United States Patent Application Publication US 2014/0004565 A1 - sequence listing, part 90

SEQ ID NO: 2224339 - RNA, 19 nt, Artificial Sequence
  Description of Artificial Sequence: Synthetic oligonucleotide
gucuguuauuccuacagug

SEQ ID NO: 2224340 - RNA, 19 nt, Artificial Sequence
  Description of Artificial Sequence: Synthetic oligonucleotide
ugcucucuggcucauaggu

SEQ ID NO: 2224341 - RNA, 19 nt, Artificial Sequence
  Description of Artificial Sequence: Synthetic oligonucleotide
gcugauuuccuauagaauc

SEQ ID NO: 2224342 - RNA, 19 nt, Artificial Sequence
  Description of Artificial Sequence: Synthetic oligonucleotide
uuugugaagugcccggaug

SEQ ID NO: 2224343 - RNA, 19 nt, Artificial Sequence
  Description of Artificial Sequence: Synthetic oligonucleotide
uguagugacuggcugauuu

SEQ ID NO: 2224344 - RNA, 19 nt, Artificial Sequence
  Description of Artificial Sequence: Synthetic oligonucleotide
ucaaucacagcauccgcca

SEQ ID NO: 2224345 - RNA, 19 nt, Artificial Sequence
  Description of Artificial Sequence: Synthetic oligonucleotide
agaaaauacucguuccaca

SEQ ID NO: 2224346 - RNA, 19 nt, Artificial Sequence
  Description of Artificial Sequence: Synthetic oligonucleotide
uuaaaugguccuuauccau

SEQ ID NO: 2224347 - RNA, 19 nt, Artificial Sequence
  Description of Artificial Sequence: Synthetic oligonucleotide
uucuguacgaucuccucug

SEQ ID NO: 2224348 - RNA, 19 nt, Artificial Sequence
  Description of Artificial Sequence: Synthetic oligonucleotide
uuucaaucacagcauccgc

SEQ ID NO: 2224349 - RNA, 19 nt, Artificial Sequence
  Description of Artificial Sequence: Synthetic oligonucleotide
agucgaggcagucugacca

SEQ ID NO: 2224350 - RNA, 19 nt, Artificial Sequence
  Description of Artificial Sequence: Synthetic oligonucleotide
uugugaagugcccggauga

SEQ ID NO: 2224351 - RNA, 19 nt, Artificial Sequence
  Description of Artificial Sequence: Synthetic oligonucleotide
guaaaugcugcagucgagg

SEQ ID NO: 2224352 - RNA, 19 nt, Artificial Sequence
  Description of Artificial Sequence: Synthetic oligonucleotide
uguaaaugcugcagucgag

SEQ ID NO: 2224353 - RNA, 19 nt, Artificial Sequence
  Description of Artificial Sequence: Synthetic oligonucleotide
ucgaacacaggauaggcua

SEQ ID NO: 2224354 - RNA, 19 nt, Artificial Sequence
  Description of Artificial Sequence: Synthetic oligonucleotide
gauuccuguaggcuggaug

SEQ ID NO: 2224355 - RNA, 19 nt, Artificial Sequence
  Description of Artificial Sequence: Synthetic oligonucleotide
uuccuauagaaucccuacc

SEQ ID NO: 2224356 - RNA, 19 nt, Artificial Sequence
  Description of Artificial Sequence: Synthetic oligonucleotide
acucguuccacacuguccu

SEQ ID NO: 2224357 - RNA, 19 nt, Artificial Sequence
  Description of Artificial Sequence: Synthetic oligonucleotide
aauuucacuccugauugga

SEQ ID NO: 2224358 - RNA, 19 nt, Artificial Sequence
  Description of Artificial Sequence: Synthetic oligonucleotide
cuuuucggaauuucuguac

SEQ ID NO: 2224359 - RNA, 19 nt, Artificial Sequence
  Description of Artificial Sequence: Synthetic oligonucleotide
ugccagaaaauacucguuc

SEQ ID NO: 2224360 - RNA, 19 nt, Artificial Sequence
  Description of Artificial Sequence: Synthetic oligonucleotide
auggauugccaccauguug

SEQ ID NO: 2224361 - RNA, 19 nt, Artificial Sequence
  Description of Artificial Sequence: Synthetic oligonucleotide
uaggcuggaugccagaaaa

SEQ ID NO: 2224362 - RNA, 19 nt, Artificial Sequence
  Description of Artificial Sequence: Synthetic oligonucleotide
uccugauuggagcaaauuu

SEQ ID NO: 2224363 - RNA, 19 nt, Artificial Sequence
  Description of Artificial Sequence: Synthetic oligonucleotide
ugaauauguacagacuaaa

SEQ ID NO: 2224364 - RNA, 19 nt, Artificial Sequence
  Description of Artificial Sequence: Synthetic oligonucleotide
ugcagacccaacaaguaaa

SEQ ID NO: 2224365 - RNA, 19 nt, Artificial Sequence
  Description of Artificial Sequence: Synthetic oligonucleotide
uauaacacugugucauacu

SEQ ID NO: 2224366 - RNA, 19 nt, Artificial Sequence
  Description of Artificial Sequence: Synthetic oligonucleotide
uaaaaucugccagagggaa

SEQ ID NO: 2224367 - RNA, 19 nt, Artificial Sequence
  Description of Artificial Sequence: Synthetic oligonucleotide
uccuuugugaagugcccgg

SEQ ID NO: 2224368 - RNA, 19 nt, Artificial Sequence
  Description of Artificial Sequence: Synthetic oligonucleotide
uaacugaguguguucagac

SEQ ID NO: 2224369 - RNA, 19 nt, Artificial Sequence
  Description of Artificial Sequence: Synthetic oligonucleotide
auaggcuaauucuuuggcu

SEQ ID NO: 2224370 - RNA, 19 nt, Artificial Sequence
  Description of Artificial Sequence: Synthetic oligonucleotide
agcuuuucggaauuucugu

SEQ ID NO: 2224371 - RNA, 19 nt, Artificial Sequence
  Description of Artificial Sequence: Synthetic oligonucleotide
agaucaacgaugcuguaua

SEQ ID NO: 2224372 - RNA, 19 nt, Artificial Sequence
  Description of Artificial Sequence: Synthetic oligonucleotide
uggcugauuuccuauagaa

SEQ ID NO: 2224373 - RNA, 19 nt, Artificial Sequence
  Description of Artificial Sequence: Synthetic oligonucleotide
ugacgcuucugccucgcgg

SEQ ID NO: 2224374 - RNA, 19 nt, Artificial Sequence
  Description of Artificial Sequence: Synthetic oligonucleotide
cuugacggaguguagugac

SEQ ID NO: 2224375 - RNA, 19 nt, Artificial Sequence
  Description of Artificial Sequence: Synthetic oligonucleotide
gaugccagaaaauacucgu

SEQ ID NO: 2224376 - RNA, 19 nt, Artificial Sequence
  Description of Artificial Sequence: Synthetic oligonucleotide
ugcgcuacugcgcaccacc

SEQ ID NO: 2224377 - RNA, 19 nt, Artificial Sequence
  Description of Artificial Sequence: Synthetic oligonucleotide
gagggaaguugccuugacg

SEQ ID NO: 2224378 - RNA, 19 nt, Artificial Sequence
  Description of Artificial Sequence: Synthetic oligonucleotide
uaggcuaauucuuuggcuu

SEQ ID NO: 2224379 - RNA, 19 nt, Artificial Sequence
  Description of Artificial Sequence: Synthetic oligonucleotide
uacucguuccacacugucc

SEQ ID NO: 2224380 - RNA, 19 nt, Artificial Sequence
  Description of Artificial Sequence: Synthetic oligonucleotide
gacuaaaaucugccagagg

SEQ ID NO: 2224381 - RNA, 19 nt, Artificial Sequence
  Description of Artificial Sequence: Synthetic oligonucleotide
uaaaugguccuuauccauu

SEQ ID NO: 2224382 - RNA, 19 nt, Artificial Sequence
  Description of Artificial Sequence: Synthetic oligonucleotide
uuuugugugugcugagcca

SEQ ID NO: 2224383 - RNA, 19 nt, Artificial Sequence
  Description of Artificial Sequence: Synthetic oligonucleotide
uucucuggguuuaugccac

SEQ ID NO: 2224384 - RNA, 19 nt, Artificial Sequence
  Description of Artificial Sequence: Synthetic oligonucleotide
auacucguuccacacuguc

SEQ ID NO: 2224385 - RNA, 19 nt, Artificial Sequence
  Description of Artificial Sequence: Synthetic oligonucleotide
uuugcagacccaacaagua

SEQ ID NO: 2224386 - RNA, 19 nt, Artificial Sequence
  Description of Artificial Sequence: Synthetic oligonucleotide
ugugcucugcuggaggacg

SEQ ID NO: 2224387 - RNA, 19 nt, Artificial Sequence
  Description of Artificial Sequence: Synthetic oligonucleotide
cuuuggcuuuugcagaccc

SEQ ID NO: 2224388 - RNA, 19 nt, Artificial Sequence
  Description of Artificial Sequence: Synthetic oligonucleotide
uuaacugaguguguucaga

SEQ ID NO: 2224389 - RNA, 19 nt, Artificial Sequence
  Description of Artificial Sequence: Synthetic oligonucleotide
uagaaucccuaccaauuuc

SEQ ID NO: 2224390 - RNA, 19 nt, Artificial Sequence
  Description of Artificial Sequence: Synthetic oligonucleotide
uggaugccagaaaauacuc

SEQ ID NO: 2224391 - RNA, 19 nt, Artificial Sequence
  Description of Artificial Sequence: Synthetic oligonucleotide
aucaacgaugcuguauaac

SEQ ID NO: 2224392 - RNA, 19 nt, Artificial Sequence
  Description of Artificial Sequence: Synthetic oligonucleotide
ggauaggcuaauucuuugg

SEQ ID NO: 2224393 - RNA, 19 nt, Artificial Sequence
  Description of Artificial Sequence: Synthetic oligonucleotide
agucugucacagcuuuucg

SEQ ID NO: 2224394 - RNA, 19 nt, Artificial Sequence
  Description of Artificial Sequence: Synthetic oligonucleotide
agacuaaaaucugccagag

SEQ ID NO: 2224395 - RNA, 19 nt, Artificial Sequence
  Description of Artificial Sequence: Synthetic oligonucleotide
aggauaggcuaauucuuug

SEQ ID NO: 2224396 - RNA, 19 nt, Artificial Sequence
  Description of Artificial Sequence: Synthetic oligonucleotide
caacgaugcuguauaacac

SEQ ID NO: 2224397 - RNA, 19 nt, Artificial Sequence
  Description of Artificial Sequence: Synthetic oligonucleotide
ugaccucggauguaaaguc

SEQ ID NO: 2224398 - RNA, 19 nt, Artificial Sequence
  Description of Artificial Sequence: Synthetic oligonucleotide
ucuguacgaucuccucugg

SEQ ID NO: 2224399 - RNA, 19 nt, Artificial Sequence
  Description of Artificial Sequence: Synthetic oligonucleotide
auagaaucccuaccaauuu

SEQ ID NO: 2224400 - RNA, 19 nt, Artificial Sequence
  Description of Artificial Sequence: Synthetic oligonucleotide
uugcagacccaacaaguaa

SEQ ID NO: 2224401 - RNA, 19 nt, Artificial Sequence
  Description of Artificial Sequence: Synthetic oligonucleotide
agcauccgccaccagcagc

SEQ ID NO: 2224402 - RNA, 19 nt, Artificial Sequence
  Description of Artificial Sequence: Synthetic oligonucleotide
ucugauuuugacgcuucug

SEQ ID NO: 2224403 - RNA, 19 nt, Artificial Sequence
  Description of Artificial Sequence: Synthetic oligonucleotide
cuuauccauuuucaguuuc

SEQ ID NO: 2224404 - RNA, 19 nt, Artificial Sequence
  Description of Artificial Sequence: Synthetic oligonucleotide
gacgcuucugccucgcggc

SEQ ID NO: 2224405 - RNA, 19 nt, Artificial Sequence
  Description of Artificial Sequence: Synthetic oligonucleotide
cucaauggcuccaagguaa

SEQ ID NO: 2224406 - RNA, 19 nt, Artificial Sequence
  Description of Artificial Sequence: Synthetic oligonucleotide
aaaaucugccagagggaag

SEQ ID NO: 2224407 - RNA, 19 nt, Artificial Sequence
  Description of Artificial Sequence: Synthetic oligonucleotide
gacccaacaaguaaaaccu

SEQ ID NO: 2224408 - RNA, 19 nt, Artificial Sequence
  Description of Artificial Sequence: Synthetic oligonucleotide
caauuucacuccugauugg

SEQ ID NO: 2224409 - RNA, 19 nt, Artificial Sequence
  Description of Artificial Sequence: Synthetic oligonucleotide
acggaguguagugacuggc

SEQ ID NO: 2224410 - RNA, 19 nt, Artificial Sequence
  Description of Artificial Sequence: Synthetic oligonucleotide
uggcccugaauauguacag

SEQ ID NO: 2224411 - RNA, 19 nt, Artificial Sequence
  Description of Artificial Sequence: Synthetic oligonucleotide
uggaguggagaucaacgau

SEQ ID NO: 2224412 - RNA, 19 nt, Artificial Sequence
  Description of Artificial Sequence: Synthetic oligonucleotide
guguaaaugcugcagucga

SEQ ID NO: 2224413 - RNA, 19 nt, Artificial Sequence
  Description of Artificial Sequence: Synthetic oligonucleotide
accgagaggccugacacgg

SEQ ID NO: 2224414 - RNA, 19 nt, Artificial Sequence
  Description of Artificial Sequence: Synthetic oligonucleotide
uuuugacgcuucugccucg

SEQ ID NO: 2224415 - RNA, 19 nt, Artificial Sequence
  Description of Artificial Sequence: Synthetic oligonucleotide
ugacggaguguagugacug

SEQ ID NO: 2224416 - RNA, 19 nt, Artificial Sequence
  Description of Artificial Sequence: Synthetic oligonucleotide
gauuuugacgcuucugccu

SEQ ID NO: 2224417 - RNA, 19 nt, Artificial Sequence
  Description of Artificial Sequence: Synthetic oligonucleotide
uccucgaacacaggauagg

SEQ ID NO: 2224418 - RNA, 19 nt, Artificial Sequence
  Description of Artificial Sequence: Synthetic oligonucleotide
cagaaaauacucguuccac

SEQ ID NO: 2224419 - RNA, 19 nt, Artificial Sequence
  Description of Artificial Sequence: Synthetic oligonucleotide
ucggaauuucuguacgauc

SEQ ID NO: 2224420 - RNA, 19 nt, Artificial Sequence
  Description of Artificial Sequence: Synthetic oligonucleotide
ugguguaaaugcugcaguc

SEQ ID NO: 2224421 - RNA, 19 nt, Artificial Sequence
  Description of Artificial Sequence: Synthetic oligonucleotide
cagacuaaaaucugccaga

SEQ ID NO: 2224422 - RNA, 19 nt, Artificial Sequence
  Description of Artificial Sequence: Synthetic oligonucleotide
ucucaauggcuccaaggua

SEQ ID NO: 2224423 - RNA, 19 nt, Artificial Sequence
  Description of Artificial Sequence: Synthetic oligonucleotide
guuauuccuacaguggcca

SEQ ID NO: 2224424 - RNA, 19 nt, Artificial Sequence
  Description of Artificial Sequence: Synthetic oligonucleotide
uugcuggcccugaauaugu

SEQ ID NO: 2224425 - RNA, 19 nt, Artificial Sequence
  Description of Artificial Sequence: Synthetic oligonucleotide
aagugcccggaugaggcuc

SEQ ID NO: 2224426 - RNA, 19 nt, Artificial Sequence
  Description of Artificial Sequence: Synthetic oligonucleotide
guuuaugccacaggcaaga

SEQ ID NO: 2224427 - RNA, 19 nt, Artificial Sequence
  Description of Artificial Sequence: Synthetic oligonucleotide
ugugcugagccaucuugcu

SEQ ID NO: 2224428 - RNA, 19 nt, Artificial Sequence
  Description of Artificial Sequence: Synthetic oligonucleotide
caugccugcgcuacugcgc

SEQ ID NO: 2224429 - RNA, 19 nt, Artificial Sequence
  Description of Artificial Sequence: Synthetic oligonucleotide
agagggaaguugccuugac

SEQ ID NO: 2224430 - RNA, 19 nt, Artificial Sequence
  Description of Artificial Sequence: Synthetic oligonucleotide
ugcuggaaaaggauacuuu

SEQ ID NO: 2224431 - RNA, 19 nt, Artificial Sequence
  Description of Artificial Sequence: Synthetic oligonucleotide
agaaucccuaccaauuucu

SEQ ID NO: 2224432 - RNA, 19 nt, Artificial Sequence
  Description of Artificial Sequence: Synthetic oligonucleotide
gacggaguguagugacugg

SEQ ID NO: 2224433 - RNA, 19 nt, Artificial Sequence
  Description of Artificial Sequence: Synthetic oligonucleotide
ggcagucugaccaugcagg

SEQ ID NO: 2224434 - RNA, 19 nt, Artificial Sequence
  Description of Artificial Sequence: Synthetic oligonucleotide
ugucacagcuuuucggaau

SEQ ID NO: 2224435 - RNA, 19 nt, Artificial Sequence
  Description of Artificial Sequence: Synthetic oligonucleotide
aggcagucugaccaugcag

SEQ ID NO: 2224436 - RNA, 19 nt, Artificial Sequence
  Description of Artificial Sequence: Synthetic oligonucleotide
guauaacacugugucauac

SEQ ID NO: 2224437 - RNA, 19 nt, Artificial Sequence
  Description of Artificial Sequence: Synthetic oligonucleotide
aacuucacccagcucucaa

SEQ ID NO: 2224438 - RNA, 19 nt, Artificial Sequence
  Description of Artificial Sequence: Synthetic oligonucleotide
auacuccuccugcaacuuc

SEQ ID NO: 2224439 - RNA, 19 nt, Artificial Sequence
  Description of Artificial Sequence: Synthetic oligonucleotide
caagguaauuucccaggug

SEQ ID NO: 2224440 - RNA, 19 nt, Artificial Sequence
  Description of Artificial Sequence: Synthetic oligonucleotide
uguauaacacugugucaua

SEQ ID NO: 2224441 - RNA, 19 nt, Artificial Sequence
  Description of Artificial Sequence: Synthetic oligonucleotide
gauacuuuucucuggguuu

SEQ ID NO: 2224442 - RNA, 19 nt, Artificial Sequence
  Description of Artificial Sequence: Synthetic oligonucleotide
uuauuccuacaguggccag

SEQ ID NO: 2224443 - RNA, 19 nt, Artificial Sequence
  Description of Artificial Sequence: Synthetic oligonucleotide
uuagccuuccacuggugua

SEQ ID NO: 2224444 - RNA, 19 nt, Artificial Sequence
  Description of Artificial Sequence: Synthetic oligonucleotide
uggccaguuugucaggguc

SEQ ID NO: 2224445 - RNA, 19 nt, Artificial Sequence
  Description of Artificial Sequence: Synthetic oligonucleotide
gaguguagugacuggcuga

SEQ ID NO: 2224446 - RNA, 19 nt, Artificial Sequence
  Description of Artificial Sequence: Synthetic oligonucleotide
cuccucgaacacaggauag

SEQ ID NO: 2224447 - RNA, 19 nt, Artificial Sequence
  Description of Artificial Sequence: Synthetic oligonucleotide
uuggcuuuugcagacccaa

SEQ ID NO: 2224448 - RNA, 19 nt, Artificial Sequence
  Description of Artificial Sequence: Synthetic oligonucleotide
gccagaaaauacucguucc

SEQ ID NO: 2224449 - RNA, 19 nt, Artificial Sequence
  Description of Artificial Sequence: Synthetic oligonucleotide
caaguaaaaccuucuuuaa

SEQ ID NO: 2224450 - RNA, 19 nt, Artificial Sequence
  Description of Artificial Sequence: Synthetic oligonucleotide
cugaauauguacagacuaa

SEQ ID NO: 2224451 - RNA, 19 nt, Artificial Sequence
  Description of Artificial Sequence: Synthetic oligonucleotide
acucacgcgccuuccgcac

SEQ ID NO: 2224452 - RNA, 19 nt, Artificial Sequence
  Description of Artificial Sequence: Synthetic oligonucleotide
uccgccaccagcagcuugu

SEQ ID NO: 2224453 - RNA, 19 nt, Artificial Sequence
  Description of Artificial Sequence: Synthetic oligonucleotide
accaugcaggugaggaucc

SEQ ID NO: 2224454 - RNA, 19 nt, Artificial Sequence
  Description of Artificial Sequence: Synthetic oligonucleotide
ucacgcgccuuccgcacgg

SEQ ID NO: 2224455 - RNA, 19 nt, Artificial Sequence
  Description of Artificial Sequence: Synthetic oligonucleotide
ugugaagugcccggaugag

SEQ ID NO: 2224456 - RNA, 19 nt, Artificial Sequence
  Description of Artificial Sequence: Synthetic oligonucleotide
agguaauuucccagguggg

SEQ ID NO: 2224457 - RNA, 19 nt, Artificial Sequence
  Description of Artificial Sequence: Synthetic oligonucleotide
gcuacugcgcaccaccucc

SEQ ID NO: 2224458 - RNA, 19 nt, Artificial Sequence
  Description of Artificial Sequence: Synthetic oligonucleotide
cacaggauaggcuaauucu

SEQ ID NO: 2224459 - RNA, 19 nt, Artificial Sequence
  Description of Artificial Sequence: Synthetic oligonucleotide
aaguugccuugacggagug

SEQ ID NO: 2224460 - RNA, 19 nt, Artificial Sequence
  Description of Artificial Sequence: Synthetic oligonucleotide
ggugauggaguggagauca

SEQ ID NO: 2224461 - RNA, 19 nt, Artificial Sequence
  Description of Artificial Sequence: Synthetic oligonucleotide
ugcggguccuuugugaagu

SEQ ID NO: 2224462 - RNA, 19 nt, Artificial Sequence
  Description of Artificial Sequence: Synthetic oligonucleotide
gguccuuauccauuuucag

SEQ ID NO: 2224463 - RNA, 19 nt, Artificial Sequence
  Description of Artificial Sequence: Synthetic oligonucleotide
ucuugcuggcccugaauau

SEQ ID NO: 2224464 - RNA, 19 nt, Artificial Sequence
  Description of Artificial Sequence: Synthetic oligonucleotide
ggaguggagaucaacgaug

SEQ ID NO: 2224465 - RNA, 19 nt, Artificial Sequence
  Description of Artificial Sequence: Synthetic oligonucleotide
gaccaugcaggugaggauc

SEQ ID NO: 2224466 - RNA, 19 nt, Artificial Sequence
  Description of Artificial Sequence: Synthetic oligonucleotide
uccaccgagaggccugaca

SEQ ID NO: 2224467 - RNA, 19 nt, Artificial Sequence
  Description of Artificial Sequence: Synthetic oligonucleotide
acgaugcuguauaacacug

SEQ ID NO: 2224468 - RNA, 19 nt, Artificial Sequence
  Description of Artificial Sequence: Synthetic oligonucleotide
acagcuuuucggaauuucu

SEQ ID NO: 2224469 - RNA, 19 nt, Artificial Sequence
  Description of Artificial Sequence: Synthetic oligonucleotide
cuguacgaucuccucuggg

SEQ ID NO: 2224470 - RNA, 19 nt, Artificial Sequence
  Description of Artificial Sequence: Synthetic oligonucleotide
uucggaauuucuguacgau

SEQ ID NO: 2224471 - RNA, 19 nt, Artificial Sequence
  Description of Artificial Sequence: Synthetic oligonucleotide
ggaaaaggauacuuuucuc

SEQ ID NO: 2224472 - RNA, 19 nt, Artificial Sequence
  Description of Artificial Sequence: Synthetic oligonucleotide
uugacggaguguagugacu

SEQ ID NO: 2224473 - RNA, 19 nt, Artificial Sequence
  Description of Artificial Sequence: Synthetic oligonucleotide
cuugcuggcccugaauaug

SEQ ID NO: 2224474 - RNA, 19 nt, Artificial Sequence
  Description of Artificial Sequence: Synthetic oligonucleotide
guccuuugugaagugcccg

SEQ ID NO: 2224475 - RNA, 19 nt, Artificial Sequence
  Description of Artificial Sequence: Synthetic oligonucleotide
ggaaguugccuugacggag

SEQ ID NO: 2224476 - RNA, 19 nt, Artificial Sequence
  Description of Artificial Sequence: Synthetic oligonucleotide
cugcagucgaggcagucug

SEQ ID NO: 2224477 - RNA, 19 nt, Artificial Sequence
  Description of Artificial Sequence: Synthetic oligonucleotide
aacagcagucauguccagu

SEQ ID NO: 2224478 - RNA, 19 nt, Artificial Sequence
  Description of Artificial Sequence: Synthetic oligonucleotide
ggguuuaugccacaggcaa

SEQ ID NO: 2224479 - RNA, 19 nt, Artificial Sequence
  Description of Artificial Sequence: Synthetic oligonucleotide
gaggacgcuaggguccugg

SEQ ID NO: 2224480 - RNA, 19 nt, Artificial Sequence
  Description of Artificial Sequence: Synthetic oligonucleotide
uccuccaccgagaggccug

SEQ ID NO: 2224481 - RNA, 19 nt, Artificial Sequence
  Description of Artificial Sequence: Synthetic oligonucleotide
cucugcuggaggacgcuag

SEQ ID NO: 2224482 - RNA, 19 nt, Artificial Sequence
  Description of Artificial Sequence: Synthetic oligonucleotide
aauacucguuccacacugu

SEQ ID NO: 2224483 - RNA, 19 nt, Artificial Sequence
  Description of Artificial Sequence: Synthetic oligonucleotide
ggugaccucggauguaaag

SEQ ID NO: 2224484 - RNA, 19 nt, Artificial Sequence
  Description of Artificial Sequence: Synthetic oligonucleotide
ggaguguagugacuggcug

SEQ ID NO: 2224485 - RNA, 19 nt, Artificial Sequence
  Description of Artificial Sequence: Synthetic oligonucleotide
ugucagggucugauuuuga

SEQ ID NO: 2224486 - RNA, 19 nt, Artificial Sequence
  Description of Artificial Sequence: Synthetic oligonucleotide
acggaguacagcgccaucu

SEQ ID NO: 2224487 - RNA, 19 nt, Artificial Sequence
  Description of Artificial Sequence: Synthetic oligonucleotide
guugccuugacggagugua

SEQ ID NO: 2224488 - RNA, 19 nt, Artificial Sequence
  Description of Artificial Sequence: Synthetic oligonucleotide
uccgcacggaguacagcgc

SEQ ID NO: 2224489 - RNA, 19 nt, Artificial Sequence
  Description of Artificial Sequence: Synthetic oligonucleotide
uagcgcgcaguguccaugc

SEQ ID NO: 2224490 - RNA, 19 nt, Artificial Sequence
  Description of Artificial Sequence: Synthetic oligonucleotide
uugccuugacggaguguag

SEQ ID NO: 2224491 - RNA, 19 nt, Artificial Sequence
  Description of Artificial Sequence: Synthetic oligonucleotide
ggauguaaagucugucaca

SEQ ID NO: 2224492 - RNA, 19 nt, Artificial Sequence
  Description of Artificial Sequence: Synthetic oligonucleotide
cucucaauggcuccaaggu

SEQ ID NO: 2224493 - RNA, 19 nt, Artificial Sequence
  Description of Artificial Sequence: Synthetic oligonucleotide
accugagacugcuggaaaa

SEQ ID NO: 2224494 - RNA, 19 nt, Artificial Sequence
  Description of Artificial Sequence: Synthetic oligonucleotide
ugacacggcugcauggauu

SEQ ID NO: 2224495 - RNA, 19 nt, Artificial Sequence
  Description of Artificial Sequence: Synthetic oligonucleotide
acaggauaggcuaauucuu

SEQ ID NO: 2224496 - RNA, 19 nt, Artificial Sequence
  Description of Artificial Sequence: Synthetic oligonucleotide
aguguagugacuggcugau

SEQ ID NO: 2224497 - RNA, 19 nt, Artificial Sequence
  Description of Artificial Sequence: Synthetic oligonucleotide
caggugaggauccagcuua

SEQ ID NO: 2224498 - RNA, 19 nt, Artificial Sequence
  Description of Artificial Sequence: Synthetic oligonucleotide
gcuuguagcgcgcaguguc

SEQ ID NO: 2224499 - RNA, 19 nt, Artificial Sequence
  Description of Artificial Sequence: Synthetic oligonucleotide
auuuccuauagaaucccua

SEQ ID NO: 2224500 - RNA, 19 nt, Artificial Sequence
  Description of Artificial Sequence: Synthetic oligonucleotide
ugccucgcggccuuagccu

SEQ ID NO: 2224501 - RNA, 19 nt, Artificial Sequence
  Description of Artificial Sequence: Synthetic oligonucleotide
aggauacuuuucucugggu

SEQ ID NO: 2224502 - RNA, 19 nt, Artificial Sequence
  Description of Artificial Sequence: Synthetic oligonucleotide
ucuuuggcuuuugcagacc

SEQ ID NO: 2224503 - RNA, 19 nt, Artificial Sequence
  Description of Artificial Sequence: Synthetic oligonucleotide
gugaggauccagcuuaacu

SEQ ID NO: 2224504 - RNA, 19 nt, Artificial Sequence
  Description of Artificial Sequence: Synthetic oligonucleotide
augccugcgcuacugcgca

SEQ ID NO: 2224505 - RNA, 19 nt, Artificial Sequence
  Description of Artificial Sequence: Synthetic oligonucleotide
uugacgcuucugccucgcg

SEQ ID NO: 2224506 - RNA, 19 nt, Artificial Sequence
  Description of Artificial Sequence: Synthetic oligonucleotide
cuguauaacacugugucau

SEQ ID NO: 2224507 - RNA, 19 nt, Artificial Sequence
  Description of Artificial Sequence: Synthetic oligonucleotide
uccuguaggcuggaugcca

SEQ ID NO: 2224508 - RNA, 19 nt, Artificial Sequence
  Description of Artificial Sequence: Synthetic oligonucleotide
uagccuuccacugguguaa

SEQ ID NO: 2224509 - RNA, 19 nt, Artificial Sequence
  Description of Artificial Sequence: Synthetic oligonucleotide
agugcccggaugaggcucc

SEQ ID NO: 2224510 - RNA, 19 nt, Artificial Sequence
  Description of Artificial Sequence: Synthetic oligonucleotide
agcugcggguccuuuguga

SEQ ID NO: 2224511 - RNA, 19 nt, Artificial Sequence
  Description of Artificial Sequence: Synthetic oligonucleotide
cucaauuucacuccugauu

SEQ ID NO: 2224512 - RNA, 19 nt, Artificial Sequence
  Description of Artificial Sequence: Synthetic oligonucleotide
cugccucgcggccuuagcc

SEQ ID NO: 2224513 - RNA, 19 nt, Artificial Sequence
  Description of Artificial Sequence: Synthetic oligonucleotide
ggcuuuugcagacccaaca

SEQ ID NO: 2224514 - RNA, 19 nt, Artificial Sequence
  Description of Artificial Sequence: Synthetic oligonucleotide
uuugacgcuucugccucgc

SEQ ID NO: 2224515 - RNA, 19 nt, Artificial Sequence
  Description of Artificial Sequence: Synthetic oligonucleotide
ugccuugacggaguguagu

SEQ ID NO: 2224516 - RNA, 19 nt, Artificial Sequence
  Description of Artificial Sequence: Synthetic oligonucleotide
ugaccaugcaggugaggau

SEQ ID NO: 2224517 - RNA, 19 nt, Artificial Sequence
  Description of Artificial Sequence: Synthetic oligonucleotide
gugugcugagccaucuugc

SEQ ID NO: 2224518 - RNA, 19 nt, Artificial Sequence
  Description of Artificial Sequence: Synthetic oligonucleotide
gaucaacgaugcuguauaa

SEQ ID NO: 2224519 - RNA, 19 nt, Artificial Sequence
  Description of Artificial Sequence: Synthetic oligonucleotide
uuggagacgccagcucugc

SEQ ID NO: 2224520 - RNA, 19 nt, Artificial Sequence
  Description of Artificial Sequence: Synthetic oligonucleotide
accucggauguaaagucug

SEQ ID NO: 2224521 - RNA, 19 nt, Artificial Sequence
  Description of Artificial Sequence: Synthetic oligonucleotide
gcuuaacugaguguguuca

SEQ ID NO: 2224522 - RNA, 19 nt, Artificial Sequence
  Description of Artificial Sequence: Synthetic oligonucleotide
aggacgcuaggguccuggg

SEQ ID NO: 2224523 - RNA, 19 nt, Artificial Sequence
  Description of Artificial Sequence: Synthetic oligonucleotide
caccgagaggccugacacg

SEQ ID NO: 2224524 - RNA, 19 nt, Artificial Sequence
  Description of Artificial Sequence: Synthetic oligonucleotide
ucugccucgcggccuuagc

SEQ ID NO: 2224525 - RNA, 19 nt, Artificial Sequence
  Description of Artificial Sequence: Synthetic oligonucleotide
cagcuuguagcgcgcagug

SEQ ID NO: 2224526 - RNA, 19 nt, Artificial Sequence
  Description of Artificial Sequence: Synthetic oligonucleotide
cacggcugcauggauugcc

SEQ ID NO: 2224527 - RNA, 19 nt, Artificial Sequence
  Description of Artificial Sequence: Synthetic oligonucleotide
uggcuuuugcagacccaac

SEQ ID NO: 2224528 - RNA, 19 nt, Artificial Sequence
  Description of Artificial Sequence: Synthetic oligonucleotide
ugcagucgaggcagucuga

SEQ ID NO: 2224529 - RNA, 19 nt, Artificial Sequence
  Description of Artificial Sequence: Synthetic oligonucleotide
auuccuacaguggccaguu

SEQ ID NO: 2224530 - RNA, 19 nt, Artificial Sequence
  Description of Artificial Sequence: Synthetic oligonucleotide
gaagaacagcagucauguc

SEQ ID NO: 2224531 - RNA, 19 nt, Artificial Sequence
  Description of Artificial Sequence: Synthetic oligonucleotide
agcgcgcaguguccaugcc

SEQ ID NO: 2224532 - RNA, 19 nt, Artificial Sequence
  Description of Artificial Sequence: Synthetic oligonucleotide
gcuggaugccagaaaauac

SEQ ID NO: 2224533 - RNA, 19 nt, Artificial Sequence
  Description of Artificial Sequence: Synthetic oligonucleotide
aggauccagcuuaacugag

SEQ ID NO: 2224534 - RNA, 19 nt, Artificial Sequence
  Description of Artificial Sequence: Synthetic oligonucleotide
ggguccuuugugaagugcc

SEQ ID NO: 2224535 - RNA, 19 nt, Artificial Sequence
  Description of Artificial Sequence: Synthetic oligonucleotide
guuggagacgccagcucug

SEQ ID NO: 2224536 - RNA, 19 nt, Artificial Sequence
  Description of Artificial Sequence: Synthetic oligonucleotide
gagacgccagcucugcucu

SEQ ID NO: 2224537 - RNA, 19 nt, Artificial Sequence
  Description of Artificial Sequence: Synthetic oligonucleotide
ucguuccacacuguccuuc

SEQ ID NO: 2224538 - RNA, 19 nt, Artificial Sequence
  Description of Artificial Sequence: Synthetic oligonucleotide
augcuguauaacacugugu

SEQ ID NO: 2224539 - RNA, 19 nt, Artificial Sequence
  Description of Artificial Sequence: Synthetic oligonucleotide
uuuaugccacaggcaagaa

SEQ ID NO: 2224540 - RNA, 19 nt, Artificial Sequence
  Description of Artificial Sequence: Synthetic oligonucleotide
ggaguacagcgccaucuug

SEQ ID NO: 2224541 - RNA, 19 nt, Artificial Sequence
  Description of Artificial Sequence: Synthetic oligonucleotide
ggccuuagccuuccacugg

SEQ ID NO: 2224542 - RNA, 19 nt, Artificial Sequence
  Description of Artificial Sequence: Synthetic oligonucleotide
cauaggugaccucggaugu

SEQ ID NO: 2224543 - RNA, 19 nt, Artificial Sequence
  Description of Artificial Sequence: Synthetic oligonucleotide
gguuuaugccacaggcaag

SEQ ID NO: 2224544 - RNA, 19 nt, Artificial Sequence
  Description of Artificial Sequence: Synthetic oligonucleotide
cacagcuuuucggaauuuc

SEQ ID NO: 2224545 - RNA, 19 nt, Artificial Sequence
  Description of Artificial Sequence: Synthetic oligonucleotide
aucugccagagggaaguug

SEQ ID NO: 2224546 - RNA, 19 nt, Artificial Sequence
  Description of Artificial Sequence: Synthetic oligonucleotide
cagacccaacaaguaaaac

SEQ ID NO: 2224547 - RNA, 19 nt, Artificial Sequence
  Description of Artificial Sequence: Synthetic oligonucleotide
acaccugagacugcuggaa

SEQ ID NO: 2224548 - RNA, 19 nt, Artificial Sequence
  Description of Artificial Sequence: Synthetic oligonucleotide
guacgaucuccucugggcu

SEQ ID NO: 2224549 - RNA, 19 nt, Artificial Sequence
  Description of Artificial Sequence: Synthetic oligonucleotide
cggauguaaagucugucac

SEQ ID NO: 2224550 - RNA, 19 nt, Artificial Sequence
  Description of Artificial Sequence: Synthetic oligonucleotide
gcuuuugcagacccaacaa

SEQ ID NO: 2224551 - RNA, 19 nt, Artificial Sequence
  Description of Artificial Sequence: Synthetic oligonucleotide
agggucugauuuugacgcu

SEQ ID NO: 2224552 - RNA, 19 nt, Artificial Sequence
  Description of Artificial Sequence: Synthetic oligonucleotide
ggacgcuaggguccugggg

SEQ ID NO: 2224553 - RNA, 19 nt, Artificial Sequence
  Description of Artificial Sequence: Synthetic oligonucleotide
ggagacgccagcucugcuc

SEQ ID NO: 2224554 - RNA, 19 nt, Artificial Sequence
  Description of Artificial Sequence: Synthetic oligonucleotide
gagacugcuggaaaaggau

SEQ ID NO: 2224555 - RNA, 19 nt, Artificial Sequence
  Description of Artificial Sequence: Synthetic oligonucleotide
cucacgcgccuuccgcacg

SEQ ID NO: 2224556 - RNA, 19 nt, Artificial Sequence
  Description of Artificial Sequence: Synthetic oligonucleotide
cugcggguccuuugugaag

SEQ ID NO: 2224557 - RNA, 19 nt, Artificial Sequence
  Description of Artificial Sequence: Synthetic oligonucleotide
agugacuggcugauuuccu

SEQ ID NO: 2224558 - RNA, 19 nt, Artificial Sequence
  Description of Artificial Sequence: Synthetic oligonucleotide
uguccaugccugcgcuacu

SEQ ID NO: 2224559 - RNA, 19 nt, Artificial Sequence
  Description of Artificial Sequence: Synthetic oligonucleotide
ccucgaacacaggauaggc

SEQ ID NO: 2224560 - RNA, 19 nt, Artificial Sequence
  Description of Artificial Sequence: Synthetic oligonucleotide
cuggcugauuuccuauaga

SEQ ID NO: 2224561 - RNA, 19 nt, Artificial Sequence
  Description of Artificial Sequence: Synthetic oligonucleotide
caguggccaguuugucagg

SEQ ID NO: 2224562 - RNA, 19 nt, Artificial Sequence
  Description of Artificial Sequence: Synthetic oligonucleotide
ucgaggcagucugaccaug

SEQ ID NO: 2224563 - RNA, 19 nt, Artificial Sequence
  Description of Artificial Sequence: Synthetic oligonucleotide
gcaguguccaugccugcgc

SEQ ID NO: 2224564 - RNA, 19 nt, Artificial Sequence
  Description of Artificial Sequence: Synthetic oligonucleotide
gacuggcugauuuccuaua

SEQ ID NO: 2224565 - RNA, 19 nt, Artificial Sequence
  Description of Artificial Sequence: Synthetic oligonucleotide
gagaucaacgaugcuguau

SEQ ID NO: 2224566 - RNA, 19 nt, Artificial Sequence
  Description of Artificial Sequence: Synthetic oligonucleotide
cuccugcaacuucacccag

SEQ ID NO: 2224567 - RNA, 19 nt, Artificial Sequence
  Description of Artificial Sequence: Synthetic oligonucleotide
auccgccaccagcagcuug

SEQ ID NO: 2224568 - RNA, 19 nt, Artificial Sequence
  Description of Artificial Sequence: Synthetic oligonucleotide
guagcgcgcaguguccaug

SEQ ID NO: 2224569 - RNA, 19 nt, Artificial Sequence
  Description of Artificial Sequence: Synthetic oligonucleotide
gaaguugccuugacggagu

SEQ ID NO: 2224570 - RNA, 19 nt, Artificial Sequence
  Description of Artificial Sequence: Synthetic oligonucleotide
gaguguguucagacaccug

SEQ ID NO: 2224571 - RNA, 19 nt, Artificial Sequence
  Description of Artificial Sequence: Synthetic oligonucleotide
gguccuuugugaagugccc

SEQ ID NO: 2224572 - RNA, 19 nt, Artificial Sequence
  Description of Artificial Sequence: Synthetic oligonucleotide
gcuuuucggaauuucugua

SEQ ID NO: 2224573 - RNA, 19 nt, Artificial Sequence
  Description of Artificial Sequence: Synthetic oligonucleotide
uggaggacgcuaggguccu

SEQ ID NO: 2224574 - RNA, 19 nt, Artificial Sequence
  Description of Artificial Sequence: Synthetic oligonucleotide
gagaggccugacacggcug

SEQ ID NO: 2224575 - RNA, 19 nt, Artificial Sequence
  Description of Artificial Sequence: Synthetic oligonucleotide
gggacggugauggagugga

SEQ ID NO: 2224576 - RNA, 19 nt, Artificial Sequence
  Description of Artificial Sequence: Synthetic oligonucleotide
ggauacuuuucucuggguu

SEQ ID NO: 2224577 - RNA, 19 nt, Artificial Sequence
  Description of Artificial Sequence: Synthetic oligonucleotide
uguagcgcgcaguguccau

SEQ ID NO: 2224578 - RNA, 19 nt, Artificial Sequence
  Description of Artificial Sequence: Synthetic oligonucleotide
ucacuccugauuggagcaa

SEQ ID NO: 2224579 - RNA, 19 nt, Artificial Sequence
  Description of Artificial Sequence: Synthetic oligonucleotide
cuacaguggccaguuuguc

SEQ ID NO: 2224580 - RNA, 19 nt, Artificial Sequence
  Description of Artificial Sequence: Synthetic oligonucleotide
cacugguguaaaugcugca

SEQ ID NO: 2224581 - RNA, 19 nt, Artificial Sequence
  Description of Artificial Sequence: Synthetic oligonucleotide
cuuccgcacggaguacagc

SEQ ID NO: 2224582 - RNA, 19 nt, Artificial Sequence
  Description of Artificial Sequence: Synthetic oligonucleotide
ccagagggaaguugccuug

SEQ ID NO: 2224583 - RNA, 19 nt, Artificial Sequence
  Description of Artificial Sequence: Synthetic oligonucleotide
uucugccucgcggccuuag

SEQ ID NO: 2224584 - RNA, 19 nt, Artificial Sequence
  Description of Artificial Sequence: Synthetic oligonucleotide
accuccucgaacacaggau

SEQ ID NO: 2224585 - RNA, 19 nt, Artificial Sequence
  Description of Artificial Sequence: Synthetic oligonucleotide
gggaaguugccuugacgga

SEQ ID NO: 2224586 - RNA, 19 nt, Artificial Sequence
  Description of Artificial Sequence: Synthetic oligonucleotide
cacucacgcgccuuccgca

SEQ ID NO: 2224587 - RNA, 19 nt, Artificial Sequence
  Description of Artificial Sequence: Synthetic oligonucleotide
agacgccagcucugcucuc

SEQ ID NO: 2224588 - RNA, 19 nt, Artificial Sequence
  Description of Artificial Sequence: Synthetic oligonucleotide
augccagaaaauacucguu

SEQ ID NO: 2224589 - RNA, 19 nt, Artificial Sequence
  Description of Artificial Sequence: Synthetic oligonucleotide
cggaauuucuguacgaucu

SEQ ID NO: 2224590 - RNA, 19 nt, Artificial Sequence
  Description of Artificial Sequence: Synthetic oligonucleotide
aaucugccagagggaaguu

SEQ ID NO: 2224591 - RNA, 19 nt, Artificial Sequence
  Description of Artificial Sequence: Synthetic oligonucleotide
gucacagcuuuucggaauu

SEQ ID NO: 2224592 - RNA, 19 nt, Artificial Sequence
  Description of Artificial Sequence: Synthetic oligonucleotide
acggcugcauggauugcca

SEQ ID NO: 2224593 - RNA, 19 nt, Artificial Sequence
  Description of Artificial Sequence: Synthetic oligonucleotide
caggauaggcuaauucuuu

SEQ ID NO: 2224594 - RNA, 19 nt, Artificial Sequence
  Description of Artificial Sequence: Synthetic oligonucleotide
aguugccuugacggagugu

SEQ ID NO: 2224595 - RNA, 19 nt, Artificial Sequence
  Description of Artificial Sequence: Synthetic oligonucleotide
ccugauuggagcaaauuuu

SEQ ID NO: 2224596 - RNA, 19 nt, Artificial Sequence
  Description of Artificial Sequence: Synthetic oligonucleotide
gaccucggauguaaagucu

SEQ ID NO: 2224597 - RNA, 19 nt, Artificial Sequence
  Description of Artificial Sequence: Synthetic oligonucleotide
cuggcucauaggugaccuc

SEQ ID NO: 2224598 - RNA, 19 nt, Artificial Sequence
  Description of Artificial Sequence: Synthetic oligonucleotide
caacaaguaaaaccuucuu

SEQ ID NO: 2224599 - RNA, 19 nt, Artificial Sequence
  Description of Artificial Sequence: Synthetic oligonucleotide
ccuauagaaucccuaccaa

SEQ ID NO: 2224600 - RNA, 19 nt, Artificial Sequence
  Description of Artificial Sequence: Synthetic oligonucleotide
agcuuguagcgcgcagugu

SEQ ID NO: 2224601 - RNA, 19 nt, Artificial Sequence
  Description of Artificial Sequence: Synthetic oligonucleotide
gaagugcccggaugaggcu

SEQ ID NO: 2224602 - RNA, 19 nt, Artificial Sequence
  Description of Artificial Sequence: Synthetic oligonucleotide
cucgcggccuuagccuucc

SEQ ID NO: 2224603 - RNA, 19 nt, Artificial Sequence
  Description of Artificial Sequence: Synthetic oligonucleotide
cucauaggugaccucggau

SEQ ID NO: 2224604 - RNA, 19 nt, Artificial Sequence
  Description of Artificial Sequence: Synthetic oligonucleotide
ggccugacacggcugcaug

SEQ ID NO: 2224605 - RNA, 19 nt, Artificial Sequence
  Description of Artificial Sequence: Synthetic oligonucleotide
gccaguuugucagggucug

SEQ ID NO: 2224606 - RNA, 19 nt, Artificial Sequence
  Description of Artificial Sequence: Synthetic oligonucleotide
gugcucugcuggaggacgc

SEQ ID NO: 2224607 - RNA, 19 nt, Artificial Sequence
  Description of Artificial Sequence: Synthetic oligonucleotide
ggucugauuuugacgcuuc

SEQ ID NO: 2224608 - RNA, 19 nt, Artificial Sequence
  Description of Artificial Sequence: Synthetic oligonucleotide
ccgcacggaguacagcgcc

SEQ ID NO: 2224609 - RNA, 19 nt, Artificial Sequence
  Description of Artificial Sequence: Synthetic oligonucleotide
cgcgcaguguccaugccug

SEQ ID NO: 2224610 - RNA, 19 nt, Artificial Sequence
  Description of Artificial Sequence: Synthetic oligonucleotide
auaggugaccucggaugua

SEQ ID NO: 2224611 - RNA, 19 nt, Artificial Sequence
  Description of Artificial Sequence: Synthetic oligonucleotide
caccugagacugcuggaaa

SEQ ID NO: 2224612 - RNA, 19 nt, Artificial Sequence
  Description of Artificial Sequence: Synthetic oligonucleotide
gaacacaggauaggcuaau

SEQ ID NO: 2224613 - RNA, 19 nt, Artificial Sequence
  Description of Artificial Sequence: Synthetic oligonucleotide
ccuuccgcacggaguacag

SEQ ID NO: 2224614 - RNA, 19 nt, Artificial Sequence
  Description of Artificial Sequence: Synthetic oligonucleotide
gcagucgaggcagucugac

SEQ ID NO: 2224615 - RNA, 19 nt, Artificial Sequence
  Description of Artificial Sequence: Synthetic oligonucleotide
gcucauaggugaccucgga

SEQ ID NO: 2224616 - RNA, 19 nt, Artificial Sequence
  Description of Artificial Sequence: Synthetic oligonucleotide
ggaugaggcuccagcacuc

SEQ ID NO: 2224617 - RNA, 19 nt, Artificial Sequence
  Description of Artificial Sequence: Synthetic oligonucleotide
cuuugugaagugcccggau

SEQ ID NO: 2224618 - RNA, 19 nt, Artificial Sequence
  Description of Artificial Sequence: Synthetic oligonucleotide
cacccagcucucaauggcu

SEQ ID NO: 2224619 - RNA, 19 nt, Artificial Sequence
  Description of Artificial Sequence: Synthetic oligonucleotide
cagagggaaguugccuuga

SEQ ID NO: 2224620 - RNA, 19 nt, Artificial Sequence
  Description of Artificial Sequence: Synthetic oligonucleotide
cacggaguacagcgccauc

SEQ ID NO: 2224621 - RNA, 19 nt, Artificial Sequence
  Description of Artificial Sequence: Synthetic oligonucleotide
ggggacggugauggagugg

SEQ ID NO: 2224622 - RNA, 19 nt, Artificial Sequence
  Description of Artificial Sequence: Synthetic oligonucleotide
aggccugacacggcugcau

SEQ ID NO: 2224623 - RNA, 19 nt, Artificial Sequence
  Description of Artificial Sequence: Synthetic oligonucleotide
ccuacaguggccaguuugu

SEQ ID NO: 2224624 - RNA, 19 nt, Artificial Sequence
  Description of Artificial Sequence: Synthetic oligonucleotide
gcggccuuagccuuccacu

SEQ ID NO: 2224625 - RNA, 19 nt, Artificial Sequence
  Description of Artificial Sequence: Synthetic oligonucleotide
gcagacccaacaaguaaaa

SEQ ID NO: 2224626 - RNA, 19 nt, Artificial Sequence
  Description of Artificial Sequence: Synthetic oligonucleotide
caguuugucagggucugau

SEQ ID NO: 2224627 - RNA, 19 nt, Artificial Sequence
  Description of Artificial Sequence: Synthetic oligonucleotide
ccuccucgaacacaggaua

SEQ ID NO: 2224628 - RNA, 19 nt, Artificial Sequence
  Description of Artificial Sequence: Synthetic oligonucleotide
gacgccagcucugcucucu

SEQ ID NO: 2224629 - RNA, 19 nt, Artificial Sequence
  Description of Artificial Sequence: Synthetic oligonucleotide
cggccuuagccuuccacug

SEQ ID NO: 2224630 - RNA, 19 nt, Artificial Sequence
  Description of Artificial Sequence: Synthetic oligonucleotide
ugcccggaugaggcuccag

SEQ ID NO: 2224631 - RNA, 19 nt, Artificial Sequence
  Description of Artificial Sequence: Synthetic oligonucleotide
ccuuagccuuccacuggug

SEQ ID NO: 2224632 - RNA, 19 nt, Artificial Sequence
  Description of Artificial Sequence: Synthetic oligonucleotide
ugccugcgcuacugcgcac

SEQ ID NO: 2224633 - RNA, 19 nt, Artificial Sequence
  Description of Artificial Sequence: Synthetic oligonucleotide
ggugaggauccagcuuaac

SEQ ID NO: 2224634 - RNA, 19 nt, Artificial Sequence
  Description of Artificial Sequence: Synthetic oligonucleotide
gcauccgccaccagcagcu

SEQ ID NO: 2224635 - RNA, 19 nt, Artificial Sequence
  Description of Artificial Sequence: Synthetic oligonucleotide
aggugaggauccagcuuaa

SEQ ID NO: 2224636 - RNA, 19 nt, Artificial Sequence
  Description of Artificial Sequence: Synthetic oligonucleotide
caacuucacccagcucuca

SEQ ID NO: 2224637 - RNA, 19 nt, Artificial Sequence
  Description of Artificial Sequence: Synthetic oligonucleotide
ggcccugaauauguacaga

SEQ ID NO: 2224638 - RNA, 19 nt, Artificial Sequence
  Description of Artificial Sequence: Synthetic oligonucleotide
cugcuggaaaaggauacuu

SEQ ID NO: 2224639 - RNA, 19 nt, Artificial Sequence
  Description of Artificial Sequence: Synthetic oligonucleotide
gcgccuuccgcacggagua

SEQ ID NO: 2224640 - RNA, 19 nt, Artificial Sequence
  Description of Artificial Sequence: Synthetic oligonucleotide
gccuuagccuuccacuggu

SEQ ID NO: 2224641 - RNA, 19 nt, Artificial Sequence
  Description of Artificial Sequence: Synthetic oligonucleotide
agccuuccacugguguaaa

SEQ ID NO: 2224642 - RNA, 19 nt, Artificial Sequence
  Description of Artificial Sequence: Synthetic oligonucleotide
cuacugcgcaccaccuccu

SEQ ID NO: 2224643 - RNA, 19 nt, Artificial Sequence
  Description of Artificial Sequence: Synthetic oligonucleotide
gucgaggcagucugaccau

SEQ ID NO: 2224644 - RNA, 19 nt, Artificial Sequence
  Description of Artificial Sequence: Synthetic oligonucleotide
ccuugacggaguguaguga

SEQ ID NO: 2224645 - RNA, 19 nt, Artificial Sequence
  Description of Artificial Sequence: Synthetic oligonucleotide
ggagaucaacgaugcugua

SEQ ID NO: 2224646 - RNA, 19 nt, Artificial Sequence
  Description of Artificial Sequence: Synthetic oligonucleotide
cccugaauauguacagacu

SEQ ID NO: 2224647 - RNA, 19 nt, Artificial Sequence
  Description of Artificial Sequence: Synthetic oligonucleotide
gccagagggaaguugccuu

SEQ ID NO: 2224648 - RNA, 19 nt, Artificial Sequence
  Description of Artificial Sequence: Synthetic oligonucleotide
cagcuuaacugaguguguu

SEQ ID NO: 2224649 - RNA, 19 nt, Artificial Sequence
  Description of Artificial Sequence: Synthetic oligonucleotide
ccugacacggcugcaugga

SEQ ID NO: 2224650 - RNA, 19 nt, Artificial Sequence
  Description of Artificial Sequence: Synthetic oligonucleotide
ggauccagcuuaacugagu

SEQ ID NO: 2224651 - RNA, 19 nt, Artificial Sequence
  Description of Artificial Sequence: Synthetic oligonucleotide
cgaacacaggauaggcuaa

SEQ ID NO: 2224652 - RNA, 19 nt, Artificial Sequence
  Description of Artificial Sequence: Synthetic oligonucleotide
cugcgcuacugcgcaccac

SEQ ID NO: 2224653 - RNA, 19 nt, Artificial Sequence
  Description of Artificial Sequence: Synthetic oligonucleotide
ccgagaggccugacacggc

SEQ ID NO: 2224654 - RNA, 19 nt, Artificial Sequence
  Description of Artificial Sequence: Synthetic oligonucleotide
aggugaccucggauguaaa

SEQ ID NO: 2224655 - RNA, 19 nt, Artificial Sequence
  Description of Artificial Sequence: Synthetic oligonucleotide
gccuuccgcacggaguaca

SEQ ID NO: 2224656 - RNA, 19 nt, Artificial Sequence
  Description of Artificial Sequence: Synthetic oligonucleotide
gcgcaguguccaugccugc

SEQ ID NO: 2224657 - RNA, 19 nt, Artificial Sequence
  Description of Artificial Sequence: Synthetic oligonucleotide
gcagcuuguagcgcgcagu

SEQ ID NO: 2224658 - RNA, 19 nt, Artificial Sequence
  Description of Artificial Sequence: Synthetic oligonucleotide
ucgcggccuuagccuucca

SEQ ID NO: 2224659 - RNA, 19 nt, Artificial Sequence
  Description of Artificial Sequence: Synthetic oligonucleotide
ccagcucucaauggcucca

SEQ ID NO: 2224660 - RNA, 19 nt, Artificial Sequence
  Description of Artificial Sequence: Synthetic oligonucleotide
cugacacggcugcauggau

SEQ ID NO: 2224661 - RNA, 19 nt, Artificial Sequence
  Description of Artificial Sequence: Synthetic oligonucleotide
ccagcuuaacugagugugu

SEQ ID NO: 2224662 - RNA, 19 nt, Artificial Sequence
  Description of Artificial Sequence: Synthetic oligonucleotide
cggguccuuugugaagugc

SEQ ID NO: 2224663 - RNA, 19 nt, Artificial Sequence
  Description of Artificial Sequence: Synthetic oligonucleotide
gcgcgcaguguccaugccu

SEQ ID NO: 2224664 - RNA, 19 nt, Artificial Sequence
  Description of Artificial Sequence: Synthetic oligonucleotide
cgcggccuuagccuuccac

SEQ ID NO: 2224665 - RNA, 19 nt, Artificial Sequence
  Description of Artificial Sequence: Synthetic oligonucleotide
ccucggauguaaagucugu

SEQ ID NO: 2224666 - RNA, 19 nt, Artificial Sequence
  Description of Artificial Sequence: Synthetic oligonucleotide
ccucgcggccuuagccuuc

SEQ ID NO: 2224667 - RNA, 19 nt, Artificial Sequence
  Description of Artificial Sequence: Synthetic oligonucleotide
cucugggcugucuguuauu

SEQ ID NO: 2224668 - RNA, 19 nt, Artificial Sequence
  Description of Artificial Sequence: Synthetic oligonucleotide
ccugcgcuacugcgcacca

SEQ ID NO: 2224669 - RNA, 19 nt, Artificial Sequence
  Description of Artificial Sequence: Synthetic oligonucleotide
cggaguguagugacuggcu

SEQ ID NO: 2224670 - RNA, 19 nt, Artificial Sequence
  Description of Artificial Sequence: Synthetic oligonucleotide
caauggcuccaagguaauu

SEQ ID NO: 2224671 - RNA, 19 nt, Artificial Sequence
  Description of Artificial Sequence: Synthetic oligonucleotide
cgagaggccugacacggcu

SEQ ID NO: 2224672 - RNA, 19 nt, Artificial Sequence
  Description of Artificial Sequence: Synthetic oligonucleotide
cgcacggaguacagcgcca

SEQ ID NO: 2224673 - RNA, 19 nt, Artificial Sequence
  Description of Artificial Sequence: Synthetic oligonucleotide
ggaggacgcuaggguccug

SEQ ID NO: 2224674 - RNA, 19 nt, Artificial Sequence
  Description of Artificial Sequence: Synthetic oligonucleotide
cuccagcacucacgcgccu

SEQ ID NO: 2224675 - RNA, 19 nt, Artificial Sequence
  Description of Artificial Sequence: Synthetic oligonucleotide
ccaguuugucagggucuga

SEQ ID NO: 2224676 - RNA, 19 nt, Artificial Sequence
  Description of Artificial Sequence: Synthetic oligonucleotide
gugcccggaugaggcucca

SEQ ID NO: 2224677 - RNA, 19 nt, Artificial Sequence
  Description of Artificial Sequence: Synthetic oligonucleotide
gcacggaguacagcgccau

SEQ ID NO: 2224678 - RNA, 19 nt, Artificial Sequence
  Description of Artificial Sequence: Synthetic oligonucleotide
gccucgcggccuuagccuu

SEQ ID NO: 2224679 - RNA, 19 nt, Artificial Sequence
  Description of Artificial Sequence: Synthetic oligonucleotide
cacgcgccuuccgcacgga

SEQ ID NO: 2224680 - RNA, 19 nt, Artificial Sequence
  Description of Artificial Sequence: Synthetic oligonucleotide
ccuccaccgagaggccuga

SEQ ID NO: 2224681 - RNA, 19 nt, Artificial Sequence
  Description of Artificial Sequence: Synthetic oligonucleotide
ggauuccuguaggcuggau

SEQ ID NO: 2224682 - RNA, 19 nt, Artificial Sequence
  Description of Artificial Sequence: Synthetic oligonucleotide
gcgcuacugcgcaccaccu

SEQ ID NO: 2224683 - RNA, 19 nt, Artificial Sequence
  Description of Artificial Sequence: Synthetic oligonucleotide
cuucugccucgcggccuua

SEQ ID NO: 2224684 - RNA, 19 nt, Artificial Sequence
  Description of Artificial Sequence: Synthetic oligonucleotide
cauccgccaccagcagcuu

SEQ ID NO: 2224685 - RNA, 19 nt, Artificial Sequence
  Description of Artificial Sequence: Synthetic oligonucleotide
gcucugcucucuggcucau

SEQ ID NO: 2224686 - RNA, 19 nt, Artificial Sequence
  Description of Artificial Sequence: Synthetic oligonucleotide
ccgccaccagcagcuugua

SEQ ID NO: 2224687 - RNA, 19 nt, Artificial Sequence
  Description of Artificial Sequence: Synthetic oligonucleotide
uuuaaaacauccaugauga

SEQ ID NO: 2224688 - RNA, 19 nt, Artificial Sequence
  Description of Artificial Sequence: Synthetic oligonucleotide
aacaauagcuaacaagagc

SEQ ID NO: 2224689 - RNA, 19 nt, Artificial Sequence
  Description of Artificial Sequence: Synthetic oligonucleotide
aaagcuagacugcagacac

SEQ ID NO: 2224690 - RNA, 19 nt, Artificial Sequence
  Description of Artificial Sequence: Synthetic oligonucleotide
aagagagagaccuauagug

SEQ ID NO: 2224691 - RNA, 19 nt, Artificial Sequence
  Description of Artificial Sequence: Synthetic oligonucleotide
aauaauaauaccacuaucu

SEQ ID NO: 2224692 - RNA, 19 nt, Artificial Sequence
  Description of Artificial Sequence: Synthetic oligonucleotide
aauaauaaguuacuuuuca

SEQ ID NO: 2224693 - RNA, 19 nt, Artificial Sequence
  Description of Artificial Sequence: Synthetic oligonucleotide
aaauaacaaaagcauacag

SEQ ID NO: 2224694 - RNA, 19 nt, Artificial Sequence
  Description of Artificial Sequence: Synthetic oligonucleotide
ugagcuuaaauguaguccg

SEQ ID NO: 2224695 - RNA, 19 nt, Artificial Sequence
  Description of Artificial Sequence: Synthetic oligonucleotide
uuucaauuuuaaaacaucc

SEQ ID NO: 2224696 - RNA, 19 nt, Artificial Sequence
  Description of Artificial Sequence: Synthetic oligonucleotide
aauaaguuacuuuucaaau

SEQ ID NO: 2224697 - RNA, 19 nt, Artificial Sequence
  Description of Artificial Sequence: Synthetic oligonucleotide
aaagugauuuacaagagag

SEQ ID NO: 2224698 - RNA, 19 nt, Artificial Sequence
  Description of Artificial Sequence: Synthetic oligonucleotide
agacauaaguuuaagaggc

SEQ ID NO: 2224699 - RNA, 19 nt, Artificial Sequence
  Description of Artificial Sequence: Synthetic oligonucleotide
aguauuuacacuuaguaaa

SEQ ID NO: 2224700 - RNA, 19 nt, Artificial Sequence
  Description of Artificial Sequence: Synthetic oligonucleotide
aacaagagcucuugaauac

SEQ ID NO: 2224701 - RNA, 19 nt, Artificial Sequence
  Description of Artificial Sequence: Synthetic oligonucleotide
ucacacuacaccuauacag

SEQ ID NO: 2224702 - RNA, 19 nt, Artificial Sequence
  Description of Artificial Sequence: Synthetic oligonucleotide
ugauuuacaagagagagac

SEQ ID NO: 2224703 - RNA, 19 nt, Artificial Sequence
  Description of Artificial Sequence: Synthetic oligonucleotide
ucacauuucaauuuuaaaa

SEQ ID NO: 2224704 - RNA, 19 nt, Artificial Sequence
  Description of Artificial Sequence: Synthetic oligonucleotide
uugaauguguccuuuagcc

SEQ ID NO: 2224705 - RNA, 19 nt, Artificial Sequence
  Description of Artificial Sequence: Synthetic oligonucleotide
aauguguuaggagaugugg

SEQ ID NO: 2224706 - RNA, 19 nt, Artificial Sequence
  Description of Artificial Sequence: Synthetic oligonucleotide
uugauuauagcaacugugc

SEQ ID NO: 2224707 - RNA, 19 nt, Artificial Sequence
  Description of Artificial Sequence: Synthetic oligonucleotide
aaauacacaagacuauccu

SEQ ID NO: 2224708 - RNA, 19 nt, Artificial Sequence
  Description of Artificial Sequence: Synthetic oligonucleotide
ugaauugugcagauaauug

SEQ ID NO: 2224709 - RNA, 19 nt, Artificial Sequence
  Description of Artificial Sequence: Synthetic oligonucleotide
aauaauaccacuaucuuua

SEQ ID NO: 2224710 - RNA, 19 nt, Artificial Sequence
  Description of Artificial Sequence: Synthetic oligonucleotide
auaacaaguauuuacacuu

SEQ ID NO: 2224711 - RNA, 19 nt, Artificial Sequence
  Description of Artificial Sequence: Synthetic oligonucleotide
cuuaaauguaguccgaggc

SEQ ID NO: 2224712 - RNA, 19 nt, Artificial Sequence
  Description of Artificial Sequence: Synthetic oligonucleotide
uuggaaauaauaauaccac

SEQ ID NO: 2224713 - RNA, 19 nt, Artificial Sequence
  Description of Artificial Sequence: Synthetic oligonucleotide
uuugguuccaauguguuag

SEQ ID NO: 2224714 - RNA, 19 nt, Artificial Sequence
  Description of Artificial Sequence: Synthetic oligonucleotide
agugauuuacaagagagag

SEQ ID NO: 2224715 - RNA, 19 nt, Artificial Sequence
  Description of Artificial Sequence: Synthetic oligonucleotide
aaaacuaggagacaacauu

SEQ ID NO: 2224716 - RNA, 19 nt, Artificial Sequence
  Description of Artificial Sequence: Synthetic oligonucleotide
agugccacaucucuguacc

SEQ ID NO: 2224717 - RNA, 19 nt, Artificial Sequence
  Description of Artificial Sequence: Synthetic oligonucleotide
aaaagacauaaguuuaaga

SEQ ID NO: 2224718 - RNA, 19 nt, Artificial Sequence
  Description of Artificial Sequence: Synthetic oligonucleotide
ugagugucuacuacaauag

SEQ ID NO: 2224719 - RNA, 19 nt, Artificial Sequence
  Description of Artificial Sequence: Synthetic oligonucleotide
aauagugccacaucucugu

SEQ ID NO: 2224720 - RNA, 19 nt, Artificial Sequence
  Description of Artificial Sequence: Synthetic oligonucleotide
cuuggaaauaauaauacca

SEQ ID NO: 2224721 - RNA, 19 nt, Artificial Sequence
  Description of Artificial Sequence: Synthetic oligonucleotide
ucuaaaagacauaaguuua

SEQ ID NO: 2224722 - RNA, 19 nt, Artificial Sequence
  Description of Artificial Sequence: Synthetic oligonucleotide
uuuauuugguuccaaugug

SEQ ID NO: 2224723 - RNA, 19 nt, Artificial Sequence
  Description of Artificial Sequence: Synthetic oligonucleotide
uucuaaaagacauaaguuu

SEQ ID NO: 2224724 - RNA, 19 nt, Artificial Sequence
  Description of Artificial Sequence: Synthetic oligonucleotide
agacauuuugaaugugucc

SEQ ID NO: 2224725 - RNA, 19 nt, Artificial Sequence
  Description of Artificial Sequence: Synthetic oligonucleotide
aacaaguauuuacacuuag

SEQ ID NO: 2224726 - RNA, 19 nt, Artificial Sequence
  Description of Artificial Sequence: Synthetic oligonucleotide
gugguaauaaaugauaccc

SEQ ID NO: 2224727 - RNA, 19 nt, Artificial Sequence
  Description of Artificial Sequence: Synthetic oligonucleotide
aauugugcagauaauuguc

SEQ ID NO: 2224728 - RNA, 19 nt, Artificial Sequence
  Description of Artificial Sequence: Synthetic oligonucleotide
cuugauuauagcaacugug

SEQ ID NO: 2224729 - RNA, 19 nt, Artificial Sequence
  Description of Artificial Sequence: Synthetic oligonucleotide
auugucacuugauuauagc

SEQ ID NO: 2224730 - RNA, 19 nt, Artificial Sequence
  Description of Artificial Sequence: Synthetic oligonucleotide
aaguauuuacacuuaguaa

SEQ ID NO: 2224731 - RNA, 19 nt, Artificial Sequence
  Description of Artificial Sequence: Synthetic oligonucleotide
gaccuauagugauauaggg

SEQ ID NO: 2224732 - RNA, 19 nt, Artificial Sequence
  Description of Artificial Sequence: Synthetic oligonucleotide
uggagguucuuuuauuugg

SEQ ID NO: 2224733 - RNA, 19 nt, Artificial Sequence
  Description of Artificial Sequence: Synthetic oligonucleotide
acaaucauugaauugugca

SEQ ID NO: 2224734 - RNA, 19 nt, Artificial Sequence
  Description of Artificial Sequence: Synthetic oligonucleotide
aagaaaggaagcacgacuc

SEQ ID NO: 2224735 - RNA, 19 nt, Artificial Sequence
  Description of Artificial Sequence: Synthetic oligonucleotide
uuaaauguaguccgaggca

SEQ ID NO: 2224736 - RNA, 19 nt, Artificial Sequence
  Description of Artificial Sequence: Synthetic oligonucleotide
uuuugaauguguccuuuag

SEQ ID NO: 2224737 - RNA, 19 nt, Artificial Sequence
  Description of Artificial Sequence: Synthetic oligonucleotide
uaacaaaagcauacagagg

SEQ ID NO: 2224738 - RNA, 19 nt, Artificial Sequence
  Description of Artificial Sequence: Synthetic oligonucleotide
aguuacuuuucaaauacac

SEQ ID NO: 2224739 - RNA, 19 nt, Artificial Sequence
  Description of Artificial Sequence: Synthetic oligonucleotide
gauaauugucacuugauua

SEQ ID NO: 2224740 - RNA, 19 nt, Artificial Sequence
  Description of Artificial Sequence: Synthetic oligonucleotide
ugugcaaaguguaggcugg

SEQ ID NO: 2224741 - RNA, 19 nt, Artificial Sequence
  Description of Artificial Sequence: Synthetic oligonucleotide
acaauagcuaacaagagcu

SEQ ID NO: 2224742 - RNA, 19 nt, Artificial Sequence
  Description of Artificial Sequence: Synthetic oligonucleotide
uguaccuaugucaggauga

SEQ ID NO: 2224743 - RNA, 19 nt, Artificial Sequence
  Description of Artificial Sequence: Synthetic oligonucleotide
acaagagagagaccuauag

SEQ ID NO: 2224744 - RNA, 19 nt, Artificial Sequence
  Description of Artificial Sequence: Synthetic oligonucleotide
gagaccuauagugauauag

SEQ ID NO: 2224745 - RNA, 19 nt, Artificial Sequence
  Description of Artificial Sequence: Synthetic oligonucleotide
uauagccucagacaaacaa

SEQ ID NO: 2224746 - RNA, 19 nt, Artificial Sequence
  Description of Artificial Sequence: Synthetic oligonucleotide
gacucagaagaacucaucc

SEQ ID NO: 2224747 - RNA, 19 nt, Artificial Sequence
  Description of Artificial Sequence: Synthetic oligonucleotide
aaucauugaauugugcaga

SEQ ID NO: 2224748 - RNA, 19 nt, Artificial Sequence
  Description of Artificial Sequence: Synthetic oligonucleotide
auaauugucacuugauuau

SEQ ID NO: 2224749 - RNA, 19 nt, Artificial Sequence
  Description of Artificial Sequence: Synthetic oligonucleotide
aaacuaggagacaacauug

SEQ ID NO: 2224750 - RNA, 19 nt, Artificial Sequence
  Description of Artificial Sequence: Synthetic oligonucleotide
uuaaggaaacugcaccugc

SEQ ID NO: 2224751 - RNA, 19 nt, Artificial Sequence
  Description of Artificial Sequence: Synthetic oligonucleotide
uaaagugauuuacaagaga

SEQ ID NO: 2224752 - RNA, 19 nt, Artificial Sequence
  Description of Artificial Sequence: Synthetic oligonucleotide
ugugguaauaaaugauacc

SEQ ID NO: 2224753 - RNA, 19 nt, Artificial Sequence
  Description of Artificial Sequence: Synthetic oligonucleotide
uuccaaugggcuccaaugg

SEQ ID NO: 2224754 - RNA, 19 nt, Artificial Sequence
  Description of Artificial Sequence: Synthetic oligonucleotide
uaaauguaguccgaggcag

SEQ ID NO: 2224755 - RNA, 19 nt, Artificial Sequence
  Description of Artificial Sequence: Synthetic oligonucleotide
ugcaacauccaguuaagga

SEQ ID NO: 2224756 - RNA, 19 nt, Artificial Sequence
  Description of Artificial Sequence: Synthetic oligonucleotide
ucagacaaacaauagcuaa

SEQ ID NO: 2224757 - RNA, 19 nt, Artificial Sequence
  Description of Artificial Sequence: Synthetic oligonucleotide
gcauccaaaagcuagacug

SEQ ID NO: 2224758 - RNA, 19 nt, Artificial Sequence
  Description of Artificial Sequence: Synthetic oligonucleotide
aagacuauccuugguauug

SEQ ID NO: 2224759 - RNA, 19 nt, Artificial Sequence
  Description of Artificial Sequence: Synthetic oligonucleotide
ugauuauagcaacugugca

SEQ ID NO: 2224760 - RNA, 19 nt, Artificial Sequence
  Description of Artificial Sequence: Synthetic oligonucleotide
uuuauagccucagacaaac

SEQ ID NO: 2224761 - RNA, 19 nt, Artificial Sequence
  Description of Artificial Sequence: Synthetic oligonucleotide
ugucacuugauuauagcaa

SEQ ID NO: 2224762 - RNA, 19 nt, Artificial Sequence
  Description of Artificial Sequence: Synthetic oligonucleotide
aacuaggagacaacauugc

SEQ ID NO: 2224763 - RNA, 19 nt, Artificial Sequence
  Description of Artificial Sequence: Synthetic oligonucleotide
cacacuacaccuauacagg

SEQ ID NO: 2224764 - RNA, 19 nt, Artificial Sequence
  Description of Artificial Sequence: Synthetic oligonucleotide
aauagcuaacaagagcucu

SEQ ID NO: 2224765 - RNA, 19 nt, Artificial Sequence
  Description of Artificial Sequence: Synthetic oligonucleotide
uuagcgaggaaaccccagg

SEQ ID NO: 2224766 - RNA, 19 nt, Artificial Sequence
  Description of Artificial Sequence: Synthetic oligonucleotide
gaauguguccuuuagccca

SEQ ID NO: 2224767 - RNA, 19 nt, Artificial Sequence
  Description of Artificial Sequence: Synthetic oligonucleotide
auugcuuguuacaggaugc

SEQ ID NO: 2224768 - RNA, 19 nt, Artificial Sequence
  Description of Artificial Sequence: Synthetic oligonucleotide
uccaguuaaggaaacugca

SEQ ID NO: 2224769 - RNA, 19 nt, Artificial Sequence
  Description of Artificial Sequence: Synthetic oligonucleotide
acaacauugcuuguuacag

SEQ ID NO: 2224770 - RNA, 19 nt, Artificial Sequence
  Description of Artificial Sequence: Synthetic oligonucleotide
ggaagcacgacucagaaga

SEQ ID NO: 2224771 - RNA, 19 nt, Artificial Sequence
  Description of Artificial Sequence: Synthetic oligonucleotide
uaaacucacauuucaauuu

SEQ ID NO: 2224772 - RNA, 19 nt, Artificial Sequence
  Description of Artificial Sequence: Synthetic oligonucleotide
uccaaugggcuccaauggg

SEQ ID NO: 2224773 - RNA, 19 nt, Artificial Sequence
  Description of Artificial Sequence: Synthetic oligonucleotide
auaaguuuaagaggcauca

SEQ ID NO: 2224774 - RNA, 19 nt, Artificial Sequence
  Description of Artificial Sequence: Synthetic oligonucleotide
acagaagaaaggaagcacg

SEQ ID NO: 2224775 - RNA, 19 nt, Artificial Sequence
  Description of Artificial Sequence: Synthetic oligonucleotide
caguuaaggaaacugcacc

SEQ ID NO: 2224776 - RNA, 19 nt, Artificial Sequence
  Description of Artificial Sequence: Synthetic oligonucleotide
aauacacaagacuauccuu

SEQ ID NO: 2224777 - RNA, 19 nt, Artificial Sequence
  Description of Artificial Sequence: Synthetic oligonucleotide
uggaaauaauaauaccacu

SEQ ID NO: 2224778 - RNA, 19 nt, Artificial Sequence
  Description of Artificial Sequence: Synthetic oligonucleotide
guuuuauagccucagacaa

SEQ ID NO: 2224779 - RNA, 19 nt, Artificial Sequence
  Description of Artificial Sequence: Synthetic oligonucleotide
gaaaccccaggguuggugg

SEQ ID NO: 2224780 - RNA, 19 nt, Artificial Sequence
  Description of Artificial Sequence: Synthetic oligonucleotide
aaagcauacagaggcacug

SEQ ID NO: 2224781 - RNA, 19 nt, Artificial Sequence
  Description of Artificial Sequence: Synthetic oligonucleotide
acaauagugccacaucucu

SEQ ID NO: 2224782 - RNA, 19 nt, Artificial Sequence
  Description of Artificial Sequence: Synthetic oligonucleotide
aaaguguaggcugggauca

SEQ ID NO: 2224783 - RNA, 19 nt, Artificial Sequence
  Description of Artificial Sequence: Synthetic oligonucleotide
uucgcuaucugcgucagcc

SEQ ID NO: 2224784 - RNA, 19 nt, Artificial Sequence
  Description of Artificial Sequence: Synthetic oligonucleotide
acuaucuuuaaagugauuu

SEQ ID NO: 2224785 - RNA, 19 nt, Artificial Sequence
  Description of Artificial Sequence: Synthetic oligonucleotide
guuccaauguguuaggaga

SEQ ID NO: 2224786 - RNA, 19 nt, Artificial Sequence
  Description of Artificial Sequence: Synthetic oligonucleotide
aauugucacuugauuauag

SEQ ID NO: 2224787 - RNA, 19 nt, Artificial Sequence
  Description of Artificial Sequence: Synthetic oligonucleotide
augugguaauaaaugauac

SEQ ID NO: 2224788 - RNA, 19 nt, Artificial Sequence
  Description of Artificial Sequence: Synthetic oligonucleotide
gagaugugguaauaaauga

SEQ ID NO: 2224789 - RNA, 19 nt, Artificial Sequence
  Description of Artificial Sequence: Synthetic oligonucleotide
auaauaauaccacuaucuu

SEQ ID NO: 2224790 - RNA, 19 nt, Artificial Sequence
  Description of Artificial Sequence: Synthetic oligonucleotide
caguuuuauagccucagac

SEQ ID NO: 2224791 - RNA, 19 nt, Artificial Sequence
  Description of Artificial Sequence: Synthetic oligonucleotide
uaaaugauacccuuacauu

SEQ ID NO: 2224792 - RNA, 19 nt, Artificial Sequence
  Description of Artificial Sequence: Synthetic oligonucleotide
gauuauagcaacugugcaa

SEQ ID NO: 2224793 - RNA, 19 nt, Artificial Sequence
  Description of Artificial Sequence: Synthetic oligonucleotide
ugucuacuacaauagugcc

SEQ ID NO: 2224794 - RNA, 19 nt, Artificial Sequence
  Description of Artificial Sequence: Synthetic oligonucleotide
cauugaauugugcagauaa

SEQ ID NO: 2224795 - RNA, 19 nt, Artificial Sequence
  Description of Artificial Sequence: Synthetic oligonucleotide
cugagcuuaaauguagucc

SEQ ID NO: 2224796 - RNA, 19 nt, Artificial Sequence
  Description of Artificial Sequence: Synthetic oligonucleotide
cacagacaguuuuauagcc

SEQ ID NO: 2224797 - RNA, 19 nt, Artificial Sequence
  Description of Artificial Sequence: Synthetic oligonucleotide
accuauacagguguguuuc

SEQ ID NO: 2224798 - RNA, 19 nt, Artificial Sequence
  Description of Artificial Sequence: Synthetic oligonucleotide
aaacucacauuucaauuuu

SEQ ID NO: 2224799 - RNA, 19 nt, Artificial Sequence
  Description of Artificial Sequence: Synthetic oligonucleotide
auccaguuaaggaaacugc

SEQ ID NO: 2224800 - RNA, 19 nt, Artificial Sequence
  Description of Artificial Sequence: Synthetic oligonucleotide
ugccuuacaaucauugaau

SEQ ID NO: 2224801 - RNA, 19 nt, Artificial Sequence
  Description of Artificial Sequence: Synthetic oligonucleotide
uccaaugggcauccaaaag

SEQ ID NO: 2224802 - RNA, 19 nt, Artificial Sequence
  Description of Artificial Sequence: Synthetic oligonucleotide
agcaguugagcuguuggcc

SEQ ID NO: 2224803 - RNA, 19 nt, Artificial Sequence
  Description of Artificial Sequence: Synthetic oligonucleotide
aaaagcuagacugcagaca

SEQ ID NO: 2224804 - RNA, 19 nt, Artificial Sequence
  Description of Artificial Sequence: Synthetic oligonucleotide
uggcuuggaaauaauaaua

SEQ ID NO: 2224805 - RNA, 19 nt, Artificial Sequence
  Description of Artificial Sequence: Synthetic oligonucleotide
auacagguguguuucccac

SEQ ID NO: 2224806 - RNA, 19 nt, Artificial Sequence
  Description of Artificial Sequence: Synthetic oligonucleotide
uacaaucauugaauugugc

SEQ ID NO: 2224807 - RNA, 19 nt, Artificial Sequence
  Description of Artificial Sequence: Synthetic oligonucleotide
ucaggaugacgucugcugc

SEQ ID NO: 2224808 - RNA, 19 nt, Artificial Sequence
  Description of Artificial Sequence: Synthetic oligonucleotide
gugucuacuacaauagugc

SEQ ID NO: 2224809 - RNA, 19 nt, Artificial Sequence
  Description of Artificial Sequence: Synthetic oligonucleotide
uuggccuuggucuguagag

SEQ ID NO: 2224810 - RNA, 19 nt, Artificial Sequence
  Description of Artificial Sequence: Synthetic oligonucleotide
aaaccacaauacuuuaaau

SEQ ID NO: 2224811 - RNA, 19 nt, Artificial Sequence
  Description of Artificial Sequence: Synthetic oligonucleotide
auaauaaguuacuuuucaa

SEQ ID NO: 2224812 - RNA, 19 nt, Artificial Sequence
  Description of Artificial Sequence: Synthetic oligonucleotide
auacacaagacuauccuug

SEQ ID NO: 2224813 - RNA, 19 nt, Artificial Sequence
  Description of Artificial Sequence: Synthetic oligonucleotide
guaggcugggaucaggugc

SEQ ID NO: 2224814 - RNA, 19 nt, Artificial Sequence
  Description of Artificial Sequence: Synthetic oligonucleotide
gguauuggcagacauuuug

SEQ ID NO: 2224815 - RNA, 19 nt, Artificial Sequence
  Description of Artificial Sequence: Synthetic oligonucleotide
cauugcuuguuacaggaug

SEQ ID NO: 2224816 - RNA, 19 nt, Artificial Sequence
  Description of Artificial Sequence: Synthetic oligonucleotide
aaaccccaggguugguggc

SEQ ID NO: 2224817 - RNA, 19 nt, Artificial Sequence
  Description of Artificial Sequence: Synthetic oligonucleotide
auaccacuaucuuuaaagu

SEQ ID NO: 2224818 - RNA, 19 nt, Artificial Sequence
  Description of Artificial Sequence: Synthetic oligonucleotide
gucacuugauuauagcaac

SEQ ID NO: 2224819 - RNA, 19 nt, Artificial Sequence
  Description of Artificial Sequence: Synthetic oligonucleotide
aggugcaacauccaguuaa

SEQ ID NO: 2224820 - RNA, 19 nt, Artificial Sequence
  Description of Artificial Sequence: Synthetic oligonucleotide
uuguccaugcuccugacuu

SEQ ID NO: 2224821 - RNA, 19 nt, Artificial Sequence
  Description of Artificial Sequence: Synthetic oligonucleotide
agacaacauugcuuguuac

SEQ ID NO: 2224822 - RNA, 19 nt, Artificial Sequence
  Description of Artificial Sequence: Synthetic oligonucleotide
cagacaaacaauagcuaac

SEQ ID NO: 2224823 - RNA, 19 nt, Artificial Sequence
  Description of Artificial Sequence: Synthetic oligonucleotide
cauccaaaagcuagacugc

SEQ ID NO: 2224824 - RNA, 19 nt, Artificial Sequence
  Description of Artificial Sequence: Synthetic oligonucleotide
agaccuauagugauauagg

SEQ ID NO: 2224825 - RNA, 19 nt, Artificial Sequence
  Description of Artificial Sequence: Synthetic oligonucleotide
acuugauuauagcaacugu

SEQ ID NO: 2224826 - RNA, 19 nt, Artificial Sequence
  Description of Artificial Sequence: Synthetic oligonucleotide
aggaaacugcaccugcagg

SEQ ID NO: 2224827 - RNA, 19 nt, Artificial Sequence
  Description of Artificial Sequence: Synthetic oligonucleotide
uaauuggagguucuuuuau

SEQ ID NO: 2224828 - RNA, 19 nt, Artificial Sequence
  Description of Artificial Sequence: Synthetic oligonucleotide
ggcacugucuuucuaaaag

SEQ ID NO: 2224829 - RNA, 19 nt, Artificial Sequence
  Description of Artificial Sequence: Synthetic oligonucleotide
accuauagugauauagggg

SEQ ID NO: 2224830 - RNA, 19 nt, Artificial Sequence
  Description of Artificial Sequence: Synthetic oligonucleotide
caaguauuuacacuuagua

SEQ ID NO: 2224831 - RNA, 19 nt, Artificial Sequence
  Description of Artificial Sequence: Synthetic oligonucleotide
aaggaagcacgacucagaa

SEQ ID NO: 2224832 - RNA, 19 nt, Artificial Sequence
  Description of Artificial Sequence: Synthetic oligonucleotide
gaagaaaggaagcacgacu

SEQ ID NO: 2224833 - RNA, 19 nt, Artificial Sequence
  Description of Artificial Sequence: Synthetic oligonucleotide
cauaaguuuaagaggcauc

SEQ ID NO: 2224834 - RNA, 19 nt, Artificial Sequence
  Description of Artificial Sequence: Synthetic oligonucleotide
uauacagguguguuuccca

SEQ ID NO: 2224835 - RNA, 19 nt, Artificial Sequence
  Description of Artificial Sequence: Synthetic oligonucleotide
auacuuuaaauaauaaguu

SEQ ID NO: 2224836 - RNA, 19 nt, Artificial Sequence
  Description of Artificial Sequence: Synthetic oligonucleotide
auggcuuggaaauaauaau

SEQ ID NO: 2224837 - RNA, 19 nt, Artificial Sequence
  Description of Artificial Sequence: Synthetic oligonucleotide
gaaaggaagcacgacucag

SEQ ID NO: 2224838 - RNA, 19 nt, Artificial Sequence
  Description of Artificial Sequence: Synthetic oligonucleotide
gaacucugagcuuaaaugu

SEQ ID NO: 2224839 - RNA, 19 nt, Artificial Sequence
  Description of Artificial Sequence: Synthetic oligonucleotide
acaagacuauccuugguau

SEQ ID NO: 2224840 - RNA, 19 nt, Artificial Sequence
  Description of Artificial Sequence: Synthetic oligonucleotide
uugguauuggcagacauuu

SEQ ID NO: 2224841 - RNA, 19 nt, Artificial Sequence
  Description of Artificial Sequence: Synthetic oligonucleotide
agcaacugugcaauuuugc

SEQ ID NO: 2224842 - RNA, 19 nt, Artificial Sequence
  Description of Artificial Sequence: Synthetic oligonucleotide
gugaugugcaaaguguagg

SEQ ID NO: 2224843 - RNA, 19 nt, Artificial Sequence
  Description of Artificial Sequence: Synthetic oligonucleotide
uccaaaagcuagacugcag

SEQ ID NO: 2224844 - RNA, 19 nt, Artificial Sequence
  Description of Artificial Sequence: Synthetic oligonucleotide
agaagaaaggaagcacgac

SEQ ID NO: 2224845 - RNA, 19 nt, Artificial Sequence
  Description of Artificial Sequence: Synthetic oligonucleotide
uuggagguucuuuuauuug

SEQ ID NO: 2224846 - RNA, 19 nt, Artificial Sequence
  Description of Artificial Sequence: Synthetic oligonucleotide
gauaaacucacauuucaau

SEQ ID NO: 2224847 - RNA, 19 nt, Artificial Sequence
  Description of Artificial Sequence: Synthetic oligonucleotide
accuaugucaggaugacgu

SEQ ID NO: 2224848 - RNA, 19 nt, Artificial Sequence
  Description of Artificial Sequence: Synthetic oligonucleotide
aacauccaguuaaggaaac

SEQ ID NO: 2224849 - RNA, 19 nt, Artificial Sequence
  Description of Artificial Sequence: Synthetic oligonucleotide
gaauugugcagauaauugu

SEQ ID NO: 2224850 - RNA, 19 nt, Artificial Sequence
  Description of Artificial Sequence: Synthetic oligonucleotide
gacauuuugaauguguccu

SEQ ID NO: 2224851 - RNA, 19 nt, Artificial Sequence
  Description of Artificial Sequence: Synthetic oligonucleotide
augccuuacaaucauugaa

SEQ ID NO: 2224852 - RNA, 19 nt, Artificial Sequence
  Description of Artificial Sequence: Synthetic oligonucleotide
acuaggagacaacauugcu

SEQ ID NO: 2224853 - RNA, 19 nt, Artificial Sequence
  Description of Artificial Sequence: Synthetic oligonucleotide
ggagaugugguaauaaaug

SEQ ID NO: 2224854 - RNA, 19 nt, Artificial Sequence
  Description of Artificial Sequence: Synthetic oligonucleotide
uguguuaggagauguggua

SEQ ID NO: 2224855 - RNA, 19 nt, Artificial Sequence
  Description of Artificial Sequence: Synthetic oligonucleotide
uacaauagugccacaucuc

SEQ ID NO: 2224856 - RNA, 19 nt, Artificial Sequence
  Description of Artificial Sequence: Synthetic oligonucleotide
caacauugcuuguuacagg

SEQ ID NO: 2224857 - RNA, 19 nt, Artificial Sequence
  Description of Artificial Sequence: Synthetic oligonucleotide
cucagcuuagcgaggaaac

SEQ ID NO: 2224858 - RNA, 19 nt, Artificial Sequence
  Description of Artificial Sequence: Synthetic oligonucleotide
agcuuagcgaggaaacccc

SEQ ID NO: 2224859 - RNA, 19 nt, Artificial Sequence
  Description of Artificial Sequence: Synthetic oligonucleotide
uagccucagacaaacaaua

SEQ ID NO: 2224860 - RNA, 19 nt, Artificial Sequence
  Description of Artificial Sequence: Synthetic oligonucleotide
uauuugguuccaauguguu

SEQ ID NO: 2224861 - RNA, 19 nt, Artificial Sequence
  Description of Artificial Sequence: Synthetic oligonucleotide
uacauucucuuaaccaaaa

SEQ ID NO: 2224862 - RNA, 19 nt, Artificial Sequence
  Description of Artificial Sequence: Synthetic oligonucleotide
ucagaccacagacaguuuu

SEQ ID NO: 2224863 - RNA, 19 nt, Artificial Sequence
  Description of Artificial Sequence: Synthetic oligonucleotide
gacaguuuuauagccucag

SEQ ID NO: 2224864 - RNA, 19 nt, Artificial Sequence
  Description of Artificial Sequence: Synthetic oligonucleotide
augauacccuuacauucuc

SEQ ID NO: 2224865 - RNA, 19 nt, Artificial Sequence
  Description of Artificial Sequence: Synthetic oligonucleotide
aaacauccaugaugagcag

SEQ ID NO: 2224866 - RNA, 19 nt, Artificial Sequence
  Description of Artificial Sequence: Synthetic oligonucleotide
aucugcuucgcuaucugcg

SEQ ID NO: 2224867 - RNA, 19 nt, Artificial Sequence
  Description of Artificial Sequence: Synthetic oligonucleotide
aaauguaguccgaggcagg

SEQ ID NO: 2224868 - RNA, 19 nt, Artificial Sequence
  Description of Artificial Sequence: Synthetic oligonucleotide
augggcauccaaaagcuag

SEQ ID NO: 2224869 - RNA, 19 nt, Artificial Sequence
  Description of Artificial Sequence: Synthetic oligonucleotide
cagacauuuugaauguguc

SEQ ID NO: 2224870 - RNA, 19 nt, Artificial Sequence
  Description of Artificial Sequence: Synthetic oligonucleotide
ucacuugauuauagcaacu

SEQ ID NO: 2224871 - RNA, 19 nt, Artificial Sequence
  Description of Artificial Sequence: Synthetic oligonucleotide
ccaaugggcauccaaaagc

SEQ ID NO: 2224872 - RNA, 19 nt, Artificial Sequence
  Description of Artificial Sequence: Synthetic oligonucleotide
cugcaggacagaagaaagg

SEQ ID NO: 2224873 - RNA, 19 nt, Artificial Sequence
  Description of Artificial Sequence: Synthetic oligonucleotide
auagcaacugugcaauuuu

SEQ ID NO: 2224874 - RNA, 19 nt, Artificial Sequence
  Description of Artificial Sequence: Synthetic oligonucleotide
aacugcaccugcaggacag

SEQ ID NO: 2224875 - RNA, 19 nt, Artificial Sequence
  Description of Artificial Sequence: Synthetic oligonucleotide
uuacaagagagagaccuau

SEQ ID NO: 2224876 - RNA, 19 nt, Artificial Sequence
  Description of Artificial Sequence: Synthetic oligonucleotide
gcuuaaauguaguccgagg

SEQ ID NO: 2224877 - RNA, 19 nt, Artificial Sequence
  Description of Artificial Sequence: Synthetic oligonucleotide
uagcaacugugcaauuuug

SEQ ID NO: 2224878 - RNA, 19 nt, Artificial Sequence
  Description of Artificial Sequence: Synthetic oligonucleotide
uagacugcagacaccugcu

SEQ ID NO: 2224879 - RNA, 19 nt, Artificial Sequence
  Description of Artificial Sequence: Synthetic oligonucleotide
gaugccuuacaaucauuga

SEQ ID NO: 2224880 - RNA, 19 nt, Artificial Sequence
  Description of Artificial Sequence: Synthetic oligonucleotide
uugguuccaauguguuagg

SEQ ID NO: 2224881 - RNA, 19 nt, Artificial Sequence
  Description of Artificial Sequence: Synthetic oligonucleotide
aaaggaagcacgacucaga

SEQ ID NO: 2224882 - RNA, 19 nt, Artificial Sequence
  Description of Artificial Sequence: Synthetic oligonucleotide
acacuacaccuauacaggu

SEQ ID NO: 2224883 - RNA, 19 nt, Artificial Sequence
  Description of Artificial Sequence: Synthetic oligonucleotide
cuccugacuuccaaugggc

SEQ ID NO: 2224884 - RNA, 19 nt, Artificial Sequence
  Description of Artificial Sequence: Synthetic oligonucleotide
uaacaaguauuuacacuua

SEQ ID NO: 2224885 - RNA, 19 nt, Artificial Sequence
  Description of Artificial Sequence: Synthetic oligonucleotide
cugagugucuacuacaaua

SEQ ID NO: 2224886 - RNA, 19 nt, Artificial Sequence
  Description of Artificial Sequence: Synthetic oligonucleotide
aaacugcaccugcaggaca

SEQ ID NO: 2224887 - RNA, 19 nt, Artificial Sequence
  Description of Artificial Sequence: Synthetic oligonucleotide
agaaaggaagcacgacuca

SEQ ID NO: 2224888 - RNA, 19 nt, Artificial Sequence
  Description of Artificial Sequence: Synthetic oligonucleotide
gcaacauccaguuaaggaa

SEQ ID NO: 2224889 - RNA, 19 nt, Artificial Sequence
  Description of Artificial Sequence: Synthetic oligonucleotide
uguuaggagaugugguaau

SEQ ID NO: 2224890 - RNA, 19 nt, Artificial Sequence
  Description of Artificial Sequence: Synthetic oligonucleotide
uaauaccacuaucuuuaaa

SEQ ID NO: 2224891 - RNA, 19 nt, Artificial Sequence
  Description of Artificial Sequence: Synthetic oligonucleotide
guuaaggaaacugcaccug

SEQ ID NO: 2224892 - RNA, 19 nt, Artificial Sequence
  Description of Artificial Sequence: Synthetic oligonucleotide
ucugcuucgcuaucugcgu

SEQ ID NO: 2224893 - RNA, 19 nt, Artificial Sequence
  Description of Artificial Sequence: Synthetic oligonucleotide
aucuuuaaagugauuuaca

SEQ ID NO: 2224894 - RNA, 19 nt, Artificial Sequence
  Description of Artificial Sequence: Synthetic oligonucleotide
uggucuguagagccacgag

SEQ ID NO: 2224895 - RNA, 19 nt, Artificial Sequence
  Description of Artificial Sequence: Synthetic oligonucleotide
cacuugauuauagcaacug

SEQ ID NO: 2224896 - RNA, 19 nt, Artificial Sequence
  Description of Artificial Sequence: Synthetic oligonucleotide
agcuagacugcagacaccu

SEQ ID NO: 2224897 - RNA, 19 nt, Artificial Sequence
  Description of Artificial Sequence: Synthetic oligonucleotide
agugaugugcaaaguguag

SEQ ID NO: 2224898 - RNA, 19 nt, Artificial Sequence
  Description of Artificial Sequence: Synthetic oligonucleotide
agaacucauccucagcuua

SEQ ID NO: 2224899 - RNA, 19 nt, Artificial Sequence
  Description of Artificial Sequence: Synthetic oligonucleotide
ugcagauaauugucacuug

SEQ ID NO: 2224900 - RNA, 19 nt, Artificial Sequence
  Description of Artificial Sequence: Synthetic oligonucleotide
cuuagcgaggaaaccccag

SEQ ID NO: 2224901 - RNA, 19 nt, Artificial Sequence
  Description of Artificial Sequence: Synthetic oligonucleotide
acaaaaccacaauacuuua

SEQ ID NO: 2224902 - RNA, 19 nt, Artificial Sequence
  Description of Artificial Sequence: Synthetic oligonucleotide
ucagcuuagcgaggaaacc

SEQ ID NO: 2224903 - RNA, 19 nt, Artificial Sequence
  Description of Artificial Sequence: Synthetic oligonucleotide
agcuuaaauguaguccgag

SEQ ID NO: 2224904 - RNA, 19 nt, Artificial Sequence
  Description of Artificial Sequence: Synthetic oligonucleotide
auugugcagauaauuguca

SEQ ID NO: 2224905 - RNA, 19 nt, Artificial Sequence
  Description of Artificial Sequence: Synthetic oligonucleotide
uacagaggcacugucuuuc

SEQ ID NO: 2224906 - RNA, 19 nt, Artificial Sequence
  Description of Artificial Sequence: Synthetic oligonucleotide
uacuacaauagugccacau

SEQ ID NO: 2224907 - RNA, 19 nt, Artificial Sequence
  Description of Artificial Sequence: Synthetic oligonucleotide
acauaaguuuaagaggcau

SEQ ID NO: 2224908 - RNA, 19 nt, Artificial Sequence
  Description of Artificial Sequence: Synthetic oligonucleotide
uccgaggcaggagugaugu

SEQ ID NO: 2224909 - RNA, 19 nt, Artificial Sequence
  Description of Artificial Sequence: Synthetic oligonucleotide
ggucuguagagccacgagc

SEQ ID NO: 2224910 - RNA, 19 nt, Artificial Sequence
  Description of Artificial Sequence: Synthetic oligonucleotide
cagcuuagcgaggaaaccc

SEQ ID NO: 2224911 - RNA, 19 nt, Artificial Sequence
  Description of Artificial Sequence: Synthetic oligonucleotide
gaacucauccucagcuuag

SEQ ID NO: 2224912 - RNA, 19 nt, Artificial Sequence
  Description of Artificial Sequence: Synthetic oligonucleotide
aucauugaauugugcagau

SEQ ID NO: 2224913 - RNA, 19 nt, Artificial Sequence
  Description of Artificial Sequence: Synthetic oligonucleotide
agcacgacucagaagaacu

SEQ ID NO: 2224914 - RNA, 19 nt, Artificial Sequence
  Description of Artificial Sequence: Synthetic oligonucleotide
agagagagaccuauaguga

SEQ ID NO: 2224915 - RNA, 19 nt, Artificial Sequence
  Description of Artificial Sequence: Synthetic oligonucleotide
ugauacccuuacauucucu

SEQ ID NO: 2224916 - RNA, 19 nt, Artificial Sequence
  Description of Artificial Sequence: Synthetic oligonucleotide
caauguguuaggagaugug

SEQ ID NO: 2224917 - RNA, 19 nt, Artificial Sequence
  Description of Artificial Sequence: Synthetic oligonucleotide
cgaacucugagcuuaaaug

SEQ ID NO: 2224918 - RNA, 19 nt, Artificial Sequence
  Description of Artificial Sequence: Synthetic oligonucleotide
ugcuucgcuaucugcguca

SEQ ID NO: 2224919 - RNA, 19 nt, Artificial Sequence
  Description of Artificial Sequence: Synthetic oligonucleotide
cuguaccuaugucaggaug

SEQ ID NO: 2224920 - RNA, 19 nt, Artificial Sequence
  Description of Artificial Sequence: Synthetic oligonucleotide
gacuauccuugguauuggc

SEQ ID NO: 2224921 - RNA, 19 nt, Artificial Sequence
  Description of Artificial Sequence: Synthetic oligonucleotide
caauagcuaacaagagcuc

SEQ ID NO: 2224922 - RNA, 19 nt, Artificial Sequence
  Description of Artificial Sequence: Synthetic oligonucleotide
cacuacaccuauacaggug

SEQ ID NO: 2224923 - RNA, 19 nt, Artificial Sequence
  Description of Artificial Sequence: Synthetic oligonucleotide
ugcgucagccacaucugcu

SEQ ID NO: 2224924 - RNA, 19 nt, Artificial Sequence
  Description of Artificial Sequence: Synthetic oligonucleotide
agacuauccuugguauugg

SEQ ID NO: 2224925 - RNA, 19 nt, Artificial Sequence
  Description of Artificial Sequence: Synthetic oligonucleotide
aagcuagacugcagacacc

SEQ ID NO: 2224926 - RNA, 19 nt, Artificial Sequence
  Description of Artificial Sequence: Synthetic oligonucleotide
uuauagccucagacaaaca

SEQ ID NO: 2224927 - RNA, 19 nt, Artificial Sequence
  Description of Artificial Sequence: Synthetic oligonucleotide
uagcuaacaagagcucuug

SEQ ID NO: 2224928 - RNA, 19 nt, Artificial Sequence
  Description of Artificial Sequence: Synthetic oligonucleotide
agaugugguaauaaaugau

SEQ ID NO: 2224929 - RNA, 19 nt, Artificial Sequence
  Description of Artificial Sequence: Synthetic oligonucleotide
ggcuuggaaauaauaauac

SEQ ID NO: 2224930 - RNA, 19 nt, Artificial Sequence
  Description of Artificial Sequence: Synthetic oligonucleotide
gcaggagugaugugcaaag

SEQ ID NO: 2224931 - RNA, 19 nt, Artificial Sequence
  Description of Artificial Sequence: Synthetic oligonucleotide
acaaguauuuacacuuagu

SEQ ID NO: 2224932 - RNA, 19 nt, Artificial Sequence
  Description of Artificial Sequence: Synthetic oligonucleotide
gaaacugcaccugcaggac

SEQ ID NO: 2224933 - RNA, 19 nt, Artificial Sequence
  Description of Artificial Sequence: Synthetic oligonucleotide
cuacaauagugccacaucu

SEQ ID NO: 2224934 - RNA, 19 nt, Artificial Sequence
  Description of Artificial Sequence: Synthetic oligonucleotide
cagcaguugagcuguuggc

SEQ ID NO: 2224935 - RNA, 19 nt, Artificial Sequence
  Description of Artificial Sequence: Synthetic oligonucleotide
aaugggcuccaaugggcau

SEQ ID NO: 2224936 - RNA, 19 nt, Artificial Sequence
  Description of Artificial Sequence: Synthetic oligonucleotide
caucugcuucgcuaucugc

SEQ ID NO: 2224937 - RNA, 19 nt, Artificial Sequence
  Description of Artificial Sequence: Synthetic oligonucleotide
aacucugagcuuaaaugua

SEQ ID NO: 2224938 - RNA, 19 nt, Artificial Sequence
  Description of Artificial Sequence: Synthetic oligonucleotide
uacaccuauacaggugugu

SEQ ID NO: 2224939 - RNA, 19 nt, Artificial Sequence
  Description of Artificial Sequence: Synthetic oligonucleotide
uaauugucacuugauuaua

SEQ ID NO: 2224940 - RNA, 19 nt, Artificial Sequence
  Description of Artificial Sequence: Synthetic oligonucleotide
uccaauguguuaggagaug

SEQ ID NO: 2224941 - RNA, 19 nt, Artificial Sequence
  Description of Artificial Sequence: Synthetic oligonucleotide
gcagauaauugucacuuga

SEQ ID NO: 2224942 - RNA, 19 nt, Artificial Sequence
  Description of Artificial Sequence: Synthetic oligonucleotide
auuugguuccaauguguua

SEQ ID NO: 2224943 - RNA, 19 nt, Artificial Sequence
  Description of Artificial Sequence: Synthetic oligonucleotide
uaccuaugucaggaugacg

SEQ ID NO: 2224944 - RNA, 19 nt, Artificial Sequence
  Description of Artificial Sequence: Synthetic oligonucleotide
auaauaccacuaucuuuaa

SEQ ID NO: 2224945 - RNA, 19 nt, Artificial Sequence
  Description of Artificial Sequence: Synthetic oligonucleotide
ggaugccuuacaaucauug

SEQ ID NO: 2224946 - RNA, 19 nt, Artificial Sequence
  Description of Artificial Sequence: Synthetic oligonucleotide
uugcuuguuacaggaugcc

SEQ ID NO: 2224947 - RNA, 19 nt, Artificial Sequence
  Description of Artificial Sequence: Synthetic oligonucleotide
uguagagccacgagcucuu

SEQ ID NO: 2224948 - RNA, 19 nt, Artificial Sequence
  Description of Artificial Sequence: Synthetic oligonucleotide
agcgaggaaaccccagggu

SEQ ID NO: 2224949 - RNA, 19 nt, Artificial Sequence
  Description of Artificial Sequence: Synthetic oligonucleotide
gcuccugacuuccaauggg

SEQ ID NO: 2224950 - RNA, 19 nt, Artificial Sequence
  Description of Artificial Sequence: Synthetic oligonucleotide
ccuuacauucucuuaacca

SEQ ID NO: 2224951 - RNA, 19 nt, Artificial Sequence
  Description of Artificial Sequence: Synthetic oligonucleotide
uacaagagagagaccuaua

SEQ ID NO: 2224952 - RNA, 19 nt, Artificial Sequence
  Description of Artificial Sequence: Synthetic oligonucleotide
ccuuacaaucauugaauug

SEQ ID NO: 2224953 - RNA, 19 nt, Artificial Sequence
  Description of Artificial Sequence: Synthetic oligonucleotide
aguguaggcugggaucagg

SEQ ID NO: 2224954 - RNA, 19 nt, Artificial Sequence
  Description of Artificial Sequence: Synthetic oligonucleotide
cacaagacuauccuuggua

SEQ ID NO: 2224955 - RNA, 19 nt, Artificial Sequence
  Description of Artificial Sequence: Synthetic oligonucleotide
auagccucagacaaacaau

SEQ ID NO: 2224956 - RNA, 19 nt, Artificial Sequence
  Description of Artificial Sequence: Synthetic oligonucleotide
cucuguaccuaugucagga

SEQ ID NO: 2224957 - RNA, 19 nt, Artificial Sequence
  Description of Artificial Sequence: Synthetic oligonucleotide
aagcauacagaggcacugu

SEQ ID NO: 2224958 - RNA, 19 nt, Artificial Sequence
  Description of Artificial Sequence: Synthetic oligonucleotide
ucuguagagccacgagcuc

SEQ ID NO: 2224959 - RNA, 19 nt, Artificial Sequence
  Description of Artificial Sequence: Synthetic oligonucleotide
acagacaguuuuauagccu

SEQ ID NO: 2224960 - RNA, 19 nt, Artificial Sequence
  Description of Artificial Sequence: Synthetic oligonucleotide
acauuuugaauguguccuu

SEQ ID NO: 2224961 - RNA, 19 nt, Artificial Sequence
  Description of Artificial Sequence: Synthetic oligonucleotide
gagagagaccuauagugau

SEQ ID NO: 2224962 - RNA, 19 nt, Artificial Sequence
  Description of Artificial Sequence: Synthetic oligonucleotide
acuauccuugguauuggca

SEQ ID NO: 2224963 - RNA, 19 nt, Artificial Sequence
  Description of Artificial Sequence: Synthetic oligonucleotide
cuuggucuguagagccacg

SEQ ID NO: 2224964 - RNA, 19 nt, Artificial Sequence
  Description of Artificial Sequence: Synthetic oligonucleotide
uaaguuuaagaggcaucaa

SEQ ID NO: 2224965 - RNA, 19 nt, Artificial Sequence
  Description of Artificial Sequence: Synthetic oligonucleotide
cacgagcucuuguccaugc

SEQ ID NO: 2224966 - RNA, 19 nt, Artificial Sequence
  Description of Artificial Sequence: Synthetic oligonucleotide
agcuaacaagagcucuuga

SEQ ID NO: 2224967 - RNA, 19 nt, Artificial Sequence
  Description of Artificial Sequence: Synthetic oligonucleotide
ugcuuguuacaggaugccu

SEQ ID NO: 2224968 - RNA, 19 nt, Artificial Sequence
  Description of Artificial Sequence: Synthetic oligonucleotide
acuuccaaugggcuccaau

SEQ ID NO: 2224969 - RNA, 19 nt, Artificial Sequence
  Description of Artificial Sequence: Synthetic oligonucleotide
gugauuuacaagagagaga

SEQ ID NO: 2224970 - RNA, 19 nt, Artificial Sequence
  Description of Artificial Sequence: Synthetic oligonucleotide
ccaguuaaggaaacugcac

SEQ ID NO: 2224971 - RNA, 19 nt, Artificial Sequence
  Description of Artificial Sequence: Synthetic oligonucleotide
ugggaucaggugcaacauc

SEQ ID NO: 2224972 - RNA, 19 nt, Artificial Sequence
  Description of Artificial Sequence: Synthetic oligonucleotide
aggaugacgucugcugcuc

SEQ ID NO: 2224973 - RNA, 19 nt, Artificial Sequence
  Description of Artificial Sequence: Synthetic oligonucleotide
uuggucuguagagccacga

SEQ ID NO: 2224974 - RNA, 19 nt, Artificial Sequence
  Description of Artificial Sequence: Synthetic oligonucleotide
gauacccuuacauucucuu

SEQ ID NO: 2224975 - RNA, 19 nt, Artificial Sequence
  Description of Artificial Sequence: Synthetic oligonucleotide
gcuaacaagagcucuugaa

SEQ ID NO: 2224976 - RNA, 19 nt, Artificial Sequence
  Description of Artificial Sequence: Synthetic oligonucleotide
ucuguaccuaugucaggau

SEQ ID NO: 2224977 - RNA, 19 nt, Artificial Sequence
  Description of Artificial Sequence: Synthetic oligonucleotide
ugguggcagcaguugagcu

SEQ ID NO: 2224978 - RNA, 19 nt, Artificial Sequence
  Description of Artificial Sequence: Synthetic oligonucleotide
gacauaaguuuaagaggca

SEQ ID NO: 2224979 - RNA, 19 nt, Artificial Sequence
  Description of Artificial Sequence: Synthetic oligonucleotide
cauccucagcuuagcgagg

SEQ ID NO: 2224980 - RNA, 19 nt, Artificial Sequence
  Description of Artificial Sequence: Synthetic oligonucleotide
agcuauggcuuggaaauaa

SEQ ID NO: 2224981 - RNA, 19 nt, Artificial Sequence
  Description of Artificial Sequence: Synthetic oligonucleotide
gucuacuacaauagugcca

SEQ ID NO: 2224982 - RNA, 19 nt, Artificial Sequence
  Description of Artificial Sequence: Synthetic oligonucleotide
caaugggcuccaaugggca

SEQ ID NO: 2224983 - RNA, 19 nt, Artificial Sequence
  Description of Artificial Sequence: Synthetic oligonucleotide
cuacaccuauacaggugug

SEQ ID NO: 2224984 - RNA, 19 nt, Artificial Sequence
  Description of Artificial Sequence: Synthetic oligonucleotide
auagcuaacaagagcucuu

SEQ ID NO: 2224985 - RNA, 19 nt, Artificial Sequence
  Description of Artificial Sequence: Synthetic oligonucleotide
agccucagacaaacaauag

SEQ ID NO: 2224986 - RNA, 19 nt, Artificial Sequence
  Description of Artificial Sequence: Synthetic oligonucleotide
ugggcuccaaugggcaucc

SEQ ID NO: 2224987 - RNA, 19 nt, Artificial Sequence
  Description of Artificial Sequence: Synthetic oligonucleotide
gugcaacauccaguuaagg

SEQ ID NO: 2224988 - RNA, 19 nt, Artificial Sequence
  Description of Artificial Sequence: Synthetic oligonucleotide
ugcucagaccacagacagu

SEQ ID NO: 2224989 - RNA, 19 nt, Artificial Sequence
  Description of Artificial Sequence: Synthetic oligonucleotide
ugguuccaauguguuagga

SEQ ID NO: 2224990 - RNA, 19 nt, Artificial Sequence
  Description of Artificial Sequence: Synthetic oligonucleotide
caccugcucauuuucaucu

SEQ ID NO: 2224991 - RNA, 19 nt, Artificial Sequence
  Description of Artificial Sequence: Synthetic oligonucleotide
gagagaccuauagugauau

SEQ ID NO: 2224992 - RNA, 19 nt, Artificial Sequence
  Description of Artificial Sequence: Synthetic oligonucleotide
ggugcaacauccaguuaag

SEQ ID NO: 2224993 - RNA, 19 nt, Artificial Sequence
  Description of Artificial Sequence: Synthetic oligonucleotide
aacucacauuucaauuuua

SEQ ID NO: 2224994 - RNA, 19 nt, Artificial Sequence
  Description of Artificial Sequence: Synthetic oligonucleotide
uuauagcaacugugcaauu

SEQ ID NO: 2224995 - RNA, 19 nt, Artificial Sequence
  Description of Artificial Sequence: Synthetic oligonucleotide
gaggcaggagugaugugca

SEQ ID NO: 2224996 - RNA, 19 nt, Artificial Sequence
  Description of Artificial Sequence: Synthetic oligonucleotide
ucgcuaucugcgucagcca

SEQ ID NO: 2224997 - RNA, 19 nt, Artificial Sequence
  Description of Artificial Sequence: Synthetic oligonucleotide
guaccuaugucaggaugac

SEQ ID NO: 2224998 - RNA, 19 nt, Artificial Sequence
  Description of Artificial Sequence: Synthetic oligonucleotide
acaccuauacagguguguu

SEQ ID NO: 2224999 - RNA, 19 nt, Artificial Sequence
  Description of Artificial Sequence: Synthetic oligonucleotide
cuccaaugggcauccaaaa

SEQ ID NO: 2225000 - RNA, 19 nt, Artificial Sequence
  Description of Artificial Sequence: Synthetic oligonucleotide
cacgacucagaagaacuca

SEQ ID NO: 2225001 - RNA, 19 nt, Artificial Sequence
  Description of Artificial Sequence: Synthetic oligonucleotide
auacagaggcacugucuuu

SEQ ID NO: 2225002 - RNA, 19 nt, Artificial Sequence
  Description of Artificial Sequence: Synthetic oligonucleotide
ucauugaauugugcagaua

SEQ ID NO: 2225003 - RNA, 19 nt, Artificial Sequence
  Description of Artificial Sequence: Synthetic oligonucleotide
ugguauuggcagacauuuu

SEQ ID NO: 2225004 - RNA, 19 nt, Artificial Sequence
  Description of Artificial Sequence: Synthetic oligonucleotide
auccucagcuuagcgagga

SEQ ID NO: 2225005 - RNA, 19 nt, Artificial Sequence
  Description of Artificial Sequence: Synthetic oligonucleotide
agaccacagacaguuuuau

SEQ ID NO: 2225006 - RNA, 19 nt, Artificial Sequence
  Description of Artificial Sequence: Synthetic oligonucleotide
aaugggcauccaaaagcua

SEQ ID NO: 2225007 - RNA, 19 nt, Artificial Sequence
  Description of Artificial Sequence: Synthetic oligonucleotide
aguugagcuguuggccuug

SEQ ID NO: 2225008 - RNA, 19 nt, Artificial Sequence
  Description of Artificial Sequence: Synthetic oligonucleotide
gagugucuacuacaauagu

SEQ ID NO: 2225009 - RNA, 19 nt, Artificial Sequence
  Description of Artificial Sequence: Synthetic oligonucleotide
gacaccugcucauuuucau

SEQ ID NO: 2225010 - RNA, 19 nt, Artificial Sequence
  Description of Artificial Sequence: Synthetic oligonucleotide
ucccaccugagugucuacu

SEQ ID NO: 2225011 - RNA, 19 nt, Artificial Sequence
  Description of Artificial Sequence: Synthetic oligonucleotide
agacaguuuuauagccuca

SEQ ID NO: 2225012 - RNA, 19 nt, Artificial Sequence
  Description of Artificial Sequence: Synthetic oligonucleotide
gagcuuaaauguaguccga

SEQ ID NO: 2225013 - RNA, 19 nt, Artificial Sequence
  Description of Artificial Sequence: Synthetic oligonucleotide
acgacucagaagaacucau

SEQ ID NO: 2225014 - RNA, 19 nt, Artificial Sequence
  Description of Artificial Sequence: Synthetic oligonucleotide
gugcaaaguguaggcuggg

SEQ ID NO: 2225015 - RNA, 19 nt, Artificial Sequence
  Description of Artificial Sequence: Synthetic oligonucleotide
ccuauacagguguguuucc

SEQ ID NO: 2225016 - RNA, 19 nt, Artificial Sequence
  Description of Artificial Sequence: Synthetic oligonucleotide
ccugacuuccaaugggcuc

SEQ ID NO: 2225017 - RNA, 19 nt, Artificial Sequence
  Description of Artificial Sequence: Synthetic oligonucleotide
acgagcucuuguccaugcu

SEQ ID NO: 2225018 - RNA, 19 nt, Artificial Sequence
  Description of Artificial Sequence: Synthetic oligonucleotide
cagaccacagacaguuuua

SEQ ID NO: 2225019 - RNA, 19 nt, Artificial Sequence
  Description of Artificial Sequence: Synthetic oligonucleotide
gguguguuucccaccugag

SEQ ID NO: 2225020 - RNA, 19 nt, Artificial Sequence
  Description of Artificial Sequence: Synthetic oligonucleotide
guuaggagaugugguaaua

SEQ ID NO: 2225021 - RNA, 19 nt, Artificial Sequence
  Description of Artificial Sequence: Synthetic oligonucleotide
augacgucugcugcucaga

SEQ ID NO: 2225022 - RNA, 19 nt, Artificial Sequence
  Description of Artificial Sequence: Synthetic oligonucleotide
gaugagcaggcugcucaca

SEQ ID NO: 2225023 - RNA, 19 nt, Artificial Sequence
  Description of Artificial Sequence: Synthetic oligonucleotide
cugcuucgcuaucugcguc

SEQ ID NO: 2225024 - RNA, 19 nt, Artificial Sequence
  Description of Artificial Sequence: Synthetic oligonucleotide
cuaugucaggaugacgucu

SEQ ID NO: 2225025 - RNA, 19 nt, Artificial Sequence
  Description of Artificial Sequence: Synthetic oligonucleotide
ggaaaccccaggguuggug

SEQ ID NO: 2225026 - RNA, 19 nt, Artificial Sequence
  Description of Artificial Sequence: Synthetic oligonucleotide
ugcucacacuacaccuaua

SEQ ID NO: 2225027 - RNA, 19 nt, Artificial Sequence
  Description of Artificial Sequence: Synthetic oligonucleotide
uccucagcuuagcgaggaa

SEQ ID NO: 2225028 - RNA, 19 nt, Artificial Sequence
  Description of Artificial Sequence: Synthetic oligonucleotide
cucugagcuuaaauguagu

SEQ ID NO: 2225029 - RNA, 19 nt, Artificial Sequence
  Description of Artificial Sequence: Synthetic oligonucleotide
gaagcacgacucagaagaa

SEQ ID NO: 2225030 - RNA, 19 nt, Artificial Sequence
  Description of Artificial Sequence: Synthetic oligonucleotide
ccuaugucaggaugacguc

SEQ ID NO: 2225031 - RNA, 19 nt, Artificial Sequence
  Description of Artificial Sequence: Synthetic oligonucleotide
guguguuucccaccugagu

SEQ ID NO: 2225032 - RNA, 19 nt, Artificial Sequence
  Description of Artificial Sequence: Synthetic oligonucleotide
cuugguauuggcagacauu

SEQ ID NO: 2225033 - RNA, 19 nt, Artificial Sequence
  Description of Artificial Sequence: Synthetic oligonucleotide
cuucgcuaucugcgucagc

SEQ ID NO: 2225034 - RNA, 19 nt, Artificial Sequence
  Description of Artificial Sequence: Synthetic oligonucleotide
agagaccuauagugauaua

SEQ ID NO: 2225035 - RNA, 19 nt, Artificial Sequence
  Description of Artificial Sequence: Synthetic oligonucleotide
cuguagagccacgagcucu

SEQ ID NO: 2225036 - RNA, 19 nt, Artificial Sequence
  Description of Artificial Sequence: Synthetic oligonucleotide
gcaguugagcuguuggccu

SEQ ID NO: 2225037 - RNA, 19 nt, Artificial Sequence
  Description of Artificial Sequence: Synthetic oligonucleotide
uucccaccugagugucuac

SEQ ID NO: 2225038 - RNA, 19 nt, Artificial Sequence
  Description of Artificial Sequence: Synthetic oligonucleotide
gcuccaaugggcauccaaa

SEQ ID NO: 2225039 - RNA, 19 nt, Artificial Sequence
  Description of Artificial Sequence: Synthetic oligonucleotide
gcaaaguguaggcugggau

SEQ ID NO: 2225040 - RNA, 19 nt, Artificial Sequence
  Description of Artificial Sequence: Synthetic oligonucleotide
gucugcugcucagaccaca

SEQ ID NO: 2225041 - RNA, 19 nt, Artificial Sequence
  Description of Artificial Sequence: Synthetic oligonucleotide
gcucagaccacagacaguu

SEQ ID NO: 2225042 - RNA, 19 nt, Artificial Sequence
  Description of Artificial Sequence: Synthetic oligonucleotide
gggcauccaaaagcuagac

SEQ ID NO: 2225043 - RNA, 19 nt, Artificial Sequence
  Description of Artificial Sequence: Synthetic oligonucleotide
caggaugccuuacaaucau

SEQ ID NO: 2225044 - RNA, 19 nt, Artificial Sequence
  Description of Artificial Sequence: Synthetic oligonucleotide
cuacuacaauagugccaca

SEQ ID NO: 2225045 - RNA, 19 nt, Artificial Sequence
  Description of Artificial Sequence: Synthetic oligonucleotide
caagacuauccuugguauu

SEQ ID NO: 2225046 - RNA, 19 nt, Artificial Sequence
  Description of Artificial Sequence: Synthetic oligonucleotide
ggggcgaacucugagcuua

SEQ ID NO: 2225047 - RNA, 19 nt, Artificial Sequence
  Description of Artificial Sequence: Synthetic oligonucleotide
ggcauccaaaagcuagacu

SEQ ID NO: 2225048 - RNA, 19 nt, Artificial Sequence
  Description of Artificial Sequence: Synthetic oligonucleotide
ggcuccaaugggcauccaa

SEQ ID NO: 2225049 - RNA, 19 nt, Artificial Sequence
  Description of Artificial Sequence: Synthetic oligonucleotide
gcuucgcuaucugcgucag

SEQ ID NO: 2225050 - RNA, 19 nt, Artificial Sequence
  Description of Artificial Sequence: Synthetic oligonucleotide
guccgaggcaggagugaug

SEQ ID NO: 2225051 - RNA, 19 nt, Artificial Sequence
  Description of Artificial Sequence: Synthetic oligonucleotide
cgcuaucugcgucagccac

SEQ ID NO: 2225052 - RNA, 19 nt, Artificial Sequence
  Description of Artificial Sequence: Synthetic oligonucleotide
gccuuacaaucauugaauu

SEQ ID NO: 2225053 - RNA, 19 nt, Artificial Sequence
  Description of Artificial Sequence: Synthetic oligonucleotide
ggaugacgucugcugcuca

SEQ ID NO: 2225054 - RNA, 19 nt, Artificial Sequence
  Description of Artificial Sequence: Synthetic oligonucleotide
gcacgacucagaagaacuc

SEQ ID NO: 2225055 - RNA, 19 nt, Artificial Sequence
  Description of Artificial Sequence: Synthetic oligonucleotide
cugcucacacuacaccuau

SEQ ID NO: 2225056 - RNA, 19 nt, Artificial Sequence
  Description of Artificial Sequence: Synthetic oligonucleotide
gcgucagccacaucugcua

SEQ ID NO: 2225057 - RNA, 19 nt, Artificial Sequence
  Description of Artificial Sequence: Synthetic oligonucleotide
gcgaacucugagcuuaaau

SEQ ID NO: 2225058 - RNA, 19 nt, Artificial Sequence
  Description of Artificial Sequence: Synthetic oligonucleotide
aggaugccuuacaaucauu

SEQ ID NO: 2225059 - RNA, 19 nt, Artificial Sequence
  Description of Artificial Sequence: Synthetic oligonucleotide
gcuuguuacaggaugccuu

SEQ ID NO: 2225060 - RNA, 19 nt, Artificial Sequence
  Description of Artificial Sequence: Synthetic oligonucleotide
gcgaggaaaccccaggguu

SEQ ID NO: 2225061 - RNA, 19 nt, Artificial Sequence
  Description of Artificial Sequence: Synthetic oligonucleotide
gcuuagcgaggaaacccca

SEQ ID NO: 2225062 - RNA, 19 nt, Artificial Sequence
  Description of Artificial Sequence: Synthetic oligonucleotide
ccaauguguuaggagaugu

SEQ ID NO: 2225063 - RNA, 19 nt, Artificial Sequence
  Description of Artificial Sequence: Synthetic oligonucleotide
gccacaucucuguaccuau

SEQ ID NO: 2225064 - RNA, 19 nt, Artificial Sequence
  Description of Artificial Sequence: Synthetic oligonucleotide
cagaggcacugucuuucua

SEQ ID NO: 2225065 - RNA, 19 nt, Artificial Sequence
  Description of Artificial Sequence: Synthetic oligonucleotide
ccucagcuuagcgaggaaa

SEQ ID NO: 2225066 - RNA, 19 nt, Artificial Sequence
  Description of Artificial Sequence: Synthetic oligonucleotide
caggagugaugugcaaagu

SEQ ID NO: 2225067 - RNA, 19 nt, Artificial Sequence
  Description of Artificial Sequence: Synthetic oligonucleotide
cacuaucuuuaaagugauu

SEQ ID NO: 2225068 - RNA, 19 nt, Artificial Sequence
  Description of Artificial Sequence: Synthetic oligonucleotide
caguugagcuguuggccuu

SEQ ID NO: 2225069 - RNA, 19 nt, Artificial Sequence
  Description of Artificial Sequence: Synthetic oligonucleotide
ccacgagcucuuguccaug

SEQ ID NO: 2225070 - RNA, 19 nt, Artificial Sequence
  Description of Artificial Sequence: Synthetic oligonucleotide
cuguuggccuuggucugua

SEQ ID NO: 2225071 - RNA, 19 nt, Artificial Sequence
  Description of Artificial Sequence: Synthetic oligonucleotide
gcuauggcuuggaaauaau

SEQ ID NO: 2225072 - RNA, 19 nt, Artificial Sequence
  Description of Artificial Sequence: Synthetic oligonucleotide
cucagaccacagacaguuu

SEQ ID NO: 2225073 - RNA, 19 nt, Artificial Sequence
  Description of Artificial Sequence: Synthetic oligonucleotide
gacuuccaaugggcuccaa

SEQ ID NO: 2225074 - RNA, 19 nt, Artificial Sequence
  Description of Artificial Sequence: Synthetic oligonucleotide
cccaagcuauggcuuggaa

SEQ ID NO: 2225075 - RNA, 19 nt, Artificial Sequence
  Description of Artificial Sequence: Synthetic oligonucleotide
ccgaggcaggagugaugug

SEQ ID NO: 2225076 - RNA, 19 nt, Artificial Sequence
  Description of Artificial Sequence: Synthetic oligonucleotide
gcccaagcuauggcuugga

SEQ ID NO: 2225077 - RNA, 19 nt, Artificial Sequence
  Description of Artificial Sequence: Synthetic oligonucleotide
ggcgaacucugagcuuaaa

SEQ ID NO: 2225078 - RNA, 19 nt, Artificial Sequence
  Description of Artificial Sequence: Synthetic oligonucleotide
cugcagacaccugcucauu

SEQ ID NO: 2225079 - RNA, 19 nt, Artificial Sequence
  Description of Artificial Sequence: Synthetic oligonucleotide
gggcgaacucugagcuuaa

SEQ ID NO: 2225080 - RNA, 19 nt, Artificial Sequence
  Description of Artificial Sequence: Synthetic oligonucleotide
ccaugaugagcaggcugcu

SEQ ID NO: 2225081 - RNA, 19 nt, Artificial Sequence
  Description of Artificial Sequence: Synthetic oligonucleotide
gggcuccaaugggcaucca

SEQ ID NO: 2225082 - RNA, 19 nt, Artificial Sequence
  Description of Artificial Sequence: Synthetic oligonucleotide
aagcuuaaaauuuauacag

SEQ ID NO: 2225083 - RNA, 19 nt, Artificial Sequence
  Description of Artificial Sequence: Synthetic oligonucleotide
aauuuuaccacucugcucu

SEQ ID NO: 2225084 - RNA, 19 nt, Artificial Sequence
  Description of Artificial Sequence: Synthetic oligonucleotide
aaauauguucucuagauca

SEQ ID NO: 2225085 - RNA, 19 nt, Artificial Sequence
  Description of Artificial Sequence: Synthetic oligonucleotide
ucugcaaacacuaaaagac

SEQ ID NO: 2225086 - RNA, 19 nt, Artificial Sequence
  Description of Artificial Sequence: Synthetic oligonucleotide
ugagacuuuaaaaugagcc

SEQ ID NO: 2225087 - RNA, 19 nt, Artificial Sequence
  Description of Artificial Sequence: Synthetic oligonucleotide
ugagaugcaauucaugacg

SEQ ID NO: 2225088 - RNA, 19 nt, Artificial Sequence
  Description of Artificial Sequence: Synthetic oligonucleotide
uauacagauauucaaagga

SEQ ID NO: 2225089 - RNA, 19 nt, Artificial Sequence
  Description of Artificial Sequence: Synthetic oligonucleotide
aacacuaaaagacacacau

SEQ ID NO: 2225090 - RNA, 19 nt, Artificial Sequence
  Description of Artificial Sequence: Synthetic oligonucleotide
cuaaaagacacacauuugg

SEQ ID NO: 2225091 - RNA, 19 nt, Artificial Sequence
  Description of Artificial Sequence: Synthetic oligonucleotide
aaugugaugaaucccaggu

SEQ ID NO: 2225092 - RNA, 19 nt, Artificial Sequence
  Description of Artificial Sequence: Synthetic oligonucleotide
aaaugggacagauacaugu

SEQ ID NO: 2225093 - RNA, 19 nt, Artificial Sequence
  Description of Artificial Sequence: Synthetic oligonucleotide
uagaucagcaguuauauca

SEQ ID NO: 2225094 - RNA, 19 nt, Artificial Sequence
  Description of Artificial Sequence: Synthetic oligonucleotide
ggaauuucuaaacaaaugg

SEQ ID NO: 2225095 - RNA, 19 nt, Artificial Sequence
  Description of Artificial Sequence: Synthetic oligonucleotide
cuucauaucuuucaaaagc

SEQ ID NO: 2225096 - RNA, 19 nt, Artificial Sequence
  Description of Artificial Sequence: Synthetic oligonucleotide
aacauuuucaacuuuccau

SEQ ID NO: 2225097 - RNA, 19 nt, Artificial Sequence
  Description of Artificial Sequence: Synthetic oligonucleotide
uucuauucaccuaaggaag

SEQ ID NO: 2225098 - RNA, 19 nt, Artificial Sequence
  Description of Artificial Sequence: Synthetic oligonucleotide
aauaauuuaguaacucuuc

SEQ ID NO: 2225099 - RNA, 19 nt, Artificial Sequence
  Description of Artificial Sequence: Synthetic oligonucleotide
acagcauacaaagagauuc

SEQ ID NO: 2225100 - RNA, 19 nt, Artificial Sequence
  Description of Artificial Sequence: Synthetic oligonucleotide
ucaaaugugaugaauccca

SEQ ID NO: 2225101 - RNA, 19 nt, Artificial Sequence
  Description of Artificial Sequence: Synthetic oligonucleotide
aagaaauaacuguuuuaac

SEQ ID NO: 2225102 - RNA, 19 nt, Artificial Sequence
  Description of Artificial Sequence: Synthetic oligonucleotide
ucugcugacaaauaaagaa

SEQ ID NO: 2225103 - RNA, 19 nt, Artificial Sequence
  Description of Artificial Sequence: Synthetic oligonucleotide
auggaauaaaauuuuacca

SEQ ID NO: 2225104 - RNA, 19 nt, Artificial Sequence
  Description of Artificial Sequence: Synthetic oligonucleotide
aauaaaauuuuaccacucu

SEQ ID NO: 2225105 - RNA, 19 nt, Artificial Sequence
  Description of Artificial Sequence: Synthetic oligonucleotide
aguuauaucaaaugugaug

SEQ ID NO: 2225106 - RNA, 19 nt, Artificial Sequence
  Description of Artificial Sequence: Synthetic oligonucleotide
cucaacacaaucuuguccc

SEQ ID NO: 2225107 - RNA, 19 nt, Artificial Sequence
  Description of Artificial Sequence: Synthetic oligonucleotide
uguaaaccagacuucaaag

SEQ ID NO: 2225108 - RNA, 19 nt, Artificial Sequence
  Description of Artificial Sequence: Synthetic oligonucleotide
aauuuaguaacucuucguu

SEQ ID NO: 2225109 - RNA, 19 nt, Artificial Sequence
  Description of Artificial Sequence: Synthetic oligonucleotide
caaauucagaauaauuuag

SEQ ID NO: 2225110 - RNA, 19 nt, Artificial Sequence
  Description of Artificial Sequence: Synthetic oligonucleotide
ugaguugagacuuuaaaau

SEQ ID NO: 2225111 - RNA, 19 nt, Artificial Sequence
  Description of Artificial Sequence: Synthetic oligonucleotide
guuauaucaaaugugauga

SEQ ID NO: 2225112 - RNA, 19 nt, Artificial Sequence
  Description of Artificial Sequence: Synthetic oligonucleotide
acaacauuccaagauagcg

SEQ ID NO: 2225113 - RNA, 19 nt, Artificial Sequence
  Description of Artificial Sequence: Synthetic oligonucleotide
gaugagaugcaauucauga

SEQ ID NO: 2225114 - RNA, 19 nt, Artificial Sequence
  Description of Artificial Sequence: Synthetic oligonucleotide
aauuccagcauuugguaca

SEQ ID NO: 2225115 - RNA, 19 nt, Artificial Sequence
  Description of Artificial Sequence: Synthetic oligonucleotide
uuuacagcauacaaagaga

SEQ ID NO: 2225116 - RNA, 19 nt, Artificial Sequence
  Description of Artificial Sequence: Synthetic oligonucleotide
aagauuuuacagcauacaa

SEQ ID NO: 2225117 - RNA, 19 nt, Artificial Sequence
  Description of Artificial Sequence: Synthetic oligonucleotide
ucaaauauguucucuagau

SEQ ID NO: 2225118 - RNA, 19 nt, Artificial Sequence
  Description of Artificial Sequence: Synthetic oligonucleotide
uuuucaacuuuccauggca

SEQ ID NO: 2225119 - RNA, 19 nt, Artificial Sequence
  Description of Artificial Sequence: Synthetic oligonucleotide
uacagauauucaaaggagc

SEQ ID NO: 2225120 - RNA, 19 nt, Artificial Sequence
  Description of Artificial Sequence: Synthetic oligonucleotide
ucaaagauccacaggggag

SEQ ID NO: 2225121 - RNA, 19 nt, Artificial Sequence
  Description of Artificial Sequence: Synthetic oligonucleotide
ucaaauucagaauaauuua

SEQ ID NO: 2225122 - RNA, 19 nt, Artificial Sequence
  Description of Artificial Sequence: Synthetic oligonucleotide
agaauaauuuaguaacucu

SEQ ID NO: 2225123 - RNA, 19 nt, Artificial Sequence
  Description of Artificial Sequence: Synthetic oligonucleotide
auaucaaaugugaugaauc

SEQ ID NO: 2225124 - RNA, 19 nt, Artificial Sequence
  Description of Artificial Sequence: Synthetic oligonucleotide
gaagacaaggauuauggga

SEQ ID NO: 2225125 - RNA, 19 nt, Artificial Sequence
  Description of Artificial Sequence: Synthetic oligonucleotide
uuuagcaugauccgcgaga

SEQ ID NO: 2225126 - RNA, 19 nt, Artificial Sequence
  Description of Artificial Sequence: Synthetic oligonucleotide
aaggcgaacagggaguucg

SEQ ID NO: 2225127 - RNA, 19 nt, Artificial Sequence
  Description of Artificial Sequence: Synthetic oligonucleotide
uuuaucuggaaaugggaca

SEQ ID NO: 2225128 - RNA, 19 nt, Artificial Sequence
  Description of Artificial Sequence: Synthetic oligonucleotide
caugcaaacaaacauuuuc

SEQ ID NO: 2225129 - RNA, 19 nt, Artificial Sequence
  Description of Artificial Sequence: Synthetic oligonucleotide
agauucuuggucuuuggag

SEQ ID NO: 2225130 - RNA, 19 nt, Artificial Sequence
  Description of Artificial Sequence: Synthetic oligonucleotide
uuuaguaacucuucguuau

SEQ ID NO: 2225131 - RNA, 19 nt, Artificial Sequence
  Description of Artificial Sequence: Synthetic oligonucleotide
gacgacuugguucagagca

SEQ ID NO: 2225132 - RNA, 19 nt, Artificial Sequence
  Description of Artificial Sequence: Synthetic oligonucleotide
uucaagaaggcaauccaug

SEQ ID NO: 2225133 - RNA, 19 nt, Artificial Sequence
  Description of Artificial Sequence: Synthetic oligonucleotide
guagaauuccagcauuugg

SEQ ID NO: 2225134 - RNA, 19 nt, Artificial Sequence
  Description of Artificial Sequence: Synthetic oligonucleotide
cauauuuaucuggaaaugg

SEQ ID NO: 2225135 - RNA, 19 nt, Artificial Sequence
  Description of Artificial Sequence: Synthetic oligonucleotide
auuuaucuggaaaugggac

SEQ ID NO: 2225136 - RNA, 19 nt, Artificial Sequence
  Description of Artificial Sequence: Synthetic oligonucleotide
auuaucaccucucaacaca

SEQ ID NO: 2225137 - RNA, 19 nt, Artificial Sequence
  Description of Artificial Sequence: Synthetic oligonucleotide
uucaaaagcagcuucggau

SEQ ID NO: 2225138 - RNA, 19 nt, Artificial Sequence
  Description of Artificial Sequence: Synthetic oligonucleotide
gaguugagacuuuaaaaug

SEQ ID NO: 2225139 - RNA, 19 nt, Artificial Sequence
  Description of Artificial Sequence: Synthetic oligonucleotide
ucaagaaggcaauccaugc

SEQ ID NO: 2225140 - RNA, 19 nt, Artificial Sequence
  Description of Artificial Sequence: Synthetic oligonucleotide
uucaaagauccacagggga

SEQ ID NO: 2225141 - RNA, 19 nt, Artificial Sequence
  Description of Artificial Sequence: Synthetic oligonucleotide
agugaagucuucuacauuu

SEQ ID NO: 2225142 - RNA, 19 nt, Artificial Sequence
  Description of Artificial Sequence: Synthetic oligonucleotide
uguucucuagaucagcagu

SEQ ID NO: 2225143 - RNA, 19 nt, Artificial Sequence
  Description of Artificial Sequence: Synthetic oligonucleotide
caagauagcgucaagguga

SEQ ID NO: 2225144 - RNA, 19 nt, Artificial Sequence
  Description of Artificial Sequence: Synthetic oligonucleotide
agugggacaaauccaguuc

SEQ ID NO: 2225145 - RNA, 19 nt, Artificial Sequence
  Description of Artificial Sequence: Synthetic oligonucleotide
aagacaaggauuaugggaa

SEQ ID NO: 2225146 - RNA, 19 nt, Artificial Sequence
  Description of Artificial Sequence: Synthetic oligonucleotide
uaugggaauuucuaaacaa

SEQ ID NO: 2225147 - RNA, 19 nt, Artificial Sequence
  Description of Artificial Sequence: Synthetic oligonucleotide
uauguucucuagaucagca

SEQ ID NO: 2225148 - RNA, 19 nt, Artificial Sequence
  Description of Artificial Sequence: Synthetic oligonucleotide
aaauucagaauaauuuagu

SEQ ID NO: 2225149 - RNA, 19 nt, Artificial Sequence
  Description of Artificial Sequence: Synthetic oligonucleotide
uuacagcauacaaagagau

SEQ ID NO: 2225150 - RNA, 19 nt, Artificial Sequence
  Description of Artificial Sequence: Synthetic oligonucleotide
uuaacauuccaaucaaaua

SEQ ID NO: 2225151 - RNA, 19 nt, Artificial Sequence
  Description of Artificial Sequence: Synthetic oligonucleotide
uuuuguaaaccagacuuca

SEQ ID NO: 2225152 - RNA, 19 nt, Artificial Sequence
  Description of Artificial Sequence: Synthetic oligonucleotide
uucguuauuucauauuuau

SEQ ID NO: 2225153 - RNA, 19 nt, Artificial Sequence
  Description of Artificial Sequence: Synthetic oligonucleotide
aucgugacgaccuucccuc

SEQ ID NO: 2225154 - RNA, 19 nt, Artificial Sequence
  Description of Artificial Sequence: Synthetic oligonucleotide
uaauuuaguaacucuucgu

SEQ ID NO: 2225155 - RNA, 19 nt, Artificial Sequence
  Description of Artificial Sequence: Synthetic oligonucleotide
uuguaaaccagacuucaaa

SEQ ID NO: 2225156 - RNA, 19 nt, Artificial Sequence
  Description of Artificial Sequence: Synthetic oligonucleotide
aguaacucuucguuauuuc

SEQ ID NO: 2225157 - RNA, 19 nt, Artificial Sequence
  Description of Artificial Sequence: Synthetic oligonucleotide
aucaccucucaacacaauc

SEQ ID NO: 2225158 - RNA, 19 nt, Artificial Sequence
  Description of Artificial Sequence: Synthetic oligonucleotide
gacaaauccaguucaagaa

SEQ ID NO: 2225159 - RNA, 19 nt, Artificial Sequence
  Description of Artificial Sequence: Synthetic oligonucleotide
caaacauuuucaacuuucc

SEQ ID NO: 2225160 - RNA, 19 nt, Artificial Sequence
  Description of Artificial Sequence: Synthetic oligonucleotide
gauuaugggaauuucuaaa

SEQ ID NO: 2225161 - RNA, 19 nt, Artificial Sequence
  Description of Artificial Sequence: Synthetic oligonucleotide
aaauaacuguuuuaacauu

SEQ ID NO: 2225162 - RNA, 19 nt, Artificial Sequence
  Description of Artificial Sequence: Synthetic oligonucleotide
uuccaagauagcgucaagg

SEQ ID NO: 2225163 - RNA, 19 nt, Artificial Sequence
  Description of Artificial Sequence: Synthetic oligonucleotide
gucacuucuuucucuaggg

SEQ ID NO: 2225164 - RNA, 19 nt, Artificial Sequence
  Description of Artificial Sequence: Synthetic oligonucleotide
ucauauuuaucuggaaaug

SEQ ID NO: 2225165 - RNA, 19 nt, Artificial Sequence
  Description of Artificial Sequence: Synthetic oligonucleotide
ucaccucucaacacaaucu

SEQ ID NO: 2225166 - RNA, 19 nt, Artificial Sequence
  Description of Artificial Sequence: Synthetic oligonucleotide
ugauccugucaccagaggu

SEQ ID NO: 2225167 - RNA, 19 nt, Artificial Sequence
  Description of Artificial Sequence: Synthetic oligonucleotide
uccaagauagcgucaaggu

SEQ ID NO: 2225168 - RNA, 19 nt, Artificial Sequence
  Description of Artificial Sequence: Synthetic oligonucleotide
ucuauucaccuaaggaaga

SEQ ID NO: 2225169 - RNA, 19 nt, Artificial Sequence
  Description of Artificial Sequence: Synthetic oligonucleotide
cagauacauguccugaucc

SEQ ID NO: 2225170 - RNA, 19 nt, Artificial Sequence
  Description of Artificial Sequence: Synthetic oligonucleotide
ucuagaucagcaguuauau

SEQ ID NO: 2225171 - RNA, 19 nt, Artificial Sequence
  Description of Artificial Sequence: Synthetic oligonucleotide
ugguacaacauuccaagau

SEQ ID NO: 2225172 - RNA, 19 nt, Artificial Sequence
  Description of Artificial Sequence: Synthetic oligonucleotide
uucaucgugacgaccuucc

SEQ ID NO: 2225173 - RNA, 19 nt, Artificial Sequence
  Description of Artificial Sequence: Synthetic oligonucleotide
auacagauauucaaaggag

SEQ ID NO: 2225174 - RNA, 19 nt, Artificial Sequence
  Description of Artificial Sequence: Synthetic oligonucleotide
gacuucaaagauccacagg

SEQ ID NO: 2225175 - RNA, 19 nt, Artificial Sequence
  Description of Artificial Sequence: Synthetic oligonucleotide
uccaugcaaacaaacauuu

SEQ ID NO: 2225176 - RNA, 19 nt, Artificial Sequence
  Description of Artificial Sequence: Synthetic oligonucleotide
ucugcucuuuuguaaacca

SEQ ID NO: 2225177 - RNA, 19 nt, Artificial Sequence
  Description of Artificial Sequence: Synthetic oligonucleotide
aaugggacagauacauguc

SEQ ID NO: 2225178 - RNA, 19 nt, Artificial Sequence
  Description of Artificial Sequence: Synthetic oligonucleotide
auuugguugaguugagacu

SEQ ID NO: 2225179 - RNA, 19 nt, Artificial Sequence
  Description of Artificial Sequence: Synthetic oligonucleotide
uugagacuuuaaaaugagc

SEQ ID NO: 2225180 - RNA, 19 nt, Artificial Sequence
  Description of Artificial Sequence: Synthetic oligonucleotide
gaugaagcagccgaaggug

SEQ ID NO: 2225181 - RNA, 19 nt, Artificial Sequence
  Description of Artificial Sequence: Synthetic oligonucleotide
uccauggcaaagcuuaaaa

SEQ ID NO: 2225182 - RNA, 19 nt, Artificial Sequence
  Description of Artificial Sequence: Synthetic oligonucleotide
ucagcgagaaggcgaacag

SEQ ID NO: 2225183 - RNA, 19 nt, Artificial Sequence
  Description of Artificial Sequence: Synthetic oligonucleotide
aaggaagacaaggauuaug

SEQ ID NO: 2225184 - RNA, 19 nt, Artificial Sequence
  Description of Artificial Sequence: Synthetic oligonucleotide
cuaaggaagacaaggauua

SEQ ID NO: 2225185 - RNA, 19 nt, Artificial Sequence
  Description of Artificial Sequence: Synthetic oligonucleotide
ucuagggccagugaagucu

SEQ ID NO: 2225186 - RNA, 19 nt, Artificial Sequence
  Description of Artificial Sequence: Synthetic oligonucleotide
gagacgugcagccgcacgg

SEQ ID NO: 2225187 - RNA, 19 nt, Artificial Sequence
  Description of Artificial Sequence: Synthetic oligonucleotide
gauuaucaccucucaacac

SEQ ID NO: 2225188 - RNA, 19 nt, Artificial Sequence
  Description of Artificial Sequence: Synthetic oligonucleotide
agcgagaaggcgaacaggg

SEQ ID NO: 2225189 - RNA, 19 nt, Artificial Sequence
  Description of Artificial Sequence: Synthetic oligonucleotide
gaauuccagcauuugguac

SEQ ID NO: 2225190 - RNA, 19 nt, Artificial Sequence
  Description of Artificial Sequence: Synthetic oligonucleotide
ugcaauucaugacguauaa

SEQ ID NO: 2225191 - RNA, 19 nt, Artificial Sequence
  Description of Artificial Sequence: Synthetic oligonucleotide
agaaagcuucuauucaccu

SEQ ID NO: 2225192 - RNA, 19 nt, Artificial Sequence
  Description of Artificial Sequence: Synthetic oligonucleotide
uaacucuucguuauuucau

SEQ ID NO: 2225193 - RNA, 19 nt, Artificial Sequence
  Description of Artificial Sequence: Synthetic oligonucleotide
caaaggacgacuugguuca

SEQ ID NO: 2225194 - RNA, 19 nt, Artificial Sequence
  Description of Artificial Sequence: Synthetic oligonucleotide
uuuuagcaugauccgcgag

SEQ ID NO: 2225195 - RNA, 19 nt, Artificial Sequence
  Description of Artificial Sequence: Synthetic oligonucleotide
cacaaucuugucccaaagg

SEQ ID NO: 2225196 - RNA, 19 nt, Artificial Sequence
  Description of Artificial Sequence: Synthetic oligonucleotide
guaaaccagacuucaaaga

SEQ ID NO: 2225197 - RNA, 19 nt, Artificial Sequence
  Description of Artificial Sequence: Synthetic oligonucleotide
aacacaaucuugucccaaa

SEQ ID NO: 2225198 - RNA, 19 nt, Artificial Sequence
  Description of Artificial Sequence: Synthetic oligonucleotide
ugaaucccaggucacuucu

SEQ ID NO: 2225199 - RNA, 19 nt, Artificial Sequence
  Description of Artificial Sequence: Synthetic oligonucleotide
uuaucaccucucaacacaa

SEQ ID NO: 2225200 - RNA, 19 nt, Artificial Sequence
  Description of Artificial Sequence: Synthetic oligonucleotide
aagauagcgucaaggugac

SEQ ID NO: 2225201 - RNA, 19 nt, Artificial Sequence
  Description of Artificial Sequence: Synthetic oligonucleotide
agagauucuuggucuuugg

SEQ ID NO: 2225202 - RNA, 19 nt, Artificial Sequence
  Description of Artificial Sequence: Synthetic oligonucleotide
augugaugaaucccagguc

SEQ ID NO: 2225203 - RNA, 19 nt, Artificial Sequence
  Description of Artificial Sequence: Synthetic oligonucleotide
auuuaguaacucuucguua

SEQ ID NO: 2225204 - RNA, 19 nt, Artificial Sequence
  Description of Artificial Sequence: Synthetic oligonucleotide
uguugaauacucugcugac

SEQ ID NO: 2225205 - RNA, 19 nt, Artificial Sequence
  Description of Artificial Sequence: Synthetic oligonucleotide
gacuuuaaaaugagccugc

SEQ ID NO: 2225206 - RNA, 19 nt, Artificial Sequence
  Description of Artificial Sequence: Synthetic oligonucleotide
aagcagccgaaggugagcg

SEQ ID NO: 2225207 - RNA, 19 nt, Artificial Sequence
  Description of Artificial Sequence: Synthetic oligonucleotide
aaagcagcuucggauuauc

SEQ ID NO: 2225208 - RNA, 19 nt, Artificial Sequence
  Description of Artificial Sequence: Synthetic oligonucleotide
agcaugauccgcgagacgu

SEQ ID NO: 2225209 - RNA, 19 nt, Artificial Sequence
  Description of Artificial Sequence: Synthetic oligonucleotide
uucaccuaaggaagacaag

SEQ ID NO: 2225210 - RNA, 19 nt, Artificial Sequence
  Description of Artificial Sequence: Synthetic oligonucleotide
aagagauucuuggucuuug

SEQ ID NO: 2225211 - RNA, 19 nt, Artificial Sequence
  Description of Artificial Sequence: Synthetic oligonucleotide
aauccaguucaagaaggca

SEQ ID NO: 2225212 - RNA, 19 nt, Artificial Sequence
  Description of Artificial Sequence: Synthetic oligonucleotide
auccgcgagacgugcagcc

SEQ ID NO: 2225213 - RNA, 19 nt, Artificial Sequence
  Description of Artificial Sequence: Synthetic oligonucleotide
augaaucccaggucacuuc

SEQ ID NO: 2225214 - RNA, 19 nt, Artificial Sequence
  Description of Artificial Sequence: Synthetic oligonucleotide
caaauauguucucuagauc

SEQ ID NO: 2225215 - RNA, 19 nt, Artificial Sequence
  Description of Artificial Sequence: Synthetic oligonucleotide
acgguguucaucgugacga

SEQ ID NO: 2225216 - RNA, 19 nt, Artificial Sequence
  Description of Artificial Sequence: Synthetic oligonucleotide
ucguuauuucauauuuauc

SEQ ID NO: 2225217 - RNA, 19 nt, Artificial Sequence
  Description of Artificial Sequence: Synthetic oligonucleotide
gaaggcaauccaugcaaac

SEQ ID NO: 2225218 - RNA, 19 nt, Artificial Sequence
  Description of Artificial Sequence: Synthetic oligonucleotide
gagacuuuaaaaugagccu

SEQ ID NO: 2225219 - RNA, 19 nt, Artificial Sequence
  Description of Artificial Sequence: Synthetic oligonucleotide
agagguagaauuccagcau

SEQ ID NO: 2225220 - RNA, 19 nt, Artificial Sequence
  Description of Artificial Sequence: Synthetic oligonucleotide
agauacauguccugauccu

SEQ ID NO: 2225221 - RNA, 19 nt, Artificial Sequence
  Description of Artificial Sequence: Synthetic oligonucleotide
aggcaauccaugcaaacaa

SEQ ID NO: 2225222 - RNA, 19 nt, Artificial Sequence
  Description of Artificial Sequence: Synthetic oligonucleotide
uuuguaaaccagacuucaa

SEQ ID NO: 2225223 - RNA, 19 nt, Artificial Sequence
  Description of Artificial Sequence: Synthetic oligonucleotide
gagaaagcuucuauucacc

SEQ ID NO: 2225224 - RNA, 19 nt, Artificial Sequence
  Description of Artificial Sequence: Synthetic oligonucleotide
cauguccugauccugucac

SEQ ID NO: 2225225 - RNA, 19 nt, Artificial Sequence
  Description of Artificial Sequence: Synthetic oligonucleotide
guugaguugagacuuuaaa

SEQ ID NO: 2225226 - RNA, 19 nt, Artificial Sequence
  Description of Artificial Sequence: Synthetic oligonucleotide
cacacauuugguugaguug

SEQ ID NO: 2225227 - RNA, 19 nt, Artificial Sequence
  Description of Artificial Sequence: Synthetic oligonucleotide
uccaguucaagaaggcaau

SEQ ID NO: 2225228 - RNA, 19 nt, Artificial Sequence
  Description of Artificial Sequence: Synthetic oligonucleotide
gacgcuccggucuuugaag

SEQ ID NO: 2225229 - RNA, 19 nt, Artificial Sequence
  Description of Artificial Sequence: Synthetic oligonucleotide
agauauucaaaggagcauu

SEQ ID NO: 2225230 - RNA, 19 nt, Artificial Sequence
  Description of Artificial Sequence: Synthetic oligonucleotide
gcagcuucggauuaucacc

SEQ ID NO: 2225231 - RNA, 19 nt, Artificial Sequence
  Description of Artificial Sequence: Synthetic oligonucleotide
agauuuuacagcauacaaa

SEQ ID NO: 2225232 - RNA, 19 nt, Artificial Sequence
  Description of Artificial Sequence: Synthetic oligonucleotide
ugauccgcgagacgugcag

SEQ ID NO: 2225233 - RNA, 19 nt, Artificial Sequence
  Description of Artificial Sequence: Synthetic oligonucleotide
acacacauuugguugaguu

SEQ ID NO: 2225234 - RNA, 19 nt, Artificial Sequence
  Description of Artificial Sequence: Synthetic oligonucleotide
agaauuccagcauuuggua

SEQ ID NO: 2225235 - RNA, 19 nt, Artificial Sequence
  Description of Artificial Sequence: Synthetic oligonucleotide
ucccuugaggccauuucca

SEQ ID NO: 2225236 - RNA, 19 nt, Artificial Sequence
  Description of Artificial Sequence: Synthetic oligonucleotide
caguucaagaaggcaaucc

SEQ ID NO: 2225237 - RNA, 19 nt, Artificial Sequence
  Description of Artificial Sequence: Synthetic oligonucleotide
accuaaggaagacaaggau

SEQ ID NO: 2225238 - RNA, 19 nt, Artificial Sequence
  Description of Artificial Sequence: Synthetic oligonucleotide
ggagaaagcuucuauucac

SEQ ID NO: 2225239 - RNA, 19 nt, Artificial Sequence
  Description of Artificial Sequence: Synthetic oligonucleotide
auguccugauccugucacc

SEQ ID NO: 2225240 - RNA, 19 nt, Artificial Sequence
  Description of Artificial Sequence: Synthetic oligonucleotide
gacgguguucaucgugacg

SEQ ID NO: 2225241 - RNA, 19 nt, Artificial Sequence
  Description of Artificial Sequence: Synthetic oligonucleotide
uccugauccugucaccaga

SEQ ID NO: 2225242 - RNA, 19 nt, Artificial Sequence
  Description of Artificial Sequence: Synthetic oligonucleotide
uuuaccacucugcucuuuu

SEQ ID NO: 2225243 - RNA, 19 nt, Artificial Sequence
  Description of Artificial Sequence: Synthetic oligonucleotide
acuaaaagacacacauuug

SEQ ID NO: 2225244 - RNA, 19 nt, Artificial Sequence
  Description of Artificial Sequence: Synthetic oligonucleotide
uauucaccuaaggaagaca

SEQ ID NO: 2225245 - RNA, 19 nt, Artificial Sequence
  Description of Artificial Sequence: Synthetic oligonucleotide
ucccaggucacuucuuucu

SEQ ID NO: 2225246 - RNA, 19 nt, Artificial Sequence
  Description of Artificial Sequence: Synthetic oligonucleotide
uaccacucugcucuuuugu

SEQ ID NO: 2225247 - RNA, 19 nt, Artificial Sequence
  Description of Artificial Sequence: Synthetic oligonucleotide
gagccugcaagauuuuaca

SEQ ID NO: 2225248 - RNA, 19 nt, Artificial Sequence
  Description of Artificial Sequence: Synthetic oligonucleotide
cacuaaaagacacacauuu

SEQ ID NO: 2225249 - RNA, 19 nt, Artificial Sequence
  Description of Artificial Sequence: Synthetic oligonucleotide
gcuucuauucaccuaagga

SEQ ID NO: 2225250 - RNA, 19 nt, Artificial Sequence
  Description of Artificial Sequence: Synthetic oligonucleotide
ggauuaucaccucucaaca

SEQ ID NO: 2225251 - RNA, 19 nt, Artificial Sequence
  Description of Artificial Sequence: Synthetic oligonucleotide
uucaacuuuccauggcaaa

SEQ ID NO: 2225252 - RNA, 19 nt, Artificial Sequence
  Description of Artificial Sequence: Synthetic oligonucleotide
uucgcgcgcgacaggacgg

SEQ ID NO: 2225253 - RNA, 19 nt, Artificial Sequence
  Description of Artificial Sequence: Synthetic oligonucleotide
ucucuagaucagcaguuau

SEQ ID NO: 2225254 - RNA, 19 nt, Artificial Sequence
  Description of Artificial Sequence: Synthetic oligonucleotide
gucaaggugacauuucugu

SEQ ID NO: 2225255 - RNA, 19 nt, Artificial Sequence
  Description of Artificial Sequence: Synthetic oligonucleotide
guucgcgcgcgacaggacg

SEQ ID NO: 2225256 - RNA, 19 nt, Artificial Sequence
  Description of Artificial Sequence: Synthetic oligonucleotide
auucaccuaaggaagacaa

SEQ ID NO: 2225257 - RNA, 19 nt, Artificial Sequence
  Description of Artificial Sequence: Synthetic oligonucleotide
gccauuuccaucaucgaag

SEQ ID NO: 2225258 - RNA, 19 nt, Artificial Sequence
  Description of Artificial Sequence: Synthetic oligonucleotide
aacagggaguucgcgcgcg

SEQ ID NO: 2225259 - RNA, 19 nt, Artificial Sequence
  Description of Artificial Sequence: Synthetic oligonucleotide
cuucggauuaucaccucuc

SEQ ID NO: 2225260 - RNA, 19 nt, Artificial Sequence
  Description of Artificial Sequence: Synthetic oligonucleotide
gcaguuauaucaaauguga

SEQ ID NO: 2225261 - RNA, 19 nt, Artificial Sequence
  Description of Artificial Sequence: Synthetic oligonucleotide
gugggacaaauccaguuca

SEQ ID NO: 2225262 - RNA, 19 nt, Artificial Sequence
  Description of Artificial Sequence: Synthetic oligonucleotide
acgcuccggucuuugaagg

SEQ ID NO: 2225263 - RNA, 19 nt, Artificial Sequence
  Description of Artificial Sequence: Synthetic oligonucleotide
gauagcgucaaggugacau

SEQ ID NO: 2225264 - RNA, 19 nt, Artificial Sequence
  Description of Artificial Sequence: Synthetic oligonucleotide
uccgacacccguccccagg

SEQ ID NO: 2225265 - RNA, 19 nt, Artificial Sequence
  Description of Artificial Sequence: Synthetic oligonucleotide
ucacgcucagcgagaaggc

SEQ ID NO: 2225266 - RNA, 19 nt, Artificial Sequence
  Description of Artificial Sequence: Synthetic oligonucleotide
auuugguacaacauuccaa

SEQ ID NO: 2225267 - RNA, 19 nt, Artificial Sequence
  Description of Artificial Sequence: Synthetic oligonucleotide
cugcaaacacuaaaagaca

SEQ ID NO: 2225268 - RNA, 19 nt, Artificial Sequence
  Description of Artificial Sequence: Synthetic oligonucleotide
ucucuagggccagugaagu

SEQ ID NO: 2225269 - RNA, 19 nt, Artificial Sequence
  Description of Artificial Sequence: Synthetic oligonucleotide
ucggauuaucaccucucaa

SEQ ID NO: 2225270 - RNA, 19 nt, Artificial Sequence
  Description of Artificial Sequence: Synthetic oligonucleotide
ccaaaggacgacuugguuc

SEQ ID NO: 2225271 - RNA, 19 nt, Artificial Sequence
  Description of Artificial Sequence: Synthetic oligonucleotide
ugacgaccuucccucgggg

SEQ ID NO: 2225272 - RNA, 19 nt, Artificial Sequence
  Description of Artificial Sequence: Synthetic oligonucleotide
gggaauuucuaaacaaaug

SEQ ID NO: 2225273 - RNA, 19 nt, Artificial Sequence
  Description of Artificial Sequence: Synthetic oligonucleotide
uuaguaacucuucguuauu

SEQ ID NO: 2225274 - RNA, 19 nt, Artificial Sequence
  Description of Artificial Sequence: Synthetic oligonucleotide
auccugucaccagagguag

SEQ ID NO: 2225275 - RNA, 19 nt, Artificial Sequence
  Description of Artificial Sequence: Synthetic oligonucleotide
ucccaaaggacgacuuggu

SEQ ID NO: 2225276 - RNA, 19 nt, Artificial Sequence
  Description of Artificial Sequence: Synthetic oligonucleotide
cauuugguacaacauucca

SEQ ID NO: 2225277 - RNA, 19 nt, Artificial Sequence
  Description of Artificial Sequence: Synthetic oligonucleotide
gugacgaccuucccucggg

SEQ ID NO: 2225278 - RNA, 19 nt, Artificial Sequence
  Description of Artificial Sequence: Synthetic oligonucleotide
gaaagcuucuauucaccua

SEQ ID NO: 2225279 - RNA, 19 nt, Artificial Sequence
  Description of Artificial Sequence: Synthetic oligonucleotide
uacagcauacaaagagauu

SEQ ID NO: 2225280 - RNA, 19 nt, Artificial Sequence
  Description of Artificial Sequence: Synthetic oligonucleotide
aggugacauuucuguuucc

SEQ ID NO: 2225281 - RNA, 19 nt, Artificial Sequence
  Description of Artificial Sequence: Synthetic oligonucleotide
agaugagaugcaauucaug

SEQ ID NO: 2225282 - RNA, 19 nt, Artificial Sequence
  Description of Artificial Sequence: Synthetic oligonucleotide
cuccggucuuugaaggcgg

SEQ ID NO: 2225283 - RNA, 19 nt, Artificial Sequence
  Description of Artificial Sequence: Synthetic oligonucleotide
cucucaacacaaucuuguc

SEQ ID NO: 2225284 - RNA, 19 nt, Artificial Sequence
  Description of Artificial Sequence: Synthetic oligonucleotide
cugucuccgacacccgucc

SEQ ID NO: 2225285 - RNA, 19 nt, Artificial Sequence
  Description of Artificial Sequence: Synthetic oligonucleotide
ucaucgugacgaccuuccc

SEQ ID NO: 2225286 - RNA, 19 nt, Artificial Sequence
  Description of Artificial Sequence: Synthetic oligonucleotide
caagaaggcaauccaugca

SEQ ID NO: 2225287 - RNA, 19 nt, Artificial Sequence
  Description of Artificial Sequence: Synthetic oligonucleotide
uaguaacucuucguuauuu

SEQ ID NO: 2225288 - RNA, 19 nt, Artificial Sequence
  Description of Artificial Sequence: Synthetic oligonucleotide
aaaagcagcuucggauuau

SEQ ID NO: 2225289 - RNA, 19 nt, Artificial Sequence
  Description of Artificial Sequence: Synthetic oligonucleotide
caaagauccacaggggaga

SEQ ID NO: 2225290 - RNA, 19 nt, Artificial Sequence
  Description of Artificial Sequence: Synthetic oligonucleotide
ugggacaaauccaguucaa

SEQ ID NO: 2225291 - RNA, 19 nt, Artificial Sequence
  Description of Artificial Sequence: Synthetic oligonucleotide
caccuaaggaagacaagga

SEQ ID NO: 2225292 - RNA, 19 nt, Artificial Sequence
  Description of Artificial Sequence: Synthetic oligonucleotide
caacauuccaagauagcgu

SEQ ID NO: 2225293 - RNA, 19 nt, Artificial Sequence
  Description of Artificial Sequence: Synthetic oligonucleotide
gaacagggaguucgcgcgc

SEQ ID NO: 2225294 - RNA, 19 nt, Artificial Sequence
  Description of Artificial Sequence: Synthetic oligonucleotide
auacauguccugauccugu

SEQ ID NO: 2225295 - RNA, 19 nt, Artificial Sequence
  Description of Artificial Sequence: Synthetic oligonucleotide
accagagguagaauuccag

SEQ ID NO: 2225296 - RNA, 19 nt, Artificial Sequence
  Description of Artificial Sequence: Synthetic oligonucleotide
cucugcugacaaauaaaga

SEQ ID NO: 2225297 - RNA, 19 nt, Artificial Sequence
  Description of Artificial Sequence: Synthetic oligonucleotide
agcagccgaaggugagcgc

SEQ ID NO: 2225298 - RNA, 19 nt, Artificial Sequence
  Description of Artificial Sequence: Synthetic oligonucleotide
cggauuaucaccucucaac

SEQ ID NO: 2225299 - RNA, 19 nt, Artificial Sequence
  Description of Artificial Sequence: Synthetic oligonucleotide
agaucagcaguuauaucaa

SEQ ID NO: 2225300 - RNA, 19 nt, Artificial Sequence
  Description of Artificial Sequence: Synthetic oligonucleotide
acacccguccccaggcucc

SEQ ID NO: 2225301 - RNA, 19 nt, Artificial Sequence
  Description of Artificial Sequence: Synthetic oligonucleotide
ggauuaugggaauuucuaa

SEQ ID NO: 2225302 - RNA, 19 nt, Artificial Sequence
  Description of Artificial Sequence: Synthetic oligonucleotide
gacgugcagccgcacgggg

SEQ ID NO: 2225303 - RNA, 19 nt, Artificial Sequence
  Description of Artificial Sequence: Synthetic oligonucleotide
acauguccugauccuguca

SEQ ID NO: 2225304 - RNA, 19 nt, Artificial Sequence
  Description of Artificial Sequence: Synthetic oligonucleotide
uggugaugaagcagccgaa

SEQ ID NO: 2225305 - RNA, 19 nt, Artificial Sequence
  Description of Artificial Sequence: Synthetic oligonucleotide
cugauccugucaccagagg

SEQ ID NO: 2225306 - RNA, 19 nt, Artificial Sequence
  Description of Artificial Sequence: Synthetic oligonucleotide
uugucccaaaggacgacuu

SEQ ID NO: 2225307 - RNA, 19 nt, Artificial Sequence
  Description of Artificial Sequence: Synthetic oligonucleotide
gauccugucaccagaggua

SEQ ID NO: 2225308 - RNA, 19 nt, Artificial Sequence
  Description of Artificial Sequence: Synthetic oligonucleotide
ucgugacgaccuucccucg

SEQ ID NO: 2225309 - RNA, 19 nt, Artificial Sequence
  Description of Artificial Sequence: Synthetic oligonucleotide
agacaaggauuaugggaau

SEQ ID NO: 2225310 - RNA, 19 nt, Artificial Sequence
  Description of Artificial Sequence: Synthetic oligonucleotide
cgaacagggaguucgcgcg

SEQ ID NO: 2225311 - RNA, 19 nt, Artificial Sequence
  Description of Artificial Sequence: Synthetic oligonucleotide
ccaagauagcgucaaggug

SEQ ID NO: 2225312 - RNA, 19 nt, Artificial Sequence
  Description of Artificial Sequence: Synthetic oligonucleotide
gaucagcaguuauaucaaa

SEQ ID NO: 2225313 - RNA, 19 nt, Artificial Sequence
  Description of Artificial Sequence: Synthetic oligonucleotide
agcuucggauuaucaccuc

SEQ ID NO: 2225314 - RNA, 19 nt, Artificial Sequence
  Description of Artificial Sequence: Synthetic oligonucleotide
cagcaguuauaucaaaugu

SEQ ID NO: 2225315 - RNA, 19 nt, Artificial Sequence
  Description of Artificial Sequence: Synthetic oligonucleotide
uucucuagaucagcaguua

SEQ ID NO: 2225316 - RNA, 19 nt, Artificial Sequence
  Description of Artificial Sequence: Synthetic oligonucleotide
aggacgguguucaucguga

SEQ ID NO: 2225317 - RNA, 19 nt, Artificial Sequence
  Description of Artificial Sequence: Synthetic oligonucleotide
cuucguuauuucauauuua

SEQ ID NO: 2225318 - RNA, 19 nt, Artificial Sequence
  Description of Artificial Sequence: Synthetic oligonucleotide
gucuccgacacccgucccc

SEQ ID NO: 2225319 - RNA, 19 nt, Artificial Sequence
  Description of Artificial Sequence: Synthetic oligonucleotide
caggacgguguucaucgug

SEQ ID NO: 2225320 - RNA, 19 nt, Artificial Sequence
  Description of Artificial Sequence: Synthetic oligonucleotide
agcgucaaggugacauuuc

SEQ ID NO: 2225321 - RNA, 19 nt, Artificial Sequence
  Description of Artificial Sequence: Synthetic oligonucleotide
ugaggccauuuccaucauc

SEQ ID NO: 2225322 - RNA, 19 nt, Artificial Sequence
  Description of Artificial Sequence: Synthetic oligonucleotide
ggugaugaagcagccgaag

SEQ ID NO: 2225323 - RNA, 19 nt, Artificial Sequence
  Description of Artificial Sequence: Synthetic oligonucleotide
auagcgucaaggugacauu

SEQ ID NO: 2225324 - RNA, 19 nt, Artificial Sequence
  Description of Artificial Sequence: Synthetic oligonucleotide
ucuccgacacccgucccca

SEQ ID NO: 2225325 - RNA, 19 nt, Artificial Sequence
  Description of Artificial Sequence: Synthetic oligonucleotide
gcauuugguacaacauucc

SEQ ID NO: 2225326 - RNA, 19 nt, Artificial Sequence
  Description of Artificial Sequence: Synthetic oligonucleotide
gcaauccaugcaaacaaac

SEQ ID NO: 2225327 - RNA, 19 nt, Artificial Sequence
  Description of Artificial Sequence: Synthetic oligonucleotide
cauuccaagauagcgucaa

SEQ ID NO: 2225328 - RNA, 19 nt, Artificial Sequence
  Description of Artificial Sequence: Synthetic oligonucleotide
uguucaucgugacgaccuu

SEQ ID NO: 2225329 - RNA, 19 nt, Artificial Sequence
  Description of Artificial Sequence: Synthetic oligonucleotide
acauuugguugaguugaga

SEQ ID NO: 2225330 - RNA, 19 nt, Artificial Sequence
  Description of Artificial Sequence: Synthetic oligonucleotide
gcgaacagggaguucgcgc

SEQ ID NO: 2225331 - RNA, 19 nt, Artificial Sequence
  Description of Artificial Sequence: Synthetic oligonucleotide
gagaugcaauucaugacgu

SEQ ID NO: 2225332 - RNA, 19 nt, Artificial Sequence
  Description of Artificial Sequence: Synthetic oligonucleotide
cagcgagaaggcgaacagg

SEQ ID NO: 2225333 - RNA, 19 nt, Artificial Sequence
  Description of Artificial Sequence: Synthetic oligonucleotide
uaaggaagacaaggauuau

SEQ ID NO: 2225334 - RNA, 19 nt, Artificial Sequence
  Description of Artificial Sequence: Synthetic oligonucleotide
agacgugcagccgcacggg

SEQ ID NO: 2225335 - RNA, 19 nt, Artificial Sequence
  Description of Artificial Sequence: Synthetic oligonucleotide
gggacaaauccaguucaag

SEQ ID NO: 2225336 - RNA, 19 nt, Artificial Sequence
  Description of Artificial Sequence: Synthetic oligonucleotide
uccgcgagacgugcagccg

SEQ ID NO: 2225337 - RNA, 19 nt, Artificial Sequence
  Description of Artificial Sequence: Synthetic oligonucleotide
gcauucugcaaacacuaaa

SEQ ID NO: 2225338 - RNA, 19 nt, Artificial Sequence
  Description of Artificial Sequence: Synthetic oligonucleotide
agaugcaauucaugacgua

SEQ ID NO: 2225339 - RNA, 19 nt, Artificial Sequence
  Description of Artificial Sequence: Synthetic oligonucleotide
agggaguucgcgcgcgaca

SEQ ID NO: 2225340 - RNA, 19 nt, Artificial Sequence
  Description of Artificial Sequence: Synthetic oligonucleotide
uagcgucaaggugacauuu

SEQ ID NO: 2225341 - RNA, 19 nt, Artificial Sequence
  Description of Artificial Sequence: Synthetic oligonucleotide
uuccauggcaaagcuuaaa

SEQ ID NO: 2225342 - RNA, 19 nt, Artificial Sequence
  Description of Artificial Sequence: Synthetic oligonucleotide
gcucuuuuguaaaccagac

SEQ ID NO: 2225343 - RNA, 19 nt, Artificial Sequence
  Description of Artificial Sequence: Synthetic oligonucleotide
cagccgaaggugagcgccg

SEQ ID NO: 2225344 - RNA, 19 nt, Artificial Sequence
  Description of Artificial Sequence: Synthetic oligonucleotide
cacgcucagcgagaaggcg

SEQ ID NO: 2225345 - RNA, 19 nt, Artificial Sequence
  Description of Artificial Sequence: Synthetic oligonucleotide
gaguucgcgcgcgacagga

SEQ ID NO: 2225346 - RNA, 19 nt, Artificial Sequence
  Description of Artificial Sequence: Synthetic oligonucleotide
gacacccguccccaggcuc

SEQ ID NO: 2225347 - RNA, 19 nt, Artificial Sequence
  Description of Artificial Sequence: Synthetic oligonucleotide
ccugauccugucaccagag

SEQ ID NO: 2225348 - RNA, 19 nt, Artificial Sequence
  Description of Artificial Sequence: Synthetic oligonucleotide
ugucuccgacacccguccc

SEQ ID NO: 2225349 - RNA, 19 nt, Artificial Sequence
  Description of Artificial Sequence: Synthetic oligonucleotide
gauccgcgagacgugcagc

SEQ ID NO: 2225350 - RNA, 19 nt, Artificial Sequence
  Description of Artificial Sequence: Synthetic oligonucleotide
gugaugaaucccaggucac

SEQ ID NO: 2225351 - RNA, 19 nt, Artificial Sequence
  Description of Artificial Sequence: Synthetic oligonucleotide
aggccauuuccaucaucga

SEQ ID NO: 2225352 - RNA, 19 nt, Artificial Sequence
  Description of Artificial Sequence: Synthetic oligonucleotide
cucagcgagaaggcgaaca

SEQ ID NO: 2225353 - RNA, 19 nt, Artificial Sequence
  Description of Artificial Sequence: Synthetic oligonucleotide
ggagagaugagaugcaauu

SEQ ID NO: 2225354 - RNA, 19 nt, Artificial Sequence
  Description of Artificial Sequence: Synthetic oligonucleotide
gagaaggcgaacagggagu

SEQ ID NO: 2225355 - RNA, 19 nt, Artificial Sequence
  Description of Artificial Sequence: Synthetic oligonucleotide
augcaauucaugacguaua

SEQ ID NO: 2225356 - RNA, 19 nt, Artificial Sequence
  Description of Artificial Sequence: Synthetic oligonucleotide
uugguugaguugagacuuu

SEQ ID NO: 2225357 - RNA, 19 nt, Artificial Sequence
  Description of Artificial Sequence: Synthetic oligonucleotide
agccgcacggggacgcucc

SEQ ID NO: 2225358 - RNA, 19 nt, Artificial Sequence
  Description of Artificial Sequence: Synthetic oligonucleotide
agccgaaggugagcgccgc

SEQ ID NO: 2225359 - RNA, 19 nt, Artificial Sequence
  Description of Artificial Sequence: Synthetic oligonucleotide
agaaggcaauccaugcaaa

SEQ ID NO: 2225360 - RNA, 19 nt, Artificial Sequence
  Description of Artificial Sequence: Synthetic oligonucleotide
ggccauuuccaucaucgaa

SEQ ID NO: 2225361 - RNA, 19 nt, Artificial Sequence
  Description of Artificial Sequence: Synthetic oligonucleotide
agcgccgccaucacgcuca

SEQ ID NO: 2225362 - RNA, 19 nt, Artificial Sequence
  Description of Artificial Sequence: Synthetic oligonucleotide
cucuagggccagugaaguc

SEQ ID NO: 2225363 - RNA, 19 nt, Artificial Sequence
  Description of Artificial Sequence: Synthetic oligonucleotide
aggcgaacagggaguucgc

SEQ ID NO: 2225364 - RNA, 19 nt, Artificial Sequence
  Description of Artificial Sequence: Synthetic oligonucleotide
agggccagugaagucuucu

SEQ ID NO: 2225365 - RNA, 19 nt, Artificial Sequence
  Description of Artificial Sequence: Synthetic oligonucleotide
uccggucuuugaaggcggu

SEQ ID NO: 2225366 - RNA, 19 nt, Artificial Sequence
  Description of Artificial Sequence: Synthetic oligonucleotide
acacuaaaagacacacauu

SEQ ID NO: 2225367 - RNA, 19 nt, Artificial Sequence
  Description of Artificial Sequence: Synthetic oligonucleotide
gcagccgaaggugagcgcc

SEQ ID NO: 2225368 - RNA, 19 nt, Artificial Sequence
  Description of Artificial Sequence: Synthetic oligonucleotide
uccugucaccagagguaga

SEQ ID NO: 2225369 - RNA, 19 nt, Artificial Sequence
  Description of Artificial Sequence: Synthetic oligonucleotide
auuuuaccacucugcucuu

SEQ ID NO: 2225370 - RNA, 19 nt, Artificial Sequence
  Description of Artificial Sequence: Synthetic oligonucleotide
ugguugaguugagacuuua

SEQ ID NO: 2225371 - RNA, 19 nt, Artificial Sequence
  Description of Artificial Sequence: Synthetic oligonucleotide
caccagagguagaauucca

SEQ ID NO: 2225372 - RNA, 19 nt, Artificial Sequence
  Description of Artificial Sequence: Synthetic oligonucleotide
acgcucagcgagaaggcga

SEQ ID NO: 2225373 - RNA, 19 nt, Artificial Sequence
  Description of Artificial Sequence: Synthetic oligonucleotide
gggaguucgcgcgcgacag

SEQ ID NO: 2225374 - RNA, 19 nt, Artificial Sequence
  Description of Artificial Sequence: Synthetic oligonucleotide
agguagaauuccagcauuu

SEQ ID NO: 2225375 - RNA, 19 nt, Artificial Sequence
  Description of Artificial Sequence: Synthetic oligonucleotide
acauuccaagauagcguca

SEQ ID NO: 2225376 - RNA, 19 nt, Artificial Sequence
  Description of Artificial Sequence: Synthetic oligonucleotide
gagaugagaugcaauucau

SEQ ID NO: 2225377 - RNA, 19 nt, Artificial Sequence
  Description of Artificial Sequence: Synthetic oligonucleotide
ggacagauacauguccuga

SEQ ID NO: 2225378 - RNA, 19 nt, Artificial Sequence
  Description of Artificial Sequence: Synthetic oligonucleotide
cagcuucggauuaucaccu

SEQ ID NO: 2225379 - RNA, 19 nt, Artificial Sequence
  Description of Artificial Sequence: Synthetic oligonucleotide
guucaucgugacgaccuuc

SEQ ID NO: 2225380 - RNA, 19 nt, Artificial Sequence
  Description of Artificial Sequence: Synthetic oligonucleotide
ugagcgccgccaucacgcu

SEQ ID NO: 2225381 - RNA, 19 nt, Artificial Sequence
  Description of Artificial Sequence: Synthetic oligonucleotide
aguucgcgcgcgacaggac

SEQ ID NO: 2225382 - RNA, 19 nt, Artificial Sequence
  Description of Artificial Sequence: Synthetic oligonucleotide
acaggacgguguucaucgu

SEQ ID NO: 2225383 - RNA, 19 nt, Artificial Sequence
  Description of Artificial Sequence: Synthetic oligonucleotide
caucgugacgaccuucccu

SEQ ID NO: 2225384 - RNA, 19 nt, Artificial Sequence
  Description of Artificial Sequence: Synthetic oligonucleotide
caucacgcucagcgagaag

SEQ ID NO: 2225385 - RNA, 19 nt, Artificial Sequence
  Description of Artificial Sequence: Synthetic oligonucleotide
ccuugaggccauuuccauc

SEQ ID NO: 2225386 - RNA, 19 nt, Artificial Sequence
  Description of Artificial Sequence: Synthetic oligonucleotide
ggcgaacagggaguucgcg

SEQ ID NO: 2225387 - RNA, 19 nt, Artificial Sequence
  Description of Artificial Sequence: Synthetic oligonucleotide
agcauucugcaaacacuaa

SEQ ID NO: 2225388 - RNA, 19 nt, Artificial Sequence
  Description of Artificial Sequence: Synthetic oligonucleotide
acagggaguucgcgcgcga

SEQ ID NO: 2225389 - RNA, 19 nt, Artificial Sequence
  Description of Artificial Sequence: Synthetic oligonucleotide
ggaguucgcgcgcgacagg

SEQ ID NO: 2225390 - RNA, 19 nt, Artificial Sequence
  Description of Artificial Sequence: Synthetic oligonucleotide
gaaggcgaacagggaguuc

SEQ ID NO: 2225391 - RNA, 19 nt, Artificial Sequence
  Description of Artificial Sequence: Synthetic oligonucleotide
acgacuugguucagagcau

SEQ ID NO: 2225392 - RNA, 19 nt, Artificial Sequence
  Description of Artificial Sequence: Synthetic oligonucleotide
cgucaaggugacauuucug

SEQ ID NO: 2225393 - RNA, 19 nt, Artificial Sequence
  Description of Artificial Sequence: Synthetic oligonucleotide
ggacgguguucaucgugac

SEQ ID NO: 2225394 - RNA, 19 nt, Artificial Sequence
  Description of Artificial Sequence: Synthetic oligonucleotide
ccugucuccgacacccguc

SEQ ID NO: 2225395 - RNA, 19 nt, Artificial Sequence
  Description of Artificial Sequence: Synthetic oligonucleotide
cuugucccaaaggacgacu

SEQ ID NO: 2225396 - RNA, 19 nt, Artificial Sequence
  Description of Artificial Sequence: Synthetic oligonucleotide
gcuucggauuaucaccucu

SEQ ID NO: 2225397 - RNA, 19 nt, Artificial Sequence
  Description of Artificial Sequence: Synthetic oligonucleotide
ccgacacccguccccaggc

SEQ ID NO: 2225398 - RNA, 19 nt, Artificial Sequence
  Description of Artificial Sequence: Synthetic oligonucleotide
ggacgcuccggucuuugaa

SEQ ID NO: 2225399 - RNA, 19 nt, Artificial Sequence
  Description of Artificial Sequence: Synthetic oligonucleotide
augauccgcgagacgugca

SEQ ID NO: 2225400 - RNA, 19 nt, Artificial Sequence
  Description of Artificial Sequence: Synthetic oligonucleotide
caccucucaacacaaucuu

SEQ ID NO: 2225401 - RNA, 19 nt, Artificial Sequence
  Description of Artificial Sequence: Synthetic oligonucleotide
ggcaauccaugcaaacaaa

SEQ ID NO: 2225402 - RNA, 19 nt, Artificial Sequence
  Description of Artificial Sequence: Synthetic oligonucleotide
acgugcagccgcacgggga

SEQ ID NO: 2225403 - RNA, 19 nt, Artificial Sequence
  Description of Artificial Sequence: Synthetic oligonucleotide
gcgucaaggugacauuucu

SEQ ID NO: 2225404 - RNA, 19 nt, Artificial Sequence
  Description of Artificial Sequence: Synthetic oligonucleotide
cagggaguucgcgcgcgac

SEQ ID NO: 2225405 - RNA, 19 nt, Artificial Sequence
  Description of Artificial Sequence: Synthetic oligonucleotide
cuuugaaggcgguggugau

SEQ ID NO: 2225406 - RNA, 19 nt, Artificial Sequence
  Description of Artificial Sequence: Synthetic oligonucleotide
gguugaguugagacuuuaa

SEQ ID NO: 2225407 - RNA, 19 nt, Artificial Sequence
  Description of Artificial Sequence: Synthetic oligonucleotide
acggggacgcuccggucuu

SEQ ID NO: 2225408 - RNA, 19 nt, Artificial Sequence
  Description of Artificial Sequence: Synthetic oligonucleotide
gcaauucaugacguauaaa

SEQ ID NO: 2225409 - RNA, 19 nt, Artificial Sequence
  Description of Artificial Sequence: Synthetic oligonucleotide
ggcaaagcuuaaaauuuau

SEQ ID NO: 2225410 - RNA, 19 nt, Artificial Sequence
  Description of Artificial Sequence: Synthetic oligonucleotide
ccgcgagacgugcagccgc

SEQ ID NO: 2225411 - RNA, 19 nt, Artificial Sequence
  Description of Artificial Sequence: Synthetic oligonucleotide
cgagacgugcagccgcacg

SEQ ID NO: 2225412 - RNA, 19 nt, Artificial Sequence
  Description of Artificial Sequence: Synthetic oligonucleotide
gcaugauccgcgagacgug

SEQ ID NO: 2225413 - RNA, 19 nt, Artificial Sequence
  Description of Artificial Sequence: Synthetic oligonucleotide
cgugacgaccuucccucgg

SEQ ID NO: 2225414 - RNA, 19 nt, Artificial Sequence
  Description of Artificial Sequence: Synthetic oligonucleotide
cacggggacgcuccggucu

SEQ ID NO: 2225415 - RNA, 19 nt, Artificial Sequence
  Description of Artificial Sequence: Synthetic oligonucleotide
accagacuucaaagaucca

SEQ ID NO: 2225416 - RNA, 19 nt, Artificial Sequence
  Description of Artificial Sequence: Synthetic oligonucleotide
cuccgacacccguccccag

SEQ ID NO: 2225417 - RNA, 19 nt, Artificial Sequence
  Description of Artificial Sequence: Synthetic oligonucleotide
agauagcgucaaggugaca

SEQ ID NO: 2225418 - RNA, 19 nt, Artificial Sequence
  Description of Artificial Sequence: Synthetic oligonucleotide
cacccguccccaggcuccg

SEQ ID NO: 2225419 - RNA, 19 nt, Artificial Sequence
  Description of Artificial Sequence: Synthetic oligonucleotide
cuagggccagugaagucuu

SEQ ID NO: 2225420 - RNA, 19 nt, Artificial Sequence
  Description of Artificial Sequence: Synthetic oligonucleotide
ucgcgcgcgacaggacggu

SEQ ID NO: 2225421 - RNA, 19 nt, Artificial Sequence
  Description of Artificial Sequence: Synthetic oligonucleotide
gggccagugaagucuucua

SEQ ID NO: 2225422 - RNA, 19 nt, Artificial Sequence
  Description of Artificial Sequence: Synthetic oligonucleotide
cugcaagauuuuacagcau

SEQ ID NO: 2225423 - RNA, 19 nt, Artificial Sequence
  Description of Artificial Sequence: Synthetic oligonucleotide
acccguccccaggcuccgc

SEQ ID NO: 2225424 - RNA, 19 nt, Artificial Sequence
  Description of Artificial Sequence: Synthetic oligonucleotide
gccaucacgcucagcgaga

SEQ ID NO: 2225425 - RNA, 19 nt, Artificial Sequence
  Description of Artificial Sequence: Synthetic oligonucleotide
gcgagaaggcgaacaggga

SEQ ID NO: 2225426 - RNA, 19 nt, Artificial Sequence
  Description of Artificial Sequence: Synthetic oligonucleotide
gccgaaggugagcgccgcc

SEQ ID NO: 2225427 - RNA, 19 nt, Artificial Sequence
  Description of Artificial Sequence: Synthetic oligonucleotide
cgcgacaggacgguguuca

SEQ ID NO: 2225428 - RNA, 19 nt, Artificial Sequence
  Description of Artificial Sequence: Synthetic oligonucleotide
ggggacgcuccggucuuug

SEQ ID NO: 2225429 - RNA, 19 nt, Artificial Sequence
  Description of Artificial Sequence: Synthetic oligonucleotide
gggagagaugagaugcaau

SEQ ID NO: 2225430 - RNA, 19 nt, Artificial Sequence
  Description of Artificial Sequence: Synthetic oligonucleotide
gggacgcuccggucuuuga

SEQ ID NO: 2225431 - RNA, 19 nt, Artificial Sequence
  Description of Artificial Sequence: Synthetic oligonucleotide
uguuucccuugaggccauu

SEQ ID NO: 2225432 - RNA, 19 nt, Artificial Sequence
  Description of Artificial Sequence: Synthetic oligonucleotide
ccgaaggugagcgccgcca

SEQ ID NO: 2225433 - RNA, 19 nt, Artificial Sequence
  Description of Artificial Sequence: Synthetic oligonucleotide
cgguguucaucgugacgac

SEQ ID NO: 2225434 - RNA, 19 nt, Artificial Sequence
  Description of Artificial Sequence: Synthetic oligonucleotide
ccggucuuugaaggcggug

SEQ ID NO: 2225435 - RNA, 19 nt, Artificial Sequence
  Description of Artificial Sequence: Synthetic oligonucleotide
gggcccugucuccgacacc

SEQ ID NO: 2225436 - RNA, 19 nt, Artificial Sequence
  Description of Artificial Sequence: Synthetic oligonucleotide
gcccugucuccgacacccg

SEQ ID NO: 2225437 - RNA, 19 nt, Artificial Sequence
  Description of Artificial Sequence: Synthetic oligonucleotide
cgcucagcgagaaggcgaa

SEQ ID NO: 2225438 - RNA, 19 nt, Artificial Sequence
  Description of Artificial Sequence: Synthetic oligonucleotide
ccaugcaaacaaacauuuu

SEQ ID NO: 2225439 - RNA, 19 nt, Artificial Sequence
  Description of Artificial Sequence: Synthetic oligonucleotide
gcacggggacgcuccgguc

SEQ ID NO: 2225440 - RNA, 19 nt, Artificial Sequence
  Description of Artificial Sequence: Synthetic oligonucleotide
gcucagcgagaaggcgaac

SEQ ID NO: 2225441 - RNA, 19 nt, Artificial Sequence
  Description of Artificial Sequence: Synthetic oligonucleotide
cgcgagacgugcagccgca

SEQ ID NO: 2225442 - RNA, 19 nt, Artificial Sequence
  Description of Artificial Sequence: Synthetic oligonucleotide
gcgagacgugcagccgcac

SEQ ID NO: 2225443 - RNA, 19 nt, Artificial Sequence
  Description of Artificial Sequence: Synthetic oligonucleotide
cccugucuccgacacccgu

SEQ ID NO: 2225444 - RNA, 19 nt, Artificial Sequence
  Description of Artificial Sequence: Synthetic oligonucleotide
gcgcgcgacaggacggugu

SEQ ID NO: 2225445 - RNA, 19 nt, Artificial Sequence
  Description of Artificial Sequence: Synthetic oligonucleotide
gcgcgacaggacgguguuc

SEQ ID NO: 2225446 - RNA, 19 nt, Artificial Sequence
  Description of Artificial Sequence: Synthetic oligonucleotide
gcgacaggacgguguucau

SEQ ID NO: 2225447 - RNA, 19 nt, Artificial Sequence
  Description of Artificial Sequence: Synthetic oligonucleotide
cccguccccaggcuccgcu

SEQ ID NO: 2225448 - RNA, 19 nt, Artificial Sequence
  Description of Artificial Sequence: Synthetic oligonucleotide
cgcgcgcgacaggacggug

SEQ ID NO: 2225449 - RNA, 19 nt, Artificial Sequence
  Description of Artificial Sequence: Synthetic oligonucleotide
cgcgcgacaggacgguguu

SEQ ID NO: 2225450 - RNA, 19 nt, Artificial Sequence
  Description of Artificial Sequence: Synthetic oligonucleotide
gcagccgcacggggacgcu

SEQ ID NO: 2225451 - RNA, 19 nt, Artificial Sequence
  Description of Artificial Sequence: Synthetic oligonucleotide
cgacacccguccccaggcu

SEQ ID NO: 2225452 - RNA, 19 nt, Artificial Sequence
  Description of Artificial Sequence: Synthetic oligonucleotide
cggggacgcuccggucuuu

SEQ ID NO: 2225453 - RNA, 19 nt, Artificial Sequence
  Description of Artificial Sequence: Synthetic oligonucleotide
uuuucuaacacuaauguug

SEQ ID NO: 2225454 - RNA, 19 nt, Artificial Sequence
  Description of Artificial Sequence: Synthetic oligonucleotide
aaccaaugcacucagaaac

SEQ ID NO: 2225455 - RNA, 19 nt, Artificial Sequence
  Description of Artificial Sequence: Synthetic oligonucleotide
ucuauuaccagguugaugu

SEQ ID NO: 2225456 - RNA, 19 nt, Artificial Sequence
  Description of Artificial Sequence: Synthetic oligonucleotide
auuaaaucuaaauaggacu

SEQ ID NO: 2225457 - RNA, 19 nt, Artificial Sequence
  Description of Artificial Sequence: Synthetic oligonucleotide
gaaaacuguacuuaggacc

SEQ ID NO: 2225458 - RNA, 19 nt, Artificial Sequence
  Description of Artificial Sequence: Synthetic oligonucleotide
acgacugucaacuuuggcc

SEQ ID NO: 2225459 - RNA, 19 nt, Artificial Sequence
  Description of Artificial Sequence: Synthetic oligonucleotide
ucaacuuuggcccuuuccg

SEQ ID NO: 2225460 - RNA, 19 nt, Artificial Sequence
  Description of Artificial Sequence: Synthetic oligonucleotide
ucuaagaacagucauugac

SEQ ID NO: 2225461 - RNA, 19 nt, Artificial Sequence
  Description of Artificial Sequence: Synthetic oligonucleotide
uuucacuugagcaagagau

SEQ ID NO: 2225462 - RNA, 19 nt, Artificial Sequence
  Description of Artificial Sequence: Synthetic oligonucleotide
aaauuuaaaugcaugacca

SEQ ID NO: 2225463 - RNA, 19 nt, Artificial Sequence
  Description of Artificial Sequence: Synthetic oligonucleotide
uuaaaucuaaauaggacuc

SEQ ID NO: 2225464 - RNA, 19 nt, Artificial Sequence
  Description of Artificial Sequence: Synthetic oligonucleotide
uaauguugcagucagauuu

SEQ ID NO: 2225465 - RNA, 19 nt, Artificial Sequence
  Description of Artificial Sequence: Synthetic oligonucleotide
aucuaauucucucuuugcc

SEQ ID NO: 2225466 - RNA, 19 nt, Artificial Sequence
  Description of Artificial Sequence: Synthetic oligonucleotide
uauaaaauuucugucgucc

SEQ ID NO: 2225467 - RNA, 19 nt, Artificial Sequence
  Description of Artificial Sequence: Synthetic oligonucleotide
accaguguuagacagauug

SEQ ID NO: 2225468 - RNA, 19 nt, Artificial Sequence
  Description of Artificial Sequence: Synthetic oligonucleotide
aagucaaaucauucacugc

SEQ ID NO: 2225469 - RNA, 19 nt, Artificial Sequence
  Description of Artificial Sequence: Synthetic oligonucleotide
ugaaaggugauauaaaauu

SEQ ID NO: 2225470 - RNA, 19 nt, Artificial Sequence
  Description of Artificial Sequence: Synthetic oligonucleotide
auggauucggcauuaaauc

SEQ ID NO: 2225471 - RNA, 19 nt, Artificial Sequence
  Description of Artificial Sequence: Synthetic oligonucleotide
aaaccugaacuccucugcc

SEQ ID NO: 2225472 - RNA, 19 nt, Artificial Sequence
  Description of Artificial Sequence: Synthetic oligonucleotide
uuucuaacacuaauguugc

SEQ ID NO: 2225473 - RNA, 19 nt, Artificial Sequence
  Description of Artificial Sequence: Synthetic oligonucleotide
uccaauucgagcuugauuu

SEQ ID NO: 2225474 - RNA, 19 nt, Artificial Sequence
  Description of Artificial Sequence: Synthetic oligonucleotide
ucuagcagaaagcugcucc

SEQ ID NO: 2225475 - RNA, 19 nt, Artificial Sequence
  Description of Artificial Sequence: Synthetic oligonucleotide
aaggucggaagucaaauca

SEQ ID NO: 2225476 - RNA, 19 nt, Artificial Sequence
  Description of Artificial Sequence: Synthetic oligonucleotide
cauuaaaucuaaauaggac

SEQ ID NO: 2225477 - RNA, 19 nt, Artificial Sequence
  Description of Artificial Sequence: Synthetic oligonucleotide
uuuaaaugcaugaccaaaa

SEQ ID NO: 2225478 - RNA, 19 nt, Artificial Sequence
  Description of Artificial Sequence: Synthetic oligonucleotide
uauuauuaucuccucuaag

SEQ ID NO: 2225479 - RNA, 19 nt, Artificial Sequence
  Description of Artificial Sequence: Synthetic oligonucleotide
ucuaacacuaauguugcag

SEQ ID NO: 2225480 - RNA, 19 nt, Artificial Sequence
  Description of Artificial Sequence: Synthetic oligonucleotide
aaugggaugguuuccaaau

SEQ ID NO: 2225481 - RNA, 19 nt, Artificial Sequence
  Description of Artificial Sequence: Synthetic oligonucleotide
auaaaauuucugucguccg

SEQ ID NO: 2225482 - RNA, 19 nt, Artificial Sequence
  Description of Artificial Sequence: Synthetic oligonucleotide
aauucucucuccuccggcg

SEQ ID NO: 2225483 - RNA, 19 nt, Artificial Sequence
  Description of Artificial Sequence: Synthetic oligonucleotide
gaaggauauuauuaucucc

SEQ ID NO: 2225484 - RNA, 19 nt, Artificial Sequence
  Description of Artificial Sequence: Synthetic oligonucleotide
aaaacuugcuagugaagug

SEQ ID NO: 2225485 - RNA, 19 nt, Artificial Sequence
  Description of Artificial Sequence: Synthetic oligonucleotide
gauguuuggcuucugauuc

SEQ ID NO: 2225486 - RNA, 19 nt, Artificial Sequence
  Description of Artificial Sequence: Synthetic oligonucleotide
ucugaaagugccacuagug

SEQ ID NO: 2225487 - RNA, 19 nt, Artificial Sequence
  Description of Artificial Sequence: Synthetic oligonucleotide
ucuccauaagaaaaucuug

SEQ ID NO: 2225488 - RNA, 19 nt, Artificial Sequence
  Description of Artificial Sequence: Synthetic oligonucleotide
ucaaccaaugcacucagaa

SEQ ID NO: 2225489 - RNA, 19 nt, Artificial Sequence
  Description of Artificial Sequence: Synthetic oligonucleotide
ucuagucacaguuccauca

SEQ ID NO: 2225490 - RNA, 19 nt, Artificial Sequence
  Description of Artificial Sequence: Synthetic oligonucleotide
aaaggucggaagucaaauc

SEQ ID NO: 2225491 - RNA, 19 nt, Artificial Sequence
  Description of Artificial Sequence: Synthetic oligonucleotide
ucggcauuaaaucuaaaua

SEQ ID NO: 2225492 - RNA, 19 nt, Artificial Sequence
  Description of Artificial Sequence: Synthetic oligonucleotide
uccucuauuaccagguuga

SEQ ID NO: 2225493 - RNA, 19 nt, Artificial Sequence
  Description of Artificial Sequence: Synthetic oligonucleotide
cagggauaaaacuugcuag

SEQ ID NO: 2225494 - RNA, 19 nt, Artificial Sequence
  Description of Artificial Sequence: Synthetic oligonucleotide
ucuaauucucucuuugccu

SEQ ID NO: 2225495 - RNA, 19 nt, Artificial Sequence
  Description of Artificial Sequence: Synthetic oligonucleotide
ucuguugcguucugaaagg

SEQ ID NO: 2225496 - RNA, 19 nt, Artificial Sequence
  Description of Artificial Sequence: Synthetic oligonucleotide
aaaucauucacugcaggga

SEQ ID NO: 2225497 - RNA, 19 nt, Artificial Sequence
  Description of Artificial Sequence: Synthetic oligonucleotide
uuaucaagaaggauauuau

SEQ ID NO: 2225498 - RNA, 19 nt, Artificial Sequence
  Description of Artificial Sequence: Synthetic oligonucleotide
aaaauuucugucguccgug

SEQ ID NO: 2225499 - RNA, 19 nt, Artificial Sequence
  Description of Artificial Sequence: Synthetic oligonucleotide
aaucauucacugcagggau

SEQ ID NO: 2225500 - RNA, 19 nt, Artificial Sequence
  Description of Artificial Sequence: Synthetic oligonucleotide
guguuagacagauuggcag

SEQ ID NO: 2225501 - RNA, 19 nt, Artificial Sequence
  Description of Artificial Sequence: Synthetic oligonucleotide
gauauuauuaucuccucua

SEQ ID NO: 2225502 - RNA, 19 nt, Artificial Sequence
  Description of Artificial Sequence: Synthetic oligonucleotide
agaacagucauugacuucu

SEQ ID NO: 2225503 - RNA, 19 nt, Artificial Sequence
  Description of Artificial Sequence: Synthetic oligonucleotide
uucacugcagggauaaaac

SEQ ID NO: 2225504 - RNA, 19 nt, Artificial Sequence
  Description of Artificial Sequence: Synthetic oligonucleotide
ucuugggagaagaaugucu

SEQ ID NO: 2225505 - RNA, 19 nt, Artificial Sequence
  Description of Artificial Sequence: Synthetic oligonucleotide
accggugggauagagacgc

SEQ ID NO: 2225506 - RNA, 19 nt, Artificial Sequence
  Description of Artificial Sequence: Synthetic oligonucleotide
ugaccggugggauagagac

SEQ ID NO: 2225507 - RNA, 19 nt, Artificial Sequence
  Description of Artificial Sequence: Synthetic oligonucleotide
ucuaaauaggacuccaguu

SEQ ID NO: 2225508 - RNA, 19 nt, Artificial Sequence
  Description of Artificial Sequence: Synthetic oligonucleotide
aauuuaaaugcaugaccaa

SEQ ID NO: 2225509 - RNA, 19 nt, Artificial Sequence
  Description of Artificial Sequence: Synthetic oligonucleotide
uccaucaugucuacuuucc

SEQ ID NO: 2225510 - RNA, 19 nt, Artificial Sequence
  Description of Artificial Sequence: Synthetic oligonucleotide
ucuugagaucuucucguag

SEQ ID NO: 2225511 - RNA, 19 nt, Artificial Sequence
  Description of Artificial Sequence: Synthetic oligonucleotide
ugcuuucuguuuuaagucc

SEQ ID NO: 2225512 - RNA, 19 nt, Artificial Sequence
  Description of Artificial Sequence: Synthetic oligonucleotide
gugauauaaaauuucuguc

SEQ ID NO: 2225513 - RNA, 19 nt, Artificial Sequence
  Description of Artificial Sequence: Synthetic oligonucleotide
gauauaaaauuucugucgu

SEQ ID NO: 2225514 - RNA, 19 nt, Artificial Sequence
  Description of Artificial Sequence: Synthetic oligonucleotide
auuaccagguugauguccc

SEQ ID NO: 2225515 - RNA, 19 nt, Artificial Sequence
  Description of Artificial Sequence: Synthetic oligonucleotide
ucuacugggcucuagucac

SEQ ID NO: 2225516 - RNA, 19 nt, Artificial Sequence
  Description of Artificial Sequence: Synthetic oligonucleotide
uuuggaaugggaugguuuc

SEQ ID NO: 2225517 - RNA, 19 nt, Artificial Sequence
  Description of Artificial Sequence: Synthetic oligonucleotide
uaaaauuucugucguccgu

SEQ ID NO: 2225518 - RNA, 19 nt, Artificial Sequence
  Description of Artificial Sequence: Synthetic oligonucleotide
uucugauucauacucguuu

SEQ ID NO: 2225519 - RNA, 19 nt, Artificial Sequence
  Description of Artificial Sequence: Synthetic oligonucleotide
ugaaaacuguacuuaggac

SEQ ID NO: 2225520 - RNA, 19 nt, Artificial Sequence
  Description of Artificial Sequence: Synthetic oligonucleotide
ugccuuugcuuucaggaag

SEQ ID NO: 2225521 - RNA, 19 nt, Artificial Sequence
  Description of Artificial Sequence: Synthetic oligonucleotide
agacagaugcagcucugcc

SEQ ID NO: 2225522 - RNA, 19 nt, Artificial Sequence
  Description of Artificial Sequence: Synthetic oligonucleotide
aaaucuaaauaggacucca

SEQ ID NO: 2225523 - RNA, 19 nt, Artificial Sequence
  Description of Artificial Sequence: Synthetic oligonucleotide
gaaagugccacuagugacc

SEQ ID NO: 2225524 - RNA, 19 nt, Artificial Sequence
  Description of Artificial Sequence: Synthetic oligonucleotide
aucuaaauaggacuccagu

SEQ ID NO: 2225525 - RNA, 19 nt, Artificial Sequence
  Description of Artificial Sequence: Synthetic oligonucleotide
ucguauuuuggaaugggau

SEQ ID NO: 2225526 - RNA, 19 nt, Artificial Sequence
  Description of Artificial Sequence: Synthetic oligonucleotide
uuugccucuucaauuuuca

SEQ ID NO: 2225527 - RNA, 19 nt, Artificial Sequence
  Description of Artificial Sequence: Synthetic oligonucleotide
cacucuuggauuugguacg

SEQ ID NO: 2225528 - RNA, 19 nt, Artificial Sequence
  Description of Artificial Sequence: Synthetic oligonucleotide
uucacacucuccauaagaa

SEQ ID NO: 2225529 - RNA, 19 nt, Artificial Sequence
  Description of Artificial Sequence: Synthetic oligonucleotide
aagauguuuggcuucugau

SEQ ID NO: 2225530 - RNA, 19 nt, Artificial Sequence
  Description of Artificial Sequence: Synthetic oligonucleotide
uaaaucuaaauaggacucc

SEQ ID NO: 2225531 - RNA, 19 nt, Artificial Sequence
  Description of Artificial Sequence: Synthetic oligonucleotide
aagacgacugucaacuuug

SEQ ID NO: 2225532 - RNA, 19 nt, Artificial Sequence
  Description of Artificial Sequence: Synthetic oligonucleotide
ucuacuuuccuuguaaguu

SEQ ID NO: 2225533 - RNA, 19 nt, Artificial Sequence
  Description of Artificial Sequence: Synthetic oligonucleotide
uggauucggcauuaaaucu

SEQ ID NO: 2225534 - RNA, 19 nt, Artificial Sequence
  Description of Artificial Sequence: Synthetic oligonucleotide
uucggcauuaaaucuaaau

SEQ ID NO: 2225535 - RNA, 19 nt, Artificial Sequence
  Description of Artificial Sequence: Synthetic oligonucleotide
auuuuaucaagaaggauau

SEQ ID NO: 2225536 - RNA, 19 nt, Artificial Sequence
  Description of Artificial Sequence: Synthetic oligonucleotide
aaaaggucggaagucaaau

SEQ ID NO: 2225537 - RNA, 19 nt, Artificial Sequence
  Description of Artificial Sequence: Synthetic oligonucleotide
aggauauuauuaucuccuc

SEQ ID NO: 2225538 - RNA, 19 nt, Artificial Sequence
  Description of Artificial Sequence: Synthetic oligonucleotide
ucagaaaccuggaaccagu

SEQ ID NO: 2225539 - RNA, 19 nt, Artificial Sequence
  Description of Artificial Sequence: Synthetic oligonucleotide
aacuuuggcccuuuccgca

SEQ ID NO: 2225540 - RNA, 19 nt, Artificial Sequence
  Description of Artificial Sequence: Synthetic oligonucleotide
agggauaaaacuugcuagu

SEQ ID NO: 2225541 - RNA, 19 nt, Artificial Sequence
  Description of Artificial Sequence: Synthetic oligonucleotide
ggugauugcacugucaacc

SEQ ID NO: 2225542 - RNA, 19 nt, Artificial Sequence
  Description of Artificial Sequence: Synthetic oligonucleotide
ugucuacuuuccuuguaag

SEQ ID NO: 2225543 - RNA, 19 nt, Artificial Sequence
  Description of Artificial Sequence: Synthetic oligonucleotide
caaaccugaacuccucugc

SEQ ID NO: 2225544 - RNA, 19 nt, Artificial Sequence
  Description of Artificial Sequence: Synthetic oligonucleotide
uauuaccagguugaugucc

SEQ ID NO: 2225545 - RNA, 19 nt, Artificial Sequence
  Description of Artificial Sequence: Synthetic oligonucleotide
uuuuggaaugggaugguuu

SEQ ID NO: 2225546 - RNA, 19 nt, Artificial Sequence
  Description of Artificial Sequence: Synthetic oligonucleotide
ggugauauaaaauuucugu

SEQ ID NO: 2225547 - RNA, 19 nt, Artificial Sequence
  Description of Artificial Sequence: Synthetic oligonucleotide
agugaaguguccuuuguuu

SEQ ID NO: 2225548 - RNA, 19 nt, Artificial Sequence
  Description of Artificial Sequence: Synthetic oligonucleotide
ugagcaagagauggauucg

SEQ ID NO: 2225549 - RNA, 19 nt, Artificial Sequence
  Description of Artificial Sequence: Synthetic oligonucleotide
uuaaguccucuauuaccag

SEQ ID NO: 2225550 - RNA, 19 nt, Artificial Sequence
  Description of Artificial Sequence: Synthetic oligonucleotide
auucauacucguuugcuuu

SEQ ID NO: 2225551 - RNA, 19 nt, Artificial Sequence
  Description of Artificial Sequence: Synthetic oligonucleotide
cuccauaagaaaaucuuga

SEQ ID NO: 2225552 - RNA, 19 nt, Artificial Sequence
  Description of Artificial Sequence: Synthetic oligonucleotide
uugacuucuugggagaaga

SEQ ID NO: 2225553 - RNA, 19 nt, Artificial Sequence
  Description of Artificial Sequence: Synthetic oligonucleotide
aucaagaaggauauuauua

SEQ ID NO: 2225554 - RNA, 19 nt, Artificial Sequence
  Description of Artificial Sequence: Synthetic oligonucleotide
auagucugcuguuuuauuu

SEQ ID NO: 2225555 - RNA, 19 nt, Artificial Sequence
  Description of Artificial Sequence: Synthetic oligonucleotide
caagaaggauauuauuauc

SEQ ID NO: 2225556 - RNA, 19 nt, Artificial Sequence
  Description of Artificial Sequence: Synthetic oligonucleotide
uagacagauuggcagggga

SEQ ID NO: 2225557 - RNA, 19 nt, Artificial Sequence
  Description of Artificial Sequence: Synthetic oligonucleotide
guugaugucccugucccgg

SEQ ID NO: 2225558 - RNA, 19 nt, Artificial Sequence
  Description of Artificial Sequence: Synthetic oligonucleotide
uuaucuccucuaagaacag

SEQ ID NO: 2225559 - RNA, 19 nt, Artificial Sequence
  Description of Artificial Sequence: Synthetic oligonucleotide
aacuugcuagugaaguguc

SEQ ID NO: 2225560 - RNA, 19 nt, Artificial Sequence
  Description of Artificial Sequence: Synthetic oligonucleotide
uguugcguucugaaaggug

SEQ ID NO: 2225561 - RNA, 19 nt, Artificial Sequence
  Description of Artificial Sequence: Synthetic oligonucleotide
guuagacagauuggcaggg

SEQ ID NO: 2225562 - RNA, 19 nt, Artificial Sequence
  Description of Artificial Sequence: Synthetic oligonucleotide
aaccugcaauucucucucc

SEQ ID NO: 2225563 - RNA, 19 nt, Artificial Sequence
  Description of Artificial Sequence: Synthetic oligonucleotide
ugggaugguuuccaaauau

SEQ ID NO: 2225564 - RNA, 19 nt, Artificial Sequence
  Description of Artificial Sequence: Synthetic oligonucleotide
auucgagcuugauuucuuc

SEQ ID NO: 2225565 - RNA, 19 nt, Artificial Sequence
  Description of Artificial Sequence: Synthetic oligonucleotide
ucgagcuugauuucuucac

SEQ ID NO: 2225566 - RNA, 19 nt, Artificial Sequence
  Description of Artificial Sequence: Synthetic oligonucleotide
ucucugaaagugccacuag

SEQ ID NO: 2225567 - RNA, 19 nt, Artificial Sequence
  Description of Artificial Sequence: Synthetic oligonucleotide
caguguuagacagauuggc

SEQ ID NO: 2225568 - RNA, 19 nt, Artificial Sequence
  Description of Artificial Sequence: Synthetic oligonucleotide
ucuuggauuugguacgaaa

SEQ ID NO: 2225569 - RNA, 19 nt, Artificial Sequence
  Description of Artificial Sequence: Synthetic oligonucleotide
gugggauagagacgcaucc

SEQ ID NO: 2225570 - RNA, 19 nt, Artificial Sequence
  Description of Artificial Sequence: Synthetic oligonucleotide
ugauucauacucguuugcu

SEQ ID NO: 2225571 - RNA, 19 nt, Artificial Sequence
  Description of Artificial Sequence: Synthetic oligonucleotide
uucgagcuugauuucuuca

SEQ ID NO: 2225572 - RNA, 19 nt, Artificial Sequence
  Description of Artificial Sequence: Synthetic oligonucleotide
acugcagggauaaaacuug

SEQ ID NO: 2225573 - RNA, 19 nt, Artificial Sequence
  Description of Artificial Sequence: Synthetic oligonucleotide
aaguccucuauuaccaggu

SEQ ID NO: 2225574 - RNA, 19 nt, Artificial Sequence
  Description of Artificial Sequence: Synthetic oligonucleotide
uccgcagacagaugcagcu

SEQ ID NO: 2225575 - RNA, 19 nt, Artificial Sequence
  Description of Artificial Sequence: Synthetic oligonucleotide
gagaucuucucguagacau

SEQ ID NO: 2225576 - RNA, 19 nt, Artificial Sequence
  Description of Artificial Sequence: Synthetic oligonucleotide
ucacugcagggauaaaacu

SEQ ID NO: 2225577 - RNA, 19 nt, Artificial Sequence
  Description of Artificial Sequence: Synthetic oligonucleotide
gacgcauccaugccucuag

SEQ ID NO: 2225578 - RNA, 19 nt, Artificial Sequence
  Description of Artificial Sequence: Synthetic oligonucleotide
agauguuuggcuucugauu

SEQ ID NO: 2225579 - RNA, 19 nt, Artificial Sequence
  Description of Artificial Sequence: Synthetic oligonucleotide
cacacucuccauaagaaaa

SEQ ID NO: 2225580 - RNA, 19 nt, Artificial Sequence
  Description of Artificial Sequence: Synthetic oligonucleotide
aaccugaacuccucugccu

SEQ ID NO: 2225581 - RNA, 19 nt, Artificial Sequence
  Description of Artificial Sequence: Synthetic oligonucleotide
cuaagaacagucauugacu

SEQ ID NO: 2225582 - RNA, 19 nt, Artificial Sequence
  Description of Artificial Sequence: Synthetic oligonucleotide
gagcaagagauggauucgg

SEQ ID NO: 2225583 - RNA, 19 nt, Artificial Sequence
  Description of Artificial Sequence: Synthetic oligonucleotide
ugccacuagugaccggugg

SEQ ID NO: 2225584 - RNA, 19 nt, Artificial Sequence
  Description of Artificial Sequence: Synthetic oligonucleotide
uucugaagacgacugucaa

SEQ ID NO: 2225585 - RNA, 19 nt, Artificial Sequence
  Description of Artificial Sequence: Synthetic oligonucleotide
uuuccagggugauugcacu

SEQ ID NO: 2225586 - RNA, 19 nt, Artificial Sequence
  Description of Artificial Sequence: Synthetic oligonucleotide
gaagauguuuggcuucuga

SEQ ID NO: 2225587 - RNA, 19 nt, Artificial Sequence
  Description of Artificial Sequence: Synthetic oligonucleotide
augucuacuuuccuuguaa

SEQ ID NO: 2225588 - RNA, 19 nt, Artificial Sequence
  Description of Artificial Sequence: Synthetic oligonucleotide
caacuuuggcccuuuccgc

SEQ ID NO: 2225589 - RNA, 19 nt, Artificial Sequence
  Description of Artificial Sequence: Synthetic oligonucleotide
uuuccgcagacagaugcag

SEQ ID NO: 2225590 - RNA, 19 nt, Artificial Sequence
  Description of Artificial Sequence: Synthetic oligonucleotide
auaaaacuugcuagugaag

SEQ ID NO: 2225591 - RNA, 19 nt, Artificial Sequence
  Description of Artificial Sequence: Synthetic oligonucleotide
agcaaccugcaauucucuc

SEQ ID NO: 2225592 - RNA, 19 nt, Artificial Sequence
  Description of Artificial Sequence: Synthetic oligonucleotide
uuggcuucugauucauacu

SEQ ID NO: 2225593 - RNA, 19 nt, Artificial Sequence
  Description of Artificial Sequence: Synthetic oligonucleotide
uuagacagauuggcagggg

SEQ ID NO: 2225594 - RNA, 19 nt, Artificial Sequence
  Description of Artificial Sequence: Synthetic oligonucleotide
uccucuaagaacagucauu

SEQ ID NO: 2225595 - RNA, 19 nt, Artificial Sequence
  Description of Artificial Sequence: Synthetic oligonucleotide
agucugcuguuuuauuucu

SEQ ID NO: 2225596 - RNA, 19 nt, Artificial Sequence
  Description of Artificial Sequence: Synthetic oligonucleotide
cugauucauacucguuugc

SEQ ID NO: 2225597 - RNA, 19 nt, Artificial Sequence
  Description of Artificial Sequence: Synthetic oligonucleotide
ucugucguccguggguucg

SEQ ID NO: 2225598 - RNA, 19 nt, Artificial Sequence
  Description of Artificial Sequence: Synthetic oligonucleotide
caaccugcaauucucucuc

SEQ ID NO: 2225599 - RNA, 19 nt, Artificial Sequence
  Description of Artificial Sequence: Synthetic oligonucleotide
ucacacucuccauaagaaa

SEQ ID NO: 2225600 - RNA, 19 nt, Artificial Sequence
  Description of Artificial Sequence: Synthetic oligonucleotide
aaccuggaaccaguguuag

SEQ ID NO: 2225601 - RNA, 19 nt, Artificial Sequence
  Description of Artificial Sequence: Synthetic oligonucleotide
uccaaaccugaacuccucu

SEQ ID NO: 2225602 - RNA, 19 nt, Artificial Sequence
  Description of Artificial Sequence: Synthetic oligonucleotide
uuccaauucgagcuugauu

SEQ ID NO: 2225603 - RNA, 19 nt, Artificial Sequence
  Description of Artificial Sequence: Synthetic oligonucleotide
uucgccucguauuuuggaa

SEQ ID NO: 2225604 - RNA, 19 nt, Artificial Sequence
  Description of Artificial Sequence: Synthetic oligonucleotide
uagucacaguuccaucaug

SEQ ID NO: 2225605 - RNA, 19 nt, Artificial Sequence
  Description of Artificial Sequence: Synthetic oligonucleotide
agggugauugcacugucaa

SEQ ID NO: 2225606 - RNA, 19 nt, Artificial Sequence
  Description of Artificial Sequence: Synthetic oligonucleotide
auacucguuugcuuucugu

SEQ ID NO: 2225607 - RNA, 19 nt, Artificial Sequence
  Description of Artificial Sequence: Synthetic oligonucleotide
uucauacucguuugcuuuc

SEQ ID NO: 2225608 - RNA, 19 nt, Artificial Sequence
  Description of Artificial Sequence: Synthetic oligonucleotide
guccucuauuaccagguug

SEQ ID NO: 2225609 - RNA, 19 nt, Artificial Sequence
  Description of Artificial Sequence: Synthetic oligonucleotide
uuccuuguaaguucagcuu

SEQ ID NO: 2225610 - RNA, 19 nt, Artificial Sequence
  Description of Artificial Sequence: Synthetic oligonucleotide
uacucguuugcuuucuguu

SEQ ID NO: 2225611 - RNA, 19 nt, Artificial Sequence
  Description of Artificial Sequence: Synthetic oligonucleotide
agugccacuagugaccggu

SEQ ID NO: 2225612 - RNA, 19 nt, Artificial Sequence
  Description of Artificial Sequence: Synthetic oligonucleotide
cugaaagugccacuaguga

SEQ ID NO: 2225613 - RNA, 19 nt, Artificial Sequence
  Description of Artificial Sequence: Synthetic oligonucleotide
acuugcuagugaagugucc

SEQ ID NO: 2225614 - RNA, 19 nt, Artificial Sequence
  Description of Artificial Sequence: Synthetic oligonucleotide
aaugucuacugggcucuag

SEQ ID NO: 2225615 - RNA, 19 nt, Artificial Sequence
  Description of Artificial Sequence: Synthetic oligonucleotide
acuuuggcccuuuccgcag

SEQ ID NO: 2225616 - RNA, 19 nt, Artificial Sequence
  Description of Artificial Sequence: Synthetic oligonucleotide
gaagaaugucuacugggcu

SEQ ID NO: 2225617 - RNA, 19 nt, Artificial Sequence
  Description of Artificial Sequence: Synthetic oligonucleotide
ccuuuccgcagacagaugc

SEQ ID NO: 2225618 - RNA, 19 nt, Artificial Sequence
  Description of Artificial Sequence: Synthetic oligonucleotide
cugucccggacucuguugc

SEQ ID NO: 2225619 - RNA, 19 nt, Artificial Sequence
  Description of Artificial Sequence: Synthetic oligonucleotide
aguguuagacagauuggca

SEQ ID NO: 2225620 - RNA, 19 nt, Artificial Sequence
  Description of Artificial Sequence: Synthetic oligonucleotide
ggauaaaacuugcuaguga

SEQ ID NO: 2225621 - RNA, 19 nt, Artificial Sequence
  Description of Artificial Sequence: Synthetic oligonucleotide
caaugcacucagaaaccug

SEQ ID NO: 2225622 - RNA, 19 nt, Artificial Sequence
  Description of Artificial Sequence: Synthetic oligonucleotide
augucuacugggcucuagu

SEQ ID NO: 2225623 - RNA, 19 nt, Artificial Sequence
  Description of Artificial Sequence: Synthetic oligonucleotide
uuucucugaaagugccacu

SEQ ID NO: 2225624 - RNA, 19 nt, Artificial Sequence
  Description of Artificial Sequence: Synthetic oligonucleotide
gucuacugggcucuaguca

SEQ ID NO: 2225625 - RNA, 19 nt, Artificial Sequence
  Description of Artificial Sequence: Synthetic oligonucleotide
uugggagaagaaugucuac

SEQ ID NO: 2225626 - RNA, 19 nt, Artificial Sequence
  Description of Artificial Sequence: Synthetic oligonucleotide
uauagucugcuguuuuauu

SEQ ID NO: 2225627 - RNA, 19 nt, Artificial Sequence
  Description of Artificial Sequence: Synthetic oligonucleotide
gacgacugucaacuuuggc

SEQ ID NO: 2225628 - RNA, 19 nt, Artificial Sequence
  Description of Artificial Sequence: Synthetic oligonucleotide
uccauguucugaagacgac

SEQ ID NO: 2225629 - RNA, 19 nt, Artificial Sequence
  Description of Artificial Sequence: Synthetic oligonucleotide
cagguugaugucccugucc

SEQ ID NO: 2225630 - RNA, 19 nt, Artificial Sequence
  Description of Artificial Sequence: Synthetic oligonucleotide
ugccucuagcagaaagcug

SEQ ID NO: 2225631 - RNA, 19 nt, Artificial Sequence
  Description of Artificial Sequence: Synthetic oligonucleotide
uuguaaguucagcuucaau

SEQ ID NO: 2225632 - RNA, 19 nt, Artificial Sequence
  Description of Artificial Sequence: Synthetic oligonucleotide
gcauuaaaucuaaauagga

SEQ ID NO: 2225633 - RNA, 19 nt, Artificial Sequence
  Description of Artificial Sequence: Synthetic oligonucleotide
cauccaugccucuagcaga

SEQ ID NO: 2225634 - RNA, 19 nt, Artificial Sequence
  Description of Artificial Sequence: Synthetic oligonucleotide
cucagaaaccuggaaccag

SEQ ID NO: 2225635 - RNA, 19 nt, Artificial Sequence
  Description of Artificial Sequence: Synthetic oligonucleotide
acgcauccaugccucuagc

SEQ ID NO: 2225636 - RNA, 19 nt, Artificial Sequence
  Description of Artificial Sequence: Synthetic oligonucleotide
ugauugcacugucaaccaa

SEQ ID NO: 2225637 - RNA, 19 nt, Artificial Sequence
  Description of Artificial Sequence: Synthetic oligonucleotide
ccucuaagaacagucauug

SEQ ID NO: 2225638 - RNA, 19 nt, Artificial Sequence
  Description of Artificial Sequence: Synthetic oligonucleotide
agauggauucggcauuaaa

SEQ ID NO: 2225639 - RNA, 19 nt, Artificial Sequence
  Description of Artificial Sequence: Synthetic oligonucleotide
gaaugggaugguuuccaaa

SEQ ID NO: 2225640 - RNA, 19 nt, Artificial Sequence
  Description of Artificial Sequence: Synthetic oligonucleotide
uguuuccagggugauugca

SEQ ID NO: 2225641 - RNA, 19 nt, Artificial Sequence
  Description of Artificial Sequence: Synthetic oligonucleotide
ucagggguauagucugcug

SEQ ID NO: 2225642 - RNA, 19 nt, Artificial Sequence
  Description of Artificial Sequence: Synthetic oligonucleotide
gauucggcauuaaaucuaa

SEQ ID NO: 2225643 - RNA, 19 nt, Artificial Sequence
  Description of Artificial Sequence: Synthetic oligonucleotide
aaaccuggaaccaguguua

SEQ ID NO: 2225644 - RNA, 19 nt, Artificial Sequence
  Description of Artificial Sequence: Synthetic oligonucleotide
cucguauuuuggaauggga

SEQ ID NO: 2225645 - RNA, 19 nt, Artificial Sequence
  Description of Artificial Sequence: Synthetic oligonucleotide
uucuaacacuaauguugca

SEQ ID NO: 2225646 - RNA, 19 nt, Artificial Sequence
  Description of Artificial Sequence: Synthetic oligonucleotide
cuucuugagaucuucucgu

SEQ ID NO: 2225647 - RNA, 19 nt, Artificial Sequence
  Description of Artificial Sequence: Synthetic oligonucleotide
gugauugcacugucaacca

SEQ ID NO: 2225648 - RNA, 19 nt, Artificial Sequence
  Description of Artificial Sequence: Synthetic oligonucleotide
ugggcucuagucacaguuc

SEQ ID NO: 2225649 - RNA, 19 nt, Artificial Sequence
  Description of Artificial Sequence: Synthetic oligonucleotide
ugucccggacucuguugcg

SEQ ID NO: 2225650 - RNA, 19 nt, Artificial Sequence
  Description of Artificial Sequence: Synthetic oligonucleotide
ccaguguuagacagauugg

SEQ ID NO: 2225651 - RNA, 19 nt, Artificial Sequence
  Description of Artificial Sequence: Synthetic oligonucleotide
ucauacucguuugcuuucu

SEQ ID NO: 2225652 - RNA, 19 nt, Artificial Sequence
  Description of Artificial Sequence: Synthetic oligonucleotide
agcuuugauuccaaaccug

SEQ ID NO: 2225653 - RNA, 19 nt, Artificial Sequence
  Description of Artificial Sequence: Synthetic oligonucleotide
ucgccucguauuuuggaau

SEQ ID NO: 2225654 - RNA, 19 nt, Artificial Sequence
  Description of Artificial Sequence: Synthetic oligonucleotide
uucuugagaucuucucgua

SEQ ID NO: 2225655 - RNA, 19 nt, Artificial Sequence
  Description of Artificial Sequence: Synthetic oligonucleotide
ugggauagagacgcaucca

SEQ ID NO: 2225656 - RNA, 19 nt, Artificial Sequence
  Description of Artificial Sequence: Synthetic oligonucleotide
cuucagggguauagucugc

SEQ ID NO: 2225657 - RNA, 19 nt, Artificial Sequence
  Description of Artificial Sequence: Synthetic oligonucleotide
uucagggguauagucugcu

SEQ ID NO: 2225658 - RNA, 19 nt, Artificial Sequence
  Description of Artificial Sequence: Synthetic oligonucleotide
aauucgagcuugauuucuu

SEQ ID NO: 2225659 - RNA, 19 nt, Artificial Sequence
  Description of Artificial Sequence: Synthetic oligonucleotide
cucuauuaccagguugaug

SEQ ID NO: 2225660 - RNA, 19 nt, Artificial Sequence
  Description of Artificial Sequence: Synthetic oligonucleotide
gggauaaaacuugcuagug

SEQ ID NO: 2225661 - RNA, 19 nt, Artificial Sequence
  Description of Artificial Sequence: Synthetic oligonucleotide
agggguauagucugcuguu

SEQ ID NO: 2225662 - RNA, 19 nt, Artificial Sequence
  Description of Artificial Sequence: Synthetic oligonucleotide
gcaauucucucuccuccgg

SEQ ID NO: 2225663 - RNA, 19 nt, Artificial Sequence
  Description of Artificial Sequence: Synthetic oligonucleotide
cuauuaccagguugauguc

SEQ ID NO: 2225664 - RNA, 19 nt, Artificial Sequence
  Description of Artificial Sequence: Synthetic oligonucleotide
gccacuagugaccgguggg

SEQ ID NO: 2225665 - RNA, 19 nt, Artificial Sequence
  Description of Artificial Sequence: Synthetic oligonucleotide
gggcucuagucacaguucc

SEQ ID NO: 2225666 - RNA, 19 nt, Artificial Sequence
  Description of Artificial Sequence: Synthetic oligonucleotide
uugcguucugaaaggugau

SEQ ID NO: 2225667 - RNA, 19 nt, Artificial Sequence
  Description of Artificial Sequence: Synthetic oligonucleotide
gacagauuggcaggggaaa

SEQ ID NO: 2225668 - RNA, 19 nt, Artificial Sequence
  Description of Artificial Sequence: Synthetic oligonucleotide
uucuugggagaagaauguc

SEQ ID NO: 2225669 - RNA, 19 nt, Artificial Sequence
  Description of Artificial Sequence: Synthetic oligonucleotide
accugaacuccucugccuu

SEQ ID NO: 2225670 - RNA, 19 nt, Artificial Sequence
  Description of Artificial Sequence: Synthetic oligonucleotide
ugaugucccugucccggac

SEQ ID NO: 2225671 - RNA, 19 nt, Artificial Sequence
  Description of Artificial Sequence: Synthetic oligonucleotide
gucacaguuccaucauguc

SEQ ID NO: 2225672 - RNA, 19 nt, Artificial Sequence
  Description of Artificial Sequence: Synthetic oligonucleotide
ugcuagugaaguguccuuu

SEQ ID NO: 2225673 - RNA, 19 nt, Artificial Sequence
  Description of Artificial Sequence: Synthetic oligonucleotide
cugucaaccaaugcacuca

SEQ ID NO: 2225674 - RNA, 19 nt, Artificial Sequence
  Description of Artificial Sequence: Synthetic oligonucleotide
uugcuuucaggaaguccau

SEQ ID NO: 2225675 - RNA, 19 nt, Artificial Sequence
  Description of Artificial Sequence: Synthetic oligonucleotide
acuagugaccggugggaua

SEQ ID NO: 2225676 - RNA, 19 nt, Artificial Sequence
  Description of Artificial Sequence: Synthetic oligonucleotide
ucguccguggguucgccuc

SEQ ID NO: 2225677 - RNA, 19 nt, Artificial Sequence
  Description of Artificial Sequence: Synthetic oligonucleotide
cacucuccauaagaaaauc

SEQ ID NO: 2225678 - RNA, 19 nt, Artificial Sequence
  Description of Artificial Sequence: Synthetic oligonucleotide
agugaccggugggauagag

SEQ ID NO: 2225679 - RNA, 19 nt, Artificial Sequence
  Description of Artificial Sequence: Synthetic oligonucleotide
gcagggauaaaacuugcua

SEQ ID NO: 2225680 - RNA, 19 nt, Artificial Sequence
  Description of Artificial Sequence: Synthetic oligonucleotide
acacucuccauaagaaaau

SEQ ID NO: 2225681 - RNA, 19 nt, Artificial Sequence
  Description of Artificial Sequence: Synthetic oligonucleotide
ggauauuauuaucuccucu

SEQ ID NO: 2225682 - RNA, 19 nt, Artificial Sequence
  Description of Artificial Sequence: Synthetic oligonucleotide
cauacucguuugcuuucug

SEQ ID NO: 2225683 - RNA, 19 nt, Artificial Sequence
  Description of Artificial Sequence: Synthetic oligonucleotide
augggaugguuuccaaaua

SEQ ID NO: 2225684 - RNA, 19 nt, Artificial Sequence
  Description of Artificial Sequence: Synthetic oligonucleotide
gaaccaguguuagacagau

SEQ ID NO: 2225685 - RNA, 19 nt, Artificial Sequence
  Description of Artificial Sequence: Synthetic oligonucleotide
gaagacgacugucaacuuu

SEQ ID NO: 2225686 - RNA, 19 nt, Artificial Sequence
  Description of Artificial Sequence: Synthetic oligonucleotide
guucgccucguauuuugga

SEQ ID NO: 2225687 - RNA, 19 nt, Artificial Sequence
  Description of Artificial Sequence: Synthetic oligonucleotide
gaccggugggauagagacg

SEQ ID NO: 2225688 - RNA, 19 nt, Artificial Sequence
  Description of Artificial Sequence: Synthetic oligonucleotide
gucuacuuuccuuguaagu

SEQ ID NO: 2225689 - RNA, 19 nt, Artificial Sequence
  Description of Artificial Sequence: Synthetic oligonucleotide
aguuucucugaaagugcca

SEQ ID NO: 2225690 - RNA, 19 nt, Artificial Sequence
  Description of Artificial Sequence: Synthetic oligonucleotide
uugcuagugaaguguccuu

SEQ ID NO: 2225691 - RNA, 19 nt, Artificial Sequence
  Description of Artificial Sequence: Synthetic oligonucleotide
cugaacuccucugccuuug

SEQ ID NO: 2225692 - RNA, 19 nt, Artificial Sequence
  Description of Artificial Sequence: Synthetic oligonucleotide
agacgacugucaacuuugg

SEQ ID NO: 2225693 - RNA, 19 nt, Artificial Sequence
  Description of Artificial Sequence: Synthetic oligonucleotide
ugaagacgacugucaacuu

SEQ ID NO: 2225694 - RNA, 19 nt, Artificial Sequence
  Description of Artificial Sequence: Synthetic oligonucleotide
ucguuugcuuucuguuuua

SEQ ID NO: 2225695 - RNA, 19 nt, Artificial Sequence
  Description of Artificial Sequence: Synthetic oligonucleotide
cuugcuagugaaguguccu

SEQ ID NO: 2225696 - RNA, 19 nt, Artificial Sequence
  Description of Artificial Sequence: Synthetic oligonucleotide
agagauggauucggcauua

SEQ ID NO: 2225697 - RNA, 19 nt, Artificial Sequence
  Description of Artificial Sequence: Synthetic oligonucleotide
acucuuggauuugguacga

SEQ ID NO: 2225698 - RNA, 19 nt, Artificial Sequence
  Description of Artificial Sequence: Synthetic oligonucleotide
ccaaaccugaacuccucug

SEQ ID NO: 2225699 - RNA, 19 nt, Artificial Sequence
  Description of Artificial Sequence: Synthetic oligonucleotide
gcuucaauggcaucuaauu

SEQ ID NO: 2225700 - RNA, 19 nt, Artificial Sequence
  Description of Artificial Sequence: Synthetic oligonucleotide
auuuuggaaugggaugguu

SEQ ID NO: 2225701 - RNA, 19 nt, Artificial Sequence
  Description of Artificial Sequence: Synthetic oligonucleotide
ggguucgccucguauuuug

SEQ ID NO: 2225702 - RNA, 19 nt, Artificial Sequence
  Description of Artificial Sequence: Synthetic oligonucleotide
agcuucaauggcaucuaau

SEQ ID NO: 2225703 - RNA, 19 nt, Artificial Sequence
  Description of Artificial Sequence: Synthetic oligonucleotide
gguauagucugcuguuuua

SEQ ID NO: 2225704 - RNA, 19 nt, Artificial Sequence
  Description of Artificial Sequence: Synthetic oligonucleotide
cacugcagggauaaaacuu

SEQ ID NO: 2225705 - RNA, 19 nt, Artificial Sequence
  Description of Artificial Sequence: Synthetic oligonucleotide
ccucguauuuuggaauggg

SEQ ID NO: 2225706 - RNA, 19 nt, Artificial Sequence
  Description of Artificial Sequence: Synthetic oligonucleotide
gacuucuugggagaagaau

SEQ ID NO: 2225707 - RNA, 19 nt, Artificial Sequence
  Description of Artificial Sequence: Synthetic oligonucleotide
aggucggaagucaaaucau

SEQ ID NO: 2225708 - RNA, 19 nt, Artificial Sequence
  Description of Artificial Sequence: Synthetic oligonucleotide
gcagcaaccugcaauucuc

SEQ ID NO: 2225709 - RNA, 19 nt, Artificial Sequence
  Description of Artificial Sequence: Synthetic oligonucleotide
cucugaaagugccacuagu

SEQ ID NO: 2225710 - RNA, 19 nt, Artificial Sequence
  Description of Artificial Sequence: Synthetic oligonucleotide
aguccucuauuaccagguu

SEQ ID NO: 2225711 - RNA, 19 nt, Artificial Sequence
  Description of Artificial Sequence: Synthetic oligonucleotide
ugcguucugaaaggugaua

SEQ ID NO: 2225712 - RNA, 19 nt, Artificial Sequence
  Description of Artificial Sequence: Synthetic oligonucleotide
auccaugccucuagcagaa

SEQ ID NO: 2225713 - RNA, 19 nt, Artificial Sequence
  Description of Artificial Sequence: Synthetic oligonucleotide
gcaaccugcaauucucucu

SEQ ID NO: 2225714 - RNA, 19 nt, Artificial Sequence
  Description of Artificial Sequence: Synthetic oligonucleotide
cagggguauagucugcugu

SEQ ID NO: 2225715 - RNA, 19 nt, Artificial Sequence
  Description of Artificial Sequence: Synthetic oligonucleotide
gguucgccucguauuuugg

SEQ ID NO: 2225716 - RNA, 19 nt, Artificial Sequence
  Description of Artificial Sequence: Synthetic oligonucleotide
guauagucugcuguuuuau

SEQ ID NO: 2225717 - RNA, 19 nt, Artificial Sequence
  Description of Artificial Sequence: Synthetic oligonucleotide
cagggugauugcacuguca

SEQ ID NO: 2225718 - RNA, 19 nt, Artificial Sequence
  Description of Artificial Sequence: Synthetic oligonucleotide
acgcagcaaccugcaauuc

SEQ ID NO: 2225719 - RNA, 19 nt, Artificial Sequence
  Description of Artificial Sequence: Synthetic oligonucleotide
ggugggauagagacgcauc

SEQ ID NO: 2225720 - RNA, 19 nt, Artificial Sequence
  Description of Artificial Sequence: Synthetic oligonucleotide
gccucguauuuuggaaugg

SEQ ID NO: 2225721 - RNA, 19 nt, Artificial Sequence
  Description of Artificial Sequence: Synthetic oligonucleotide
gcuucugauucauacucgu

SEQ ID NO: 2225722 - RNA, 19 nt, Artificial Sequence
  Description of Artificial Sequence: Synthetic oligonucleotide
uucugucguccguggguuc

SEQ ID NO: 2225723 - RNA, 19 nt, Artificial Sequence
  Description of Artificial Sequence: Synthetic oligonucleotide
cucguuugcuuucuguuuu

SEQ ID NO: 2225724 - RNA, 19 nt, Artificial Sequence
  Description of Artificial Sequence: Synthetic oligonucleotide
gggugauugcacugucaac

SEQ ID NO: 2225725 - RNA, 19 nt, Artificial Sequence
  Description of Artificial Sequence: Synthetic oligonucleotide
ucccggacucuguugcguu

SEQ ID NO: 2225726 - RNA, 19 nt, Artificial Sequence
  Description of Artificial Sequence: Synthetic oligonucleotide
caauucgagcuugauuucu

SEQ ID NO: 2225727 - RNA, 19 nt, Artificial Sequence
  Description of Artificial Sequence: Synthetic oligonucleotide
ugucguccguggguucgcc

SEQ ID NO: 2225728 - RNA, 19 nt, Artificial Sequence
  Description of Artificial Sequence: Synthetic oligonucleotide
cacgcagcaaccugcaauu

SEQ ID NO: 2225729 - RNA, 19 nt, Artificial Sequence
  Description of Artificial Sequence: Synthetic oligonucleotide
cuaauguugcagucagauu

SEQ ID NO: 2225730 - RNA, 19 nt, Artificial Sequence
  Description of Artificial Sequence: Synthetic oligonucleotide
cuugagcaagagauggauu

SEQ ID NO: 2225731 - RNA, 19 nt, Artificial Sequence
  Description of Artificial Sequence: Synthetic oligonucleotide
gggauagagacgcauccau

SEQ ID NO: 2225732 - RNA, 19 nt, Artificial Sequence
  Description of Artificial Sequence: Synthetic oligonucleotide
acugucaacuuuggcccuu

SEQ ID NO: 2225733 - RNA, 19 nt, Artificial Sequence
  Description of Artificial Sequence: Synthetic oligonucleotide
cuuuggcccuuuccgcaga

SEQ ID NO: 2225734 - RNA, 19 nt, Artificial Sequence
  Description of Artificial Sequence: Synthetic oligonucleotide
cucugccuucuugagaucu

SEQ ID NO: 2225735 - RNA, 19 nt, Artificial Sequence
  Description of Artificial Sequence: Synthetic oligonucleotide
cuucacucuuggauuuggu

SEQ ID NO: 2225736 - RNA, 19 nt, Artificial Sequence
  Description of Artificial Sequence: Synthetic oligonucleotide
gugaccggugggauagaga

SEQ ID NO: 2225737 - RNA, 19 nt, Artificial Sequence
  Description of Artificial Sequence: Synthetic oligonucleotide
cugucguccguggguucgc

SEQ ID NO: 2225738 - RNA, 19 nt, Artificial Sequence
  Description of Artificial Sequence: Synthetic oligonucleotide
guggguucgccucguauuu

SEQ ID NO: 2225739 - RNA, 19 nt, Artificial Sequence
  Description of Artificial Sequence: Synthetic oligonucleotide
cgccucguauuuuggaaug

SEQ ID NO: 2225740 - RNA, 19 nt, Artificial Sequence
  Description of Artificial Sequence: Synthetic oligonucleotide
agacgcauccaugccucua

SEQ ID NO: 2225741 - RNA, 19 nt, Artificial Sequence
  Description of Artificial Sequence: Synthetic oligonucleotide
accacgcagcaaccugcaa

SEQ ID NO: 2225742 - RNA, 19 nt, Artificial Sequence
  Description of Artificial Sequence: Synthetic oligonucleotide
uggguucgccucguauuuu

SEQ ID NO: 2225743 - RNA, 19 nt, Artificial Sequence
  Description of Artificial Sequence: Synthetic oligonucleotide
gagauggauucggcauuaa

SEQ ID NO: 2225744 - RNA, 19 nt, Artificial Sequence
  Description of Artificial Sequence: Synthetic oligonucleotide
gugccacuagugaccggug

SEQ ID NO: 2225745 - RNA, 19 nt, Artificial Sequence
  Description of Artificial Sequence: Synthetic oligonucleotide
aaccaguguuagacagauu

SEQ ID NO: 2225746 - RNA, 19 nt, Artificial Sequence
  Description of Artificial Sequence: Synthetic oligonucleotide
cagcaaccugcaauucucu

SEQ ID NO: 2225747 - RNA, 19 nt, Artificial Sequence
  Description of Artificial Sequence: Synthetic oligonucleotide
gcguucugaaaggugauau

SEQ ID NO: 2225748 - RNA, 19 nt, Artificial Sequence
  Description of Artificial Sequence: Synthetic oligonucleotide
gagacgcauccaugccucu

SEQ ID NO: 2225749 - RNA, 19 nt, Artificial Sequence
  Description of Artificial Sequence: Synthetic oligonucleotide
uagugaccggugggauaga

SEQ ID NO: 2225750 - RNA, 19 nt, Artificial Sequence
  Description of Artificial Sequence: Synthetic oligonucleotide
uccaugccucuagcagaaa

SEQ ID NO: 2225751 - RNA, 19 nt, Artificial Sequence
  Description of Artificial Sequence: Synthetic oligonucleotide
ggguauagucugcuguuuu

SEQ ID NO: 2225752 - RNA, 19 nt, Artificial Sequence
  Description of Artificial Sequence: Synthetic oligonucleotide
uccguggguucgccucgua

SEQ ID NO: 2225753 - RNA, 19 nt, Artificial Sequence
  Description of Artificial Sequence: Synthetic oligonucleotide
gcucuagucacaguuccau

SEQ ID NO: 2225754 - RNA, 19 nt, Artificial Sequence
  Description of Artificial Sequence: Synthetic oligonucleotide
ggcaucuaauucucucuuu

SEQ ID NO: 2225755 - RNA, 19 nt, Artificial Sequence
  Description of Artificial Sequence: Synthetic oligonucleotide
ggcucuagucacaguucca

SEQ ID NO: 2225756 - RNA, 19 nt, Artificial Sequence
  Description of Artificial Sequence: Synthetic oligonucleotide
cguccguggguucgccucg

SEQ ID NO: 2225757 - RNA, 19 nt, Artificial Sequence
  Description of Artificial Sequence: Synthetic oligonucleotide
gaaugucuacugggcucua

SEQ ID NO: 2225758 - RNA, 19 nt, Artificial Sequence
  Description of Artificial Sequence: Synthetic oligonucleotide
cuguugcguucugaaaggu

SEQ ID NO: 2225759 - RNA, 19 nt, Artificial Sequence
  Description of Artificial Sequence: Synthetic oligonucleotide
ccacuagugaccgguggga

SEQ ID NO: 2225760 - RNA, 19 nt, Artificial Sequence
  Description of Artificial Sequence: Synthetic oligonucleotide
cucuuggauuugguacgaa

SEQ ID NO: 2225761 - RNA, 19 nt, Artificial Sequence
  Description of Artificial Sequence: Synthetic oligonucleotide
gaacagucauugacuucuu

SEQ ID NO: 2225762 - RNA, 19 nt, Artificial Sequence
  Description of Artificial Sequence: Synthetic oligonucleotide
ggucggaagucaaaucauu

SEQ ID NO: 2225763 - RNA, 19 nt, Artificial Sequence
  Description of Artificial Sequence: Synthetic oligonucleotide
ccaaugcacucagaaaccu

SEQ ID NO: 2225764 - RNA, 19 nt, Artificial Sequence
  Description of Artificial Sequence: Synthetic oligonucleotide
gucccggacucuguugcgu

SEQ ID NO: 2225765 - RNA, 19 nt, Artificial Sequence
  Description of Artificial Sequence: Synthetic oligonucleotide
ccacgcagcaaccugcaau

SEQ ID NO: 2225766 - RNA, 19 nt, Artificial Sequence
  Description of Artificial Sequence: Synthetic oligonucleotide
gucguccguggguucgccu

SEQ ID NO: 2225767 - RNA, 19 nt, Artificial Sequence
  Description of Artificial Sequence: Synthetic oligonucleotide
cacuagugaccggugggau

SEQ ID NO: 2225768 - RNA, 19 nt, Artificial Sequence
  Description of Artificial Sequence: Synthetic oligonucleotide
ccaucaugucuacuuuccu

SEQ ID NO: 2225769 - RNA, 19 nt, Artificial Sequence
  Description of Artificial Sequence: Synthetic oligonucleotide
cgcagcaaccugcaauucu

SEQ ID NO: 2225770 - RNA, 19 nt, Artificial Sequence
  Description of Artificial Sequence: Synthetic oligonucleotide
gggguauagucugcuguuu

SEQ ID NO: 2225771 - RNA, 19 nt, Artificial Sequence
  Description of Artificial Sequence: Synthetic oligonucleotide
cguggguucgccucguauu

SEQ ID NO: 2225772 - RNA, 19 nt, Artificial Sequence
  Description of Artificial Sequence: Synthetic oligonucleotide
cguuugcuuucuguuuuaa

SEQ ID NO: 2225773 - RNA, 19 nt, Artificial Sequence
  Description of Artificial Sequence: Synthetic oligonucleotide
cugucaacuuuggcccuuu

SEQ ID NO: 2225774 - RNA, 19 nt, Artificial Sequence
  Description of Artificial Sequence: Synthetic oligonucleotide
guccguggguucgccucgu

SEQ ID NO: 2225775 - RNA, 19 nt, Artificial Sequence
  Description of Artificial Sequence: Synthetic oligonucleotide
ccggacucuguugcguucu

SEQ ID NO: 2225776 - RNA, 19 nt, Artificial Sequence
  Description of Artificial Sequence: Synthetic oligonucleotide
ccggugggauagagacgca

SEQ ID NO: 2225777 - RNA, 19 nt, Artificial Sequence
  Description of Artificial Sequence: Synthetic oligonucleotide
ccucuauuaccagguugau

SEQ ID NO: 2225778 - RNA, 19 nt, Artificial Sequence
  Description of Artificial Sequence: Synthetic oligonucleotide
ccguggguucgccucguau

SEQ ID NO: 2225779 - RNA, 19 nt, Artificial Sequence
  Description of Artificial Sequence: Synthetic oligonucleotide
cggugggauagagacgcau

SEQ ID NO: 2225780 - RNA, 19 nt, Artificial Sequence
  Description of Artificial Sequence: Synthetic oligonucleotide
aaucaaaucauacacacga

SEQ ID NO: 2225781 - RNA, 19 nt, Artificial Sequence
  Description of Artificial Sequence: Synthetic oligonucleotide
uucucuaccaccaagaggc

SEQ ID NO: 2225782 - RNA, 19 nt, Artificial Sequence
  Description of Artificial Sequence: Synthetic oligonucleotide
uuucugaaaauucugauug

SEQ ID NO: 2225783 - RNA, 19 nt, Artificial Sequence
  Description of Artificial Sequence: Synthetic oligonucleotide
aaugaucucauccucaaag

SEQ ID NO: 2225784 - RNA, 19 nt, Artificial Sequence
  Description of Artificial Sequence: Synthetic oligonucleotide
gauauguucagauaaauga

SEQ ID NO: 2225785 - RNA, 19 nt, Artificial Sequence
  Description of Artificial Sequence: Synthetic oligonucleotide
aauguaaccuucuuucaac

SEQ ID NO: 2225786 - RNA, 19 nt, Artificial Sequence
  Description of Artificial Sequence: Synthetic oligonucleotide
uguaacuacaauugcaggg

SEQ ID NO: 2225787 - RNA, 19 nt, Artificial Sequence
  Description of Artificial Sequence: Synthetic oligonucleotide
aaagauaucuagauucucc

SEQ ID NO: 2225788 - RNA, 19 nt, Artificial Sequence
  Description of Artificial Sequence: Synthetic oligonucleotide
cuuugaacugcucagaugc

SEQ ID NO: 2225789 - RNA, 19 nt, Artificial Sequence
  Description of Artificial Sequence: Synthetic oligonucleotide
auaacuuguacugugacac

SEQ ID NO: 2225790 - RNA, 19 nt, Artificial Sequence
  Description of Artificial Sequence: Synthetic oligonucleotide
aacgaugaaacacaggacu

SEQ ID NO: 2225791 - RNA, 19 nt, Artificial Sequence
  Description of Artificial Sequence: Synthetic oligonucleotide
aaugugugucaauaugggc

SEQ ID NO: 2225792 - RNA, 19 nt, Artificial Sequence
  Description of Artificial Sequence: Synthetic oligonucleotide
aaaucauacacacgacugg

SEQ ID NO: 2225793 - RNA, 19 nt, Artificial Sequence
  Description of Artificial Sequence: Synthetic oligonucleotide
aauuccaugaguccaaaga

SEQ ID NO: 2225794 - RNA, 19 nt, Artificial Sequence
  Description of Artificial Sequence: Synthetic oligonucleotide
cauaguggaauucauaacc

SEQ ID NO: 2225795 - RNA, 19 nt, Artificial Sequence
  Description of Artificial Sequence: Synthetic oligonucleotide
gauuauuccaccuuugaac

SEQ ID NO: 2225796 - RNA, 19 nt, Artificial Sequence
  Description of Artificial Sequence: Synthetic oligonucleotide
cuaacguaaaugauguucg

SEQ ID NO: 2225797 - RNA, 19 nt, Artificial Sequence
  Description of Artificial Sequence: Synthetic oligonucleotide
aauucugauugucuguguc

SEQ ID NO: 2225798 - RNA, 19 nt, Artificial Sequence
  Description of Artificial Sequence: Synthetic oligonucleotide
uuuccuaacguaaaugaug

SEQ ID NO: 2225799 - RNA, 19 nt, Artificial Sequence
  Description of Artificial Sequence: Synthetic oligonucleotide
gagagaaaugaucucaucc

SEQ ID NO: 2225800 - RNA, 19 nt, Artificial Sequence
  Description of Artificial Sequence: Synthetic oligonucleotide
uuugaagaacaacacacca

SEQ ID NO: 2225801 - RNA, 19 nt, Artificial Sequence
  Description of Artificial Sequence: Synthetic oligonucleotide
uucauaaccaaaauguuua

SEQ ID NO: 2225802 - RNA, 19 nt, Artificial Sequence
  Description of Artificial Sequence: Synthetic oligonucleotide
guaacgaugaaacacagga

SEQ ID NO: 2225803 - RNA, 19 nt, Artificial Sequence
  Description of Artificial Sequence: Synthetic oligonucleotide
uucagauaaaugaucagac

SEQ ID NO: 2225804 - RNA, 19 nt, Artificial Sequence
  Description of Artificial Sequence: Synthetic oligonucleotide
uugcaaucaaaucauacac

SEQ ID NO: 2225805 - RNA, 19 nt, Artificial Sequence
  Description of Artificial Sequence: Synthetic oligonucleotide
uuaacacuuuccaaaagca

SEQ ID NO: 2225806 - RNA, 19 nt, Artificial Sequence
  Description of Artificial Sequence: Synthetic oligonucleotide
uguugcaaaugucaggaag

SEQ ID NO: 2225807 - RNA, 19 nt, Artificial Sequence
  Description of Artificial Sequence: Synthetic oligonucleotide
agccaaauggcucaacagc

SEQ ID NO: 2225808 - RNA, 19 nt, Artificial Sequence
  Description of Artificial Sequence: Synthetic oligonucleotide
aaccaaaauguuuaacucu

SEQ ID NO: 2225809 - RNA, 19 nt, Artificial Sequence
  Description of Artificial Sequence: Synthetic oligonucleotide
ucagguuuauguuuaaugu

SEQ ID NO: 2225810 - RNA, 19 nt, Artificial Sequence
  Description of Artificial Sequence: Synthetic oligonucleotide
ugauguucgaauuccacgc

SEQ ID NO: 2225811 - RNA, 19 nt, Artificial Sequence
  Description of Artificial Sequence: Synthetic oligonucleotide
uuuuaaggauuucugaaaa

SEQ ID NO: 2225812 - RNA, 19 nt, Artificial Sequence
  Description of Artificial Sequence: Synthetic oligonucleotide
auuauuccaccuuugaacu

SEQ ID NO: 2225813 - RNA, 19 nt, Artificial Sequence
  Description of Artificial Sequence: Synthetic oligonucleotide
ugauuuauggucaacugau

SEQ ID NO: 2225814 - RNA, 19 nt, Artificial Sequence
  Description of Artificial Sequence: Synthetic oligonucleotide
aagauaucuagauucuccu

SEQ ID NO: 2225815 - RNA, 19 nt, Artificial Sequence
  Description of Artificial Sequence: Synthetic oligonucleotide
ugaagaacaacacaccaau

SEQ ID NO: 2225816 - RNA, 19 nt, Artificial Sequence
  Description of Artificial Sequence: Synthetic oligonucleotide
ugaucagaccuuuugaaga

SEQ ID NO: 2225817 - RNA, 19 nt, Artificial Sequence
  Description of Artificial Sequence: Synthetic oligonucleotide
gaauucauaaccaaaaugu

SEQ ID NO: 2225818 - RNA, 19 nt, Artificial Sequence
  Description of Artificial Sequence: Synthetic oligonucleotide
augauguucgaauuccacg

SEQ ID NO: 2225819 - RNA, 19 nt, Artificial Sequence
  Description of Artificial Sequence: Synthetic oligonucleotide
uccauaacaaucucugacc

SEQ ID NO: 2225820 - RNA, 19 nt, Artificial Sequence
  Description of Artificial Sequence: Synthetic oligonucleotide
uuauacuugauauguucag

SEQ ID NO: 2225821 - RNA, 19 nt, Artificial Sequence
  Description of Artificial Sequence: Synthetic oligonucleotide
gacgagguaacauaacuug

SEQ ID NO: 2225822 - RNA, 19 nt, Artificial Sequence
  Description of Artificial Sequence: Synthetic oligonucleotide
ucaaaucauacacacgacu

SEQ ID NO: 2225823 - RNA, 19 nt, Artificial Sequence
  Description of Artificial Sequence: Synthetic oligonucleotide
auaguagcucuucagaaug

SEQ ID NO: 2225824 - RNA, 19 nt, Artificial Sequence
  Description of Artificial Sequence: Synthetic oligonucleotide
acaccaauucccuugauca

SEQ ID NO: 2225825 - RNA, 19 nt, Artificial Sequence
  Description of Artificial Sequence: Synthetic oligonucleotide
uacaugguaguaacgauga

SEQ ID NO: 2225826 - RNA, 19 nt, Artificial Sequence
  Description of Artificial Sequence: Synthetic oligonucleotide
uuccuaacguaaaugaugu

SEQ ID NO: 2225827 - RNA, 19 nt, Artificial Sequence
  Description of Artificial Sequence: Synthetic oligonucleotide
uuucucuaccaccaagagg

SEQ ID NO: 2225828 - RNA, 19 nt, Artificial Sequence
  Description of Artificial Sequence: Synthetic oligonucleotide
uuauggucaacugaucagg

SEQ ID NO: 2225829 - RNA, 19 nt, Artificial Sequence
  Description of Artificial Sequence: Synthetic oligonucleotide
auuuauggucaacugauca

SEQ ID NO: 2225830 - RNA, 19 nt, Artificial Sequence
  Description of Artificial Sequence: Synthetic oligonucleotide
caaaucauacacacgacug

SEQ ID NO: 2225831 - RNA, 19 nt, Artificial Sequence
  Description of Artificial Sequence: Synthetic oligonucleotide
uauguuuaauguaaccuuc

SEQ ID NO: 2225832 - RNA, 19 nt, Artificial Sequence
  Description of Artificial Sequence: Synthetic oligonucleotide
auguaaccuucuuucaacc

SEQ ID NO: 2225833 - RNA, 19 nt, Artificial Sequence
  Description of Artificial Sequence: Synthetic oligonucleotide
aucagguuuauguuuaaug

SEQ ID NO: 2225834 - RNA, 19 nt, Artificial Sequence
  Description of Artificial Sequence: Synthetic oligonucleotide
ucauacugauuuaugguca

SEQ ID NO: 2225835 - RNA, 19 nt, Artificial Sequence
  Description of Artificial Sequence: Synthetic oligonucleotide
agaaugugugucaauaugg

SEQ ID NO: 2225836 - RNA, 19 nt, Artificial Sequence
  Description of Artificial Sequence: Synthetic oligonucleotide
uguacugugacacccucug

SEQ ID NO: 2225837 - RNA, 19 nt, Artificial Sequence
  Description of Artificial Sequence: Synthetic oligonucleotide
aaaggcuuauccuuaucca

SEQ ID NO: 2225838 - RNA, 19 nt, Artificial Sequence
  Description of Artificial Sequence: Synthetic oligonucleotide
gguucauacugauuuaugg

SEQ ID NO: 2225839 - RNA, 19 nt, Artificial Sequence
  Description of Artificial Sequence: Synthetic oligonucleotide
uuaaagucaagucuccgau

SEQ ID NO: 2225840 - RNA, 19 nt, Artificial Sequence
  Description of Artificial Sequence: Synthetic oligonucleotide
uauguucagauaaaugauc

SEQ ID NO: 2225841 - RNA, 19 nt, Artificial Sequence
  Description of Artificial Sequence: Synthetic oligonucleotide
ugaaacacaggacuugggu

SEQ ID NO: 2225842 - RNA, 19 nt, Artificial Sequence
  Description of Artificial Sequence: Synthetic oligonucleotide
ucuugcaaucaaaucauac

SEQ ID NO: 2225843 - RNA, 19 nt, Artificial Sequence
  Description of Artificial Sequence: Synthetic oligonucleotide
uaacauaacuuguacugug

SEQ ID NO: 2225844 - RNA, 19 nt, Artificial Sequence
  Description of Artificial Sequence: Synthetic oligonucleotide
ugcuuaaaauccauaacaa

SEQ ID NO: 2225845 - RNA, 19 nt, Artificial Sequence
  Description of Artificial Sequence: Synthetic oligonucleotide
uuauguuuaauguaaccuu

SEQ ID NO: 2225846 - RNA, 19 nt, Artificial Sequence
  Description of Artificial Sequence: Synthetic oligonucleotide
cacaguguuguucucauag

SEQ ID NO: 2225847 - RNA, 19 nt, Artificial Sequence
  Description of Artificial Sequence: Synthetic oligonucleotide
gugcuuaaaauccauaaca

SEQ ID NO: 2225848 - RNA, 19 nt, Artificial Sequence
  Description of Artificial Sequence: Synthetic oligonucleotide
gcaaaugucaggaagaccc

SEQ ID NO: 2225849 - RNA, 19 nt, Artificial Sequence
  Description of Artificial Sequence: Synthetic oligonucleotide
ugaguccaaagauaucuag

SEQ ID NO: 2225850 - RNA, 19 nt, Artificial Sequence
  Description of Artificial Sequence: Synthetic oligonucleotide
uccauguccagguucauac

SEQ ID NO: 2225851 - RNA, 19 nt, Artificial Sequence
  Description of Artificial Sequence: Synthetic oligonucleotide
ugcaaucaaaucauacaca

SEQ ID NO: 2225852 - RNA, 19 nt, Artificial Sequence
  Description of Artificial Sequence: Synthetic oligonucleotide
gaaugugugucaauauggg

SEQ ID NO: 2225853 - RNA, 19 nt, Artificial Sequence
  Description of Artificial Sequence: Synthetic oligonucleotide
ucuccgaugucacugguga

SEQ ID NO: 2225854 - RNA, 19 nt, Artificial Sequence
  Description of Artificial Sequence: Synthetic oligonucleotide
agaagaaauaauuucucua

SEQ ID NO: 2225855 - RNA, 19 nt, Artificial Sequence
  Description of Artificial Sequence: Synthetic oligonucleotide
uaagccaaauggcucaaca

SEQ ID NO: 2225856 - RNA, 19 nt, Artificial Sequence
  Description of Artificial Sequence: Synthetic oligonucleotide
uuuucuggguguaauucca

SEQ ID NO: 2225857 - RNA, 19 nt, Artificial Sequence
  Description of Artificial Sequence: Synthetic oligonucleotide
augaucagaccuuuugaag

SEQ ID NO: 2225858 - RNA, 19 nt, Artificial Sequence
  Description of Artificial Sequence: Synthetic oligonucleotide
uccaccuuugaacugcuca

SEQ ID NO: 2225859 - RNA, 19 nt, Artificial Sequence
  Description of Artificial Sequence: Synthetic oligonucleotide
auaucuagauucuccuguc

SEQ ID NO: 2225860 - RNA, 19 nt, Artificial Sequence
  Description of Artificial Sequence: Synthetic oligonucleotide
ucuccuguccaauuaacac

SEQ ID NO: 2225861 - RNA, 19 nt, Artificial Sequence
  Description of Artificial Sequence: Synthetic oligonucleotide
uaauguaaccuucuuucaa

SEQ ID NO: 2225862 - RNA, 19 nt, Artificial Sequence
  Description of Artificial Sequence: Synthetic oligonucleotide
cagaauacaugguaguaac

SEQ ID NO: 2225863 - RNA, 19 nt, Artificial Sequence
  Description of Artificial Sequence: Synthetic oligonucleotide
gaauacaugguaguaacga

SEQ ID NO: 2225864 - RNA, 19 nt, Artificial Sequence
  Description of Artificial Sequence: Synthetic oligonucleotide
ucaccagcaaacuccgacg

SEQ ID NO: 2225865 - RNA, 19 nt, Artificial Sequence
  Description of Artificial Sequence: Synthetic oligonucleotide
cucaaaggcagaaugugug

SEQ ID NO: 2225866 - RNA, 19 nt, Artificial Sequence
  Description of Artificial Sequence: Synthetic oligonucleotide
cucugucugucacagaccg

SEQ ID NO: 2225867 - RNA, 19 nt, Artificial Sequence
  Description of Artificial Sequence: Synthetic oligonucleotide
aaggauuucugaaaauucu

SEQ ID NO: 2225868 - RNA, 19 nt, Artificial Sequence
  Description of Artificial Sequence: Synthetic oligonucleotide
acugauuuauggucaacug

SEQ ID NO: 2225869 - RNA, 19 nt, Artificial Sequence
  Description of Artificial Sequence: Synthetic oligonucleotide
auaacaaucucugacccca

SEQ ID NO: 2225870 - RNA, 19 nt, Artificial Sequence
  Description of Artificial Sequence: Synthetic oligonucleotide
ggaauucauaaccaaaaug

SEQ ID NO: 2225871 - RNA, 19 nt, Artificial Sequence
  Description of Artificial Sequence: Synthetic oligonucleotide
guaacuacaauugcagggc

SEQ ID NO: 2225872 - RNA, 19 nt, Artificial Sequence
  Description of Artificial Sequence: Synthetic oligonucleotide
ucucugaccccaaacugag

SEQ ID NO: 2225873 - RNA, 19 nt, Artificial Sequence
  Description of Artificial Sequence: Synthetic oligonucleotide
uguucagauaaaugaucag

SEQ ID NO: 2225874 - RNA, 19 nt, Artificial Sequence
  Description of Artificial Sequence: Synthetic oligonucleotide
cuuuacugcucucuggaag

SEQ ID NO: 2225875 - RNA, 19 nt, Artificial Sequence
  Description of Artificial Sequence: Synthetic oligonucleotide
auucccuugaucauaguag

SEQ ID NO: 2225876 - RNA, 19 nt, Artificial Sequence
  Description of Artificial Sequence: Synthetic oligonucleotide
ugauuauuccaccuuugaa

SEQ ID NO: 2225877 - RNA, 19 nt, Artificial Sequence
  Description of Artificial Sequence: Synthetic oligonucleotide
uggacaguaucaaauuuuc

SEQ ID NO: 2225878 - RNA, 19 nt, Artificial Sequence
  Description of Artificial Sequence: Synthetic oligonucleotide
gaaugcuaacaucacccag

SEQ ID NO: 2225879 - RNA, 19 nt, Artificial Sequence
  Description of Artificial Sequence: Synthetic oligonucleotide
aguaucaaauuuucugggu

SEQ ID NO: 2225880 - RNA, 19 nt, Artificial Sequence
  Description of Artificial Sequence: Synthetic oligonucleotide
uuauccuuauccacagugu

SEQ ID NO: 2225881 - RNA, 19 nt, Artificial Sequence
  Description of Artificial Sequence: Synthetic oligonucleotide
uugaagaacaacacaccaa

SEQ ID NO: 2225882 - RNA, 19 nt, Artificial Sequence
  Description of Artificial Sequence: Synthetic oligonucleotide
auacuugauauguucagau

SEQ ID NO: 2225883 - RNA, 19 nt, Artificial Sequence
  Description of Artificial Sequence: Synthetic oligonucleotide
caaaagcauuuucucaucc

SEQ ID NO: 2225884 - RNA, 19 nt, Artificial Sequence
  Description of Artificial Sequence: Synthetic oligonucleotide
auguuuuaaggauuucuga

SEQ ID NO: 2225885 - RNA, 19 nt, Artificial Sequence
  Description of Artificial Sequence: Synthetic oligonucleotide
uguucgaauuccacgcuug

SEQ ID NO: 2225886 - RNA, 19 nt, Artificial Sequence
  Description of Artificial Sequence: Synthetic oligonucleotide
gcuucuugcaaucaaauca

SEQ ID NO: 2225887 - RNA, 19 nt, Artificial Sequence
  Description of Artificial Sequence: Synthetic oligonucleotide
ugugacacccucugggugc

SEQ ID NO: 2225888 - RNA, 19 nt, Artificial Sequence
  Description of Artificial Sequence: Synthetic oligonucleotide
caaucaaaucauacacacg

SEQ ID NO: 2225889 - RNA, 19 nt, Artificial Sequence
  Description of Artificial Sequence: Synthetic oligonucleotide
acguaaaugauguucgaau

SEQ ID NO: 2225890 - RNA, 19 nt, Artificial Sequence
  Description of Artificial Sequence: Synthetic oligonucleotide
aguguuguucucauagugg

SEQ ID NO: 2225891 - RNA, 19 nt, Artificial Sequence
  Description of Artificial Sequence: Synthetic oligonucleotide
aauccauaacaaucucuga

SEQ ID NO: 2225892 - RNA, 19 nt, Artificial Sequence
  Description of Artificial Sequence: Synthetic oligonucleotide
aagucuccgaugucacugg

SEQ ID NO: 2225893 - RNA, 19 nt, Artificial Sequence
  Description of Artificial Sequence: Synthetic oligonucleotide
gagguaacauaacuuguac

SEQ ID NO: 2225894 - RNA, 19 nt, Artificial Sequence
  Description of Artificial Sequence: Synthetic oligonucleotide
guaaaugauguucgaauuc

SEQ ID NO: 2225895 - RNA, 19 nt, Artificial Sequence
  Description of Artificial Sequence: Synthetic oligonucleotide
gguaguaacgaugaaacac

SEQ ID NO: 2225896 - RNA, 19 nt, Artificial Sequence
  Description of Artificial Sequence: Synthetic oligonucleotide
uugucugugucuccugucc

SEQ ID NO: 2225897 - RNA, 19 nt, Artificial Sequence
  Description of Artificial Sequence: Synthetic oligonucleotide
uggcucaacagcuucuugc

SEQ ID NO: 2225898 - RNA, 19 nt, Artificial Sequence
  Description of Artificial Sequence: Synthetic oligonucleotide
uccugcuaagccaaauggc

SEQ ID NO: 2225899 - RNA, 19 nt, Artificial Sequence
  Description of Artificial Sequence: Synthetic oligonucleotide
ugaucauaguagcucuuca

SEQ ID NO: 2225900 - RNA, 19 nt, Artificial Sequence
  Description of Artificial Sequence: Synthetic oligonucleotide
cucauaguggaauucauaa

SEQ ID NO: 2225901 - RNA, 19 nt, Artificial Sequence
  Description of Artificial Sequence: Synthetic oligonucleotide
aauaugggcaggaauucca

SEQ ID NO: 2225902 - RNA, 19 nt, Artificial Sequence
  Description of Artificial Sequence: Synthetic oligonucleotide
ugcuaagccaaauggcuca

SEQ ID NO: 2225903 - RNA, 19 nt, Artificial Sequence
  Description of Artificial Sequence: Synthetic oligonucleotide
ugcuguugcaaaugucagg

SEQ ID NO: 2225904 - RNA, 19 nt, Artificial Sequence
  Description of Artificial Sequence: Synthetic oligonucleotide
augugugucaauaugggca

SEQ ID NO: 2225905 - RNA, 19 nt, Artificial Sequence
  Description of Artificial Sequence: Synthetic oligonucleotide
aacacuuuccaaaagcauu

SEQ ID NO: 2225906 - RNA, 19 nt, Artificial Sequence
  Description of Artificial Sequence: Synthetic oligonucleotide
agaccuuuugaagaacaac

SEQ ID NO: 2225907 - RNA, 19 nt, Artificial Sequence
  Description of Artificial Sequence: Synthetic oligonucleotide
cauccucaaaggcagaaug

SEQ ID NO: 2225908 - RNA, 19 nt, Artificial Sequence
  Description of Artificial Sequence: Synthetic oligonucleotide
aacacaccaauucccuuga

SEQ ID NO: 2225909 - RNA, 19 nt, Artificial Sequence
  Description of Artificial Sequence: Synthetic oligonucleotide
ugcuuaaagucaagucucc

SEQ ID NO: 2225910 - RNA, 19 nt, Artificial Sequence
  Description of Artificial Sequence: Synthetic oligonucleotide
uguaaccuucuuucaacca

SEQ ID NO: 2225911 - RNA, 19 nt, Artificial Sequence
  Description of Artificial Sequence: Synthetic oligonucleotide
uaacgaugaaacacaggac

SEQ ID NO: 2225912 - RNA, 19 nt, Artificial Sequence
  Description of Artificial Sequence: Synthetic oligonucleotide
ucacagaauacaugguagu

SEQ ID NO: 2225913 - RNA, 19 nt, Artificial Sequence
  Description of Artificial Sequence: Synthetic oligonucleotide
aaauucugauugucugugu

SEQ ID NO: 2225914 - RNA, 19 nt, Artificial Sequence
  Description of Artificial Sequence: Synthetic oligonucleotide
gagguguaacuacaauugc

SEQ ID NO: 2225915 - RNA, 19 nt, Artificial Sequence
  Description of Artificial Sequence: Synthetic oligonucleotide
aacuacaauugcagggcac

SEQ ID NO: 2225916 - RNA, 19 nt, Artificial Sequence
  Description of Artificial Sequence: Synthetic oligonucleotide
uuuaaggauuucugaaaau

SEQ ID NO: 2225917 - RNA, 19 nt, Artificial Sequence
  Description of Artificial Sequence: Synthetic oligonucleotide
ucuucagaaugcuaacauc

SEQ ID NO: 2225918 - RNA, 19 nt, Artificial Sequence
  Description of Artificial Sequence: Synthetic oligonucleotide
ucgaauuccacgcuugcuu

SEQ ID NO: 2225919 - RNA, 19 nt, Artificial Sequence
  Description of Artificial Sequence: Synthetic oligonucleotide
cauaacaaucucugacccc

SEQ ID NO: 2225920 - RNA, 19 nt, Artificial Sequence
  Description of Artificial Sequence: Synthetic oligonucleotide
uaacacuuuccaaaagcau

SEQ ID NO: 2225921 - RNA, 19 nt, Artificial Sequence
  Description of Artificial Sequence: Synthetic oligonucleotide
agcucuucagaaugcuaac

SEQ ID NO: 2225922 - RNA, 19 nt, Artificial Sequence
  Description of Artificial Sequence: Synthetic oligonucleotide
aauucauaaccaaaauguu

SEQ ID NO: 2225923 - RNA, 19 nt, Artificial Sequence
  Description of Artificial Sequence: Synthetic oligonucleotide
uccacgcuugcuuaaaguc

SEQ ID NO: 2225924 - RNA, 19 nt, Artificial Sequence
  Description of Artificial Sequence: Synthetic oligonucleotide
agguaacauaacuuguacu

SEQ ID NO: 2225925 - RNA, 19 nt, Artificial Sequence
  Description of Artificial Sequence: Synthetic oligonucleotide
uccuguccaauuaacacuu

SEQ ID NO: 2225926 - RNA, 19 nt, Artificial Sequence
  Description of Artificial Sequence: Synthetic oligonucleotide
cuuaaagucaagucuccga

SEQ ID NO: 2225927 - RNA, 19 nt, Artificial Sequence
  Description of Artificial Sequence: Synthetic oligonucleotide
augcuaacaucacccagag

SEQ ID NO: 2225928 - RNA, 19 nt, Artificial Sequence
  Description of Artificial Sequence: Synthetic oligonucleotide
uguuuaacucuucuauguu

SEQ ID NO: 2225929 - RNA, 19 nt, Artificial Sequence
  Description of Artificial Sequence: Synthetic oligonucleotide
auguucagauaaaugauca

SEQ ID NO: 2225930 - RNA, 19 nt, Artificial Sequence
  Description of Artificial Sequence: Synthetic oligonucleotide
ugucacuggugauuauucc

SEQ ID NO: 2225931 - RNA, 19 nt, Artificial Sequence
  Description of Artificial Sequence: Synthetic oligonucleotide
uaacuacaauugcagggca

SEQ ID NO: 2225932 - RNA, 19 nt, Artificial Sequence
  Description of Artificial Sequence: Synthetic oligonucleotide
uauccuuauccacaguguu

SEQ ID NO: 2225933 - RNA, 19 nt, Artificial Sequence
  Description of Artificial Sequence: Synthetic oligonucleotide
guaguaacgaugaaacaca

SEQ ID NO: 2225934 - RNA, 19 nt, Artificial Sequence
  Description of Artificial Sequence: Synthetic oligonucleotide
uaucuagauucuccuguca

SEQ ID NO: 2225935 - RNA, 19 nt, Artificial Sequence
  Description of Artificial Sequence: Synthetic oligonucleotide
uccucaaaggcagaaugug

SEQ ID NO: 2225936 - RNA, 19 nt, Artificial Sequence
  Description of Artificial Sequence: Synthetic oligonucleotide
auacaugguaguaacgaug

SEQ ID NO: 2225937 - RNA, 19 nt, Artificial Sequence
  Description of Artificial Sequence: Synthetic oligonucleotide
aacauaacuuguacuguga

SEQ ID NO: 2225938 - RNA, 19 nt, Artificial Sequence
  Description of Artificial Sequence: Synthetic oligonucleotide
auugucugugucuccuguc

SEQ ID NO: 2225939 - RNA, 19 nt, Artificial Sequence
  Description of Artificial Sequence: Synthetic oligonucleotide
ucuagauucuccugucauc

SEQ ID NO: 2225940 - RNA, 19 nt, Artificial Sequence
  Description of Artificial Sequence: Synthetic oligonucleotide
agaaugcuaacaucaccca

SEQ ID NO: 2225941 - RNA, 19 nt, Artificial Sequence
  Description of Artificial Sequence: Synthetic oligonucleotide
caguguuguucucauagug

SEQ ID NO: 2225942 - RNA, 19 nt, Artificial Sequence
  Description of Artificial Sequence: Synthetic oligonucleotide
acuggugauuauuccaccu

SEQ ID NO: 2225943 - RNA, 19 nt, Artificial Sequence
  Description of Artificial Sequence: Synthetic oligonucleotide
agguuuauguuuaauguaa

SEQ ID NO: 2225944 - RNA, 19 nt, Artificial Sequence
  Description of Artificial Sequence: Synthetic oligonucleotide
aacguaaaugauguucgaa

SEQ ID NO: 2225945 - RNA, 19 nt, Artificial Sequence
  Description of Artificial Sequence: Synthetic oligonucleotide
agaauacaugguaguaacg

SEQ ID NO: 2225946 - RNA, 19 nt, Artificial Sequence
  Description of Artificial Sequence: Synthetic oligonucleotide
auauguucagauaaaugau

SEQ ID NO: 2225947 - RNA, 19 nt, Artificial Sequence
  Description of Artificial Sequence: Synthetic oligonucleotide
caaaugucaggaagacccc

SEQ ID NO: 2225948 - RNA, 19 nt, Artificial Sequence
  Description of Artificial Sequence: Synthetic oligonucleotide
uuauuccaccuuugaacug

SEQ ID NO: 2225949 - RNA, 19 nt, Artificial Sequence
  Description of Artificial Sequence: Synthetic oligonucleotide
ugaccccaaacugagagaa

SEQ ID NO: 2225950 - RNA, 19 nt, Artificial Sequence
  Description of Artificial Sequence: Synthetic oligonucleotide
ucaauaugggcaggaauuc

SEQ ID NO: 2225951 - RNA, 19 nt, Artificial Sequence
  Description of Artificial Sequence: Synthetic oligonucleotide
auucauaaccaaaauguuu

SEQ ID NO: 2225952 - RNA, 19 nt, Artificial Sequence
  Description of Artificial Sequence: Synthetic oligonucleotide
aucuagauucuccugucau

SEQ ID NO: 2225953 - RNA, 19 nt, Artificial Sequence
  Description of Artificial Sequence: Synthetic oligonucleotide
ugugucuccuguccaauua

SEQ ID NO: 2225954 - RNA, 19 nt, Artificial Sequence
  Description of Artificial Sequence: Synthetic oligonucleotide
ucauaaccaaaauguuuaa

SEQ ID NO: 2225955 - RNA, 19 nt, Artificial Sequence
  Description of Artificial Sequence: Synthetic oligonucleotide
acuggacauguucucgcuc

SEQ ID NO: 2225956 - RNA, 19 nt, Artificial Sequence
  Description of Artificial Sequence: Synthetic oligonucleotide
auaguggaauucauaacca

SEQ ID NO: 2225957 - RNA, 19 nt, Artificial Sequence
  Description of Artificial Sequence: Synthetic oligonucleotide
cauuucuccaaaaugcugu

SEQ ID NO: 2225958 - RNA, 19 nt, Artificial Sequence
  Description of Artificial Sequence: Synthetic oligonucleotide
augucacuggugauuauuc

SEQ ID NO: 2225959 - RNA, 19 nt, Artificial Sequence
  Description of Artificial Sequence: Synthetic oligonucleotide
aaaugaucucauccucaaa

SEQ ID NO: 2225960 - RNA, 19 nt, Artificial Sequence
  Description of Artificial Sequence: Synthetic oligonucleotide
acaugccucacuuuccuaa

SEQ ID NO: 2225961 - RNA, 19 nt, Artificial Sequence
  Description of Artificial Sequence: Synthetic oligonucleotide
cuagauucuccugucauca

SEQ ID NO: 2225962 - RNA, 19 nt, Artificial Sequence
  Description of Artificial Sequence: Synthetic oligonucleotide
uggugauuauuccaccuuu

SEQ ID NO: 2225963 - RNA, 19 nt, Artificial Sequence
  Description of Artificial Sequence: Synthetic oligonucleotide
acuacaauugcagggcaca

SEQ ID NO: 2225964 - RNA, 19 nt, Artificial Sequence
  Description of Artificial Sequence: Synthetic oligonucleotide
uaacguaaaugauguucga

SEQ ID NO: 2225965 - RNA, 19 nt, Artificial Sequence
  Description of Artificial Sequence: Synthetic oligonucleotide
acagaauacaugguaguaa

SEQ ID NO: 2225966 - RNA, 19 nt, Artificial Sequence
  Description of Artificial Sequence: Synthetic oligonucleotide
agaaaugaucucauccuca

SEQ ID NO: 2225967 - RNA, 19 nt, Artificial Sequence
  Description of Artificial Sequence: Synthetic oligonucleotide
gauucuccugucaucacca

SEQ ID NO: 2225968 - RNA, 19 nt, Artificial Sequence
  Description of Artificial Sequence: Synthetic oligonucleotide
ugguaguaacgaugaaaca

SEQ ID NO: 2225969 - RNA, 19 nt, Artificial Sequence
  Description of Artificial Sequence: Synthetic oligonucleotide
uccaauucuccaucacaga

SEQ ID NO: 2225970 - RNA, 19 nt, Artificial Sequence
  Description of Artificial Sequence: Synthetic oligonucleotide
cauaacuuguacugugaca

SEQ ID NO: 2225971 - RNA, 19 nt, Artificial Sequence
  Description of Artificial Sequence: Synthetic oligonucleotide
aguaacgaugaaacacagg

SEQ ID NO: 2225972 - RNA, 19 nt, Artificial Sequence
  Description of Artificial Sequence: Synthetic oligonucleotide
uaguggaauucauaaccaa

SEQ ID NO: 2225973 - RNA, 19 nt, Artificial Sequence
  Description of Artificial Sequence: Synthetic oligonucleotide
aacaucacccagagccugg

SEQ ID NO: 2225974 - RNA, 19 nt, Artificial Sequence
  Description of Artificial Sequence: Synthetic oligonucleotide
ugucugucacagaccgagg

SEQ ID NO: 2225975 - RNA, 19 nt, Artificial Sequence
  Description of Artificial Sequence: Synthetic oligonucleotide
uuugaacugcucagaugcu

SEQ ID NO: 2225976 - RNA, 19 nt, Artificial Sequence
  Description of Artificial Sequence: Synthetic oligonucleotide
ggugcuuaaaauccauaac

SEQ ID NO: 2225977 - RNA, 19 nt, Artificial Sequence
  Description of Artificial Sequence: Synthetic oligonucleotide
uaaccuucuuucaaccauu

SEQ ID NO: 2225978 - RNA, 19 nt, Artificial Sequence
  Description of Artificial Sequence: Synthetic oligonucleotide
ugucuccuguccaauuaac

SEQ ID NO: 2225979 - RNA, 19 nt, Artificial Sequence
  Description of Artificial Sequence: Synthetic oligonucleotide
augccucacuuuccuaacg

SEQ ID NO: 2225980 - RNA, 19 nt, Artificial Sequence
  Description of Artificial Sequence: Synthetic oligonucleotide
caaacuccgacgagguaac

SEQ ID NO: 2225981 - RNA, 19 nt, Artificial Sequence
  Description of Artificial Sequence: Synthetic oligonucleotide
caugaguccaaagauaucu

SEQ ID NO: 2225982 - RNA, 19 nt, Artificial Sequence
  Description of Artificial Sequence: Synthetic oligonucleotide
uacuugauauguucagaua

SEQ ID NO: 2225983 - RNA, 19 nt, Artificial Sequence
  Description of Artificial Sequence: Synthetic oligonucleotide
auuccacgcuugcuuaaag

SEQ ID NO: 2225984 - RNA, 19 nt, Artificial Sequence
  Description of Artificial Sequence: Synthetic oligonucleotide
ccauaacaaucucugaccc

SEQ ID NO: 2225985 - RNA, 19 nt, Artificial Sequence
  Description of Artificial Sequence: Synthetic oligonucleotide
cagaccgagguguaacuac

SEQ ID NO: 2225986 - RNA, 19 nt, Artificial Sequence
  Description of Artificial Sequence: Synthetic oligonucleotide
cuugauauguucagauaaa

SEQ ID NO: 2225987 - RNA, 19 nt, Artificial Sequence
  Description of Artificial Sequence: Synthetic oligonucleotide
ugcaaaugucaggaagacc

SEQ ID NO: 2225988 - RNA, 19 nt, Artificial Sequence
  Description of Artificial Sequence: Synthetic oligonucleotide
agaugcuuggacaguauca

SEQ ID NO: 2225989 - RNA, 19 nt, Artificial Sequence
  Description of Artificial Sequence: Synthetic oligonucleotide
uuccacgcuugcuuaaagu

SEQ ID NO: 2225990 - RNA, 19 nt, Artificial Sequence
  Description of Artificial Sequence: Synthetic oligonucleotide
aucauacacacgacuggac

SEQ ID NO: 2225991 - RNA, 19 nt, Artificial Sequence
  Description of Artificial Sequence: Synthetic oligonucleotide
uugaucauaguagcucuuc

SEQ ID NO: 2225992 - RNA, 19 nt, Artificial Sequence
  Description of Artificial Sequence: Synthetic oligonucleotide
gugauuauuccaccuuuga

SEQ ID NO: 2225993 - RNA, 19 nt, Artificial Sequence
  Description of Artificial Sequence: Synthetic oligonucleotide
caauaugggcaggaauucc

SEQ ID NO: 2225994 - RNA, 19 nt, Artificial Sequence
  Description of Artificial Sequence: Synthetic oligonucleotide
ccuaacguaaaugauguuc

SEQ ID NO: 2225995 - RNA, 19 nt, Artificial Sequence
  Description of Artificial Sequence: Synthetic oligonucleotide
uaacaucacccagagccug

SEQ ID NO: 2225996 - RNA, 19 nt, Artificial Sequence
  Description of Artificial Sequence: Synthetic oligonucleotide
aguggaauucauaaccaaa

SEQ ID NO: 2225997 - RNA, 19 nt, Artificial Sequence
  Description of Artificial Sequence: Synthetic oligonucleotide
uucucauccucagaagaaa

SEQ ID NO: 2225998 - RNA, 19 nt, Artificial Sequence
  Description of Artificial Sequence: Synthetic oligonucleotide
cgagguguaacuacaauug

SEQ ID NO: 2225999 - RNA, 19 nt, Artificial Sequence
  Description of Artificial Sequence: Synthetic oligonucleotide
agguguaacuacaauugca

SEQ ID NO: 2226000 - RNA, 19 nt, Artificial Sequence
  Description of Artificial Sequence: Synthetic oligonucleotide
uacaauugcagggcacaug

SEQ ID NO: 2226001 - RNA, 19 nt, Artificial Sequence
  Description of Artificial Sequence: Synthetic oligonucleotide
aacacaggacuugggucag

SEQ ID NO: 2226002 - RNA, 19 nt, Artificial Sequence
  Description of Artificial Sequence: Synthetic oligonucleotide
cucuuuacugcucucugga

SEQ ID NO: 2226003 - RNA, 19 nt, Artificial Sequence
  Description of Artificial Sequence: Synthetic oligonucleotide
cugcuaagccaaauggcuc

SEQ ID NO: 2226004 - RNA, 19 nt, Artificial Sequence
  Description of Artificial Sequence: Synthetic oligonucleotide
agauaaaugaucagaccuu

SEQ ID NO: 2226005 - RNA, 19 nt, Artificial Sequence
  Description of Artificial Sequence: Synthetic oligonucleotide
auacugauuuauggucaac

SEQ ID NO: 2226006 - RNA, 19 nt, Artificial Sequence
  Description of Artificial Sequence: Synthetic oligonucleotide
cacuuuccuaacguaaaug

SEQ ID NO: 2226007 - RNA, 19 nt, Artificial Sequence
  Description of Artificial Sequence: Synthetic oligonucleotide
ucccuugaucauaguagcu

SEQ ID NO: 2226008 - RNA, 19 nt, Artificial Sequence
  Description of Artificial Sequence: Synthetic oligonucleotide
caucacagaauacauggua

SEQ ID NO: 2226009 - RNA, 19 nt, Artificial Sequence
  Description of Artificial Sequence: Synthetic oligonucleotide
ugauugucugugucuccug

SEQ ID NO: 2226010 - RNA, 19 nt, Artificial Sequence
  Description of Artificial Sequence: Synthetic oligonucleotide
acugcucucuggaaggcag

SEQ ID NO: 2226011 - RNA, 19 nt, Artificial Sequence
  Description of Artificial Sequence: Synthetic oligonucleotide
ggcuuauccuuauccacag

SEQ ID NO: 2226012 - RNA, 19 nt, Artificial Sequence
  Description of Artificial Sequence: Synthetic oligonucleotide
ucacagaccgagguguaac

SEQ ID NO: 2226013 - RNA, 19 nt, Artificial Sequence
  Description of Artificial Sequence: Synthetic oligonucleotide
cccagguaaaggcuuaucc

SEQ ID NO: 2226014 - RNA, 19 nt, Artificial Sequence
  Description of Artificial Sequence: Synthetic oligonucleotide
accuuugaacugcucagau

SEQ ID NO: 2226015 - RNA, 19 nt, Artificial Sequence
  Description of Artificial Sequence: Synthetic oligonucleotide
uuaacucuucuauguuuua

SEQ ID NO: 2226016 - RNA, 19 nt, Artificial Sequence
  Description of Artificial Sequence: Synthetic oligonucleotide
ucuuuacugcucucuggaa

SEQ ID NO: 2226017 - RNA, 19 nt, Artificial Sequence
  Description of Artificial Sequence: Synthetic oligonucleotide
gauuuauggucaacugauc

SEQ ID NO: 2226018 - RNA, 19 nt, Artificial Sequence
  Description of Artificial Sequence: Synthetic oligonucleotide
acuccgacgagguaacaua

SEQ ID NO: 2226019 - RNA, 19 nt, Artificial Sequence
  Description of Artificial Sequence: Synthetic oligonucleotide
caugguaguaacgaugaaa

SEQ ID NO: 2226020 - RNA, 19 nt, Artificial Sequence
  Description of Artificial Sequence: Synthetic oligonucleotide
auacacacgacuggacaug

SEQ ID NO: 2226021 - RNA, 19 nt, Artificial Sequence
  Description of Artificial Sequence: Synthetic oligonucleotide
auguuuaauguaaccuucu

SEQ ID NO: 2226022 - RNA, 19 nt, Artificial Sequence
  Description of Artificial Sequence: Synthetic oligonucleotide
aacuccgacgagguaacau

SEQ ID NO: 2226023 - RNA, 19 nt, Artificial Sequence
  Description of Artificial Sequence: Synthetic oligonucleotide
gcuugcuuaaagucaaguc

SEQ ID NO: 2226024 - RNA, 19 nt, Artificial Sequence
  Description of Artificial Sequence: Synthetic oligonucleotide
aaggcagaaugugugucaa

SEQ ID NO: 2226025 - RNA, 19 nt, Artificial Sequence
  Description of Artificial Sequence: Synthetic oligonucleotide
ccaauucccuugaucauag

SEQ ID NO: 2226026 - RNA, 19 nt, Artificial Sequence
  Description of Artificial Sequence: Synthetic oligonucleotide
cuugggucagggcauccug

SEQ ID NO: 2226027 - RNA, 19 nt, Artificial Sequence
  Description of Artificial Sequence: Synthetic oligonucleotide
aauuccacgcuugcuuaaa

SEQ ID NO: 2226028 - RNA, 19 nt, Artificial Sequence
  Description of Artificial Sequence: Synthetic oligonucleotide
cugaucagguuuauguuua

SEQ ID NO: 2226029 - RNA, 19 nt, Artificial Sequence
  Description of Artificial Sequence: Synthetic oligonucleotide
augaaacacaggacuuggg

SEQ ID NO: 2226030 - RNA, 19 nt, Artificial Sequence
  Description of Artificial Sequence: Synthetic oligonucleotide
accccaaacugagagaaau

SEQ ID NO: 2226031 - RNA, 19 nt, Artificial Sequence
  Description of Artificial Sequence: Synthetic oligonucleotide
guacugugacacccucugg

SEQ ID NO: 2226032 - RNA, 19 nt, Artificial Sequence
  Description of Artificial Sequence: Synthetic oligonucleotide
aggaagccuccaauucucc

SEQ ID NO: 2226033 - RNA, 19 nt, Artificial Sequence
  Description of Artificial Sequence: Synthetic oligonucleotide
uucgaauuccacgcuugcu

SEQ ID NO: 2226034 - RNA, 19 nt, Artificial Sequence
  Description of Artificial Sequence: Synthetic oligonucleotide
cagguuuauguuuaaugua

SEQ ID NO: 2226035 - RNA, 19 nt, Artificial Sequence
  Description of Artificial Sequence: Synthetic oligonucleotide
uccgacgagguaacauaac

SEQ ID NO: 2226036 - RNA, 19 nt, Artificial Sequence
  Description of Artificial Sequence: Synthetic oligonucleotide
cuucuugcaaucaaaucau

SEQ ID NO: 2226037 - RNA, 19 nt, Artificial Sequence
  Description of Artificial Sequence: Synthetic oligonucleotide
uucuugcaaucaaaucaua

SEQ ID NO: 2226038 - RNA, 19 nt, Artificial Sequence
  Description of Artificial Sequence: Synthetic oligonucleotide
guaaccuucuuucaaccau

SEQ ID NO: 2226039 - RNA, 19 nt, Artificial Sequence
  Description of Artificial Sequence: Synthetic oligonucleotide
ggguguaauuccaugaguc

SEQ ID NO: 2226040 - RNA, 19 nt, Artificial Sequence
  Description of Artificial Sequence: Synthetic oligonucleotide
ucucuaccaccaagaggcc

SEQ ID NO: 2226041 - RNA, 19 nt, Artificial Sequence
  Description of Artificial Sequence: Synthetic oligonucleotide
uggacauguucucgcucca

SEQ ID NO: 2226042 - RNA, 19 nt, Artificial Sequence
  Description of Artificial Sequence: Synthetic oligonucleotide
uccugucaucaccagcaaa

SEQ ID NO: 2226043 - RNA, 19 nt, Artificial Sequence
  Description of Artificial Sequence: Synthetic oligonucleotide
ggauuucugaaaauucuga

SEQ ID NO: 2226044 - RNA, 19 nt, Artificial Sequence
  Description of Artificial Sequence: Synthetic oligonucleotide
uacacacgacuggacaugu

SEQ ID NO: 2226045 - RNA, 19 nt, Artificial Sequence
  Description of Artificial Sequence: Synthetic oligonucleotide
caauugcagggcacaugcc

SEQ ID NO: 2226046 - RNA, 19 nt, Artificial Sequence
  Description of Artificial Sequence: Synthetic oligonucleotide
ugggugcuuaaaauccaua

SEQ ID NO: 2226047 - RNA, 19 nt, Artificial Sequence
  Description of Artificial Sequence: Synthetic oligonucleotide
uagauucuccugucaucac

SEQ ID NO: 2226048 - RNA, 19 nt, Artificial Sequence
  Description of Artificial Sequence: Synthetic oligonucleotide
uuacugcucucuggaaggc

SEQ ID NO: 2226049 - RNA, 19 nt, Artificial Sequence
  Description of Artificial Sequence: Synthetic oligonucleotide
gggugcuuaaaauccauaa

SEQ ID NO: 2226050 - RNA, 19 nt, Artificial Sequence
  Description of Artificial Sequence: Synthetic oligonucleotide
ugaucagguuuauguuuaa

SEQ ID NO: 2226051 - RNA, 19 nt, Artificial Sequence
  Description of Artificial Sequence: Synthetic oligonucleotide
ugcuaacaucacccagagc

SEQ ID NO: 2226052 - RNA, 19 nt, Artificial Sequence
  Description of Artificial Sequence: Synthetic oligonucleotide
acgagguaacauaacuugu

SEQ ID NO: 2226053 - RNA, 19 nt, Artificial Sequence
  Description of Artificial Sequence: Synthetic oligonucleotide
cauacugauuuauggucaa

SEQ ID NO: 2226054 - RNA, 19 nt, Artificial Sequence
  Description of Artificial Sequence: Synthetic oligonucleotide
gauaaaugaucagaccuuu

SEQ ID NO: 2226055 - RNA, 19 nt, Artificial Sequence
  Description of Artificial Sequence: Synthetic oligonucleotide
gcuuaaagucaagucuccg

SEQ ID NO: 2226056 - RNA, 19 nt, Artificial Sequence
  Description of Artificial Sequence: Synthetic oligonucleotide
cacgcuugcuuaaagucaa

SEQ ID NO: 2226057 - RNA, 19 nt, Artificial Sequence
  Description of Artificial Sequence: Synthetic oligonucleotide
auguucgaauuccacgcuu

SEQ ID NO: 2226058 - RNA, 19 nt, Artificial Sequence
  Description of Artificial Sequence: Synthetic oligonucleotide
agguucauacugauuuaug

SEQ ID NO: 2226059 - RNA, 19 nt, Artificial Sequence
  Description of Artificial Sequence: Synthetic oligonucleotide
aacugcucagaugcuugga

SEQ ID NO: 2226060 - RNA, 19 nt, Artificial Sequence
  Description of Artificial Sequence: Synthetic oligonucleotide
uccgaugucacuggugauu

SEQ ID NO: 2226061 - RNA, 19 nt, Artificial Sequence
  Description of Artificial Sequence: Synthetic oligonucleotide
cugugacacccucugggug

SEQ ID NO: 2226062 - RNA, 19 nt, Artificial Sequence
  Description of Artificial Sequence: Synthetic oligonucleotide
gguuuauguuuaauguaac

SEQ ID NO: 2226063 - RNA, 19 nt, Artificial Sequence
  Description of Artificial Sequence: Synthetic oligonucleotide
guaaaggcuuauccuuauc

SEQ ID NO: 2226064 - RNA, 19 nt, Artificial Sequence
  Description of Artificial Sequence: Synthetic oligonucleotide
auccucaaaggcagaaugu

SEQ ID NO: 2226065 - RNA, 19 nt, Artificial Sequence
  Description of Artificial Sequence: Synthetic oligonucleotide
auggcucaacagcuucuug

SEQ ID NO: 2226066 - RNA, 19 nt, Artificial Sequence
  Description of Artificial Sequence: Synthetic oligonucleotide
gauguucgaauuccacgcu

SEQ ID NO: 2226067 - RNA, 19 nt, Artificial Sequence
  Description of Artificial Sequence: Synthetic oligonucleotide
guaacauaacuuguacugu

SEQ ID NO: 2226068 - RNA, 19 nt, Artificial Sequence
  Description of Artificial Sequence: Synthetic oligonucleotide
accaauucccuugaucaua

SEQ ID NO: 2226069 - RNA, 19 nt, Artificial Sequence
  Description of Artificial Sequence: Synthetic oligonucleotide
gaauuccacgcuugcuuaa

SEQ ID NO: 2226070 - RNA, 19 nt, Artificial Sequence
  Description of Artificial Sequence: Synthetic oligonucleotide
uaacaaucucugaccccaa

SEQ ID NO: 2226071 - RNA, 19 nt, Artificial Sequence
  Description of Artificial Sequence: Synthetic oligonucleotide
ggugauuauuccaccuuug

SEQ ID NO: 2226072 - RNA, 19 nt, Artificial Sequence
  Description of Artificial Sequence: Synthetic oligonucleotide
accgagguguaacuacaau

SEQ ID NO: 2226073 - RNA, 19 nt, Artificial Sequence
  Description of Artificial Sequence: Synthetic oligonucleotide
aucaaauuuucugggugua

SEQ ID NO: 2226074 - RNA, 19 nt, Artificial Sequence
  Description of Artificial Sequence: Synthetic oligonucleotide
gucagggcauccugcuaag

SEQ ID NO: 2226075 - RNA, 19 nt, Artificial Sequence
  Description of Artificial Sequence: Synthetic oligonucleotide
gcaaacuccgacgagguaa

SEQ ID NO: 2226076 - RNA, 19 nt, Artificial Sequence
  Description of Artificial Sequence: Synthetic oligonucleotide
cauaguagcucuucagaau

SEQ ID NO: 2226077 - RNA, 19 nt, Artificial Sequence
  Description of Artificial Sequence: Synthetic oligonucleotide
gagccuggcaggaagccuc

SEQ ID NO: 2226078 - RNA, 19 nt, Artificial Sequence
  Description of Artificial Sequence: Synthetic oligonucleotide
aggaguggccuuccucugu

SEQ ID NO: 2226079 - RNA, 19 nt, Artificial Sequence
  Description of Artificial Sequence: Synthetic oligonucleotide
agaccgagguguaacuaca

SEQ ID NO: 2226080 - RNA, 19 nt, Artificial Sequence
  Description of Artificial Sequence: Synthetic oligonucleotide
cuuuccuaacguaaaugau

SEQ ID NO: 2226081 - RNA, 19 nt, Artificial Sequence
  Description of Artificial Sequence: Synthetic oligonucleotide
ccucugggugcuuaaaauc

SEQ ID NO: 2226082 - RNA, 19 nt, Artificial Sequence
  Description of Artificial Sequence: Synthetic oligonucleotide
acgaugaaacacaggacuu

SEQ ID NO: 2226083 - RNA, 19 nt, Artificial Sequence
  Description of Artificial Sequence: Synthetic oligonucleotide
cucuucagaaugcuaacau

SEQ ID NO: 2226084 - RNA, 19 nt, Artificial Sequence
  Description of Artificial Sequence: Synthetic oligonucleotide
acccucugggugcuuaaaa

SEQ ID NO: 2226085 - RNA, 19 nt, Artificial Sequence
  Description of Artificial Sequence: Synthetic oligonucleotide
gggcacaugccucacuuuc

SEQ ID NO: 2226086 - RNA, 19 nt, Artificial Sequence
  Description of Artificial Sequence: Synthetic oligonucleotide
ggucagggcauccugcuaa

SEQ ID NO: 2226087 - RNA, 19 nt, Artificial Sequence
  Description of Artificial Sequence: Synthetic oligonucleotide
caccagcaaacuccgacga

SEQ ID NO: 2226088 - RNA, 19 nt, Artificial Sequence
  Description of Artificial Sequence: Synthetic oligonucleotide
ccuuugaacugcucagaug

SEQ ID NO: 2226089 - RNA, 19 nt, Artificial Sequence
  Description of Artificial Sequence: Synthetic oligonucleotide
agguaaaggcuuauccuua

SEQ ID NO: 2226090 - RNA, 19 nt, Artificial Sequence
  Description of Artificial Sequence: Synthetic oligonucleotide
agucuccgaugucacuggu

SEQ ID NO: 2226091 - RNA, 19 nt, Artificial Sequence
  Description of Artificial Sequence: Synthetic oligonucleotide
cuccgacgagguaacauaa

SEQ ID NO: 2226092 - RNA, 19 nt, Artificial Sequence
  Description of Artificial Sequence: Synthetic oligonucleotide
cagaccuuuugaagaacaa

SEQ ID NO: 2226093 - RNA, 19 nt, Artificial Sequence
  Description of Artificial Sequence: Synthetic oligonucleotide
auaaaugaucagaccuuuu

SEQ ID NO: 2226094 - RNA, 19 nt, Artificial Sequence
  Description of Artificial Sequence: Synthetic oligonucleotide
auaugggcaggaauuccau

SEQ ID NO: 2226095 - RNA, 19 nt, Artificial Sequence
  Description of Artificial Sequence: Synthetic oligonucleotide
cuccaaaaugcuguugcaa

SEQ ID NO: 2226096 - RNA, 19 nt, Artificial Sequence
  Description of Artificial Sequence: Synthetic oligonucleotide
cacagaauacaugguagua

SEQ ID NO: 2226097 - RNA, 19 nt, Artificial Sequence
  Description of Artificial Sequence: Synthetic oligonucleotide
ggcagaaugugugucaaua

SEQ ID NO: 2226098 - RNA, 19 nt, Artificial Sequence
  Description of Artificial Sequence: Synthetic oligonucleotide
uccuaacguaaaugauguu

SEQ ID NO: 2226099 - RNA, 19 nt, Artificial Sequence
  Description of Artificial Sequence: Synthetic oligonucleotide
cuaagccaaauggcucaac

SEQ ID NO: 2226100 - RNA, 19 nt, Artificial Sequence
  Description of Artificial Sequence: Synthetic oligonucleotide
cccuugaucauaguagcuc

SEQ ID NO: 2226101 - RNA, 19 nt, Artificial Sequence
  Description of Artificial Sequence: Synthetic oligonucleotide
acuugggucagggcauccu

SEQ ID NO: 2226102 - RNA, 19 nt, Artificial Sequence
  Description of Artificial Sequence: Synthetic oligonucleotide
gacuggacauguucucgcu

SEQ ID NO: 2226103 - RNA, 19 nt, Artificial Sequence
  Description of Artificial Sequence: Synthetic oligonucleotide
ccugcuaagccaaauggcu

SEQ ID NO: 2226104 - RNA, 19 nt, Artificial Sequence
  Description of Artificial Sequence: Synthetic oligonucleotide
gucuccgaugucacuggug

SEQ ID NO: 2226105 - RNA, 19 nt, Artificial Sequence
  Description of Artificial Sequence: Synthetic oligonucleotide
cugucacagaccgaggugu

SEQ ID NO: 2226106 - RNA, 19 nt, Artificial Sequence
  Description of Artificial Sequence: Synthetic oligonucleotide
ccacgcuugcuuaaaguca

SEQ ID NO: 2226107 - RNA, 19 nt, Artificial Sequence
  Description of Artificial Sequence: Synthetic oligonucleotide
ggcacaugccucacuuucc

SEQ ID NO: 2226108 - RNA, 19 nt, Artificial Sequence
  Description of Artificial Sequence: Synthetic oligonucleotide
acagaccgagguguaacua

SEQ ID NO: 2226109 - RNA, 19 nt, Artificial Sequence
  Description of Artificial Sequence: Synthetic oligonucleotide
ccucugucugucacagacc

SEQ ID NO: 2226110 - RNA, 19 nt, Artificial Sequence
  Description of Artificial Sequence: Synthetic oligonucleotide
agcaaacuccgacgaggua

SEQ ID NO: 2226111 - RNA, 19 nt, Artificial Sequence
  Description of Artificial Sequence: Synthetic oligonucleotide
ggaguggccuuccucuguc

SEQ ID NO: 2226112 - RNA, 19 nt, Artificial Sequence
  Description of Artificial Sequence: Synthetic oligonucleotide
ccaaagauaucuagauucu

SEQ ID NO: 2226113 - RNA, 19 nt, Artificial Sequence
  Description of Artificial Sequence: Synthetic oligonucleotide
ccccaaacugagagaaaug

SEQ ID NO: 2226114 - RNA, 19 nt, Artificial Sequence
  Description of Artificial Sequence: Synthetic oligonucleotide
caccuuugaacugcucaga

SEQ ID NO: 2226115 - RNA, 19 nt, Artificial Sequence
  Description of Artificial Sequence: Synthetic oligonucleotide
gaucagguuuauguuuaau

SEQ ID NO: 2226116 - RNA, 19 nt, Artificial Sequence
  Description of Artificial Sequence: Synthetic oligonucleotide
cagcaaacuccgacgaggu

SEQ ID NO: 2226117 - RNA, 19 nt, Artificial Sequence
  Description of Artificial Sequence: Synthetic oligonucleotide
ccuugaucauaguagcucu

SEQ ID NO: 2226118 - RNA, 19 nt, Artificial Sequence
  Description of Artificial Sequence: Synthetic oligonucleotide
cagcuucuugcaaucaaau

SEQ ID NO: 2226119 - RNA, 19 nt, Artificial Sequence
  Description of Artificial Sequence: Synthetic oligonucleotide
cuguugcaaaugucaggaa

SEQ ID NO: 2226120 - RNA, 19 nt, Artificial Sequence
  Description of Artificial Sequence: Synthetic oligonucleotide
gaccgagguguaacuacaa

SEQ ID NO: 2226121 - RNA, 19 nt, Artificial Sequence
  Description of Artificial Sequence: Synthetic oligonucleotide
gggaggaguggccuuccuc

SEQ ID NO: 2226122 - RNA, 19 nt, Artificial Sequence
  Description of Artificial Sequence: Synthetic oligonucleotide
cacagaccgagguguaacu

SEQ ID NO: 2226123 - RNA, 19 nt, Artificial Sequence
  Description of Artificial Sequence: Synthetic oligonucleotide
ccaugaguccaaagauauc

SEQ ID NO: 2226124 - RNA, 19 nt, Artificial Sequence
  Description of Artificial Sequence: Synthetic oligonucleotide
cagggaggaguggccuucc

SEQ ID NO: 2226125 - RNA, 19 nt, Artificial Sequence
  Description of Artificial Sequence: Synthetic oligonucleotide
gcagaaugugugucaauau

SEQ ID NO: 2226126 - RNA, 19 nt, Artificial Sequence
  Description of Artificial Sequence: Synthetic oligonucleotide
ggucaacugaucagguuua

SEQ ID NO: 2226127 - RNA, 19 nt, Artificial Sequence
  Description of Artificial Sequence: Synthetic oligonucleotide
acgcuugcuuaaagucaag

SEQ ID NO: 2226128 - RNA, 19 nt, Artificial Sequence
  Description of Artificial Sequence: Synthetic oligonucleotide
cucugaccccaaacugaga

SEQ ID NO: 2226129 - RNA, 19 nt, Artificial Sequence
  Description of Artificial Sequence: Synthetic oligonucleotide
cgagguaacauaacuugua

SEQ ID NO: 2226130 - RNA, 19 nt, Artificial Sequence
  Description of Artificial Sequence: Synthetic oligonucleotide
cagguucauacugauuuau

SEQ ID NO: 2226131 - RNA, 19 nt, Artificial Sequence
  Description of Artificial Sequence: Synthetic oligonucleotide
gucacagaccgagguguaa

SEQ ID NO: 2226132 - RNA, 19 nt, Artificial Sequence
  Description of Artificial Sequence: Synthetic oligonucleotide
ccgacgagguaacauaacu

SEQ ID NO: 2226133 - RNA, 19 nt, Artificial Sequence
  Description of Artificial Sequence: Synthetic oligonucleotide
ccucaaaggcagaaugugu

SEQ ID NO: 2226134 - RNA, 19 nt, Artificial Sequence
  Description of Artificial Sequence: Synthetic oligonucleotide
gcacaugccucacuuuccu

SEQ ID NO: 2226135 - RNA, 19 nt, Artificial Sequence
  Description of Artificial Sequence: Synthetic oligonucleotide
caccaauucccuugaucau

SEQ ID NO: 2226136 - RNA, 19 nt, Artificial Sequence
  Description of Artificial Sequence: Synthetic oligonucleotide
gaccccaaacugagagaaa

SEQ ID NO: 2226137 - RNA, 19 nt, Artificial Sequence
  Description of Artificial Sequence: Synthetic oligonucleotide
cacaugccucacuuuccua

SEQ ID NO: 2226138 - RNA, 19 nt, Artificial Sequence
  Description of Artificial Sequence: Synthetic oligonucleotide
cguaaaugauguucgaauu

SEQ ID NO: 2226139 - RNA, 19 nt, Artificial Sequence
  Description of Artificial Sequence: Synthetic oligonucleotide
cuccugucaucaccagcaa

SEQ ID NO: 2226140 - RNA, 19 nt, Artificial Sequence
  Description of Artificial Sequence: Synthetic oligonucleotide
gaguggccuuccucugucu

SEQ ID NO: 2226141 - RNA, 19 nt, Artificial Sequence
  Description of Artificial Sequence: Synthetic oligonucleotide
ccgagguguaacuacaauu

SEQ ID NO: 2226142 - RNA, 19 nt, Artificial Sequence
  Description of Artificial Sequence: Synthetic oligonucleotide
ucgcuccagcugccaugcu

SEQ ID NO: 2226143 - RNA, 19 nt, Artificial Sequence
  Description of Artificial Sequence: Synthetic oligonucleotide
cgaauuccacgcuugcuua

SEQ ID NO: 2226144 - RNA, 19 nt, Artificial Sequence
  Description of Artificial Sequence: Synthetic oligonucleotide
ccagguucauacugauuua

SEQ ID NO: 2226145 - RNA, 19 nt, Artificial Sequence
  Description of Artificial Sequence: Synthetic oligonucleotide
gcuaagccaaauggcucaa

SEQ ID NO: 2226146 - RNA, 19 nt, Artificial Sequence
  Description of Artificial Sequence: Synthetic oligonucleotide
caauucccuugaucauagu

SEQ ID NO: 2226147 - RNA, 19 nt, Artificial Sequence
  Description of Artificial Sequence: Synthetic oligonucleotide
ccgaugucacuggugauua

SEQ ID NO: 2226148 - RNA, 19 nt, Artificial Sequence
  Description of Artificial Sequence: Synthetic oligonucleotide
gccaugcucuuuacugcuc

SEQ ID NO: 2226149 - RNA, 19 nt, Artificial Sequence
  Description of Artificial Sequence: Synthetic oligonucleotide
acacacgacuggacauguu

SEQ ID NO: 2226150 - RNA, 19 nt, Artificial Sequence
  Description of Artificial Sequence: Synthetic oligonucleotide
ccaaauggcucaacagcuu

SEQ ID NO: 2226151 - RNA, 19 nt, Artificial Sequence
  Description of Artificial Sequence: Synthetic oligonucleotide
cgacgagguaacauaacuu

SEQ ID NO: 2226152 - RNA, 19 nt, Artificial Sequence
  Description of Artificial Sequence: Synthetic oligonucleotide
ccccagguaaaggcuuauc

SEQ ID NO: 2226153 - RNA, 19 nt, Artificial Sequence
  Description of Artificial Sequence: Synthetic oligonucleotide
gcucagaugcuuggacagu

SEQ ID NO: 2226154 - RNA, 19 nt, Artificial Sequence
  Description of Artificial Sequence: Synthetic oligonucleotide
ccacaguguuguucucaua

SEQ ID NO: 2226155 - RNA, 19 nt, Artificial Sequence
  Description of Artificial Sequence: Synthetic oligonucleotide
cgcuugcuuaaagucaagu

SEQ ID NO: 2226156 - RNA, 19 nt, Artificial Sequence
  Description of Artificial Sequence: Synthetic oligonucleotide
cgaugucacuggugauuau

SEQ ID NO: 2226157 - RNA, 19 nt, Artificial Sequence
  Description of Artificial Sequence: Synthetic oligonucleotide
uuugcuauaguuaacagga

SEQ ID NO: 2226158 - RNA, 19 nt, Artificial Sequence
  Description of Artificial Sequence: Synthetic oligonucleotide
aaugguucaaacuucagga

SEQ ID NO: 2226159 - RNA, 19 nt, Artificial Sequence
  Description of Artificial Sequence: Synthetic oligonucleotide
aaaugguucaaacuucagg

SEQ ID NO: 2226160 - RNA, 19 nt, Artificial Sequence
  Description of Artificial Sequence: Synthetic oligonucleotide
cuuaugaguacaaaguagg

SEQ ID NO: 2226161 - RNA, 19 nt, Artificial Sequence
  Description of Artificial Sequence: Synthetic oligonucleotide
ucuuaugaguacaaaguag

SEQ ID NO: 2226162 - RNA, 19 nt, Artificial Sequence
  Description of Artificial Sequence: Synthetic oligonucleotide
gagaacuuaagucuggccc

SEQ ID NO: 2226163 - RNA, 19 nt, Artificial Sequence
  Description of Artificial Sequence: Synthetic oligonucleotide
agaacuuaagucuggcccc

SEQ ID NO: 2226164 - RNA, 19 nt, Artificial Sequence
  Description of Artificial Sequence: Synthetic oligonucleotide
uguacauggaggauaaaug

SEQ ID NO: 2226165 - RNA, 19 nt, Artificial Sequence
  Description of Artificial Sequence: Synthetic oligonucleotide
aacucaauauauuccuccg

SEQ ID NO: 2226166 - RNA, 19 nt, Artificial Sequence
  Description of Artificial Sequence: Synthetic oligonucleotide
uauagaaccuuucaauucu

SEQ ID NO: 2226167 - RNA, 19 nt, Artificial Sequence
  Description of Artificial Sequence: Synthetic oligonucleotide
uuaaugggacuucuaaucc

SEQ ID NO: 2226168 - RNA, 19 nt, Artificial Sequence
  Description of Artificial Sequence: Synthetic oligonucleotide
guacauggaggauaaaugg

SEQ ID NO: 2226169 - RNA, 19 nt, Artificial Sequence
  Description of Artificial Sequence: Synthetic oligonucleotide
agaccagagaacuuaaguc

SEQ ID NO: 2226170 - RNA, 19 nt, Artificial Sequence
  Description of Artificial Sequence: Synthetic oligonucleotide
uugugugucaccaggagcc

SEQ ID NO: 2226171 - RNA, 19 nt, Artificial Sequence
  Description of Artificial Sequence: Synthetic oligonucleotide
uauaaugugugucggacac

SEQ ID NO: 2226172 - RNA, 19 nt, Artificial Sequence
  Description of Artificial Sequence: Synthetic oligonucleotide
agcuuuauaaugugugucg

SEQ ID NO: 2226173 - RNA, 19 nt, Artificial Sequence
  Description of Artificial Sequence: Synthetic oligonucleotide
agagagagagagcagagag

SEQ ID NO: 2226174 - RNA, 19 nt, Artificial Sequence
  Description of Artificial Sequence: Synthetic oligonucleotide
ucuggcauuguacauggag

SEQ ID NO: 2226175 - RNA, 19 nt, Artificial Sequence
  Description of Artificial Sequence: Synthetic oligonucleotide
aaccuuucaauucuuuucu

SEQ ID NO: 2226176 - RNA, 19 nt, Artificial Sequence
  Description of Artificial Sequence: Synthetic oligonucleotide
cuuaaugggacuucuaauc

SEQ ID NO: 2226177 - RNA, 19 nt, Artificial Sequence
  Description of Artificial Sequence: Synthetic oligonucleotide
gaacucaauauauuccucc

SEQ ID NO: 2226178 - RNA, 19 nt, Artificial Sequence
  Description of Artificial Sequence: Synthetic oligonucleotide
uuucugaaucccagaaucg

SEQ ID NO: 2226179 - RNA, 19 nt, Artificial Sequence
  Description of Artificial Sequence: Synthetic oligonucleotide
caucaguuuucccugaugg

SEQ ID NO: 2226180 - RNA, 19 nt, Artificial Sequence
  Description of Artificial Sequence: Synthetic oligonucleotide
guaaagagcagcuuuauaa

SEQ ID NO: 2226181 - RNA, 19 nt, Artificial Sequence
  Description of Artificial Sequence: Synthetic oligonucleotide
gagagagagagagagagag

SEQ ID NO: 2226182 - RNA, 19 nt, Artificial Sequence
  Description of Artificial Sequence: Synthetic oligonucleotide
uucccugauggcuuaaugg

SEQ ID NO: 2226183 - RNA, 19 nt, Artificial Sequence
  Description of Artificial Sequence: Synthetic oligonucleotide
uguaggcaguuauagaacc

SEQ ID NO: 2226184 - RNA, 19 nt, Artificial Sequence
  Description of Artificial Sequence: Synthetic oligonucleotide
ucccugauggcuuaauggg

SEQ ID NO: 2226185 - RNA, 19 nt, Artificial Sequence
  Description of Artificial Sequence: Synthetic oligonucleotide
ugugugucggacacgauca

SEQ ID NO: 2226186 - RNA, 19 nt, Artificial Sequence
  Description of Artificial Sequence: Synthetic oligonucleotide
uuauagaaccuuucaauuc

SEQ ID NO: 2226187 - RNA, 19 nt, Artificial Sequence
  Description of Artificial Sequence: Synthetic oligonucleotide
augccagaguuccugaagc

SEQ ID NO: 2226188 - RNA, 19 nt, Artificial Sequence
  Description of Artificial Sequence: Synthetic oligonucleotide
ugugcucgcguccaggagg

SEQ ID NO: 2226189 - RNA, 19 nt, Artificial Sequence
  Description of Artificial Sequence: Synthetic oligonucleotide
uuucacacaagguuugugu

SEQ ID NO: 2226190 - RNA, 19 nt, Artificial Sequence
  Description of Artificial Sequence: Synthetic oligonucleotide
acuucuaauccauguguac

SEQ ID NO: 2226191 - RNA, 19 nt, Artificial Sequence
  Description of Artificial Sequence: Synthetic oligonucleotide
uaauccauguguacuccgg

SEQ ID NO: 2226192 - RNA, 19 nt, Artificial Sequence
  Description of Artificial Sequence: Synthetic oligonucleotide
uagaccagagaacuuaagu

SEQ ID NO: 2226193 - RNA, 19 nt, Artificial Sequence
  Description of Artificial Sequence: Synthetic oligonucleotide
uuugugugucaccaggagc

SEQ ID NO: 2226194 - RNA, 19 nt, Artificial Sequence
  Description of Artificial Sequence: Synthetic oligonucleotide
ugcuauaguuaacaggaac

SEQ ID NO: 2226195 - RNA, 19 nt, Artificial Sequence
  Description of Artificial Sequence: Synthetic oligonucleotide
ugguucaaacuucaggaca

SEQ ID NO: 2226196 - RNA, 19 nt, Artificial Sequence
  Description of Artificial Sequence: Synthetic oligonucleotide
ucuuguaaagagcagcuuu

SEQ ID NO: 2226197 - RNA, 19 nt, Artificial Sequence
  Description of Artificial Sequence: Synthetic oligonucleotide
gaaccuuucaauucuuuuc

SEQ ID NO: 2226198 - RNA, 19 nt, Artificial Sequence
  Description of Artificial Sequence: Synthetic oligonucleotide
uucaguaauggauggguca

SEQ ID NO: 2226199 - RNA, 19 nt, Artificial Sequence
  Description of Artificial Sequence: Synthetic oligonucleotide
uucuuaugaguacaaagua

SEQ ID NO: 2226200 - RNA, 19 nt, Artificial Sequence
  Description of Artificial Sequence: Synthetic oligonucleotide
guuguaggcaguuauagaa

SEQ ID NO: 2226201 - RNA, 19 nt, Artificial Sequence
  Description of Artificial Sequence: Synthetic oligonucleotide
uuuauucuuaugaguacaa

SEQ ID NO: 2226202 - RNA, 19 nt, Artificial Sequence
  Description of Artificial Sequence: Synthetic oligonucleotide
acaguacucuuguaaagag

SEQ ID NO: 2226203 - RNA, 19 nt, Artificial Sequence
  Description of Artificial Sequence: Synthetic oligonucleotide
aagucuggccccugcagcg

SEQ ID NO: 2226204 - RNA, 19 nt, Artificial Sequence
  Description of Artificial Sequence: Synthetic oligonucleotide
caggaacucaauauauucc

SEQ ID NO: 2226205 - RNA, 19 nt, Artificial Sequence
  Description of Artificial Sequence: Synthetic oligonucleotide
gcagagagcaaauauauac

SEQ ID NO: 2226206 - RNA, 19 nt, Artificial Sequence
  Description of Artificial Sequence: Synthetic oligonucleotide
uucucuagaccagagaacu

SEQ ID NO: 2226207 - RNA, 19 nt, Artificial Sequence
  Description of Artificial Sequence: Synthetic oligonucleotide
aguacucuuguaaagagca

SEQ ID NO: 2226208 - RNA, 19 nt, Artificial Sequence
  Description of Artificial Sequence: Synthetic oligonucleotide
uagucuuccucugagaaga

SEQ ID NO: 2226209 - RNA, 19 nt, Artificial Sequence
  Description of Artificial Sequence: Synthetic oligonucleotide
ucaauauauuccuccguca

SEQ ID NO: 2226210 - RNA, 19 nt, Artificial Sequence
  Description of Artificial Sequence: Synthetic oligonucleotide
uuguuguaggcaguuauag

SEQ ID NO: 2226211 - RNA, 19 nt, Artificial Sequence
  Description of Artificial Sequence: Synthetic oligonucleotide
aaucgcuugugcucgcguc

SEQ ID NO: 2226212 - RNA, 19 nt, Artificial Sequence
  Description of Artificial Sequence: Synthetic oligonucleotide
augugugucggacacgauc

SEQ ID NO: 2226213 - RNA, 19 nt, Artificial Sequence
  Description of Artificial Sequence: Synthetic oligonucleotide
uaugaguacaaaguaggcu

SEQ ID NO: 2226214 - RNA, 19 nt, Artificial Sequence
  Description of Artificial Sequence: Synthetic oligonucleotide
cauugcuuguuguaggcag

SEQ ID NO: 2226215 - RNA, 19 nt, Artificial Sequence
  Description of Artificial Sequence: Synthetic oligonucleotide
uaaagagcagcuuuauaau

SEQ ID NO: 2226216 - RNA, 19 nt, Artificial Sequence
  Description of Artificial Sequence: Synthetic oligonucleotide
aaaccuuagucuuccucug

SEQ ID NO: 2226217 - RNA, 19 nt, Artificial Sequence
  Description of Artificial Sequence: Synthetic oligonucleotide
agagagagagcagagagca

SEQ ID NO: 2226218 - RNA, 19 nt, Artificial Sequence
  Description of Artificial Sequence: Synthetic oligonucleotide
cuuuuauucuuaugaguac

SEQ ID NO: 2226219 - RNA, 19 nt, Artificial Sequence
  Description of Artificial Sequence: Synthetic oligonucleotide
uuuccauugcuuguuguag

SEQ ID NO: 2226220 - RNA, 19 nt, Artificial Sequence
  Description of Artificial Sequence: Synthetic oligonucleotide
uucacacaagguuugugug

SEQ ID NO: 2226221 - RNA, 19 nt, Artificial Sequence
  Description of Artificial Sequence: Synthetic oligonucleotide
acggugaugccagaguucc

SEQ ID NO: 2226222 - RNA, 19 nt, Artificial Sequence
  Description of Artificial Sequence: Synthetic oligonucleotide
gagagagagagagagagca

SEQ ID NO: 2226223 - RNA, 19 nt, Artificial Sequence
  Description of Artificial Sequence: Synthetic oligonucleotide
agguuugugugucaccagg

SEQ ID NO: 2226224 - RNA, 19 nt, Artificial Sequence
  Description of Artificial Sequence: Synthetic oligonucleotide
ugagugcagggucugugcg

SEQ ID NO: 2226225 - RNA, 19 nt, Artificial Sequence
  Description of Artificial Sequence: Synthetic oligonucleotide
cucaauauauuccuccguc

SEQ ID NO: 2226226 - RNA, 19 nt, Artificial Sequence
  Description of Artificial Sequence: Synthetic oligonucleotide
uuauaaugugugucggaca

SEQ ID NO: 2226227 - RNA, 19 nt, Artificial Sequence
  Description of Artificial Sequence: Synthetic oligonucleotide
uuagucuuccucugagaag

SEQ ID NO: 2226228 - RNA, 19 nt, Artificial Sequence
  Description of Artificial Sequence: Synthetic oligonucleotide
caucacaucaucuuucaca

SEQ ID NO: 2226229 - RNA, 19 nt, Artificial Sequence
  Description of Artificial Sequence: Synthetic oligonucleotide
uauaguuaacaggaacuca

SEQ ID NO: 2226230 - RNA, 19 nt, Artificial Sequence
  Description of Artificial Sequence: Synthetic oligonucleotide
ucugaaucccagaaucgcu

SEQ ID NO: 2226231 - RNA, 19 nt, Artificial Sequence
  Description of Artificial Sequence: Synthetic oligonucleotide
auauauuccuccgucacca

SEQ ID NO: 2226232 - RNA, 19 nt, Artificial Sequence
  Description of Artificial Sequence: Synthetic oligonucleotide
acaagguuugugugucacc

SEQ ID NO: 2226233 - RNA, 19 nt, Artificial Sequence
  Description of Artificial Sequence: Synthetic oligonucleotide
caauauauuccuccgucac

SEQ ID NO: 2226234 - RNA, 19 nt, Artificial Sequence
  Description of Artificial Sequence: Synthetic oligonucleotide
agcauugcugguugcgccc

SEQ ID NO: 2226235 - RNA, 19 nt, Artificial Sequence
  Description of Artificial Sequence: Synthetic oligonucleotide
acuuaagucuggccccugc

SEQ ID NO: 2226236 - RNA, 19 nt, Artificial Sequence
  Description of Artificial Sequence: Synthetic oligonucleotide
uucuaauccauguguacuc

SEQ ID NO: 2226237 - RNA, 19 nt, Artificial Sequence
  Description of Artificial Sequence: Synthetic oligonucleotide
aucgcuugugcucgcgucc

SEQ ID NO: 2226238 - RNA, 19 nt, Artificial Sequence
  Description of Artificial Sequence: Synthetic oligonucleotide
uuucucuagaccagagaac

SEQ ID NO: 2226239 - RNA, 19 nt, Artificial Sequence
  Description of Artificial Sequence: Synthetic oligonucleotide
uggcauuguacauggagga

SEQ ID NO: 2226240 - RNA, 19 nt, Artificial Sequence
  Description of Artificial Sequence: Synthetic oligonucleotide
uaaugggacuucuaaucca

SEQ ID NO: 2226241 - RNA, 19 nt, Artificial Sequence
  Description of Artificial Sequence: Synthetic oligonucleotide
acacgaucagggccaaacc

SEQ ID NO: 2226242 - RNA, 19 nt, Artificial Sequence
  Description of Artificial Sequence: Synthetic oligonucleotide
uaaugugugucggacacga

SEQ ID NO: 2226243 - RNA, 19 nt, Artificial Sequence
  Description of Artificial Sequence: Synthetic oligonucleotide
uccauguguacuccggaca

SEQ ID NO: 2226244 - RNA, 19 nt, Artificial Sequence
  Description of Artificial Sequence: Synthetic oligonucleotide
agcgcggauacacucacag

SEQ ID NO: 2226245 - RNA, 19 nt, Artificial Sequence
  Description of Artificial Sequence: Synthetic oligonucleotide
ugguuugcuauaguuaaca

SEQ ID NO: 2226246 - RNA, 19 nt, Artificial Sequence
  Description of Artificial Sequence: Synthetic oligonucleotide
ugagaagagugcagcacug

SEQ ID NO: 2226247 - RNA, 19 nt, Artificial Sequence
  Description of Artificial Sequence: Synthetic oligonucleotide
uucugaaucccagaaucgc

SEQ ID NO: 2226248 - RNA, 19 nt, Artificial Sequence
  Description of Artificial Sequence: Synthetic oligonucleotide
cuaauccauguguacuccg

SEQ ID NO: 2226249 - RNA, 19 nt, Artificial Sequence
  Description of Artificial Sequence: Synthetic oligonucleotide
uguuguaggcaguuauaga

SEQ ID NO: 2226250 - RNA, 19 nt, Artificial Sequence
  Description of Artificial Sequence: Synthetic oligonucleotide
guuaacaggaacucaauau

SEQ ID NO: 2226251 - RNA, 19 nt, Artificial Sequence
  Description of Artificial Sequence: Synthetic oligonucleotide
gaccagagaacuuaagucu

SEQ ID NO: 2226252 - RNA, 19 nt, Artificial Sequence
  Description of Artificial Sequence: Synthetic oligonucleotide
uuucccugauggcuuaaug

SEQ ID NO: 2226253 - RNA, 19 nt, Artificial Sequence
  Description of Artificial Sequence: Synthetic oligonucleotide
ugggacuucuaauccaugu

SEQ ID NO: 2226254 - RNA, 19 nt, Artificial Sequence
  Description of Artificial Sequence: Synthetic oligonucleotide
auaguuaacaggaacucaa

SEQ ID NO: 2226255 - RNA, 19 nt, Artificial Sequence
  Description of Artificial Sequence: Synthetic oligonucleotide
cuauaguuaacaggaacuc

SEQ ID NO: 2226256 - RNA, 19 nt, Artificial Sequence
  Description of Artificial Sequence: Synthetic oligonucleotide
uggaaauggcuuuucuuuc

SEQ ID NO: 2226257 - RNA, 19 nt, Artificial Sequence
  Description of Artificial Sequence: Synthetic oligonucleotide
ucacacaagguuugugugu

SEQ ID NO: 2226258 - RNA, 19 nt, Artificial Sequence
  Description of Artificial Sequence: Synthetic oligonucleotide
ugaaucccagaaucgcuug

SEQ ID NO: 2226259 - RNA, 19 nt, Artificial Sequence
  Description of Artificial Sequence: Synthetic oligonucleotide
acagcauugcugguugcgc

SEQ ID NO: 2226260 - RNA, 19 nt, Artificial Sequence
  Description of Artificial Sequence: Synthetic oligonucleotide
ucuagaccagagaacuuaa

SEQ ID NO: 2226261 - RNA, 19 nt, Artificial Sequence
  Description of Artificial Sequence: Synthetic oligonucleotide
cacaucaucuuucacacaa

SEQ ID NO: 2226262 - RNA, 19 nt, Artificial Sequence
  Description of Artificial Sequence: Synthetic oligonucleotide
gugucggacacgaucaggg

SEQ ID NO: 2226263 - RNA, 19 nt, Artificial Sequence
  Description of Artificial Sequence: Synthetic oligonucleotide
caguacucuuguaaagagc

SEQ ID NO: 2226264 - RNA, 19 nt, Artificial Sequence
  Description of Artificial Sequence: Synthetic oligonucleotide
uuuccucgcuuccccacgg

SEQ ID NO: 2226265 - RNA, 19 nt, Artificial Sequence
  Description of Artificial Sequence: Synthetic oligonucleotide
guguacuccggacagccag

SEQ ID NO: 2226266 - RNA, 19 nt, Artificial Sequence
  Description of Artificial Sequence: Synthetic oligonucleotide
gucucagaaugugagcugg

SEQ ID NO: 2226267 - RNA, 19 nt, Artificial Sequence
  Description of Artificial Sequence: Synthetic oligonucleotide
auuuucugguuugcuauag

SEQ ID NO: 2226268 - RNA, 19 nt, Artificial Sequence
  Description of Artificial Sequence: Synthetic oligonucleotide
uguaaagagcagcuuuaua

SEQ ID NO: 2226269 - RNA, 19 nt, Artificial Sequence
  Description of Artificial Sequence: Synthetic oligonucleotide
uccugaagccagaagcaac

SEQ ID NO: 2226270 - RNA, 19 nt, Artificial Sequence
  Description of Artificial Sequence: Synthetic oligonucleotide
aguuaacaggaacucaaua

SEQ ID NO: 2226271 - RNA, 19 nt, Artificial Sequence
  Description of Artificial Sequence: Synthetic oligonucleotide
ugaguacaaaguaggcuau

SEQ ID NO: 2226272 - RNA, 19 nt, Artificial Sequence
  Description of Artificial Sequence: Synthetic oligonucleotide
ugauucccaggccaucagc

SEQ ID NO: 2226273 - RNA, 19 nt, Artificial Sequence
  Description of Artificial Sequence: Synthetic oligonucleotide
gucaugugcuuuuccuugg

SEQ ID NO: 2226274 - RNA, 19 nt, Artificial Sequence
  Description of Artificial Sequence: Synthetic oligonucleotide
aggcucugcgccuuccagc

SEQ ID NO: 2226275 - RNA, 19 nt, Artificial Sequence
  Description of Artificial Sequence: Synthetic oligonucleotide
uuucaauucuuuucuuguu

SEQ ID NO: 2226276 - RNA, 19 nt, Artificial Sequence
  Description of Artificial Sequence: Synthetic oligonucleotide
cagagagcaaauauauaca

SEQ ID NO: 2226277 - RNA, 19 nt, Artificial Sequence
  Description of Artificial Sequence: Synthetic oligonucleotide
ugggucaugugcuuuuccu

SEQ ID NO: 2226278 - RNA, 19 nt, Artificial Sequence
  Description of Artificial Sequence: Synthetic oligonucleotide
acucaauauauuccuccgu

SEQ ID NO: 2226279 - RNA, 19 nt, Artificial Sequence
  Description of Artificial Sequence: Synthetic oligonucleotide
gguucaaacuucaggacag

SEQ ID NO: 2226280 - RNA, 19 nt, Artificial Sequence
  Description of Artificial Sequence: Synthetic oligonucleotide
aguaauggaugggucaugu

SEQ ID NO: 2226281 - RNA, 19 nt, Artificial Sequence
  Description of Artificial Sequence: Synthetic oligonucleotide
agaaccuuucaauucuuuu

SEQ ID NO: 2226282 - RNA, 19 nt, Artificial Sequence
  Description of Artificial Sequence: Synthetic oligonucleotide
gacacgaucagggccaaac

SEQ ID NO: 2226283 - RNA, 19 nt, Artificial Sequence
  Description of Artificial Sequence: Synthetic oligonucleotide
uuuucugguuugcuauagu

SEQ ID NO: 2226284 - RNA, 19 nt, Artificial Sequence
  Description of Artificial Sequence: Synthetic oligonucleotide
aaugggacuucuaauccau

SEQ ID NO: 2226285 - RNA, 19 nt, Artificial Sequence
  Description of Artificial Sequence: Synthetic oligonucleotide
gacagcauugcugguugcg

SEQ ID NO: 2226286 - RNA, 19 nt, Artificial Sequence
  Description of Artificial Sequence: Synthetic oligonucleotide
uucaaacuucaggacagca

SEQ ID NO: 2226287 - RNA, 19 nt, Artificial Sequence
  Description of Artificial Sequence: Synthetic oligonucleotide
cuuagucuuccucugagaa

SEQ ID NO: 2226288 - RNA, 19 nt, Artificial Sequence
  Description of Artificial Sequence: Synthetic oligonucleotide
aggaggauucggccggcgc

SEQ ID NO: 2226289 - RNA, 19 nt, Artificial Sequence
  Description of Artificial Sequence: Synthetic oligonucleotide
ccugaagccagaagcaacg

SEQ ID NO: 2226290 - RNA, 19 nt, Artificial Sequence
  Description of Artificial Sequence: Synthetic oligonucleotide
gagagagagagagagcaga

SEQ ID NO: 2226291 - RNA, 19 nt, Artificial Sequence
  Description of Artificial Sequence: Synthetic oligonucleotide
agagugcagcacugauucc

SEQ ID NO: 2226292 - RNA, 19 nt, Artificial Sequence
  Description of Artificial Sequence: Synthetic oligonucleotide
uccgucaccaucaguuuuc

SEQ ID NO: 2226293 - RNA, 19 nt, Artificial Sequence
  Description of Artificial Sequence: Synthetic oligonucleotide
ugugucggacacgaucagg

SEQ ID NO: 2226294 - RNA, 19 nt, Artificial Sequence
  Description of Artificial Sequence: Synthetic oligonucleotide
uguacuccggacagccagc

SEQ ID NO: 2226295 - RNA, 19 nt, Artificial Sequence
  Description of Artificial Sequence: Synthetic oligonucleotide
aagcaacggccgcugagug

SEQ ID NO: 2226296 - RNA, 19 nt, Artificial Sequence
  Description of Artificial Sequence: Synthetic oligonucleotide
auggucuucaguaauggau

SEQ ID NO: 2226297 - RNA, 19 nt, Artificial Sequence
  Description of Artificial Sequence: Synthetic oligonucleotide
aaccuuagucuuccucuga

SEQ ID NO: 2226298 - RNA, 19 nt, Artificial Sequence
  Description of Artificial Sequence: Synthetic oligonucleotide
agagagagagagagagagc

SEQ ID NO: 2226299 - RNA, 19 nt, Artificial Sequence
  Description of Artificial Sequence: Synthetic oligonucleotide
uaguuaacaggaacucaau

SEQ ID NO: 2226300 - RNA, 19 nt, Artificial Sequence
  Description of Artificial Sequence: Synthetic oligonucleotide
cuugcccaggcucugcgcc

SEQ ID NO: 2226301 - RNA, 19 nt, Artificial Sequence
  Description of Artificial Sequence: Synthetic oligonucleotide
ggucaugugcuuuuccuug

SEQ ID NO: 2226302 - RNA, 19 nt, Artificial Sequence
  Description of Artificial Sequence: Synthetic oligonucleotide
ggauaaaugguucaaacuu

SEQ ID NO: 2226303 - RNA, 19 nt, Artificial Sequence
  Description of Artificial Sequence: Synthetic oligonucleotide
agaagagugcagcacugau

SEQ ID NO: 2226304 - RNA, 19 nt, Artificial Sequence
  Description of Artificial Sequence: Synthetic oligonucleotide
uuccugcgcguucaggagc

SEQ ID NO: 2226305 - RNA, 19 nt, Artificial Sequence
  Description of Artificial Sequence: Synthetic oligonucleotide
cuagaccagagaacuuaag

SEQ ID NO: 2226306 - RNA, 19 nt, Artificial Sequence
  Description of Artificial Sequence: Synthetic oligonucleotide
gguuugcuauaguuaacag

SEQ ID NO: 2226307 - RNA, 19 nt, Artificial Sequence
  Description of Artificial Sequence: Synthetic oligonucleotide
gagagagagagcagagagc

SEQ ID NO: 2226308 - RNA, 19 nt, Artificial Sequence
  Description of Artificial Sequence: Synthetic oligonucleotide
agcgugguggugaagaacu

SEQ ID NO: 2226309 - RNA, 19 nt, Artificial Sequence
  Description of Artificial Sequence: Synthetic oligonucleotide
cuuuauaaugugugucgga

SEQ ID NO: 2226310 - RNA, 19 nt, Artificial Sequence
  Description of Artificial Sequence: Synthetic oligonucleotide
cugagugcagggucugugc

SEQ ID NO: 2226311 - RNA, 19 nt, Artificial Sequence
  Description of Artificial Sequence: Synthetic oligonucleotide
gcuuuauaaugugugucgg

SEQ ID NO: 2226312 - RNA, 19 nt, Artificial Sequence
  Description of Artificial Sequence: Synthetic oligonucleotide
cuuuccucgcuuccccacg

SEQ ID NO: 2226313 - RNA, 19 nt, Artificial Sequence
  Description of Artificial Sequence: Synthetic oligonucleotide
cuuccagcgcccgaacucg

SEQ ID NO: 2226314 - RNA, 19 nt, Artificial Sequence
  Description of Artificial Sequence: Synthetic oligonucleotide
agagagagagagagcagag

SEQ ID NO: 2226315 - RNA, 19 nt, Artificial Sequence
  Description of Artificial Sequence: Synthetic oligonucleotide
ugcagcgcggauacacuca

SEQ ID NO: 2226316 - RNA, 19 nt, Artificial Sequence
  Description of Artificial Sequence: Synthetic oligonucleotide
auaaugugugucggacacg

SEQ ID NO: 2226317 - RNA, 19 nt, Artificial Sequence
  Description of Artificial Sequence: Synthetic oligonucleotide
cagcauugcugguugcgcc

SEQ ID NO: 2226318 - RNA, 19 nt, Artificial Sequence
  Description of Artificial Sequence: Synthetic oligonucleotide
ggaggauucggccggcgcg

SEQ ID NO: 2226319 - RNA, 19 nt, Artificial Sequence
  Description of Artificial Sequence: Synthetic oligonucleotide
cucugcgccuuccagcgcc

SEQ ID NO: 2226320 - RNA, 19 nt, Artificial Sequence
  Description of Artificial Sequence: Synthetic oligonucleotide
cagcuuuauaauguguguc

SEQ ID NO: 2226321 - RNA, 19 nt, Artificial Sequence
  Description of Artificial Sequence: Synthetic oligonucleotide
ucucagaaugugagcugga

SEQ ID NO: 2226322 - RNA, 19 nt, Artificial Sequence
  Description of Artificial Sequence: Synthetic oligonucleotide
aguacaaaguaggcuauuu

SEQ ID NO: 2226323 - RNA, 19 nt, Artificial Sequence
  Description of Artificial Sequence: Synthetic oligonucleotide
ggcucugcgccuuccagcg

SEQ ID NO: 2226324 - RNA, 19 nt, Artificial Sequence
  Description of Artificial Sequence: Synthetic oligonucleotide
agugucuggcauuguacau

SEQ ID NO: 2226325 - RNA, 19 nt, Artificial Sequence
  Description of Artificial Sequence: Synthetic oligonucleotide
uggaggauaaaugguucaa

SEQ ID NO: 2226326 - RNA, 19 nt, Artificial Sequence
  Description of Artificial Sequence: Synthetic oligonucleotide
uugugcucgcguccaggag

SEQ ID NO: 2226327 - RNA, 19 nt, Artificial Sequence
  Description of Artificial Sequence: Synthetic oligonucleotide
aucaucuuucacacaaggu

SEQ ID NO: 2226328 - RNA, 19 nt, Artificial Sequence
  Description of Artificial Sequence: Synthetic oligonucleotide
uugcuauaguuaacaggaa

SEQ ID NO: 2226329 - RNA, 19 nt, Artificial Sequence
  Description of Artificial Sequence: Synthetic oligonucleotide
ugcgcguucaggagcugca

SEQ ID NO: 2226330 - RNA, 19 nt, Artificial Sequence
  Description of Artificial Sequence: Synthetic oligonucleotide
cacacaagguuuguguguc

SEQ ID NO: 2226331 - RNA, 19 nt, Artificial Sequence
  Description of Artificial Sequence: Synthetic oligonucleotide
uccugcgcguucaggagcu

SEQ ID NO: 2226332 - RNA, 19 nt, Artificial Sequence
  Description of Artificial Sequence: Synthetic oligonucleotide
guaauggaugggucaugug

SEQ ID NO: 2226333 - RNA, 19 nt, Artificial Sequence
  Description of Artificial Sequence: Synthetic oligonucleotide
gugucuggcauuguacaug

SEQ ID NO: 2226334 - RNA, 19 nt, Artificial Sequence
  Description of Artificial Sequence: Synthetic oligonucleotide
cuuucacacaagguuugug

SEQ ID NO: 2226335 - RNA, 19 nt, Artificial Sequence
  Description of Artificial Sequence: Synthetic oligonucleotide
gggacuucuaauccaugug

SEQ ID NO: 2226336 - RNA, 19 nt, Artificial Sequence
  Description of Artificial Sequence: Synthetic oligonucleotide
gagagcaaauauauacaaa

SEQ ID NO: 2226337 - RNA, 19 nt, Artificial Sequence
  Description of Artificial Sequence: Synthetic oligonucleotide
aggagcgugguggugaaga

SEQ ID NO: 2226338 - RNA, 19 nt, Artificial Sequence
  Description of Artificial Sequence: Synthetic oligonucleotide
uguguacuccggacagcca

SEQ ID NO: 2226339 - RNA, 19 nt, Artificial Sequence
  Description of Artificial Sequence: Synthetic oligonucleotide
agcauggucuuuccucgcu

SEQ ID NO: 2226340 - RNA, 19 nt, Artificial Sequence
  Description of Artificial Sequence: Synthetic oligonucleotide
cugguuugcuauaguuaac

SEQ ID NO: 2226341 - RNA, 19 nt, Artificial Sequence
  Description of Artificial Sequence: Synthetic oligonucleotide
cagugucuggcauuguaca

SEQ ID NO: 2226342 - RNA, 19 nt, Artificial Sequence
  Description of Artificial Sequence: Synthetic oligonucleotide
gguuccuuuuauucuuaug

SEQ ID NO: 2226343 - RNA, 19 nt, Artificial Sequence
  Description of Artificial Sequence: Synthetic oligonucleotide
ggcgcgaggagcguggugg

SEQ ID NO: 2226344 - RNA, 19 nt, Artificial Sequence
  Description of Artificial Sequence: Synthetic oligonucleotide
gauggcuuaaugggacuuc

SEQ ID NO: 2226345 - RNA, 19 nt, Artificial Sequence
  Description of Artificial Sequence: Synthetic oligonucleotide
gauucggccggcgcgagga

SEQ ID NO: 2226346 - RNA, 19 nt, Artificial Sequence
  Description of Artificial Sequence: Synthetic oligonucleotide
cgcggauacacucacagac

SEQ ID NO: 2226347 - RNA, 19 nt, Artificial Sequence
  Description of Artificial Sequence: Synthetic oligonucleotide
ccagaaucgcuugugcucg

SEQ ID NO: 2226348 - RNA, 19 nt, Artificial Sequence
  Description of Artificial Sequence: Synthetic oligonucleotide
ucguccacgcugccuuucc

SEQ ID NO: 2226349 - RNA, 19 nt, Artificial Sequence
  Description of Artificial Sequence: Synthetic oligonucleotide
agaaucgcuugugcucgcg

SEQ ID NO: 2226350 - RNA, 19 nt, Artificial Sequence
  Description of Artificial Sequence: Synthetic oligonucleotide
agcgcccgaacucggcgcg

SEQ ID NO: 2226351 - RNA, 19 nt, Artificial Sequence
  Description of Artificial Sequence: Synthetic oligonucleotide
auggcuuaaugggacuucu

SEQ ID NO: 2226352 - RNA, 19 nt, Artificial Sequence
  Description of Artificial Sequence: Synthetic oligonucleotide
uuccagcgcccgaacucgg

SEQ ID NO: 2226353 - RNA, 19 nt, Artificial Sequence
  Description of Artificial Sequence: Synthetic oligonucleotide
guacucuuguaaagagcag

SEQ ID NO: 2226354 - RNA, 19 nt, Artificial Sequence
  Description of Artificial Sequence: Synthetic oligonucleotide
agagagagagagagagcag

SEQ ID NO: 2226355 - RNA, 19 nt, Artificial Sequence
  Description of Artificial Sequence: Synthetic oligonucleotide
acaucaucuuucacacaag

SEQ ID NO: 2226356 - RNA, 19 nt, Artificial Sequence
  Description of Artificial Sequence: Synthetic oligonucleotide
gcuauaguuaacaggaacu

SEQ ID NO: 2226357 - RNA, 19 nt, Artificial Sequence
  Description of Artificial Sequence: Synthetic oligonucleotide
ggcuuaaugggacuucuaa

SEQ ID NO: 2226358 - RNA, 19 nt, Artificial Sequence
  Description of Artificial Sequence: Synthetic oligonucleotide
auuccuccgucaccaucag

SEQ ID NO: 2226359 - RNA, 19 nt, Artificial Sequence
  Description of Artificial Sequence: Synthetic oligonucleotide
cuuaagucuggccccugca

SEQ ID NO: 2226360 - RNA, 19 nt, Artificial Sequence
  Description of Artificial Sequence: Synthetic oligonucleotide
ucucuagaccagagaacuu

SEQ ID NO: 2226361 - RNA, 19 nt, Artificial Sequence
  Description of Artificial Sequence: Synthetic oligonucleotide
cucgcguccaggaggagga

SEQ ID NO: 2226362 - RNA, 19 nt, Artificial Sequence
  Description of Artificial Sequence: Synthetic oligonucleotide
cuuguuguaggcaguuaua

SEQ ID NO: 2226363 - RNA, 19 nt, Artificial Sequence
  Description of Artificial Sequence: Synthetic oligonucleotide
gagagagagagagcagaga

SEQ ID NO: 2226364 - RNA, 19 nt, Artificial Sequence
  Description of Artificial Sequence: Synthetic oligonucleotide
cuucuaauccauguguacu

SEQ ID NO: 2226365 - RNA, 19 nt, Artificial Sequence
  Description of Artificial Sequence: Synthetic oligonucleotide
cucugagaagagugcagca

SEQ ID NO: 2226366 - RNA, 19 nt, Artificial Sequence
  Description of Artificial Sequence: Synthetic oligonucleotide
agucuggccccugcagcgc

SEQ ID NO: 2226367 - RNA, 19 nt, Artificial Sequence
  Description of Artificial Sequence: Synthetic oligonucleotide
ggacuucuaauccaugugu

SEQ ID NO: 2226368 - RNA, 19 nt, Artificial Sequence
  Description of Artificial Sequence: Synthetic oligonucleotide
uauauuccuccgucaccau

SEQ ID NO: 2226369 - RNA, 19 nt, Artificial Sequence
  Description of Artificial Sequence: Synthetic oligonucleotide
ugagcuggaaauggcuuuu

SEQ ID NO: 2226370 - RNA, 19 nt, Artificial Sequence
  Description of Artificial Sequence: Synthetic oligonucleotide
cauggucuucaguaaugga

SEQ ID NO: 2226371 - RNA, 19 nt, Artificial Sequence
  Description of Artificial Sequence: Synthetic oligonucleotide
cacggugaugccagaguuc

SEQ ID NO: 2226372 - RNA, 19 nt, Artificial Sequence
  Description of Artificial Sequence: Synthetic oligonucleotide
ccacaguacucuuguaaag

SEQ ID NO: 2226373 - RNA, 19 nt, Artificial Sequence
  Description of Artificial Sequence: Synthetic oligonucleotide
agcaccuuccagcuccuuu

SEQ ID NO: 2226374 - RNA, 19 nt, Artificial Sequence
  Description of Artificial Sequence: Synthetic oligonucleotide
auugcuuguuguaggcagu

SEQ ID NO: 2226375 - RNA, 19 nt, Artificial Sequence
  Description of Artificial Sequence: Synthetic oligonucleotide
cucuagaccagagaacuua

SEQ ID NO: 2226376 - RNA, 19 nt, Artificial Sequence
  Description of Artificial Sequence: Synthetic oligonucleotide
gaacucuuccugcgcguuc

SEQ ID NO: 2226377 - RNA, 19 nt, Artificial Sequence
  Description of Artificial Sequence: Synthetic oligonucleotide
guucaaacuucaggacagc

SEQ ID NO: 2226378 - RNA, 19 nt, Artificial Sequence
  Description of Artificial Sequence: Synthetic oligonucleotide
cugugcguccugcaguguc

SEQ ID NO: 2226379 - RNA, 19 nt, Artificial Sequence
  Description of Artificial Sequence: Synthetic oligonucleotide
uccagcgcccgaacucggc

SEQ ID NO: 2226380 - RNA, 19 nt, Artificial Sequence
  Description of Artificial Sequence: Synthetic oligonucleotide
aacuuaagucuggccccug

SEQ ID NO: 2226381 - RNA, 19 nt, Artificial Sequence
  Description of Artificial Sequence: Synthetic oligonucleotide
ugcguccugcagugucugg

SEQ ID NO: 2226382 - RNA, 19 nt, Artificial Sequence
  Description of Artificial Sequence: Synthetic oligonucleotide
cauguguacuccggacagc

SEQ ID NO: 2226383 - RNA, 19 nt, Artificial Sequence
  Description of Artificial Sequence: Synthetic oligonucleotide
gguugcgcccuucagagcu

SEQ ID NO: 2226384 - RNA, 19 nt, Artificial Sequence
  Description of Artificial Sequence: Synthetic oligonucleotide
acacaagguuuguguguca

SEQ ID NO: 2226385 - RNA, 19 nt, Artificial Sequence
  Description of Artificial Sequence: Synthetic oligonucleotide
ucaggacagcauugcuggu

SEQ ID NO: 2226386 - RNA, 19 nt, Artificial Sequence
  Description of Artificial Sequence: Synthetic oligonucleotide
ucugcgccuuccagcgccc

SEQ ID NO: 2226387 - RNA, 19 nt, Artificial Sequence
  Description of Artificial Sequence: Synthetic oligonucleotide
gaacucggcgcggcggucc

SEQ ID NO: 2226388 - RNA, 19 nt, Artificial Sequence
  Description of Artificial Sequence: Synthetic oligonucleotide
gagcugcaccacccgcacg

SEQ ID NO: 2226389 - RNA, 19 nt, Artificial Sequence
  Description of Artificial Sequence: Synthetic oligonucleotide
agagagagagagagagaga

SEQ ID NO: 2226390 - RNA, 19 nt, Artificial Sequence
  Description of Artificial Sequence: Synthetic oligonucleotide
gaugggucaugugcuuuuc

SEQ ID NO: 2226391 - RNA, 19 nt, Artificial Sequence
  Description of Artificial Sequence: Synthetic oligonucleotide
uggcuuaaugggacuucua

SEQ ID NO: 2226392 - RNA, 19 nt, Artificial Sequence
  Description of Artificial Sequence: Synthetic oligonucleotide
gugugucggacacgaucag

SEQ ID NO: 2226393 - RNA, 19 nt, Artificial Sequence
  Description of Artificial Sequence: Synthetic oligonucleotide
gaagcaacggccgcugagu

SEQ ID NO: 2226394 - RNA, 19 nt, Artificial Sequence
  Description of Artificial Sequence: Synthetic oligonucleotide
acgaucagggccaaaccuu

SEQ ID NO: 2226395 - RNA, 19 nt, Artificial Sequence
  Description of Artificial Sequence: Synthetic oligonucleotide
gagcgugguggugaagaac

SEQ ID NO: 2226396 - RNA, 19 nt, Artificial Sequence
  Description of Artificial Sequence: Synthetic oligonucleotide
gaaucccagaaucgcuugu

SEQ ID NO: 2226397 - RNA, 19 nt, Artificial Sequence
  Description of Artificial Sequence: Synthetic oligonucleotide
uuuucccugauggcuuaau

SEQ ID NO: 2226398 - RNA, 19 nt, Artificial Sequence
  Description of Artificial Sequence: Synthetic oligonucleotide
ggccaaaccuuagucuucc

SEQ ID NO: 2226399 - RNA, 19 nt, Artificial Sequence
  Description of Artificial Sequence: Synthetic oligonucleotide
aacucggcgcggcggucca

SEQ ID NO: 2226400 - RNA, 19 nt, Artificial Sequence
  Description of Artificial Sequence: Synthetic oligonucleotide
cagcacugauucccaggcc

SEQ ID NO: 2226401 - RNA, 19 nt, Artificial Sequence
  Description of Artificial Sequence: Synthetic oligonucleotide
guacaaaguaggcuauuuu

SEQ ID NO: 2226402 - RNA, 19 nt, Artificial Sequence
  Description of Artificial Sequence: Synthetic oligonucleotide
cacgaucagggccaaaccu

SEQ ID NO: 2226403 - RNA, 19 nt, Artificial Sequence
  Description of Artificial Sequence: Synthetic oligonucleotide
ugguugcgcccuucagagc

SEQ ID NO: 2226404 - RNA, 19 nt, Artificial Sequence
  Description of Artificial Sequence: Synthetic oligonucleotide
ccaaaccuuagucuuccuc

SEQ ID NO: 2226405 - RNA, 19 nt, Artificial Sequence
  Description of Artificial Sequence: Synthetic oligonucleotide
cagaaucgcuugugcucgc

SEQ ID NO: 2226406 - RNA, 19 nt, Artificial Sequence
  Description of Artificial Sequence: Synthetic oligonucleotide
ucgcuugugcucgcgucca

SEQ ID NO: 2226407 - RNA, 19 nt, Artificial Sequence
  Description of Artificial Sequence: Synthetic oligonucleotide
gaggaggauucggccggcg

SEQ ID NO: 2226408 - RNA, 19 nt, Artificial Sequence
  Description of Artificial Sequence: Synthetic oligonucleotide
ggcaguuauagaaccuuuc

SEQ ID NO: 2226409 - RNA, 19 nt, Artificial Sequence
  Description of Artificial Sequence: Synthetic oligonucleotide
gcagcagugcuguuucuga

SEQ ID NO: 2226410 - RNA, 19 nt, Artificial Sequence
  Description of Artificial Sequence: Synthetic oligonucleotide
gaggauucggccggcgcga

SEQ ID NO: 2226411 - RNA, 19 nt, Artificial Sequence
  Description of Artificial Sequence: Synthetic oligonucleotide
gcguucaggagcugcacca

SEQ ID NO: 2226412 - RNA, 19 nt, Artificial Sequence
  Description of Artificial Sequence: Synthetic oligonucleotide
caguaauggaugggucaug

SEQ ID NO: 2226413 - RNA, 19 nt, Artificial Sequence
  Description of Artificial Sequence: Synthetic oligonucleotide
gcggauacacucacagacc

SEQ ID NO: 2226414 - RNA, 19 nt, Artificial Sequence
  Description of Artificial Sequence: Synthetic oligonucleotide
gcauuguacauggaggaua

SEQ ID NO: 2226415 - RNA, 19 nt, Artificial Sequence
  Description of Artificial Sequence: Synthetic oligonucleotide
gaaucgcuugugcucgcgu

SEQ ID NO: 2226416 - RNA, 19 nt, Artificial Sequence
  Description of Artificial Sequence: Synthetic oligonucleotide
uuccggcugagguccgccu

SEQ ID NO: 2226417 - RNA, 19 nt, Artificial Sequence
  Description of Artificial Sequence: Synthetic oligonucleotide
cugcgcguucaggagcugc

SEQ ID NO: 2226418 - RNA, 19 nt, Artificial Sequence
  Description of Artificial Sequence: Synthetic oligonucleotide
cagggccaaaccuuagucu

SEQ ID NO: 2226419 - RNA, 19 nt, Artificial Sequence
  Description of Artificial Sequence: Synthetic oligonucleotide
gcuuguuguaggcaguuau

SEQ ID NO: 2226420 - RNA, 19 nt, Artificial Sequence
  Description of Artificial Sequence: Synthetic oligonucleotide
ggaggauaaaugguucaaa

SEQ ID NO: 2226421 - RNA, 19 nt, Artificial Sequence
  Description of Artificial Sequence: Synthetic oligonucleotide
gaagagugcagcacugauu

SEQ ID NO: 2226422 - RNA, 19 nt, Artificial Sequence
  Description of Artificial Sequence: Synthetic oligonucleotide
gaacuuaagucuggccccu

SEQ ID NO: 2226423 - RNA, 19 nt, Artificial Sequence
  Description of Artificial Sequence: Synthetic oligonucleotide
augggacuucuaauccaug

SEQ ID NO: 2226424 - RNA, 19 nt, Artificial Sequence
  Description of Artificial Sequence: Synthetic oligonucleotide
agaacucuuccugcgcguu

SEQ ID NO: 2226425 - RNA, 19 nt, Artificial Sequence
  Description of Artificial Sequence: Synthetic oligonucleotide
gcucgcguccaggaggagg

SEQ ID NO: 2226426 - RNA, 19 nt, Artificial Sequence
  Description of Artificial Sequence: Synthetic oligonucleotide
aaugugugucggacacgau

SEQ ID NO: 2226427 - RNA, 19 nt, Artificial Sequence
  Description of Artificial Sequence: Synthetic oligonucleotide
gcuuaaugggacuucuaau

SEQ ID NO: 2226428 - RNA, 19 nt, Artificial Sequence
  Description of Artificial Sequence: Synthetic oligonucleotide
cuacuuugaaaagccauuu

SEQ ID NO: 2226429 - RNA, 19 nt, Artificial Sequence
  Description of Artificial Sequence: Synthetic oligonucleotide
auucggccggcgcgaggag

SEQ ID NO: 2226430 - RNA, 19 nt, Artificial Sequence
  Description of Artificial Sequence: Synthetic oligonucleotide
gcugagugcagggucugug

SEQ ID NO: 2226431 - RNA, 19 nt, Artificial Sequence
  Description of Artificial Sequence: Synthetic oligonucleotide
gcuugugcucgcguccagg

SEQ ID NO: 2226432 - RNA, 19 nt, Artificial Sequence
  Description of Artificial Sequence: Synthetic oligonucleotide
gagcuggaaauggcuuuuc

SEQ ID NO: 2226433 - RNA, 19 nt, Artificial Sequence
  Description of Artificial Sequence: Synthetic oligonucleotide
aggcaguuauagaaccuuu

SEQ ID NO: 2226434 - RNA, 19 nt, Artificial Sequence
  Description of Artificial Sequence: Synthetic oligonucleotide
gccuugcccaggcucugcg

SEQ ID NO: 2226435 - RNA, 19 nt, Artificial Sequence
  Description of Artificial Sequence: Synthetic oligonucleotide
ccagcgcccgaacucggcg

SEQ ID NO: 2226436 - RNA, 19 nt, Artificial Sequence
  Description of Artificial Sequence: Synthetic oligonucleotide
caucagcaccuuccagcuc

SEQ ID NO: 2226437 - RNA, 19 nt, Artificial Sequence
  Description of Artificial Sequence: Synthetic oligonucleotide
ugcgcccuucagagcugcc

SEQ ID NO: 2226438 - RNA, 19 nt, Artificial Sequence
  Description of Artificial Sequence: Synthetic oligonucleotide
guacuccggacagccagca

SEQ ID NO: 2226439 - RNA, 19 nt, Artificial Sequence
  Description of Artificial Sequence: Synthetic oligonucleotide
cagcagugcuguuucugaa

SEQ ID NO: 2226440 - RNA, 19 nt, Artificial Sequence
  Description of Artificial Sequence: Synthetic oligonucleotide
ggacagcauugcugguugc

SEQ ID NO: 2226441 - RNA, 19 nt, Artificial Sequence
  Description of Artificial Sequence: Synthetic oligonucleotide
gccagaguuccugaagcca

SEQ ID NO: 2226442 - RNA, 19 nt, Artificial Sequence
  Description of Artificial Sequence: Synthetic oligonucleotide
cacugauucccaggccauc

SEQ ID NO: 2226443 - RNA, 19 nt, Artificial Sequence
  Description of Artificial Sequence: Synthetic oligonucleotide
gccccugcagcgcggauac

SEQ ID NO: 2226444 - RNA, 19 nt, Artificial Sequence
  Description of Artificial Sequence: Synthetic oligonucleotide
gcguccugcagugucuggc

SEQ ID NO: 2226445 - RNA, 19 nt, Artificial Sequence
  Description of Artificial Sequence: Synthetic oligonucleotide
guugcgcccuucagagcug

SEQ ID NO: 2226446 - RNA, 19 nt, Artificial Sequence
  Description of Artificial Sequence: Synthetic oligonucleotide
gugcguccugcagugucug

SEQ ID NO: 2226447 - RNA, 19 nt, Artificial Sequence
  Description of Artificial Sequence: Synthetic oligonucleotide
ccaucacaucaucuuucac

SEQ ID NO: 2226448 - RNA, 19 nt, Artificial Sequence
  Description of Artificial Sequence: Synthetic oligonucleotide
gugcucgcguccaggagga

SEQ ID NO: 2226449 - RNA, 19 nt, Artificial Sequence
  Description of Artificial Sequence: Synthetic oligonucleotide
gcugccuuuccggcugagg

SEQ ID NO: 2226450 - RNA, 19 nt, Artificial Sequence
  Description of Artificial Sequence: Synthetic oligonucleotide
ggauucggccggcgcgagg

SEQ ID NO: 2226451 - RNA, 19 nt, Artificial Sequence
  Description of Artificial Sequence: Synthetic oligonucleotide
aggauucggccggcgcgag

SEQ ID NO: 2226452 - RNA, 19 nt, Artificial Sequence
  Description of Artificial Sequence: Synthetic oligonucleotide
gagguccgccuugcccagg

SEQ ID NO: 2226453 - RNA, 19 nt, Artificial Sequence
  Description of Artificial Sequence: Synthetic oligonucleotide
ggccgcugagugcaggguc

SEQ ID NO: 2226454 - RNA, 19 nt, Artificial Sequence
  Description of Artificial Sequence: Synthetic oligonucleotide
cucguccacgcugccuuuc

SEQ ID NO: 2226455 - RNA, 19 nt, Artificial Sequence
  Description of Artificial Sequence: Synthetic oligonucleotide
ccuugcccaggcucugcgc

SEQ ID NO: 2226456 - RNA, 19 nt, Artificial Sequence
  Description of Artificial Sequence: Synthetic oligonucleotide
ucgcuuccccacggugaug

SEQ ID NO: 2226457 - RNA, 19 nt, Artificial Sequence
  Description of Artificial Sequence: Synthetic oligonucleotide
gaguacaaaguaggcuauu

SEQ ID NO: 2226458 - RNA, 19 nt, Artificial Sequence
  Description of Artificial Sequence: Synthetic oligonucleotide
cgcguucaggagcugcacc

SEQ ID NO: 2226459 - RNA, 19 nt, Artificial Sequence
  Description of Artificial Sequence: Synthetic oligonucleotide
uccccacggugaugccaga

SEQ ID NO: 2226460 - RNA, 19 nt, Artificial Sequence
  Description of Artificial Sequence: Synthetic oligonucleotide
guuuucccugauggcuuaa

SEQ ID NO: 2226461 - RNA, 19 nt, Artificial Sequence
  Description of Artificial Sequence: Synthetic oligonucleotide
uccggacagccagcauggu

SEQ ID NO: 2226462 - RNA, 19 nt, Artificial Sequence
  Description of Artificial Sequence: Synthetic oligonucleotide
gggccaaaccuuagucuuc

SEQ ID NO: 2226463 - RNA, 19 nt, Artificial Sequence
  Description of Artificial Sequence: Synthetic oligonucleotide
cccgaacucggcgcggcgg

SEQ ID NO: 2226464 - RNA, 19 nt, Artificial Sequence
  Description of Artificial Sequence: Synthetic oligonucleotide
ccgucaccaucaguuuucc

SEQ ID NO: 2226465 - RNA, 19 nt, Artificial Sequence
  Description of Artificial Sequence: Synthetic oligonucleotide
acgcugccuuuccggcuga

SEQ ID NO: 2226466 - RNA, 19 nt, Artificial Sequence
  Description of Artificial Sequence: Synthetic oligonucleotide
ugcucgcguccaggaggag

SEQ ID NO: 2226467 - RNA, 19 nt, Artificial Sequence
  Description of Artificial Sequence: Synthetic oligonucleotide
gggucaugugcuuuuccuu

SEQ ID NO: 2226468 - RNA, 19 nt, Artificial Sequence
  Description of Artificial Sequence: Synthetic oligonucleotide
cucgcuuccccacggugau

SEQ ID NO: 2226469 - RNA, 19 nt, Artificial Sequence
  Description of Artificial Sequence: Synthetic oligonucleotide
cugcgccuuccagcgcccg

SEQ ID NO: 2226470 - RNA, 19 nt, Artificial Sequence
  Description of Artificial Sequence: Synthetic oligonucleotide
gcgcggauacacucacaga

SEQ ID NO: 2226471 - RNA, 19 nt, Artificial Sequence
  Description of Artificial Sequence: Synthetic oligonucleotide
cuccgucaccaucaguuuu

SEQ ID NO: 2226472 - RNA, 19 nt, Artificial Sequence
  Description of Artificial Sequence: Synthetic oligonucleotide
ccauugcuuguuguaggca

SEQ ID NO: 2226473 - RNA, 19 nt, Artificial Sequence
  Description of Artificial Sequence: Synthetic oligonucleotide
cagcgcggauacacucaca

SEQ ID NO: 2226474 - RNA, 19 nt, Artificial Sequence
  Description of Artificial Sequence: Synthetic oligonucleotide
gcccgaacucggcgcggcg

SEQ ID NO: 2226475 - RNA, 19 nt, Artificial Sequence
  Description of Artificial Sequence: Synthetic oligonucleotide
cucuuguaaagagcagcuu

SEQ ID NO: 2226476 - RNA, 19 nt, Artificial Sequence
  Description of Artificial Sequence: Synthetic oligonucleotide
cacagaccacaguacucuu

SEQ ID NO: 2226477 - RNA, 19 nt, Artificial Sequence
  Description of Artificial Sequence: Synthetic oligonucleotide
gcucugcgccuuccagcgc

SEQ ID NO: 2226478 - RNA, 19 nt, Artificial Sequence
  Description of Artificial Sequence: Synthetic oligonucleotide
ggcauuguacauggaggau

SEQ ID NO: 2226479 - RNA, 19 nt, Artificial Sequence
  Description of Artificial Sequence: Synthetic oligonucleotide
gucuggcauuguacaugga

SEQ ID NO: 2226480 - RNA, 19 nt, Artificial Sequence
  Description of Artificial Sequence: Synthetic oligonucleotide
gcgcccuucagagcugcca

SEQ ID NO: 2226481 - RNA, 19 nt, Artificial Sequence
  Description of Artificial Sequence: Synthetic oligonucleotide
gcgcguucaggagcugcac

SEQ ID NO: 2226482 - RNA, 19 nt, Artificial Sequence
  Description of Artificial Sequence: Synthetic oligonucleotide
ccacggugaugccagaguu

SEQ ID NO: 2226483 - RNA, 19 nt, Artificial Sequence
  Description of Artificial Sequence: Synthetic oligonucleotide
ccugcagcgcggauacacu

SEQ ID NO: 2226484 - RNA, 19 nt, Artificial Sequence
  Description of Artificial Sequence: Synthetic oligonucleotide
gccgcugagugcagggucu

SEQ ID NO: 2226485 - RNA, 19 nt, Artificial Sequence
  Description of Artificial Sequence: Synthetic oligonucleotide
cgcacggcguccucgucca

SEQ ID NO: 2226486 - RNA, 19 nt, Artificial Sequence
  Description of Artificial Sequence: Synthetic oligonucleotide
gccaaaccuuagucuuccu

SEQ ID NO: 2226487 - RNA, 19 nt, Artificial Sequence
  Description of Artificial Sequence: Synthetic oligonucleotide
gcgccuuccagcgcccgaa

SEQ ID NO: 2226488 - RNA, 19 nt, Artificial Sequence
  Description of Artificial Sequence: Synthetic oligonucleotide
ggccggcgcgaggagcgug

SEQ ID NO: 2226489 - RNA, 19 nt, Artificial Sequence
  Description of Artificial Sequence: Synthetic oligonucleotide
cgcuugugcucgcguccag

SEQ ID NO: 2226490 - RNA, 19 nt, Artificial Sequence
  Description of Artificial Sequence: Synthetic oligonucleotide
cauugcugguugcgcccuu

SEQ ID NO: 2226491 - RNA, 19 nt, Artificial Sequence
  Description of Artificial Sequence: Synthetic oligonucleotide
cgaggagcgugguggugaa

SEQ ID NO: 2226492 - RNA, 19 nt, Artificial Sequence
  Description of Artificial Sequence: Synthetic oligonucleotide
ccuccgucaccaucaguuu

SEQ ID NO: 2226493 - RNA, 19 nt, Artificial Sequence
  Description of Artificial Sequence: Synthetic oligonucleotide
ccgaacucggcgcggcggu

SEQ ID NO: 2226494 - RNA, 19 nt, Artificial Sequence
  Description of Artificial Sequence: Synthetic oligonucleotide
gcgcgaggagcgugguggu

SEQ ID NO: 2226495 - RNA, 19 nt, Artificial Sequence
  Description of Artificial Sequence: Synthetic oligonucleotide
gguccgccuugcccaggcu

SEQ ID NO: 2226496 - RNA, 19 nt, Artificial Sequence
  Description of Artificial Sequence: Synthetic oligonucleotide
ggacacgaucagggccaaa

SEQ ID NO: 2226497 - RNA, 19 nt, Artificial Sequence
  Description of Artificial Sequence: Synthetic oligonucleotide
ccugcgcguucaggagcug

SEQ ID NO: 2226498 - RNA, 19 nt, Artificial Sequence
  Description of Artificial Sequence: Synthetic oligonucleotide
cccgcacggcguccucguc

SEQ ID NO: 2226499 - RNA, 19 nt, Artificial Sequence
  Description of Artificial Sequence: Synthetic oligonucleotide
cgaacucggcgcggcgguc

SEQ ID NO: 2226500 - RNA, 19 nt, Artificial Sequence
  Description of Artificial Sequence: Synthetic oligonucleotide
cggcgcgaggagcguggug

SEQ ID NO: 2226501 - RNA, 19 nt, Artificial Sequence
  Description of Artificial Sequence: Synthetic oligonucleotide
ccucguccacgcugccuuu

SEQ ID NO: 2226502 - RNA, 19 nt, Artificial Sequence
  Description of Artificial Sequence: Synthetic oligonucleotide
ccggcgcgaggagcguggu

SEQ ID NO: 2226503 - RNA, 19 nt, Artificial Sequence
  Description of Artificial Sequence: Synthetic oligonucleotide
cggcguccucguccacgcu

SEQ ID NO: 2226504 - RNA, 19 nt, Artificial Sequence
  Description of Artificial Sequence: Synthetic oligonucleotide
cggccggcgcgaggagcgu

SEQ ID NO: 2226505 - RNA, 19 nt, Artificial Sequence
  Description of Artificial Sequence: Synthetic oligonucleotide
aauacuuuacuucaucucg

SEQ ID NO: 2226506 - RNA, 19 nt, Artificial Sequence
  Description of Artificial Sequence: Synthetic oligonucleotide
agaugaaauaaacauagcc

SEQ ID NO: 2226507 - RNA, 19 nt, Artificial Sequence
  Description of Artificial Sequence: Synthetic oligonucleotide
auucguuuccauuaaaccc

SEQ ID NO: 2226508 - RNA, 19 nt, Artificial Sequence
  Description of Artificial Sequence: Synthetic oligonucleotide
accaauagcaaauagaaug

SEQ ID NO: 2226509 - RNA, 19 nt, Artificial Sequence
  Description of Artificial Sequence: Synthetic oligonucleotide
aaacccaccacauauguag

SEQ ID NO: 2226510 - RNA, 19 nt, Artificial Sequence
  Description of Artificial Sequence: Synthetic oligonucleotide
uuauuuagcuaauagaaga

SEQ ID NO: 2226511 - RNA, 19 nt, Artificial Sequence
  Description of Artificial Sequence: Synthetic oligonucleotide
aauuacaccuauuccacuc

SEQ ID NO: 2226512 - RNA, 19 nt, Artificial Sequence
  Description of Artificial Sequence: Synthetic oligonucleotide
uuuagcuaauagaagaggc

SEQ ID NO: 2226513 - RNA, 19 nt, Artificial Sequence
  Description of Artificial Sequence: Synthetic oligonucleotide
auaaacauagccuuucaag

SEQ ID NO: 2226514 - RNA, 19 nt, Artificial Sequence
  Description of Artificial Sequence: Synthetic oligonucleotide
auagaagaggcucauacag

SEQ ID NO: 2226515 - RNA, 19 nt, Artificial Sequence
  Description of Artificial Sequence: Synthetic oligonucleotide
uaauagaagaggcucauac

SEQ ID NO: 2226516 - RNA, 19 nt, Artificial Sequence
  Description of Artificial Sequence: Synthetic oligonucleotide
aagaggcucauacagguag

SEQ ID NO: 2226517 - RNA, 19 nt, Artificial Sequence
  Description of Artificial Sequence: Synthetic oligonucleotide
aaugaugacaggcuuacau

SEQ ID NO: 2226518 - RNA, 19 nt, Artificial Sequence
  Description of Artificial Sequence: Synthetic oligonucleotide
ucgauuagcuccaucaaag

SEQ ID NO: 2226519 - RNA, 19 nt, Artificial Sequence
  Description of Artificial Sequence: Synthetic oligonucleotide
ugguaaagccauuaaagcc

SEQ ID NO: 2226520 - RNA, 19 nt, Artificial Sequence
  Description of Artificial Sequence: Synthetic oligonucleotide
agcaauuacaccuauucca

SEQ ID NO: 2226521 - RNA, 19 nt, Artificial Sequence
  Description of Artificial Sequence: Synthetic oligonucleotide
aguugucccgucuagcugc

SEQ ID NO: 2226522 - RNA, 19 nt, Artificial Sequence
  Description of Artificial Sequence: Synthetic oligonucleotide
uucguuuccauuaaaccca

SEQ ID NO: 2226523 - RNA, 19 nt, Artificial Sequence
  Description of Artificial Sequence: Synthetic oligonucleotide
aagcggaauacuuuacuuc

SEQ ID NO: 2226524 - RNA, 19 nt, Artificial Sequence
  Description of Artificial Sequence: Synthetic oligonucleotide
  modified_base (2)..(2): a, c, u, g, unknown or other
unacccaucugucugcccg

SEQ ID NO: 2226525 - RNA, 19 nt, Artificial Sequence
  Description of Artificial Sequence: Synthetic oligonucleotide
agcgucauaccacucaucg

SEQ ID NO: 2226526 - RNA, 19 nt, Artificial Sequence
  Description of Artificial Sequence: Synthetic oligonucleotide
uccucagucgauuagcucc

SEQ ID NO: 2226527 - RNA, 19 nt, Artificial Sequence
  Description of Artificial Sequence: Synthetic oligonucleotide
auaugcucaugucaugagc

SEQ ID NO: 2226528 - RNA, 19 nt, Artificial Sequence
  Description of Artificial Sequence: Synthetic oligonucleotide
auuacaccuauuccacucc

SEQ ID NO: 2226529 - RNA, 19 nt, Artificial Sequence
  Description of Artificial Sequence: Synthetic oligonucleotide
agagcacugcgguauaugc

SEQ ID NO: 2226530 - RNA, 19 nt, Artificial Sequence
  Description of Artificial Sequence: Synthetic oligonucleotide
aauagaagaggcucauaca

SEQ ID NO: 2226531 - RNA, 19 nt, Artificial Sequence
  Description of Artificial Sequence: Synthetic oligonucleotide
acaccuauuccacuccucc

SEQ ID NO: 2226532 - RNA, 19 nt, Artificial Sequence
  Description of Artificial Sequence: Synthetic oligonucleotide
uugaacauaguggggaugg

SEQ ID NO: 2226533 - RNA, 19 nt, Artificial Sequence
  Description of Artificial Sequence: Synthetic oligonucleotide
uaccaaaauugcuacgagg

SEQ ID NO: 2226534 - RNA, 19 nt, Artificial Sequence
  Description of Artificial Sequence: Synthetic oligonucleotide
auacauguuccccguaagc

SEQ ID NO: 2226535 - RNA, 19 nt, Artificial Sequence
  Description of Artificial Sequence: Synthetic oligonucleotide
ugcguauacauguuccccg

SEQ ID NO: 2226536 - RNA, 19 nt, Artificial Sequence
  Description of Artificial Sequence: Synthetic oligonucleotide
uaaagguggugguaaagcc

SEQ ID NO: 2226537 - RNA, 19 nt, Artificial Sequence
  Description of Artificial Sequence: Synthetic oligonucleotide
aauaaacauagccuuucaa

SEQ ID NO: 2226538 - RNA, 19 nt, Artificial Sequence
  Description of Artificial Sequence: Synthetic oligonucleotide
acgaggauugaacauagug

SEQ ID NO: 2226539 - RNA, 19 nt, Artificial Sequence
  Description of Artificial Sequence: Synthetic oligonucleotide
aaauaaacauagccuuuca

SEQ ID NO: 2226540 - RNA, 19 nt, Artificial Sequence
  Description of Artificial Sequence: Synthetic oligonucleotide
caugucaugagcgucauac

SEQ ID NO: 2226541 - RNA, 19 nt, Artificial Sequence
  Description of Artificial Sequence: Synthetic oligonucleotide
auuuagcuaauagaagagg

SEQ ID NO: 2226542 - RNA, 19 nt, Artificial Sequence
  Description of Artificial Sequence: Synthetic oligonucleotide
agcacugcgguauaugcuc

SEQ ID NO: 2226543 - RNA, 19 nt, Artificial Sequence
  Description of Artificial Sequence: Synthetic oligonucleotide
  modified_base (6)..(6): a, c, u, g, unknown or other
acauunacccaucugucug

SEQ ID NO: 2226544 - RNA, 19 nt, Artificial Sequence
  Description of Artificial Sequence: Synthetic oligonucleotide
acugcguauacauguuccc

SEQ ID NO: 2226545 - RNA, 19 nt, Artificial Sequence
  Description of Artificial Sequence: Synthetic oligonucleotide
aaguguuagccacuggacu

SEQ ID NO: 2226546 - RNA, 19 nt, Artificial Sequence
  Description of Artificial Sequence: Synthetic oligonucleotide
gaugaaauaaacauagccu

SEQ ID NO: 2226547 - RNA, 19 nt, Artificial Sequence
  Description of Artificial Sequence: Synthetic oligonucleotide
ucguccacuaccucgauac

SEQ ID NO: 2226548 - RNA, 19 nt, Artificial Sequence
  Description of Artificial Sequence: Synthetic oligonucleotide
uacugcguauacauguucc

SEQ ID NO: 2226549 - RNA, 19 nt, Artificial Sequence
  Description of Artificial Sequence: Synthetic oligonucleotide
  modified_base (10)..(10): a, c, u, g, unknown or other
agugacauunacccaucug

SEQ ID NO: 2226550 - RNA, 19 nt, Artificial Sequence
  Description of Artificial Sequence: Synthetic oligonucleotide
agcaaauagaauggcauag

SEQ ID NO: 2226551 - RNA, 19 nt, Artificial Sequence
  Description of Artificial Sequence: Synthetic oligonucleotide
auuggcuagcccugguacc

SEQ ID NO: 2226552 - RNA, 19 nt, Artificial Sequence
  Description of Artificial Sequence: Synthetic oligonucleotide
uaggguacuugucgaagcg

SEQ ID NO: 2226553 - RNA, 19 nt, Artificial Sequence
  Description of Artificial Sequence: Synthetic oligonucleotide
aguguuguauacuucugcu

SEQ ID NO: 2226554 - RNA, 19 nt, Artificial Sequence
  Description of Artificial Sequence: Synthetic oligonucleotide
uucccauagaguguugugg

SEQ ID NO: 2226555 - RNA, 19 nt, Artificial Sequence
  Description of Artificial Sequence: Synthetic oligonucleotide
auacauggccuuuagggca

SEQ ID NO: 2226556 - RNA, 19 nt, Artificial Sequence
  Description of Artificial Sequence: Synthetic oligonucleotide
aucacuccgcugcucaugc

SEQ ID NO: 2226557 - RNA, 19 nt, Artificial Sequence
  Description of Artificial Sequence: Synthetic oligonucleotide
acauauguagaccuuccca

SEQ ID NO: 2226558 - RNA, 19 nt, Artificial Sequence
  Description of Artificial Sequence: Synthetic oligonucleotide
ucgauaccaaaauugcuac

SEQ ID NO: 2226559 - RNA, 19 nt, Artificial Sequence
  Description of Artificial Sequence: Synthetic oligonucleotide
agcggaauacuuuacuuca

SEQ ID NO: 2226560 - RNA, 19 nt, Artificial Sequence
  Description of Artificial Sequence: Synthetic oligonucleotide
uguuguggcgcuugcauca

SEQ ID NO: 2226561 - RNA, 19 nt, Artificial Sequence
  Description of Artificial Sequence: Synthetic oligonucleotide
auacuuuacuucaucucgc

SEQ ID NO: 2226562 - RNA, 19 nt, Artificial Sequence
  Description of Artificial Sequence: Synthetic oligonucleotide
accucgauaccaaaauugc

SEQ ID NO: 2226563 - RNA, 19 nt, Artificial Sequence
  Description of Artificial Sequence: Synthetic oligonucleotide
accuacugcguauacaugu

SEQ ID NO: 2226564 - RNA, 19 nt, Artificial Sequence
  Description of Artificial Sequence: Synthetic oligonucleotide
agugcuaauccugugaagu

SEQ ID NO: 2226565 - RNA, 19 nt, Artificial Sequence
  Description of Artificial Sequence: Synthetic oligonucleotide
uucugcaguguugagacgc

SEQ ID NO: 2226566 - RNA, 19 nt, Artificial Sequence
  Description of Artificial Sequence: Synthetic oligonucleotide
uuccccguaagcaauuaca

SEQ ID NO: 2226567 - RNA, 19 nt, Artificial Sequence
  Description of Artificial Sequence: Synthetic oligonucleotide
accaaaauugcuacgagga

SEQ ID NO: 2226568 - RNA, 19 nt, Artificial Sequence
  Description of Artificial Sequence: Synthetic oligonucleotide
uccguucauguucagguca

SEQ ID NO: 2226569 - RNA, 19 nt, Artificial Sequence
  Description of Artificial Sequence: Synthetic oligonucleotide
uagaugaaauaaacauagc

SEQ ID NO: 2226570 - RNA, 19 nt, Artificial Sequence
  Description of Artificial Sequence: Synthetic oligonucleotide
  modified_base (4)..(4): a, c, u, g, unknown or other
auunacccaucugucugcc

SEQ ID NO: 2226571 - RNA, 19 nt, Artificial Sequence
  Description of Artificial Sequence: Synthetic oligonucleotide
agaauuggaggguccguuc

SEQ ID NO: 2226572 - RNA, 19 nt, Artificial Sequence
  Description of Artificial Sequence: Synthetic oligonucleotide
  modified_base (8)..(8): a, c, u, g, unknown or other
ugacauunacccaucuguc

SEQ ID NO: 2226573 - RNA, 19 nt, Artificial Sequence
  Description of Artificial Sequence: Synthetic oligonucleotide
acuaccucgauaccaaaau

SEQ ID NO: 2226574 - RNA, 19 nt, Artificial Sequence
  Description of Artificial Sequence: Synthetic oligonucleotide
auaguggggauggugcgcc

SEQ ID NO: 2226575 - RNA, 19 nt, Artificial Sequence
  Description of Artificial Sequence: Synthetic oligonucleotide
  modified_base (5)..(5): a, c, u, g, unknown or other
cauunacccaucugucugc

SEQ ID NO: 2226576 - RNA, 19 nt, Artificial Sequence
  Description of Artificial Sequence: Synthetic oligonucleotide
aaguugucccgucuagcug

SEQ ID NO: 2226577 - RNA, 19 nt, Artificial Sequence
  Description of Artificial Sequence: Synthetic oligonucleotide
uguaaacaggcauucguuu

SEQ ID NO: 2226578 - RNA, 19 nt, Artificial Sequence
  Description of Artificial Sequence: Synthetic oligonucleotide
cuacgaggauugaacauag

SEQ ID NO: 2226579 - RNA, 19 nt, Artificial Sequence
  Description of Artificial Sequence: Synthetic oligonucleotide
  modified_base (9)..(9): a, c, u, g, unknown or other
gugacauunacccaucugu

SEQ ID NO: 2226580 - RNA, 19 nt, Artificial Sequence
  Description of Artificial Sequence: Synthetic oligonucleotide
ucucgcagugcuaauccug

SEQ ID NO: 2226581 - RNA, 19 nt, Artificial Sequence
  Description of Artificial Sequence: Synthetic oligonucleotide
uagcuaauagaagaggcuc

SEQ ID NO: 2226582 - RNA, 19 nt, Artificial Sequence
  Description of Artificial Sequence: Synthetic oligonucleotide
uccccguaagcaauuacac

SEQ ID NO: 2226583 - RNA, 19 nt, Artificial Sequence
  Description of Artificial Sequence: Synthetic oligonucleotide
uggcauagggcagacgggg

SEQ ID NO: 2226584 - RNA, 19 nt, Artificial Sequence
  Description of Artificial Sequence: Synthetic oligonucleotide
caucucgcagugcuaaucc

SEQ ID NO: 2226585 - RNA, 19 nt, Artificial Sequence
  Description of Artificial Sequence: Synthetic oligonucleotide
caaguguuagccacuggac

SEQ ID NO: 2226586 - RNA, 19 nt, Artificial Sequence
  Description of Artificial Sequence: Synthetic oligonucleotide
gguaaagccauuaaagcca

SEQ ID NO: 2226587 - RNA, 19 nt, Artificial Sequence
  Description of Artificial Sequence: Synthetic oligonucleotide
uaauccugugaaguugucc

SEQ ID NO: 2226588 - RNA, 19 nt, Artificial Sequence
  Description of Artificial Sequence: Synthetic oligonucleotide
aguguuagccacuggacua

SEQ ID NO: 2226589 - RNA, 19 nt, Artificial Sequence
  Description of Artificial Sequence: Synthetic oligonucleotide
uggugguaaagccauuaaa

SEQ ID NO: 2226590 - RNA, 19 nt, Artificial Sequence
  Description of Artificial Sequence: Synthetic oligonucleotide
cgaggauugaacauagugg

SEQ ID NO: 2226591 - RNA, 19 nt, Artificial Sequence
  Description of Artificial Sequence: Synthetic oligonucleotide
uacuuuacuucaucucgca

SEQ ID NO: 2226592 - RNA, 19 nt, Artificial Sequence
  Description of Artificial Sequence: Synthetic oligonucleotide
uugagacgcacauagccau

SEQ ID NO: 2226593 - RNA, 19 nt, Artificial Sequence
  Description of Artificial Sequence: Synthetic oligonucleotide
cauacuccccaacauuggc

SEQ ID NO: 2226594 - RNA, 19 nt, Artificial Sequence
  Description of Artificial Sequence: Synthetic oligonucleotide
uugcuacgaggauugaaca

SEQ ID NO: 2226595 - RNA, 19 nt, Artificial Sequence
  Description of Artificial Sequence: Synthetic oligonucleotide
cauggcauagaugaaauaa

SEQ ID NO: 2226596 - RNA, 19 nt, Artificial Sequence
  Description of Artificial Sequence: Synthetic oligonucleotide
ucguaugccucaauggcau

SEQ ID NO: 2226597 - RNA, 19 nt, Artificial Sequence
  Description of Artificial Sequence: Synthetic oligonucleotide
accacauauguagaccuuc

SEQ ID NO: 2226598 - RNA, 19 nt, Artificial Sequence
  Description of Artificial Sequence: Synthetic oligonucleotide
guaggguacuugucgaagc

SEQ ID NO: 2226599 - RNA, 19 nt, Artificial Sequence
  Description of Artificial Sequence: Synthetic oligonucleotide
aaacaagaggucguccacu

SEQ ID NO: 2226600 - RNA, 19 nt, Artificial Sequence
  Description of Artificial Sequence: Synthetic oligonucleotide
cucgauaccaaaauugcua

SEQ ID NO: 2226601 - RNA, 19 nt, Artificial Sequence
  Description of Artificial Sequence: Synthetic oligonucleotide
  modified_base (7)..(7): a, c, u, g, unknown or other
gacauunacccaucugucu

SEQ ID NO: 2226602 - RNA, 19 nt, Artificial Sequence
  Description of Artificial Sequence: Synthetic oligonucleotide
cacgcagcagcucagagca

SEQ ID NO: 2226603 - RNA, 19 nt, Artificial Sequence
  Description of Artificial Sequence: Synthetic oligonucleotide
cagucgauuagcuccauca

SEQ ID NO: 2226604 - RNA, 19 nt, Artificial Sequence
  Description of Artificial Sequence: Synthetic oligonucleotide
cauuggcuagcccugguac

SEQ ID NO: 2226605 - RNA, 19 nt, Artificial Sequence
  Description of Artificial Sequence: Synthetic oligonucleotide
gcaucguaugccucaaugg

SEQ ID NO: 2226606 - RNA, 19 nt, Artificial Sequence
  Description of Artificial Sequence: Synthetic oligonucleotide
aguguuguggcgcuugcau

SEQ ID NO: 2226607 - RNA, 19 nt, Artificial Sequence
  Description of Artificial Sequence: Synthetic oligonucleotide
ugcaguguugagacgcaca

SEQ ID NO: 2226608 - RNA, 19 nt, Artificial Sequence
  Description of Artificial Sequence: Synthetic oligonucleotide
uacuugucgaagcggaaua

SEQ ID NO: 2226609 - RNA, 19 nt, Artificial Sequence
  Description of Artificial Sequence: Synthetic oligonucleotide
uuacaccuauuccacuccu

SEQ ID NO: 2226610 - RNA, 19 nt, Artificial Sequence
  Description of Artificial Sequence: Synthetic oligonucleotide
augagcgucauaccacuca

SEQ ID NO: 2226611 - RNA, 19 nt, Artificial Sequence
  Description of Artificial Sequence: Synthetic oligonucleotide
acauuaaagguggugguaa

SEQ ID NO: 2226612 - RNA, 19 nt, Artificial Sequence
  Description of Artificial Sequence: Synthetic oligonucleotide
  modified_base (11)..(11): a, c, u, g, unknown or other
aagugacauunacccaucu

SEQ ID NO: 2226613 - RNA, 19 nt, Artificial Sequence
  Description of Artificial Sequence: Synthetic oligonucleotide
augguaggcucguggacuc

SEQ ID NO: 2226614 - RNA, 19 nt, Artificial Sequence
  Description of Artificial Sequence: Synthetic oligonucleotide
gaauuggaggguccguuca

SEQ ID NO: 2226615 - RNA, 19 nt, Artificial Sequence
  Description of Artificial Sequence: Synthetic oligonucleotide
gaacauaguggggauggug

SEQ ID NO: 2226616 - RNA, 19 nt, Artificial Sequence
  Description of Artificial Sequence: Synthetic oligonucleotide
uugucgaagcggaauacuu

SEQ ID NO: 2226617 - RNA, 19 nt, Artificial Sequence
  Description of Artificial Sequence: Synthetic oligonucleotide
acuugucgaagcggaauac

SEQ ID NO: 2226618 - RNA, 19 nt, Artificial Sequence
  Description of Artificial Sequence: Synthetic oligonucleotide
cauagccuuucaaguaggc

SEQ ID NO: 2226619 - RNA, 19 nt, Artificial Sequence
  Description of Artificial Sequence: Synthetic oligonucleotide
cuggacuauaggcuucugc

SEQ ID NO: 2226620 - RNA, 19 nt, Artificial Sequence
  Description of Artificial Sequence: Synthetic oligonucleotide
aacauuaaaggugguggua

SEQ ID NO: 2226621 - RNA, 19 nt, Artificial Sequence
  Description of Artificial Sequence: Synthetic oligonucleotide
cacauauguagaccuuccc

SEQ ID NO: 2226622 - RNA, 19 nt, Artificial Sequence
  Description of Artificial Sequence: Synthetic oligonucleotide
uguccauugauuggucucu

SEQ ID NO: 2226623 - RNA, 19 nt, Artificial Sequence
  Description of Artificial Sequence: Synthetic oligonucleotide
guauaugcucaugucauga

SEQ ID NO: 2226624 - RNA, 19 nt, Artificial Sequence
  Description of Artificial Sequence: Synthetic oligonucleotide
ugagcgucauaccacucau

SEQ ID NO: 2226625 - RNA, 19 nt, Artificial Sequence
  Description of Artificial Sequence: Synthetic oligonucleotide
acaagaggucguccacuac

SEQ ID NO: 2226626 - RNA, 19 nt, Artificial Sequence
  Description of Artificial Sequence: Synthetic oligonucleotide
aguguccauugauuggucu

SEQ ID NO: 2226627 - RNA, 19 nt, Artificial Sequence
  Description of Artificial Sequence: Synthetic oligonucleotide
ucaaguaggcugccccaug

SEQ ID NO: 2226628 - RNA, 19 nt, Artificial Sequence
  Description of Artificial Sequence: Synthetic oligonucleotide
uccucaugggugcaaugac

SEQ ID NO: 2226629 - RNA, 19 nt, Artificial Sequence
  Description of Artificial Sequence: Synthetic oligonucleotide
ugucgaagcggaauacuuu

SEQ ID NO: 2226630 - RNA, 19 nt, Artificial Sequence
  Description of Artificial Sequence: Synthetic oligonucleotide
uguggcgcuugcaucacuc

SEQ ID NO: 2226631 - RNA, 19 nt, Artificial Sequence
  Description of Artificial Sequence: Synthetic oligonucleotide
gaaguugucccgucuagcu

SEQ ID NO: 2226632 - RNA, 19 nt, Artificial Sequence
  Description of Artificial Sequence: Synthetic oligonucleotide
uacuccccaacauuggcua

SEQ ID NO: 2226633 - RNA, 19 nt, Artificial Sequence
  Description of Artificial Sequence: Synthetic oligonucleotide
aaaacccucccauggcaua

SEQ ID NO: 2226634 - RNA, 19 nt, Artificial Sequence
  Description of Artificial Sequence: Synthetic oligonucleotide
agccaccaauagcaaauag

SEQ ID NO: 2226635 - RNA, 19 nt, Artificial Sequence
  Description of Artificial Sequence: Synthetic oligonucleotide
ugcgguauaugcucauguc

SEQ ID NO: 2226636 - RNA, 19 nt, Artificial Sequence
  Description of Artificial Sequence: Synthetic oligonucleotide
cacuccagccaccaauagc

SEQ ID NO: 2226637 - RNA, 19 nt, Artificial Sequence
  Description of Artificial Sequence: Synthetic oligonucleotide
ucguggacucucuuccuca

SEQ ID NO: 2226638 - RNA, 19 nt, Artificial Sequence
  Description of Artificial Sequence: Synthetic oligonucleotide
ucgaagcggaauacuuuac

SEQ ID NO: 2226639 - RNA, 19 nt, Artificial Sequence
  Description of Artificial Sequence: Synthetic oligonucleotide
ucguuuccauuaaacccac

SEQ ID NO: 2226640 - RNA, 19 nt, Artificial Sequence
  Description of Artificial Sequence: Synthetic oligonucleotide
acauagccuuucaaguagg

SEQ ID NO: 2226641 - RNA, 19 nt, Artificial Sequence
  Description of Artificial Sequence: Synthetic oligonucleotide
cuucccauagaguguugug

SEQ ID NO: 2226642 - RNA, 19 nt, Artificial Sequence
  Description of Artificial Sequence: Synthetic oligonucleotide
ugcuacgaggauugaacau

SEQ ID NO: 2226643 - RNA, 19 nt, Artificial Sequence
  Description of Artificial Sequence: Synthetic oligonucleotide
ggauugaacauagugggga

SEQ ID NO: 2226644 - RNA, 19 nt, Artificial Sequence
  Description of Artificial Sequence: Synthetic oligonucleotide
ucggucuuuucaucauagc

SEQ ID NO: 2226645 - RNA, 19 nt, Artificial Sequence
  Description of Artificial Sequence: Synthetic oligonucleotide
auugaacauaguggggaug

SEQ ID NO: 2226646 - RNA, 19 nt, Artificial Sequence
  Description of Artificial Sequence: Synthetic oligonucleotide
agaauggcauagggcagac

SEQ ID NO: 2226647 - RNA, 19 nt, Artificial Sequence
  Description of Artificial Sequence: Synthetic oligonucleotide
ucguucugcaguguugaga

SEQ ID NO: 2226648 - RNA, 19 nt, Artificial Sequence
  Description of Artificial Sequence: Synthetic oligonucleotide
aaacaggcauucguuucca

SEQ ID NO: 2226649 - RNA, 19 nt, Artificial Sequence
  Description of Artificial Sequence: Synthetic oligonucleotide
  modified_base (12)..(12): a, c, u, g, unknown or other
caagugacauunacccauc

SEQ ID NO: 2226650 - RNA, 19 nt, Artificial Sequence
  Description of Artificial Sequence: Synthetic oligonucleotide
guugagacgcacauagcca

SEQ ID NO: 2226651 - RNA, 19 nt, Artificial Sequence
  Description of Artificial Sequence: Synthetic oligonucleotide
cugcguauacauguucccc

SEQ ID NO: 2226652 - RNA, 19 nt, Artificial Sequence
  Description of Artificial Sequence: Synthetic oligonucleotide
uuggcuagcccugguacca

SEQ ID NO: 2226653 - RNA, 19 nt, Artificial Sequence
  Description of Artificial Sequence: Synthetic oligonucleotide
cauauguagaccuucccau

SEQ ID NO: 2226654 - RNA, 19 nt, Artificial Sequence
  Description of Artificial Sequence: Synthetic oligonucleotide
aggguacuugucgaagcgg

SEQ ID NO: 2226655 - RNA, 19 nt, Artificial Sequence
  Description of Artificial Sequence: Synthetic oligonucleotide
auagccuuucaaguaggcu

SEQ ID NO: 2226656 - RNA, 19 nt, Artificial Sequence
  Description of Artificial Sequence: Synthetic oligonucleotide
uagaguguuguggcgcuug

SEQ ID NO: 2226657 - RNA, 19 nt, Artificial Sequence
  Description of Artificial Sequence: Synthetic oligonucleotide
gcaauuacaccuauuccac

SEQ ID NO: 2226658 - RNA, 19 nt, Artificial Sequence
  Description of Artificial Sequence: Synthetic oligonucleotide
agcuaauagaagaggcuca

SEQ ID NO: 2226659 - RNA, 19 nt, Artificial Sequence
  Description of Artificial Sequence: Synthetic oligonucleotide
guguccauugauuggucuc

SEQ ID NO: 2226660 - RNA, 19 nt, Artificial Sequence
  Description of Artificial Sequence: Synthetic oligonucleotide
ugcccgagcaucguaugcc

SEQ ID NO: 2226661 - RNA, 19 nt, Artificial Sequence
  Description of Artificial Sequence: Synthetic oligonucleotide
ucaucggucuuuucaucau

SEQ ID NO: 2226662 - RNA, 19 nt, Artificial Sequence
  Description of Artificial Sequence: Synthetic oligonucleotide
cacuccucagucgauuagc

SEQ ID NO: 2226663 - RNA, 19 nt, Artificial Sequence
  Description of Artificial Sequence: Synthetic oligonucleotide
ccacugauugcucucagug

SEQ ID NO: 2226664 - RNA, 19 nt, Artificial Sequence
  Description of Artificial Sequence: Synthetic oligonucleotide
gucgaagcggaauacuuua

SEQ ID NO: 2226665 - RNA, 19 nt, Artificial Sequence
  Description of Artificial Sequence: Synthetic oligonucleotide
agcccugguaccacgcagc

SEQ ID NO: 2226666 - RNA, 19 nt, Artificial Sequence
  Description of Artificial Sequence: Synthetic oligonucleotide
gucgauuagcuccaucaaa

SEQ ID NO: 2226667 - RNA, 19 nt, Artificial Sequence
  Description of Artificial Sequence: Synthetic oligonucleotide
acaggcauucguuuccauu

SEQ ID NO: 2226668 - RNA, 19 nt, Artificial Sequence
  Description of Artificial Sequence: Synthetic oligonucleotide
ucugcccgagcaucguaug

SEQ ID NO: 2226669 - RNA, 19 nt, Artificial Sequence
  Description of Artificial Sequence: Synthetic oligonucleotide
gguauaugcucaugucaug

SEQ ID NO: 2226670 - RNA, 19 nt, Artificial Sequence
  Description of Artificial Sequence: Synthetic oligonucleotide
ucaucucgcagugcuaauc

SEQ ID NO: 2226671 - RNA, 19 nt, Artificial Sequence
  Description of Artificial Sequence: Synthetic oligonucleotide
uacaccuauuccacuccuc

SEQ ID NO: 2226672 - RNA, 19 nt, Artificial Sequence
  Description of Artificial Sequence: Synthetic oligonucleotide
cuacugcguauacauguuc

SEQ ID NO: 2226673 - RNA, 19 nt, Artificial Sequence
  Description of Artificial Sequence: Synthetic oligonucleotide
ucauagcacucaacauuaa

SEQ ID NO: 2226674 - RNA, 19 nt, Artificial Sequence
  Description of Artificial Sequence: Synthetic oligonucleotide
cauaguggggauggugcgc

SEQ ID NO: 2226675 - RNA, 19 nt, Artificial Sequence
  Description of Artificial Sequence: Synthetic oligonucleotide
uggguuggugaagucagaa

SEQ ID NO: 2226676 - RNA, 19 nt, Artificial Sequence
  Description of Artificial Sequence: Synthetic oligonucleotide
gucccgucuagcugcauac

SEQ ID NO: 2226677 - RNA, 19 nt, Artificial Sequence
  Description of Artificial Sequence: Synthetic oligonucleotide
agaggucguccacuaccuc

SEQ ID NO: 2226678 - RNA, 19 nt, Artificial Sequence
  Description of Artificial Sequence: Synthetic oligonucleotide
aguaggcugccccauggua

SEQ ID NO: 2226679 - RNA, 19 nt, Artificial Sequence
  Description of Artificial Sequence: Synthetic oligonucleotide
cagugcuaauccugugaag

SEQ ID NO: 2226680 - RNA, 19 nt, Artificial Sequence
  Description of Artificial Sequence: Synthetic oligonucleotide
cauugauuggucucuggcu

SEQ ID NO: 2226681 - RNA, 19 nt, Artificial Sequence
  Description of Artificial Sequence: Synthetic oligonucleotide
ucagucgauuagcuccauc

SEQ ID NO: 2226682 - RNA, 19 nt, Artificial Sequence
  Description of Artificial Sequence: Synthetic oligonucleotide
gauugaacauaguggggau

SEQ ID NO: 2226683 - RNA, 19 nt, Artificial Sequence
  Description of Artificial Sequence: Synthetic oligonucleotide
gcucauaucguucugcagu

SEQ ID NO: 2226684 - RNA, 19 nt, Artificial Sequence
  Description of Artificial Sequence: Synthetic oligonucleotide
cauagccaucaaaacccuc

SEQ ID NO: 2226685 - RNA, 19 nt, Artificial Sequence
  Description of Artificial Sequence: Synthetic oligonucleotide
gagacgcacauagccauca

SEQ ID NO: 2226686 - RNA, 19 nt, Artificial Sequence
  Description of Artificial Sequence: Synthetic oligonucleotide
ucagaauuggaggguccgu

SEQ ID NO: 2226687 - RNA, 19 nt, Artificial Sequence
  Description of Artificial Sequence: Synthetic oligonucleotide
auacuccccaacauuggcu

SEQ ID NO: 2226688 - RNA, 19 nt, Artificial Sequence
  Description of Artificial Sequence: Synthetic oligonucleotide
ugcucaugucaugagcguc

SEQ ID NO: 2226689 - RNA, 19 nt, Artificial Sequence
  Description of Artificial Sequence: Synthetic oligonucleotide
aucucgcagugcuaauccu

SEQ ID NO: 2226690 - RNA, 19 nt, Artificial Sequence
  Description of Artificial Sequence: Synthetic oligonucleotide
uacgaggauugaacauagu

SEQ ID NO: 2226691 - RNA, 19 nt, Artificial Sequence
  Description of Artificial Sequence: Synthetic oligonucleotide
aacaggcauucguuuccau

SEQ ID NO: 2226692 - RNA, 19 nt, Artificial Sequence
  Description of Artificial Sequence: Synthetic oligonucleotide
caacauuggcuagcccugg

SEQ ID NO: 2226693 - RNA, 19 nt, Artificial Sequence
  Description of Artificial Sequence: Synthetic oligonucleotide
ggugcaaugacuguccacu

SEQ ID NO: 2226694 - RNA, 19 nt, Artificial Sequence
  Description of Artificial Sequence: Synthetic oligonucleotide
cuaauccugugaaguuguc

SEQ ID NO: 2226695 - RNA, 19 nt, Artificial Sequence
  Description of Artificial Sequence: Synthetic oligonucleotide
guuguauacuucugcugua

SEQ ID NO: 2226696 - RNA, 19 nt, Artificial Sequence
  Description of Artificial Sequence: Synthetic oligonucleotide
ccgucuagcugcauacucc

SEQ ID NO: 2226697 - RNA, 19 nt, Artificial Sequence
  Description of Artificial Sequence: Synthetic oligonucleotide
aaauugcuacgaggauuga

SEQ ID NO: 2226698 - RNA, 19 nt, Artificial Sequence
  Description of Artificial Sequence: Synthetic oligonucleotide
cccguaagcaauuacaccu

SEQ ID NO: 2226699 - RNA, 19 nt, Artificial Sequence
  Description of Artificial Sequence: Synthetic oligonucleotide
guuccccguaagcaauuac

SEQ ID NO: 2226700 - RNA, 19 nt, Artificial Sequence
  Description of Artificial Sequence: Synthetic oligonucleotide
ccauagaguguuguggcgc

SEQ ID NO: 2226701 - RNA, 19 nt, Artificial Sequence
  Description of Artificial Sequence: Synthetic oligonucleotide
cugcccgagcaucguaugc

SEQ ID NO: 2226702 - RNA, 19 nt, Artificial Sequence
  Description of Artificial Sequence: Synthetic oligonucleotide
caacauuaaaggugguggu

SEQ ID NO: 2226703 - RNA, 19 nt, Artificial Sequence
  Description of Artificial Sequence: Synthetic oligonucleotide
acauuggcuagcccuggua

SEQ ID NO: 2226704 - RNA, 19 nt, Artificial Sequence
  Description of Artificial Sequence: Synthetic oligonucleotide
cucguggacucucuuccuc

SEQ ID NO: 2226705 - RNA, 19 nt, Artificial Sequence
  Description of Artificial Sequence: Synthetic oligonucleotide
ugaacauaguggggauggu

SEQ ID NO: 2226706 - RNA, 19 nt, Artificial Sequence
  Description of Artificial Sequence: Synthetic oligonucleotide
cuuccgccacuccagccac

SEQ ID NO: 2226707 - RNA, 19 nt, Artificial Sequence
  Description of Artificial Sequence: Synthetic oligonucleotide
ccuauuccacuccuccugc

SEQ ID NO: 2226708 - RNA, 19 nt, Artificial Sequence
  Description of Artificial Sequence: Synthetic oligonucleotide
caugagcgucauaccacuc

SEQ ID NO: 2226709 - RNA, 19 nt, Artificial Sequence
  Description of Artificial Sequence: Synthetic oligonucleotide
cuccucagucgauuagcuc

SEQ ID NO: 2226710 - RNA, 19 nt, Artificial Sequence
  Description of Artificial Sequence: Synthetic oligonucleotide
ucgcagugcuaauccugug

SEQ ID NO: 2226711 - RNA, 19 nt, Artificial Sequence
  Description of Artificial Sequence: Synthetic oligonucleotide
uuagggcauuaaugaugac

SEQ ID NO: 2226712 - RNA, 19 nt, Artificial Sequence
  Description of Artificial Sequence: Synthetic oligonucleotide
gcgucauaccacucaucgg

SEQ ID NO: 2226713 - RNA, 19 nt, Artificial Sequence
  Description of Artificial Sequence: Synthetic oligonucleotide
cacuaccucgauaccaaaa

SEQ ID NO: 2226714 - RNA, 19 nt, Artificial Sequence
  Description of Artificial Sequence: Synthetic oligonucleotide
guggcgcuugcaucacucc

SEQ ID NO: 2226715 - RNA, 19 nt, Artificial Sequence
  Description of Artificial Sequence: Synthetic oligonucleotide
ccccguaagcaauuacacc

SEQ ID NO: 2226716 - RNA, 19 nt, Artificial Sequence
  Description of Artificial Sequence: Synthetic oligonucleotide
cagagcacugcgguauaug

SEQ ID NO: 2226717 - RNA, 19 nt, Artificial Sequence
  Description of Artificial Sequence: Synthetic oligonucleotide
caucacuccgcugcucaug

SEQ ID NO: 2226718 - RNA, 19 nt, Artificial Sequence
  Description of Artificial Sequence: Synthetic oligonucleotide
guccguucauguucagguc

SEQ ID NO: 2226719 - RNA, 19 nt, Artificial Sequence
  Description of Artificial Sequence: Synthetic oligonucleotide
guggugguaaagccauuaa

SEQ ID NO: 2226720 - RNA, 19 nt, Artificial Sequence
  Description of Artificial Sequence: Synthetic oligonucleotide
cgauuagcuccaucaaagc

SEQ ID NO: 2226721 - RNA, 19 nt, Artificial Sequence
  Description of Artificial Sequence: Synthetic oligonucleotide
ugucugcccgagcaucgua

SEQ ID NO: 2226722 - RNA, 19 nt, Artificial Sequence
  Description of Artificial Sequence: Synthetic oligonucleotide
cgucuagcugcauacuccc

SEQ ID NO: 2226723 - RNA, 19 nt, Artificial Sequence
  Description of Artificial Sequence: Synthetic oligonucleotide
ucauacagguaggguacuu

SEQ ID NO: 2226724 - RNA, 19 nt, Artificial Sequence
  Description of Artificial Sequence: Synthetic oligonucleotide
gcagacggggccuggugag

SEQ ID NO: 2226725 - RNA, 19 nt, Artificial Sequence
  Description of Artificial Sequence: Synthetic oligonucleotide
uuguggcgcuugcaucacu

SEQ ID NO: 2226726 - RNA, 19 nt, Artificial Sequence
  Description of Artificial Sequence: Synthetic oligonucleotide
cauagaguguuguggcgcu

SEQ ID NO: 2226727 - RNA, 19 nt, Artificial Sequence
  Description of Artificial Sequence: Synthetic oligonucleotide
ggcaaugaguguccauuga

SEQ ID NO: 2226728 - RNA, 19 nt, Artificial Sequence
  Description of Artificial Sequence: Synthetic oligonucleotide
ugauuggucucuggcucau

SEQ ID NO: 2226729 - RNA, 19 nt, Artificial Sequence
  Description of Artificial Sequence: Synthetic oligonucleotide
gcuacgaggauugaacaua

SEQ ID NO: 2226730 - RNA, 19 nt, Artificial Sequence
  Description of Artificial Sequence: Synthetic oligonucleotide
ccacucaucggucuuuuca

SEQ ID NO: 2226731 - RNA, 19 nt, Artificial Sequence
  Description of Artificial Sequence: Synthetic oligonucleotide
gauggugcgccaaguguua

SEQ ID NO: 2226732 - RNA, 19 nt, Artificial Sequence
  Description of Artificial Sequence: Synthetic oligonucleotide
cauguuccccguaagcaau

SEQ ID NO: 2226733 - RNA, 19 nt, Artificial Sequence
  Description of Artificial Sequence: Synthetic oligonucleotide
cucgcagugcuaauccugu

SEQ ID NO: 2226734 - RNA, 19 nt, Artificial Sequence
  Description of Artificial Sequence: Synthetic oligonucleotide
acuccgcugcucaugcaug

SEQ ID NO: 2226735 - RNA, 19 nt, Artificial Sequence
  Description of Artificial Sequence: Synthetic oligonucleotide
uguuccccguaagcaauua

SEQ ID NO: 2226736 - RNA, 19 nt, Artificial Sequence
  Description of Artificial Sequence: Synthetic oligonucleotide
ggccuggugaguggguugg

SEQ ID NO: 2226737 - RNA, 19 nt, Artificial Sequence
  Description of Artificial Sequence: Synthetic oligonucleotide
ucagagcacugcgguauau

SEQ ID NO: 2226738 - RNA, 19 nt, Artificial Sequence
  Description of Artificial Sequence: Synthetic oligonucleotide
caauuacaccuauuccacu

SEQ ID NO: 2226739 - RNA, 19 nt, Artificial Sequence
  Description of Artificial Sequence: Synthetic oligonucleotide
gcauuaaugaugacaggcu

SEQ ID NO: 2226740 - RNA, 19 nt, Artificial Sequence
  Description of Artificial Sequence: Synthetic oligonucleotide
aacccucccauggcauaga

SEQ ID NO: 2226741 - RNA, 19 nt, Artificial Sequence
  Description of Artificial Sequence: Synthetic oligonucleotide
guccauugauuggucucug

SEQ ID NO: 2226742 - RNA, 19 nt, Artificial Sequence
  Description of Artificial Sequence: Synthetic oligonucleotide
cggucuuuucaucauagca

SEQ ID NO: 2226743 - RNA, 19 nt, Artificial Sequence
  Description of Artificial Sequence: Synthetic oligonucleotide
cucuggcucauaucguucu

SEQ ID NO: 2226744 - RNA, 19 nt, Artificial Sequence
  Description of Artificial Sequence: Synthetic oligonucleotide
gcacuccucagucgauuag

SEQ ID NO: 2226745 - RNA, 19 nt, Artificial Sequence
  Description of Artificial Sequence: Synthetic oligonucleotide
ucaugucaugagcgucaua

SEQ ID NO: 2226746 - RNA, 19 nt, Artificial Sequence
  Description of Artificial Sequence: Synthetic oligonucleotide
cccaacauuggcuagcccu

SEQ ID NO: 2226747 - RNA, 19 nt, Artificial Sequence
  Description of Artificial Sequence: Synthetic oligonucleotide
ccccaugguaggcucgugg

SEQ ID NO: 2226748 - RNA, 19 nt, Artificial Sequence
  Description of Artificial Sequence: Synthetic oligonucleotide
cugcgguauaugcucaugu

SEQ ID NO: 2226749 - RNA, 19 nt, Artificial Sequence
  Description of Artificial Sequence: Synthetic oligonucleotide
ggguccguucauguucagg

SEQ ID NO: 2226750 - RNA, 19 nt, Artificial Sequence
  Description of Artificial Sequence: Synthetic oligonucleotide
aggucauacauggccuuua

SEQ ID NO: 2226751 - RNA, 19 nt, Artificial Sequence
  Description of Artificial Sequence: Synthetic oligonucleotide
uguuagccacuggacuaua

SEQ ID NO: 2226752 - RNA, 19 nt, Artificial Sequence
  Description of Artificial Sequence: Synthetic oligonucleotide
auaccacucaucggucuuu

SEQ ID NO: 2226753 - RNA, 19 nt, Artificial Sequence
  Description of Artificial Sequence: Synthetic oligonucleotide
gccaaguguuagccacugg

SEQ ID NO: 2226754 - RNA, 19 nt, Artificial Sequence
  Description of Artificial Sequence: Synthetic oligonucleotide
auagggcagacggggccug

SEQ ID NO: 2226755 - RNA, 19 nt, Artificial Sequence
  Description of Artificial Sequence: Synthetic oligonucleotide
cggaauacuuuacuucauc

SEQ ID NO: 2226756 - RNA, 19 nt, Artificial Sequence
  Description of Artificial Sequence: Synthetic oligonucleotide
ggggcuuccgccacuccag

SEQ ID NO: 2226757 - RNA, 19 nt, Artificial Sequence
  Description of Artificial Sequence: Synthetic oligonucleotide
ucccgucuagcugcauacu

SEQ ID NO: 2226758 - RNA, 19 nt, Artificial Sequence
  Description of Artificial Sequence: Synthetic oligonucleotide
caucggucuuuucaucaua

SEQ ID NO: 2226759 - RNA, 19 nt, Artificial Sequence
  Description of Artificial Sequence: Synthetic oligonucleotide
cugcaguguugagacgcac

SEQ ID NO: 2226760 - RNA, 19 nt, Artificial Sequence
  Description of Artificial Sequence: Synthetic oligonucleotide
caccaauagcaaauagaau

SEQ ID NO: 2226761 - RNA, 19 nt, Artificial Sequence
  Description of Artificial Sequence: Synthetic oligonucleotide
cuugucgaagcggaauacu

SEQ ID NO: 2226762 - RNA, 19 nt, Artificial Sequence
  Description of Artificial Sequence: Synthetic oligonucleotide
ggcagacggggccugguga

SEQ ID NO: 2226763 - RNA, 19 nt, Artificial Sequence
  Description of Artificial Sequence: Synthetic oligonucleotide
guacuugucgaagcggaau

SEQ ID NO: 2226764 - RNA, 19 nt, Artificial Sequence
  Description of Artificial Sequence: Synthetic oligonucleotide
uaccacucaucggucuuuu

SEQ ID NO: 2226765 - RNA, 19 nt, Artificial Sequence
  Description of Artificial Sequence: Synthetic oligonucleotide
cuaauagaagaggcucaua

SEQ ID NO: 2226766 - RNA, 19 nt, Artificial Sequence
  Description of Artificial Sequence: Synthetic oligonucleotide
gagcgucauaccacucauc

SEQ ID NO: 2226767 - RNA, 19 nt, Artificial Sequence
  Description of Artificial Sequence: Synthetic oligonucleotide
gguggugguaaagccauua

SEQ ID NO: 2226768 - RNA, 19 nt, Artificial Sequence
  Description of Artificial Sequence: Synthetic oligonucleotide
aggguccguucauguucag

SEQ ID NO: 2226769 - RNA, 19 nt, Artificial Sequence
  Description of Artificial Sequence: Synthetic oligonucleotide
cccgucuagcugcauacuc

SEQ ID NO: 2226770 - RNA, 19 nt, Artificial Sequence
  Description of Artificial Sequence: Synthetic oligonucleotide
gugcuaauccugugaaguu

SEQ ID NO: 2226771 - RNA, 19 nt, Artificial Sequence
  Description of Artificial Sequence: Synthetic oligonucleotide
guagaccuucccauagagu

SEQ ID NO: 2226772 - RNA, 19 nt, Artificial Sequence
  Description of Artificial Sequence: Synthetic oligonucleotide
cuaccucgauaccaaaauu

SEQ ID NO: 2226773 - RNA, 19 nt, Artificial Sequence
  Description of Artificial Sequence: Synthetic oligonucleotide
ccgagcaucguaugccuca

SEQ ID NO: 2226774 - RNA, 19 nt, Artificial Sequence
  Description of Artificial Sequence: Synthetic oligonucleotide
ccaccuacugcguauacau

SEQ ID NO: 2226775 - RNA, 19 nt, Artificial Sequence
  Description of Artificial Sequence: Synthetic oligonucleotide
gugcgccaaguguuagcca

SEQ ID NO: 2226776 - RNA, 19 nt, Artificial Sequence
  Description of Artificial Sequence: Synthetic oligonucleotide
cccaugguaggcucgugga

SEQ ID NO: 2226777 - RNA, 19 nt, Artificial Sequence
  Description of Artificial Sequence: Synthetic oligonucleotide
ugguaggcucguggacucu

SEQ ID NO: 2226778 - RNA, 19 nt, Artificial Sequence
  Description of Artificial Sequence: Synthetic oligonucleotide
caccuauuccacuccuccu

SEQ ID NO: 2226779 - RNA, 19 nt, Artificial Sequence
  Description of Artificial Sequence: Synthetic oligonucleotide
ugguaccacgcagcagcuc

SEQ ID NO: 2226780 - RNA, 19 nt, Artificial Sequence
  Description of Artificial Sequence: Synthetic oligonucleotide
gggccuggugaguggguug

SEQ ID NO: 2226781 - RNA, 19 nt, Artificial Sequence
  Description of Artificial Sequence: Synthetic oligonucleotide
gucguccacuaccucgaua

SEQ ID NO: 2226782 - RNA, 19 nt, Artificial Sequence
  Description of Artificial Sequence: Synthetic oligonucleotide
cuauuccacuccuccugcu

SEQ ID NO: 2226783 - RNA, 19 nt, Artificial Sequence
  Description of Artificial Sequence: Synthetic oligonucleotide
auagaguguuguggcgcuu

SEQ ID NO: 2226784 - RNA, 19 nt, Artificial Sequence
  Description of Artificial Sequence: Synthetic oligonucleotide
guaagcaauuacaccuauu

SEQ ID NO: 2226785 - RNA, 19 nt, Artificial Sequence
  Description of Artificial Sequence: Synthetic oligonucleotide
cacuccgcugcucaugcau

SEQ ID NO: 2226786 - RNA, 19 nt, Artificial Sequence
  Description of Artificial Sequence: Synthetic oligonucleotide
gcuaauagaagaggcucau

SEQ ID NO: 2226787 - RNA, 19 nt, Artificial Sequence
  Description of Artificial Sequence: Synthetic oligonucleotide
auguuccccguaagcaauu

SEQ ID NO: 2226788 - RNA, 19 nt, Artificial Sequence
  Description of Artificial Sequence: Synthetic oligonucleotide
guguuagccacuggacuau

SEQ ID NO: 2226789 - RNA, 19 nt, Artificial Sequence
  Description of Artificial Sequence: Synthetic oligonucleotide
gggcuuccgccacuccagc

SEQ ID NO: 2226790 - RNA, 19 nt, Artificial Sequence
  Description of Artificial Sequence: Synthetic oligonucleotide
gggcagacggggccuggug

SEQ ID NO: 2226791 - RNA, 19 nt, Artificial Sequence
  Description of Artificial Sequence: Synthetic oligonucleotide
ccucgauaccaaaauugcu

SEQ ID NO: 2226792 - RNA, 19 nt, Artificial Sequence
  Description of Artificial Sequence: Synthetic oligonucleotide
cucagagcacugcgguaua

SEQ ID NO: 2226793 - RNA, 19 nt, Artificial Sequence
  Description of Artificial Sequence: Synthetic oligonucleotide
ggauggugcgccaaguguu

SEQ ID NO: 2226794 - RNA, 19 nt, Artificial Sequence
  Description of Artificial Sequence: Synthetic oligonucleotide
caaugacuguccacugauu

SEQ ID NO: 2226795 - RNA, 19 nt, Artificial Sequence
  Description of Artificial Sequence: Synthetic oligonucleotide
agggcagacggggccuggu

SEQ ID NO: 2226796 - RNA, 19 nt, Artificial Sequence
  Description of Artificial Sequence: Synthetic oligonucleotide
cagaauuggaggguccguu

SEQ ID NO: 2226797 - RNA, 19 nt, Artificial Sequence
  Description of Artificial Sequence: Synthetic oligonucleotide
ccguaagcaauuacaccua

SEQ ID NO: 2226798 - RNA, 19 nt, Artificial Sequence
  Description of Artificial Sequence: Synthetic oligonucleotide
ggguuggugaagucagaau

SEQ ID NO: 2226799 - RNA, 19 nt, Artificial Sequence
  Description of Artificial Sequence: Synthetic oligonucleotide
ccucaugggugcaaugacu

SEQ ID NO: 2226800 - RNA, 19 nt, Artificial Sequence
  Description of Artificial Sequence: Synthetic oligonucleotide
accuucccauagaguguug

SEQ ID NO: 2226801 - RNA, 19 nt, Artificial Sequence
  Description of Artificial Sequence: Synthetic oligonucleotide
cgguauaugcucaugucau

SEQ ID NO: 2226802 - RNA, 19 nt, Artificial Sequence
  Description of Artificial Sequence: Synthetic oligonucleotide
gucugcccgagcaucguau

SEQ ID NO: 2226803 - RNA, 19 nt, Artificial Sequence
  Description of Artificial Sequence: Synthetic oligonucleotide
cucauacagguaggguacu

SEQ ID NO: 2226804 - RNA, 19 nt, Artificial Sequence
  Description of Artificial Sequence: Synthetic oligonucleotide
cagccaccaauagcaaaua

SEQ ID NO: 2226805 - RNA, 19 nt, Artificial Sequence
  Description of Artificial Sequence: Synthetic oligonucleotide
ccaaaauugcuacgaggau

SEQ ID NO: 2226806 - RNA, 19 nt, Artificial Sequence
  Description of Artificial Sequence: Synthetic oligonucleotide
caccacauauguagaccuu

SEQ ID NO: 2226807 - RNA, 19 nt, Artificial Sequence
  Description of Artificial Sequence: Synthetic oligonucleotide
cgaagcggaauacuuuacu

SEQ ID NO: 2226808 - RNA, 19 nt, Artificial Sequence
  Description of Artificial Sequence: Synthetic oligonucleotide
cucaugucaugagcgucau

SEQ ID NO: 2226809 - RNA, 19 nt, Artificial Sequence
  Description of Artificial Sequence: Synthetic oligonucleotide
cacugcgguauaugcucau

SEQ ID NO: 2226810 - RNA, 19 nt, Artificial Sequence
  Description of Artificial Sequence: Synthetic oligonucleotide
gcccgagcaucguaugccu

SEQ ID NO: 2226811 - RNA, 19 nt, Artificial Sequence
  Description of Artificial Sequence: Synthetic oligonucleotide
gcgcuugcaucacuccgcu

SEQ ID NO: 2226812 - RNA, 19 nt, Artificial Sequence
  Description of Artificial Sequence: Synthetic oligonucleotide
ccuacugcguauacauguu

SEQ ID NO: 2226813 - RNA, 19 nt, Artificial Sequence
  Description of Artificial Sequence: Synthetic oligonucleotide
cgccaaguguuagccacug

SEQ ID NO: 2226814 - RNA, 19 nt, Artificial Sequence
  Description of Artificial Sequence: Synthetic oligonucleotide
ccacuaccucgauaccaaa

SEQ ID NO: 2226815 - RNA, 19 nt, Artificial Sequence
  Description of Artificial Sequence: Synthetic oligonucleotide
cugcacuccucagucgauu

SEQ ID NO: 2226816 - RNA, 19 nt, Artificial Sequence
  Description of Artificial Sequence: Synthetic oligonucleotide
cguaagcaauuacaccuau

SEQ ID NO: 2226817 - RNA, 19 nt, Artificial Sequence
  Description of Artificial Sequence: Synthetic oligonucleotide
cugucugcccgagcaucgu

SEQ ID NO: 2226818 - RNA, 19 nt, Artificial Sequence
  Description of Artificial Sequence: Synthetic oligonucleotide
cgcuugcaucacuccgcug

SEQ ID NO: 2226819 - RNA, 19 nt, Artificial Sequence
  Description of Artificial Sequence: Synthetic oligonucleotide
cagacggggccuggugagu

SEQ ID NO: 2226820 - RNA, 19 nt, Artificial Sequence
  Description of Artificial Sequence: Synthetic oligonucleotide
ggucguccacuaccucgau

SEQ ID NO: 2226821 - RNA, 19 nt, Artificial Sequence
  Description of Artificial Sequence: Synthetic oligonucleotide
gcgccaaguguuagccacu

SEQ ID NO: 2226822 - RNA, 19 nt, Artificial Sequence
  Description of Artificial Sequence: Synthetic oligonucleotide
cgccacuccagccaccaau

SEQ ID NO: 2226823 - RNA, 19 nt, Artificial Sequence
  Description of Artificial Sequence: Synthetic oligonucleotide
gccuggugaguggguuggu

SEQ ID NO: 2226824 - RNA, 19 nt, Artificial Sequence
  Description of Artificial Sequence: Synthetic oligonucleotide
ccgccacuccagccaccaa

SEQ ID NO: 2226825 - RNA, 19 nt, Artificial Sequence
  Description of Artificial Sequence: Synthetic oligonucleotide
gaugauucuaaguagaacc

SEQ ID NO: 2226826 - RNA, 19 nt, Artificial Sequence
  Description of Artificial Sequence: Synthetic oligonucleotide
  modified_base (5)..(5): a, c, u, g, unknown or other
uuuancucaacaaugggga

SEQ ID NO: 2226827 - RNA, 19 nt, Artificial Sequence
  Description of Artificial Sequence: Synthetic oligonucleotide
aaugguagcagacacaggu

SEQ ID NO: 2226828 - RNA, 19 nt, Artificial Sequence
  Description of Artificial Sequence: Synthetic oligonucleotide
aucaugacuaaacaacugc

SEQ ID NO: 2226829 - RNA, 19 nt, Artificial Sequence
  Description of Artificial Sequence: Synthetic oligonucleotide
aaccugugaauuuugagag

SEQ ID NO: 2226830 - RNA, 19 nt, Artificial Sequence
  Description of Artificial Sequence: Synthetic oligonucleotide
ugaacagugacacauacuc

SEQ ID NO: 2226831 - RNA, 19 nt, Artificial Sequence
  Description of Artificial Sequence: Synthetic oligonucleotide
uaauucuuaaaugugaucu

SEQ ID NO: 2226832 - RNA, 19 nt, Artificial Sequence
  Description of Artificial Sequence: Synthetic oligonucleotide
aaaugugaucuccaguaac

SEQ ID NO: 2226833 - RNA, 19 nt, Artificial Sequence
  Description of Artificial Sequence: Synthetic oligonucleotide
aaaaugguagcagacacag

SEQ ID NO: 2226834 - RNA, 19 nt, Artificial Sequence
  Description of Artificial Sequence: Synthetic oligonucleotide
ugaacucacagacugauga

SEQ ID NO: 2226835 - RNA, 19 nt, Artificial Sequence
  Description of Artificial Sequence: Synthetic oligonucleotide
aagacagaaaaucgacccc

SEQ ID NO: 2226836 - RNA, 19 nt, Artificial Sequence
  Description of Artificial Sequence: Synthetic oligonucleotide
aacuccuccacugugaagg

SEQ ID NO: 2226837 - RNA, 19 nt, Artificial Sequence
  Description of Artificial Sequence: Synthetic oligonucleotide
uguguaguaauucuuaaau

SEQ ID NO: 2226838 - RNA, 19 nt, Artificial Sequence
  Description of Artificial Sequence: Synthetic oligonucleotide
agacaagugacccauuugg

SEQ ID NO: 2226839 - RNA, 19 nt, Artificial Sequence
  Description of Artificial Sequence: Synthetic oligonucleotide
aacagugacacauacuccu

SEQ ID NO: 2226840 - RNA, 19 nt, Artificial Sequence
  Description of Artificial Sequence: Synthetic oligonucleotide
ugucagacaagacagaaaa

SEQ ID NO: 2226841 - RNA, 19 nt, Artificial Sequence
  Description of Artificial Sequence: Synthetic oligonucleotide
uuaaaugugaucuccagua

SEQ ID NO: 2226842 - RNA, 19 nt, Artificial Sequence
  Description of Artificial Sequence: Synthetic oligonucleotide
ucuccaguaacucgaaagg

SEQ ID NO: 2226843 - RNA, 19 nt, Artificial Sequence
  Description of Artificial Sequence: Synthetic oligonucleotide
aauaggggucaucucuucc

SEQ ID NO: 2226844 - RNA, 19 nt, Artificial Sequence
  Description of Artificial Sequence: Synthetic oligonucleotide
guuaggaaaggugacaucg

SEQ ID NO: 2226845 - RNA, 19 nt, Artificial Sequence
  Description of Artificial Sequence: Synthetic oligonucleotide
aagagacugaauuugcaug

SEQ ID NO: 2226846 - RNA, 19 nt, Artificial Sequence
  Description of Artificial Sequence: Synthetic oligonucleotide
caagacagaaaaucgaccc

SEQ ID NO: 2226847 - RNA, 19 nt, Artificial Sequence
  Description of Artificial Sequence: Synthetic oligonucleotide
uccaguaacucgaaaggcg

SEQ ID NO: 2226848 - RNA, 19 nt, Artificial Sequence
  Description of Artificial Sequence: Synthetic oligonucleotide
ucuaaguagaaccugugaa

SEQ ID NO: 2226849 - RNA, 19 nt, Artificial Sequence
  Description of Artificial Sequence: Synthetic oligonucleotide
ugugcuaccaugcugggcu

SEQ ID NO: 2226850 - RNA, 19 nt, Artificial Sequence
  Description of Artificial Sequence: Synthetic oligonucleotide
ugaauuuugagaggaagag

SEQ ID NO: 2226851 - RNA, 19 nt, Artificial Sequence
  Description of Artificial Sequence: Synthetic oligonucleotide
uaguaauucuuaaauguga

SEQ ID NO: 2226852 - RNA, 19 nt, Artificial Sequence
  Description of Artificial Sequence: Synthetic oligonucleotide
aagugacccauuuggacgg

SEQ ID NO: 2226853 - RNA, 19 nt, Artificial Sequence
  Description of Artificial Sequence: Synthetic oligonucleotide
  modified_base (6)..(6): a, c, u, g, unknown or other
guuuancucaacaaugggg

SEQ ID NO: 2226854 - RNA, 19 nt, Artificial Sequence
  Description of Artificial Sequence: Synthetic oligonucleotide
aaacaguagucccgaagac

SEQ ID NO: 2226855 - RNA, 19 nt, Artificial Sequence
  Description of Artificial Sequence: Synthetic oligonucleotide
caagugacccauuuggacg

SEQ ID NO: 2226856 - RNA, 19 nt, Artificial Sequence
  Description of Artificial Sequence: Synthetic oligonucleotide
agaaaaucgaccccacuag

SEQ ID NO: 2226857 - RNA, 19 nt, Artificial Sequence
  Description of Artificial Sequence: Synthetic oligonucleotide
ugacagggaaccaacauac

SEQ ID NO: 2226858 - RNA, 19 nt, Artificial Sequence
  Description of Artificial Sequence: Synthetic oligonucleotide
aaugaauaggggucaucuc

SEQ ID NO: 2226859 - RNA, 19 nt, Artificial Sequence
  Description of Artificial Sequence: Synthetic oligonucleotide
gacaucgacgaccagcacg

SEQ ID NO: 2226860 - RNA, 19 nt, Artificial Sequence
  Description of Artificial Sequence: Synthetic oligonucleotide
uuggggaaaaucagggagg

SEQ ID NO: 2226861 - RNA, 19 nt, Artificial Sequence
  Description of Artificial Sequence: Synthetic oligonucleotide
ugugaucuccaguaacucg

SEQ ID NO: 2226862 - RNA, 19 nt, Artificial Sequence
  Description of Artificial Sequence: Synthetic oligonucleotide
uggauagaauacauaagga

SEQ ID NO: 2226863 - RNA, 19 nt, Artificial Sequence
  Description of Artificial Sequence: Synthetic oligonucleotide
aucuccaguaacucgaaag

SEQ ID NO: 2226864 - RNA, 19 nt, Artificial Sequence
  Description of Artificial Sequence: Synthetic oligonucleotide
agauuugcaacuccuccac

SEQ ID NO: 2226865 - RNA, 19 nt, Artificial Sequence
  Description of Artificial Sequence: Synthetic oligonucleotide
ugagcuaccuggaacaggu

SEQ ID NO: 2226866 - RNA, 19 nt, Artificial Sequence
  Description of Artificial Sequence: Synthetic oligonucleotide
  modified_base (10)..(10): a, c, u, g, unknown or other
acagguuuancucaacaau

SEQ ID NO: 2226867 - RNA, 19 nt, Artificial Sequence
  Description of Artificial Sequence: Synthetic oligonucleotide
gaaccugugaauuuugaga

SEQ ID NO: 2226868 - RNA, 19 nt, Artificial Sequence
  Description of Artificial Sequence: Synthetic oligonucleotide
augaauaggggucaucucu

SEQ ID NO: 2226869 - RNA, 19 nt, Artificial Sequence
  Description of Artificial Sequence: Synthetic oligonucleotide
aacucacagacugaugagg

SEQ ID NO: 2226870 - RNA, 19 nt, Artificial Sequence
  Description of Artificial Sequence: Synthetic oligonucleotide
gaaaaucgaccccacuagg

SEQ ID NO: 2226871 - RNA, 19 nt, Artificial Sequence
  Description of Artificial Sequence: Synthetic oligonucleotide
uaggaaucaugacuaaaca

SEQ ID NO: 2226872 - RNA, 19 nt, Artificial Sequence
  Description of Artificial Sequence: Synthetic oligonucleotide
agaggaaugaauagggguc

SEQ ID NO: 2226873 - RNA, 19 nt, Artificial Sequence
  Description of Artificial Sequence: Synthetic oligonucleotide
ugacacauacuccugggcu

SEQ ID NO: 2226874 - RNA, 19 nt, Artificial Sequence
  Description of Artificial Sequence: Synthetic oligonucleotide
acagccauagcggugacgg

SEQ ID NO: 2226875 - RNA, 19 nt, Artificial Sequence
  Description of Artificial Sequence: Synthetic oligonucleotide
  modified_base (9)..(9): a, c, u, g, unknown or other
cagguuuancucaacaaug

SEQ ID NO: 2226876 - RNA, 19 nt, Artificial Sequence
  Description of Artificial Sequence: Synthetic oligonucleotide
agagacugaauuugcaugu

SEQ ID NO: 2226877 - RNA, 19 nt, Artificial Sequence
  Description of Artificial Sequence: Synthetic oligonucleotide
aacugcccacaucugcugc

SEQ ID NO: 2226878 - RNA, 19 nt, Artificial Sequence
  Description of Artificial Sequence: Synthetic oligonucleotide
agacugaugaggugaaaag

SEQ ID NO: 2226879 - RNA, 19 nt, Artificial Sequence
  Description of Artificial Sequence: Synthetic oligonucleotide
ugugcagugggguauggug

SEQ ID NO: 2226880 - RNA, 19 nt, Artificial Sequence
  Description of Artificial Sequence: Synthetic oligonucleotide
aagacaagugacccauuug

SEQ ID NO: 2226881 - RNA, 19 nt, Artificial Sequence
  Description of Artificial Sequence: Synthetic oligonucleotide
aguaggauacucugcuggg

SEQ ID NO: 2226882 - RNA, 19 nt, Artificial Sequence
  Description of Artificial Sequence: Synthetic oligonucleotide
cauggauagaauacauaag

SEQ ID NO: 2226883 - RNA, 19 nt, Artificial Sequence
  Description of Artificial Sequence: Synthetic oligonucleotide
auuugcaacuccuccacug

SEQ ID NO: 2226884 - RNA, 19 nt, Artificial Sequence
  Description of Artificial Sequence: Synthetic oligonucleotide
acaucgacgaccagcacgc

SEQ ID NO: 2226885 - RNA, 19 nt, Artificial Sequence
  Description of Artificial Sequence: Synthetic oligonucleotide
caguaggauacucugcugg

SEQ ID NO: 2226886 - RNA, 19 nt, Artificial Sequence
  Description of Artificial Sequence: Synthetic oligonucleotide
aaaucgaccccacuaggaa

SEQ ID NO: 2226887 - RNA, 19 nt, Artificial Sequence
  Description of Artificial Sequence: Synthetic oligonucleotide
acaauggggaaaaugguag

SEQ ID NO: 2226888 - RNA, 19 nt, Artificial Sequence
  Description of Artificial Sequence: Synthetic oligonucleotide
  modified_base (8)..(8): a, c, u, g, unknown or other
agguuuancucaacaaugg

SEQ ID NO: 2226889 - RNA, 19 nt, Artificial Sequence
  Description of Artificial Sequence: Synthetic oligonucleotide
agaaccugugaauuuugag

SEQ ID NO: 2226890 - RNA, 19 nt, Artificial Sequence
  Description of Artificial Sequence: Synthetic oligonucleotide
uagauuugcaacuccucca

SEQ ID NO: 2226891 - RNA, 19 nt, Artificial Sequence
  Description of Artificial Sequence: Synthetic oligonucleotide
uaggacucugcucacguca

SEQ ID NO: 2226892 - RNA, 19 nt, Artificial Sequence
  Description of Artificial Sequence: Synthetic oligonucleotide
acucgaugauucuaaguag

SEQ ID NO: 2226893 - RNA, 19 nt, Artificial Sequence
  Description of Artificial Sequence: Synthetic oligonucleotide
uucuuaaaugugaucucca

SEQ ID NO: 2226894 - RNA, 19 nt, Artificial Sequence
  Description of Artificial Sequence: Synthetic oligonucleotide
  modified_base (17)..(17): a, c, u, g, unknown or other
accuggaacagguuuancu

SEQ ID NO: 2226895 - RNA, 19 nt, Artificial Sequence
  Description of Artificial Sequence: Synthetic oligonucleotide
cagggaaccaacauacgag

SEQ ID NO: 2226896 - RNA, 19 nt, Artificial Sequence
  Description of Artificial Sequence: Synthetic oligonucleotide
ucgacgaccagcacgccag

SEQ ID NO: 2226897 - RNA, 19 nt, Artificial Sequence
  Description of Artificial Sequence: Synthetic oligonucleotide
guguaguaauucuuaaaug

SEQ ID NO: 2226898 - RNA, 19 nt, Artificial Sequence
  Description of Artificial Sequence: Synthetic oligonucleotide
guaguaauucuuaaaugug

SEQ ID NO: 2226899 - RNA, 19 nt, Artificial Sequence
  Description of Artificial Sequence: Synthetic oligonucleotide
auuugcaugucagacaaga

SEQ ID NO: 2226900 - RNA, 19 nt, Artificial Sequence
  Description of Artificial Sequence: Synthetic oligonucleotide
aaggcgaggagcaggcugc

SEQ ID NO: 2226901 - RNA, 19 nt, Artificial Sequence
  Description of Artificial Sequence: Synthetic oligonucleotide
  modified_base (7)..(7): a, c, u, g, unknown or other
gguuuancucaacaauggg

SEQ ID NO: 2226902 - RNA, 19 nt, Artificial Sequence
  Description of Artificial Sequence: Synthetic oligonucleotide
acagggaaccaacauacga

SEQ ID NO: 2226903 - RNA, 19 nt, Artificial Sequence
  Description of Artificial Sequence: Synthetic oligonucleotide
gacaagacagaaaaucgac

SEQ ID NO: 2226904 - RNA, 19 nt, Artificial Sequence
  Description of Artificial Sequence: Synthetic oligonucleotide
aaaggcgcgacguuaggaa

SEQ ID NO: 2226905 - RNA, 19 nt, Artificial Sequence
  Description of Artificial Sequence: Synthetic oligonucleotide
ugggagacccucaaggcga

SEQ ID NO: 2226906 - RNA, 19 nt, Artificial Sequence
  Description of Artificial Sequence: Synthetic oligonucleotide
ugguagcagacacaggugu

SEQ ID NO: 2226907 - RNA, 19 nt, Artificial Sequence
  Description of Artificial Sequence: Synthetic oligonucleotide
ucacagacugaugagguga

SEQ ID NO: 2226908 - RNA, 19 nt, Artificial Sequence
  Description of Artificial Sequence: Synthetic oligonucleotide
uccugagcuaccuggaaca

SEQ ID NO: 2226909 - RNA, 19 nt, Artificial Sequence
  Description of Artificial Sequence: Synthetic oligonucleotide
aggaggaacucgaugauuc

SEQ ID NO: 2226910 - RNA, 19 nt, Artificial Sequence
  Description of Artificial Sequence: Synthetic oligonucleotide
uguguaaaccaggcuaucc

SEQ ID NO: 2226911 - RNA, 19 nt, Artificial Sequence
  Description of Artificial Sequence: Synthetic oligonucleotide
  modified_base (2)..(2): a, c, u, g, unknown or other
ancucaacaauggggaaaa

SEQ ID NO: 2226912 - RNA, 19 nt, Artificial Sequence
  Description of Artificial Sequence: Synthetic oligonucleotide
ggaaaggugacaucgacga

SEQ ID NO: 2226913 - RNA, 19 nt, Artificial Sequence
  Description of Artificial Sequence: Synthetic oligonucleotide
ucuaggacucugcucacgu

SEQ ID NO: 2226914 - RNA, 19 nt, Artificial Sequence
  Description of Artificial Sequence: Synthetic oligonucleotide
ugacuaaacaacugcccac

SEQ ID NO: 2226915 - RNA, 19 nt, Artificial Sequence
  Description of Artificial Sequence: Synthetic oligonucleotide
gugugugcuaccaugcugg

SEQ ID NO: 2226916 - RNA, 19 nt, Artificial Sequence
  Description of Artificial Sequence: Synthetic oligonucleotide
ugcuugaacagugacacau

SEQ ID NO: 2226917 - RNA, 19 nt, Artificial Sequence
  Description of Artificial Sequence: Synthetic oligonucleotide
acgaccagcacgccaggcc

SEQ ID NO: 2226918 - RNA, 19 nt, Artificial Sequence
  Description of Artificial Sequence: Synthetic oligonucleotide
caaacaguagucccgaaga

SEQ ID NO: 2226919 - RNA, 19 nt, Artificial Sequence
  Description of Artificial Sequence: Synthetic oligonucleotide
aggaaucaugacuaaacaa

SEQ ID NO: 2226920 - RNA, 19 nt, Artificial Sequence
  Description of Artificial Sequence: Synthetic oligonucleotide
ucugggagacccucaaggc

SEQ ID NO: 2226921 - RNA, 19 nt, Artificial Sequence
  Description of Artificial Sequence: Synthetic oligonucleotide
gaucagacgcagcucuagg

SEQ ID NO: 2226922 - RNA, 19 nt, Artificial Sequence
  Description of Artificial Sequence: Synthetic oligonucleotide
accaacauacgagacauga

SEQ ID NO: 2226923 - RNA, 19 nt, Artificial Sequence
  Description of Artificial Sequence: Synthetic oligonucleotide
aaaaucgaccccacuagga

SEQ ID NO: 2226924 - RNA, 19 nt, Artificial Sequence
  Description of Artificial Sequence: Synthetic oligonucleotide
auggugacgaacccggaug

SEQ ID NO: 2226925 - RNA, 19 nt, Artificial Sequence
  Description of Artificial Sequence: Synthetic oligonucleotide
uaaaugugaucuccaguaa

SEQ ID NO: 2226926 - RNA, 19 nt, Artificial Sequence
  Description of Artificial Sequence: Synthetic oligonucleotide
gaacucacagacugaugag

SEQ ID NO: 2226927 - RNA, 19 nt, Artificial Sequence
  Description of Artificial Sequence: Synthetic oligonucleotide
ucgaaaggcgcgacguuag

SEQ ID NO: 2226928 - RNA, 19 nt, Artificial Sequence
  Description of Artificial Sequence: Synthetic oligonucleotide
accucaguaggauacucug

SEQ ID NO: 2226929 - RNA, 19 nt, Artificial Sequence
  Description of Artificial Sequence: Synthetic oligonucleotide
ugauucuaaguagaaccug

SEQ ID NO: 2226930 - RNA, 19 nt, Artificial Sequence
  Description of Artificial Sequence: Synthetic oligonucleotide
ucuuuucacaugacaggga

SEQ ID NO: 2226931 - RNA, 19 nt, Artificial Sequence
  Description of Artificial Sequence: Synthetic oligonucleotide
uaaguagaaccugugaauu

SEQ ID NO: 2226932 - RNA, 19 nt, Artificial Sequence
  Description of Artificial Sequence: Synthetic oligonucleotide
aaucgaccccacuaggaau

SEQ ID NO: 2226933 - RNA, 19 nt, Artificial Sequence
  Description of Artificial Sequence: Synthetic oligonucleotide
uaacucgaaaggcgcgacg

SEQ ID NO: 2226934 - RNA, 19 nt, Artificial Sequence
  Description of Artificial Sequence: Synthetic oligonucleotide
uggggaaaaugguagcaga

SEQ ID NO: 2226935 - RNA, 19 nt, Artificial Sequence
  Description of Artificial Sequence: Synthetic oligonucleotide
ucccaggucaugaauguaa

SEQ ID NO: 2226936 - RNA, 19 nt, Artificial Sequence
  Description of Artificial Sequence: Synthetic oligonucleotide
agucccgaagacaagugac

SEQ ID NO: 2226937 - RNA, 19 nt, Artificial Sequence
  Description of Artificial Sequence: Synthetic oligonucleotide
ugggagguccucaugucgc

SEQ ID NO: 2226938 - RNA, 19 nt, Artificial Sequence
  Description of Artificial Sequence: Synthetic oligonucleotide
ugacgaacccggaugcuca

SEQ ID NO: 2226939 - RNA, 19 nt, Artificial Sequence
  Description of Artificial Sequence: Synthetic oligonucleotide
uuugcaugucagacaagac

SEQ ID NO: 2226940 - RNA, 19 nt, Artificial Sequence
  Description of Artificial Sequence: Synthetic oligonucleotide
agggaaccaacauacgaga

SEQ ID NO: 2226941 - RNA, 19 nt, Artificial Sequence
  Description of Artificial Sequence: Synthetic oligonucleotide
ggauagaauacauaaggaa

SEQ ID NO: 2226942 - RNA, 19 nt, Artificial Sequence
  Description of Artificial Sequence: Synthetic oligonucleotide
aacucgaaaggcgcgacgu

SEQ ID NO: 2226943 - RNA, 19 nt, Artificial Sequence
  Description of Artificial Sequence: Synthetic oligonucleotide
ucgaugauucuaaguagaa

SEQ ID NO: 2226944 - RNA, 19 nt, Artificial Sequence
  Description of Artificial Sequence: Synthetic oligonucleotide
aacaauggggaaaauggua

SEQ ID NO: 2226945 - RNA, 19 nt, Artificial Sequence
  Description of Artificial Sequence: Synthetic oligonucleotide
gguauggugacgaacccgg

SEQ ID NO: 2226946 - RNA, 19 nt, Artificial Sequence
  Description of Artificial Sequence: Synthetic oligonucleotide
acccugauuggccugggag

SEQ ID NO: 2226947 - RNA, 19 nt, Artificial Sequence
  Description of Artificial Sequence: Synthetic oligonucleotide
uuuucacaugacagggaac

SEQ ID NO: 2226948 - RNA, 19 nt, Artificial Sequence
  Description of Artificial Sequence: Synthetic oligonucleotide
aaguagaaccugugaauuu

SEQ ID NO: 2226949 - RNA, 19 nt, Artificial Sequence
  Description of Artificial Sequence: Synthetic oligonucleotide
  modified_base (4)..(4): a, c, u, g, unknown or other
uuancucaacaauggggaa

SEQ ID NO: 2226950 - RNA, 19 nt, Artificial Sequence
  Description of Artificial Sequence: Synthetic oligonucleotide
caggugugcauacuggcag

SEQ ID NO: 2226951 - RNA, 19 nt, Artificial Sequence
  Description of Artificial Sequence: Synthetic oligonucleotide
ugcaacuccuccacuguga

SEQ ID NO: 2226952 - RNA, 19 nt, Artificial Sequence
  Description of Artificial Sequence: Synthetic oligonucleotide
caauggggaaaaugguagc

SEQ ID NO: 2226953 - RNA, 19 nt, Artificial Sequence
  Description of Artificial Sequence: Synthetic oligonucleotide
cugggagacccucaaggcg

SEQ ID NO: 2226954 - RNA, 19 nt, Artificial Sequence
  Description of Artificial Sequence: Synthetic oligonucleotide
aguaauucuuaaaugugau

SEQ ID NO: 2226955 - RNA, 19 nt, Artificial Sequence
  Description of Artificial Sequence: Synthetic oligonucleotide
agggcuacggugucuuuuc

SEQ ID NO: 2226956 - RNA, 19 nt, Artificial Sequence
  Description of Artificial Sequence: Synthetic oligonucleotide
  modified_base (3)..(3): a, c, u, g, unknown or other
uancucaacaauggggaaa

SEQ ID NO: 2226957 - RNA, 19 nt, Artificial Sequence
  Description of Artificial Sequence: Synthetic oligonucleotide
gacacauacuccugggcuc

SEQ ID NO: 2226958 - RNA, 19 nt, Artificial Sequence
  Description of Artificial Sequence: Synthetic oligonucleotide
gaaugaauaggggucaucu

SEQ ID NO: 2226959 - RNA, 19 nt, Artificial Sequence
  Description of Artificial Sequence: Synthetic oligonucleotide
cugugaaggacagccauag

SEQ ID NO: 2226960 - RNA, 19 nt, Artificial Sequence
  Description of Artificial Sequence: Synthetic oligonucleotide
cucaaggcgaggagcaggc

SEQ ID NO: 2226961 - RNA, 19 nt, Artificial Sequence
  Description of Artificial Sequence: Synthetic oligonucleotide
aguagucccgaagacaagu

SEQ ID NO: 2226962 - RNA, 19 nt, Artificial Sequence
  Description of Artificial Sequence: Synthetic oligonucleotide
uagucccgaagacaaguga

SEQ ID NO: 2226963 - RNA, 19 nt, Artificial Sequence
  Description of Artificial Sequence: Synthetic oligonucleotide
cucgaugauucuaaguaga

SEQ ID NO: 2226964 - RNA, 19 nt, Artificial Sequence
  Description of Artificial Sequence: Synthetic oligonucleotide
acccggaugcucaagaaag

SEQ ID NO: 2226965 - RNA, 19 nt, Artificial Sequence
  Description of Artificial Sequence: Synthetic oligonucleotide
uugaacucacagacugaug

SEQ ID NO: 2226966 - RNA, 19 nt, Artificial Sequence
  Description of Artificial Sequence: Synthetic oligonucleotide
ucaguaggauacucugcug

SEQ ID NO: 2226967 - RNA, 19 nt, Artificial Sequence
  Description of Artificial Sequence: Synthetic oligonucleotide
cacgucacacagcaucugg

SEQ ID NO: 2226968 - RNA, 19 nt, Artificial Sequence
  Description of Artificial Sequence: Synthetic oligonucleotide
uauggugacgaacccggau

SEQ ID NO: 2226969 - RNA, 19 nt, Artificial Sequence
  Description of Artificial Sequence: Synthetic oligonucleotide
gacacugggugggaaagcc

SEQ ID NO: 2226970 - RNA, 19 nt, Artificial Sequence
  Description of Artificial Sequence: Synthetic oligonucleotide
augacagggaaccaacaua

SEQ ID NO: 2226971 - RNA, 19 nt, Artificial Sequence
  Description of Artificial Sequence: Synthetic oligonucleotide
gaaucaugacuaaacaacu

SEQ ID NO: 2226972 - RNA, 19 nt, Artificial Sequence
  Description of Artificial Sequence: Synthetic oligonucleotide
  modified_base (16)..(16): a, c, u, g, unknown or other
ccuggaacagguuuancuc

SEQ ID NO: 2226973 - RNA, 19 nt, Artificial Sequence
  Description of Artificial Sequence: Synthetic oligonucleotide
cugcaccucaguaggauac

SEQ ID NO: 2226974 - RNA, 19 nt, Artificial Sequence
  Description of Artificial Sequence: Synthetic oligonucleotide
gaacagugacacauacucc

SEQ ID NO: 2226975 - RNA, 19 nt, Artificial Sequence
  Description of Artificial Sequence: Synthetic oligonucleotide
acaguagucccgaagacaa

SEQ ID NO: 2226976 - RNA, 19 nt, Artificial Sequence
  Description of Artificial Sequence: Synthetic oligonucleotide
agacaagacagaaaaucga

SEQ ID NO: 2226977 - RNA, 19 nt, Artificial Sequence
  Description of Artificial Sequence: Synthetic oligonucleotide
uuccucaagcuucccaggu

SEQ ID NO: 2226978 - RNA, 19 nt, Artificial Sequence
  Description of Artificial Sequence: Synthetic oligonucleotide
aacccggaugcucaagaaa

SEQ ID NO: 2226979 - RNA, 19 nt, Artificial Sequence
  Description of Artificial Sequence: Synthetic oligonucleotide
aucagacgcagcucuagga

SEQ ID NO: 2226980 - RNA, 19 nt, Artificial Sequence
  Description of Artificial Sequence: Synthetic oligonucleotide
aggugugcauacuggcagg

SEQ ID NO: 2226981 - RNA, 19 nt, Artificial Sequence
  Description of Artificial Sequence: Synthetic oligonucleotide
uugcaacuccuccacugug

SEQ ID NO: 2226982 - RNA, 19 nt, Artificial Sequence
  Description of Artificial Sequence: Synthetic oligonucleotide
ugugugcuaccaugcuggg

SEQ ID NO: 2226983 - RNA, 19 nt, Artificial Sequence
  Description of Artificial Sequence: Synthetic oligonucleotide
aucgaccccacuaggaauc

SEQ ID NO: 2226984 - RNA, 19 nt, Artificial Sequence
  Description of Artificial Sequence: Synthetic oligonucleotide
gaaaaugguagcagacaca

SEQ ID NO: 2226985 - RNA, 19 nt, Artificial Sequence
  Description of Artificial Sequence: Synthetic oligonucleotide
aguagaaccugugaauuuu

SEQ ID NO: 2226986 - RNA, 19 nt, Artificial Sequence
  Description of Artificial Sequence: Synthetic oligonucleotide
ccaguaacucgaaaggcgc

SEQ ID NO: 2226987 - RNA, 19 nt, Artificial Sequence
  Description of Artificial Sequence: Synthetic oligonucleotide
cuaaacaacugcccacauc

SEQ ID NO: 2226988 - RNA, 19 nt, Artificial Sequence
  Description of Artificial Sequence: Synthetic oligonucleotide
auggggaaaaugguagcag

SEQ ID NO: 2226989 - RNA, 19 nt, Artificial Sequence
  Description of Artificial Sequence: Synthetic oligonucleotide
cuccaguaacucgaaaggc

SEQ ID NO: 2226990 - RNA, 19 nt, Artificial Sequence
  Description of Artificial Sequence: Synthetic oligonucleotide
gauucuaaguagaaccugu

SEQ ID NO: 2226991 - RNA, 19 nt, Artificial Sequence
  Description of Artificial Sequence: Synthetic oligonucleotide
agcagaagcagaggaauga

SEQ ID NO: 2226992 - RNA, 19 nt, Artificial Sequence
  Description of Artificial Sequence: Synthetic oligonucleotide
auagcggugacggcugccg

SEQ ID NO: 2226993 - RNA, 19 nt, Artificial Sequence
  Description of Artificial Sequence: Synthetic oligonucleotide
cugguagauuugcaacucc

SEQ ID NO: 2226994 - RNA, 19 nt, Artificial Sequence
  Description of Artificial Sequence: Synthetic oligonucleotide
guaggauacucugcugggg

SEQ ID NO: 2226995 - RNA, 19 nt, Artificial Sequence
  Description of Artificial Sequence: Synthetic oligonucleotide
gugcauacuggcaggacag

SEQ ID NO: 2226996 - RNA, 19 nt, Artificial Sequence
  Description of Artificial Sequence: Synthetic oligonucleotide
gcucuuuggucccugcugg

SEQ ID NO: 2226997 - RNA, 19 nt, Artificial Sequence
  Description of Artificial Sequence: Synthetic oligonucleotide
ugugaaggacagccauagc

SEQ ID NO: 2226998 - RNA, 19 nt, Artificial Sequence
  Description of Artificial Sequence: Synthetic oligonucleotide
cagaaaaucgaccccacua

SEQ ID NO: 2226999 - RNA, 19 nt, Artificial Sequence
  Description of Artificial Sequence: Synthetic oligonucleotide
guaacccugauuggccugg

SEQ ID NO: 2227000 - RNA, 19 nt, Artificial Sequence
  Description of Artificial Sequence: Synthetic oligonucleotide
gcaucaaacaguagucccg

SEQ ID NO: 2227001 - RNA, 19 nt, Artificial Sequence
  Description of Artificial Sequence: Synthetic oligonucleotide
  modified_base (15)..(15): a, c, u, g, unknown or other
cuggaacagguuuancuca

SEQ ID NO: 2227002 - RNA, 19 nt, Artificial Sequence
  Description of Artificial Sequence: Synthetic oligonucleotide
gaggaaugaauagggguca

SEQ ID NO: 2227003 - RNA, 19 nt, Artificial Sequence
  Description of Artificial Sequence: Synthetic oligonucleotide
ggugaaaagugugugcuac

SEQ ID NO: 2227004 - RNA, 19 nt, Artificial Sequence
  Description of Artificial Sequence: Synthetic oligonucleotide
caaggcgaggagcaggcug

SEQ ID NO: 2227005 - RNA, 19 nt, Artificial Sequence
  Description of Artificial Sequence: Synthetic oligonucleotide
ccucaugucgcccacuugc

SEQ ID NO: 2227006 - RNA, 19 nt, Artificial Sequence
  Description of Artificial Sequence: Synthetic oligonucleotide
gcucaagaaagcuguguag

SEQ ID NO: 2227007 - RNA, 19 nt, Artificial Sequence
  Description of Artificial Sequence: Synthetic oligonucleotide
gaaccaacauacgagacau

SEQ ID NO: 2227008 - RNA, 19 nt, Artificial Sequence
  Description of Artificial Sequence: Synthetic oligonucleotide
ucacaugacagggaaccaa

SEQ ID NO: 2227009 - RNA, 19 nt, Artificial Sequence
  Description of Artificial Sequence: Synthetic oligonucleotide
aguaacucgaaaggcgcga

SEQ ID NO: 2227010 - RNA, 19 nt, Artificial Sequence
  Description of Artificial Sequence: Synthetic oligonucleotide
auucuaaguagaaccugug

SEQ ID NO: 2227011 - RNA, 19 nt, Artificial Sequence
  Description of Artificial Sequence: Synthetic oligonucleotide
aaggcgcgacguuaggaaa

SEQ ID NO: 2227012 - RNA, 19 nt, Artificial Sequence
  Description of Artificial Sequence: Synthetic oligonucleotide
ggaaccaacauacgagaca

SEQ ID NO: 2227013 - RNA, 19 nt, Artificial Sequence
  Description of Artificial Sequence: Synthetic oligonucleotide
gacagggaaccaacauacg

SEQ ID NO: 2227014 - RNA, 19 nt, Artificial Sequence
  Description of Artificial Sequence: Synthetic oligonucleotide
uggacggugugugcagugg

SEQ ID NO: 2227015 - RNA, 19 nt, Artificial Sequence
  Description of Artificial Sequence: Synthetic oligonucleotide
gaauaggggucaucucuuc

SEQ ID NO: 2227016 - RNA, 19 nt, Artificial Sequence
  Description of Artificial Sequence: Synthetic oligonucleotide
uuuggucccugcugguaga

SEQ ID NO: 2227017 - RNA, 19 nt, Artificial Sequence
  Description of Artificial Sequence: Synthetic oligonucleotide
agacgcagcucuaggacuc

SEQ ID NO: 2227018 - RNA, 19 nt, Artificial Sequence
  Description of Artificial Sequence: Synthetic oligonucleotide
gcucacuggacacugggug

SEQ ID NO: 2227019 - RNA, 19 nt, Artificial Sequence
  Description of Artificial Sequence: Synthetic oligonucleotide
cuaaguagaaccugugaau

SEQ ID NO: 2227020 - RNA, 19 nt, Artificial Sequence
  Description of Artificial Sequence: Synthetic oligonucleotide
ggugucuuuucacaugaca

SEQ ID NO: 2227021 - RNA, 19 nt, Artificial Sequence
  Description of Artificial Sequence: Synthetic oligonucleotide
ugaucuccaguaacucgaa

SEQ ID NO: 2227022 - RNA, 19 nt, Artificial Sequence
  Description of Artificial Sequence: Synthetic oligonucleotide
aauuugcaugucagacaag

SEQ ID NO: 2227023 - RNA, 19 nt, Artificial Sequence
  Description of Artificial Sequence: Synthetic oligonucleotide
gacggugugugcagugggg

SEQ ID NO: 2227024 - RNA, 19 nt, Artificial Sequence
  Description of Artificial Sequence: Synthetic oligonucleotide
acuguguaaaccaggcuau

SEQ ID NO: 2227025 - RNA, 19 nt, Artificial Sequence
  Description of Artificial Sequence: Synthetic oligonucleotide
gacguuaggaaaggugaca

SEQ ID NO: 2227026 - RNA, 19 nt, Artificial Sequence
  Description of Artificial Sequence: Synthetic oligonucleotide
gaccccacuaggaaucaug

SEQ ID NO: 2227027 - RNA, 19 nt, Artificial Sequence
  Description of Artificial Sequence: Synthetic oligonucleotide
cagaggaaugaauaggggu

SEQ ID NO: 2227028 - RNA, 19 nt, Artificial Sequence
  Description of Artificial Sequence: Synthetic oligonucleotide
gacucugcucacgucacac

SEQ ID NO: 2227029 - RNA, 19 nt, Artificial Sequence
  Description of Artificial Sequence: Synthetic oligonucleotide
gaugaggugaaaagugugu

SEQ ID NO: 2227030 - RNA, 19 nt, Artificial Sequence
  Description of Artificial Sequence: Synthetic oligonucleotide
guagaaccugugaauuuug

SEQ ID NO: 2227031 - RNA, 19 nt, Artificial Sequence
  Description of Artificial Sequence: Synthetic oligonucleotide
gccacuagcagaagcagag

SEQ ID NO: 2227032 - RNA, 19 nt, Artificial Sequence
  Description of Artificial Sequence: Synthetic oligonucleotide
acuugcagggcuacggugu

SEQ ID NO: 2227033 - RNA, 19 nt, Artificial Sequence
  Description of Artificial Sequence: Synthetic oligonucleotide
ugcauacuggcaggacagg

SEQ ID NO: 2227034 - RNA, 19 nt, Artificial Sequence
  Description of Artificial Sequence: Synthetic oligonucleotide
acuaggaaucaugacuaaa

SEQ ID NO: 2227035 - RNA, 19 nt, Artificial Sequence
  Description of Artificial Sequence: Synthetic oligonucleotide
uccucaagcuucccagguc

SEQ ID NO: 2227036 - RNA, 19 nt, Artificial Sequence
  Description of Artificial Sequence: Synthetic oligonucleotide
aaaaggccacuagcagaag

SEQ ID NO: 2227037 - RNA, 19 nt, Artificial Sequence
  Description of Artificial Sequence: Synthetic oligonucleotide
cugcucacgucacacagca

SEQ ID NO: 2227038 - RNA, 19 nt, Artificial Sequence
  Description of Artificial Sequence: Synthetic oligonucleotide
gacaagugacccauuugga

SEQ ID NO: 2227039 - RNA, 19 nt, Artificial Sequence
  Description of Artificial Sequence: Synthetic oligonucleotide
agccauagcggugacggcu

SEQ ID NO: 2227040 - RNA, 19 nt, Artificial Sequence
  Description of Artificial Sequence: Synthetic oligonucleotide
uuggacggugugugcagug

SEQ ID NO: 2227041 - RNA, 19 nt, Artificial Sequence
  Description of Artificial Sequence: Synthetic oligonucleotide
cagacacaggugugcauac

SEQ ID NO: 2227042 - RNA, 19 nt, Artificial Sequence
  Description of Artificial Sequence: Synthetic oligonucleotide
acuaaacaacugcccacau

SEQ ID NO: 2227043 - RNA, 19 nt, Artificial Sequence
  Description of Artificial Sequence: Synthetic oligonucleotide
aucgacgaccagcacgcca

SEQ ID NO: 2227044 - RNA, 19 nt, Artificial Sequence
  Description of Artificial Sequence: Synthetic oligonucleotide
gaugcucaagaaagcugug

SEQ ID NO: 2227045 - RNA, 19 nt, Artificial Sequence
  Description of Artificial Sequence: Synthetic oligonucleotide
gacccucaaggcgaggagc

SEQ ID NO: 2227046 - RNA, 19 nt, Artificial Sequence
  Description of Artificial Sequence: Synthetic oligonucleotide
aaacaacugcccacaucug

SEQ ID NO: 2227047 - RNA, 19 nt, Artificial Sequence
  Description of Artificial Sequence: Synthetic oligonucleotide
uucacaugacagggaacca

SEQ ID NO: 2227048 - RNA, 19 nt, Artificial Sequence
  Description of Artificial Sequence: Synthetic oligonucleotide
gaaaggcgcgacguuagga

SEQ ID NO: 2227049 - RNA, 19 nt, Artificial Sequence
  Description of Artificial Sequence: Synthetic oligonucleotide
ucaagcuucccaggucaug

SEQ ID NO: 2227050 - RNA, 19 nt, Artificial Sequence
  Description of Artificial Sequence: Synthetic oligonucleotide
cuugggagguccucauguc

SEQ ID NO: 2227051 - RNA, 19 nt, Artificial Sequence
  Description of Artificial Sequence: Synthetic oligonucleotide
cuguguaguaauucuuaaa

SEQ ID NO: 2227052 - RNA, 19 nt, Artificial Sequence
  Description of Artificial Sequence: Synthetic oligonucleotide
gaaaaucagggaggggcuc

SEQ ID NO: 2227053 - RNA, 19 nt, Artificial Sequence
  Description of Artificial Sequence: Synthetic oligonucleotide
aggaacucgaugauucuaa

SEQ ID NO: 2227054 - RNA, 19 nt, Artificial Sequence
  Description of Artificial Sequence: Synthetic oligonucleotide
gacagaaaaucgaccccac

SEQ ID NO: 2227055 - RNA, 19 nt, Artificial Sequence
  Description of Artificial Sequence: Synthetic oligonucleotide
gaagacaagugacccauuu

SEQ ID NO: 2227056 - RNA, 19 nt, Artificial Sequence
  Description of Artificial Sequence: Synthetic oligonucleotide
gcuacggugucuuuucaca

SEQ ID NO: 2227057 - RNA, 19 nt, Artificial Sequence
  Description of Artificial Sequence: Synthetic oligonucleotide
cugagcuaccuggaacagg

SEQ ID NO: 2227058 - RNA, 19 nt, Artificial Sequence
  Description of Artificial Sequence: Synthetic oligonucleotide
ugauuggccugggagucac

SEQ ID NO: 2227059 - RNA, 19 nt, Artificial Sequence
  Description of Artificial Sequence: Synthetic oligonucleotide
caagcuucccaggucauga

SEQ ID NO: 2227060 - RNA, 19 nt, Artificial Sequence
  Description of Artificial Sequence: Synthetic oligonucleotide
gucccgaagacaagugacc

SEQ ID NO: 2227061 - RNA, 19 nt, Artificial Sequence
  Description of Artificial Sequence: Synthetic oligonucleotide
guagucccgaagacaagug

SEQ ID NO: 2227062 - RNA, 19 nt, Artificial Sequence
  Description of Artificial Sequence: Synthetic oligonucleotide
cauuuggacggugugugca

SEQ ID NO: 2227063 - RNA, 19 nt, Artificial Sequence
  Description of Artificial Sequence: Synthetic oligonucleotide
caucaaacaguagucccga

SEQ ID NO: 2227064 - RNA, 19 nt, Artificial Sequence
  Description of Artificial Sequence: Synthetic oligonucleotide
aagcuucccaggucaugaa

SEQ ID NO: 2227065 - RNA, 19 nt, Artificial Sequence
  Description of Artificial Sequence: Synthetic oligonucleotide
cugggagucacuguguaaa

SEQ ID NO: 2227066 - RNA, 19 nt, Artificial Sequence
  Description of Artificial Sequence: Synthetic oligonucleotide
gccaggccgaccuugggag

SEQ ID NO: 2227067 - RNA, 19 nt, Artificial Sequence
  Description of Artificial Sequence: Synthetic oligonucleotide
cucaagaaagcuguguagu

SEQ ID NO: 2227068 - RNA, 19 nt, Artificial Sequence
  Description of Artificial Sequence: Synthetic oligonucleotide
acucugcucacgucacaca

SEQ ID NO: 2227069 - RNA, 19 nt, Artificial Sequence
  Description of Artificial Sequence: Synthetic oligonucleotide
auacuccugggcucccucu

SEQ ID NO: 2227070 - RNA, 19 nt, Artificial Sequence
  Description of Artificial Sequence: Synthetic oligonucleotide
gacagccauagcggugacg

SEQ ID NO: 2227071 - RNA, 19 nt, Artificial Sequence
  Description of Artificial Sequence: Synthetic oligonucleotide
ggacggugugugcaguggg

SEQ ID NO: 2227072 - RNA, 19 nt, Artificial Sequence
  Description of Artificial Sequence: Synthetic oligonucleotide
gcgacguuaggaaagguga

SEQ ID NO: 2227073 - RNA, 19 nt, Artificial Sequence
  Description of Artificial Sequence: Synthetic oligonucleotide
augguagcagacacaggug

SEQ ID NO: 2227074 - RNA, 19 nt, Artificial Sequence
  Description of Artificial Sequence: Synthetic oligonucleotide
aacccugauuggccuggga

SEQ ID NO: 2227075 - RNA, 19 nt, Artificial Sequence
  Description of Artificial Sequence: Synthetic oligonucleotide
aggccacuagcagaagcag

SEQ ID NO: 2227076 - RNA, 19 nt, Artificial Sequence
  Description of Artificial Sequence: Synthetic oligonucleotide
cucuaggacucugcucacg

SEQ ID NO: 2227077 - RNA, 19 nt, Artificial Sequence
  Description of Artificial Sequence: Synthetic oligonucleotide
ggguauggugacgaacccg

SEQ ID NO: 2227078 - RNA, 19 nt, Artificial Sequence
  Description of Artificial Sequence: Synthetic oligonucleotide
caacaauggggaaaauggu

SEQ ID NO: 2227079 - RNA, 19 nt, Artificial Sequence
  Description of Artificial Sequence: Synthetic oligonucleotide
aggggucaucucuuccuca

SEQ ID NO: 2227080 - RNA, 19 nt, Artificial Sequence
  Description of Artificial Sequence: Synthetic oligonucleotide
cacgccaggccgaccuugg

SEQ ID NO: 2227081 - RNA, 19 nt, Artificial Sequence
  Description of Artificial Sequence: Synthetic oligonucleotide
gaacccggaugcucaagaa

SEQ ID NO: 2227082 - RNA, 19 nt, Artificial Sequence
  Description of Artificial Sequence: Synthetic oligonucleotide
guaacucgaaaggcgcgac

SEQ ID NO: 2227083 - RNA, 19 nt, Artificial Sequence
  Description of Artificial Sequence: Synthetic oligonucleotide
accccacuaggaaucauga

SEQ ID NO: 2227084 - RNA, 19 nt, Artificial Sequence
  Description of Artificial Sequence: Synthetic oligonucleotide
aggugaaaagugugugcua

SEQ ID NO: 2227085 - RNA, 19 nt, Artificial Sequence
  Description of Artificial Sequence: Synthetic oligonucleotide
cuaggacucugcucacguc

SEQ ID NO: 2227086 - RNA, 19 nt, Artificial Sequence
  Description of Artificial Sequence: Synthetic oligonucleotide
gugugggucaggcaucaaa

SEQ ID NO: 2227087 - RNA, 19 nt, Artificial Sequence
  Description of Artificial Sequence: Synthetic oligonucleotide
ggggaaaaugguagcagac

SEQ ID NO: 2227088 - RNA, 19 nt, Artificial Sequence
  Description of Artificial Sequence: Synthetic oligonucleotide
cauacuccugggcucccuc

SEQ ID NO: 2227089 - RNA, 19 nt, Artificial Sequence
  Description of Artificial Sequence: Synthetic oligonucleotide
aggcgcgacguuaggaaag

SEQ ID NO: 2227090 - RNA, 19 nt, Artificial Sequence
  Description of Artificial Sequence: Synthetic oligonucleotide
acccauuuggacggugugu

SEQ ID NO: 2227091 - RNA, 19 nt, Artificial Sequence
  Description of Artificial Sequence: Synthetic oligonucleotide
cuugcagggcuacgguguc

SEQ ID NO: 2227092 - RNA, 19 nt, Artificial Sequence
  Description of Artificial Sequence: Synthetic oligonucleotide
uaacccugauuggccuggg

SEQ ID NO: 2227093 - RNA, 19 nt, Artificial Sequence
  Description of Artificial Sequence: Synthetic oligonucleotide
ggaugcucaagaaagcugu

SEQ ID NO: 2227094 - RNA, 19 nt, Artificial Sequence
  Description of Artificial Sequence: Synthetic oligonucleotide
ugcaccucaguaggauacu

SEQ ID NO: 2227095 - RNA, 19 nt, Artificial Sequence
  Description of Artificial Sequence: Synthetic oligonucleotide
gaucuccaguaacucgaaa

SEQ ID NO: 2227096 - RNA, 19 nt, Artificial Sequence
  Description of Artificial Sequence: Synthetic oligonucleotide
gaggaacucgaugauucua

SEQ ID NO: 2227097 - RNA, 19 nt, Artificial Sequence
  Description of Artificial Sequence: Synthetic oligonucleotide
ccacuaggaaucaugacua

SEQ ID NO: 2227098 - RNA, 19 nt, Artificial Sequence
  Description of Artificial Sequence: Synthetic oligonucleotide
gugacgaacccggaugcuc

SEQ ID NO: 2227099 - RNA, 19 nt, Artificial Sequence
  Description of Artificial Sequence: Synthetic oligonucleotide
gggagucacuguguaaacc

SEQ ID NO: 2227100 - RNA, 19 nt, Artificial Sequence
  Description of Artificial Sequence: Synthetic oligonucleotide
cuagcagaagcagaggaau

SEQ ID NO: 2227101 - RNA, 19 nt, Artificial Sequence
  Description of Artificial Sequence: Synthetic oligonucleotide
gauuugcaacuccuccacu

SEQ ID NO: 2227102 - RNA, 19 nt, Artificial Sequence
  Description of Artificial Sequence: Synthetic oligonucleotide
gugggguauggugacgaac

SEQ ID NO: 2227103 - RNA, 19 nt, Artificial Sequence
  Description of Artificial Sequence: Synthetic oligonucleotide
cuugaacucacagacugau

SEQ ID NO: 2227104 - RNA, 19 nt, Artificial Sequence
  Description of Artificial Sequence: Synthetic oligonucleotide
acgucacacagcaucuggu

SEQ ID NO: 2227105 - RNA, 19 nt, Artificial Sequence
  Description of Artificial Sequence: Synthetic oligonucleotide
cuucccaggucaugaaugu

SEQ ID NO: 2227106 - RNA, 19 nt, Artificial Sequence
  Description of Artificial Sequence: Synthetic oligonucleotide
cucacgucacacagcaucu

SEQ ID NO: 2227107 - RNA, 19 nt, Artificial Sequence
  Description of Artificial Sequence: Synthetic oligonucleotide
acggugugugcaguggggu

SEQ ID NO: 2227108 - RNA, 19 nt, Artificial Sequence
  Description of Artificial Sequence: Synthetic oligonucleotide
caugacagggaaccaacau

SEQ ID NO: 2227109 - RNA, 19 nt, Artificial Sequence
  Description of Artificial Sequence: Synthetic oligonucleotide
cccauuuggacggugugug

SEQ ID NO: 2227110 - RNA, 19 nt, Artificial Sequence
  Description of Artificial Sequence: Synthetic oligonucleotide
ugcagggcuacggugucuu

SEQ ID NO: 2227111 - RNA, 19 nt, Artificial Sequence
  Description of Artificial Sequence: Synthetic oligonucleotide
cauagcggugacggcugcc

SEQ ID NO: 2227112 - RNA, 19 nt, Artificial Sequence
  Description of Artificial Sequence: Synthetic oligonucleotide
ggcuacggugucuuuucac

SEQ ID NO: 2227113 - RNA, 19 nt, Artificial Sequence
  Description of Artificial Sequence: Synthetic oligonucleotide
gacgaccagcacgccaggc

SEQ ID NO: 2227114 - RNA, 19 nt, Artificial Sequence
  Description of Artificial Sequence: Synthetic oligonucleotide
cccacuugcagggcuacgg

SEQ ID NO: 2227115 - RNA, 19 nt, Artificial Sequence
  Description of Artificial Sequence: Synthetic oligonucleotide
ucgaccccacuaggaauca

SEQ ID NO: 2227116 - RNA, 19 nt, Artificial Sequence
  Description of Artificial Sequence: Synthetic oligonucleotide
ggcgcgacguuaggaaagg

SEQ ID NO: 2227117 - RNA, 19 nt, Artificial Sequence
  Description of Artificial Sequence: Synthetic oligonucleotide
acucgaaaggcgcgacguu

SEQ ID NO: 2227118 - RNA, 19 nt, Artificial Sequence
  Description of Artificial Sequence: Synthetic oligonucleotide
cugugaauuuugagaggaa

SEQ ID NO: 2227119 - RNA, 19 nt, Artificial Sequence
  Description of Artificial Sequence: Synthetic oligonucleotide
ccucaagcuucccagguca

SEQ ID NO: 2227120 - RNA, 19 nt, Artificial Sequence
  Description of Artificial Sequence: Synthetic oligonucleotide
acugugaaggacagccaua

SEQ ID NO: 2227121 - RNA, 19 nt, Artificial Sequence
  Description of Artificial Sequence: Synthetic oligonucleotide
gggaaccaacauacgagac

SEQ ID NO: 2227122 - RNA, 19 nt, Artificial Sequence
  Description of Artificial Sequence: Synthetic oligonucleotide
  modified_base (18)..(18): a, c, u, g, unknown or other
uaccuggaacagguuuanc

SEQ ID NO: 2227123 - RNA, 19 nt, Artificial Sequence
  Description of Artificial Sequence: Synthetic oligonucleotide
ccucaaggcgaggagcagg

SEQ ID NO: 2227124 - RNA, 19 nt, Artificial Sequence
  Description of Artificial Sequence: Synthetic oligonucleotide
acgccaggccgaccuuggg

SEQ ID NO: 2227125 - RNA, 19 nt, Artificial Sequence
  Description of Artificial Sequence: Synthetic oligonucleotide
ugcuaccaugcugggcucu

SEQ ID NO: 2227126 - RNA, 19 nt, Artificial Sequence
  Description of Artificial Sequence: Synthetic oligonucleotide
cccggaugcucaagaaagc

SEQ ID NO: 2227127 - RNA, 19 nt, Artificial Sequence
  Description of Artificial Sequence: Synthetic oligonucleotide
gugugcuaccaugcugggc

SEQ ID NO: 2227128 - RNA, 19 nt, Artificial Sequence
  Description of Artificial Sequence: Synthetic oligonucleotide
cgaccagcacgccaggccg

SEQ ID NO: 2227129 - RNA, 19 nt, Artificial Sequence
  Description of Artificial Sequence: Synthetic oligonucleotide
gucaggcaucaaacaguag

SEQ ID NO: 2227130 - RNA, 19 nt, Artificial Sequence
  Description of Artificial Sequence: Synthetic oligonucleotide
cucgaaaggcgcgacguua

SEQ ID NO: 2227131 - RNA, 19 nt, Artificial Sequence
  Description of Artificial Sequence: Synthetic oligonucleotide
ggucugggagacccucaag

SEQ ID NO: 2227132 - RNA, 19 nt, Artificial Sequence
  Description of Artificial Sequence: Synthetic oligonucleotide
ggucaggcaucaaacagua

SEQ ID NO: 2227133 - RNA, 19 nt, Artificial Sequence
  Description of Artificial Sequence: Synthetic oligonucleotide
cagccauagcggugacggc

SEQ ID NO: 2227134 - RNA, 19 nt, Artificial Sequence
  Description of Artificial Sequence: Synthetic oligonucleotide
cagacgcagcucuaggacu

SEQ ID NO: 2227135 - RNA, 19 nt, Artificial Sequence
  Description of Artificial Sequence: Synthetic oligonucleotide
cgcgacguuaggaaaggug

SEQ ID NO: 2227136 - RNA, 19 nt, Artificial Sequence
  Description of Artificial Sequence: Synthetic oligonucleotide
cggaugcucaagaaagcug

SEQ ID NO: 2227137 - RNA, 19 nt, Artificial Sequence
  Description of Artificial Sequence: Synthetic oligonucleotide
cacugugaaggacagccau

SEQ ID NO: 2227138 - RNA, 19 nt, Artificial Sequence
  Description of Artificial Sequence: Synthetic oligonucleotide
acggcugccgcaggaucag

SEQ ID NO: 2227139 - RNA, 19 nt, Artificial Sequence
  Description of Artificial Sequence: Synthetic oligonucleotide
uucccaggucaugaaugua

SEQ ID NO: 2227140 - RNA, 19 nt, Artificial Sequence
  Description of Artificial Sequence: Synthetic oligonucleotide
ucgcccacuugcagggcua

SEQ ID NO: 2227141 - RNA, 19 nt, Artificial Sequence
  Description of Artificial Sequence: Synthetic oligonucleotide
ccauuuggacggugugugc

SEQ ID NO: 2227142 - RNA, 19 nt, Artificial Sequence
  Description of Artificial Sequence: Synthetic oligonucleotide
cuaccaugcugggcucuag

SEQ ID NO: 2227143 - RNA, 19 nt, Artificial Sequence
  Description of Artificial Sequence: Synthetic oligonucleotide
acgaacccggaugcucaag

SEQ ID NO: 2227144 - RNA, 19 nt, Artificial Sequence
  Description of Artificial Sequence: Synthetic oligonucleotide
ucaaggcgaggagcaggcu

SEQ ID NO: 2227145 - RNA, 19 nt, Artificial Sequence
  Description of Artificial Sequence: Synthetic oligonucleotide
  modified_base (19)..(19): a, c, u, g, unknown or other
cuaccuggaacagguuuan

SEQ ID NO: 2227146 - RNA, 19 nt, Artificial Sequence
  Description of Artificial Sequence: Synthetic oligonucleotide
gacgaacccggaugcucaa

SEQ ID NO: 2227147 - RNA, 19 nt, Artificial Sequence
  Description of Artificial Sequence: Synthetic oligonucleotide
gugugugcagugggguaug

SEQ ID NO: 2227148 - RNA, 19 nt, Artificial Sequence
  Description of Artificial Sequence: Synthetic oligonucleotide
cgaugauucuaaguagaac

SEQ ID NO: 2227149 - RNA, 19 nt, Artificial Sequence
  Description of Artificial Sequence: Synthetic oligonucleotide
  modified_base (13)..(13): a, c, u, g, unknown or other
ggaacagguuuancucaac

SEQ ID NO: 2227150 - RNA, 19 nt, Artificial Sequence
  Description of Artificial Sequence: Synthetic oligonucleotide
ggggucaucucuuccucaa

SEQ ID NO: 2227151 - RNA, 19 nt, Artificial Sequence
  Description of Artificial Sequence: Synthetic oligonucleotide
cuacggugucuuuucacau

SEQ ID NO: 2227152 - RNA, 19 nt, Artificial Sequence
  Description of Artificial Sequence: Synthetic oligonucleotide
caccucaguaggauacucu

SEQ ID NO: 2227153 - RNA, 19 nt, Artificial Sequence
  Description of Artificial Sequence: Synthetic oligonucleotide
ugcucacgucacacagcau

SEQ ID NO: 2227154 - RNA, 19 nt, Artificial Sequence
  Description of Artificial Sequence: Synthetic oligonucleotide
gcuaccuggaacagguuua

SEQ ID NO: 2227155 - RNA, 19 nt, Artificial Sequence
  Description of Artificial Sequence: Synthetic oligonucleotide
cgacguuaggaaaggugac

SEQ ID NO: 2227156 - RNA, 19 nt, Artificial Sequence
  Description of Artificial Sequence: Synthetic oligonucleotide
uugcagggcuacggugucu

SEQ ID NO: 2227157 - RNA, 19 nt, Artificial Sequence
  Description of Artificial Sequence: Synthetic oligonucleotide
cugugugggucaggcauca

SEQ ID NO: 2227158 - RNA, 19 nt, Artificial Sequence
  Description of Artificial Sequence: Synthetic oligonucleotide
ggugacggcugccgcagga

SEQ ID NO: 2227159 - RNA, 19 nt, Artificial Sequence
  Description of Artificial Sequence: Synthetic oligonucleotide
acagacugaugaggugaaa

SEQ ID NO: 2227160 - RNA, 19 nt, Artificial Sequence
  Description of Artificial Sequence: Synthetic oligonucleotide
ccacuagcagaagcagagg

SEQ ID NO: 2227161 - RNA, 19 nt, Artificial Sequence
  Description of Artificial Sequence: Synthetic oligonucleotide
ugucgcccacuugcagggc

SEQ ID NO: 2227162 - RNA, 19 nt, Artificial Sequence
  Description of Artificial Sequence: Synthetic oligonucleotide
gccgcaggaucagacgcag

SEQ ID NO: 2227163 - RNA, 19 nt, Artificial Sequence
  Description of Artificial Sequence: Synthetic oligonucleotide
gggcucuaggacaucaucu

SEQ ID NO: 2227164 - RNA, 19 nt, Artificial Sequence
  Description of Artificial Sequence: Synthetic oligonucleotide
agugacccauuuggacggu

SEQ ID NO: 2227165 - RNA, 19 nt, Artificial Sequence
  Description of Artificial Sequence: Synthetic oligonucleotide
guauggugacgaacccgga

SEQ ID NO: 2227166 - RNA, 19 nt, Artificial Sequence
  Description of Artificial Sequence: Synthetic oligonucleotide
gugcuaccaugcugggcuc

SEQ ID NO: 2227167 - RNA, 19 nt, Artificial Sequence
  Description of Artificial Sequence: Synthetic oligonucleotide
gcugggcucuaggacauca

SEQ ID NO: 2227168 - RNA, 19 nt, Artificial Sequence
  Description of Artificial Sequence: Synthetic oligonucleotide
ggaggaacucgaugauucu

SEQ ID NO: 2227169 - RNA, 19 nt, Artificial Sequence
  Description of Artificial Sequence: Synthetic oligonucleotide
aggccgaccuugggagguc

SEQ ID NO: 2227170 - RNA, 19 nt, Artificial Sequence
  Description of Artificial Sequence: Synthetic oligonucleotide
ccugagcuaccuggaacag

SEQ ID NO: 2227171 - RNA, 19 nt, Artificial Sequence
  Description of Artificial Sequence: Synthetic oligonucleotide
cguuaggaaaggugacauc

SEQ ID NO: 2227172 - RNA, 19 nt, Artificial Sequence
  Description of Artificial Sequence: Synthetic oligonucleotide
gucagacaagacagaaaau

SEQ ID NO: 2227173 - RNA, 19 nt, Artificial Sequence
  Description of Artificial Sequence: Synthetic oligonucleotide
gcagcucuaggacucugcu

SEQ ID NO: 2227174 - RNA, 19 nt, Artificial Sequence
  Description of Artificial Sequence: Synthetic oligonucleotide
gucgcccacuugcagggcu

SEQ ID NO: 2227175 - RNA, 19 nt, Artificial Sequence
  Description of Artificial Sequence: Synthetic oligonucleotide
ccaggccgaccuugggagg

SEQ ID NO: 2227176 - RNA, 19 nt, Artificial Sequence
  Description of Artificial Sequence: Synthetic oligonucleotide
cgcagcucuaggacucugc

SEQ ID NO: 2227177 - RNA, 19 nt, Artificial Sequence
  Description of Artificial Sequence: Synthetic oligonucleotide
ggccacuagcagaagcaga

SEQ ID NO: 2227178 - RNA, 19 nt, Artificial Sequence
  Description of Artificial Sequence: Synthetic oligonucleotide
caucgacgaccagcacgcc

SEQ ID NO: 2227179 - RNA, 19 nt, Artificial Sequence
  Description of Artificial Sequence: Synthetic oligonucleotide
gcugcaccucaguaggaua

SEQ ID NO: 2227180 - RNA, 19 nt, Artificial Sequence
  Description of Artificial Sequence: Synthetic oligonucleotide
ggcugccgcaggaucagac

SEQ ID NO: 2227181 - RNA, 19 nt, Artificial Sequence
  Description of Artificial Sequence: Synthetic oligonucleotide
gaccagcacgccaggccga

SEQ ID NO: 2227182 - RNA, 19 nt, Artificial Sequence
  Description of Artificial Sequence: Synthetic oligonucleotide
cagcacgccaggccgaccu

SEQ ID NO: 2227183 - RNA, 19 nt, Artificial Sequence
  Description of Artificial Sequence: Synthetic oligonucleotide
cgaaaggcgcgacguuagg

SEQ ID NO: 2227184 - RNA, 19 nt, Artificial Sequence
  Description of Artificial Sequence: Synthetic oligonucleotide
gggagacccucaaggcgag

SEQ ID NO: 2227185 - RNA, 19 nt, Artificial Sequence
  Description of Artificial Sequence: Synthetic oligonucleotide
ugugugggucaggcaucaa

SEQ ID NO: 2227186 - RNA, 19 nt, Artificial Sequence
  Description of Artificial Sequence: Synthetic oligonucleotide
cccgaagacaagugaccca

SEQ ID NO: 2227187 - RNA, 19 nt, Artificial Sequence
  Description of Artificial Sequence: Synthetic oligonucleotide
ggacucugcucacgucaca

SEQ ID NO: 2227188 - RNA, 19 nt, Artificial Sequence
  Description of Artificial Sequence: Synthetic oligonucleotide
ggugugugcagugggguau

SEQ ID NO: 2227189 - RNA, 19 nt, Artificial Sequence
  Description of Artificial Sequence: Synthetic oligonucleotide
cgaacccggaugcucaaga

SEQ ID NO: 2227190 - RNA, 19 nt, Artificial Sequence
  Description of Artificial Sequence: Synthetic oligonucleotide
gcuugaacagugacacaua

SEQ ID NO: 2227191 - RNA, 19 nt, Artificial Sequence
  Description of Artificial Sequence: Synthetic oligonucleotide
agcacgccaggccgaccuu

SEQ ID NO: 2227192 - RNA, 19 nt, Artificial Sequence
  Description of Artificial Sequence: Synthetic oligonucleotide
ggagacccucaaggcgagg

SEQ ID NO: 2227193 - RNA, 19 nt, Artificial Sequence
  Description of Artificial Sequence: Synthetic oligonucleotide
ccacugugaaggacagcca

SEQ ID NO: 2227194 - RNA, 19 nt, Artificial Sequence
  Description of Artificial Sequence: Synthetic oligonucleotide
gggcuacggugucuuuuca

SEQ ID NO: 2227195 - RNA, 19 nt, Artificial Sequence
  Description of Artificial Sequence: Synthetic oligonucleotide
cucaagcuucccaggucau

SEQ ID NO: 2227196 - RNA, 19 nt, Artificial Sequence
  Description of Artificial Sequence: Synthetic oligonucleotide
cccugauuggccugggagu

SEQ ID NO: 2227197 - RNA, 19 nt, Artificial Sequence
  Description of Artificial Sequence: Synthetic oligonucleotide
aggcgaggagcaggcugcu

SEQ ID NO: 2227198 - RNA, 19 nt, Artificial Sequence
  Description of Artificial Sequence: Synthetic oligonucleotide
gccugggagucacugugua

SEQ ID NO: 2227199 - RNA, 19 nt, Artificial Sequence
  Description of Artificial Sequence: Synthetic oligonucleotide
gcacgccaggccgaccuug

SEQ ID NO: 2227200 - RNA, 19 nt, Artificial Sequence
  Description of Artificial Sequence: Synthetic oligonucleotide
ggaaagccacuuggggaaa

SEQ ID NO: 2227201 - RNA, 19 nt, Artificial Sequence
  Description of Artificial Sequence: Synthetic oligonucleotide
ccaacauacgagacaugau

SEQ ID NO: 2227202 - RNA, 19 nt, Artificial Sequence
  Description of Artificial Sequence: Synthetic oligonucleotide
ggccgaccuugggaggucc

SEQ ID NO: 2227203 - RNA, 19 nt, Artificial Sequence
  Description of Artificial Sequence: Synthetic oligonucleotide
ccgaagacaagugacccau

SEQ ID NO: 2227204 - RNA, 19 nt, Artificial Sequence
  Description of Artificial Sequence: Synthetic oligonucleotide
caggccgaccuugggaggu

SEQ ID NO: 2227205 - RNA, 19 nt, Artificial Sequence
  Description of Artificial Sequence: Synthetic oligonucleotide
cggugucuuuucacaugac

SEQ ID NO: 2227206 - RNA, 19 nt, Artificial Sequence
  Description of Artificial Sequence: Synthetic oligonucleotide
gggcucuuuggucccugcu

SEQ ID NO: 2227207 - RNA, 19 nt, Artificial Sequence
  Description of Artificial Sequence: Synthetic oligonucleotide
gcuaccaugcugggcucua

SEQ ID NO: 2227208 - RNA, 19 nt, Artificial Sequence
  Description of Artificial Sequence: Synthetic oligonucleotide
gugacggcugccgcaggau

SEQ ID NO: 2227209 - RNA, 19 nt, Artificial Sequence
  Description of Artificial Sequence: Synthetic oligonucleotide
cgacgaccagcacgccagg

SEQ ID NO: 2227210 - RNA, 19 nt, Artificial Sequence
  Description of Artificial Sequence: Synthetic oligonucleotide
ggugacgaacccggaugcu

SEQ ID NO: 2227211 - RNA, 19 nt, Artificial Sequence
  Description of Artificial Sequence: Synthetic oligonucleotide
cgaccuugggagguccuca

SEQ ID NO: 2227212 - RNA, 19 nt, Artificial Sequence
  Description of Artificial Sequence: Synthetic oligonucleotide
gagcuaccuggaacagguu

SEQ ID NO: 2227213 - RNA, 19 nt, Artificial Sequence
  Description of Artificial Sequence: Synthetic oligonucleotide
ggcgaggagcaggcugcuc

SEQ ID NO: 2227214 - RNA, 19 nt, Artificial Sequence
  Description of Artificial Sequence: Synthetic oligonucleotide
cggugacggcugccgcagg

SEQ ID NO: 2227215 - RNA, 19 nt, Artificial Sequence
  Description of Artificial Sequence: Synthetic oligonucleotide
cgcccacuugcagggcuac

SEQ ID NO: 2227216 - RNA, 19 nt, Artificial Sequence
  Description of Artificial Sequence: Synthetic oligonucleotide
gcgcgacguuaggaaaggu

SEQ ID NO: 2227217 - RNA, 19 nt, Artificial Sequence
  Description of Artificial Sequence: Synthetic oligonucleotide
gcagggcuacggugucuuu

SEQ ID NO: 2227218 - RNA, 19 nt, Artificial Sequence
  Description of Artificial Sequence: Synthetic oligonucleotide
gccgaccuugggagguccu

SEQ ID NO: 2227219 - RNA, 19 nt, Artificial Sequence
  Description of Artificial Sequence: Synthetic oligonucleotide
cgaagacaagugacccauu

SEQ ID NO: 2227220 - RNA, 19 nt, Artificial Sequence
  Description of Artificial Sequence: Synthetic oligonucleotide
cggcugccgcaggaucaga

SEQ ID NO: 2227221 - RNA, 19 nt, Artificial Sequence
  Description of Artificial Sequence: Synthetic oligonucleotide
cgaccccacuaggaaucau

SEQ ID NO: 2227222 - RNA, 19 nt, Artificial Sequence
  Description of Artificial Sequence: Synthetic oligonucleotide
aaaagucagagucaaagcc

SEQ ID NO: 2227223 - RNA, 19 nt, Artificial Sequence
  Description of Artificial Sequence: Synthetic oligonucleotide
ugugcuuugaagauaauag

SEQ ID NO: 2227224 - RNA, 19 nt, Artificial Sequence
  Description of Artificial Sequence: Synthetic oligonucleotide
aacaacuaauaaccaaugc

SEQ ID NO: 2227225 - RNA, 19 nt, Artificial Sequence
  Description of Artificial Sequence: Synthetic oligonucleotide
aaauaaagugcuuucuaag

SEQ ID NO: 2227226 - RNA, 19 nt, Artificial Sequence
  Description of Artificial Sequence: Synthetic oligonucleotide
auauuagccagguacacac

SEQ ID NO: 2227227 - RNA, 19 nt, Artificial Sequence
  Description of Artificial Sequence: Synthetic oligonucleotide
agugauucuuguuaguagc

SEQ ID NO: 2227228 - RNA, 19 nt, Artificial Sequence
  Description of Artificial Sequence: Synthetic oligonucleotide
ucacugauaccuaacacgg

SEQ ID NO: 2227229 - RNA, 19 nt, Artificial Sequence
  Description of Artificial Sequence: Synthetic oligonucleotide
aauggcgaggguuagguag

SEQ ID NO: 2227230 - RNA, 19 nt, Artificial Sequence
  Description of Artificial Sequence: Synthetic oligonucleotide
acuaauaaccaaugcagcg

SEQ ID NO: 2227231 - RNA, 19 nt, Artificial Sequence
  Description of Artificial Sequence: Synthetic oligonucleotide
caacuaauaaccaaugcag

SEQ ID NO: 2227232 - RNA, 19 nt, Artificial Sequence
  Description of Artificial Sequence: Synthetic oligonucleotide
agugcuuucuaagaggucc

SEQ ID NO: 2227233 - RNA, 19 nt, Artificial Sequence
  Description of Artificial Sequence: Synthetic oligonucleotide
aacugucaccuucaaaugg

SEQ ID NO: 2227234 - RNA, 19 nt, Artificial Sequence
  Description of Artificial Sequence: Synthetic oligonucleotide
acaacuaauaaccaaugca

SEQ ID NO: 2227235 - RNA, 19 nt, Artificial Sequence
  Description of Artificial Sequence: Synthetic oligonucleotide
aacuaauaaccaaugcagc

SEQ ID NO: 2227236 - RNA, 19 nt, Artificial Sequence
  Description of Artificial Sequence: Synthetic oligonucleotide
guaaaguuaggcaucaccg

SEQ ID NO: 2227237 - RNA, 19 nt, Artificial Sequence
  Description of Artificial Sequence: Synthetic oligonucleotide
uugguauacuuucugaucu

SEQ ID NO: 2227238 - RNA, 19 nt, Artificial Sequence
  Description of Artificial Sequence: Synthetic oligonucleotide
ugucgcacaaacacggugg

SEQ ID NO: 2227239 - RNA, 19 nt, Artificial Sequence
  Description of Artificial Sequence: Synthetic oligonucleotide
uaaaguuaggcaucaccgg

SEQ ID NO: 2227240 - RNA, 19 nt, Artificial Sequence
  Description of Artificial Sequence: Synthetic oligonucleotide
ugugaauaugcacuguaca

SEQ ID NO: 2227241 - RNA, 19 nt, Artificial Sequence
  Description of Artificial Sequence: Synthetic oligonucleotide
aaaguuaggcaucaccggu

SEQ ID NO: 2227242 - RNA, 19 nt, Artificial Sequence
  Description of Artificial Sequence: Synthetic oligonucleotide
uuaguagcaguuuggagca

SEQ ID NO: 2227243 - RNA, 19 nt, Artificial Sequence
  Description of Artificial Sequence: Synthetic oligonucleotide
agaaugguacaccagguug

SEQ ID NO: 2227244 - RNA, 19 nt, Artificial Sequence
  Description of Artificial Sequence: Synthetic oligonucleotide
cugaucuguacacucaugg

SEQ ID NO: 2227245 - RNA, 19 nt, Artificial Sequence
  Description of Artificial Sequence: Synthetic oligonucleotide
aaagggcagccauucacac

SEQ ID NO: 2227246 - RNA, 19 nt, Artificial Sequence
  Description of Artificial Sequence: Synthetic oligonucleotide
uauacuuucugaucuguac

SEQ ID NO: 2227247 - RNA, 19 nt, Artificial Sequence
  Description of Artificial Sequence: Synthetic oligonucleotide
ucuuaauaucaccaucccc

SEQ ID NO: 2227248 - RNA, 19 nt, Artificial Sequence
  Description of Artificial Sequence: Synthetic oligonucleotide
uucagaugugaagugaggg

SEQ ID NO: 2227249 - RNA, 19 nt, Artificial Sequence
  Description of Artificial Sequence: Synthetic oligonucleotide
aucaucgaugcauucacuc

SEQ ID NO: 2227250 - RNA, 19 nt, Artificial Sequence
  Description of Artificial Sequence: Synthetic oligonucleotide
augcacuguacauauuagc

SEQ ID NO: 2227251 - RNA, 19 nt, Artificial Sequence
  Description of Artificial Sequence: Synthetic oligonucleotide
aaauuagguaacaauacaa

SEQ ID NO: 2227252 - RNA, 19 nt, Artificial Sequence
  Description of Artificial Sequence: Synthetic oligonucleotide
cuuguuaguagcaguuugg

SEQ ID NO: 2227253 - RNA, 19 nt, Artificial Sequence
  Description of Artificial Sequence: Synthetic oligonucleotide
cuaauaaccaaugcagcgg

SEQ ID NO: 2227254 - RNA, 19 nt, Artificial Sequence
  Description of Artificial Sequence: Synthetic oligonucleotide
aagugagggacacgaaauc

SEQ ID NO: 2227255 - RNA, 19 nt, Artificial Sequence
  Description of Artificial Sequence: Synthetic oligonucleotide
acugauaccuaacacggca

SEQ ID NO: 2227256 - RNA, 19 nt, Artificial Sequence
  Description of Artificial Sequence: Synthetic oligonucleotide
uuuggagcaguuccucugg

SEQ ID NO: 2227257 - RNA, 19 nt, Artificial Sequence
  Description of Artificial Sequence: Synthetic oligonucleotide
aaugguacaccagguugcc

SEQ ID NO: 2227258 - RNA, 19 nt, Artificial Sequence
  Description of Artificial Sequence: Synthetic oligonucleotide
uaugcacuguacauauuag

SEQ ID NO: 2227259 - RNA, 19 nt, Artificial Sequence
  Description of Artificial Sequence: Synthetic oligonucleotide
aaucaguagcaaugggaag

SEQ ID NO: 2227260 - RNA, 19 nt, Artificial Sequence
  Description of Artificial Sequence: Synthetic oligonucleotide
uuucuaagaggucccuagg

SEQ ID NO: 2227261 - RNA, 19 nt, Artificial Sequence
  Description of Artificial Sequence: Synthetic oligonucleotide
ugcaucucuacguagcggc

SEQ ID NO: 2227262 - RNA, 19 nt, Artificial Sequence
  Description of Artificial Sequence: Synthetic oligonucleotide
uaauaaccaaugcagcggu

SEQ ID NO: 2227263 - RNA, 19 nt, Artificial Sequence
  Description of Artificial Sequence: Synthetic oligonucleotide
agggacacgaaaucugugg

SEQ ID NO: 2227264 - RNA, 19 nt, Artificial Sequence
  Description of Artificial Sequence: Synthetic oligonucleotide
ugugaagugagggacacga

SEQ ID NO: 2227265 - RNA, 19 nt, Artificial Sequence
  Description of Artificial Sequence: Synthetic oligonucleotide
uaccuaacacggcagaaug

SEQ ID NO: 2227266 - RNA, 19 nt, Artificial Sequence
  Description of Artificial Sequence: Synthetic oligonucleotide
guagcuacaaacugucacc

SEQ ID NO: 2227267 - RNA, 19 nt, Artificial Sequence
  Description of Artificial Sequence: Synthetic oligonucleotide
uaacacggcagaaugguac

SEQ ID NO: 2227268 - RNA, 19 nt, Artificial Sequence
  Description of Artificial Sequence: Synthetic oligonucleotide
aauuagguaacaauacaaa

SEQ ID NO: 2227269 - RNA, 19 nt, Artificial Sequence
  Description of Artificial Sequence: Synthetic oligonucleotide
aggaagaacacccagggua

SEQ ID NO: 2227270 - RNA, 19 nt, Artificial Sequence
  Description of Artificial Sequence: Synthetic oligonucleotide
cuaagaggucccuaggaag

SEQ ID NO: 2227271 - RNA, 19 nt, Artificial Sequence
  Description of Artificial Sequence: Synthetic oligonucleotide
aauagugauucuuguuagu

SEQ ID NO: 2227272 - RNA, 19 nt, Artificial Sequence
  Description of Artificial Sequence: Synthetic oligonucleotide
ugcauucacucaaagggca

SEQ ID NO: 2227273 - RNA, 19 nt, Artificial Sequence
  Description of Artificial Sequence: Synthetic oligonucleotide
uguuaguagcaguuuggag

SEQ ID NO: 2227274 - RNA, 19 nt, Artificial Sequence
  Description of Artificial Sequence: Synthetic oligonucleotide
gacacaagacuggaaauag

SEQ ID NO: 2227275 - RNA, 19 nt, Artificial Sequence
  Description of Artificial Sequence: Synthetic oligonucleotide
aaguucgcugggugcagcc

SEQ ID NO: 2227276 - RNA, 19 nt, Artificial Sequence
  Description of Artificial Sequence: Synthetic oligonucleotide
uagauguccuuucacuggc

SEQ ID NO: 2227277 - RNA, 19 nt, Artificial Sequence
  Description of Artificial Sequence: Synthetic oligonucleotide
gaugugaaggcucuuaaua

SEQ ID NO: 2227278 - RNA, 19 nt, Artificial Sequence
  Description of Artificial Sequence: Synthetic oligonucleotide
auacuuucugaucuguaca

SEQ ID NO: 2227279 - RNA, 19 nt, Artificial Sequence
  Description of Artificial Sequence: Synthetic oligonucleotide
auaugcacuguacauauua

SEQ ID NO: 2227280 - RNA, 19 nt, Artificial Sequence
  Description of Artificial Sequence: Synthetic oligonucleotide
ucuaagaggucccuaggaa

SEQ ID NO: 2227281 - RNA, 19 nt, Artificial Sequence
  Description of Artificial Sequence: Synthetic oligonucleotide
uucuaagaggucccuagga

SEQ ID NO: 2227282 - RNA, 19 nt, Artificial Sequence
  Description of Artificial Sequence: Synthetic oligonucleotide
aaggcucuuaauaucacca

SEQ ID NO: 2227283 - RNA, 19 nt, Artificial Sequence
  Description of Artificial Sequence: Synthetic oligonucleotide
uauguagcgggcaugcauc

SEQ ID NO: 2227284 - RNA, 19 nt, Artificial Sequence
  Description of Artificial Sequence: Synthetic oligonucleotide
uucaaauggauggcugugg

SEQ ID NO: 2227285 - RNA, 19 nt, Artificial Sequence
  Description of Artificial Sequence: Synthetic oligonucleotide
ucaggcauucgaauggcga

SEQ ID NO: 2227286 - RNA, 19 nt, Artificial Sequence
  Description of Artificial Sequence: Synthetic oligonucleotide
uuucugaucuguacacuca

SEQ ID NO: 2227287 - RNA, 19 nt, Artificial Sequence
  Description of Artificial Sequence: Synthetic oligonucleotide
aagacacaagacuggaaau

SEQ ID NO: 2227288 - RNA, 19 nt, Artificial Sequence
  Description of Artificial Sequence: Synthetic oligonucleotide
gguaaaguuaggcaucacc

SEQ ID NO: 2227289 - RNA, 19 nt, Artificial Sequence
  Description of Artificial Sequence: Synthetic oligonucleotide
cuuuccucauaggacaugg

SEQ ID NO: 2227290 - RNA, 19 nt, Artificial Sequence
  Description of Artificial Sequence: Synthetic oligonucleotide
cuugguauacuuucugauc

SEQ ID NO: 2227291 - RNA, 19 nt, Artificial Sequence
  Description of Artificial Sequence: Synthetic oligonucleotide
ugccuugcaaaagucagag

SEQ ID NO: 2227292 - RNA, 19 nt, Artificial Sequence
  Description of Artificial Sequence: Synthetic oligonucleotide
cacacauaaauauuuaaua

SEQ ID NO: 2227293 - RNA, 19 nt, Artificial Sequence
  Description of Artificial Sequence: Synthetic oligonucleotide
gaaugguacaccagguugc

SEQ ID NO: 2227294 - RNA, 19 nt, Artificial Sequence
  Description of Artificial Sequence: Synthetic oligonucleotide
ugugaaggcucuuaauauc

SEQ ID NO: 2227295 - RNA, 19 nt, Artificial Sequence
  Description of Artificial Sequence: Synthetic oligonucleotide
gcaaaagucagagucaaag

SEQ ID NO: 2227296 - RNA, 19 nt, Artificial Sequence
  Description of Artificial Sequence: Synthetic oligonucleotide
ucugugaauaugcacugua

SEQ ID NO: 2227297 - RNA, 19 nt, Artificial Sequence
  Description of Artificial Sequence: Synthetic oligonucleotide
ucaaauggauggcuguggu

SEQ ID NO: 2227298 - RNA, 19 nt, Artificial Sequence
  Description of Artificial Sequence: Synthetic oligonucleotide
aggcuuuugaaguucgcug

SEQ ID NO: 2227299 - RNA, 19 nt, Artificial Sequence
  Description of Artificial Sequence: Synthetic oligonucleotide
cuaggaagggacauuauaa

SEQ ID NO: 2227300 - RNA, 19 nt, Artificial Sequence
  Description of Artificial Sequence: Synthetic oligonucleotide
ugauucuuguuaguagcag

SEQ ID NO: 2227301 - RNA, 19 nt, Artificial Sequence
  Description of Artificial Sequence: Synthetic oligonucleotide
aacacggcagaaugguaca

SEQ ID NO: 2227302 - RNA, 19 nt, Artificial Sequence
  Description of Artificial Sequence: Synthetic oligonucleotide
acauauuagccagguacac

SEQ ID NO: 2227303 - RNA, 19 nt, Artificial Sequence
  Description of Artificial Sequence: Synthetic oligonucleotide
ggcuuuugaaguucgcugg

SEQ ID NO: 2227304 - RNA, 19 nt, Artificial Sequence
  Description of Artificial Sequence: Synthetic oligonucleotide
cauggccaagucuucaggc

SEQ ID NO: 2227305 - RNA, 19 nt, Artificial Sequence
  Description of Artificial Sequence: Synthetic oligonucleotide
uguguagccaggccaggcc

SEQ ID NO: 2227306 - RNA, 19 nt, Artificial Sequence
  Description of Artificial Sequence: Synthetic oligonucleotide
gguggugccguccacaaag

SEQ ID NO: 2227307 - RNA, 19 nt, Artificial Sequence
  Description of Artificial Sequence: Synthetic oligonucleotide
aaccaaugcagcgguaaag

SEQ ID NO: 2227308 - RNA, 19 nt, Artificial Sequence
  Description of Artificial Sequence: Synthetic oligonucleotide
ugauaccuaacacggcaga

SEQ ID NO: 2227309 - RNA, 19 nt, Artificial Sequence
  Description of Artificial Sequence: Synthetic oligonucleotide
uguacacucauggugugcu

SEQ ID NO: 2227310 - RNA, 19 nt, Artificial Sequence
  Description of Artificial Sequence: Synthetic oligonucleotide
cucuuaauaucaccauccc

SEQ ID NO: 2227311 - RNA, 19 nt, Artificial Sequence
  Description of Artificial Sequence: Synthetic oligonucleotide
cuggcuuuccucauaggac

SEQ ID NO: 2227312 - RNA, 19 nt, Artificial Sequence
  Description of Artificial Sequence: Synthetic oligonucleotide
caugcaucucuacguagcg

SEQ ID NO: 2227313 - RNA, 19 nt, Artificial Sequence
  Description of Artificial Sequence: Synthetic oligonucleotide
uucaggcauucgaauggcg

SEQ ID NO: 2227314 - RNA, 19 nt, Artificial Sequence
  Description of Artificial Sequence: Synthetic oligonucleotide
aucugucacagcuugguau

SEQ ID NO: 2227315 - RNA, 19 nt, Artificial Sequence
  Description of Artificial Sequence: Synthetic oligonucleotide
ucgaugcauucacucaaag

SEQ ID NO: 2227316 - RNA, 19 nt, Artificial Sequence
  Description of Artificial Sequence: Synthetic oligonucleotide
caggucaaagacacaagac

SEQ ID NO: 2227317 - RNA, 19 nt, Artificial Sequence
  Description of Artificial Sequence: Synthetic oligonucleotide
gaauaugcacuguacauau

SEQ ID NO: 2227318 - RNA, 19 nt, Artificial Sequence
  Description of Artificial Sequence: Synthetic oligonucleotide
acauggccaagucuucagg

SEQ ID NO: 2227319 - RNA, 19 nt, Artificial Sequence
  Description of Artificial Sequence: Synthetic oligonucleotide
auugggugcuggcagucuc

SEQ ID NO: 2227320 - RNA, 19 nt, Artificial Sequence
  Description of Artificial Sequence: Synthetic oligonucleotide
agcugucgcacaaacacgg

SEQ ID NO: 2227321 - RNA, 19 nt, Artificial Sequence
  Description of Artificial Sequence: Synthetic oligonucleotide
aguucagaugugaagugag

SEQ ID NO: 2227322 - RNA, 19 nt, Artificial Sequence
  Description of Artificial Sequence: Synthetic oligonucleotide
ucuucucauggcauugggu

SEQ ID NO: 2227323 - RNA, 19 nt, Artificial Sequence
  Description of Artificial Sequence: Synthetic oligonucleotide
ugaucuguacacucauggu

SEQ ID NO: 2227324 - RNA, 19 nt, Artificial Sequence
  Description of Artificial Sequence: Synthetic oligonucleotide
cacgguggugccuauguag

SEQ ID NO: 2227325 - RNA, 19 nt, Artificial Sequence
  Description of Artificial Sequence: Synthetic oligonucleotide
uacguagcggccacucucc

SEQ ID NO: 2227326 - RNA, 19 nt, Artificial Sequence
  Description of Artificial Sequence: Synthetic oligonucleotide
uccacgaugugaaggcucu

SEQ ID NO: 2227327 - RNA, 19 nt, Artificial Sequence
  Description of Artificial Sequence: Synthetic oligonucleotide
cagaugugaagugagggac

SEQ ID NO: 2227328 - RNA, 19 nt, Artificial Sequence
  Description of Artificial Sequence: Synthetic oligonucleotide
guuuggagcaguuccucug

SEQ ID NO: 2227329 - RNA, 19 nt, Artificial Sequence
  Description of Artificial Sequence: Synthetic oligonucleotide
cugugaauaugcacuguac

SEQ ID NO: 2227330 - RNA, 19 nt, Artificial Sequence
  Description of Artificial Sequence: Synthetic oligonucleotide
aucucuacguagcggccac

SEQ ID NO: 2227331 - RNA, 19 nt, Artificial Sequence
  Description of Artificial Sequence: Synthetic oligonucleotide
ggaagggacauuauaaaac

SEQ ID NO: 2227332 - RNA, 19 nt, Artificial Sequence
  Description of Artificial Sequence: Synthetic oligonucleotide
ucugucacagcuugguaua

SEQ ID NO: 2227333 - RNA, 19 nt, Artificial Sequence
  Description of Artificial Sequence: Synthetic oligonucleotide
aagaggucccuaggaaggg

SEQ ID NO: 2227334 - RNA, 19 nt, Artificial Sequence
  Description of Artificial Sequence: Synthetic oligonucleotide
uuguuaguagcaguuugga

SEQ ID NO: 2227335 - RNA, 19 nt, Artificial Sequence
  Description of Artificial Sequence: Synthetic oligonucleotide
cugauaccuaacacggcag

SEQ ID NO: 2227336 - RNA, 19 nt, Artificial Sequence
  Description of Artificial Sequence: Synthetic oligonucleotide
ugcagcgguaaaguuaggc

SEQ ID NO: 2227337 - RNA, 19 nt, Artificial Sequence
  Description of Artificial Sequence: Synthetic oligonucleotide
gaggguuagguagcgaccc

SEQ ID NO: 2227338 - RNA, 19 nt, Artificial Sequence
  Description of Artificial Sequence: Synthetic oligonucleotide
auaggacauggccaagucu

SEQ ID NO: 2227339 - RNA, 19 nt, Artificial Sequence
  Description of Artificial Sequence: Synthetic oligonucleotide
aucuguacacucauggugu

SEQ ID NO: 2227340 - RNA, 19 nt, Artificial Sequence
  Description of Artificial Sequence: Synthetic oligonucleotide
gcucuuaauaucaccaucc

SEQ ID NO: 2227341 - RNA, 19 nt, Artificial Sequence
  Description of Artificial Sequence: Synthetic oligonucleotide
caggcauucgaauggcgag

SEQ ID NO: 2227342 - RNA, 19 nt, Artificial Sequence
  Description of Artificial Sequence: Synthetic oligonucleotide
ucacucaaagggcagccau

SEQ ID NO: 2227343 - RNA, 19 nt, Artificial Sequence
  Description of Artificial Sequence: Synthetic oligonucleotide
aggguagcuacaaacuguc

SEQ ID NO: 2227344 - RNA, 19 nt, Artificial Sequence
  Description of Artificial Sequence: Synthetic oligonucleotide
uucugaucuguacacucau

SEQ ID NO: 2227345 - RNA, 19 nt, Artificial Sequence
  Description of Artificial Sequence: Synthetic oligonucleotide
agcuugguauacuuucuga

SEQ ID NO: 2227346 - RNA, 19 nt, Artificial Sequence
  Description of Artificial Sequence: Synthetic oligonucleotide
aaguuaggcaucaccggug

SEQ ID NO: 2227347 - RNA, 19 nt, Artificial Sequence
  Description of Artificial Sequence: Synthetic oligonucleotide
auagcagacaccuggccuu

SEQ ID NO: 2227348 - RNA, 19 nt, Artificial Sequence
  Description of Artificial Sequence: Synthetic oligonucleotide
ugguauacuuucugaucug

SEQ ID NO: 2227349 - RNA, 19 nt, Artificial Sequence
  Description of Artificial Sequence: Synthetic oligonucleotide
gaugugaagugagggacac

SEQ ID NO: 2227350 - RNA, 19 nt, Artificial Sequence
  Description of Artificial Sequence: Synthetic oligonucleotide
gugccguccacaaaggcag

SEQ ID NO: 2227351 - RNA, 19 nt, Artificial Sequence
  Description of Artificial Sequence: Synthetic oligonucleotide
gauagcagacaccuggccu

SEQ ID NO: 2227352 - RNA, 19 nt, Artificial Sequence
  Description of Artificial Sequence: Synthetic oligonucleotide
auagugauucuuguuagua

SEQ ID NO: 2227353 - RNA, 19 nt, Artificial Sequence
  Description of Artificial Sequence: Synthetic oligonucleotide
uugcaaaagucagagucaa

SEQ ID NO: 2227354 - RNA, 19 nt, Artificial Sequence
  Description of Artificial Sequence: Synthetic oligonucleotide
acggcagaaugguacacca

SEQ ID NO: 2227355 - RNA, 19 nt, Artificial Sequence
  Description of Artificial Sequence: Synthetic oligonucleotide
gauucuuguuaguagcagu

SEQ ID NO: 2227356 - RNA, 19 nt, Artificial Sequence
  Description of Artificial Sequence: Synthetic oligonucleotide
ccagcugucgcacaaacac

SEQ ID NO: 2227357 - RNA, 19 nt, Artificial Sequence
  Description of Artificial Sequence: Synthetic oligonucleotide
uauuagccagguacacaca

SEQ ID NO: 2227358 - RNA, 19 nt, Artificial Sequence
  Description of Artificial Sequence: Synthetic oligonucleotide
ucuguacacucauggugug

SEQ ID NO: 2227359 - RNA, 19 nt, Artificial Sequence
  Description of Artificial Sequence: Synthetic oligonucleotide
caagucuucaggcauucga

SEQ ID NO: 2227360 - RNA, 19 nt, Artificial Sequence
  Description of Artificial Sequence: Synthetic oligonucleotide
gcuacaaacugucaccuuc

SEQ ID NO: 2227361 - RNA, 19 nt, Artificial Sequence
  Description of Artificial Sequence: Synthetic oligonucleotide
guagcgacccagcugucgc

SEQ ID NO: 2227362 - RNA, 19 nt, Artificial Sequence
  Description of Artificial Sequence: Synthetic oligonucleotide
agcgguaaaguuaggcauc

SEQ ID NO: 2227363 - RNA, 19 nt, Artificial Sequence
  Description of Artificial Sequence: Synthetic oligonucleotide
caugaggucacugauaccu

SEQ ID NO: 2227364 - RNA, 19 nt, Artificial Sequence
  Description of Artificial Sequence: Synthetic oligonucleotide
gaacacccaggguagcuac

SEQ ID NO: 2227365 - RNA, 19 nt, Artificial Sequence
  Description of Artificial Sequence: Synthetic oligonucleotide
auaaccaaugcagcgguaa

SEQ ID NO: 2227366 - RNA, 19 nt, Artificial Sequence
  Description of Artificial Sequence: Synthetic oligonucleotide
aguuuggagcaguuccucu

SEQ ID NO: 2227367 - RNA, 19 nt, Artificial Sequence
  Description of Artificial Sequence: Synthetic oligonucleotide
uuuccucauaggacauggc

SEQ ID NO: 2227368 - RNA, 19 nt, Artificial Sequence
  Description of Artificial Sequence: Synthetic oligonucleotide
caguguguagccaggccag

SEQ ID NO: 2227369 - RNA, 19 nt, Artificial Sequence
  Description of Artificial Sequence: Synthetic oligonucleotide
uaaccaaugcagcgguaaa

SEQ ID NO: 2227370 - RNA, 19 nt, Artificial Sequence
  Description of Artificial Sequence: Synthetic oligonucleotide
guucgcugggugcagccgg

SEQ ID NO: 2227371 - RNA, 19 nt, Artificial Sequence
  Description of Artificial Sequence: Synthetic oligonucleotide
ugaggucacugauaccuaa

SEQ ID NO: 2227372 - RNA, 19 nt, Artificial Sequence
  Description of Artificial Sequence: Synthetic oligonucleotide
gugaaggcucuuaauauca

SEQ ID NO: 2227373 - RNA, 19 nt, Artificial Sequence
  Description of Artificial Sequence: Synthetic oligonucleotide
aucaccgguggugagcagg

SEQ ID NO: 2227374 - RNA, 19 nt, Artificial Sequence
  Description of Artificial Sequence: Synthetic oligonucleotide
guguguggcaggcugugcc

SEQ ID NO: 2227375 - RNA, 19 nt, Artificial Sequence
  Description of Artificial Sequence: Synthetic oligonucleotide
cagcugucgcacaaacacg

SEQ ID NO: 2227376 - RNA, 19 nt, Artificial Sequence
  Description of Artificial Sequence: Synthetic oligonucleotide
acugucaccuucaaaugga

SEQ ID NO: 2227377 - RNA, 19 nt, Artificial Sequence
  Description of Artificial Sequence: Synthetic oligonucleotide
acacucauggugugcuuug

SEQ ID NO: 2227378 - RNA, 19 nt, Artificial Sequence
  Description of Artificial Sequence: Synthetic oligonucleotide
caaauggauggcuguggug

SEQ ID NO: 2227379 - RNA, 19 nt, Artificial Sequence
  Description of Artificial Sequence: Synthetic oligonucleotide
uguccaucaucgaugcauu

SEQ ID NO: 2227380 - RNA, 19 nt, Artificial Sequence
  Description of Artificial Sequence: Synthetic oligonucleotide
cuacguagcggccacucuc

SEQ ID NO: 2227381 - RNA, 19 nt, Artificial Sequence
  Description of Artificial Sequence: Synthetic oligonucleotide
cauucacucaaagggcagc

SEQ ID NO: 2227382 - RNA, 19 nt, Artificial Sequence
  Description of Artificial Sequence: Synthetic oligonucleotide
ugcaccgaggcagugugug

SEQ ID NO: 2227383 - RNA, 19 nt, Artificial Sequence
  Description of Artificial Sequence: Synthetic oligonucleotide
cuucaaauggauggcugug

SEQ ID NO: 2227384 - RNA, 19 nt, Artificial Sequence
  Description of Artificial Sequence: Synthetic oligonucleotide
ucucauggcauugggugcu

SEQ ID NO: 2227385 - RNA, 19 nt, Artificial Sequence
  Description of Artificial Sequence: Synthetic oligonucleotide
cuacaaacugucaccuuca

SEQ ID NO: 2227386 - RNA, 19 nt, Artificial Sequence
  Description of Artificial Sequence: Synthetic oligonucleotide
cauaggacauggccaaguc

SEQ ID NO: 2227387 - RNA, 19 nt, Artificial Sequence
  Description of Artificial Sequence: Synthetic oligonucleotide
caaugcagcgguaaaguua

SEQ ID NO: 2227388 - RNA, 19 nt, Artificial Sequence
  Description of Artificial Sequence: Synthetic oligonucleotide
cagccauucacacacagcu

SEQ ID NO: 2227389 - RNA, 19 nt, Artificial Sequence
  Description of Artificial Sequence: Synthetic oligonucleotide
acuggaaauagauguccuu

SEQ ID NO: 2227390 - RNA, 19 nt, Artificial Sequence
  Description of Artificial Sequence: Synthetic oligonucleotide
guagcggccacucucccuc

SEQ ID NO: 2227391 - RNA, 19 nt, Artificial Sequence
  Description of Artificial Sequence: Synthetic oligonucleotide
aggcauucgaauggcgagg

SEQ ID NO: 2227392 - RNA, 19 nt, Artificial Sequence
  Description of Artificial Sequence: Synthetic oligonucleotide
cauggcauugggugcuggc

SEQ ID NO: 2227393 - RNA, 19 nt, Artificial Sequence
  Description of Artificial Sequence: Synthetic oligonucleotide
ggugucugugaauaugcac

SEQ ID NO: 2227394 - RNA, 19 nt, Artificial Sequence
  Description of Artificial Sequence: Synthetic oligonucleotide
ggaaauagauguccuuuca

SEQ ID NO: 2227395 - RNA, 19 nt, Artificial Sequence
  Description of Artificial Sequence: Synthetic oligonucleotide
gcuuuugaaguucgcuggg

SEQ ID NO: 2227396 - RNA, 19 nt, Artificial Sequence
  Description of Artificial Sequence: Synthetic oligonucleotide
accgguggugagcagguca

SEQ ID NO: 2227397 - RNA, 19 nt, Artificial Sequence
  Description of Artificial Sequence: Synthetic oligonucleotide
gugaauaugcacuguacau

SEQ ID NO: 2227398 - RNA, 19 nt, Artificial Sequence
  Description of Artificial Sequence: Synthetic oligonucleotide
ucuacguagcggccacucu

SEQ ID NO: 2227399 - RNA, 19 nt, Artificial Sequence
  Description of Artificial Sequence: Synthetic oligonucleotide
auucuuguuaguagcaguu

SEQ ID NO: 2227400 - RNA, 19 nt, Artificial Sequence
  Description of Artificial Sequence: Synthetic oligonucleotide
gugagggacacgaaaucug

SEQ ID NO: 2227401 - RNA, 19 nt, Artificial Sequence
  Description of Artificial Sequence: Synthetic oligonucleotide
uuagccagguacacacaua

SEQ ID NO: 2227402 - RNA, 19 nt, Artificial Sequence
  Description of Artificial Sequence: Synthetic oligonucleotide
cacugauaccuaacacggc

SEQ ID NO: 2227403 - RNA, 19 nt, Artificial Sequence
  Description of Artificial Sequence: Synthetic oligonucleotide
cacaagacuggaaauagau

SEQ ID NO: 2227404 - RNA, 19 nt, Artificial Sequence
  Description of Artificial Sequence: Synthetic oligonucleotide
cuucaggcauucgaauggc

SEQ ID NO: 2227405 - RNA, 19 nt, Artificial Sequence
  Description of Artificial Sequence: Synthetic oligonucleotide
acgaugugaaggcucuuaa

SEQ ID NO: 2227406 - RNA, 19 nt, Artificial Sequence
  Description of Artificial Sequence: Synthetic oligonucleotide
accuaacacggcagaaugg

SEQ ID NO: 2227407 - RNA, 19 nt, Artificial Sequence
  Description of Artificial Sequence: Synthetic oligonucleotide
aucaguggcagaguucaga

SEQ ID NO: 2227408 - RNA, 19 nt, Artificial Sequence
  Description of Artificial Sequence: Synthetic oligonucleotide
agacacaagacuggaaaua

SEQ ID NO: 2227409 - RNA, 19 nt, Artificial Sequence
  Description of Artificial Sequence: Synthetic oligonucleotide
caucgaugcauucacucaa

SEQ ID NO: 2227410 - RNA, 19 nt, Artificial Sequence
  Description of Artificial Sequence: Synthetic oligonucleotide
ugcagccggcauaggcucg

SEQ ID NO: 2227411 - RNA, 19 nt, Artificial Sequence
  Description of Artificial Sequence: Synthetic oligonucleotide
augcaucucuacguagcgg

SEQ ID NO: 2227412 - RNA, 19 nt, Artificial Sequence
  Description of Artificial Sequence: Synthetic oligonucleotide
uggugccguccacaaaggc

SEQ ID NO: 2227413 - RNA, 19 nt, Artificial Sequence
  Description of Artificial Sequence: Synthetic oligonucleotide
uucgaauggcgaggguuag

SEQ ID NO: 2227414 - RNA, 19 nt, Artificial Sequence
  Description of Artificial Sequence: Synthetic oligonucleotide
cagguacacacauaaauau

SEQ ID NO: 2227415 - RNA, 19 nt, Artificial Sequence
  Description of Artificial Sequence: Synthetic oligonucleotide
aguagcaguuuggagcagu

SEQ ID NO: 2227416 - RNA, 19 nt, Artificial Sequence
  Description of Artificial Sequence: Synthetic oligonucleotide
auaccuaacacggcagaau

SEQ ID NO: 2227417 - RNA, 19 nt, Artificial Sequence
  Description of Artificial Sequence: Synthetic oligonucleotide
gguacaccagguugccacg

SEQ ID NO: 2227418 - RNA, 19 nt, Artificial Sequence
  Description of Artificial Sequence: Synthetic oligonucleotide
uggcaucuucucauggcau

SEQ ID NO: 2227419 - RNA, 19 nt, Artificial Sequence
  Description of Artificial Sequence: Synthetic oligonucleotide
ucggagugccuugcaaaag

SEQ ID NO: 2227420 - RNA, 19 nt, Artificial Sequence
  Description of Artificial Sequence: Synthetic oligonucleotide
gauaccuaacacggcagaa

SEQ ID NO: 2227421 - RNA, 19 nt, Artificial Sequence
  Description of Artificial Sequence: Synthetic oligonucleotide
aggcucuuaauaucaccau

SEQ ID NO: 2227422 - RNA, 19 nt, Artificial Sequence
  Description of Artificial Sequence: Synthetic oligonucleotide
caggucaucugucacagcu

SEQ ID NO: 2227423 - RNA, 19 nt, Artificial Sequence
  Description of Artificial Sequence: Synthetic oligonucleotide
gugcuuugaagauaauagu

SEQ ID NO: 2227424 - RNA, 19 nt, Artificial Sequence
  Description of Artificial Sequence: Synthetic oligonucleotide
acguagcggccacucuccc

SEQ ID NO: 2227425 - RNA, 19 nt, Artificial Sequence
  Description of Artificial Sequence: Synthetic oligonucleotide
accuucaaauggauggcug

SEQ ID NO: 2227426 - RNA, 19 nt, Artificial Sequence
  Description of Artificial Sequence: Synthetic oligonucleotide
auguagcgggcaugcaucu

SEQ ID NO: 2227427 - RNA, 19 nt, Artificial Sequence
  Description of Artificial Sequence: Synthetic oligonucleotide
gaagugagggacacgaaau

SEQ ID NO: 2227428 - RNA, 19 nt, Artificial Sequence
  Description of Artificial Sequence: Synthetic oligonucleotide
cauauuagccagguacaca

SEQ ID NO: 2227429 - RNA, 19 nt, Artificial Sequence
  Description of Artificial Sequence: Synthetic oligonucleotide
ucacagcuugguauacuuu

SEQ ID NO: 2227430 - RNA, 19 nt, Artificial Sequence
  Description of Artificial Sequence: Synthetic oligonucleotide
gcagucuccaguguguagc

SEQ ID NO: 2227431 - RNA, 19 nt, Artificial Sequence
  Description of Artificial Sequence: Synthetic oligonucleotide
gcagcgguaaaguuaggca

SEQ ID NO: 2227432 - RNA, 19 nt, Artificial Sequence
  Description of Artificial Sequence: Synthetic oligonucleotide
ucccuaggaagggacauua

SEQ ID NO: 2227433 - RNA, 19 nt, Artificial Sequence
  Description of Artificial Sequence: Synthetic oligonucleotide
gugauucuuguuaguagca

SEQ ID NO: 2227434 - RNA, 19 nt, Artificial Sequence
  Description of Artificial Sequence: Synthetic oligonucleotide
ggcucuuaauaucaccauc

SEQ ID NO: 2227435 - RNA, 19 nt, Artificial Sequence
  Description of Artificial Sequence: Synthetic oligonucleotide
cacggcagaaugguacacc

SEQ ID NO: 2227436 - RNA, 19 nt, Artificial Sequence
  Description of Artificial Sequence: Synthetic oligonucleotide
ggcauucgaauggcgaggg

SEQ ID NO: 2227437 - RNA, 19 nt, Artificial Sequence
  Description of Artificial Sequence: Synthetic oligonucleotide
gaagaacacccaggguagc

SEQ ID NO: 2227438 - RNA, 19 nt, Artificial Sequence
  Description of Artificial Sequence: Synthetic oligonucleotide
agaugugaagugagggaca

SEQ ID NO: 2227439 - RNA, 19 nt, Artificial Sequence
  Description of Artificial Sequence: Synthetic oligonucleotide
gaggucacugauaccuaac

SEQ ID NO: 2227440 - RNA, 19 nt, Artificial Sequence
  Description of Artificial Sequence: Synthetic oligonucleotide
gagugccuugcaaaaguca

SEQ ID NO: 2227441 - RNA, 19 nt, Artificial Sequence
  Description of Artificial Sequence: Synthetic oligonucleotide
uucuuguuaguagcaguuu

SEQ ID NO: 2227442 - RNA, 19 nt, Artificial Sequence
  Description of Artificial Sequence: Synthetic oligonucleotide
ggcaugcaucucuacguag

SEQ ID NO: 2227443 - RNA, 19 nt, Artificial Sequence
  Description of Artificial Sequence: Synthetic oligonucleotide
gcgggcaugcaucucuacg

SEQ ID NO: 2227444 - RNA, 19 nt, Artificial Sequence
  Description of Artificial Sequence: Synthetic oligonucleotide
agcgggcaugcaucucuac

SEQ ID NO: 2227445 - RNA, 19 nt, Artificial Sequence
  Description of Artificial Sequence: Synthetic oligonucleotide
guacaccagguugccacgg

SEQ ID NO: 2227446 - RNA, 19 nt, Artificial Sequence
  Description of Artificial Sequence: Synthetic oligonucleotide
aguucgcugggugcagccg

SEQ ID NO: 2227447 - RNA, 19 nt, Artificial Sequence
  Description of Artificial Sequence: Synthetic oligonucleotide
caccgaggcaguguguggc

SEQ ID NO: 2227448 - RNA, 19 nt, Artificial Sequence
  Description of Artificial Sequence: Synthetic oligonucleotide
uacacucauggugugcuuu

SEQ ID NO: 2227449 - RNA, 19 nt, Artificial Sequence
  Description of Artificial Sequence: Synthetic oligonucleotide
acucauggugugcuuugaa

SEQ ID NO: 2227450 - RNA, 19 nt, Artificial Sequence
  Description of Artificial Sequence: Synthetic oligonucleotide
auucgaauggcgaggguua

SEQ ID NO: 2227451 - RNA, 19 nt, Artificial Sequence
  Description of Artificial Sequence: Synthetic oligonucleotide
agcgacccagcugucgcac

SEQ ID NO: 2227452 - RNA, 19 nt, Artificial Sequence
  Description of Artificial Sequence: Synthetic oligonucleotide
aguguguagccaggccagg

SEQ ID NO: 2227453 - RNA, 19 nt, Artificial Sequence
  Description of Artificial Sequence: Synthetic oligonucleotide
gaaguucgcugggugcagc

SEQ ID NO: 2227454 - RNA, 19 nt, Artificial Sequence
  Description of Artificial Sequence: Synthetic oligonucleotide
gugcuuucuaagagguccc

SEQ ID NO: 2227455 - RNA, 19 nt, Artificial Sequence
  Description of Artificial Sequence: Synthetic oligonucleotide
gcgaggguuagguagcgac

SEQ ID NO: 2227456 - RNA, 19 nt, Artificial Sequence
  Description of Artificial Sequence: Synthetic oligonucleotide
gcaugcaucucuacguagc

SEQ ID NO: 2227457 - RNA, 19 nt, Artificial Sequence
  Description of Artificial Sequence: Synthetic oligonucleotide
cuguacacucauggugugc

SEQ ID NO: 2227458 - RNA, 19 nt, Artificial Sequence
  Description of Artificial Sequence: Synthetic oligonucleotide
cacggcaggcuuuugaagu

SEQ ID NO: 2227459 - RNA, 19 nt, Artificial Sequence
  Description of Artificial Sequence: Synthetic oligonucleotide
ccaggguagcuacaaacug

SEQ ID NO: 2227460 - RNA, 19 nt, Artificial Sequence
  Description of Artificial Sequence: Synthetic oligonucleotide
guagcgggcaugcaucucu

SEQ ID NO: 2227461 - RNA, 19 nt, Artificial Sequence
  Description of Artificial Sequence: Synthetic oligonucleotide
gugugcuuugaagauaaua

SEQ ID NO: 2227462 - RNA, 19 nt, Artificial Sequence
  Description of Artificial Sequence: Synthetic oligonucleotide
guuagguagcgacccagcu

SEQ ID NO: 2227463 - RNA, 19 nt, Artificial Sequence
  Description of Artificial Sequence: Synthetic oligonucleotide
acacaagacuggaaauaga

SEQ ID NO: 2227464 - RNA, 19 nt, Artificial Sequence
  Description of Artificial Sequence: Synthetic oligonucleotide
ugcuuucuaagaggucccu

SEQ ID NO: 2227465 - RNA, 19 nt, Artificial Sequence
  Description of Artificial Sequence: Synthetic oligonucleotide
aauaugcacuguacauauu

SEQ ID NO: 2227466 - RNA, 19 nt, Artificial Sequence
  Description of Artificial Sequence: Synthetic oligonucleotide
caguggcagaguucagaug

SEQ ID NO: 2227467 - RNA, 19 nt, Artificial Sequence
  Description of Artificial Sequence: Synthetic oligonucleotide
aauaaccaaugcagcggua

SEQ ID NO: 2227468 - RNA, 19 nt, Artificial Sequence
  Description of Artificial Sequence: Synthetic oligonucleotide
augugaagugagggacacg

SEQ ID NO: 2227469 - RNA, 19 nt, Artificial Sequence
  Description of Artificial Sequence: Synthetic oligonucleotide
gccuuguccaucaucgaug

SEQ ID NO: 2227470 - RNA, 19 nt, Artificial Sequence
  Description of Artificial Sequence: Synthetic oligonucleotide
ucuccacgaugugaaggcu

SEQ ID NO: 2227471 - RNA, 19 nt, Artificial Sequence
  Description of Artificial Sequence: Synthetic oligonucleotide
cucggagugccuugcaaaa

SEQ ID NO: 2227472 - RNA, 19 nt, Artificial Sequence
  Description of Artificial Sequence: Synthetic oligonucleotide
caggguagcuacaaacugu

SEQ ID NO: 2227473 - RNA, 19 nt, Artificial Sequence
  Description of Artificial Sequence: Synthetic oligonucleotide
ugccccaggauagcagaca

SEQ ID NO: 2227474 - RNA, 19 nt, Artificial Sequence
  Description of Artificial Sequence: Synthetic oligonucleotide
gguagcgacccagcugucg

SEQ ID NO: 2227475 - RNA, 19 nt, Artificial Sequence
  Description of Artificial Sequence: Synthetic oligonucleotide
uaggcucggagugccuugc

SEQ ID NO: 2227476 - RNA, 19 nt, Artificial Sequence
  Description of Artificial Sequence: Synthetic oligonucleotide
ugccuauguagcgggcaug

SEQ ID NO: 2227477 - RNA, 19 nt, Artificial Sequence
  Description of Artificial Sequence: Synthetic oligonucleotide
gugcagccggcauaggcuc

SEQ ID NO: 2227478 - RNA, 19 nt, Artificial Sequence
  Description of Artificial Sequence: Synthetic oligonucleotide
gccagguacacacauaaau

SEQ ID NO: 2227479 - RNA, 19 nt, Artificial Sequence
  Description of Artificial Sequence: Synthetic oligonucleotide
cauggugugcuuugaagau

SEQ ID NO: 2227480 - RNA, 19 nt, Artificial Sequence
  Description of Artificial Sequence: Synthetic oligonucleotide
guggugccguccacaaagg

SEQ ID NO: 2227481 - RNA, 19 nt, Artificial Sequence
  Description of Artificial Sequence: Synthetic oligonucleotide
ccagguacacacauaaaua

SEQ ID NO: 2227482 - RNA, 19 nt, Artificial Sequence
  Description of Artificial Sequence: Synthetic oligonucleotide
guguguagccaggccaggc

SEQ ID NO: 2227483 - RNA, 19 nt, Artificial Sequence
  Description of Artificial Sequence: Synthetic oligonucleotide
ccucuccacgaugugaagg

SEQ ID NO: 2227484 - RNA, 19 nt, Artificial Sequence
  Description of Artificial Sequence: Synthetic oligonucleotide
ggugccguccacaaaggca

SEQ ID NO: 2227485 - RNA, 19 nt, Artificial Sequence
  Description of Artificial Sequence: Synthetic oligonucleotide
acggcaggcuuuugaaguu

SEQ ID NO: 2227486 - RNA, 19 nt, Artificial Sequence
  Description of Artificial Sequence: Synthetic oligonucleotide
cagcgguaaaguuaggcau

SEQ ID NO: 2227487 - RNA, 19 nt, Artificial Sequence
  Description of Artificial Sequence: Synthetic oligonucleotide
gggacauuauaaaacauuu

SEQ ID NO: 2227488 - RNA, 19 nt, Artificial Sequence
  Description of Artificial Sequence: Synthetic oligonucleotide
aggguuagguagcgaccca

SEQ ID NO: 2227489 - RNA, 19 nt, Artificial Sequence
  Description of Artificial Sequence: Synthetic oligonucleotide
uagcgacccagcugucgca

SEQ ID NO: 2227490 - RNA, 19 nt, Artificial Sequence
  Description of Artificial Sequence: Synthetic oligonucleotide
accgaggcaguguguggca

SEQ ID NO: 2227491 - RNA, 19 nt, Artificial Sequence
  Description of Artificial Sequence: Synthetic oligonucleotide
aggccaggccugcaccgag

SEQ ID NO: 2227492 - RNA, 19 nt, Artificial Sequence
  Description of Artificial Sequence: Synthetic oligonucleotide
ugccguccacaaaggcagc

SEQ ID NO: 2227493 - RNA, 19 nt, Artificial Sequence
  Description of Artificial Sequence: Synthetic oligonucleotide
ggcauaggcucggagugcc

SEQ ID NO: 2227494 - RNA, 19 nt, Artificial Sequence
  Description of Artificial Sequence: Synthetic oligonucleotide
agaacacccaggguagcua

SEQ ID NO: 2227495 - RNA, 19 nt, Artificial Sequence
  Description of Artificial Sequence: Synthetic oligonucleotide
caguagcaaugggaagugc

SEQ ID NO: 2227496 - RNA, 19 nt, Artificial Sequence
  Description of Artificial Sequence: Synthetic oligonucleotide
ccggcauaggcucggagug

SEQ ID NO: 2227497 - RNA, 19 nt, Artificial Sequence
  Description of Artificial Sequence: Synthetic oligonucleotide
cuaacacggcagaauggua

SEQ ID NO: 2227498 - RNA, 19 nt, Artificial Sequence
  Description of Artificial Sequence: Synthetic oligonucleotide
aaggcagcuggcaggucau

SEQ ID NO: 2227499 - RNA, 19 nt, Artificial Sequence
  Description of Artificial Sequence: Synthetic oligonucleotide
ggguuagguagcgacccag

SEQ ID NO: 2227500 - RNA, 19 nt, Artificial Sequence
  Description of Artificial Sequence: Synthetic oligonucleotide
ccaguguguagccaggcca

SEQ ID NO: 2227501 - RNA, 19 nt, Artificial Sequence
  Description of Artificial Sequence: Synthetic oligonucleotide
gccuauguagcgggcaugc

SEQ ID NO: 2227502 - RNA, 19 nt, Artificial Sequence
  Description of Artificial Sequence: Synthetic oligonucleotide
agaggucccuaggaaggga

SEQ ID NO: 2227503 - RNA, 19 nt, Artificial Sequence
  Description of Artificial Sequence: Synthetic oligonucleotide
guauacuuucugaucugua

SEQ ID NO: 2227504 - RNA, 19 nt, Artificial Sequence
  Description of Artificial Sequence: Synthetic oligonucleotide
ggugagcaggucaaagaca

SEQ ID NO: 2227505 - RNA, 19 nt, Artificial Sequence
  Description of Artificial Sequence: Synthetic oligonucleotide
ggcagucuccaguguguag

SEQ ID NO: 2227506 - RNA, 19 nt, Artificial Sequence
  Description of Artificial Sequence: Synthetic oligonucleotide
cugucacagcuugguauac

SEQ ID NO: 2227507 - RNA, 19 nt, Artificial Sequence
  Description of Artificial Sequence: Synthetic oligonucleotide
guccaucaucgaugcauuc

SEQ ID NO: 2227508 - RNA, 19 nt, Artificial Sequence
  Description of Artificial Sequence: Synthetic oligonucleotide
ggugcuggcagucuccagu

SEQ ID NO: 2227509 - RNA, 19 nt, Artificial Sequence
  Description of Artificial Sequence: Synthetic oligonucleotide
caucucuacguagcggcca

SEQ ID NO: 2227510 - RNA, 19 nt, Artificial Sequence
  Description of Artificial Sequence: Synthetic oligonucleotide
aggcaucaccgguggugag

SEQ ID NO: 2227511 - RNA, 19 nt, Artificial Sequence
  Description of Artificial Sequence: Synthetic oligonucleotide
ccugcaccgaggcagugug

SEQ ID NO: 2227512 - RNA, 19 nt, Artificial Sequence
  Description of Artificial Sequence: Synthetic oligonucleotide
cuggaaauagauguccuuu

SEQ ID NO: 2227513 - RNA, 19 nt, Artificial Sequence
  Description of Artificial Sequence: Synthetic oligonucleotide
gaauggcgaggguuaggua

SEQ ID NO: 2227514 - RNA, 19 nt, Artificial Sequence
  Description of Artificial Sequence: Synthetic oligonucleotide
aucgaugcauucacucaaa

SEQ ID NO: 2227515 - RNA, 19 nt, Artificial Sequence
  Description of Artificial Sequence: Synthetic oligonucleotide
uagcgggcaugcaucucua

SEQ ID NO: 2227516 - RNA, 19 nt, Artificial Sequence
  Description of Artificial Sequence: Synthetic oligonucleotide
caguguguggcaggcugug

SEQ ID NO: 2227517 - RNA, 19 nt, Artificial Sequence
  Description of Artificial Sequence: Synthetic oligonucleotide
gcuggcaggucaucuguca

SEQ ID NO: 2227518 - RNA, 19 nt, Artificial Sequence
  Description of Artificial Sequence: Synthetic oligonucleotide
uguagcgggcaugcaucuc

SEQ ID NO: 2227519 - RNA, 19 nt, Artificial Sequence
  Description of Artificial Sequence: Synthetic oligonucleotide
guguagccaggccaggccu

SEQ ID NO: 2227520 - RNA, 19 nt, Artificial Sequence
  Description of Artificial Sequence: Synthetic oligonucleotide
ggcaucaccgguggugagc

SEQ ID NO: 2227521 - RNA, 19 nt, Artificial Sequence
  Description of Artificial Sequence: Synthetic oligonucleotide
cgaggguuagguagcgacc

SEQ ID NO: 2227522 - RNA, 19 nt, Artificial Sequence
  Description of Artificial Sequence: Synthetic oligonucleotide
cauucgaauggcgaggguu

SEQ ID NO: 2227523 - RNA, 19 nt, Artificial Sequence
  Description of Artificial Sequence: Synthetic oligonucleotide
gugccuugcaaaagucaga

SEQ ID NO: 2227524 - RNA, 19 nt, Artificial Sequence
  Description of Artificial Sequence: Synthetic oligonucleotide
gggacacgaaaucuguggu

SEQ ID NO: 2227525 - RNA, 19 nt, Artificial Sequence
  Description of Artificial Sequence: Synthetic oligonucleotide
agauguccuuucacuggca

SEQ ID NO: 2227526 - RNA, 19 nt, Artificial Sequence
  Description of Artificial Sequence: Synthetic oligonucleotide
ggacacgaaaucuguggua

SEQ ID NO: 2227527 - RNA, 19 nt, Artificial Sequence
  Description of Artificial Sequence: Synthetic oligonucleotide
caccuggccuuguccauca

SEQ ID NO: 2227528 - RNA, 19 nt, Artificial Sequence
  Description of Artificial Sequence: Synthetic oligonucleotide
acacgguggugccuaugua

SEQ ID NO: 2227529 - RNA, 19 nt, Artificial Sequence
  Description of Artificial Sequence: Synthetic oligonucleotide
ggagugccuugcaaaaguc

SEQ ID NO: 2227530 - RNA, 19 nt, Artificial Sequence
  Description of Artificial Sequence: Synthetic oligonucleotide
gcucggagugccuugcaaa

SEQ ID NO: 2227531 - RNA, 19 nt, Artificial Sequence
  Description of Artificial Sequence: Synthetic oligonucleotide
ccacggcaggcuuuugaag

SEQ ID NO: 2227532 - RNA, 19 nt, Artificial Sequence
  Description of Artificial Sequence: Synthetic oligonucleotide
ccuaggaagggacauuaua

SEQ ID NO: 2227533 - RNA, 19 nt, Artificial Sequence
  Description of Artificial Sequence: Synthetic oligonucleotide
cucccucuccacgauguga

SEQ ID NO: 2227534 - RNA, 19 nt, Artificial Sequence
  Description of Artificial Sequence: Synthetic oligonucleotide
gucgcacaaacacgguggu

SEQ ID NO: 2227535 - RNA, 19 nt, Artificial Sequence
  Description of Artificial Sequence: Synthetic oligonucleotide
cuuuugaaguucgcugggu

SEQ ID NO: 2227536 - RNA, 19 nt, Artificial Sequence
  Description of Artificial Sequence: Synthetic oligonucleotide
caucugucacagcuuggua

SEQ ID NO: 2227537 - RNA, 19 nt, Artificial Sequence
  Description of Artificial Sequence: Synthetic oligonucleotide
ggugccuauguagcgggca

SEQ ID NO: 2227538 - RNA, 19 nt, Artificial Sequence
  Description of Artificial Sequence: Synthetic oligonucleotide
caggcuuuugaaguucgcu

SEQ ID NO: 2227539 - RNA, 19 nt, Artificial Sequence
  Description of Artificial Sequence: Synthetic oligonucleotide
gcaucaccgguggugagca

SEQ ID NO: 2227540 - RNA, 19 nt, Artificial Sequence
  Description of Artificial Sequence: Synthetic oligonucleotide
cacgaugugaaggcucuua

SEQ ID NO: 2227541 - RNA, 19 nt, Artificial Sequence
  Description of Artificial Sequence: Synthetic oligonucleotide
gcgguaaaguuaggcauca

SEQ ID NO: 2227542 - RNA, 19 nt, Artificial Sequence
  Description of Artificial Sequence: Synthetic oligonucleotide
agguugccacggcaggcuu

SEQ ID NO: 2227543 - RNA, 19 nt, Artificial Sequence
  Description of Artificial Sequence: Synthetic oligonucleotide
gcaucucuacguagcggcc

SEQ ID NO: 2227544 - RNA, 19 nt, Artificial Sequence
  Description of Artificial Sequence: Synthetic oligonucleotide
caucaccgguggugagcag

SEQ ID NO: 2227545 - RNA, 19 nt, Artificial Sequence
  Description of Artificial Sequence: Synthetic oligonucleotide
cagaaugguacaccagguu

SEQ ID NO: 2227546 - RNA, 19 nt, Artificial Sequence
  Description of Artificial Sequence: Synthetic oligonucleotide
gccacggcaggcuuuugaa

SEQ ID NO: 2227547 - RNA, 19 nt, Artificial Sequence
  Description of Artificial Sequence: Synthetic oligonucleotide
gcuuuccucauaggacaug

SEQ ID NO: 2227548 - RNA, 19 nt, Artificial Sequence
  Description of Artificial Sequence: Synthetic oligonucleotide
ccuucaaauggauggcugu

SEQ ID NO: 2227549 - RNA, 19 nt, Artificial Sequence
  Description of Artificial Sequence: Synthetic oligonucleotide
uagcggccacucucccucu

SEQ ID NO: 2227550 - RNA, 19 nt, Artificial Sequence
  Description of Artificial Sequence: Synthetic oligonucleotide
aggcucggagugccuugca

SEQ ID NO: 2227551 - RNA, 19 nt, Artificial Sequence
  Description of Artificial Sequence: Synthetic oligonucleotide
cccaggauagcagacaccu

SEQ ID NO: 2227552 - RNA, 19 nt, Artificial Sequence
  Description of Artificial Sequence: Synthetic oligonucleotide
ccagguugccacggcaggc

SEQ ID NO: 2227553 - RNA, 19 nt, Artificial Sequence
  Description of Artificial Sequence: Synthetic oligonucleotide
ccuaacacggcagaauggu

SEQ ID NO: 2227554 - RNA, 19 nt, Artificial Sequence
  Description of Artificial Sequence: Synthetic oligonucleotide
gugccccaggauagcagac

SEQ ID NO: 2227555 - RNA, 19 nt, Artificial Sequence
  Description of Artificial Sequence: Synthetic oligonucleotide
gugccuauguagcgggcau

SEQ ID NO: 2227556 - RNA, 19 nt, Artificial Sequence
  Description of Artificial Sequence: Synthetic oligonucleotide
gugaagugagggacacgaa

SEQ ID NO: 2227557 - RNA, 19 nt, Artificial Sequence
  Description of Artificial Sequence: Synthetic oligonucleotide
gccggcauaggcucggagu

SEQ ID NO: 2227558 - RNA, 19 nt, Artificial Sequence
  Description of Artificial Sequence: Synthetic oligonucleotide
gggcaugcaucucuacgua

SEQ ID NO: 2227559 - RNA, 19 nt, Artificial Sequence
  Description of Artificial Sequence: Synthetic oligonucleotide
ccaagucuucaggcauucg

SEQ ID NO: 2227560 - RNA, 19 nt, Artificial Sequence
  Description of Artificial Sequence: Synthetic oligonucleotide
gccaagucuucaggcauuc

SEQ ID NO: 2227561 - RNA, 19 nt, Artificial Sequence
  Description of Artificial Sequence: Synthetic oligonucleotide
caggaagaacacccagggu

SEQ ID NO: 2227562 - RNA, 19 nt, Artificial Sequence
  Description of Artificial Sequence: Synthetic oligonucleotide
augcagcgguaaaguuagg

SEQ ID NO: 2227563 - RNA, 19 nt, Artificial Sequence
  Description of Artificial Sequence: Synthetic oligonucleotide
cccaggguagcuacaaacu

SEQ ID NO: 2227564 - RNA, 19 nt, Artificial Sequence
  Description of Artificial Sequence: Synthetic oligonucleotide
ggccuuguccaucaucgau

SEQ ID NO: 2227565 - RNA, 19 nt, Artificial Sequence
  Description of Artificial Sequence: Synthetic oligonucleotide
agguagcgacccagcuguc

SEQ ID NO: 2227566 - RNA, 19 nt, Artificial Sequence
  Description of Artificial Sequence: Synthetic oligonucleotide
ucgcugggugcagccggca

SEQ ID NO: 2227567 - RNA, 19 nt, Artificial Sequence
  Description of Artificial Sequence: Synthetic oligonucleotide
ggcaucuucucauggcauu

SEQ ID NO: 2227568 - RNA, 19 nt, Artificial Sequence
  Description of Artificial Sequence: Synthetic oligonucleotide
cacucaaagggcagccauu

SEQ ID NO: 2227569 - RNA, 19 nt, Artificial Sequence
  Description of Artificial Sequence: Synthetic oligonucleotide
ggcucggagugccuugcaa

SEQ ID NO: 2227570 - RNA, 19 nt, Artificial Sequence
  Description of Artificial Sequence: Synthetic oligonucleotide
ggcauugggugcuggcagu

SEQ ID NO: 2227571 - RNA, 19 nt, Artificial Sequence
  Description of Artificial Sequence: Synthetic oligonucleotide
gcaguuuggagcaguuccu

SEQ ID NO: 2227572 - RNA, 19 nt, Artificial Sequence
  Description of Artificial Sequence: Synthetic oligonucleotide
guagcaguuuggagcaguu

SEQ ID NO: 2227573 - RNA, 19 nt, Artificial Sequence
  Description of Artificial Sequence: Synthetic oligonucleotide
ccucuggcucaugagguca

SEQ ID NO: 2227574 - RNA, 19 nt, Artificial Sequence
  Description of Artificial Sequence: Synthetic oligonucleotide
gcugggugcagccggcaua

SEQ ID NO: 2227575 - RNA, 19 nt, Artificial Sequence
  Description of Artificial Sequence: Synthetic oligonucleotide
aggcaguguguggcaggcu

SEQ ID NO: 2227576 - RNA, 19 nt, Artificial Sequence
  Description of Artificial Sequence: Synthetic oligonucleotide
guugccacggcaggcuuuu

SEQ ID NO: 2227577 - RNA, 19 nt, Artificial Sequence
  Description of Artificial Sequence: Synthetic oligonucleotide
ccguccacaaaggcagcug

SEQ ID NO: 2227578 - RNA, 19 nt, Artificial Sequence
  Description of Artificial Sequence: Synthetic oligonucleotide
uugccacggcaggcuuuug

SEQ ID NO: 2227579 - RNA, 19 nt, Artificial Sequence
  Description of Artificial Sequence: Synthetic oligonucleotide
gcuuucuaagaggucccua

SEQ ID NO: 2227580 - RNA, 19 nt, Artificial Sequence
  Description of Artificial Sequence: Synthetic oligonucleotide
cagguugccacggcaggcu

SEQ ID NO: 2227581 - RNA, 19 nt, Artificial Sequence
  Description of Artificial Sequence: Synthetic oligonucleotide
ccgguggugagcaggucaa

SEQ ID NO: 2227582 - RNA, 19 nt, Artificial Sequence
  Description of Artificial Sequence: Synthetic oligonucleotide
ccgaggcaguguguggcag

SEQ ID NO: 2227583 - RNA, 19 nt, Artificial Sequence
  Description of Artificial Sequence: Synthetic oligonucleotide
cauugggugcuggcagucu

SEQ ID NO: 2227584 - RNA, 19 nt, Artificial Sequence
  Description of Artificial Sequence: Synthetic oligonucleotide
ggucccuaggaagggacau

SEQ ID NO: 2227585 - RNA, 19 nt, Artificial Sequence
  Description of Artificial Sequence: Synthetic oligonucleotide
cgggcaugcaucucuacgu

SEQ ID NO: 2227586 - RNA, 19 nt, Artificial Sequence
  Description of Artificial Sequence: Synthetic oligonucleotide
caggccaggccugcaccga

SEQ ID NO: 2227587 - RNA, 19 nt, Artificial Sequence
  Description of Artificial Sequence: Synthetic oligonucleotide
gccuugcaaaagucagagu

SEQ ID NO: 2227588 - RNA, 19 nt, Artificial Sequence
  Description of Artificial Sequence: Synthetic oligonucleotide
cgaauggcgaggguuaggu

SEQ ID NO: 2227589 - RNA, 19 nt, Artificial Sequence
  Description of Artificial Sequence: Synthetic oligonucleotide
gcgacccagcugucgcaca

SEQ ID NO: 2227590 - RNA, 19 nt, Artificial Sequence
  Description of Artificial Sequence: Synthetic oligonucleotide
ggcgaggguuagguagcga

SEQ ID NO: 2227591 - RNA, 19 nt, Artificial Sequence
  Description of Artificial Sequence: Synthetic oligonucleotide
cacucucccucuccacgau

SEQ ID NO: 2227592 - RNA, 19 nt, Artificial Sequence
  Description of Artificial Sequence: Synthetic oligonucleotide
ggcuuuccucauaggacau

SEQ ID NO: 2227593 - RNA, 19 nt, Artificial Sequence
  Description of Artificial Sequence: Synthetic oligonucleotide
ccuauguagcgggcaugca

SEQ ID NO: 2227594 - RNA, 19 nt, Artificial Sequence
  Description of Artificial Sequence: Synthetic oligonucleotide
cugcaccgaggcagugugu

SEQ ID NO: 2227595 - RNA, 19 nt, Artificial Sequence
  Description of Artificial Sequence: Synthetic oligonucleotide
gcauucgaauggcgagggu

SEQ ID NO: 2227596 - RNA, 19 nt, Artificial Sequence
  Description of Artificial Sequence: Synthetic oligonucleotide
gucccuaggaagggacauu

SEQ ID NO: 2227597 - RNA, 19 nt, Artificial Sequence
  Description of Artificial Sequence: Synthetic oligonucleotide
cgaugugaaggcucuuaau

SEQ ID NO: 2227598 - RNA, 19 nt, Artificial Sequence
  Description of Artificial Sequence: Synthetic oligonucleotide
gccguccacaaaggcagcu

SEQ ID NO: 2227599 - RNA, 19 nt, Artificial Sequence
  Description of Artificial Sequence: Synthetic oligonucleotide
gccugcaccgaggcagugu

SEQ ID NO: 2227600 - RNA, 19 nt, Artificial Sequence
  Description of Artificial Sequence: Synthetic oligonucleotide
gguugccacggcaggcuuu

SEQ ID NO: 2227601 - RNA, 19 nt, Artificial Sequence
  Description of Artificial Sequence: Synthetic oligonucleotide
ggugugcuuugaagauaau

SEQ ID NO: 2227602 - RNA, 19 nt, Artificial Sequence
  Description of Artificial Sequence: Synthetic oligonucleotide
cccuaggaagggacauuau

SEQ ID NO: 2227603 - RNA, 19 nt, Artificial Sequence
  Description of Artificial Sequence: Synthetic oligonucleotide
ccacgaugugaaggcucuu

SEQ ID NO: 2227604 - RNA, 19 nt, Artificial Sequence
  Description of Artificial Sequence: Synthetic oligonucleotide
uuuauuagcaaccacacac

SEQ ID NO: 2227605 - RNA, 19 nt, Artificial Sequence
  Description of Artificial Sequence: Synthetic oligonucleotide
auagaugagaucuccaacc

SEQ ID NO: 2227606 - RNA, 19 nt, Artificial Sequence
  Description of Artificial Sequence: Synthetic oligonucleotide
auagcuuucuaauuaggcc

SEQ ID NO: 2227607 - RNA, 19 nt, Artificial Sequence
  Description of Artificial Sequence: Synthetic oligonucleotide
uuagccaaaauuaaagucu

SEQ ID NO: 2227608 - RNA, 19 nt, Artificial Sequence
  Description of Artificial Sequence: Synthetic oligonucleotide
uauaucuccagauuuagca

SEQ ID NO: 2227609 - RNA, 19 nt, Artificial Sequence
  Description of Artificial Sequence: Synthetic oligonucleotide
ucuaguaagacaauaugca

SEQ ID NO: 2227610 - RNA, 19 nt, Artificial Sequence
  Description of Artificial Sequence: Synthetic oligonucleotide
auuagccaaaauuaaaguc

SEQ ID NO: 2227611 - RNA, 19 nt, Artificial Sequence
  Description of Artificial Sequence: Synthetic oligonucleotide
ucuaauuaggcccaaaguc

SEQ ID NO: 2227612 - RNA, 19 nt, Artificial Sequence
  Description of Artificial Sequence: Synthetic oligonucleotide
uuugccuugacccauauuc

SEQ ID NO: 2227613 - RNA, 19 nt, Artificial Sequence
  Description of Artificial Sequence: Synthetic oligonucleotide
uucuaguaagacaauaugc

SEQ ID NO: 2227614 - RNA, 19 nt, Artificial Sequence
  Description of Artificial Sequence: Synthetic oligonucleotide
uuagcaaccacacacuggc

SEQ ID NO: 2227615 - RNA, 19 nt, Artificial Sequence
  Description of Artificial Sequence: Synthetic oligonucleotide
uuuauuggauucuaguaag

SEQ ID NO: 2227616 - RNA, 19 nt, Artificial Sequence
  Description of Artificial Sequence: Synthetic oligonucleotide
auuaaagucugcugaaugg

SEQ ID NO: 2227617 - RNA, 19 nt, Artificial Sequence
  Description of Artificial Sequence: Synthetic oligonucleotide
aaagauuuccccaggaaac

SEQ ID NO: 2227618 - RNA, 19 nt, Artificial Sequence
  Description of Artificial Sequence: Synthetic oligonucleotide
aaaugagccauuaaagagg

SEQ ID NO: 2227619 - RNA, 19 nt, Artificial Sequence
  Description of Artificial Sequence: Synthetic oligonucleotide
uuggauucuaguaagacaa

SEQ ID NO: 2227620 - RNA, 19 nt, Artificial Sequence
  Description of Artificial Sequence: Synthetic oligonucleotide
cugaauaugugauaggaag

SEQ ID NO: 2227621 - RNA, 19 nt, Artificial Sequence
  Description of Artificial Sequence: Synthetic oligonucleotide
auccuguccaaucacaccc

SEQ ID NO: 2227622 - RNA, 19 nt, Artificial Sequence
  Description of Artificial Sequence: Synthetic oligonucleotide
aagaagcuggcucacuccc

SEQ ID NO: 2227623 - RNA, 19 nt, Artificial Sequence
  Description of Artificial Sequence: Synthetic oligonucleotide
uaagacauuagccaaaauu

SEQ ID NO: 2227624 - RNA, 19 nt, Artificial Sequence
  Description of Artificial Sequence: Synthetic oligonucleotide
agauuuagcaaucacuaug

SEQ ID NO: 2227625 - RNA, 19 nt, Artificial Sequence
  Description of Artificial Sequence: Synthetic oligonucleotide
auuaaagagguguucaugu

SEQ ID NO: 2227626 - RNA, 19 nt, Artificial Sequence
  Description of Artificial Sequence: Synthetic oligonucleotide
uuucuaauuaggcccaaag

SEQ ID NO: 2227627 - RNA, 19 nt, Artificial Sequence
  Description of Artificial Sequence: Synthetic oligonucleotide
ugagaauccacccaguaaa

SEQ ID NO: 2227628 - RNA, 19 nt, Artificial Sequence
  Description of Artificial Sequence: Synthetic oligonucleotide
auauucuuccauucauucc

SEQ ID NO: 2227629 - RNA, 19 nt, Artificial Sequence
  Description of Artificial Sequence: Synthetic oligonucleotide
ucaaaugccagguaagaca

SEQ ID NO: 2227630 - RNA, 19 nt, Artificial Sequence
  Description of Artificial Sequence: Synthetic oligonucleotide
uucaugucaacuuucugcc

SEQ ID NO: 2227631 - RNA, 19 nt, Artificial Sequence
  Description of Artificial Sequence: Synthetic oligonucleotide
aaccaccugauucagcacg

SEQ ID NO: 2227632 - RNA, 19 nt, Artificial Sequence
  Description of Artificial Sequence: Synthetic oligonucleotide
aauacagaccauuucuggu

SEQ ID NO: 2227633 - RNA, 19 nt, Artificial Sequence
  Description of Artificial Sequence: Synthetic oligonucleotide
cuuagucuugacuaaaaug

SEQ ID NO: 2227634 - RNA, 19 nt, Artificial Sequence
  Description of Artificial Sequence: Synthetic oligonucleotide
aauucagacguaaaggcug

SEQ ID NO: 2227635 - RNA, 19 nt, Artificial Sequence
  Description of Artificial Sequence: Synthetic oligonucleotide
cacuaugccaaucacgugg

SEQ ID NO: 2227636 - RNA, 19 nt, Artificial Sequence
  Description of Artificial Sequence: Synthetic oligonucleotide
uuugaauauaucuccagau

SEQ ID NO: 2227637 - RNA, 19 nt, Artificial Sequence
  Description of Artificial Sequence: Synthetic oligonucleotide
acacccauuccauuggccc

SEQ ID NO: 2227638 - RNA, 19 nt, Artificial Sequence
  Description of Artificial Sequence: Synthetic oligonucleotide
caugucuuuauuagcaacc

SEQ ID NO: 2227639 - RNA, 19 nt, Artificial Sequence
  Description of Artificial Sequence: Synthetic oligonucleotide
uaaagagguguucauguca

SEQ ID NO: 2227640 - RNA, 19 nt, Artificial Sequence
  Description of Artificial Sequence: Synthetic oligonucleotide
aagacauuagccaaaauua

SEQ ID NO: 2227641 - RNA, 19 nt, Artificial Sequence
  Description of Artificial Sequence: Synthetic oligonucleotide
gaauccacccaguaaacgc

SEQ ID NO: 2227642 - RNA, 19 nt, Artificial Sequence
  Description of Artificial Sequence: Synthetic oligonucleotide
uuccaugucuuuauuagca

SEQ ID NO: 2227643 - RNA, 19 nt, Artificial Sequence
  Description of Artificial Sequence: Synthetic oligonucleotide
agggagaaccaccugauuc

SEQ ID NO: 2227644 - RNA, 19 nt, Artificial Sequence
  Description of Artificial Sequence: Synthetic oligonucleotide
aaccgacaguacuucagcc

SEQ ID NO: 2227645 - RNA, 19 nt, Artificial Sequence
  Description of Artificial Sequence: Synthetic oligonucleotide
gaauaugugauaggaagag

SEQ ID NO: 2227646 - RNA, 19 nt, Artificial Sequence
  Description of Artificial Sequence: Synthetic oligonucleotide
uuuaguugcuccuucaaau

SEQ ID NO: 2227647 - RNA, 19 nt, Artificial Sequence
  Description of Artificial Sequence: Synthetic oligonucleotide
aaugccagguaagacaaag

SEQ ID NO: 2227648 - RNA, 19 nt, Artificial Sequence
  Description of Artificial Sequence: Synthetic oligonucleotide
auucuaguaagacaauaug

SEQ ID NO: 2227649 - RNA, 19 nt, Artificial Sequence
  Description of Artificial Sequence: Synthetic oligonucleotide
gguaagacaaagaagcugg

SEQ ID NO: 2227650 - RNA, 19 nt, Artificial Sequence
  Description of Artificial Sequence: Synthetic oligonucleotide
gaugagaucuccaaccugc

SEQ ID NO: 2227651 - RNA, 19 nt, Artificial Sequence
  Description of Artificial Sequence: Synthetic oligonucleotide
aaucacguggucuccuuuc

SEQ ID NO: 2227652 - RNA, 19 nt, Artificial Sequence
  Description of Artificial Sequence: Synthetic oligonucleotide
cuaauagcuuucuaauuag

SEQ ID NO: 2227653 - RNA, 19 nt, Artificial Sequence
  Description of Artificial Sequence: Synthetic oligonucleotide
aauaugugauaggaagagg

SEQ ID NO: 2227654 - RNA, 19 nt, Artificial Sequence
  Description of Artificial Sequence: Synthetic oligonucleotide
aaaggcugcuccccggcgc

SEQ ID NO: 2227655 - RNA, 19 nt, Artificial Sequence
  Description of Artificial Sequence: Synthetic oligonucleotide
agcuucuaagacauuagcc

SEQ ID NO: 2227656 - RNA, 19 nt, Artificial Sequence
  Description of Artificial Sequence: Synthetic oligonucleotide
agcgucguaaacccgggcc

SEQ ID NO: 2227657 - RNA, 19 nt, Artificial Sequence
  Description of Artificial Sequence: Synthetic oligonucleotide
uuccauucauuccaaacac

SEQ ID NO: 2227658 - RNA, 19 nt, Artificial Sequence
  Description of Artificial Sequence: Synthetic oligonucleotide
gucuugacuaaaaugagcc

SEQ ID NO: 2227659 - RNA, 19 nt, Artificial Sequence
  Description of Artificial Sequence: Synthetic oligonucleotide
caauacagaccauuucugg

SEQ ID NO: 2227660 - RNA, 19 nt, Artificial Sequence
  Description of Artificial Sequence: Synthetic oligonucleotide
uucuaauuaggcccaaagu

SEQ ID NO: 2227661 - RNA, 19 nt, Artificial Sequence
  Description of Artificial Sequence: Synthetic oligonucleotide
gauaggaagagguucaucu

SEQ ID NO: 2227662 - RNA, 19 nt, Artificial Sequence
  Description of Artificial Sequence: Synthetic oligonucleotide
ugcacauucggucuguuuc

SEQ ID NO: 2227663 - RNA, 19 nt, Artificial Sequence
  Description of Artificial Sequence: Synthetic oligonucleotide
auuuagcaaucacuaugcc

SEQ ID NO: 2227664 - RNA, 19 nt, Artificial Sequence
  Description of Artificial Sequence: Synthetic oligonucleotide
cuaauuaggcccaaaguca

SEQ ID NO: 2227665 - RNA, 19 nt, Artificial Sequence
  Description of Artificial Sequence: Synthetic oligonucleotide
uuauuagcaaccacacacu

SEQ ID NO: 2227666 - RNA, 19 nt, Artificial Sequence
  Description of Artificial Sequence: Synthetic oligonucleotide
aacacaaucuccaauggau

SEQ ID NO: 2227667 - RNA, 19 nt, Artificial Sequence
  Description of Artificial Sequence: Synthetic oligonucleotide
gauuucacaaucuggagcu

SEQ ID NO: 2227668 - RNA, 19 nt, Artificial Sequence
  Description of Artificial Sequence: Synthetic oligonucleotide
uuaguugcuccuucaaaug

SEQ ID NO: 2227669 - RNA, 19 nt, Artificial Sequence
  Description of Artificial Sequence: Synthetic oligonucleotide
ucauguguucacaagcuuc

SEQ ID NO: 2227670 - RNA, 19 nt, Artificial Sequence
  Description of Artificial Sequence: Synthetic oligonucleotide
ucacaagcuucuaagacau

SEQ ID NO: 2227671 - RNA, 19 nt, Artificial Sequence
  Description of Artificial Sequence: Synthetic oligonucleotide
acuuugaauauaucuccag

SEQ ID NO: 2227672 - RNA, 19 nt, Artificial Sequence
  Description of Artificial Sequence: Synthetic oligonucleotide
ugcacgauuucacaaucug

SEQ ID NO: 2227673 - RNA, 19 nt, Artificial Sequence
  Description of Artificial Sequence: Synthetic oligonucleotide
agucuugacuaaaaugagc

SEQ ID NO: 2227674 - RNA, 19 nt, Artificial Sequence
  Description of Artificial Sequence: Synthetic oligonucleotide
ucuccaaccugcacauucg

SEQ ID NO: 2227675 - RNA, 19 nt, Artificial Sequence
  Description of Artificial Sequence: Synthetic oligonucleotide
agacguaaaggcugcuccc

SEQ ID NO: 2227676 - RNA, 19 nt, Artificial Sequence
  Description of Artificial Sequence: Synthetic oligonucleotide
ugccagguaagacaaagaa

SEQ ID NO: 2227677 - RNA, 19 nt, Artificial Sequence
  Description of Artificial Sequence: Synthetic oligonucleotide
aaugagccauuaaagaggu

SEQ ID NO: 2227678 - RNA, 19 nt, Artificial Sequence
  Description of Artificial Sequence: Synthetic oligonucleotide
uuucccaaccgacaguacu

SEQ ID NO: 2227679 - RNA, 19 nt, Artificial Sequence
  Description of Artificial Sequence: Synthetic oligonucleotide
uuuuaguugcuccuucaaa

SEQ ID NO: 2227680 - RNA, 19 nt, Artificial Sequence
  Description of Artificial Sequence: Synthetic oligonucleotide
accgcuucuguugagaauc

SEQ ID NO: 2227681 - RNA, 19 nt, Artificial Sequence
  Description of Artificial Sequence: Synthetic oligonucleotide
augugauaggaagagguuc

SEQ ID NO: 2227682 - RNA, 19 nt, Artificial Sequence
  Description of Artificial Sequence: Synthetic oligonucleotide
cacaaucuccaauggauag

SEQ ID NO: 2227683 - RNA, 19 nt, Artificial Sequence
  Description of Artificial Sequence: Synthetic oligonucleotide
cacaaucuggagcuaauag

SEQ ID NO: 2227684 - RNA, 19 nt, Artificial Sequence
  Description of Artificial Sequence: Synthetic oligonucleotide
aucuccaauggauagaguu

SEQ ID NO: 2227685 - RNA, 19 nt, Artificial Sequence
  Description of Artificial Sequence: Synthetic oligonucleotide
acacuuggugaccagcagg

SEQ ID NO: 2227686 - RNA, 19 nt, Artificial Sequence
  Description of Artificial Sequence: Synthetic oligonucleotide
ucugaauaugugauaggaa

SEQ ID NO: 2227687 - RNA, 19 nt, Artificial Sequence
  Description of Artificial Sequence: Synthetic oligonucleotide
aucacuaugccaaucacgu

SEQ ID NO: 2227688 - RNA, 19 nt, Artificial Sequence
  Description of Artificial Sequence: Synthetic oligonucleotide
augccaaucacguggucuc

SEQ ID NO: 2227689 - RNA, 19 nt, Artificial Sequence
  Description of Artificial Sequence: Synthetic oligonucleotide
uuaaagucugcugaauggu

SEQ ID NO: 2227690 - RNA, 19 nt, Artificial Sequence
  Description of Artificial Sequence: Synthetic oligonucleotide
uauuggauucuaguaagac

SEQ ID NO: 2227691 - RNA, 19 nt, Artificial Sequence
  Description of Artificial Sequence: Synthetic oligonucleotide
guucacaagcuucuaagac

SEQ ID NO: 2227692 - RNA, 19 nt, Artificial Sequence
  Description of Artificial Sequence: Synthetic oligonucleotide
aagagcagaccauccuguc

SEQ ID NO: 2227693 - RNA, 19 nt, Artificial Sequence
  Description of Artificial Sequence: Synthetic oligonucleotide
uuauuggauucuaguaaga

SEQ ID NO: 2227694 - RNA, 19 nt, Artificial Sequence
  Description of Artificial Sequence: Synthetic oligonucleotide
agucuggcaaaguauuuug

SEQ ID NO: 2227695 - RNA, 19 nt, Artificial Sequence
  Description of Artificial Sequence: Synthetic oligonucleotide
cuuggugaccagcaggcgg

SEQ ID NO: 2227696 - RNA, 19 nt, Artificial Sequence
  Description of Artificial Sequence: Synthetic oligonucleotide
uuuguaucuguggucaugu

SEQ ID NO: 2227697 - RNA, 19 nt, Artificial Sequence
  Description of Artificial Sequence: Synthetic oligonucleotide
uagaugagaucuccaaccu

SEQ ID NO: 2227698 - RNA, 19 nt, Artificial Sequence
  Description of Artificial Sequence: Synthetic oligonucleotide
cagacguaaaggcugcucc

SEQ ID NO: 2227699 - RNA, 19 nt, Artificial Sequence
  Description of Artificial Sequence: Synthetic oligonucleotide
cacgauuucacaaucugga

SEQ ID NO: 2227700 - RNA, 19 nt, Artificial Sequence
  Description of Artificial Sequence: Synthetic oligonucleotide
accgauucuuucccaaccg

SEQ ID NO: 2227701 - RNA, 19 nt, Artificial Sequence
  Description of Artificial Sequence: Synthetic oligonucleotide
uucggucuguuucuuuuag

SEQ ID NO: 2227702 - RNA, 19 nt, Artificial Sequence
  Description of Artificial Sequence: Synthetic oligonucleotide
ggaaacuuagucuugacua

SEQ ID NO: 2227703 - RNA, 19 nt, Artificial Sequence
  Description of Artificial Sequence: Synthetic oligonucleotide
caagcuucuaagacauuag

SEQ ID NO: 2227704 - RNA, 19 nt, Artificial Sequence
  Description of Artificial Sequence: Synthetic oligonucleotide
cacuuggugaccagcaggc

SEQ ID NO: 2227705 - RNA, 19 nt, Artificial Sequence
  Description of Artificial Sequence: Synthetic oligonucleotide
aggaaacuuagucuugacu

SEQ ID NO: 2227706 - RNA, 19 nt, Artificial Sequence
  Description of Artificial Sequence: Synthetic oligonucleotide
uaugcaucuucugaauaug

SEQ ID NO: 2227707 - RNA, 19 nt, Artificial Sequence
  Description of Artificial Sequence: Synthetic oligonucleotide
uugaagagcagaccauccu

SEQ ID NO: 2227708 - RNA, 19 nt, Artificial Sequence
  Description of Artificial Sequence: Synthetic oligonucleotide
guacguaccgcuucuguug

SEQ ID NO: 2227709 - RNA, 19 nt, Artificial Sequence
  Description of Artificial Sequence: Synthetic oligonucleotide
uaucuccagauuuagcaau

SEQ ID NO: 2227710 - RNA, 19 nt, Artificial Sequence
  Description of Artificial Sequence: Synthetic oligonucleotide
gacaguacuucagccauag

SEQ ID NO: 2227711 - RNA, 19 nt, Artificial Sequence
  Description of Artificial Sequence: Synthetic oligonucleotide
aaacccgggccacacacga

SEQ ID NO: 2227712 - RNA, 19 nt, Artificial Sequence
  Description of Artificial Sequence: Synthetic oligonucleotide
acguggucuccuuucacgg

SEQ ID NO: 2227713 - RNA, 19 nt, Artificial Sequence
  Description of Artificial Sequence: Synthetic oligonucleotide
gucaauacagaccauuucu

SEQ ID NO: 2227714 - RNA, 19 nt, Artificial Sequence
  Description of Artificial Sequence: Synthetic oligonucleotide
cuccuuguggcgcaggcgg

SEQ ID NO: 2227715 - RNA, 19 nt, Artificial Sequence
  Description of Artificial Sequence: Synthetic oligonucleotide
acgauuucacaaucuggag

SEQ ID NO: 2227716 - RNA, 19 nt, Artificial Sequence
  Description of Artificial Sequence: Synthetic oligonucleotide
ccaaacacaaucuccaaug

SEQ ID NO: 2227717 - RNA, 19 nt, Artificial Sequence
  Description of Artificial Sequence: Synthetic oligonucleotide
auucagacguaaaggcugc

SEQ ID NO: 2227718 - RNA, 19 nt, Artificial Sequence
  Description of Artificial Sequence: Synthetic oligonucleotide
cuuugaauauaucuccaga

SEQ ID NO: 2227719 - RNA, 19 nt, Artificial Sequence
  Description of Artificial Sequence: Synthetic oligonucleotide
aacuuugaauauaucucca

SEQ ID NO: 2227720 - RNA, 19 nt, Artificial Sequence
  Description of Artificial Sequence: Synthetic oligonucleotide
uccauucauuccaaacaca

SEQ ID NO: 2227721 - RNA, 19 nt, Artificial Sequence
  Description of Artificial Sequence: Synthetic oligonucleotide
agaauccacccaguaaacg

SEQ ID NO: 2227722 - RNA, 19 nt, Artificial Sequence
  Description of Artificial Sequence: Synthetic oligonucleotide
gauagaguuuucccaguuc

SEQ ID NO: 2227723 - RNA, 19 nt, Artificial Sequence
  Description of Artificial Sequence: Synthetic oligonucleotide
aaggccgucuacguccucg

SEQ ID NO: 2227724 - RNA, 19 nt, Artificial Sequence
  Description of Artificial Sequence: Synthetic oligonucleotide
ugucuuuauuagcaaccac

SEQ ID NO: 2227725 - RNA, 19 nt, Artificial Sequence
  Description of Artificial Sequence: Synthetic oligonucleotide
uaugugauaggaagagguu

SEQ ID NO: 2227726 - RNA, 19 nt, Artificial Sequence
  Description of Artificial Sequence: Synthetic oligonucleotide
agguaagacaaagaagcug

SEQ ID NO: 2227727 - RNA, 19 nt, Artificial Sequence
  Description of Artificial Sequence: Synthetic oligonucleotide
cacguggucuccuuucacg

SEQ ID NO: 2227728 - RNA, 19 nt, Artificial Sequence
  Description of Artificial Sequence: Synthetic oligonucleotide
aguuccugcacgauuucac

SEQ ID NO: 2227729 - RNA, 19 nt, Artificial Sequence
  Description of Artificial Sequence: Synthetic oligonucleotide
uaaacccgggccacacacg

SEQ ID NO: 2227730 - RNA, 19 nt, Artificial Sequence
  Description of Artificial Sequence: Synthetic oligonucleotide
ucuacguccucgugcuccg

SEQ ID NO: 2227731 - RNA, 19 nt, Artificial Sequence
  Description of Artificial Sequence: Synthetic oligonucleotide
ucuaagacauuagccaaaa

SEQ ID NO: 2227732 - RNA, 19 nt, Artificial Sequence
  Description of Artificial Sequence: Synthetic oligonucleotide
auacagaccauuucugguu

SEQ ID NO: 2227733 - RNA, 19 nt, Artificial Sequence
  Description of Artificial Sequence: Synthetic oligonucleotide
uugacuaaaaugagccauu

SEQ ID NO: 2227734 - RNA, 19 nt, Artificial Sequence
  Description of Artificial Sequence: Synthetic oligonucleotide
gauucagcacguugugcgc

SEQ ID NO: 2227735 - RNA, 19 nt, Artificial Sequence
  Description of Artificial Sequence: Synthetic oligonucleotide
guaaacccgggccacacac

SEQ ID NO: 2227736 - RNA, 19 nt, Artificial Sequence
  Description of Artificial Sequence: Synthetic oligonucleotide
aacaucaacuuugaauaua

SEQ ID NO: 2227737 - RNA, 19 nt, Artificial Sequence
  Description of Artificial Sequence: Synthetic oligonucleotide
gucacuuugaagagcagac

SEQ ID NO: 2227738 - RNA, 19 nt, Artificial Sequence
  Description of Artificial Sequence: Synthetic oligonucleotide
cacagcugucaauacagac

SEQ ID NO: 2227739 - RNA, 19 nt, Artificial Sequence
  Description of Artificial Sequence: Synthetic oligonucleotide
agcacguugugcgcuaccc

SEQ ID NO: 2227740 - RNA, 19 nt, Artificial Sequence
  Description of Artificial Sequence: Synthetic oligonucleotide
acuuagucuugacuaaaau

SEQ ID NO: 2227741 - RNA, 19 nt, Artificial Sequence
  Description of Artificial Sequence: Synthetic oligonucleotide
uucacggguacguaccgcu

SEQ ID NO: 2227742 - RNA, 19 nt, Artificial Sequence
  Description of Artificial Sequence: Synthetic oligonucleotide
cacguugugcgcuacccgc

SEQ ID NO: 2227743 - RNA, 19 nt, Artificial Sequence
  Description of Artificial Sequence: Synthetic oligonucleotide
agacaauaugcaucuucug

SEQ ID NO: 2227744 - RNA, 19 nt, Artificial Sequence
  Description of Artificial Sequence: Synthetic oligonucleotide
cagcugucaauacagacca

SEQ ID NO: 2227745 - RNA, 19 nt, Artificial Sequence
  Description of Artificial Sequence: Synthetic oligonucleotide
cgaauucagacguaaaggc

SEQ ID NO: 2227746 - RNA, 19 nt, Artificial Sequence
  Description of Artificial Sequence: Synthetic oligonucleotide
uugccuugacccauauucu

SEQ ID NO: 2227747 - RNA, 19 nt, Artificial Sequence
  Description of Artificial Sequence: Synthetic oligonucleotide
caaccgacaguacuucagc

SEQ ID NO: 2227748 - RNA, 19 nt, Artificial Sequence
  Description of Artificial Sequence: Synthetic oligonucleotide
gcuaauagcuuucuaauua

SEQ ID NO: 2227749 - RNA, 19 nt, Artificial Sequence
  Description of Artificial Sequence: Synthetic oligonucleotide
acaagcuucuaagacauua

SEQ ID NO: 2227750 - RNA, 19 nt, Artificial Sequence
  Description of Artificial Sequence: Synthetic oligonucleotide
ucuccuuucacggguacgu

SEQ ID NO: 2227751 - RNA, 19 nt, Artificial Sequence
  Description of Artificial Sequence: Synthetic oligonucleotide
uacguaccgcuucuguuga

SEQ ID NO: 2227752 - RNA, 19 nt, Artificial Sequence
  Description of Artificial Sequence: Synthetic oligonucleotide
ucuguggucauguguucac

SEQ ID NO: 2227753 - RNA, 19 nt, Artificial Sequence
  Description of Artificial Sequence: Synthetic oligonucleotide
agagguguucaugucaacu

SEQ ID NO: 2227754 - RNA, 19 nt, Artificial Sequence
  Description of Artificial Sequence: Synthetic oligonucleotide
ggagcuaauagcuuucuaa

SEQ ID NO: 2227755 - RNA, 19 nt, Artificial Sequence
  Description of Artificial Sequence: Synthetic oligonucleotide
uguggucauguguucacaa

SEQ ID NO: 2227756 - RNA, 19 nt, Artificial Sequence
  Description of Artificial Sequence: Synthetic oligonucleotide
acguaaaggcugcuccccg

SEQ ID NO: 2227757 - RNA, 19 nt, Artificial Sequence
  Description of Artificial Sequence: Synthetic oligonucleotide
uuucccaguuccugcacga

SEQ ID NO: 2227758 - RNA, 19 nt, Artificial Sequence
  Description of Artificial Sequence: Synthetic oligonucleotide
ucacuuugaagagcagacc

SEQ ID NO: 2227759 - RNA, 19 nt, Artificial Sequence
  Description of Artificial Sequence: Synthetic oligonucleotide
aagucugcugaaugguuuu

SEQ ID NO: 2227760 - RNA, 19 nt, Artificial Sequence
  Description of Artificial Sequence: Synthetic oligonucleotide
cuuucacggguacguaccg

SEQ ID NO: 2227761 - RNA, 19 nt, Artificial Sequence
  Description of Artificial Sequence: Synthetic oligonucleotide
acccaguaaacgccaccgc

SEQ ID NO: 2227762 - RNA, 19 nt, Artificial Sequence
  Description of Artificial Sequence: Synthetic oligonucleotide
gacauuagccaaaauuaaa

SEQ ID NO: 2227763 - RNA, 19 nt, Artificial Sequence
  Description of Artificial Sequence: Synthetic oligonucleotide
gacccauauucuuccauuc

SEQ ID NO: 2227764 - RNA, 19 nt, Artificial Sequence
  Description of Artificial Sequence: Synthetic oligonucleotide
uucagccauagcaggaguc

SEQ ID NO: 2227765 - RNA, 19 nt, Artificial Sequence
  Description of Artificial Sequence: Synthetic oligonucleotide
aaagucugcugaaugguuu

SEQ ID NO: 2227766 - RNA, 19 nt, Artificial Sequence
  Description of Artificial Sequence: Synthetic oligonucleotide
uccuuucacggguacguac

SEQ ID NO: 2227767 - RNA, 19 nt, Artificial Sequence
  Description of Artificial Sequence: Synthetic oligonucleotide
cacccaguaaacgccaccg

SEQ ID NO: 2227768 - RNA, 19 nt, Artificial Sequence
  Description of Artificial Sequence: Synthetic oligonucleotide
cacccauuccauuggcccg

SEQ ID NO: 2227769 - RNA, 19 nt, Artificial Sequence
  Description of Artificial Sequence: Synthetic oligonucleotide
agcuaauagcuuucuaauu

SEQ ID NO: 2227770 - RNA, 19 nt, Artificial Sequence
  Description of Artificial Sequence: Synthetic oligonucleotide
ugagaucuccaaccugcac

SEQ ID NO: 2227771 - RNA, 19 nt, Artificial Sequence
  Description of Artificial Sequence: Synthetic oligonucleotide
ugacccauauucuuccauu

SEQ ID NO: 2227772 - RNA, 19 nt, Artificial Sequence
  Description of Artificial Sequence: Synthetic oligonucleotide
ccgaauucagacguaaagg

SEQ ID NO: 2227773 - RNA, 19 nt, Artificial Sequence
  Description of Artificial Sequence: Synthetic oligonucleotide
agccauuaaagagguguuc

SEQ ID NO: 2227774 - RNA, 19 nt, Artificial Sequence
  Description of Artificial Sequence: Synthetic oligonucleotide
gacguaaaggcugcucccc

SEQ ID NO: 2227775 - RNA, 19 nt, Artificial Sequence
  Description of Artificial Sequence: Synthetic oligonucleotide
uucccaaccgacaguacuu

SEQ ID NO: 2227776 - RNA, 19 nt, Artificial Sequence
  Description of Artificial Sequence: Synthetic oligonucleotide
augucuuuauuagcaacca

SEQ ID NO: 2227777 - RNA, 19 nt, Artificial Sequence
  Description of Artificial Sequence: Synthetic oligonucleotide
cagaccauccuguccaauc

SEQ ID NO: 2227778 - RNA, 19 nt, Artificial Sequence
  Description of Artificial Sequence: Synthetic oligonucleotide
agcaaucacuaugccaauc

SEQ ID NO: 2227779 - RNA, 19 nt, Artificial Sequence
  Description of Artificial Sequence: Synthetic oligonucleotide
gauucuaguaagacaauau

SEQ ID NO: 2227780 - RNA, 19 nt, Artificial Sequence
  Description of Artificial Sequence: Synthetic oligonucleotide
ccaguaaacgccaccgccg

SEQ ID NO: 2227781 - RNA, 19 nt, Artificial Sequence
  Description of Artificial Sequence: Synthetic oligonucleotide
guaaaggcugcuccccggc

SEQ ID NO: 2227782 - RNA, 19 nt, Artificial Sequence
  Description of Artificial Sequence: Synthetic oligonucleotide
ugccagucuggcaaaguau

SEQ ID NO: 2227783 - RNA, 19 nt, Artificial Sequence
  Description of Artificial Sequence: Synthetic oligonucleotide
caguaaacgccaccgccgc

SEQ ID NO: 2227784 - RNA, 19 nt, Artificial Sequence
  Description of Artificial Sequence: Synthetic oligonucleotide
acccauauucuuccauuca

SEQ ID NO: 2227785 - RNA, 19 nt, Artificial Sequence
  Description of Artificial Sequence: Synthetic oligonucleotide
uuccugcacgauuucacaa

SEQ ID NO: 2227786 - RNA, 19 nt, Artificial Sequence
  Description of Artificial Sequence: Synthetic oligonucleotide
agccaaaauuaaagucugc

SEQ ID NO: 2227787 - RNA, 19 nt, Artificial Sequence
  Description of Artificial Sequence: Synthetic oligonucleotide
uugcuccuucaaaugccag

SEQ ID NO: 2227788 - RNA, 19 nt, Artificial Sequence
  Description of Artificial Sequence: Synthetic oligonucleotide
uccugcacgauuucacaau

SEQ ID NO: 2227789 - RNA, 19 nt, Artificial Sequence
  Description of Artificial Sequence: Synthetic oligonucleotide
ugguuccaugucuuuauua

SEQ ID NO: 2227790 - RNA, 19 nt, Artificial Sequence
  Description of Artificial Sequence: Synthetic oligonucleotide
accugauucagcacguugu

SEQ ID NO: 2227791 - RNA, 19 nt, Artificial Sequence
  Description of Artificial Sequence: Synthetic oligonucleotide
ugacuaaaaugagccauua

SEQ ID NO: 2227792 - RNA, 19 nt, Artificial Sequence
  Description of Artificial Sequence: Synthetic oligonucleotide
ucuccagauuuagcaauca

SEQ ID NO: 2227793 - RNA, 19 nt, Artificial Sequence
  Description of Artificial Sequence: Synthetic oligonucleotide
acaaucuccaauggauaga

SEQ ID NO: 2227794 - RNA, 19 nt, Artificial Sequence
  Description of Artificial Sequence: Synthetic oligonucleotide
uugugcgcuacccgcgccc

SEQ ID NO: 2227795 - RNA, 19 nt, Artificial Sequence
  Description of Artificial Sequence: Synthetic oligonucleotide
gaauucagacguaaaggcu

SEQ ID NO: 2227796 - RNA, 19 nt, Artificial Sequence
  Description of Artificial Sequence: Synthetic oligonucleotide
gacuaaaaugagccauuaa

SEQ ID NO: 2227797 - RNA, 19 nt, Artificial Sequence
  Description of Artificial Sequence: Synthetic oligonucleotide
agguguucaugucaacuuu

SEQ ID NO: 2227798 - RNA, 19 nt, Artificial Sequence
  Description of Artificial Sequence: Synthetic oligonucleotide
uggcucacucccuccaaca

SEQ ID NO: 2227799 - RNA, 19 nt, Artificial Sequence
  Description of Artificial Sequence: Synthetic oligonucleotide
aucacguggucuccuuuca

SEQ ID NO: 2227800 - RNA, 19 nt, Artificial Sequence
  Description of Artificial Sequence: Synthetic oligonucleotide
uggauucuaguaagacaau

SEQ ID NO: 2227801 - RNA, 19 nt, Artificial Sequence
  Description of Artificial Sequence: Synthetic oligonucleotide
acacuggccauagaugaga

SEQ ID NO: 2227802 - RNA, 19 nt, Artificial Sequence
  Description of Artificial Sequence: Synthetic oligonucleotide
ccuuucacggguacguacc

SEQ ID NO: 2227803 - RNA, 19 nt, Artificial Sequence
  Description of Artificial Sequence: Synthetic oligonucleotide
guaagacaaagaagcuggc

SEQ ID NO: 2227804 - RNA, 19 nt, Artificial Sequence
  Description of Artificial Sequence: Synthetic oligonucleotide
gggagaaccaccugauuca

SEQ ID NO: 2227805 - RNA, 19 nt, Artificial Sequence
  Description of Artificial Sequence: Synthetic oligonucleotide
uuguaucuguggucaugug

SEQ ID NO: 2227806 - RNA, 19 nt, Artificial Sequence
  Description of Artificial Sequence: Synthetic oligonucleotide
uaucuguggucauguguuc

SEQ ID NO: 2227807 - RNA, 19 nt, Artificial Sequence
  Description of Artificial Sequence: Synthetic oligonucleotide
ccaaccugcacauucgguc

SEQ ID NO: 2227808 - RNA, 19 nt, Artificial Sequence
  Description of Artificial Sequence: Synthetic oligonucleotide
cuaguaagacaauaugcau

SEQ ID NO: 2227809 - RNA, 19 nt, Artificial Sequence
  Description of Artificial Sequence: Synthetic oligonucleotide
uccaauggauagaguuuuc

SEQ ID NO: 2227810 - RNA, 19 nt, Artificial Sequence
  Description of Artificial Sequence: Synthetic oligonucleotide
caccugauucagcacguug

SEQ ID NO: 2227811 - RNA, 19 nt, Artificial Sequence
  Description of Artificial Sequence: Synthetic oligonucleotide
augucaacuuucugccagu

SEQ ID NO: 2227812 - RNA, 19 nt, Artificial Sequence
  Description of Artificial Sequence: Synthetic oligonucleotide
gcacgauuucacaaucugg

SEQ ID NO: 2227813 - RNA, 19 nt, Artificial Sequence
  Description of Artificial Sequence: Synthetic oligonucleotide
ucagacguaaaggcugcuc

SEQ ID NO: 2227814 - RNA, 19 nt, Artificial Sequence
  Description of Artificial Sequence: Synthetic oligonucleotide
cacacuuggugaccagcag

SEQ ID NO: 2227815 - RNA, 19 nt, Artificial Sequence
  Description of Artificial Sequence: Synthetic oligonucleotide
guugagaauccacccagua

SEQ ID NO: 2227816 - RNA, 19 nt, Artificial Sequence
  Description of Artificial Sequence: Synthetic oligonucleotide
cuugacuaaaaugagccau

SEQ ID NO: 2227817 - RNA, 19 nt, Artificial Sequence
  Description of Artificial Sequence: Synthetic oligonucleotide
caggaaacuuagucuugac

SEQ ID NO: 2227818 - RNA, 19 nt, Artificial Sequence
  Description of Artificial Sequence: Synthetic oligonucleotide
ugccuugacccauauucuu

SEQ ID NO: 2227819 - RNA, 19 nt, Artificial Sequence
  Description of Artificial Sequence: Synthetic oligonucleotide
acuaugccaaucacguggu

SEQ ID NO: 2227820 - RNA, 19 nt, Artificial Sequence
  Description of Artificial Sequence: Synthetic oligonucleotide
uuucacggguacguaccgc

SEQ ID NO: 2227821 - RNA, 19 nt, Artificial Sequence
  Description of Artificial Sequence: Synthetic oligonucleotide
acgacgcgcagccgcgggc

SEQ ID NO: 2227822 - RNA, 19 nt, Artificial Sequence
  Description of Artificial Sequence: Synthetic oligonucleotide
uggagcuaauagcuuucua

SEQ ID NO: 2227823 - RNA, 19 nt, Artificial Sequence
  Description of Artificial Sequence: Synthetic oligonucleotide
uuuccccaggaaacuuagu

SEQ ID NO: 2227824 - RNA, 19 nt, Artificial Sequence
  Description of Artificial Sequence: Synthetic oligonucleotide
ucuuuguaucuguggucau

SEQ ID NO: 2227825 - RNA, 19 nt, Artificial Sequence
  Description of Artificial Sequence: Synthetic oligonucleotide
ugugcgcuacccgcgcccg

SEQ ID NO: 2227826 - RNA, 19 nt, Artificial Sequence
  Description of Artificial Sequence: Synthetic oligonucleotide
cccaguaaacgccaccgcc

SEQ ID NO: 2227827 - RNA, 19 nt, Artificial Sequence
  Description of Artificial Sequence: Synthetic oligonucleotide
ccaauggauagaguuuucc

SEQ ID NO: 2227828 - RNA, 19 nt, Artificial Sequence
  Description of Artificial Sequence: Synthetic oligonucleotide
gagguguucaugucaacuu

SEQ ID NO: 2227829 - RNA, 19 nt, Artificial Sequence
  Description of Artificial Sequence: Synthetic oligonucleotide
aacgccaccgccgccuccu

SEQ ID NO: 2227830 - RNA, 19 nt, Artificial Sequence
  Description of Artificial Sequence: Synthetic oligonucleotide
acuuugaagagcagaccau

SEQ ID NO: 2227831 - RNA, 19 nt, Artificial Sequence
  Description of Artificial Sequence: Synthetic oligonucleotide
gccauuaaagagguguuca

SEQ ID NO: 2227832 - RNA, 19 nt, Artificial Sequence
  Description of Artificial Sequence: Synthetic oligonucleotide
auucggucuguuucuuuua

SEQ ID NO: 2227833 - RNA, 19 nt, Artificial Sequence
  Description of Artificial Sequence: Synthetic oligonucleotide
aggcgguccccgcagcguc

SEQ ID NO: 2227834 - RNA, 19 nt, Artificial Sequence
  Description of Artificial Sequence: Synthetic oligonucleotide
ucccaguuccugcacgauu

SEQ ID NO: 2227835 - RNA, 19 nt, Artificial Sequence
  Description of Artificial Sequence: Synthetic oligonucleotide
cauuucugguuccaugucu

SEQ ID NO: 2227836 - RNA, 19 nt, Artificial Sequence
  Description of Artificial Sequence: Synthetic oligonucleotide
ugucaacuuucugccaguc

SEQ ID NO: 2227837 - RNA, 19 nt, Artificial Sequence
  Description of Artificial Sequence: Synthetic oligonucleotide
gucuccuuucacggguacg

SEQ ID NO: 2227838 - RNA, 19 nt, Artificial Sequence
  Description of Artificial Sequence: Synthetic oligonucleotide
gcccaaagucacuuugaag

SEQ ID NO: 2227839 - RNA, 19 nt, Artificial Sequence
  Description of Artificial Sequence: Synthetic oligonucleotide
ucguaaacccgggccacac

SEQ ID NO: 2227840 - RNA, 19 nt, Artificial Sequence
  Description of Artificial Sequence: Synthetic oligonucleotide
cuuucccaaccgacaguac

SEQ ID NO: 2227841 - RNA, 19 nt, Artificial Sequence
  Description of Artificial Sequence: Synthetic oligonucleotide
gccgucuacguccucgugc

SEQ ID NO: 2227842 - RNA, 19 nt, Artificial Sequence
  Description of Artificial Sequence: Synthetic oligonucleotide
uuuugccuugacccauauu

SEQ ID NO: 2227843 - RNA, 19 nt, Artificial Sequence
  Description of Artificial Sequence: Synthetic oligonucleotide
cccgcagcgucguaaaccc

SEQ ID NO: 2227844 - RNA, 19 nt, Artificial Sequence
  Description of Artificial Sequence: Synthetic oligonucleotide
guaucuguggucauguguu

SEQ ID NO: 2227845 - RNA, 19 nt, Artificial Sequence
  Description of Artificial Sequence: Synthetic oligonucleotide
uuaggcccaaagucacuuu

SEQ ID NO: 2227846 - RNA, 19 nt, Artificial Sequence
  Description of Artificial Sequence: Synthetic oligonucleotide
cacucccuccaacaucaac

SEQ ID NO: 2227847 - RNA, 19 nt, Artificial Sequence
  Description of Artificial Sequence: Synthetic oligonucleotide
acguugugcgcuacccgcg

SEQ ID NO: 2227848 - RNA, 19 nt, Artificial Sequence
  Description of Artificial Sequence: Synthetic oligonucleotide
cacggguacguaccgcuuc

SEQ ID NO: 2227849 - RNA, 19 nt, Artificial Sequence
  Description of Artificial Sequence: Synthetic oligonucleotide
uucagcacguugugcgcua

SEQ ID NO: 2227850 - RNA, 19 nt, Artificial Sequence
  Description of Artificial Sequence: Synthetic oligonucleotide
uagcaaucacuaugccaau

SEQ ID NO: 2227851 - RNA, 19 nt, Artificial Sequence
  Description of Artificial Sequence: Synthetic oligonucleotide
guaccgcuucuguugagaa

SEQ ID NO: 2227852 - RNA, 19 nt, Artificial Sequence
  Description of Artificial Sequence: Synthetic oligonucleotide
cuccggcagcaccagcucc

SEQ ID NO: 2227853 - RNA, 19 nt, Artificial Sequence
  Description of Artificial Sequence: Synthetic oligonucleotide
gguguucaugucaacuuuc

SEQ ID NO: 2227854 - RNA, 19 nt, Artificial Sequence
  Description of Artificial Sequence: Synthetic oligonucleotide
guugugcgcuacccgcgcc

SEQ ID NO: 2227855 - RNA, 19 nt, Artificial Sequence
  Description of Artificial Sequence: Synthetic oligonucleotide
uaccgcuucuguugagaau

SEQ ID NO: 2227856 - RNA, 19 nt, Artificial Sequence
  Description of Artificial Sequence: Synthetic oligonucleotide
ucccaaccgacaguacuuc

SEQ ID NO: 2227857 - RNA, 19 nt, Artificial Sequence
  Description of Artificial Sequence: Synthetic oligonucleotide
ggagaaccaccugauucag

SEQ ID NO: 2227858 - RNA, 19 nt, Artificial Sequence
  Description of Artificial Sequence: Synthetic oligonucleotide
ugccaaucacguggucucc

SEQ ID NO: 2227859 - RNA, 19 nt, Artificial Sequence
  Description of Artificial Sequence: Synthetic oligonucleotide
uccgggcuccuuguggcgc

SEQ ID NO: 2227860 - RNA, 19 nt, Artificial Sequence
  Description of Artificial Sequence: Synthetic oligonucleotide
gcacguugugcgcuacccg

SEQ ID NO: 2227861 - RNA, 19 nt, Artificial Sequence
  Description of Artificial Sequence: Synthetic oligonucleotide
caaccugcacauucggucu

SEQ ID NO: 2227862 - RNA, 19 nt, Artificial Sequence
  Description of Artificial Sequence: Synthetic oligonucleotide
gccaaaauuaaagucugcu

SEQ ID NO: 2227863 - RNA, 19 nt, Artificial Sequence
  Description of Artificial Sequence: Synthetic oligonucleotide
acauucggucuguuucuuu

SEQ ID NO: 2227864 - RNA, 19 nt, Artificial Sequence
  Description of Artificial Sequence: Synthetic oligonucleotide
cgauucuuucccaaccgac

SEQ ID NO: 2227865 - RNA, 19 nt, Artificial Sequence
  Description of Artificial Sequence: Synthetic oligonucleotide
ccggccaccgauucuuucc

SEQ ID NO: 2227866 - RNA, 19 nt, Artificial Sequence
  Description of Artificial Sequence: Synthetic oligonucleotide
ggauucuaguaagacaaua

SEQ ID NO: 2227867 - RNA, 19 nt, Artificial Sequence
  Description of Artificial Sequence: Synthetic oligonucleotide
ugcgcuacccgcgcccggc

SEQ ID NO: 2227868 - RNA, 19 nt, Artificial Sequence
  Description of Artificial Sequence: Synthetic oligonucleotide
cagguaagacaaagaagcu

SEQ ID NO: 2227869 - RNA, 19 nt, Artificial Sequence
  Description of Artificial Sequence: Synthetic oligonucleotide
augagaucuccaaccugca

SEQ ID NO: 2227870 - RNA, 19 nt, Artificial Sequence
  Description of Artificial Sequence: Synthetic oligonucleotide
cuccgggcuccuuguggcg

SEQ ID NO: 2227871 - RNA, 19 nt, Artificial Sequence
  Description of Artificial Sequence: Synthetic oligonucleotide
cauuggcccguccacagcu

SEQ ID NO: 2227872 - RNA, 19 nt, Artificial Sequence
  Description of Artificial Sequence: Synthetic oligonucleotide
gccgccaaggccgucuacg

SEQ ID NO: 2227873 - RNA, 19 nt, Artificial Sequence
  Description of Artificial Sequence: Synthetic oligonucleotide
ucccuccaacaucaacuuu

SEQ ID NO: 2227874 - RNA, 19 nt, Artificial Sequence
  Description of Artificial Sequence: Synthetic oligonucleotide
augccagguaagacaaaga

SEQ ID NO: 2227875 - RNA, 19 nt, Artificial Sequence
  Description of Artificial Sequence: Synthetic oligonucleotide
acccauuccauuggcccgu

SEQ ID NO: 2227876 - RNA, 19 nt, Artificial Sequence
  Description of Artificial Sequence: Synthetic oligonucleotide
ccauagaugagaucuccaa

SEQ ID NO: 2227877 - RNA, 19 nt, Artificial Sequence
  Description of Artificial Sequence: Synthetic oligonucleotide
ccugcacgauuucacaauc

SEQ ID NO: 2227878 - RNA, 19 nt, Artificial Sequence
  Description of Artificial Sequence: Synthetic oligonucleotide
acccgcgcccggcagccgg

SEQ ID NO: 2227879 - RNA, 19 nt, Artificial Sequence
  Description of Artificial Sequence: Synthetic oligonucleotide
uucagacguaaaggcugcu

SEQ ID NO: 2227880 - RNA, 19 nt, Artificial Sequence
  Description of Artificial Sequence: Synthetic oligonucleotide
cauucauuccaaacacaau

SEQ ID NO: 2227881 - RNA, 19 nt, Artificial Sequence
  Description of Artificial Sequence: Synthetic oligonucleotide
ucacggguacguaccgcuu

SEQ ID NO: 2227882 - RNA, 19 nt, Artificial Sequence
  Description of Artificial Sequence: Synthetic oligonucleotide
cugucaauacagaccauuu

SEQ ID NO: 2227883 - RNA, 19 nt, Artificial Sequence
  Description of Artificial Sequence: Synthetic oligonucleotide
uccccggcgccgccaaggc

SEQ ID NO: 2227884 - RNA, 19 nt, Artificial Sequence
  Description of Artificial Sequence: Synthetic oligonucleotide
cauucggucuguuucuuuu

SEQ ID NO: 2227885 - RNA, 19 nt, Artificial Sequence
  Description of Artificial Sequence: Synthetic oligonucleotide
acguaccgcuucuguugag

SEQ ID NO: 2227886 - RNA, 19 nt, Artificial Sequence
  Description of Artificial Sequence: Synthetic oligonucleotide
aggccgucuacguccucgu

SEQ ID NO: 2227887 - RNA, 19 nt, Artificial Sequence
  Description of Artificial Sequence: Synthetic oligonucleotide
cguaaaggcugcuccccgg

SEQ ID NO: 2227888 - RNA, 19 nt, Artificial Sequence
  Description of Artificial Sequence: Synthetic oligonucleotide
cagauuuagcaaucacuau

SEQ ID NO: 2227889 - RNA, 19 nt, Artificial Sequence
  Description of Artificial Sequence: Synthetic oligonucleotide
cuacccgcgcccggcagcc

SEQ ID NO: 2227890 - RNA, 19 nt, Artificial Sequence
  Description of Artificial Sequence: Synthetic oligonucleotide
cuaugccaaucacgugguc

SEQ ID NO: 2227891 - RNA, 19 nt, Artificial Sequence
  Description of Artificial Sequence: Synthetic oligonucleotide
cuccccggcgccgccaagg

SEQ ID NO: 2227892 - RNA, 19 nt, Artificial Sequence
  Description of Artificial Sequence: Synthetic oligonucleotide
agaccauuucugguuccau

SEQ ID NO: 2227893 - RNA, 19 nt, Artificial Sequence
  Description of Artificial Sequence: Synthetic oligonucleotide
ucagcacguugugcgcuac

SEQ ID NO: 2227894 - RNA, 19 nt, Artificial Sequence
  Description of Artificial Sequence: Synthetic oligonucleotide
cagcgucguaaacccgggc

SEQ ID NO: 2227895 - RNA, 19 nt, Artificial Sequence
  Description of Artificial Sequence: Synthetic oligonucleotide
uguggcgcaggcggccaca

SEQ ID NO: 2227896 - RNA, 19 nt, Artificial Sequence
  Description of Artificial Sequence: Synthetic oligonucleotide
gcgucguaaacccgggcca

SEQ ID NO: 2227897 - RNA, 19 nt, Artificial Sequence
  Description of Artificial Sequence: Synthetic oligonucleotide
ggcuccuuguggcgcaggc

SEQ ID NO: 2227898 - RNA, 19 nt, Artificial Sequence
  Description of Artificial Sequence: Synthetic oligonucleotide
cagcaggcgguccccgcag

SEQ ID NO: 2227899 - RNA, 19 nt, Artificial Sequence
  Description of Artificial Sequence: Synthetic oligonucleotide
cagcacguugugcgcuacc

SEQ ID NO: 2227900 - RNA, 19 nt, Artificial Sequence
  Description of Artificial Sequence: Synthetic oligonucleotide
uuguggcgcaggcggccac

SEQ ID NO: 2227901 - RNA, 19 nt, Artificial Sequence
  Description of Artificial Sequence: Synthetic oligonucleotide
agcagaccauccuguccaa

SEQ ID NO: 2227902 - RNA, 19 nt, Artificial Sequence
  Description of Artificial Sequence: Synthetic oligonucleotide
uccccgcagcgucguaaac

SEQ ID NO: 2227903 - RNA, 19 nt, Artificial Sequence
  Description of Artificial Sequence: Synthetic oligonucleotide
ggcccaaagucacuuugaa

SEQ ID NO: 2227904 - RNA, 19 nt, Artificial Sequence
  Description of Artificial Sequence: Synthetic oligonucleotide
gucauguguucacaagcuu

SEQ ID NO: 2227905 - RNA, 19 nt, Artificial Sequence
  Description of Artificial Sequence: Synthetic oligonucleotide
auuucacaaucuggagcua

SEQ ID NO: 2227906 - RNA, 19 nt, Artificial Sequence
  Description of Artificial Sequence: Synthetic oligonucleotide
uggcccguccacagcuguc

SEQ ID NO: 2227907 - RNA, 19 nt, Artificial Sequence
  Description of Artificial Sequence: Synthetic oligonucleotide
auuggcccguccacagcug

SEQ ID NO: 2227908 - RNA, 19 nt, Artificial Sequence
  Description of Artificial Sequence: Synthetic oligonucleotide
gccacacuuggugaccagc

SEQ ID NO: 2227909 - RNA, 19 nt, Artificial Sequence
  Description of Artificial Sequence: Synthetic oligonucleotide
ccaccgauucuuucccaac

SEQ ID NO: 2227910 - RNA, 19 nt, Artificial Sequence
  Description of Artificial Sequence: Synthetic oligonucleotide
cacacacgacgcgcagccg

SEQ ID NO: 2227911 - RNA, 19 nt, Artificial Sequence
  Description of Artificial Sequence: Synthetic oligonucleotide
cugcacgauuucacaaucu

SEQ ID NO: 2227912 - RNA, 19 nt, Artificial Sequence
  Description of Artificial Sequence: Synthetic oligonucleotide
uucccaguuccugcacgau

SEQ ID NO: 2227913 - RNA, 19 nt, Artificial Sequence
  Description of Artificial Sequence: Synthetic oligonucleotide
caguuccugcacgauuuca

SEQ ID NO: 2227914 - RNA, 19 nt, Artificial Sequence
  Description of Artificial Sequence: Synthetic oligonucleotide
ggucuccuuucacggguac

SEQ ID NO: 2227915 - RNA, 19 nt, Artificial Sequence
  Description of Artificial Sequence: Synthetic oligonucleotide
gagccauuaaagagguguu

SEQ ID NO: 2227916 - RNA, 19 nt, Artificial Sequence
  Description of Artificial Sequence: Synthetic oligonucleotide
gacgcgcagccgcgggcgc

SEQ ID NO: 2227917 - RNA, 19 nt, Artificial Sequence
  Description of Artificial Sequence: Synthetic oligonucleotide
gcacauucggucuguuucu

SEQ ID NO: 2227918 - RNA, 19 nt, Artificial Sequence
  Description of Artificial Sequence: Synthetic oligonucleotide
ccccgcagcgucguaaacc

SEQ ID NO: 2227919 - RNA, 19 nt, Artificial Sequence
  Description of Artificial Sequence: Synthetic oligonucleotide
cuucagccauagcaggagu

SEQ ID NO: 2227920 - RNA, 19 nt, Artificial Sequence
  Description of Artificial Sequence: Synthetic oligonucleotide
ccgcuucuguugagaaucc

SEQ ID NO: 2227921 - RNA, 19 nt, Artificial Sequence
  Description of Artificial Sequence: Synthetic oligonucleotide
gguacguaccgcuucuguu

SEQ ID NO: 2227922 - RNA, 19 nt, Artificial Sequence
  Description of Artificial Sequence: Synthetic oligonucleotide
cuacguccucgugcuccgg

SEQ ID NO: 2227923 - RNA, 19 nt, Artificial Sequence
  Description of Artificial Sequence: Synthetic oligonucleotide
ggauagaguuuucccaguu

SEQ ID NO: 2227924 - RNA, 19 nt, Artificial Sequence
  Description of Artificial Sequence: Synthetic oligonucleotide
gcuacccgcgcccggcagc

SEQ ID NO: 2227925 - RNA, 19 nt, Artificial Sequence
  Description of Artificial Sequence: Synthetic oligonucleotide
gucguaaacccgggccaca

SEQ ID NO: 2227926 - RNA, 19 nt, Artificial Sequence
  Description of Artificial Sequence: Synthetic oligonucleotide
gccaccgauucuuucccaa

SEQ ID NO: 2227927 - RNA, 19 nt, Artificial Sequence
  Description of Artificial Sequence: Synthetic oligonucleotide
guccccgcagcgucguaaa

SEQ ID NO: 2227928 - RNA, 19 nt, Artificial Sequence
  Description of Artificial Sequence: Synthetic oligonucleotide
gcugucaauacagaccauu

SEQ ID NO: 2227929 - RNA, 19 nt, Artificial Sequence
  Description of Artificial Sequence: Synthetic oligonucleotide
cuccaacaucaacuuugaa

SEQ ID NO: 2227930 - RNA, 19 nt, Artificial Sequence
  Description of Artificial Sequence: Synthetic oligonucleotide
cuuguggcgcaggcggcca

SEQ ID NO: 2227931 - RNA, 19 nt, Artificial Sequence
  Description of Artificial Sequence: Synthetic oligonucleotide
ggcagccggccaccgauuc

SEQ ID NO: 2227932 - RNA, 19 nt, Artificial Sequence
  Description of Artificial Sequence: Synthetic oligonucleotide
cuccuccgggcuccuugug

SEQ ID NO: 2227933 - RNA, 19 nt, Artificial Sequence
  Description of Artificial Sequence: Synthetic oligonucleotide
ccgauucuuucccaaccga

SEQ ID NO: 2227934 - RNA, 19 nt, Artificial Sequence
  Description of Artificial Sequence: Synthetic oligonucleotide
ggccacacuuggugaccag

SEQ ID NO: 2227935 - RNA, 19 nt, Artificial Sequence
  Description of Artificial Sequence: Synthetic oligonucleotide
cacuggccauagaugagau

SEQ ID NO: 2227936 - RNA, 19 nt, Artificial Sequence
  Description of Artificial Sequence: Synthetic oligonucleotide
cagucuggcaaaguauuuu

SEQ ID NO: 2227937 - RNA, 19 nt, Artificial Sequence
  Description of Artificial Sequence: Synthetic oligonucleotide
acgcgcagccgcgggcgcg

SEQ ID NO: 2227938 - RNA, 19 nt, Artificial Sequence
  Description of Artificial Sequence: Synthetic oligonucleotide
cguugugcgcuacccgcgc

SEQ ID NO: 2227939 - RNA, 19 nt, Artificial Sequence
  Description of Artificial Sequence: Synthetic oligonucleotide
ggguacguaccgcuucugu

SEQ ID NO: 2227940 - RNA, 19 nt, Artificial Sequence
  Description of Artificial Sequence: Synthetic oligonucleotide
cuggagcuaauagcuuucu

SEQ ID NO: 2227941 - RNA, 19 nt, Artificial Sequence
  Description of Artificial Sequence: Synthetic oligonucleotide
cggccaccgauucuuuccc

SEQ ID NO: 2227942 - RNA, 19 nt, Artificial Sequence
  Description of Artificial Sequence: Synthetic oligonucleotide
ggcccguccacagcuguca

SEQ ID NO: 2227943 - RNA, 19 nt, Artificial Sequence
  Description of Artificial Sequence: Synthetic oligonucleotide
ccauuaaagagguguucau

SEQ ID NO: 2227944 - RNA, 19 nt, Artificial Sequence
  Description of Artificial Sequence: Synthetic oligonucleotide
ccgacaguacuucagccau

SEQ ID NO: 2227945 - RNA, 19 nt, Artificial Sequence
  Description of Artificial Sequence: Synthetic oligonucleotide
ggcgguccccgcagcgucg

SEQ ID NO: 2227946 - RNA, 19 nt, Artificial Sequence
  Description of Artificial Sequence: Synthetic oligonucleotide
agcugucaauacagaccau

SEQ ID NO: 2227947 - RNA, 19 nt, Artificial Sequence
  Description of Artificial Sequence: Synthetic oligonucleotide
gcggccacacuuggugacc

SEQ ID NO: 2227948 - RNA, 19 nt, Artificial Sequence
  Description of Artificial Sequence: Synthetic oligonucleotide
ccguccacagcugucaaua

SEQ ID NO: 2227949 - RNA, 19 nt, Artificial Sequence
  Description of Artificial Sequence: Synthetic oligonucleotide
caaucacguggucuccuuu

SEQ ID NO: 2227950 - RNA, 19 nt, Artificial Sequence
  Description of Artificial Sequence: Synthetic oligonucleotide
ggccgucuacguccucgug

SEQ ID NO: 2227951 - RNA, 19 nt, Artificial Sequence
  Description of Artificial Sequence: Synthetic oligonucleotide
guggcgcaggcggccacac

SEQ ID NO: 2227952 - RNA, 19 nt, Artificial Sequence
  Description of Artificial Sequence: Synthetic oligonucleotide
uacccgcgcccggcagccg

SEQ ID NO: 2227953 - RNA, 19 nt, Artificial Sequence
  Description of Artificial Sequence: Synthetic oligonucleotide
ccgucuacguccucgugcu

SEQ ID NO: 2227954 - RNA, 19 nt, Artificial Sequence
  Description of Artificial Sequence: Synthetic oligonucleotide
ccgcagcgucguaaacccg

SEQ ID NO: 2227955 - RNA, 19 nt, Artificial Sequence
  Description of Artificial Sequence: Synthetic oligonucleotide
cccaaccgacaguacuuca

SEQ ID NO: 2227956 - RNA, 19 nt, Artificial Sequence
  Description of Artificial Sequence: Synthetic oligonucleotide
ggccaccgauucuuuccca

SEQ ID NO: 2227957 - RNA, 19 nt, Artificial Sequence
  Description of Artificial Sequence: Synthetic oligonucleotide
ggcucacucccuccaacau

SEQ ID NO: 2227958 - RNA, 19 nt, Artificial Sequence
  Description of Artificial Sequence: Synthetic oligonucleotide
cugcacauucggucuguuu

SEQ ID NO: 2227959 - RNA, 19 nt, Artificial Sequence
  Description of Artificial Sequence: Synthetic oligonucleotide
caaggccgucuacguccuc

SEQ ID NO: 2227960 - RNA, 19 nt, Artificial Sequence
  Description of Artificial Sequence: Synthetic oligonucleotide
cgucguaaacccgggccac

SEQ ID NO: 2227961 - RNA, 19 nt, Artificial Sequence
  Description of Artificial Sequence: Synthetic oligonucleotide
gccggccaccgauucuuuc

SEQ ID NO: 2227962 - RNA, 19 nt, Artificial Sequence
  Description of Artificial Sequence: Synthetic oligonucleotide
ccagggagaaccaccugau

SEQ ID NO: 2227963 - RNA, 19 nt, Artificial Sequence
  Description of Artificial Sequence: Synthetic oligonucleotide
cgacgcgcagccgcgggcg

SEQ ID NO: 2227964 - RNA, 19 nt, Artificial Sequence
  Description of Artificial Sequence: Synthetic oligonucleotide
gcugcuccccggcgccgcc

SEQ ID NO: 2227965 - RNA, 19 nt, Artificial Sequence
  Description of Artificial Sequence: Synthetic oligonucleotide
ccccgaauucagacguaaa

SEQ ID NO: 2227966 - RNA, 19 nt, Artificial Sequence
  Description of Artificial Sequence: Synthetic oligonucleotide
cagggagaaccaccugauu

SEQ ID NO: 2227967 - RNA, 19 nt, Artificial Sequence
  Description of Artificial Sequence: Synthetic oligonucleotide
cacauucggucuguuucuu

SEQ ID NO: 2227968 - RNA, 19 nt, Artificial Sequence
  Description of Artificial Sequence: Synthetic oligonucleotide
cacaagcuucuaagacauu

SEQ ID NO: 2227969 - RNA, 19 nt, Artificial Sequence
  Description of Artificial Sequence: Synthetic oligonucleotide
gccaaucacguggucuccu

SEQ ID NO: 2227970 - RNA, 19 nt, Artificial Sequence
  Description of Artificial Sequence: Synthetic oligonucleotide
gaucuccaaccugcacauu

SEQ ID NO: 2227971 - RNA, 19 nt, Artificial Sequence
  Description of Artificial Sequence: Synthetic oligonucleotide
cguaaacccgggccacaca

SEQ ID NO: 2227972 - RNA, 19 nt, Artificial Sequence
  Description of Artificial Sequence: Synthetic oligonucleotide
cgugcuccggcagcaccag

SEQ ID NO: 2227973 - RNA, 19 nt, Artificial Sequence
  Description of Artificial Sequence: Synthetic oligonucleotide
cgccaaggccgucuacguc

SEQ ID NO: 2227974 - RNA, 19 nt, Artificial Sequence
  Description of Artificial Sequence: Synthetic oligonucleotide
gcagccggccaccgauucu

SEQ ID NO: 2227975 - RNA, 19 nt, Artificial Sequence
  Description of Artificial Sequence: Synthetic oligonucleotide
agccggccaccgauucuuu

SEQ ID NO: 2227976 - RNA, 19 nt, Artificial Sequence
  Description of Artificial Sequence: Synthetic oligonucleotide
gcccguccacagcugucaa

SEQ ID NO: 2227977 - RNA, 19 nt, Artificial Sequence
  Description of Artificial Sequence: Synthetic oligonucleotide
ccgggcuccuuguggcgca

SEQ ID NO: 2227978 - RNA, 19 nt, Artificial Sequence
  Description of Artificial Sequence: Synthetic oligonucleotide
caggcgguccccgcagcgu

SEQ ID NO: 2227979 - RNA, 19 nt, Artificial Sequence
  Description of Artificial Sequence: Synthetic oligonucleotide
cccgcgcccggcagccggc

SEQ ID NO: 2227980 - RNA, 19 nt, Artificial Sequence
  Description of Artificial Sequence: Synthetic oligonucleotide
ccaaucacguggucuccuu

SEQ ID NO: 2227981 - RNA, 19 nt, Artificial Sequence
  Description of Artificial Sequence: Synthetic oligonucleotide
cgcuacccgcgcccggcag

SEQ ID NO: 2227982 - RNA, 19 nt, Artificial Sequence
  Description of Artificial Sequence: Synthetic oligonucleotide
cugcuccccggcgccgcca

SEQ ID NO: 2227983 - RNA, 19 nt, Artificial Sequence
  Description of Artificial Sequence: Synthetic oligonucleotide
ccgccaaggccgucuacgu

SEQ ID NO: 2227984 - RNA, 19 nt, Artificial Sequence
  Description of Artificial Sequence: Synthetic oligonucleotide
gcgcuacccgcgcccggca

SEQ ID NO: 2227985 - RNA, 19 nt, Artificial Sequence
  Description of Artificial Sequence: Synthetic oligonucleotide
gcuccuccccagggagaac

SEQ ID NO: 2227986 - RNA, 19 nt, Artificial Sequence
  Description of Artificial Sequence: Synthetic oligonucleotide
ccuccuccgggcuccuugu

SEQ ID NO: 2227987 - RNA, 19 nt, Artificial Sequence
  Description of Artificial Sequence: Synthetic oligonucleotide
gcccggcagccggccaccg

SEQ ID NO: 2227988 - RNA, 19 nt, Artificial Sequence
  Description of Artificial Sequence: Synthetic oligonucleotide
cggguacguaccgcuucug

SEQ ID NO: 2227989 - RNA, 19 nt, Artificial Sequence
  Description of Artificial Sequence: Synthetic oligonucleotide
cgucuacguccucgugcuc

SEQ ID NO: 2227990 - RNA, 19 nt, Artificial Sequence
  Description of Artificial Sequence: Synthetic oligonucleotide
cggccacacuuggugacca

SEQ ID NO: 2227991 - RNA, 19 nt, Artificial Sequence
  Description of Artificial Sequence: Synthetic oligonucleotide
gcgccgccaaggccgucua

SEQ ID NO: 2227992 - RNA, 19 nt, Artificial Sequence
  Description of Artificial Sequence: Synthetic oligonucleotide
cccguccacagcugucaau

SEQ ID NO: 2227993 - RNA, 19 nt, Artificial Sequence
  Description of Artificial Sequence: Synthetic oligonucleotide
cgcccggcagccggccacc

SEQ ID NO: 2227994 - RNA, 19 nt, Artificial Sequence
  Description of Artificial Sequence: Synthetic oligonucleotide
cgccgccaaggccgucuac

SEQ ID NO: 2227995 - RNA, 19 nt, Artificial Sequence
  Description of Artificial Sequence: Synthetic oligonucleotide
gcgguccccgcagcgucgu

SEQ ID NO: 2227996 - RNA, 19 nt, Artificial Sequence
  Description of Artificial Sequence: Synthetic oligonucleotide
ccugcacauucggucuguu

SEQ ID NO: 2227997 - RNA, 19 nt, Artificial Sequence
  Description of Artificial Sequence: Synthetic oligonucleotide
ccggcgccgccaaggccgu

SEQ ID NO: 2227998 - RNA, 19 nt, Artificial Sequence
  Description of Artificial Sequence: Synthetic oligonucleotide
cggcagccggccaccgauu

SEQ ID NO: 2227999 - RNA, 19 nt, Artificial Sequence
  Description of Artificial Sequence: Synthetic oligonucleotide
cgguccccgcagcgucgua

SEQ ID NO: 2228000 - RNA, 19 nt, Artificial Sequence
  Description of Artificial Sequence: Synthetic oligonucleotide
cggcgccgccaaggccguc

SEQ ID NO: 2228001 - RNA, 19 nt, Artificial Sequence
  Description of Artificial Sequence: Synthetic oligonucleotide
ccgccuccuccgggcuccu

SEQ ID NO: 2228002 - RNA, 19 nt, Artificial Sequence
  Description of Artificial Sequence: Synthetic oligonucleotide
ugagcuaugguauagaggg

SEQ ID NO: 2228003 - RNA, 19 nt, Artificial Sequence
  Description of Artificial Sequence: Synthetic oligonucleotide
agaauaauagaagucaucc

SEQ ID NO: 2228004 - RNA, 19 nt, Artificial Sequence
  Description of Artificial Sequence: Synthetic oligonucleotide
agucuaaagacuuauuugg

SEQ ID NO: 2228005 - RNA, 19 nt, Artificial Sequence
  Description of Artificial Sequence: Synthetic oligonucleotide
uuauccaugaaguaaagug

SEQ ID NO: 2228006 - RNA, 19 nt, Artificial Sequence
  Description of Artificial Sequence: Synthetic oligonucleotide
uucuuuaguacacaugugg

SEQ ID NO: 2228007 - RNA, 19 nt, Artificial Sequence
  Description of Artificial Sequence: Synthetic oligonucleotide
auuuuaauauuuccgaauc

SEQ ID NO: 2228008 - RNA, 19 nt, Artificial Sequence
  Description of Artificial Sequence: Synthetic oligonucleotide
uauccaugaaguaaagugg

SEQ ID NO: 2228009 - RNA, 19 nt, Artificial Sequence
  Description of Artificial Sequence: Synthetic oligonucleotide
auuuccaacugccaaacgc

SEQ ID NO: 2228010 - RNA, 19 nt, Artificial Sequence
  Description of Artificial Sequence: Synthetic oligonucleotide
uguuguuuccaucuuaucc

SEQ ID NO: 2228011 - RNA, 19 nt, Artificial Sequence
  Description of Artificial Sequence: Synthetic oligonucleotide
uuucaaguuauccaugaag

SEQ ID NO: 2228012 - RNA, 19 nt, Artificial Sequence
  Description of Artificial Sequence: Synthetic oligonucleotide
uguacugaaacacagucac

SEQ ID NO: 2228013 - RNA, 19 nt, Artificial Sequence
  Description of Artificial Sequence: Synthetic oligonucleotide
aauauuuccgaaucugucu

SEQ ID NO: 2228014 - RNA, 19 nt, Artificial Sequence
  Description of Artificial Sequence: Synthetic oligonucleotide
uguaagaaccagcauagcc

SEQ ID NO: 2228015 - RNA, 19 nt, Artificial Sequence
  Description of Artificial Sequence: Synthetic oligonucleotide
aagucuaaagacuuauuug

SEQ ID NO: 2228016 - RNA, 19 nt, Artificial Sequence
  Description of Artificial Sequence: Synthetic oligonucleotide
ugguucaugaaacauaugu

SEQ ID NO: 2228017 - RNA, 19 nt, Artificial Sequence
  Description of Artificial Sequence: Synthetic oligonucleotide
aaagaucccuuacaacacc

SEQ ID NO: 2228018 - RNA, 19 nt, Artificial Sequence
  Description of Artificial Sequence: Synthetic oligonucleotide
acugacuaaucacagcugc

SEQ ID NO: 2228019 - RNA, 19 nt, Artificial Sequence
  Description of Artificial Sequence: Synthetic oligonucleotide
agauguuacaacuugguca

SEQ ID NO: 2228020 - RNA, 19 nt, Artificial Sequence
  Description of Artificial Sequence: Synthetic oligonucleotide
aguaaagugggucagaaau

SEQ ID NO: 2228021 - RNA, 19 nt, Artificial Sequence
  Description of Artificial Sequence: Synthetic oligonucleotide
aauaaaggaaguucucaug

SEQ ID NO: 2228022 - RNA, 19 nt, Artificial Sequence
  Description of Artificial Sequence: Synthetic oligonucleotide
uguaugaaguccaaccucc

SEQ ID NO: 2228023 - RNA, 19 nt, Artificial Sequence
  Description of Artificial Sequence: Synthetic oligonucleotide
uucaugaaacauauguucc

SEQ ID NO: 2228024 - RNA, 19 nt, Artificial Sequence
  Description of Artificial Sequence: Synthetic oligonucleotide
ugaucuuggaccauuaggu

SEQ ID NO: 2228025 - RNA, 19 nt, Artificial Sequence
  Description of Artificial Sequence: Synthetic oligonucleotide
gaaugugucuccaauacgg

SEQ ID NO: 2228026 - RNA, 19 nt, Artificial Sequence
  Description of Artificial Sequence: Synthetic oligonucleotide
aaaauuggcucgcagagaa

SEQ ID NO: 2228027 - RNA, 19 nt, Artificial Sequence
  Description of Artificial Sequence: Synthetic oligonucleotide
aaacauauguucccuucgg

SEQ ID NO: 2228028 - RNA, 19 nt, Artificial Sequence
  Description of Artificial Sequence: Synthetic oligonucleotide
guucucaugaucuuggacc

SEQ ID NO: 2228029 - RNA, 19 nt, Artificial Sequence
  Description of Artificial Sequence: Synthetic oligonucleotide
cuuguaagaaccagcauag

SEQ ID NO: 2228030 - RNA, 19 nt, Artificial Sequence
  Description of Artificial Sequence: Synthetic oligonucleotide
ugccaaacgcaccugaugg

SEQ ID NO: 2228031 - RNA, 19 nt, Artificial Sequence
  Description of Artificial Sequence: Synthetic oligonucleotide
aauucgcacauuuuaauau

SEQ ID NO: 2228032 - RNA, 19 nt, Artificial Sequence
  Description of Artificial Sequence: Synthetic oligonucleotide
ucuucaguggaugaaaucc

SEQ ID NO: 2228033 - RNA, 19 nt, Artificial Sequence
  Description of Artificial Sequence: Synthetic oligonucleotide
uuuuagaauaauagaaguc

SEQ ID NO: 2228034 - RNA, 19 nt, Artificial Sequence
  Description of Artificial Sequence: Synthetic oligonucleotide
auaaaggaaguucucauga

SEQ ID NO: 2228035 - RNA, 19 nt, Artificial Sequence
  Description of Artificial Sequence: Synthetic oligonucleotide
aaaauaaaggaaguucuca

SEQ ID NO: 2228036 - RNA, 19 nt, Artificial Sequence
  Description of Artificial Sequence: Synthetic oligonucleotide
aauugcaucuucuguagcu

SEQ ID NO: 2228037 - RNA, 19 nt, Artificial Sequence
  Description of Artificial Sequence: Synthetic oligonucleotide
aucauuccaaaauuggcuc

SEQ ID NO: 2228038 - RNA, 19 nt, Artificial Sequence
  Description of Artificial Sequence: Synthetic oligonucleotide
aucguggacaggcauaagc

SEQ ID NO: 2228039 - RNA, 19 nt, Artificial Sequence
  Description of Artificial Sequence: Synthetic oligonucleotide
ucuuuaguacacauguggc

SEQ ID NO: 2228040 - RNA, 19 nt, Artificial Sequence
  Description of Artificial Sequence: Synthetic oligonucleotide
guaagaaccagcauagccg

SEQ ID NO: 2228041 - RNA, 19 nt, Artificial Sequence
  Description of Artificial Sequence: Synthetic oligonucleotide
uuuuccuucauaaccgggc

SEQ ID NO: 2228042 - RNA, 19 nt, Artificial Sequence
  Description of Artificial Sequence: Synthetic oligonucleotide
gaaacauauguucccuucg

SEQ ID NO: 2228043 - RNA, 19 nt, Artificial Sequence
  Description of Artificial Sequence: Synthetic oligonucleotide
aagucaucccugcuuuucc

SEQ ID NO: 2228044 - RNA, 19 nt, Artificial Sequence
  Description of Artificial Sequence: Synthetic oligonucleotide
augaucuuggaccauuagg

SEQ ID NO: 2228045 - RNA, 19 nt, Artificial Sequence
  Description of Artificial Sequence: Synthetic oligonucleotide
ucaauggaacauaagauuu

SEQ ID NO: 2228046 - RNA, 19 nt, Artificial Sequence
  Description of Artificial Sequence: Synthetic oligonucleotide
auaaaauucgcacauuuua

SEQ ID NO: 2228047 - RNA, 19 nt, Artificial Sequence
  Description of Artificial Sequence: Synthetic oligonucleotide
uugguuuuagaauaauaga

SEQ ID NO: 2228048 - RNA, 19 nt, Artificial Sequence
  Description of Artificial Sequence: Synthetic oligonucleotide
uucgguagcaccauaaaau

SEQ ID NO: 2228049 - RNA, 19 nt, Artificial Sequence
  Description of Artificial Sequence: Synthetic oligonucleotide
ugugguugcaacauuuucu

SEQ ID NO: 2228050 - RNA, 19 nt, Artificial Sequence
  Description of Artificial Sequence: Synthetic oligonucleotide
uaaaauucgcacauuuuaa

SEQ ID NO: 2228051 - RNA, 19 nt, Artificial Sequence
  Description of Artificial Sequence: Synthetic oligonucleotide
uccuguaugaaguccaacc

SEQ ID NO: 2228052 - RNA, 19 nt, Artificial Sequence
  Description of Artificial Sequence: Synthetic oligonucleotide
uaagucuaaagacuuauuu

SEQ ID NO: 2228053 - RNA, 19 nt, Artificial Sequence
  Description of Artificial Sequence: Synthetic oligonucleotide
gacugauccaaucuucccg

SEQ ID NO: 2228054 - RNA, 19 nt, Artificial Sequence
  Description of Artificial Sequence: Synthetic oligonucleotide
aaaauucgcacauuuuaau

SEQ ID NO: 2228055 - RNA, 19 nt, Artificial Sequence
  Description of Artificial Sequence: Synthetic oligonucleotide
uuguuugcacagauaacgg

SEQ ID NO: 2228056 - RNA, 19 nt, Artificial Sequence
  Description of Artificial Sequence: Synthetic oligonucleotide
acagauaacggcaaaguuc

SEQ ID NO: 2228057 - RNA, 19 nt, Artificial Sequence
  Description of Artificial Sequence: Synthetic oligonucleotide
uagagauguuacaacuugg

SEQ ID NO: 2228058 - RNA, 19 nt, Artificial Sequence
  Description of Artificial Sequence: Synthetic oligonucleotide
guucaugaaacauauguuc

SEQ ID NO: 2228059 - RNA, 19 nt, Artificial Sequence
  Description of Artificial Sequence: Synthetic oligonucleotide
gaauaauagaagucauccc

SEQ ID NO: 2228060 - RNA, 19 nt, Artificial Sequence
  Description of Artificial Sequence: Synthetic oligonucleotide
uuuuaauauuuccgaaucu

SEQ ID NO: 2228061 - RNA, 19 nt, Artificial Sequence
  Description of Artificial Sequence: Synthetic oligonucleotide
ugugucuccaauacgguac

SEQ ID NO: 2228062 - RNA, 19 nt, Artificial Sequence
  Description of Artificial Sequence: Synthetic oligonucleotide
acuuauuugguuuuagaau

SEQ ID NO: 2228063 - RNA, 19 nt, Artificial Sequence
  Description of Artificial Sequence: Synthetic oligonucleotide
aaacugucuccacacauca

SEQ ID NO: 2228064 - RNA, 19 nt, Artificial Sequence
  Description of Artificial Sequence: Synthetic oligonucleotide
caaucauuccaaaauuggc

SEQ ID NO: 2228065 - RNA, 19 nt, Artificial Sequence
  Description of Artificial Sequence: Synthetic oligonucleotide
cauauguucccuucgguag

SEQ ID NO: 2228066 - RNA, 19 nt, Artificial Sequence
  Description of Artificial Sequence: Synthetic oligonucleotide
uuuccaacugccaaacgca

SEQ ID NO: 2228067 - RNA, 19 nt, Artificial Sequence
  Description of Artificial Sequence: Synthetic oligonucleotide
ugugguucaugaaacauau

SEQ ID NO: 2228068 - RNA, 19 nt, Artificial Sequence
  Description of Artificial Sequence: Synthetic oligonucleotide
uaaaugaugucaucagcug

SEQ ID NO: 2228069 - RNA, 19 nt, Artificial Sequence
  Description of Artificial Sequence: Synthetic oligonucleotide
ugugcuuguaagaaccagc

SEQ ID NO: 2228070 - RNA, 19 nt, Artificial Sequence
  Description of Artificial Sequence: Synthetic oligonucleotide
ucaugaaacauauguuccc

SEQ ID NO: 2228071 - RNA, 19 nt, Artificial Sequence
  Description of Artificial Sequence: Synthetic oligonucleotide
gaaguaaacaucucccuuc

SEQ ID NO: 2228072 - RNA, 19 nt, Artificial Sequence
  Description of Artificial Sequence: Synthetic oligonucleotide
acugauccaaucuucccgg

SEQ ID NO: 2228073 - RNA, 19 nt, Artificial Sequence
  Description of Artificial Sequence: Synthetic oligonucleotide
acaucagcgaccucugugg

SEQ ID NO: 2228074 - RNA, 19 nt, Artificial Sequence
  Description of Artificial Sequence: Synthetic oligonucleotide
uaugaaguccaaccucccg

SEQ ID NO: 2228075 - RNA, 19 nt, Artificial Sequence
  Description of Artificial Sequence: Synthetic oligonucleotide
ucauuccaaaauuggcucg

SEQ ID NO: 2228076 - RNA, 19 nt, Artificial Sequence
  Description of Artificial Sequence: Synthetic oligonucleotide
ugcaacugacuaaucacag

SEQ ID NO: 2228077 - RNA, 19 nt, Artificial Sequence
  Description of Artificial Sequence: Synthetic oligonucleotide
aaaguucuccaauguacug

SEQ ID NO: 2228078 - RNA, 19 nt, Artificial Sequence
  Description of Artificial Sequence: Synthetic oligonucleotide
uuagaauaauagaagucau

SEQ ID NO: 2228079 - RNA, 19 nt, Artificial Sequence
  Description of Artificial Sequence: Synthetic oligonucleotide
agcugugcagccaaaagcc

SEQ ID NO: 2228080 - RNA, 19 nt, Artificial Sequence
  Description of Artificial Sequence: Synthetic oligonucleotide
uggaugaaauccuucuucc

SEQ ID NO: 2228081 - RNA, 19 nt, Artificial Sequence
  Description of Artificial Sequence: Synthetic oligonucleotide
gaaguucucaugaucuugg

SEQ ID NO: 2228082 - RNA, 19 nt, Artificial Sequence
  Description of Artificial Sequence: Synthetic oligonucleotide
aaauucgcacauuuuaaua

SEQ ID NO: 2228083 - RNA, 19 nt, Artificial Sequence
  Description of Artificial Sequence: Synthetic oligonucleotide
aaguccaaccucccgauca

SEQ ID NO: 2228084 - RNA, 19 nt, Artificial Sequence
  Description of Artificial Sequence: Synthetic oligonucleotide
gguagcaccauaaaauucg

SEQ ID NO: 2228085 - RNA, 19 nt, Artificial Sequence
  Description of Artificial Sequence: Synthetic oligonucleotide
aagcccacaaccaaagauc

SEQ ID NO: 2228086 - RNA, 19 nt, Artificial Sequence
  Description of Artificial Sequence: Synthetic oligonucleotide
gguuauauaaaugauguca

SEQ ID NO: 2228087 - RNA, 19 nt, Artificial Sequence
  Description of Artificial Sequence: Synthetic oligonucleotide
ugaaacacagucacauugu

SEQ ID NO: 2228088 - RNA, 19 nt, Artificial Sequence
  Description of Artificial Sequence: Synthetic oligonucleotide
guagagauguuacaacuug

SEQ ID NO: 2228089 - RNA, 19 nt, Artificial Sequence
  Description of Artificial Sequence: Synthetic oligonucleotide
aagugggucagaaaucuuc

SEQ ID NO: 2228090 - RNA, 19 nt, Artificial Sequence
  Description of Artificial Sequence: Synthetic oligonucleotide
ucugagguuguuugcacag

SEQ ID NO: 2228091 - RNA, 19 nt, Artificial Sequence
  Description of Artificial Sequence: Synthetic oligonucleotide
uaagaaccagcauagccga

SEQ ID NO: 2228092 - RNA, 19 nt, Artificial Sequence
  Description of Artificial Sequence: Synthetic oligonucleotide
aaguaaacaucucccuucu

SEQ ID NO: 2228093 - RNA, 19 nt, Artificial Sequence
  Description of Artificial Sequence: Synthetic oligonucleotide
gauaacggcaaaguucucc

SEQ ID NO: 2228094 - RNA, 19 nt, Artificial Sequence
  Description of Artificial Sequence: Synthetic oligonucleotide
cuauacagccaccaauucc

SEQ ID NO: 2228095 - RNA, 19 nt, Artificial Sequence
  Description of Artificial Sequence: Synthetic oligonucleotide
uaaagugggucagaaaucu

SEQ ID NO: 2228096 - RNA, 19 nt, Artificial Sequence
  Description of Artificial Sequence: Synthetic oligonucleotide
uccaauacgguacccaaaa

SEQ ID NO: 2228097 - RNA, 19 nt, Artificial Sequence
  Description of Artificial Sequence: Synthetic oligonucleotide
uaauagaagucaucccugc

SEQ ID NO: 2228098 - RNA, 19 nt, Artificial Sequence
  Description of Artificial Sequence: Synthetic oligonucleotide
ucuccaauguacugaaaca

SEQ ID NO: 2228099 - RNA, 19 nt, Artificial Sequence
  Description of Artificial Sequence: Synthetic oligonucleotide
gacuuauuugguuuuagaa

SEQ ID NO: 2228100 - RNA, 19 nt, Artificial Sequence
  Description of Artificial Sequence: Synthetic oligonucleotide
ugguagagauguuacaacu

SEQ ID NO: 2228101 - RNA, 19 nt, Artificial Sequence
  Description of Artificial Sequence: Synthetic oligonucleotide
cagccaaaagcccacaacc

SEQ ID NO: 2228102 - RNA, 19 nt, Artificial Sequence
  Description of Artificial Sequence: Synthetic oligonucleotide
aaccaaagaucccuuacaa

SEQ ID NO: 2228103 - RNA, 19 nt, Artificial Sequence
  Description of Artificial Sequence: Synthetic oligonucleotide
uccaaaauuggcucgcaga

SEQ ID NO: 2228104 - RNA, 19 nt, Artificial Sequence
  Description of Artificial Sequence: Synthetic oligonucleotide
uguuugcacagauaacggc

SEQ ID NO: 2228105 - RNA, 19 nt, Artificial Sequence
  Description of Artificial Sequence: Synthetic oligonucleotide
aauagaagucaucccugcu

SEQ ID NO: 2228106 - RNA, 19 nt, Artificial Sequence
  Description of Artificial Sequence: Synthetic oligonucleotide
accaaagaucccuuacaac

SEQ ID NO: 2228107 - RNA, 19 nt, Artificial Sequence
  Description of Artificial Sequence: Synthetic oligonucleotide
uccuucuuccaccaauugc

SEQ ID NO: 2228108 - RNA, 19 nt, Artificial Sequence
  Description of Artificial Sequence: Synthetic oligonucleotide
gguuuuagaauaauagaag

SEQ ID NO: 2228109 - RNA, 19 nt, Artificial Sequence
  Description of Artificial Sequence: Synthetic oligonucleotide
uagaauaauagaagucauc

SEQ ID NO: 2228110 - RNA, 19 nt, Artificial Sequence
  Description of Artificial Sequence: Synthetic oligonucleotide
gaggguuauauaaaugaug

SEQ ID NO: 2228111 - RNA, 19 nt, Artificial Sequence
  Description of Artificial Sequence: Synthetic oligonucleotide
uguagcuugaaagucccug

SEQ ID NO: 2228112 - RNA, 19 nt, Artificial Sequence
  Description of Artificial Sequence: Synthetic oligonucleotide
gaucccuuacaacaccugc

SEQ ID NO: 2228113 - RNA, 19 nt, Artificial Sequence
  Description of Artificial Sequence: Synthetic oligonucleotide
uucucaugaucuuggacca

SEQ ID NO: 2228114 - RNA, 19 nt, Artificial Sequence
  Description of Artificial Sequence: Synthetic oligonucleotide
uuacaacuuggucauacau

SEQ ID NO: 2228115 - RNA, 19 nt, Artificial Sequence
  Description of Artificial Sequence: Synthetic oligonucleotide
aacauauguucccuucggu

SEQ ID NO: 2228116 - RNA, 19 nt, Artificial Sequence
  Description of Artificial Sequence: Synthetic oligonucleotide
auaacggcaaaguucucca

SEQ ID NO: 2228117 - RNA, 19 nt, Artificial Sequence
  Description of Artificial Sequence: Synthetic oligonucleotide
ucuaaagacuuauuugguu

SEQ ID NO: 2228118 - RNA, 19 nt, Artificial Sequence
  Description of Artificial Sequence: Synthetic oligonucleotide
uuuccuucauaaccgggca

SEQ ID NO: 2228119 - RNA, 19 nt, Artificial Sequence
  Description of Artificial Sequence: Synthetic oligonucleotide
ucguggacaggcauaagcu

SEQ ID NO: 2228120 - RNA, 19 nt, Artificial Sequence
  Description of Artificial Sequence: Synthetic oligonucleotide
uguuacaacuuggucauac

SEQ ID NO: 2228121 - RNA, 19 nt, Artificial Sequence
  Description of Artificial Sequence: Synthetic oligonucleotide
cugagcuaugguauagagg

SEQ ID NO: 2228122 - RNA, 19 nt, Artificial Sequence
  Description of Artificial Sequence: Synthetic oligonucleotide
ucagaaaucuucaguggau

SEQ ID NO: 2228123 - RNA, 19 nt, Artificial Sequence
  Description of Artificial Sequence: Synthetic oligonucleotide
caugaaguaaaguggguca

SEQ ID NO: 2228124 - RNA, 19 nt, Artificial Sequence
  Description of Artificial Sequence: Synthetic oligonucleotide
ugggucagaaaucuucagu

SEQ ID NO: 2228125 - RNA, 19 nt, Artificial Sequence
  Description of Artificial Sequence: Synthetic oligonucleotide
augaaguccaaccucccga

SEQ ID NO: 2228126 - RNA, 19 nt, Artificial Sequence
  Description of Artificial Sequence: Synthetic oligonucleotide
uuaguacacauguggcacc

SEQ ID NO: 2228127 - RNA, 19 nt, Artificial Sequence
  Description of Artificial Sequence: Synthetic oligonucleotide
uguacuucuugcaaucauu

SEQ ID NO: 2228128 - RNA, 19 nt, Artificial Sequence
  Description of Artificial Sequence: Synthetic oligonucleotide
agcuaugguauagagggag

SEQ ID NO: 2228129 - RNA, 19 nt, Artificial Sequence
  Description of Artificial Sequence: Synthetic oligonucleotide
uacaacuuggucauacauu

SEQ ID NO: 2228130 - RNA, 19 nt, Artificial Sequence
  Description of Artificial Sequence: Synthetic oligonucleotide
cauuguacuucuugcaauc

SEQ ID NO: 2228131 - RNA, 19 nt, Artificial Sequence
  Description of Artificial Sequence: Synthetic oligonucleotide
aacggcaaaguucuccaau

SEQ ID NO: 2228132 - RNA, 19 nt, Artificial Sequence
  Description of Artificial Sequence: Synthetic oligonucleotide
uauagagggaggguuauau

SEQ ID NO: 2228133 - RNA, 19 nt, Artificial Sequence
  Description of Artificial Sequence: Synthetic oligonucleotide
aauuggcucgcagagaauu

SEQ ID NO: 2228134 - RNA, 19 nt, Artificial Sequence
  Description of Artificial Sequence: Synthetic oligonucleotide
gggucagaaaucuucagug

SEQ ID NO: 2228135 - RNA, 19 nt, Artificial Sequence
  Description of Artificial Sequence: Synthetic oligonucleotide
accaauugcaucuucugua

SEQ ID NO: 2228136 - RNA, 19 nt, Artificial Sequence
  Description of Artificial Sequence: Synthetic oligonucleotide
gcacauuuuaauauuuccg

SEQ ID NO: 2228137 - RNA, 19 nt, Artificial Sequence
  Description of Artificial Sequence: Synthetic oligonucleotide
gacaggcauaagcugguag

SEQ ID NO: 2228138 - RNA, 19 nt, Artificial Sequence
  Description of Artificial Sequence: Synthetic oligonucleotide
auauuuccgaaucugucua

SEQ ID NO: 2228139 - RNA, 19 nt, Artificial Sequence
  Description of Artificial Sequence: Synthetic oligonucleotide
acucuauacagccaccaau

SEQ ID NO: 2228140 - RNA, 19 nt, Artificial Sequence
  Description of Artificial Sequence: Synthetic oligonucleotide
uccaccaauugcaucuucu

SEQ ID NO: 2228141 - RNA, 19 nt, Artificial Sequence
  Description of Artificial Sequence: Synthetic oligonucleotide
ucuauacagccaccaauuc

SEQ ID NO: 2228142 - RNA, 19 nt, Artificial Sequence
  Description of Artificial Sequence: Synthetic oligonucleotide
auagaagucaucccugcuu

SEQ ID NO: 2228143 - RNA, 19 nt, Artificial Sequence
  Description of Artificial Sequence: Synthetic oligonucleotide
ugcacagauaacggcaaag

SEQ ID NO: 2228144 - RNA, 19 nt, Artificial Sequence
  Description of Artificial Sequence: Synthetic oligonucleotide
cuuuaguacacauguggca

SEQ ID NO: 2228145 - RNA, 19 nt, Artificial Sequence
  Description of Artificial Sequence: Synthetic oligonucleotide
gagauguuacaacuugguc

SEQ ID NO: 2228146 - RNA, 19 nt, Artificial Sequence
  Description of Artificial Sequence: Synthetic oligonucleotide
accugcaacugacuaauca

SEQ ID NO: 2228147 - RNA, 19 nt, Artificial Sequence
  Description of Artificial Sequence: Synthetic oligonucleotide
gucagaaaucuucagugga

SEQ ID NO: 2228148 - RNA, 19 nt, Artificial Sequence
  Description of Artificial Sequence: Synthetic oligonucleotide
ucuuauccugaauucuuaa

SEQ ID NO: 2228149 - RNA, 19 nt, Artificial Sequence
  Description of Artificial Sequence: Synthetic oligonucleotide
guaaacaucucccuucuua

SEQ ID NO: 2228150 - RNA, 19 nt, Artificial Sequence
  Description of Artificial Sequence: Synthetic oligonucleotide
ugagguuguuugcacagau

SEQ ID NO: 2228151 - RNA, 19 nt, Artificial Sequence
  Description of Artificial Sequence: Synthetic oligonucleotide
uuuucaaguuauccaugaa

SEQ ID NO: 2228152 - RNA, 19 nt, Artificial Sequence
  Description of Artificial Sequence: Synthetic oligonucleotide
cacauuugcuuccuguaug

SEQ ID NO: 2228153 - RNA, 19 nt, Artificial Sequence
  Description of Artificial Sequence: Synthetic oligonucleotide
cuccaauguacugaaacac

SEQ ID NO: 2228154 - RNA, 19 nt, Artificial Sequence
  Description of Artificial Sequence: Synthetic oligonucleotide
agacuuauuugguuuuaga

SEQ ID NO: 2228155 - RNA, 19 nt, Artificial Sequence
  Description of Artificial Sequence: Synthetic oligonucleotide
cacaucauugcucaugcca

SEQ ID NO: 2228156 - RNA, 19 nt, Artificial Sequence
  Description of Artificial Sequence: Synthetic oligonucleotide
aaaucguggacaggcauaa

SEQ ID NO: 2228157 - RNA, 19 nt, Artificial Sequence
  Description of Artificial Sequence: Synthetic oligonucleotide
gggaggguuauauaaauga

SEQ ID NO: 2228158 - RNA, 19 nt, Artificial Sequence
  Description of Artificial Sequence: Synthetic oligonucleotide
auagccgaaguuugcucuc

SEQ ID NO: 2228159 - RNA, 19 nt, Artificial Sequence
  Description of Artificial Sequence: Synthetic oligonucleotide
ggucagaaaucuucagugg

SEQ ID NO: 2228160 - RNA, 19 nt, Artificial Sequence
  Description of Artificial Sequence: Synthetic oligonucleotide
acauuguacuucuugcaau

SEQ ID NO: 2228161 - RNA, 19 nt, Artificial Sequence
  Description of Artificial Sequence: Synthetic oligonucleotide
ugauccaaucuucccggug

SEQ ID NO: 2228162 - RNA, 19 nt, Artificial Sequence
  Description of Artificial Sequence: Synthetic oligonucleotide
ugccauuuccaacugccaa

SEQ ID NO: 2228163 - RNA, 19 nt, Artificial Sequence
  Description of Artificial Sequence: Synthetic oligonucleotide
cauuaggucuccuguguug

SEQ ID NO: 2228164 - RNA, 19 nt, Artificial Sequence
  Description of Artificial Sequence: Synthetic oligonucleotide
cagauaacggcaaaguucu

SEQ ID NO: 2228165 - RNA, 19 nt, Artificial Sequence
  Description of Artificial Sequence: Synthetic oligonucleotide
gaaagucccuguuguuucc

SEQ ID NO: 2228166 - RNA, 19 nt, Artificial Sequence
  Description of Artificial Sequence: Synthetic oligonucleotide
ucaucagcugugcagccaa

SEQ ID NO: 2228167 - RNA, 19 nt, Artificial Sequence
  Description of Artificial Sequence: Synthetic oligonucleotide
ucaguggaugaaauccuuc

SEQ ID NO: 2228168 - RNA, 19 nt, Artificial Sequence
  Description of Artificial Sequence: Synthetic oligonucleotide
aguccaaccucccgaucac

SEQ ID NO: 2228169 - RNA, 19 nt, Artificial Sequence
  Description of Artificial Sequence: Synthetic oligonucleotide
gaucuuggaccauuagguc

SEQ ID NO: 2228170 - RNA, 19 nt, Artificial Sequence
  Description of Artificial Sequence: Synthetic oligonucleotide
agcuugaaagucccuguug

SEQ ID NO: 2228171 - RNA, 19 nt, Artificial Sequence
  Description of Artificial Sequence: Synthetic oligonucleotide
uucgcacauuuuaauauuu

SEQ ID NO: 2228172 - RNA, 19 nt, Artificial Sequence
  Description of Artificial Sequence: Synthetic oligonucleotide
uggaccauuaggucuccug

SEQ ID NO: 2228173 - RNA, 19 nt, Artificial Sequence
  Description of Artificial Sequence: Synthetic oligonucleotide
acauauguucccuucggua

SEQ ID NO: 2228174 - RNA, 19 nt, Artificial Sequence
  Description of Artificial Sequence: Synthetic oligonucleotide
uaaaggaaguucucaugau

SEQ ID NO: 2228175 - RNA, 19 nt, Artificial Sequence
  Description of Artificial Sequence: Synthetic oligonucleotide
cauaaccgggcacaggcac

SEQ ID NO: 2228176 - RNA, 19 nt, Artificial Sequence
  Description of Artificial Sequence: Synthetic oligonucleotide
agaaccagcauagccgaag

SEQ ID NO: 2228177 - RNA, 19 nt, Artificial Sequence
  Description of Artificial Sequence: Synthetic oligonucleotide
ccaaaauuggcucgcagag

SEQ ID NO: 2228178 - RNA, 19 nt, Artificial Sequence
  Description of Artificial Sequence: Synthetic oligonucleotide
uccuucauaaccgggcaca

SEQ ID NO: 2228179 - RNA, 19 nt, Artificial Sequence
  Description of Artificial Sequence: Synthetic oligonucleotide
ucgguagcaccauaaaauu

SEQ ID NO: 2228180 - RNA, 19 nt, Artificial Sequence
  Description of Artificial Sequence: Synthetic oligonucleotide
aacucuauacagccaccaa

SEQ ID NO: 2228181 - RNA, 19 nt, Artificial Sequence
  Description of Artificial Sequence: Synthetic oligonucleotide
gaccauuaggucuccugug

SEQ ID NO: 2228182 - RNA, 19 nt, Artificial Sequence
  Description of Artificial Sequence: Synthetic oligonucleotide
uaagcugguagagauguua

SEQ ID NO: 2228183 - RNA, 19 nt, Artificial Sequence
  Description of Artificial Sequence: Synthetic oligonucleotide
acacaucauugcucaugcc

SEQ ID NO: 2228184 - RNA, 19 nt, Artificial Sequence
  Description of Artificial Sequence: Synthetic oligonucleotide
aaguucucaugaucuugga

SEQ ID NO: 2228185 - RNA, 19 nt, Artificial Sequence
  Description of Artificial Sequence: Synthetic oligonucleotide
ucccgaucacaucagcgac

SEQ ID NO: 2228186 - RNA, 19 nt, Artificial Sequence
  Description of Artificial Sequence: Synthetic oligonucleotide
ucgcacauuuuaauauuuc

SEQ ID NO: 2228187 - RNA, 19 nt, Artificial Sequence
  Description of Artificial Sequence: Synthetic oligonucleotide
aaugugucuccaauacggu

SEQ ID NO: 2228188 - RNA, 19 nt, Artificial Sequence
  Description of Artificial Sequence: Synthetic oligonucleotide
uguucccuucgguagcacc

SEQ ID NO: 2228189 - RNA, 19 nt, Artificial Sequence
  Description of Artificial Sequence: Synthetic oligonucleotide
gaucacaucagcgaccucu

SEQ ID NO: 2228190 - RNA, 19 nt, Artificial Sequence
  Description of Artificial Sequence: Synthetic oligonucleotide
auucgcacauuuuaauauu

SEQ ID NO: 2228191 - RNA, 19 nt, Artificial Sequence
  Description of Artificial Sequence: Synthetic oligonucleotide
ucaugccauuuccaacugc

SEQ ID NO: 2228192 - RNA, 19 nt, Artificial Sequence
  Description of Artificial Sequence: Synthetic oligonucleotide
uaugguauagagggagggu

SEQ ID NO: 2228193 - RNA, 19 nt, Artificial Sequence
  Description of Artificial Sequence: Synthetic oligonucleotide
aacugacuaaucacagcug

SEQ ID NO: 2228194 - RNA, 19 nt, Artificial Sequence
  Description of Artificial Sequence: Synthetic oligonucleotide
uuccaacugccaaacgcac

SEQ ID NO: 2228195 - RNA, 19 nt, Artificial Sequence
  Description of Artificial Sequence: Synthetic oligonucleotide
auuaggucuccuguguuga

SEQ ID NO: 2228196 - RNA, 19 nt, Artificial Sequence
  Description of Artificial Sequence: Synthetic oligonucleotide
uucccggugugguucauga

SEQ ID NO: 2228197 - RNA, 19 nt, Artificial Sequence
  Description of Artificial Sequence: Synthetic oligonucleotide
caacugacuaaucacagcu

SEQ ID NO: 2228198 - RNA, 19 nt, Artificial Sequence
  Description of Artificial Sequence: Synthetic oligonucleotide
ugcucaugccauuuccaac

SEQ ID NO: 2228199 - RNA, 19 nt, Artificial Sequence
  Description of Artificial Sequence: Synthetic oligonucleotide
cacaucagcgaccucugug

SEQ ID NO: 2228200 - RNA, 19 nt, Artificial Sequence
  Description of Artificial Sequence: Synthetic oligonucleotide
ucauaaccgggcacaggca

SEQ ID NO: 2228201 - RNA, 19 nt, Artificial Sequence
  Description of Artificial Sequence: Synthetic oligonucleotide
gauccaaucuucccggugu

SEQ ID NO: 2228202 - RNA, 19 nt, Artificial Sequence
  Description of Artificial Sequence: Synthetic oligonucleotide
ucucucugagguuguuugc

SEQ ID NO: 2228203 - RNA, 19 nt, Artificial Sequence
  Description of Artificial Sequence: Synthetic oligonucleotide
aaaaucguggacaggcaua

SEQ ID NO: 2228204 - RNA, 19 nt, Artificial Sequence
  Description of Artificial Sequence: Synthetic oligonucleotide
gcuuguaagaaccagcaua

SEQ ID NO: 2228205 - RNA, 19 nt, Artificial Sequence
  Description of Artificial Sequence: Synthetic oligonucleotide
guggcacccaacucuauac

SEQ ID NO: 2228206 - RNA, 19 nt, Artificial Sequence
  Description of Artificial Sequence: Synthetic oligonucleotide
uuuccgaaucugucuaaaa

SEQ ID NO: 2228207 - RNA, 19 nt, Artificial Sequence
  Description of Artificial Sequence: Synthetic oligonucleotide
cuucuguagcuugaaaguc

SEQ ID NO: 2228208 - RNA, 19 nt, Artificial Sequence
  Description of Artificial Sequence: Synthetic oligonucleotide
ugguugcaacauuuucucc

SEQ ID NO: 2228209 - RNA, 19 nt, Artificial Sequence
  Description of Artificial Sequence: Synthetic oligonucleotide
cagaaaucuucaguggaug

SEQ ID NO: 2228210 - RNA, 19 nt, Artificial Sequence
  Description of Artificial Sequence: Synthetic oligonucleotide
uugcucaugccauuuccaa

SEQ ID NO: 2228211 - RNA, 19 nt, Artificial Sequence
  Description of Artificial Sequence: Synthetic oligonucleotide
uggacaggcauaagcuggu

SEQ ID NO: 2228212 - RNA, 19 nt, Artificial Sequence
  Description of Artificial Sequence: Synthetic oligonucleotide
ugguauagagggaggguua

SEQ ID NO: 2228213 - RNA, 19 nt, Artificial Sequence
  Description of Artificial Sequence: Synthetic oligonucleotide
ugaaguaaagugggucaga

SEQ ID NO: 2228214 - RNA, 19 nt, Artificial Sequence
  Description of Artificial Sequence: Synthetic oligonucleotide
uuuccccuucucucugagg

SEQ ID NO: 2228215 - RNA, 19 nt, Artificial Sequence
  Description of Artificial Sequence: Synthetic oligonucleotide
uucaguggaugaaauccuu

SEQ ID NO: 2228216 - RNA, 19 nt, Artificial Sequence
  Description of Artificial Sequence: Synthetic oligonucleotide
cugcaacugacuaaucaca

SEQ ID NO: 2228217 - RNA, 19 nt, Artificial Sequence
  Description of Artificial Sequence: Synthetic oligonucleotide
cauuuuaauauuuccgaau

SEQ ID NO: 2228218 - RNA, 19 nt, Artificial Sequence
  Description of Artificial Sequence: Synthetic oligonucleotide
uacacauguggcacccaac

SEQ ID NO: 2228219 - RNA, 19 nt, Artificial Sequence
  Description of Artificial Sequence: Synthetic oligonucleotide
cuccacacaucauugcuca

SEQ ID NO: 2228220 - RNA, 19 nt, Artificial Sequence
  Description of Artificial Sequence: Synthetic oligonucleotide
uuuccaucuuauccugaau

SEQ ID NO: 2228221 - RNA, 19 nt, Artificial Sequence
  Description of Artificial Sequence: Synthetic oligonucleotide
uauuuccgaaucugucuaa

SEQ ID NO: 2228222 - RNA, 19 nt, Artificial Sequence
  Description of Artificial Sequence: Synthetic oligonucleotide
uaggucuccuguguugaag

SEQ ID NO: 2228223 - RNA, 19 nt, Artificial Sequence
  Description of Artificial Sequence: Synthetic oligonucleotide
aaagacuuauuugguuuua

SEQ ID NO: 2228224 - RNA, 19 nt, Artificial Sequence
  Description of Artificial Sequence: Synthetic oligonucleotide
guaaagugggucagaaauc

SEQ ID NO: 2228225 - RNA, 19 nt, Artificial Sequence
  Description of Artificial Sequence: Synthetic oligonucleotide
cauuuccaacugccaaacg

SEQ ID NO: 2228226 - RNA, 19 nt, Artificial Sequence
  Description of Artificial Sequence: Synthetic oligonucleotide
uccaaccucccgaucacau

SEQ ID NO: 2228227 - RNA, 19 nt, Artificial Sequence
  Description of Artificial Sequence: Synthetic oligonucleotide
accugaaugugucuccaau

SEQ ID NO: 2228228 - RNA, 19 nt, Artificial Sequence
  Description of Artificial Sequence: Synthetic oligonucleotide
ucauugcucaugccauuuc

SEQ ID NO: 2228229 - RNA, 19 nt, Artificial Sequence
  Description of Artificial Sequence: Synthetic oligonucleotide
caaccaaagaucccuuaca

SEQ ID NO: 2228230 - RNA, 19 nt, Artificial Sequence
  Description of Artificial Sequence: Synthetic oligonucleotide
uccaaucuucccggugugg

SEQ ID NO: 2228231 - RNA, 19 nt, Artificial Sequence
  Description of Artificial Sequence: Synthetic oligonucleotide
ggcacccaacucuauacag

SEQ ID NO: 2228232 - RNA, 19 nt, Artificial Sequence
  Description of Artificial Sequence: Synthetic oligonucleotide
uggcucgcagagaauuucu

SEQ ID NO: 2228233 - RNA, 19 nt, Artificial Sequence
  Description of Artificial Sequence: Synthetic oligonucleotide
caggcauaagcugguagag

SEQ ID NO: 2228234 - RNA, 19 nt, Artificial Sequence
  Description of Artificial Sequence: Synthetic oligonucleotide
agugggucagaaaucuuca

SEQ ID NO: 2228235 - RNA, 19 nt, Artificial Sequence
  Description of Artificial Sequence: Synthetic oligonucleotide
caauuccaaggagagcccc

SEQ ID NO: 2228236 - RNA, 19 nt, Artificial Sequence
  Description of Artificial Sequence: Synthetic oligonucleotide
uuugcucucccgacugauc

SEQ ID NO: 2228237 - RNA, 19 nt, Artificial Sequence
  Description of Artificial Sequence: Synthetic oligonucleotide
auccuucuuccaccaauug

SEQ ID NO: 2228238 - RNA, 19 nt, Artificial Sequence
  Description of Artificial Sequence: Synthetic oligonucleotide
auguacugaaacacaguca

SEQ ID NO: 2228239 - RNA, 19 nt, Artificial Sequence
  Description of Artificial Sequence: Synthetic oligonucleotide
cauaagcugguagagaugu

SEQ ID NO: 2228240 - RNA, 19 nt, Artificial Sequence
  Description of Artificial Sequence: Synthetic oligonucleotide
agucaucccugcuuuuccu

SEQ ID NO: 2228241 - RNA, 19 nt, Artificial Sequence
  Description of Artificial Sequence: Synthetic oligonucleotide
aaacgcaccugauggucuu

SEQ ID NO: 2228242 - RNA, 19 nt, Artificial Sequence
  Description of Artificial Sequence: Synthetic oligonucleotide
gugucuccaauacgguacc

SEQ ID NO: 2228243 - RNA, 19 nt, Artificial Sequence
  Description of Artificial Sequence: Synthetic oligonucleotide
cacauuguacuucuugcaa

SEQ ID NO: 2228244 - RNA, 19 nt, Artificial Sequence
  Description of Artificial Sequence: Synthetic oligonucleotide
aaagucccuguuguuucca

SEQ ID NO: 2228245 - RNA, 19 nt, Artificial Sequence
  Description of Artificial Sequence: Synthetic oligonucleotide
guagcaccauaaaauucgc

SEQ ID NO: 2228246 - RNA, 19 nt, Artificial Sequence
  Description of Artificial Sequence: Synthetic oligonucleotide
cucgcagagaauuucuucu

SEQ ID NO: 2228247 - RNA, 19 nt, Artificial Sequence
  Description of Artificial Sequence: Synthetic oligonucleotide
ugcuuguaagaaccagcau

SEQ ID NO: 2228248 - RNA, 19 nt, Artificial Sequence
  Description of Artificial Sequence: Synthetic oligonucleotide
augaaacauauguucccuu

SEQ ID NO: 2228249 - RNA, 19 nt, Artificial Sequence
  Description of Artificial Sequence: Synthetic oligonucleotide
gguugcaacauuuucuccu

SEQ ID NO: 2228250 - RNA, 19 nt, Artificial Sequence
  Description of Artificial Sequence: Synthetic oligonucleotide
ccaccaauuccaaggagag

SEQ ID NO: 2228251 - RNA, 19 nt, Artificial Sequence
  Description of Artificial Sequence: Synthetic oligonucleotide
cucccgaucacaucagcga

SEQ ID NO: 2228252 - RNA, 19 nt, Artificial Sequence
  Description of Artificial Sequence: Synthetic oligonucleotide
agccaccaauuccaaggag

SEQ ID NO: 2228253 - RNA, 19 nt, Artificial Sequence
  Description of Artificial Sequence: Synthetic oligonucleotide
augugucuccaauacggua

SEQ ID NO: 2228254 - RNA, 19 nt, Artificial Sequence
  Description of Artificial Sequence: Synthetic oligonucleotide
aaggagagccccugagcua

SEQ ID NO: 2228255 - RNA, 19 nt, Artificial Sequence
  Description of Artificial Sequence: Synthetic oligonucleotide
cugccaaacgcaccugaug

SEQ ID NO: 2228256 - RNA, 19 nt, Artificial Sequence
  Description of Artificial Sequence: Synthetic oligonucleotide
cccaacucuauacagccac

SEQ ID NO: 2228257 - RNA, 19 nt, Artificial Sequence
  Description of Artificial Sequence: Synthetic oligonucleotide
auugcucaugccauuucca

SEQ ID NO: 2228258 - RNA, 19 nt, Artificial Sequence
  Description of Artificial Sequence: Synthetic oligonucleotide
gcaccauaaaauucgcaca

SEQ ID NO: 2228259 - RNA, 19 nt, Artificial Sequence
  Description of Artificial Sequence: Synthetic oligonucleotide
ucucccgacugauccaauc

SEQ ID NO: 2228260 - RNA, 19 nt, Artificial Sequence
  Description of Artificial Sequence: Synthetic oligonucleotide
cuucauaaccgggcacagg

SEQ ID NO: 2228261 - RNA, 19 nt, Artificial Sequence
  Description of Artificial Sequence: Synthetic oligonucleotide
cuucgguagcaccauaaaa

SEQ ID NO: 2228262 - RNA, 19 nt, Artificial Sequence
  Description of Artificial Sequence: Synthetic oligonucleotide
gcaacugacuaaucacagc

SEQ ID NO: 2228263 - RNA, 19 nt, Artificial Sequence
  Description of Artificial Sequence: Synthetic oligonucleotide
ccugagcuaugguauagag

SEQ ID NO: 2228264 - RNA, 19 nt, Artificial Sequence
  Description of Artificial Sequence: Synthetic oligonucleotide
auagagggaggguuauaua

SEQ ID NO: 2228265 - RNA, 19 nt, Artificial Sequence
  Description of Artificial Sequence: Synthetic oligonucleotide
uuggcucgcagagaauuuc

SEQ ID NO: 2228266 - RNA, 19 nt, Artificial Sequence
  Description of Artificial Sequence: Synthetic oligonucleotide
cauagccgaaguuugcucu

SEQ ID NO: 2228267 - RNA, 19 nt, Artificial Sequence
  Description of Artificial Sequence: Synthetic oligonucleotide
aagucccuguuguuuccau

SEQ ID NO: 2228268 - RNA, 19 nt, Artificial Sequence
  Description of Artificial Sequence: Synthetic oligonucleotide
ucccgacugauccaaucuu

SEQ ID NO: 2228269 - RNA, 19 nt, Artificial Sequence
  Description of Artificial Sequence: Synthetic oligonucleotide
agggaggguuauauaaaug

SEQ ID NO: 2228270 - RNA, 19 nt, Artificial Sequence
  Description of Artificial Sequence: Synthetic oligonucleotide
guaugaaguccaaccuccc

SEQ ID NO: 2228271 - RNA, 19 nt, Artificial Sequence
  Description of Artificial Sequence: Synthetic oligonucleotide
ucgcagagaauuucuucuu

SEQ ID NO: 2228272 - RNA, 19 nt, Artificial Sequence
  Description of Artificial Sequence: Synthetic oligonucleotide
auugcaucuucuguagcuu

SEQ ID NO: 2228273 - RNA, 19 nt, Artificial Sequence
  Description of Artificial Sequence: Synthetic oligonucleotide
gagggaggguuauauaaau

SEQ ID NO: 2228274 - RNA, 19 nt, Artificial Sequence
  Description of Artificial Sequence: Synthetic oligonucleotide
auuuccgaaucugucuaaa

SEQ ID NO: 2228275 - RNA, 19 nt, Artificial Sequence
  Description of Artificial Sequence: Synthetic oligonucleotide
cuguuguuuccaucuuauc

SEQ ID NO: 2228276 - RNA, 19 nt, Artificial Sequence
  Description of Artificial Sequence: Synthetic oligonucleotide
aaucguggacaggcauaag

SEQ ID NO: 2228277 - RNA, 19 nt, Artificial Sequence
  Description of Artificial Sequence: Synthetic oligonucleotide
cucuauacagccaccaauu

SEQ ID NO: 2228278 - RNA, 19 nt, Artificial Sequence
  Description of Artificial Sequence: Synthetic oligonucleotide
gaccucugugguugcaaca

SEQ ID NO: 2228279 - RNA, 19 nt, Artificial Sequence
  Description of Artificial Sequence: Synthetic oligonucleotide
aggagagccccugagcuau

SEQ ID NO: 2228280 - RNA, 19 nt, Artificial Sequence
  Description of Artificial Sequence: Synthetic oligonucleotide
gucccuguuguuuccaucu

SEQ ID NO: 2228281 - RNA, 19 nt, Artificial Sequence
  Description of Artificial Sequence: Synthetic oligonucleotide
cacauguggcacccaacuc

SEQ ID NO: 2228282 - RNA, 19 nt, Artificial Sequence
  Description of Artificial Sequence: Synthetic oligonucleotide
guacacauguggcacccaa

SEQ ID NO: 2228283 - RNA, 19 nt, Artificial Sequence
  Description of Artificial Sequence: Synthetic oligonucleotide
cuucaguggaugaaauccu

SEQ ID NO: 2228284 - RNA, 19 nt, Artificial Sequence
  Description of Artificial Sequence: Synthetic oligonucleotide
uaacggcaaaguucuccaa

SEQ ID NO: 2228285 - RNA, 19 nt, Artificial Sequence
  Description of Artificial Sequence: Synthetic oligonucleotide
ggcauaagcugguagagau

SEQ ID NO: 2228286 - RNA, 19 nt, Artificial Sequence
  Description of Artificial Sequence: Synthetic oligonucleotide
ccgacugauccaaucuucc

SEQ ID NO: 2228287 - RNA, 19 nt, Artificial Sequence
  Description of Artificial Sequence: Synthetic oligonucleotide
cauaaaauucgcacauuuu

SEQ ID NO: 2228288 - RNA, 19 nt, Artificial Sequence
  Description of Artificial Sequence: Synthetic oligonucleotide
ugcucucccgacugaucca

SEQ ID NO: 2228289 - RNA, 19 nt, Artificial Sequence
  Description of Artificial Sequence: Synthetic oligonucleotide
uuccuguaugaaguccaac

SEQ ID NO: 2228290 - RNA, 19 nt, Artificial Sequence
  Description of Artificial Sequence: Synthetic oligonucleotide
uagccgaaguuugcucucc

SEQ ID NO: 2228291 - RNA, 19 nt, Artificial Sequence
  Description of Artificial Sequence: Synthetic oligonucleotide
aucauugcucaugccauuu

SEQ ID NO: 2228292 - RNA, 19 nt, Artificial Sequence
  Description of Artificial Sequence: Synthetic oligonucleotide
gucuccacacaucauugcu

SEQ ID NO: 2228293 - RNA, 19 nt, Artificial Sequence
  Description of Artificial Sequence: Synthetic oligonucleotide
gcucaugccauuuccaacu

SEQ ID NO: 2228294 - RNA, 19 nt, Artificial Sequence
  Description of Artificial Sequence: Synthetic oligonucleotide
aaccucccgaucacaucag

SEQ ID NO: 2228295 - RNA, 19 nt, Artificial Sequence
  Description of Artificial Sequence: Synthetic oligonucleotide
gagccccugagcuauggua

SEQ ID NO: 2228296 - RNA, 19 nt, Artificial Sequence
  Description of Artificial Sequence: Synthetic oligonucleotide
caacucuauacagccacca

SEQ ID NO: 2228297 - RNA, 19 nt, Artificial Sequence
  Description of Artificial Sequence: Synthetic oligonucleotide
ccaugaaguaaaguggguc

SEQ ID NO: 2228298 - RNA, 19 nt, Artificial Sequence
  Description of Artificial Sequence: Synthetic oligonucleotide
caccauaaaauucgcacau

SEQ ID NO: 2228299 - RNA, 19 nt, Artificial Sequence
  Description of Artificial Sequence: Synthetic oligonucleotide
gcagccaaaagcccacaac

SEQ ID NO: 2228300 - RNA, 19 nt, Artificial Sequence
  Description of Artificial Sequence: Synthetic oligonucleotide
gaaguccaaccucccgauc

SEQ ID NO: 2228301 - RNA, 19 nt, Artificial Sequence
  Description of Artificial Sequence: Synthetic oligonucleotide
caugaaacauauguucccu

SEQ ID NO: 2228302 - RNA, 19 nt, Artificial Sequence
  Description of Artificial Sequence: Synthetic oligonucleotide
aucuuauccugaauucuua

SEQ ID NO: 2228303 - RNA, 19 nt, Artificial Sequence
  Description of Artificial Sequence: Synthetic oligonucleotide
agaucccuuacaacaccug

SEQ ID NO: 2228304 - RNA, 19 nt, Artificial Sequence
  Description of Artificial Sequence: Synthetic oligonucleotide
ccggugugguucaugaaac

SEQ ID NO: 2228305 - RNA, 19 nt, Artificial Sequence
  Description of Artificial Sequence: Synthetic oligonucleotide
uugcaacauuuucuccuuu

SEQ ID NO: 2228306 - RNA, 19 nt, Artificial Sequence
  Description of Artificial Sequence: Synthetic oligonucleotide
gucuccaauacgguaccca

SEQ ID NO: 2228307 - RNA, 19 nt, Artificial Sequence
  Description of Artificial Sequence: Synthetic oligonucleotide
caaaauuggcucgcagaga

SEQ ID NO: 2228308 - RNA, 19 nt, Artificial Sequence
  Description of Artificial Sequence: Synthetic oligonucleotide
caccaauuccaaggagagc

SEQ ID NO: 2228309 - RNA, 19 nt, Artificial Sequence
  Description of Artificial Sequence: Synthetic oligonucleotide
ccaauuccaaggagagccc

SEQ ID NO: 2228310 - RNA, 19 nt, Artificial Sequence
  Description of Artificial Sequence: Synthetic oligonucleotide
cauguggcacccaacucua

SEQ ID NO: 2228311 - RNA, 19 nt, Artificial Sequence
  Description of Artificial Sequence: Synthetic oligonucleotide
aguaaacaucucccuucuu

SEQ ID NO: 2228312 - RNA, 19 nt, Artificial Sequence
  Description of Artificial Sequence: Synthetic oligonucleotide
ccaccaauugcaucuucug

SEQ ID NO: 2228313 - RNA, 19 nt, Artificial Sequence
  Description of Artificial Sequence: Synthetic oligonucleotide
caucuuauccugaauucuu

SEQ ID NO: 2228314 - RNA, 19 nt, Artificial Sequence
  Description of Artificial Sequence: Synthetic oligonucleotide
aaccgggcacaggcacacc

SEQ ID NO: 2228315 - RNA, 19 nt, Artificial Sequence
  Description of Artificial Sequence: Synthetic oligonucleotide
gugugguucaugaaacaua

SEQ ID NO: 2228316 - RNA, 19 nt, Artificial Sequence
  Description of Artificial Sequence: Synthetic oligonucleotide
aucuucccggugugguuca

SEQ ID NO: 2228317 - RNA, 19 nt, Artificial Sequence
  Description of Artificial Sequence: Synthetic oligonucleotide
aaauuggcucgcagagaau

SEQ ID NO: 2228318 - RNA, 19 nt, Artificial Sequence
  Description of Artificial Sequence: Synthetic oligonucleotide
agaagucaucccugcuuuu

SEQ ID NO: 2228319 - RNA, 19 nt, Artificial Sequence
  Description of Artificial Sequence: Synthetic oligonucleotide
ccaacucuauacagccacc

SEQ ID NO: 2228320 - RNA, 19 nt, Artificial Sequence
  Description of Artificial Sequence: Synthetic oligonucleotide
auaaccgggcacaggcaca

SEQ ID NO: 2228321 - RNA, 19 nt, Artificial Sequence
  Description of Artificial Sequence: Synthetic oligonucleotide
caacaccugcaacugacua

SEQ ID NO: 2228322 - RNA, 19 nt, Artificial Sequence
  Description of Artificial Sequence: Synthetic oligonucleotide
gcagagaauuucuucuuua

SEQ ID NO: 2228323 - RNA, 19 nt, Artificial Sequence
  Description of Artificial Sequence: Synthetic oligonucleotide
caauggaacauaagauuuu

SEQ ID NO: 2228324 - RNA, 19 nt, Artificial Sequence
  Description of Artificial Sequence: Synthetic oligonucleotide
ccauuuccaacugccaaac

SEQ ID NO: 2228325 - RNA, 19 nt, Artificial Sequence
  Description of Artificial Sequence: Synthetic oligonucleotide
ggaccauuaggucuccugu

SEQ ID NO: 2228326 - RNA, 19 nt, Artificial Sequence
  Description of Artificial Sequence: Synthetic oligonucleotide
agauaacggcaaaguucuc

SEQ ID NO: 2228327 - RNA, 19 nt, Artificial Sequence
  Description of Artificial Sequence: Synthetic oligonucleotide
aucagcgaccucugugguu

SEQ ID NO: 2228328 - RNA, 19 nt, Artificial Sequence
  Description of Artificial Sequence: Synthetic oligonucleotide
cuuggaccauuaggucucc

SEQ ID NO: 2228329 - RNA, 19 nt, Artificial Sequence
  Description of Artificial Sequence: Synthetic oligonucleotide
gucuccuguguugaaguaa

SEQ ID NO: 2228330 - RNA, 19 nt, Artificial Sequence
  Description of Artificial Sequence: Synthetic oligonucleotide
ucccuguuguuuccaucuu

SEQ ID NO: 2228331 - RNA, 19 nt, Artificial Sequence
  Description of Artificial Sequence: Synthetic oligonucleotide
cuccaauacgguacccaaa

SEQ ID NO: 2228332 - RNA, 19 nt, Artificial Sequence
  Description of Artificial Sequence: Synthetic oligonucleotide
caaacgcaccugauggucu

SEQ ID NO: 2228333 - RNA, 19 nt, Artificial Sequence
  Description of Artificial Sequence: Synthetic oligonucleotide
gcauagccgaaguuugcuc

SEQ ID NO: 2228334 - RNA, 19 nt, Artificial Sequence
  Description of Artificial Sequence: Synthetic oligonucleotide
cccgaucacaucagcgacc

SEQ ID NO: 2228335 - RNA, 19 nt, Artificial Sequence
  Description of Artificial Sequence: Synthetic oligonucleotide
guacugaaacacagucaca

SEQ ID NO: 2228336 - RNA, 19 nt, Artificial Sequence
  Description of Artificial Sequence: Synthetic oligonucleotide
ccacacaucauugcucaug

SEQ ID NO: 2228337 - RNA, 19 nt, Artificial Sequence
  Description of Artificial Sequence: Synthetic oligonucleotide
augccauuuccaacugcca

SEQ ID NO: 2228338 - RNA, 19 nt, Artificial Sequence
  Description of Artificial Sequence: Synthetic oligonucleotide
uccacacaucauugcucau

SEQ ID NO: 2228339 - RNA, 19 nt, Artificial Sequence
  Description of Artificial Sequence: Synthetic oligonucleotide
cuaagucuaaagacuuauu

SEQ ID NO: 2228340 - RNA, 19 nt, Artificial Sequence
  Description of Artificial Sequence: Synthetic oligonucleotide
cccgacugauccaaucuuc

SEQ ID NO: 2228341 - RNA, 19 nt, Artificial Sequence
  Description of Artificial Sequence: Synthetic oligonucleotide
gagcuaugguauagaggga

SEQ ID NO: 2228342 - RNA, 19 nt, Artificial Sequence
  Description of Artificial Sequence: Synthetic oligonucleotide
cacagauaacggcaaaguu

SEQ ID NO: 2228343 - RNA, 19 nt, Artificial Sequence
  Description of Artificial Sequence: Synthetic oligonucleotide
gcauaagcugguagagaug

SEQ ID NO: 2228344 - RNA, 19 nt, Artificial Sequence
  Description of Artificial Sequence: Synthetic oligonucleotide
ccaaacgcaccugaugguc

SEQ ID NO: 2228345 - RNA, 19 nt, Artificial Sequence
  Description of Artificial Sequence: Synthetic oligonucleotide
gagguuguuugcacagaua

SEQ ID NO: 2228346 - RNA, 19 nt, Artificial Sequence
  Description of Artificial Sequence: Synthetic oligonucleotide
ucucaugaucuuggaccau

SEQ ID NO: 2228347 - RNA, 19 nt, Artificial Sequence
  Description of Artificial Sequence: Synthetic oligonucleotide
aagaaccagcauagccgaa

SEQ ID NO: 2228348 - RNA, 19 nt, Artificial Sequence
  Description of Artificial Sequence: Synthetic oligonucleotide
cucccgacugauccaaucu

SEQ ID NO: 2228349 - RNA, 19 nt, Artificial Sequence
  Description of Artificial Sequence: Synthetic oligonucleotide
aguacacauguggcaccca

SEQ ID NO: 2228350 - RNA, 19 nt, Artificial Sequence
  Description of Artificial Sequence: Synthetic oligonucleotide
cgguagcaccauaaaauuc

SEQ ID NO: 2228351 - RNA, 19 nt, Artificial Sequence
  Description of Artificial Sequence: Synthetic oligonucleotide
ccuguaugaaguccaaccu

SEQ ID NO: 2228352 - RNA, 19 nt, Artificial Sequence
  Description of Artificial Sequence: Synthetic oligonucleotide
ccauaaaauucgcacauuu

SEQ ID NO: 2228353 - RNA, 19 nt, Artificial Sequence
  Description of Artificial Sequence: Synthetic oligonucleotide
ccaacugccaaacgcaccu

SEQ ID NO: 2228354 - RNA, 19 nt, Artificial Sequence
  Description of Artificial Sequence: Synthetic oligonucleotide
ccgaaguuugcucucccga

SEQ ID NO: 2228355 - RNA, 19 nt, Artificial Sequence
  Description of Artificial Sequence: Synthetic oligonucleotide
cuugaaagucccuguuguu

SEQ ID NO: 2228356 - RNA, 19 nt, Artificial Sequence
  Description of Artificial Sequence: Synthetic oligonucleotide
cuucccggugugguucaug

SEQ ID NO: 2228357 - RNA, 19 nt, Artificial Sequence
  Description of Artificial Sequence: Synthetic oligonucleotide
aacgcaccugauggucuuu

SEQ ID NO: 2228358 - RNA, 19 nt, Artificial Sequence
  Description of Artificial Sequence: Synthetic oligonucleotide
caccugcaacugacuaauc

SEQ ID NO: 2228359 - RNA, 19 nt, Artificial Sequence
  Description of Artificial Sequence: Synthetic oligonucleotide
ggugugguucaugaaacau

SEQ ID NO: 2228360 - RNA, 19 nt, Artificial Sequence
  Description of Artificial Sequence: Synthetic oligonucleotide
auacagccaccaauuccaa

SEQ ID NO: 2228361 - RNA, 19 nt, Artificial Sequence
  Description of Artificial Sequence: Synthetic oligonucleotide
gcacagauaacggcaaagu

SEQ ID NO: 2228362 - RNA, 19 nt, Artificial Sequence
  Description of Artificial Sequence: Synthetic oligonucleotide
cccuuacaacaccugcaac

SEQ ID NO: 2228363 - RNA, 19 nt, Artificial Sequence
  Description of Artificial Sequence: Synthetic oligonucleotide
cccggugugguucaugaaa

SEQ ID NO: 2228364 - RNA, 19 nt, Artificial Sequence
  Description of Artificial Sequence: Synthetic oligonucleotide
ggcacaccauacacauuug

SEQ ID NO: 2228365 - RNA, 19 nt, Artificial Sequence
  Description of Artificial Sequence: Synthetic oligonucleotide
gguagagauguuacaacuu

SEQ ID NO: 2228366 - RNA, 19 nt, Artificial Sequence
  Description of Artificial Sequence: Synthetic oligonucleotide
cagcgaccucugugguugc

SEQ ID NO: 2228367 - RNA, 19 nt, Artificial Sequence
  Description of Artificial Sequence: Synthetic oligonucleotide
caccugaaugugucuccaa

SEQ ID NO: 2228368 - RNA, 19 nt, Artificial Sequence
  Description of Artificial Sequence: Synthetic oligonucleotide
guauagagggaggguuaua

SEQ ID NO: 2228369 - RNA, 19 nt, Artificial Sequence
  Description of Artificial Sequence: Synthetic oligonucleotide
guccaaccucccgaucaca

SEQ ID NO: 2228370 - RNA, 19 nt, Artificial Sequence
  Description of Artificial Sequence: Synthetic oligonucleotide
caucagcgaccucuguggu

SEQ ID NO: 2228371 - RNA, 19 nt, Artificial Sequence
  Description of Artificial Sequence: Synthetic oligonucleotide
gguauagagggaggguuau

SEQ ID NO: 2228372 - RNA, 19 nt, Artificial Sequence
  Description of Artificial Sequence: Synthetic oligonucleotide
acgcaccugauggucuuuu

SEQ ID NO: 2228373 - RNA, 19 nt, Artificial Sequence
  Description of Artificial Sequence: Synthetic oligonucleotide
cugauccaaucuucccggu

SEQ ID NO: 2228374 - RNA, 19 nt, Artificial Sequence
  Description of Artificial Sequence: Synthetic oligonucleotide
cgaccucugugguugcaac

SEQ ID NO: 2228375 - RNA, 19 nt, Artificial Sequence
  Description of Artificial Sequence: Synthetic oligonucleotide
ccaucuuauccugaauucu

SEQ ID NO: 2228376 - RNA, 19 nt, Artificial Sequence
  Description of Artificial Sequence: Synthetic oligonucleotide
cccuucgguagcaccauaa

SEQ ID NO: 2228377 - RNA, 19 nt, Artificial Sequence
  Description of Artificial Sequence: Synthetic oligonucleotide
gcccacaaccaaagauccc

SEQ ID NO: 2228378 - RNA, 19 nt, Artificial Sequence
  Description of Artificial Sequence: Synthetic oligonucleotide
cuguagcuugaaagucccu

SEQ ID NO: 2228379 - RNA, 19 nt, Artificial Sequence
  Description of Artificial Sequence: Synthetic oligonucleotide
auguuacaacuuggucaua

SEQ ID NO: 2228380 - RNA, 19 nt, Artificial Sequence
  Description of Artificial Sequence: Synthetic oligonucleotide
gccaaacgcaccugauggu

SEQ ID NO: 2228381 - RNA, 19 nt, Artificial Sequence
  Description of Artificial Sequence: Synthetic oligonucleotide
cccuguuguuuccaucuua

SEQ ID NO: 2228382 - RNA, 19 nt, Artificial Sequence
  Description of Artificial Sequence: Synthetic oligonucleotide
ccgaucacaucagcgaccu

SEQ ID NO: 2228383 - RNA, 19 nt, Artificial Sequence
  Description of Artificial Sequence: Synthetic oligonucleotide
cggugugguucaugaaaca

SEQ ID NO: 2228384 - RNA, 19 nt, Artificial Sequence
  Description of Artificial Sequence: Synthetic oligonucleotide
gcgaccucugugguugcaa

SEQ ID NO: 2228385 - RNA, 19 nt, Artificial Sequence
  Description of Artificial Sequence: Synthetic oligonucleotide
ggagagccccugagcuaug

SEQ ID NO: 2228386 - RNA, 19 nt, Artificial Sequence
  Description of Artificial Sequence: Synthetic oligonucleotide
gccccugagcuaugguaua

SEQ ID NO: 2228387 - RNA, 19 nt, Artificial Sequence
  Description of Artificial Sequence: Synthetic oligonucleotide
cccugagcuaugguauaga

SEQ ID NO: 2228388 - RNA, 19 nt, Artificial Sequence
  Description of Artificial Sequence: Synthetic oligonucleotide
cuuccaccaauugcaucuu

SEQ ID NO: 2228389 - RNA, 19 nt, Artificial Sequence
  Description of Artificial Sequence: Synthetic oligonucleotide
ccauacacauuugcuuccu

SEQ ID NO: 2228390 - RNA, 19 nt, Artificial Sequence
  Description of Artificial Sequence: Synthetic oligonucleotide
ggacaggcauaagcuggua

SEQ ID NO: 2228391 - RNA, 19 nt, Artificial Sequence
  Description of Artificial Sequence: Synthetic oligonucleotide
cucucccgacugauccaau

SEQ ID NO: 2228392 - RNA, 19 nt, Artificial Sequence
  Description of Artificial Sequence: Synthetic oligonucleotide
ggcucgcagagaauuucuu

SEQ ID NO: 2228393 - RNA, 19 nt, Artificial Sequence
  Description of Artificial Sequence: Synthetic oligonucleotide
ccgggcacaggcacaccau

SEQ ID NO: 2228394 - RNA, 19 nt, Artificial Sequence
  Description of Artificial Sequence: Synthetic oligonucleotide
aagagcuucagcuuggcgc

SEQ ID NO: 2228395 - RNA, 19 nt, Artificial Sequence
  Description of Artificial Sequence: Synthetic oligonucleotide
aaaacacuggacuuuggac

SEQ ID NO: 2228396 - RNA, 19 nt, Artificial Sequence
  Description of Artificial Sequence: Synthetic oligonucleotide
accacauacagcuuguugc

SEQ ID NO: 2228397 - RNA, 19 nt, Artificial Sequence
  Description of Artificial Sequence: Synthetic oligonucleotide
gacgccaucucucauaggg

SEQ ID NO: 2228398 - RNA, 19 nt, Artificial Sequence
  Description of Artificial Sequence: Synthetic oligonucleotide
acauuaguaccuuugcaac

SEQ ID NO: 2228399 - RNA, 19 nt, Artificial Sequence
  Description of Artificial Sequence: Synthetic oligonucleotide
uucuacuuguuucagggag

SEQ ID NO: 2228400 - RNA, 19 nt, Artificial Sequence
  Description of Artificial Sequence: Synthetic oligonucleotide
aaagcgggcaaucagcaug

SEQ ID NO: 2228401 - RNA, 19 nt, Artificial Sequence
  Description of Artificial Sequence: Synthetic oligonucleotide
gaaaauaccugcuagagau

SEQ ID NO: 2228402 - RNA, 19 nt, Artificial Sequence
  Description of Artificial Sequence: Synthetic oligonucleotide
uggacagugucauacaccc

SEQ ID NO: 2228403 - RNA, 19 nt, Artificial Sequence
  Description of Artificial Sequence: Synthetic oligonucleotide
gagaccuucacucuucugc

SEQ ID NO: 2228404 - RNA, 19 nt, Artificial Sequence
  Description of Artificial Sequence: Synthetic oligonucleotide
acgguggugaugcaguucc

SEQ ID NO: 2228405 - RNA, 19 nt, Artificial Sequence
  Description of Artificial Sequence: Synthetic oligonucleotide
uacaguucaggacagccug

SEQ ID NO: 2228406 - RNA, 19 nt, Artificial Sequence
  Description of Artificial Sequence: Synthetic oligonucleotide
ugaaguggggucauagcag

SEQ ID NO: 2228407 - RNA, 19 nt, Artificial Sequence
  Description of Artificial Sequence: Synthetic oligonucleotide
uggacuuuggacaccaugu

SEQ ID NO: 2228408 - RNA, 19 nt, Artificial Sequence
  Description of Artificial Sequence: Synthetic oligonucleotide
uuagagaccccauucucag

SEQ ID NO: 2228409 - RNA, 19 nt, Artificial Sequence
  Description of Artificial Sequence: Synthetic oligonucleotide
ugcaguuccauguaucuga

SEQ ID NO: 2228410 - RNA, 19 nt, Artificial Sequence
  Description of Artificial Sequence: Synthetic oligonucleotide
aaaguagccucccaccaca

SEQ ID NO: 2228411 - RNA, 19 nt, Artificial Sequence
  Description of Artificial Sequence: Synthetic oligonucleotide
agcgauaggcuguugauug

SEQ ID NO: 2228412 - RNA, 19 nt, Artificial Sequence
  Description of Artificial Sequence: Synthetic oligonucleotide
uaccuuugcaaccaaucgc

SEQ ID NO: 2228413 - RNA, 19 nt, Artificial Sequence
  Description of Artificial Sequence: Synthetic oligonucleotide
guaccuuugcaaccaaucg

SEQ ID NO: 2228414 - RNA, 19 nt, Artificial Sequence
  Description of Artificial Sequence: Synthetic oligonucleotide
aauccgaguccacugguug

SEQ ID NO: 2228415 - RNA, 19 nt, Artificial Sequence
  Description of Artificial Sequence: Synthetic oligonucleotide
gaaggugccucucaugcag

SEQ ID NO: 2228416 - RNA, 19 nt, Artificial Sequence
  Description of Artificial Sequence: Synthetic oligonucleotide
aggcagggaaaauaccugc

SEQ ID NO: 2228417 - RNA, 19 nt, Artificial Sequence
  Description of Artificial Sequence: Synthetic oligonucleotide
caggacaugcguuuggcgg

SEQ ID NO: 2228418 - RNA, 19 nt, Artificial Sequence
  Description of Artificial Sequence: Synthetic oligonucleotide
uccgggacacuacagagca

SEQ ID NO: 2228419 - RNA, 19 nt, Artificial Sequence
  Description of Artificial Sequence: Synthetic oligonucleotide
ccacuuauuagccacaggg

SEQ ID NO: 2228420 - RNA, 19 nt, Artificial Sequence
  Description of Artificial Sequence: Synthetic oligonucleotide
aaagagcuucagcuuggcg

SEQ ID NO: 2228421 - RNA, 19 nt, Artificial Sequence
  Description of Artificial Sequence: Synthetic oligonucleotide
auccuuagagaccccauuc

SEQ ID NO: 2228422 - RNA, 19 nt, Artificial Sequence
  Description of Artificial Sequence: Synthetic oligonucleotide
cauuaguaccuuugcaacc

SEQ ID NO: 2228423 - RNA, 19 nt, Artificial Sequence
  Description of Artificial Sequence: Synthetic oligonucleotide
ucucggagggucaaaacac

SEQ ID NO: 2228424 - RNA, 19 nt, Artificial Sequence
  Description of Artificial Sequence: Synthetic oligonucleotide
uggucucacagucgaagcg

SEQ ID NO: 2228425 - RNA, 19 nt, Artificial Sequence
  Description of Artificial Sequence: Synthetic oligonucleotide
ugcuagagauguauguccc

SEQ ID NO: 2228426 - RNA, 19 nt, Artificial Sequence
  Description of Artificial Sequence: Synthetic oligonucleotide
cuuaggaugcccaagcaca

SEQ ID NO: 2228427 - RNA, 19 nt, Artificial Sequence
  Description of Artificial Sequence: Synthetic oligonucleotide
uacagagcaacauucccac

SEQ ID NO: 2228428 - RNA, 19 nt, Artificial Sequence
  Description of Artificial Sequence: Synthetic oligonucleotide
cugcuagagauguaugucc

SEQ ID NO: 2228429 - RNA, 19 nt, Artificial Sequence
  Description of Artificial Sequence: Synthetic oligonucleotide
ucacauuaguaccuuugca

SEQ ID NO: 2228430 - RNA, 19 nt, Artificial Sequence
  Description of Artificial Sequence: Synthetic oligonucleotide
caaccaaucgcagaggcgc

SEQ ID NO: 2228431 - RNA, 19 nt, Artificial Sequence
  Description of Artificial Sequence: Synthetic oligonucleotide
ugcaaccaaucgcagaggc

SEQ ID NO: 2228432 - RNA, 19 nt, Artificial Sequence
  Description of Artificial Sequence: Synthetic oligonucleotide
guagagacaguucuccagc

SEQ ID NO: 2228433 - RNA, 19 nt, Artificial Sequence
  Description of Artificial Sequence: Synthetic oligonucleotide
cagacauccuuagagaccc

SEQ ID NO: 2228434 - RNA, 19 nt, Artificial Sequence
  Description of Artificial Sequence: Synthetic oligonucleotide
aggaugcccaagcacacgg

SEQ ID NO: 2228435 - RNA, 19 nt, Artificial Sequence
  Description of Artificial Sequence: Synthetic oligonucleotide
aguaccuuugcaaccaauc

SEQ ID NO: 2228436 - RNA, 19 nt, Artificial Sequence
  Description of Artificial Sequence: Synthetic oligonucleotide
uguccgggacacuacagag

SEQ ID NO: 2228437 - RNA, 19 nt, Artificial Sequence
  Description of Artificial Sequence: Synthetic oligonucleotide
ucuacuuguuucagggaga

SEQ ID NO: 2228438 - RNA, 19 nt, Artificial Sequence
  Description of Artificial Sequence: Synthetic oligonucleotide
cucauaggggccaccauag

SEQ ID NO: 2228439 - RNA, 19 nt, Artificial Sequence
  Description of Artificial Sequence: Synthetic oligonucleotide
acacuacagagcaacauuc

SEQ ID NO: 2228440 - RNA, 19 nt, Artificial Sequence
  Description of Artificial Sequence: Synthetic oligonucleotide
uaguccacuuauuagccac

SEQ ID NO: 2228441 - RNA, 19 nt, Artificial Sequence
  Description of Artificial Sequence: Synthetic oligonucleotide
auuaguaccuuugcaacca

SEQ ID NO: 2228442 - RNA, 19 nt, Artificial Sequence
  Description of Artificial Sequence: Synthetic oligonucleotide
cacccagacauccuuagag

SEQ ID NO: 2228443 - RNA, 19 nt, Artificial Sequence
  Description of Artificial Sequence: Synthetic oligonucleotide
cucacagucgaagcgauag

SEQ ID NO: 2228444 - RNA, 19 nt, Artificial Sequence
  Description of Artificial Sequence: Synthetic oligonucleotide
aagaaccaugaagucuggc

SEQ ID NO: 2228445 - RNA, 19 nt, Artificial Sequence
  Description of Artificial Sequence: Synthetic oligonucleotide
gaagccagggcaugacagg

SEQ ID NO: 2228446 - RNA, 19 nt, Artificial Sequence
  Description of Artificial Sequence: Synthetic oligonucleotide
guagccucccaccacauac

SEQ ID NO: 2228447 - RNA, 19 nt, Artificial Sequence
  Description of Artificial Sequence: Synthetic oligonucleotide
cucucugcacacaagccgc

SEQ ID NO: 2228448 - RNA, 19 nt, Artificial Sequence
  Description of Artificial Sequence: Synthetic oligonucleotide
gucacauuaguaccuuugc

SEQ ID NO: 2228449 - RNA, 19 nt, Artificial Sequence
  Description of Artificial Sequence: Synthetic oligonucleotide
aucgcagaggcgcugaacu

SEQ ID NO: 2228450 - RNA, 19 nt, Artificial Sequence
  Description of Artificial Sequence: Synthetic oligonucleotide
gaggcgcugaacuccaucc

SEQ ID NO: 2228451 - RNA, 19 nt, Artificial Sequence
  Description of Artificial Sequence: Synthetic oligonucleotide
cagggaaaauaccugcuag

SEQ ID NO: 2228452 - RNA, 19 nt, Artificial Sequence
  Description of Artificial Sequence: Synthetic oligonucleotide
uggcccggcaggaagaacc

SEQ ID NO: 2228453 - RNA, 19 nt, Artificial Sequence
  Description of Artificial Sequence: Synthetic oligonucleotide
ccauaguccacuuauuagc

SEQ ID NO: 2228454 - RNA, 19 nt, Artificial Sequence
  Description of Artificial Sequence: Synthetic oligonucleotide
gaugagagaguagggcacg

SEQ ID NO: 2228455 - RNA, 19 nt, Artificial Sequence
  Description of Artificial Sequence: Synthetic oligonucleotide
gaccauuccucguggacag

SEQ ID NO: 2228456 - RNA, 19 nt, Artificial Sequence
  Description of Artificial Sequence: Synthetic oligonucleotide
ugacaggacaugcguuugg

SEQ ID NO: 2228457 - RNA, 19 nt, Artificial Sequence
  Description of Artificial Sequence: Synthetic oligonucleotide
ucugggucccaaaguagcc

SEQ ID NO: 2228458 - RNA, 19 nt, Artificial Sequence
  Description of Artificial Sequence: Synthetic oligonucleotide
uccaccgguucucggaggg

SEQ ID NO: 2228459 - RNA, 19 nt, Artificial Sequence
  Description of Artificial Sequence: Synthetic oligonucleotide
uccuuagagaccccauucu

SEQ ID NO: 2228460 - RNA, 19 nt, Artificial Sequence
  Description of Artificial Sequence: Synthetic oligonucleotide
ucugaaguggggucauagc

SEQ ID NO: 2228461 - RNA, 19 nt, Artificial Sequence
  Description of Artificial Sequence: Synthetic oligonucleotide
cacauuaguaccuuugcaa

SEQ ID NO: 2228462 - RNA, 19 nt, Artificial Sequence
  Description of Artificial Sequence: Synthetic oligonucleotide
agggucuuacaccucuggg

SEQ ID NO: 2228463 - RNA, 19 nt, Artificial Sequence
  Description of Artificial Sequence: Synthetic oligonucleotide
ucacagucgaagcgauagg

SEQ ID NO: 2228464 - RNA, 19 nt, Artificial Sequence
  Description of Artificial Sequence: Synthetic oligonucleotide
agggcaugacaggacaugc

SEQ ID NO: 2228465 - RNA, 19 nt, Artificial Sequence
  Description of Artificial Sequence: Synthetic oligonucleotide
ugccuuggaccauuccucg

SEQ ID NO: 2228466 - RNA, 19 nt, Artificial Sequence
  Description of Artificial Sequence: Synthetic oligonucleotide
uuaggaugcccaagcacac

SEQ ID NO: 2228467 - RNA, 19 nt, Artificial Sequence
  Description of Artificial Sequence: Synthetic oligonucleotide
accccauucucagagcccc

SEQ ID NO: 2228468 - RNA, 19 nt, Artificial Sequence
  Description of Artificial Sequence: Synthetic oligonucleotide
ucucauaggggccaccaua

SEQ ID NO: 2228469 - RNA, 19 nt, Artificial Sequence
  Description of Artificial Sequence: Synthetic oligonucleotide
uucugcuacaguucaggac

SEQ ID NO: 2228470 - RNA, 19 nt, Artificial Sequence
  Description of Artificial Sequence: Synthetic oligonucleotide
ugaugcaguuccauguauc

SEQ ID NO: 2228471 - RNA, 19 nt, Artificial Sequence
  Description of Artificial Sequence: Synthetic oligonucleotide
uuggucucacagucgaagc

SEQ ID NO: 2228472 - RNA, 19 nt, Artificial Sequence
  Description of Artificial Sequence: Synthetic oligonucleotide
gaugcccaagcacacggug

SEQ ID NO: 2228473 - RNA, 19 nt, Artificial Sequence
  Description of Artificial Sequence: Synthetic oligonucleotide
agugucauacacccagaca

SEQ ID NO: 2228474 - RNA, 19 nt, Artificial Sequence
  Description of Artificial Sequence: Synthetic oligonucleotide
uuggcgcucacuacugcag

SEQ ID NO: 2228475 - RNA, 19 nt, Artificial Sequence
  Description of Artificial Sequence: Synthetic oligonucleotide
cucccgucacauuaguacc

SEQ ID NO: 2228476 - RNA, 19 nt, Artificial Sequence
  Description of Artificial Sequence: Synthetic oligonucleotide
gagacagaaggggaggcag

SEQ ID NO: 2228477 - RNA, 19 nt, Artificial Sequence
  Description of Artificial Sequence: Synthetic oligonucleotide
cacuacagagcaacauucc

SEQ ID NO: 2228478 - RNA, 19 nt, Artificial Sequence
  Description of Artificial Sequence: Synthetic oligonucleotide
auguccccaauccgagucc

SEQ ID NO: 2228479 - RNA, 19 nt, Artificial Sequence
  Description of Artificial Sequence: Synthetic oligonucleotide
gugucauacacccagacau

SEQ ID NO: 2228480 - RNA, 19 nt, Artificial Sequence
  Description of Artificial Sequence: Synthetic oligonucleotide
aagcgggcaaucagcaugg

SEQ ID NO: 2228481 - RNA, 19 nt, Artificial Sequence
  Description of Artificial Sequence: Synthetic oligonucleotide
guuggucucacagucgaag

SEQ ID NO: 2228482 - RNA, 19 nt, Artificial Sequence
  Description of Artificial Sequence: Synthetic oligonucleotide
cuuuggacaccaugucccg

SEQ ID NO: 2228483 - RNA, 19 nt, Artificial Sequence
  Description of Artificial Sequence: Synthetic oligonucleotide
cuuagagaccccauucuca

SEQ ID NO: 2228484 - RNA, 19 nt, Artificial Sequence
  Description of Artificial Sequence: Synthetic oligonucleotide
agagacaguucuccagcuc

SEQ ID NO: 2228485 - RNA, 19 nt, Artificial Sequence
  Description of Artificial Sequence: Synthetic oligonucleotide
acaggacaugcguuuggcg

SEQ ID NO: 2228486 - RNA, 19 nt, Artificial Sequence
  Description of Artificial Sequence: Synthetic oligonucleotide
cagucgaagcgauaggcug

SEQ ID NO: 2228487 - RNA, 19 nt, Artificial Sequence
  Description of Artificial Sequence: Synthetic oligonucleotide
uguccaccgguucucggag

SEQ ID NO: 2228488 - RNA, 19 nt, Artificial Sequence
  Description of Artificial Sequence: Synthetic oligonucleotide
ucggagggucaaaacacug

SEQ ID NO: 2228489 - RNA, 19 nt, Artificial Sequence
  Description of Artificial Sequence: Synthetic oligonucleotide
aaucgcagaggcgcugaac

SEQ ID NO: 2228490 - RNA, 19 nt, Artificial Sequence
  Description of Artificial Sequence: Synthetic oligonucleotide
acagagcaacauucccacc

SEQ ID NO: 2228491 - RNA, 19 nt, Artificial Sequence
  Description of Artificial Sequence: Synthetic oligonucleotide
cuuggaccauuccucgugg

SEQ ID NO: 2228492 - RNA, 19 nt, Artificial Sequence
  Description of Artificial Sequence: Synthetic oligonucleotide
cugaaguggggucauagca

SEQ ID NO: 2228493 - RNA, 19 nt, Artificial Sequence
  Description of Artificial Sequence: Synthetic oligonucleotide
accugcuagagauguaugu

SEQ ID NO: 2228494 - RNA, 19 nt, Artificial Sequence
  Description of Artificial Sequence: Synthetic oligonucleotide
caguccagggucuuacacc

SEQ ID NO: 2228495 - RNA, 19 nt, Artificial Sequence
  Description of Artificial Sequence: Synthetic oligonucleotide
cacagucgaagcgauaggc

SEQ ID NO: 2228496 - RNA, 19 nt, Artificial Sequence
  Description of Artificial Sequence: Synthetic oligonucleotide
agaccuucacucuucugcu

SEQ ID NO: 2228497 - RNA, 19 nt, Artificial Sequence
  Description of Artificial Sequence: Synthetic oligonucleotide
cacguagagacaguucucc

SEQ ID NO: 2228498 - RNA, 19 nt, Artificial Sequence
  Description of Artificial Sequence: Synthetic oligonucleotide
cucguggacagugucauac

SEQ ID NO: 2228499 - RNA, 19 nt, Artificial Sequence
  Description of Artificial Sequence: Synthetic oligonucleotide
ucccaaaguagccucccac

SEQ ID NO: 2228500 - RNA, 19 nt, Artificial Sequence
  Description of Artificial Sequence: Synthetic oligonucleotide
auccgaguccacugguugg

SEQ ID NO: 2228501 - RNA, 19 nt, Artificial Sequence
  Description of Artificial Sequence: Synthetic oligonucleotide
ucuuacaccucuggguccc

SEQ ID NO: 2228502 - RNA, 19 nt, Artificial Sequence
  Description of Artificial Sequence: Synthetic oligonucleotide
ugguacugucagcuucugg

SEQ ID NO: 2228503 - RNA, 19 nt, Artificial Sequence
  Description of Artificial Sequence: Synthetic oligonucleotide
ugaagucuggcugggcucc

SEQ ID NO: 2228504 - RNA, 19 nt, Artificial Sequence
  Description of Artificial Sequence: Synthetic oligonucleotide
cugacgccaucucucauag

SEQ ID NO: 2228505 - RNA, 19 nt, Artificial Sequence
  Description of Artificial Sequence: Synthetic oligonucleotide
acacggugucucuggagac

SEQ ID NO: 2228506 - RNA, 19 nt, Artificial Sequence
  Description of Artificial Sequence: Synthetic oligonucleotide
cauguccccaauccgaguc

SEQ ID NO: 2228507 - RNA, 19 nt, Artificial Sequence
  Description of Artificial Sequence: Synthetic oligonucleotide
cagcuuaggaugcccaagc

SEQ ID NO: 2228508 - RNA, 19 nt, Artificial Sequence
  Description of Artificial Sequence: Synthetic oligonucleotide
ugucauacacccagacauc

SEQ ID NO: 2228509 - RNA, 19 nt, Artificial Sequence
  Description of Artificial Sequence: Synthetic oligonucleotide
uguugauuguccaccgguu

SEQ ID NO: 2228510 - RNA, 19 nt, Artificial Sequence
  Description of Artificial Sequence: Synthetic oligonucleotide
gggaaaauaccugcuagag

SEQ ID NO: 2228511 - RNA, 19 nt, Artificial Sequence
  Description of Artificial Sequence: Synthetic oligonucleotide
auaggcuguugauugucca

SEQ ID NO: 2228512 - RNA, 19 nt, Artificial Sequence
  Description of Artificial Sequence: Synthetic oligonucleotide
agccugaacugcugcuacc

SEQ ID NO: 2228513 - RNA, 19 nt, Artificial Sequence
  Description of Artificial Sequence: Synthetic oligonucleotide
auaguccacuuauuagcca

SEQ ID NO: 2228514 - RNA, 19 nt, Artificial Sequence
  Description of Artificial Sequence: Synthetic oligonucleotide
cuuguugcccgaagccagg

SEQ ID NO: 2228515 - RNA, 19 nt, Artificial Sequence
  Description of Artificial Sequence: Synthetic oligonucleotide
uuauuagccacagggucau

SEQ ID NO: 2228516 - RNA, 19 nt, Artificial Sequence
  Description of Artificial Sequence: Synthetic oligonucleotide
uggaccauuccucguggac

SEQ ID NO: 2228517 - RNA, 19 nt, Artificial Sequence
  Description of Artificial Sequence: Synthetic oligonucleotide
guugauuguccaccgguuc

SEQ ID NO: 2228518 - RNA, 19 nt, Artificial Sequence
  Description of Artificial Sequence: Synthetic oligonucleotide
ucauagcaguccagggucu

SEQ ID NO: 2228519 - RNA, 19 nt, Artificial Sequence
  Description of Artificial Sequence: Synthetic oligonucleotide
uuccucguggacaguguca

SEQ ID NO: 2228520 - RNA, 19 nt, Artificial Sequence
  Description of Artificial Sequence: Synthetic oligonucleotide
auuguccaccgguucucgg

SEQ ID NO: 2228521 - RNA, 19 nt, Artificial Sequence
  Description of Artificial Sequence: Synthetic oligonucleotide
uagagacaguucuccagcu

SEQ ID NO: 2228522 - RNA, 19 nt, Artificial Sequence
  Description of Artificial Sequence: Synthetic oligonucleotide
cauucucagagccccuccc

SEQ ID NO: 2228523 - RNA, 19 nt, Artificial Sequence
  Description of Artificial Sequence: Synthetic oligonucleotide
acccagacauccuuagaga

SEQ ID NO: 2228524 - RNA, 19 nt, Artificial Sequence
  Description of Artificial Sequence: Synthetic oligonucleotide
uaccugcuagagauguaug

SEQ ID NO: 2228525 - RNA, 19 nt, Artificial Sequence
  Description of Artificial Sequence: Synthetic oligonucleotide
ggucuuacaccucuggguc

SEQ ID NO: 2228526 - RNA, 19 nt, Artificial Sequence
  Description of Artificial Sequence: Synthetic oligonucleotide
gauuguccaccgguucucg

SEQ ID NO: 2228527 - RNA, 19 nt, Artificial Sequence
  Description of Artificial Sequence: Synthetic oligonucleotide
uuguuucagggagacagaa

SEQ ID NO: 2228528 - RNA, 19 nt, Artificial Sequence
  Description of Artificial Sequence: Synthetic oligonucleotide
uaggcuguugauuguccac

SEQ ID NO: 2228529 - RNA, 19 nt, Artificial Sequence
  Description of Artificial Sequence: Synthetic oligonucleotide
ucccgucacauuaguaccu

SEQ ID NO: 2228530 - RNA, 19 nt, Artificial Sequence
  Description of Artificial Sequence: Synthetic oligonucleotide
guuguucccucucugcaca

SEQ ID NO: 2228531 - RNA, 19 nt, Artificial Sequence
  Description of Artificial Sequence: Synthetic oligonucleotide
auaccugcuagagauguau

SEQ ID NO: 2228532 - RNA, 19 nt, Artificial Sequence
  Description of Artificial Sequence: Synthetic oligonucleotide
caaaguagccucccaccac

SEQ ID NO: 2228533 - RNA, 19 nt, Artificial Sequence
  Description of Artificial Sequence: Synthetic oligonucleotide
gacaggacaugcguuuggc

SEQ ID NO: 2228534 - RNA, 19 nt, Artificial Sequence
  Description of Artificial Sequence: Synthetic oligonucleotide
guugcccgaagccagggca

SEQ ID NO: 2228535 - RNA, 19 nt, Artificial Sequence
  Description of Artificial Sequence: Synthetic oligonucleotide
gaagaaccaugaagucugg

SEQ ID NO: 2228536 - RNA, 19 nt, Artificial Sequence
  Description of Artificial Sequence: Synthetic oligonucleotide
ucucucauaggggccacca

SEQ ID NO: 2228537 - RNA, 19 nt, Artificial Sequence
  Description of Artificial Sequence: Synthetic oligonucleotide
cuacuuguuucagggagac

SEQ ID NO: 2228538 - RNA, 19 nt, Artificial Sequence
  Description of Artificial Sequence: Synthetic oligonucleotide
ugcccaagcacacgguguc

SEQ ID NO: 2228539 - RNA, 19 nt, Artificial Sequence
  Description of Artificial Sequence: Synthetic oligonucleotide
cuugcagucaaaggcugug

SEQ ID NO: 2228540 - RNA, 19 nt, Artificial Sequence
  Description of Artificial Sequence: Synthetic oligonucleotide
ugccucucaugcaggcagg

SEQ ID NO: 2228541 - RNA, 19 nt, Artificial Sequence
  Description of Artificial Sequence: Synthetic oligonucleotide
caccacauacagcuuguug

SEQ ID NO: 2228542 - RNA, 19 nt, Artificial Sequence
  Description of Artificial Sequence: Synthetic oligonucleotide
ugcuacccggagcugguac

SEQ ID NO: 2228543 - RNA, 19 nt, Artificial Sequence
  Description of Artificial Sequence: Synthetic oligonucleotide
gagggaccccuguuguucc

SEQ ID NO: 2228544 - RNA, 19 nt, Artificial Sequence
  Description of Artificial Sequence: Synthetic oligonucleotide
ugccgagggaccccuguug

SEQ ID NO: 2228545 - RNA, 19 nt, Artificial Sequence
  Description of Artificial Sequence: Synthetic oligonucleotide
gaaguggggucauagcagu

SEQ ID NO: 2228546 - RNA, 19 nt, Artificial Sequence
  Description of Artificial Sequence: Synthetic oligonucleotide
ccucccgucacauuaguac

SEQ ID NO: 2228547 - RNA, 19 nt, Artificial Sequence
  Description of Artificial Sequence: Synthetic oligonucleotide
gucauguccccaauccgag

SEQ ID NO: 2228548 - RNA, 19 nt, Artificial Sequence
  Description of Artificial Sequence: Synthetic oligonucleotide
ggaaaauaccugcuagaga

SEQ ID NO: 2228549 - RNA, 19 nt, Artificial Sequence
  Description of Artificial Sequence: Synthetic oligonucleotide
gcugacaaaggccgugggg

SEQ ID NO: 2228550 - RNA, 19 nt, Artificial Sequence
  Description of Artificial Sequence: Synthetic oligonucleotide
gucuuacaccucugggucc

SEQ ID NO: 2228551 - RNA, 19 nt, Artificial Sequence
  Description of Artificial Sequence: Synthetic oligonucleotide
uggcgcucacuacugcagc

SEQ ID NO: 2228552 - RNA, 19 nt, Artificial Sequence
  Description of Artificial Sequence: Synthetic oligonucleotide
agcuuaggaugcccaagca

SEQ ID NO: 2228553 - RNA, 19 nt, Artificial Sequence
  Description of Artificial Sequence: Synthetic oligonucleotide
uagccucccaccacauaca

SEQ ID NO: 2228554 - RNA, 19 nt, Artificial Sequence
  Description of Artificial Sequence: Synthetic oligonucleotide
ugggucccaaaguagccuc

SEQ ID NO: 2228555 - RNA, 19 nt, Artificial Sequence
  Description of Artificial Sequence: Synthetic oligonucleotide
uugcugacgccaucucuca

SEQ ID NO: 2228556 - RNA, 19 nt, Artificial Sequence
  Description of Artificial Sequence: Synthetic oligonucleotide
agccucccaccacauacag

SEQ ID NO: 2228557 - RNA, 19 nt, Artificial Sequence
  Description of Artificial Sequence: Synthetic oligonucleotide
guggacagugucauacacc

SEQ ID NO: 2228558 - RNA, 19 nt, Artificial Sequence
  Description of Artificial Sequence: Synthetic oligonucleotide
uccgaaggugccucucaug

SEQ ID NO: 2228559 - RNA, 19 nt, Artificial Sequence
  Description of Artificial Sequence: Synthetic oligonucleotide
ccacauacagcuuguugcc

SEQ ID NO: 2228560 - RNA, 19 nt, Artificial Sequence
  Description of Artificial Sequence: Synthetic oligonucleotide
uuguugcccgaagccaggg

SEQ ID NO: 2228561 - RNA, 19 nt, Artificial Sequence
  Description of Artificial Sequence: Synthetic oligonucleotide
uggagaccuucacucuucu

SEQ ID NO: 2228562 - RNA, 19 nt, Artificial Sequence
  Description of Artificial Sequence: Synthetic oligonucleotide
gggucauagcaguccaggg

SEQ ID NO: 2228563 - RNA, 19 nt, Artificial Sequence
  Description of Artificial Sequence: Synthetic oligonucleotide
gacacuacagagcaacauu

SEQ ID NO: 2228564 - RNA, 19 nt, Artificial Sequence
  Description of Artificial Sequence: Synthetic oligonucleotide
accaugaagucuggcuggg

SEQ ID NO: 2228565 - RNA, 19 nt, Artificial Sequence
  Description of Artificial Sequence: Synthetic oligonucleotide
acguagagacaguucucca

SEQ ID NO: 2228566 - RNA, 19 nt, Artificial Sequence
  Description of Artificial Sequence: Synthetic oligonucleotide
uuagccacagggucauauu

SEQ ID NO: 2228567 - RNA, 19 nt, Artificial Sequence
  Description of Artificial Sequence: Synthetic oligonucleotide
ugacaaaggccguggggau

SEQ ID NO: 2228568 - RNA, 19 nt, Artificial Sequence
  Description of Artificial Sequence: Synthetic oligonucleotide
ucguggacagugucauaca

SEQ ID NO: 2228569 - RNA, 19 nt, Artificial Sequence
  Description of Artificial Sequence: Synthetic oligonucleotide
ccagacauccuuagagacc

SEQ ID NO: 2228570 - RNA, 19 nt, Artificial Sequence
  Description of Artificial Sequence: Synthetic oligonucleotide
uggggucauagcaguccag

SEQ ID NO: 2228571 - RNA, 19 nt, Artificial Sequence
  Description of Artificial Sequence: Synthetic oligonucleotide
aaguggggucauagcaguc

SEQ ID NO: 2228572 - RNA, 19 nt, Artificial Sequence
  Description of Artificial Sequence: Synthetic oligonucleotide
augagagaguagggcacgg

SEQ ID NO: 2228573 - RNA, 19 nt, Artificial Sequence
  Description of Artificial Sequence: Synthetic oligonucleotide
aagcgauaggcuguugauu

SEQ ID NO: 2228574 - RNA, 19 nt, Artificial Sequence
  Description of Artificial Sequence: Synthetic oligonucleotide
uaguaccuuugcaaccaau

SEQ ID NO: 2228575 - RNA, 19 nt, Artificial Sequence
  Description of Artificial Sequence: Synthetic oligonucleotide
cugauguccgggacacuac

SEQ ID NO: 2228576 - RNA, 19 nt, Artificial Sequence
  Description of Artificial Sequence: Synthetic oligonucleotide
ucucugcacacaagccgcu

SEQ ID NO: 2228577 - RNA, 19 nt, Artificial Sequence
  Description of Artificial Sequence: Synthetic oligonucleotide
ugauuguccaccgguucuc

SEQ ID NO: 2228578 - RNA, 19 nt, Artificial Sequence
  Description of Artificial Sequence: Synthetic oligonucleotide
gcuuaggaugcccaagcac

SEQ ID NO: 2228579 - RNA, 19 nt, Artificial Sequence
  Description of Artificial Sequence: Synthetic oligonucleotide
uuggcggucauguccccaa

SEQ ID NO: 2228580 - RNA, 19 nt, Artificial Sequence
  Description of Artificial Sequence: Synthetic oligonucleotide
cacauacagcuuguugccc

SEQ ID NO: 2228581 - RNA, 19 nt, Artificial Sequence
  Description of Artificial Sequence: Synthetic oligonucleotide
uccucguggacagugucau

SEQ ID NO: 2228582 - RNA, 19 nt, Artificial Sequence
  Description of Artificial Sequence: Synthetic oligonucleotide
ucauguccccaauccgagu

SEQ ID NO: 2228583 - RNA, 19 nt, Artificial Sequence
  Description of Artificial Sequence: Synthetic oligonucleotide
guccacuuauuagccacag

SEQ ID NO: 2228584 - RNA, 19 nt, Artificial Sequence
  Description of Artificial Sequence: Synthetic oligonucleotide
agucgaagcgauaggcugu

SEQ ID NO: 2228585 - RNA, 19 nt, Artificial Sequence
  Description of Artificial Sequence: Synthetic oligonucleotide
gacaaaggccguggggaug

SEQ ID NO: 2228586 - RNA, 19 nt, Artificial Sequence
  Description of Artificial Sequence: Synthetic oligonucleotide
augacaggacaugcguuug

SEQ ID NO: 2228587 - RNA, 19 nt, Artificial Sequence
  Description of Artificial Sequence: Synthetic oligonucleotide
acagucgaagcgauaggcu

SEQ ID NO: 2228588 - RNA, 19 nt, Artificial Sequence
  Description of Artificial Sequence: Synthetic oligonucleotide
acccggagcugguacuguc

SEQ ID NO: 2228589 - RNA, 19 nt, Artificial Sequence
  Description of Artificial Sequence: Synthetic oligonucleotide
cuuggcgcucacuacugca

SEQ ID NO: 2228590 - RNA, 19 nt, Artificial Sequence
  Description of Artificial Sequence: Synthetic oligonucleotide
cuucugcuacaguucagga

SEQ ID NO: 2228591 - RNA, 19 nt, Artificial Sequence
  Description of Artificial Sequence: Synthetic oligonucleotide
gaagcgauaggcuguugau

SEQ ID NO: 2228592 - RNA, 19 nt, Artificial Sequence
  Description of Artificial Sequence: Synthetic oligonucleotide
caagccgcuggcagcuuag

SEQ ID NO: 2228593 - RNA, 19 nt, Artificial Sequence
  Description of Artificial Sequence: Synthetic oligonucleotide
uagcaguccagggucuuac

SEQ ID NO: 2228594 - RNA, 19 nt, Artificial Sequence
  Description of Artificial Sequence: Synthetic oligonucleotide
augcaguuccauguaucug

SEQ ID NO: 2228595 - RNA, 19 nt, Artificial Sequence
  Description of Artificial Sequence: Synthetic oligonucleotide
acacuggacuuuggacacc

SEQ ID NO: 2228596 - RNA, 19 nt, Artificial Sequence
  Description of Artificial Sequence: Synthetic oligonucleotide
uguccccaauccgagucca

SEQ ID NO: 2228597 - RNA, 19 nt, Artificial Sequence
  Description of Artificial Sequence: Synthetic oligonucleotide
gcacacaagccgcuggcag

SEQ ID NO: 2228598 - RNA, 19 nt, Artificial Sequence
  Description of Artificial Sequence: Synthetic oligonucleotide
ggccguggggaugagagag

SEQ ID NO: 2228599 - RNA, 19 nt, Artificial Sequence
  Description of Artificial Sequence: Synthetic oligonucleotide
gcuagagauguaugucccc

SEQ ID NO: 2228600 - RNA, 19 nt, Artificial Sequence
  Description of Artificial Sequence: Synthetic oligonucleotide
ggugcuuccaggugcugac

SEQ ID NO: 2228601 - RNA, 19 nt, Artificial Sequence
  Description of Artificial Sequence: Synthetic oligonucleotide
uccgaguccacugguuggu

SEQ ID NO: 2228602 - RNA, 19 nt, Artificial Sequence
  Description of Artificial Sequence: Synthetic oligonucleotide
uccccaauccgaguccacu

SEQ ID NO: 2228603 - RNA, 19 nt, Artificial Sequence
  Description of Artificial Sequence: Synthetic oligonucleotide
caccauaguccacuuauua

SEQ ID NO: 2228604 - RNA, 19 nt, Artificial Sequence
  Description of Artificial Sequence: Synthetic oligonucleotide
cagccugaacugcugcuac

SEQ ID NO: 2228605 - RNA, 19 nt, Artificial Sequence
  Description of Artificial Sequence: Synthetic oligonucleotide
acgccaucucucauagggg

SEQ ID NO: 2228606 - RNA, 19 nt, Artificial Sequence
  Description of Artificial Sequence: Synthetic oligonucleotide
aucucucauaggggccacc

SEQ ID NO: 2228607 - RNA, 19 nt, Artificial Sequence
  Description of Artificial Sequence: Synthetic oligonucleotide
ggccaaagcgggcaaucag

SEQ ID NO: 2228608 - RNA, 19 nt, Artificial Sequence
  Description of Artificial Sequence: Synthetic oligonucleotide
gcuguugauuguccaccgg

SEQ ID NO: 2228609 - RNA, 19 nt, Artificial Sequence
  Description of Artificial Sequence: Synthetic oligonucleotide
ugacgccaucucucauagg

SEQ ID NO: 2228610 - RNA, 19 nt, Artificial Sequence
  Description of Artificial Sequence: Synthetic oligonucleotide
cacuuauuagccacagggu

SEQ ID NO: 2228611 - RNA, 19 nt, Artificial Sequence
  Description of Artificial Sequence: Synthetic oligonucleotide
uuuggcggucaugucccca

SEQ ID NO: 2228612 - RNA, 19 nt, Artificial Sequence
  Description of Artificial Sequence: Synthetic oligonucleotide
acacccagacauccuuaga

SEQ ID NO: 2228613 - RNA, 19 nt, Artificial Sequence
  Description of Artificial Sequence: Synthetic oligonucleotide
caguuccauguaucugaag

SEQ ID NO: 2228614 - RNA, 19 nt, Artificial Sequence
  Description of Artificial Sequence: Synthetic oligonucleotide
uccacugguuggucucaca

SEQ ID NO: 2228615 - RNA, 19 nt, Artificial Sequence
  Description of Artificial Sequence: Synthetic oligonucleotide
cguuuggcggucauguccc

SEQ ID NO: 2228616 - RNA, 19 nt, Artificial Sequence
  Description of Artificial Sequence: Synthetic oligonucleotide
caccaugucccgguggaug

SEQ ID NO: 2228617 - RNA, 19 nt, Artificial Sequence
  Description of Artificial Sequence: Synthetic oligonucleotide
ccacugguuggucucacag

SEQ ID NO: 2228618 - RNA, 19 nt, Artificial Sequence
  Description of Artificial Sequence: Synthetic oligonucleotide
gccaaagcgggcaaucagc

SEQ ID NO: 2228619 - RNA, 19 nt, Artificial Sequence
  Description of Artificial Sequence: Synthetic oligonucleotide
cacggugucucuggagacc

SEQ ID NO: 2228620 - RNA, 19 nt, Artificial Sequence
  Description of Artificial Sequence: Synthetic oligonucleotide
caccacguagagacaguuc

SEQ ID NO: 2228621 - RNA, 19 nt, Artificial Sequence
  Description of Artificial Sequence: Synthetic oligonucleotide
uacaccucugggucccaaa

SEQ ID NO: 2228622 - RNA, 19 nt, Artificial Sequence
  Description of Artificial Sequence: Synthetic oligonucleotide
cauacagcuuguugcccga

SEQ ID NO: 2228623 - RNA, 19 nt, Artificial Sequence
  Description of Artificial Sequence: Synthetic oligonucleotide
cuguugauuguccaccggu

SEQ ID NO: 2228624 - RNA, 19 nt, Artificial Sequence
  Description of Artificial Sequence: Synthetic oligonucleotide
agcacacggugucucugga

SEQ ID NO: 2228625 - RNA, 19 nt, Artificial Sequence
  Description of Artificial Sequence: Synthetic oligonucleotide
cgaagccagggcaugacag

SEQ ID NO: 2228626 - RNA, 19 nt, Artificial Sequence
  Description of Artificial Sequence: Synthetic oligonucleotide
aaccaaucgcagaggcgcu

SEQ ID NO: 2228627 - RNA, 19 nt, Artificial Sequence
  Description of Artificial Sequence: Synthetic oligonucleotide
ggacaccaugucccggugg

SEQ ID NO: 2228628 - RNA, 19 nt, Artificial Sequence
  Description of Artificial Sequence: Synthetic oligonucleotide
cagggcaugacaggacaug

SEQ ID NO: 2228629 - RNA, 19 nt, Artificial Sequence
  Description of Artificial Sequence: Synthetic oligonucleotide
ggucauguccccaauccga

SEQ ID NO: 2228630 - RNA, 19 nt, Artificial Sequence
  Description of Artificial Sequence: Synthetic oligonucleotide
gcucagccgagccauggcc

SEQ ID NO: 2228631 - RNA, 19 nt, Artificial Sequence
  Description of Artificial Sequence: Synthetic oligonucleotide
agccgagccauggccaaag

SEQ ID NO: 2228632 - RNA, 19 nt, Artificial Sequence
  Description of Artificial Sequence: Synthetic oligonucleotide
gcaaccaaucgcagaggcg

SEQ ID NO: 2228633 - RNA, 19 nt, Artificial Sequence
  Description of Artificial Sequence: Synthetic oligonucleotide
guccgggacacuacagagc

SEQ ID NO: 2228634 - RNA, 19 nt, Artificial Sequence
  Description of Artificial Sequence: Synthetic oligonucleotide
ucucacagucgaagcgaua

SEQ ID NO: 2228635 - RNA, 19 nt, Artificial Sequence
  Description of Artificial Sequence: Synthetic oligonucleotide
gcaguccagggucuuacac

SEQ ID NO: 2228636 - RNA, 19 nt, Artificial Sequence
  Description of Artificial Sequence: Synthetic oligonucleotide
cccaauccgaguccacugg

SEQ ID NO: 2228637 - RNA, 19 nt, Artificial Sequence
  Description of Artificial Sequence: Synthetic oligonucleotide
agcaguccagggucuuaca

SEQ ID NO: 2228638 - RNA, 19 nt, Artificial Sequence
  Description of Artificial Sequence: Synthetic oligonucleotide
guccaccgguucucggagg

SEQ ID NO: 2228639 - RNA, 19 nt, Artificial Sequence
  Description of Artificial Sequence: Synthetic oligonucleotide
cuacaguucaggacagccu

SEQ ID NO: 2228640 - RNA, 19 nt, Artificial Sequence
  Description of Artificial Sequence: Synthetic oligonucleotide
ucccucccgucacauuagu

SEQ ID NO: 2228641 - RNA, 19 nt, Artificial Sequence
  Description of Artificial Sequence: Synthetic oligonucleotide
cuguguugcuggugccgag

SEQ ID NO: 2228642 - RNA, 19 nt, Artificial Sequence
  Description of Artificial Sequence: Synthetic oligonucleotide
aguccacuuauuagccaca

SEQ ID NO: 2228643 - RNA, 19 nt, Artificial Sequence
  Description of Artificial Sequence: Synthetic oligonucleotide
ccgagccauggccaaagcg

SEQ ID NO: 2228644 - RNA, 19 nt, Artificial Sequence
  Description of Artificial Sequence: Synthetic oligonucleotide
ggucucacagucgaagcga

SEQ ID NO: 2228645 - RNA, 19 nt, Artificial Sequence
  Description of Artificial Sequence: Synthetic oligonucleotide
uacuuguuucagggagaca

SEQ ID NO: 2228646 - RNA, 19 nt, Artificial Sequence
  Description of Artificial Sequence: Synthetic oligonucleotide
ggcagccuugcagucaaag

SEQ ID NO: 2228647 - RNA, 19 nt, Artificial Sequence
  Description of Artificial Sequence: Synthetic oligonucleotide
ggcaugacaggacaugcgu

SEQ ID NO: 2228648 - RNA, 19 nt, Artificial Sequence
  Description of Artificial Sequence: Synthetic oligonucleotide
ugcguuuggcggucauguc

SEQ ID NO: 2228649 - RNA, 19 nt, Artificial Sequence
  Description of Artificial Sequence: Synthetic oligonucleotide
caugcguuuggcggucaug

SEQ ID NO: 2228650 - RNA, 19 nt, Artificial Sequence
  Description of Artificial Sequence: Synthetic oligonucleotide
cuacccggagcugguacug

SEQ ID NO: 2228651 - RNA, 19 nt, Artificial Sequence
  Description of Artificial Sequence: Synthetic oligonucleotide
agacauccuuagagacccc

SEQ ID NO: 2228652 - RNA, 19 nt, Artificial Sequence
  Description of Artificial Sequence: Synthetic oligonucleotide
gggucuuacaccucugggu

SEQ ID NO: 2228653 - RNA, 19 nt, Artificial Sequence
  Description of Artificial Sequence: Synthetic oligonucleotide
gggcaugacaggacaugcg

SEQ ID NO: 2228654 - RNA, 19 nt, Artificial Sequence
  Description of Artificial Sequence: Synthetic oligonucleotide
gccugaacugcugcuaccc

SEQ ID NO: 2228655 - RNA, 19 nt, Artificial Sequence
  Description of Artificial Sequence: Synthetic oligonucleotide
ccucugggucccaaaguag

SEQ ID NO: 2228656 - RNA, 19 nt, Artificial Sequence
  Description of Artificial Sequence: Synthetic oligonucleotide
ugcugacgccaucucucau

SEQ ID NO: 2228657 - RNA, 19 nt, Artificial Sequence
  Description of Artificial Sequence: Synthetic oligonucleotide
cccucucugcacacaagcc

SEQ ID NO: 2228658 - RNA, 19 nt, Artificial Sequence
  Description of Artificial Sequence: Synthetic oligonucleotide
acaagccgcuggcagcuua

SEQ ID NO: 2228659 - RNA, 19 nt, Artificial Sequence
  Description of Artificial Sequence: Synthetic oligonucleotide
ccaaagcgggcaaucagca

SEQ ID NO: 2228660 - RNA, 19 nt, Artificial Sequence
  Description of Artificial Sequence: Synthetic oligonucleotide
accaaucgcagaggcgcug

SEQ ID NO: 2228661 - RNA, 19 nt, Artificial Sequence
  Description of Artificial Sequence: Synthetic oligonucleotide
gguggaugcugguccacca

SEQ ID NO: 2228662 - RNA, 19 nt, Artificial Sequence
  Description of Artificial Sequence: Synthetic oligonucleotide
gccaccauaguccacuuau

SEQ ID NO: 2228663 - RNA, 19 nt, Artificial Sequence
  Description of Artificial Sequence: Synthetic oligonucleotide
gcugccuuggaccauuccu

SEQ ID NO: 2228664 - RNA, 19 nt, Artificial Sequence
  Description of Artificial Sequence: Synthetic oligonucleotide
cauacacccagacauccuu

SEQ ID NO: 2228665 - RNA, 19 nt, Artificial Sequence
  Description of Artificial Sequence: Synthetic oligonucleotide
cauugcugacgccaucucu

SEQ ID NO: 2228666 - RNA, 19 nt, Artificial Sequence
  Description of Artificial Sequence: Synthetic oligonucleotide
gguccaccaaacacaaaga

SEQ ID NO: 2228667 - RNA, 19 nt, Artificial Sequence
  Description of Artificial Sequence: Synthetic oligonucleotide
cccggcaggaagaaccaug

SEQ ID NO: 2228668 - RNA, 19 nt, Artificial Sequence
  Description of Artificial Sequence: Synthetic oligonucleotide
caccgguucucggaggguc

SEQ ID NO: 2228669 - RNA, 19 nt, Artificial Sequence
  Description of Artificial Sequence: Synthetic oligonucleotide
agucuggcugggcuccgaa

SEQ ID NO: 2228670 - RNA, 19 nt, Artificial Sequence
  Description of Artificial Sequence: Synthetic oligonucleotide
acauccuuagagaccccau

SEQ ID NO: 2228671 - RNA, 19 nt, Artificial Sequence
  Description of Artificial Sequence: Synthetic oligonucleotide
ugcccgaagccagggcaug

SEQ ID NO: 2228672 - RNA, 19 nt, Artificial Sequence
  Description of Artificial Sequence: Synthetic oligonucleotide
ucuggcccggcaggaagaa

SEQ ID NO: 2228673 - RNA, 19 nt, Artificial Sequence
  Description of Artificial Sequence: Synthetic oligonucleotide
ggagaccuucacucuucug

SEQ ID NO: 2228674 - RNA, 19 nt, Artificial Sequence
  Description of Artificial Sequence: Synthetic oligonucleotide
gcacacggugucucuggag

SEQ ID NO: 2228675 - RNA, 19 nt, Artificial Sequence
  Description of Artificial Sequence: Synthetic oligonucleotide
acaugcguuuggcggucau

SEQ ID NO: 2228676 - RNA, 19 nt, Artificial Sequence
  Description of Artificial Sequence: Synthetic oligonucleotide
auacacccagacauccuua

SEQ ID NO: 2228677 - RNA, 19 nt, Artificial Sequence
  Description of Artificial Sequence: Synthetic oligonucleotide
cucggagggucaaaacacu

SEQ ID NO: 2228678 - RNA, 19 nt, Artificial Sequence
  Description of Artificial Sequence: Synthetic oligonucleotide
ccauuccucguggacagug

SEQ ID NO: 2228679 - RNA, 19 nt, Artificial Sequence
  Description of Artificial Sequence: Synthetic oligonucleotide
aggccguggggaugagaga

SEQ ID NO: 2228680 - RNA, 19 nt, Artificial Sequence
  Description of Artificial Sequence: Synthetic oligonucleotide
gggaggcagggaaaauacc

SEQ ID NO: 2228681 - RNA, 19 nt, Artificial Sequence
  Description of Artificial Sequence: Synthetic oligonucleotide
ccccaauccgaguccacug

SEQ ID NO: 2228682 - RNA, 19 nt, Artificial Sequence
  Description of Artificial Sequence: Synthetic oligonucleotide
uuacaccucugggucccaa

SEQ ID NO: 2228683 - RNA, 19 nt, Artificial Sequence
  Description of Artificial Sequence: Synthetic oligonucleotide
cacgguggugaugcaguuc

SEQ ID NO: 2228684 - RNA, 19 nt, Artificial Sequence
  Description of Artificial Sequence: Synthetic oligonucleotide
gccaucucucauaggggcc

SEQ ID NO: 2228685 - RNA, 19 nt, Artificial Sequence
  Description of Artificial Sequence: Synthetic oligonucleotide
gcugacgccaucucucaua

SEQ ID NO: 2228686 - RNA, 19 nt, Artificial Sequence
  Description of Artificial Sequence: Synthetic oligonucleotide
ucgaagcgauaggcuguug

SEQ ID NO: 2228687 - RNA, 19 nt, Artificial Sequence
  Description of Artificial Sequence: Synthetic oligonucleotide
auagcaguccagggucuua

SEQ ID NO: 2228688 - RNA, 19 nt, Artificial Sequence
  Description of Artificial Sequence: Synthetic oligonucleotide
caucucucauaggggccac

SEQ ID NO: 2228689 - RNA, 19 nt, Artificial Sequence
  Description of Artificial Sequence: Synthetic oligonucleotide
ccggagcugguacugucag

SEQ ID NO: 2228690 - RNA, 19 nt, Artificial Sequence
  Description of Artificial Sequence: Synthetic oligonucleotide
gggucaaaacacuggacuu

SEQ ID NO: 2228691 - RNA, 19 nt, Artificial Sequence
  Description of Artificial Sequence: Synthetic oligonucleotide
ccggcaggaagaaccauga

SEQ ID NO: 2228692 - RNA, 19 nt, Artificial Sequence
  Description of Artificial Sequence: Synthetic oligonucleotide
ggcgcucacuacugcagca

SEQ ID NO: 2228693 - RNA, 19 nt, Artificial Sequence
  Description of Artificial Sequence: Synthetic oligonucleotide
gcuuggcgcucacuacugc

SEQ ID NO: 2228694 - RNA, 19 nt, Artificial Sequence
  Description of Artificial Sequence: Synthetic oligonucleotide
gagccccucccucccguca

SEQ ID NO: 2228695 - RNA, 19 nt, Artificial Sequence
  Description of Artificial Sequence: Synthetic oligonucleotide
cugcagcauugcugacgcc

SEQ ID NO: 2228696 - RNA, 19 nt, Artificial Sequence
  Description of Artificial Sequence: Synthetic oligonucleotide
cacugguuggucucacagu

SEQ ID NO: 2228697 - RNA, 19 nt, Artificial Sequence
  Description of Artificial Sequence: Synthetic oligonucleotide
ccacguagagacaguucuc

SEQ ID NO: 2228698 - RNA, 19 nt, Artificial Sequence
  Description of Artificial Sequence: Synthetic oligonucleotide
uggcggucauguccccaau

SEQ ID NO: 2228699 - RNA, 19 nt, Artificial Sequence
  Description of Artificial Sequence: Synthetic oligonucleotide
cauuccucguggacagugu

SEQ ID NO: 2228700 - RNA, 19 nt, Artificial Sequence
  Description of Artificial Sequence: Synthetic oligonucleotide
ccucccacaggcagccuug

SEQ ID NO: 2228701 - RNA, 19 nt, Artificial Sequence
  Description of Artificial Sequence: Synthetic oligonucleotide
accgguucucggaggguca

SEQ ID NO: 2228702 - RNA, 19 nt, Artificial Sequence
  Description of Artificial Sequence: Synthetic oligonucleotide
augcaggcaggugcuucca

SEQ ID NO: 2228703 - RNA, 19 nt, Artificial Sequence
  Description of Artificial Sequence: Synthetic oligonucleotide
ggcagcuuaggaugcccaa

SEQ ID NO: 2228704 - RNA, 19 nt, Artificial Sequence
  Description of Artificial Sequence: Synthetic oligonucleotide
cauccuuagagaccccauu

SEQ ID NO: 2228705 - RNA, 19 nt, Artificial Sequence
  Description of Artificial Sequence: Synthetic oligonucleotide
cgaagcgauaggcuguuga

SEQ ID NO: 2228706 - RNA, 19 nt, Artificial Sequence
  Description of Artificial Sequence: Synthetic oligonucleotide
ggcggucauguccccaauc

SEQ ID NO: 2228707 - RNA, 19 nt, Artificial Sequence
  Description of Artificial Sequence: Synthetic oligonucleotide
gcuccgaaggugccucuca

SEQ ID NO: 2228708 - RNA, 19 nt, Artificial Sequence
  Description of Artificial Sequence: Synthetic oligonucleotide
cccuguuguucccucucug

SEQ ID NO: 2228709 - RNA, 19 nt, Artificial Sequence
  Description of Artificial Sequence: Synthetic oligonucleotide
uggugccgagggaccccug

SEQ ID NO: 2228710 - RNA, 19 nt, Artificial Sequence
  Description of Artificial Sequence: Synthetic oligonucleotide
gacaugcguuuggcgguca

SEQ ID NO: 2228711 - RNA, 19 nt, Artificial Sequence
  Description of Artificial Sequence: Synthetic oligonucleotide
ggucaaaacacuggacuuu

SEQ ID NO: 2228712 - RNA, 19 nt, Artificial Sequence
  Description of Artificial Sequence: Synthetic oligonucleotide
gucccgguggaugcugguc

SEQ ID NO: 2228713 - RNA, 19 nt, Artificial Sequence
  Description of Artificial Sequence: Synthetic oligonucleotide
guaucugaaguggggucau

SEQ ID NO: 2228714 - RNA, 19 nt, Artificial Sequence
  Description of Artificial Sequence: Synthetic oligonucleotide
cugggucccaaaguagccu

SEQ ID NO: 2228715 - RNA, 19 nt, Artificial Sequence
  Description of Artificial Sequence: Synthetic oligonucleotide
uauuagccacagggucaua

SEQ ID NO: 2228716 - RNA, 19 nt, Artificial Sequence
  Description of Artificial Sequence: Synthetic oligonucleotide
ccugauguccgggacacua

SEQ ID NO: 2228717 - RNA, 19 nt, Artificial Sequence
  Description of Artificial Sequence: Synthetic oligonucleotide
cgauaggcuguugauuguc

SEQ ID NO: 2228718 - RNA, 19 nt, Artificial Sequence
  Description of Artificial Sequence: Synthetic oligonucleotide
caauccgaguccacugguu

SEQ ID NO: 2228719 - RNA, 19 nt, Artificial Sequence
  Description of Artificial Sequence: Synthetic oligonucleotide
gcuuccaggugcugacaaa

SEQ ID NO: 2228720 - RNA, 19 nt, Artificial Sequence
  Description of Artificial Sequence: Synthetic oligonucleotide
caaagcgggcaaucagcau

SEQ ID NO: 2228721 - RNA, 19 nt, Artificial Sequence
  Description of Artificial Sequence: Synthetic oligonucleotide
acaccaugucccgguggau

SEQ ID NO: 2228722 - RNA, 19 nt, Artificial Sequence
  Description of Artificial Sequence: Synthetic oligonucleotide
ggcagggaaaauaccugcu

SEQ ID NO: 2228723 - RNA, 19 nt, Artificial Sequence
  Description of Artificial Sequence: Synthetic oligonucleotide
ggcacgguggugaugcagu

SEQ ID NO: 2228724 - RNA, 19 nt, Artificial Sequence
  Description of Artificial Sequence: Synthetic oligonucleotide
accauuccucguggacagu

SEQ ID NO: 2228725 - RNA, 19 nt, Artificial Sequence
  Description of Artificial Sequence: Synthetic oligonucleotide
caaucgcagaggcgcugaa

SEQ ID NO: 2228726 - RNA, 19 nt, Artificial Sequence
  Description of Artificial Sequence: Synthetic oligonucleotide
cgagggaccccuguuguuc

SEQ ID NO: 2228727 - RNA, 19 nt, Artificial Sequence
  Description of Artificial Sequence: Synthetic oligonucleotide
ggacaugcguuuggcgguc

SEQ ID NO: 2228728 - RNA, 19 nt, Artificial Sequence
  Description of Artificial Sequence: Synthetic oligonucleotide
caaaggccguggggaugag

SEQ ID NO: 2228729 - RNA, 19 nt, Artificial Sequence
  Description of Artificial Sequence: Synthetic oligonucleotide
gcuacccggagcugguacu

SEQ ID NO: 2228730 - RNA, 19 nt, Artificial Sequence
  Description of Artificial Sequence: Synthetic oligonucleotide
gucucacagucgaagcgau

SEQ ID NO: 2228731 - RNA, 19 nt, Artificial Sequence
  Description of Artificial Sequence: Synthetic oligonucleotide
caccaaacacaaagagcuu

SEQ ID NO: 2228732 - RNA, 19 nt, Artificial Sequence
  Description of Artificial Sequence: Synthetic oligonucleotide
ccaugaagucuggcugggc

SEQ ID NO: 2228733 - RNA, 19 nt, Artificial Sequence
  Description of Artificial Sequence: Synthetic oligonucleotide
gccgagccauggccaaagc

SEQ ID NO: 2228734 - RNA, 19 nt, Artificial Sequence
  Description of Artificial Sequence: Synthetic oligonucleotide
guccccaauccgaguccac

SEQ ID NO: 2228735 - RNA, 19 nt, Artificial Sequence
  Description of Artificial Sequence: Synthetic oligonucleotide
acuggacuuuggacaccau

SEQ ID NO: 2228736 - RNA, 19 nt, Artificial Sequence
  Description of Artificial Sequence: Synthetic oligonucleotide
ggugccgagggaccccugu

SEQ ID NO: 2228737 - RNA, 19 nt, Artificial Sequence
  Description of Artificial Sequence: Synthetic oligonucleotide
cuuacaccucuggguccca

SEQ ID NO: 2228738 - RNA, 19 nt, Artificial Sequence
  Description of Artificial Sequence: Synthetic oligonucleotide
gucgaagcgauaggcuguu

SEQ ID NO: 2228739 - RNA, 19 nt, Artificial Sequence
  Description of Artificial Sequence: Synthetic oligonucleotide
ccgaagccagggcaugaca

SEQ ID NO: 2228740 - RNA, 19 nt, Artificial Sequence
  Description of Artificial Sequence: Synthetic oligonucleotide
ccaaucgcagaggcgcuga

SEQ ID NO: 2228741 - RNA, 19 nt, Artificial Sequence
  Description of Artificial Sequence: Synthetic oligonucleotide
ggcccggcaggaagaacca

SEQ ID NO: 2228742 - RNA, 19 nt, Artificial Sequence
  Description of Artificial Sequence: Synthetic oligonucleotide
gguuggucucacagucgaa

SEQ ID NO: 2228743 - RNA, 19 nt, Artificial Sequence
  Description of Artificial Sequence: Synthetic oligonucleotide
cgguggaugcugguccacc

SEQ ID NO: 2228744 - RNA, 19 nt, Artificial Sequence
  Description of Artificial Sequence: Synthetic oligonucleotide
ccaauccgaguccacuggu

SEQ ID NO: 2228745 - RNA, 19 nt, Artificial Sequence
  Description of Artificial Sequence: Synthetic oligonucleotide
ggcuccgaaggugccucuc

SEQ ID NO: 2228746 - RNA, 19 nt, Artificial Sequence
  Description of Artificial Sequence: Synthetic oligonucleotide
cauagcaguccagggucuu

SEQ ID NO: 2228747 - RNA, 19 nt, Artificial Sequence
  Description of Artificial Sequence: Synthetic oligonucleotide
gcaugacaggacaugcguu

SEQ ID NO: 2228748 - RNA, 19 nt, Artificial Sequence
  Description of Artificial Sequence: Synthetic oligonucleotide
ggccaccauaguccacuua

SEQ ID NO: 2228749 - RNA, 19 nt, Artificial Sequence
  Description of Artificial Sequence: Synthetic oligonucleotide
gccuuggaccauuccucgu

SEQ ID NO: 2228750 - RNA, 19 nt, Artificial Sequence
  Description of Artificial Sequence: Synthetic oligonucleotide
ccaagcacacggugucucu

SEQ ID NO: 2228751 - RNA, 19 nt, Artificial Sequence
  Description of Artificial Sequence: Synthetic oligonucleotide
gugccgagggaccccuguu

SEQ ID NO: 2228752 - RNA, 19 nt, Artificial Sequence
  Description of Artificial Sequence: Synthetic oligonucleotide
ggaugcccaagcacacggu

SEQ ID NO: 2228753 - RNA, 19 nt, Artificial Sequence
  Description of Artificial Sequence: Synthetic oligonucleotide
cuggugccgagggaccccu

SEQ ID NO: 2228754 - RNA, 19 nt, Artificial Sequence
  Description of Artificial Sequence: Synthetic oligonucleotide
gcccgaagccagggcauga

SEQ ID NO: 2228755 - RNA, 19 nt, Artificial Sequence
  Description of Artificial Sequence: Synthetic oligonucleotide
ccgaguccacugguugguc

SEQ ID NO: 2228756 - RNA, 19 nt, Artificial Sequence
  Description of Artificial Sequence: Synthetic oligonucleotide
ccguggggaugagagagua

SEQ ID NO: 2228757 - RNA, 19 nt, Artificial Sequence
  Description of Artificial Sequence: Synthetic oligonucleotide
cgaguccacugguuggucu

SEQ ID NO: 2228758 - RNA, 19 nt, Artificial Sequence
  Description of Artificial Sequence: Synthetic oligonucleotide
cccucccgucacauuagua

SEQ ID NO: 2228759 - RNA, 19 nt, Artificial Sequence
  Description of Artificial Sequence: Synthetic oligonucleotide
ccgguggaugcugguccac

SEQ ID NO: 2228760 - RNA, 19 nt, Artificial Sequence
  Description of Artificial Sequence: Synthetic oligonucleotide
cagccgagccauggccaaa

SEQ ID NO: 2228761 - RNA, 19 nt, Artificial Sequence
  Description of Artificial Sequence: Synthetic oligonucleotide
gggaccccuguuguucccu

SEQ ID NO: 2228762 - RNA, 19 nt, Artificial Sequence
  Description of Artificial Sequence: Synthetic oligonucleotide
cugcuacccggagcuggua

SEQ ID NO: 2228763 - RNA, 19 nt, Artificial Sequence
  Description of Artificial Sequence: Synthetic oligonucleotide
gcacgguggugaugcaguu

SEQ ID NO: 2228764 - RNA, 19 nt, Artificial Sequence
  Description of Artificial Sequence: Synthetic oligonucleotide
gccucucaugcaggcaggu

SEQ ID NO: 2228765 - RNA, 19 nt, Artificial Sequence
  Description of Artificial Sequence: Synthetic oligonucleotide
gcgcucacuacugcagcau

SEQ ID NO: 2228766 - RNA, 19 nt, Artificial Sequence
  Description of Artificial Sequence: Synthetic oligonucleotide
cccaccacguagagacagu

SEQ ID NO: 2228767 - RNA, 19 nt, Artificial Sequence
  Description of Artificial Sequence: Synthetic oligonucleotide
cucaugcaggcaggugcuu

SEQ ID NO: 2228768 - RNA, 19 nt, Artificial Sequence
  Description of Artificial Sequence: Synthetic oligonucleotide
ccccuguuguucccucucu

SEQ ID NO: 2228769 - RNA, 19 nt, Artificial Sequence
  Description of Artificial Sequence: Synthetic oligonucleotide
ggggcugccuuggaccauu

SEQ ID NO: 2228770 - RNA, 19 nt, Artificial Sequence
  Description of Artificial Sequence: Synthetic oligonucleotide
ccgggacacuacagagcaa

SEQ ID NO: 2228771 - RNA, 19 nt, Artificial Sequence
  Description of Artificial Sequence: Synthetic oligonucleotide
gccguggggaugagagagu

SEQ ID NO: 2228772 - RNA, 19 nt, Artificial Sequence
  Description of Artificial Sequence: Synthetic oligonucleotide
ccucguggacagugucaua

SEQ ID NO: 2228773 - RNA, 19 nt, Artificial Sequence
  Description of Artificial Sequence: Synthetic oligonucleotide
gggcuccgaaggugccucu

SEQ ID NO: 2228774 - RNA, 19 nt, Artificial Sequence
  Description of Artificial Sequence: Synthetic oligonucleotide
ccgguucucggagggucaa

SEQ ID NO: 2228775 - RNA, 19 nt, Artificial Sequence
  Description of Artificial Sequence: Synthetic oligonucleotide
cccgucacauuaguaccuu

SEQ ID NO: 2228776 - RNA, 19 nt, Artificial Sequence
  Description of Artificial Sequence: Synthetic oligonucleotide
ccccauucucagagccccu

SEQ ID NO: 2228777 - RNA, 19 nt, Artificial Sequence
  Description of Artificial Sequence: Synthetic oligonucleotide
ccaugucccgguggaugcu

SEQ ID NO: 2228778 - RNA, 19 nt, Artificial Sequence
  Description of Artificial Sequence: Synthetic oligonucleotide
cgcucacuacugcagcauu

SEQ ID NO: 2228779 - RNA, 19 nt, Artificial Sequence
  Description of Artificial Sequence: Synthetic oligonucleotide
ccgagggaccccuguuguu

SEQ ID NO: 2228780 - RNA, 19 nt, Artificial Sequence
  Description of Artificial Sequence: Synthetic oligonucleotide
ccaccgguucucggagggu

SEQ ID NO: 2228781 - RNA, 19 nt, Artificial Sequence
  Description of Artificial Sequence: Synthetic oligonucleotide
cccugauguccgggacacu

SEQ ID NO: 2228782 - RNA, 19 nt, Artificial Sequence
  Description of Artificial Sequence: Synthetic oligonucleotide
aguauuuacaauuucaguc

SEQ ID NO: 2228783 - RNA, 19 nt, Artificial Sequence
  Description of Artificial Sequence: Synthetic oligonucleotide
ugugaaaacuguaaggugg

SEQ ID NO: 2228784 - RNA, 19 nt, Artificial Sequence
  Description of Artificial Sequence: Synthetic oligonucleotide
aaugcuuguguuuacaaag

SEQ ID NO: 2228785 - RNA, 19 nt, Artificial Sequence
  Description of Artificial Sequence: Synthetic oligonucleotide
agaaacuggguuuuaaggg

SEQ ID NO: 2228786 - RNA, 19 nt, Artificial Sequence
  Description of Artificial Sequence: Synthetic oligonucleotide
uagaaacuggguuuuaagg

SEQ ID NO: 2228787 - RNA, 19 nt, Artificial Sequence
  Description of Artificial Sequence: Synthetic oligonucleotide
uaaaauccuauucaaguac

SEQ ID NO: 2228788 - RNA, 19 nt, Artificial Sequence
  Description of Artificial Sequence: Synthetic oligonucleotide
acaacauucugcuaaaaca

SEQ ID NO: 2228789 - RNA, 19 nt, Artificial Sequence
  Description of Artificial Sequence: Synthetic oligonucleotide
agaaaggucacuuuuauua

SEQ ID NO: 2228790 - RNA, 19 nt, Artificial Sequence
  Description of Artificial Sequence: Synthetic oligonucleotide
ugcuaaaacagccuuguca

SEQ ID NO: 2228791 - RNA, 19 nt, Artificial Sequence
  Description of Artificial Sequence: Synthetic oligonucleotide
gaugcaaccuguuggaugc

SEQ ID NO: 2228792 - RNA, 19 nt, Artificial Sequence
  Description of Artificial Sequence: Synthetic oligonucleotide
uuugcaaccuggauuugcg

SEQ ID NO: 2228793 - RNA, 19 nt, Artificial Sequence
  Description of Artificial Sequence: Synthetic oligonucleotide
uccuauucaaguacaaaug

SEQ ID NO: 2228794 - RNA, 19 nt, Artificial Sequence
  Description of Artificial Sequence: Synthetic oligonucleotide
uuugcuugguaggacaucg

SEQ ID NO: 2228795 - RNA, 19 nt, Artificial Sequence
  Description of Artificial Sequence: Synthetic oligonucleotide
uuagaaacuggguuuuaag

SEQ ID NO: 2228796 - RNA, 19 nt, Artificial Sequence
  Description of Artificial Sequence: Synthetic oligonucleotide
gaugggugugguuagaaac

SEQ ID NO: 2228797 - RNA, 19 nt, Artificial Sequence
  Description of Artificial Sequence: Synthetic oligonucleotide
agcugaugcaaccuguugg

SEQ ID NO: 2228798 - RNA, 19 nt, Artificial Sequence
  Description of Artificial Sequence: Synthetic oligonucleotide
ugugguuaccaccugcugc

SEQ ID NO: 2228799 - RNA, 19 nt, Artificial Sequence
  Description of Artificial Sequence: Synthetic oligonucleotide
uguuuacaaaguauuuaca

SEQ ID NO: 2228800 - RNA, 19 nt, Artificial Sequence
  Description of Artificial Sequence: Synthetic oligonucleotide
guguuuacaaaguauuuac

SEQ ID NO: 2228801 - RNA, 19 nt, Artificial Sequence
  Description of Artificial Sequence: Synthetic oligonucleotide
ugagaggucugcaucugcg

SEQ ID NO: 2228802 - RNA, 19 nt, Artificial Sequence
  Description of Artificial Sequence: Synthetic oligonucleotide
uacaacauucugcuaaaac

SEQ ID NO: 2228803 - RNA, 19 nt, Artificial Sequence
  Description of Artificial Sequence: Synthetic oligonucleotide
aguuuugcaaccuggauuu

SEQ ID NO: 2228804 - RNA, 19 nt, Artificial Sequence
  Description of Artificial Sequence: Synthetic oligonucleotide
uguccuuuuaaaauccuau

SEQ ID NO: 2228805 - RNA, 19 nt, Artificial Sequence
  Description of Artificial Sequence: Synthetic oligonucleotide
cuugaggaaguuuugcaac

SEQ ID NO: 2228806 - RNA, 19 nt, Artificial Sequence
  Description of Artificial Sequence: Synthetic oligonucleotide
ucaaguacaaaugcuugug

SEQ ID NO: 2228807 - RNA, 19 nt, Artificial Sequence
  Description of Artificial Sequence: Synthetic oligonucleotide
uuuggagcugcguuggagc

SEQ ID NO: 2228808 - RNA, 19 nt, Artificial Sequence
  Description of Artificial Sequence: Synthetic oligonucleotide
uugaggaaguuuugcaacc

SEQ ID NO: 2228809 - RNA, 19 nt, Artificial Sequence
  Description of Artificial Sequence: Synthetic oligonucleotide
aaaauccuauucaaguaca

SEQ ID NO: 2228810 - RNA, 19 nt, Artificial Sequence
  Description of Artificial Sequence: Synthetic oligonucleotide
aaacuguaagguggaaggg

SEQ ID NO: 2228811 - RNA, 19 nt, Artificial Sequence
  Description of Artificial Sequence: Synthetic oligonucleotide
ugaugcaaccuguuggaug

SEQ ID NO: 2228812 - RNA, 19 nt, Artificial Sequence
  Description of Artificial Sequence: Synthetic oligonucleotide
cuuccuacuggcacggagg

SEQ ID NO: 2228813 - RNA, 19 nt, Artificial Sequence
  Description of Artificial Sequence: Synthetic oligonucleotide
uguagaaaggucacuuuua

SEQ ID NO: 2228814 - RNA, 19 nt, Artificial Sequence
  Description of Artificial Sequence: Synthetic oligonucleotide
ucugugacugcugugaaaa

SEQ ID NO: 2228815 - RNA, 19 nt, Artificial Sequence
  Description of Artificial Sequence: Synthetic oligonucleotide
uguaacuuuggcugcuggc

SEQ ID NO: 2228816 - RNA, 19 nt, Artificial Sequence
  Description of Artificial Sequence: Synthetic oligonucleotide
uguggagaagccugcugcg

SEQ ID NO: 2228817 - RNA, 19 nt, Artificial Sequence
  Description of Artificial Sequence: Synthetic oligonucleotide
guaccaaccaguuuccuuc

SEQ ID NO: 2228818 - RNA, 19 nt, Artificial Sequence
  Description of Artificial Sequence: Synthetic oligonucleotide
uccuguuucuuacaauuaa

SEQ ID NO: 2228819 - RNA, 19 nt, Artificial Sequence
  Description of Artificial Sequence: Synthetic oligonucleotide
uguguuuacaaaguauuua

SEQ ID NO: 2228820 - RNA, 19 nt, Artificial Sequence
  Description of Artificial Sequence: Synthetic oligonucleotide
aaccuguuggaugcuggcc

SEQ ID NO: 2228821 - RNA, 19 nt, Artificial Sequence
  Description of Artificial Sequence: Synthetic oligonucleotide
ugggcuguugcagucacgg

SEQ ID NO: 2228822 - RNA, 19 nt, Artificial Sequence
  Description of Artificial Sequence: Synthetic oligonucleotide
ucugcuaaaacagccuugu

SEQ ID NO: 2228823 - RNA, 19 nt, Artificial Sequence
  Description of Artificial Sequence: Synthetic oligonucleotide
aguccuguuucuuacaauu

SEQ ID NO: 2228824 - RNA, 19 nt, Artificial Sequence
  Description of Artificial Sequence: Synthetic oligonucleotide
aguccagaaacaguacaac

SEQ ID NO: 2228825 - RNA, 19 nt, Artificial Sequence
  Description of Artificial Sequence: Synthetic oligonucleotide
aucgguguccuuuuaaaau

SEQ ID NO: 2228826 - RNA, 19 nt, Artificial Sequence
  Description of Artificial Sequence: Synthetic oligonucleotide
uuggugggugucuucagcc

SEQ ID NO: 2228827 - RNA, 19 nt, Artificial Sequence
  Description of Artificial Sequence: Synthetic oligonucleotide
cugggaggaaagcugagag

SEQ ID NO: 2228828 - RNA, 19 nt, Artificial Sequence
  Description of Artificial Sequence: Synthetic oligonucleotide
aacuguaagguggaaggga

SEQ ID NO: 2228829 - RNA, 19 nt, Artificial Sequence
  Description of Artificial Sequence: Synthetic oligonucleotide
ucgguguccuuuuaaaauc

SEQ ID NO: 2228830 - RNA, 19 nt, Artificial Sequence
  Description of Artificial Sequence: Synthetic oligonucleotide
ccuauucaaguacaaaugc

SEQ ID NO: 2228831 - RNA, 19 nt, Artificial Sequence
  Description of Artificial Sequence: Synthetic oligonucleotide
cuggcuuggacugucagag

SEQ ID NO: 2228832 - RNA, 19 nt, Artificial Sequence
  Description of Artificial Sequence: Synthetic oligonucleotide
auucaaguacaaaugcuug

SEQ ID NO: 2228833 - RNA, 19 nt, Artificial Sequence
  Description of Artificial Sequence: Synthetic oligonucleotide
uuuugcaaccuggauuugc

SEQ ID NO: 2228834 - RNA, 19 nt, Artificial Sequence
  Description of Artificial Sequence: Synthetic oligonucleotide
uggcacggaggcuuggugg

SEQ ID NO: 2228835 - RNA, 19 nt, Artificial Sequence
  Description of Artificial Sequence: Synthetic oligonucleotide
cuugucauaguaccaacca

SEQ ID NO: 2228836 - RNA, 19 nt, Artificial Sequence
  Description of Artificial Sequence: Synthetic oligonucleotide
uggagcuuccaccaucugu

SEQ ID NO: 2228837 - RNA, 19 nt, Artificial Sequence
  Description of Artificial Sequence: Synthetic oligonucleotide
cugucuguggagaagccug

SEQ ID NO: 2228838 - RNA, 19 nt, Artificial Sequence
  Description of Artificial Sequence: Synthetic oligonucleotide
uguuugcugcugcacaacu

SEQ ID NO: 2228839 - RNA, 19 nt, Artificial Sequence
  Description of Artificial Sequence: Synthetic oligonucleotide
ugcguuggagcuuccacca

SEQ ID NO: 2228840 - RNA, 19 nt, Artificial Sequence
  Description of Artificial Sequence: Synthetic oligonucleotide
cacgguugggaucaucugc

SEQ ID NO: 2228841 - RNA, 19 nt, Artificial Sequence
  Description of Artificial Sequence: Synthetic oligonucleotide
ccugcugcgaagcugaugc

SEQ ID NO: 2228842 - RNA, 19 nt, Artificial Sequence
  Description of Artificial Sequence: Synthetic oligonucleotide
uuugcgucugcaccugcug

SEQ ID NO: 2228843 - RNA, 19 nt, Artificial Sequence
  Description of Artificial Sequence: Synthetic oligonucleotide
ugcaucugcgccuucccug

SEQ ID NO: 2228844 - RNA, 19 nt, Artificial Sequence
  Description of Artificial Sequence: Synthetic oligonucleotide
uuccuacuggcacggaggc

SEQ ID NO: 2228845 - RNA, 19 nt, Artificial Sequence
  Description of Artificial Sequence: Synthetic oligonucleotide
aauccuauucaaguacaaa

SEQ ID NO: 2228846 - RNA, 19 nt, Artificial Sequence
  Description of Artificial Sequence: Synthetic oligonucleotide
ugcuugguaggacaucggu

SEQ ID NO: 2228847 - RNA, 19 nt, Artificial Sequence
  Description of Artificial Sequence: Synthetic oligonucleotide
aacguggagggcugggcug

SEQ ID NO: 2228848 - RNA, 19 nt, Artificial Sequence
  Description of Artificial Sequence: Synthetic oligonucleotide
ugcaaccuggauuugcguc

SEQ ID NO: 2228849 - RNA, 19 nt, Artificial Sequence
  Description of Artificial Sequence: Synthetic oligonucleotide
cucgcaucuguaacuuugg

SEQ ID NO: 2228850 - RNA, 19 nt, Artificial Sequence
  Description of Artificial Sequence: Synthetic oligonucleotide
aguuucugggcuugggaga

SEQ ID NO: 2228851 - RNA, 19 nt, Artificial Sequence
  Description of Artificial Sequence: Synthetic oligonucleotide
caguacaacauucugcuaa

SEQ ID NO: 2228852 - RNA, 19 nt, Artificial Sequence
  Description of Artificial Sequence: Synthetic oligonucleotide
aguacaacauucugcuaaa

SEQ ID NO: 2228853 - RNA, 19 nt, Artificial Sequence
  Description of Artificial Sequence: Synthetic oligonucleotide
ggugugguuagaaacuggg

SEQ ID NO: 2228854 - RNA, 19 nt, Artificial Sequence
  Description of Artificial Sequence: Synthetic oligonucleotide
guuuuaagggcugguuggg

SEQ ID NO: 2228855 - RNA, 19 nt, Artificial Sequence
  Description of Artificial Sequence: Synthetic oligonucleotide
ugggguauguaagcuggcg

SEQ ID NO: 2228856 - RNA, 19 nt, Artificial Sequence
  Description of Artificial Sequence: Synthetic oligonucleotide
uuaagggcugguugggccu

SEQ ID NO: 2228857 - RNA, 19 nt, Artificial Sequence
  Description of Artificial Sequence: Synthetic oligonucleotide
accuguuggaugcuggcca

SEQ ID NO: 2228858 - RNA, 19 nt, Artificial Sequence
  Description of Artificial Sequence: Synthetic oligonucleotide
aaacuggguuuuaagggcu

SEQ ID NO: 2228859 - RNA, 19 nt, Artificial Sequence
  Description of Artificial Sequence: Synthetic oligonucleotide
cugagucccagccaguuuc

SEQ ID NO: 2228860 - RNA, 19 nt, Artificial Sequence
  Description of Artificial Sequence: Synthetic oligonucleotide
cuucccuggcaucggaacg

SEQ ID NO: 2228861 - RNA, 19 nt, Artificial Sequence
  Description of Artificial Sequence: Synthetic oligonucleotide
cugcguuggagcuuccacc

SEQ ID NO: 2228862 - RNA, 19 nt, Artificial Sequence
  Description of Artificial Sequence: Synthetic oligonucleotide
auucugcuaaaacagccuu

SEQ ID NO: 2228863 - RNA, 19 nt, Artificial Sequence
  Description of Artificial Sequence: Synthetic oligonucleotide
uaagcuggcggcguucugc

SEQ ID NO: 2228864 - RNA, 19 nt, Artificial Sequence
  Description of Artificial Sequence: Synthetic oligonucleotide
aaacagccuugucauagua

SEQ ID NO: 2228865 - RNA, 19 nt, Artificial Sequence
  Description of Artificial Sequence: Synthetic oligonucleotide
ggcaucggaacguggaggg

SEQ ID NO: 2228866 - RNA, 19 nt, Artificial Sequence
  Description of Artificial Sequence: Synthetic oligonucleotide
agcugagaggucugcaucu

SEQ ID NO: 2228867 - RNA, 19 nt, Artificial Sequence
  Description of Artificial Sequence: Synthetic oligonucleotide
gaugagcuucugcugcacc

SEQ ID NO: 2228868 - RNA, 19 nt, Artificial Sequence
  Description of Artificial Sequence: Synthetic oligonucleotide
ugcuuguguuuacaaagua

SEQ ID NO: 2228869 - RNA, 19 nt, Artificial Sequence
  Description of Artificial Sequence: Synthetic oligonucleotide
caacuugaggaaguuuugc

SEQ ID NO: 2228870 - RNA, 19 nt, Artificial Sequence
  Description of Artificial Sequence: Synthetic oligonucleotide
uuuuaagggcugguugggc

SEQ ID NO: 2228871 - RNA, 19 nt, Artificial Sequence
  Description of Artificial Sequence: Synthetic oligonucleotide
agcugugcugggcuuggac

SEQ ID NO: 2228872 - RNA, 19 nt, Artificial Sequence
  Description of Artificial Sequence: Synthetic oligonucleotide
ugggagaugggugugguua

SEQ ID NO: 2228873 - RNA, 19 nt, Artificial Sequence
  Description of Artificial Sequence: Synthetic oligonucleotide
gagaggucugcaucugcgc

SEQ ID NO: 2228874 - RNA, 19 nt, Artificial Sequence
  Description of Artificial Sequence: Synthetic oligonucleotide
uacaaaugcuuguguuuac

SEQ ID NO: 2228875 - RNA, 19 nt, Artificial Sequence
  Description of Artificial Sequence: Synthetic oligonucleotide
ggguauguaagcuggcggc

SEQ ID NO: 2228876 - RNA, 19 nt, Artificial Sequence
  Description of Artificial Sequence: Synthetic oligonucleotide
uggcggugggguauguaag

SEQ ID NO: 2228877 - RNA, 19 nt, Artificial Sequence
  Description of Artificial Sequence: Synthetic oligonucleotide
gggguauguaagcuggcgg

SEQ ID NO: 2228878 - RNA, 19 nt, Artificial Sequence
  Description of Artificial Sequence: Synthetic oligonucleotide
aguaccaaccaguuuccuu

SEQ ID NO: 2228879 - RNA, 19 nt, Artificial Sequence
  Description of Artificial Sequence: Synthetic oligonucleotide
acucgcaucuguaacuuug

SEQ ID NO: 2228880 - RNA, 19 nt, Artificial Sequence
  Description of Artificial Sequence: Synthetic oligonucleotide
aaauccuauucaaguacaa

SEQ ID NO: 2228881 - RNA, 19 nt, Artificial Sequence
  Description of Artificial Sequence: Synthetic oligonucleotide
cuguaacuuuggcugcugg

SEQ ID NO: 2228882 - RNA, 19 nt, Artificial Sequence
  Description of Artificial Sequence: Synthetic oligonucleotide
ucgcaucuguaacuuuggc

SEQ ID NO: 2228883 - RNA, 19 nt, Artificial Sequence
  Description of Artificial Sequence: Synthetic oligonucleotide
cuauucaaguacaaaugcu

SEQ ID NO: 2228884 - RNA, 19 nt, Artificial Sequence
  Description of Artificial Sequence: Synthetic oligonucleotide
caguuuccuuccuacuggc

SEQ ID NO: 2228885 - RNA, 19 nt, Artificial Sequence
  Description of Artificial Sequence: Synthetic oligonucleotide
ugggugugguuagaaacug

SEQ ID NO: 2228886 - RNA, 19 nt, Artificial Sequence
  Description of Artificial Sequence: Synthetic oligonucleotide
guugcagucacgguuggga

SEQ ID NO: 2228887 - RNA, 19 nt, Artificial Sequence
  Description of Artificial Sequence: Synthetic oligonucleotide
acaaaugcuuguguuuaca

SEQ ID NO: 2228888 - RNA, 19 nt, Artificial Sequence
  Description of Artificial Sequence: Synthetic oligonucleotide
uugcgucugcaccugcuga

SEQ ID NO: 2228889 - RNA, 19 nt, Artificial Sequence
  Description of Artificial Sequence: Synthetic oligonucleotide
aagcuggcggcguucugca

SEQ ID NO: 2228890 - RNA, 19 nt, Artificial Sequence
  Description of Artificial Sequence: Synthetic oligonucleotide
ugggacacuggcugugggc

SEQ ID NO: 2228891 - RNA, 19 nt, Artificial Sequence
  Description of Artificial Sequence: Synthetic oligonucleotide
ucacgguugggaucaucug

SEQ ID NO: 2228892 - RNA, 19 nt, Artificial Sequence
  Description of Artificial Sequence: Synthetic oligonucleotide
acaacuugaggaaguuuug

SEQ ID NO: 2228893 - RNA, 19 nt, Artificial Sequence
  Description of Artificial Sequence: Synthetic oligonucleotide
gguauguaagcuggcggcg

SEQ ID NO: 2228894 - RNA, 19 nt, Artificial Sequence
  Description of Artificial Sequence: Synthetic oligonucleotide
gaucaucugcaccuguugu

SEQ ID NO: 2228895 - RNA, 19 nt, Artificial Sequence
  Description of Artificial Sequence: Synthetic oligonucleotide
ugagcgggcuguugaggag

SEQ ID NO: 2228896 - RNA, 19 nt, Artificial Sequence
  Description of Artificial Sequence: Synthetic oligonucleotide
cacuuuuauuagccuuugc

SEQ ID NO: 2228897 - RNA, 19 nt, Artificial Sequence
  Description of Artificial Sequence: Synthetic oligonucleotide
aggucacuuuuauuagccu

SEQ ID NO: 2228898 - RNA, 19 nt, Artificial Sequence
  Description of Artificial Sequence: Synthetic oligonucleotide
ugugagugucacugucugu

SEQ ID NO: 2228899 - RNA, 19 nt, Artificial Sequence
  Description of Artificial Sequence: Synthetic oligonucleotide
ccuugucauaguaccaacc

SEQ ID NO: 2228900 - RNA, 19 nt, Artificial Sequence
  Description of Artificial Sequence: Synthetic oligonucleotide
cucgcggggagcuguggcg

SEQ ID NO: 2228901 - RNA, 19 nt, Artificial Sequence
  Description of Artificial Sequence: Synthetic oligonucleotide
gcuguugccugugugagug

SEQ ID NO: 2228902 - RNA, 19 nt, Artificial Sequence
  Description of Artificial Sequence: Synthetic oligonucleotide
gauuugcgucugcaccugc

SEQ ID NO: 2228903 - RNA, 19 nt, Artificial Sequence
  Description of Artificial Sequence: Synthetic oligonucleotide
cacaacuugaggaaguuuu

SEQ ID NO: 2228904 - RNA, 19 nt, Artificial Sequence
  Description of Artificial Sequence: Synthetic oligonucleotide
uauguaagcuggcggcguu

SEQ ID NO: 2228905 - RNA, 19 nt, Artificial Sequence
  Description of Artificial Sequence: Synthetic oligonucleotide
agaugggugugguuagaaa

SEQ ID NO: 2228906 - RNA, 19 nt, Artificial Sequence
  Description of Artificial Sequence: Synthetic oligonucleotide
ugagucccagccaguuucu

SEQ ID NO: 2228907 - RNA, 19 nt, Artificial Sequence
  Description of Artificial Sequence: Synthetic oligonucleotide
gcugugggcagccucgcgg

SEQ ID NO: 2228908 - RNA, 19 nt, Artificial Sequence
  Description of Artificial Sequence: Synthetic oligonucleotide
gugaaaacuguaaggugga

SEQ ID NO: 2228909 - RNA, 19 nt, Artificial Sequence
  Description of Artificial Sequence: Synthetic oligonucleotide
gacaucgguguccuuuuaa

SEQ ID NO: 2228910 - RNA, 19 nt, Artificial Sequence
  Description of Artificial Sequence: Synthetic oligonucleotide
ggcacggaggcuugguggg

SEQ ID NO: 2228911 - RNA, 19 nt, Artificial Sequence
  Description of Artificial Sequence: Synthetic oligonucleotide
gcugugcugggcuuggacc

SEQ ID NO: 2228912 - RNA, 19 nt, Artificial Sequence
  Description of Artificial Sequence: Synthetic oligonucleotide
ugcaccuguuguccugcug

SEQ ID NO: 2228913 - RNA, 19 nt, Artificial Sequence
  Description of Artificial Sequence: Synthetic oligonucleotide
cuggcaucggaacguggag

SEQ ID NO: 2228914 - RNA, 19 nt, Artificial Sequence
  Description of Artificial Sequence: Synthetic oligonucleotide
gaaguuuugcaaccuggau

SEQ ID NO: 2228915 - RNA, 19 nt, Artificial Sequence
  Description of Artificial Sequence: Synthetic oligonucleotide
gguugggaucaucugcacc

SEQ ID NO: 2228916 - RNA, 19 nt, Artificial Sequence
  Description of Artificial Sequence: Synthetic oligonucleotide
uguuguccugcugcuguug

SEQ ID NO: 2228917 - RNA, 19 nt, Artificial Sequence
  Description of Artificial Sequence: Synthetic oligonucleotide
uugcaaccuggauuugcgu

SEQ ID NO: 2228918 - RNA, 19 nt, Artificial Sequence
  Description of Artificial Sequence: Synthetic oligonucleotide
uugcagucacgguugggau

SEQ ID NO: 2228919 - RNA, 19 nt, Artificial Sequence
  Description of Artificial Sequence: Synthetic oligonucleotide
uggugggugucuucagccu

SEQ ID NO: 2228920 - RNA, 19 nt, Artificial Sequence
  Description of Artificial Sequence: Synthetic oligonucleotide
uucccuggcaucggaacgu

SEQ ID NO: 2228921 - RNA, 19 nt, Artificial Sequence
  Description of Artificial Sequence: Synthetic oligonucleotide
ugcaaccuguuggaugcug

SEQ ID NO: 2228922 - RNA, 19 nt, Artificial Sequence
  Description of Artificial Sequence: Synthetic oligonucleotide
ugaaaacuguaagguggaa

SEQ ID NO: 2228923 - RNA, 19 nt, Artificial Sequence
  Description of Artificial Sequence: Synthetic oligonucleotide
ucugcgccuucccuggcau

SEQ ID NO: 2228924 - RNA, 19 nt, Artificial Sequence
  Description of Artificial Sequence: Synthetic oligonucleotide
cauucugcuaaaacagccu

SEQ ID NO: 2228925 - RNA, 19 nt, Artificial Sequence
  Description of Artificial Sequence: Synthetic oligonucleotide
cuggcggcguucugcacag

SEQ ID NO: 2228926 - RNA, 19 nt, Artificial Sequence
  Description of Artificial Sequence: Synthetic oligonucleotide
gcuguugcagucacgguug

SEQ ID NO: 2228927 - RNA, 19 nt, Artificial Sequence
  Description of Artificial Sequence: Synthetic oligonucleotide
ugcaccugcugagucccag

SEQ ID NO: 2228928 - RNA, 19 nt, Artificial Sequence
  Description of Artificial Sequence: Synthetic oligonucleotide
ucgcggggagcuguggcgg

SEQ ID NO: 2228929 - RNA, 19 nt, Artificial Sequence
  Description of Artificial Sequence: Synthetic oligonucleotide
agccuugucauaguaccaa

SEQ ID NO: 2228930 - RNA, 19 nt, Artificial Sequence
  Description of Artificial Sequence: Synthetic oligonucleotide
ggacugucagagcuggcug

SEQ ID NO: 2228931 - RNA, 19 nt, Artificial Sequence
  Description of Artificial Sequence: Synthetic oligonucleotide
auguaagcuggcggcguuc

SEQ ID NO: 2228932 - RNA, 19 nt, Artificial Sequence
  Description of Artificial Sequence: Synthetic oligonucleotide
caucgguguccuuuuaaaa

SEQ ID NO: 2228933 - RNA, 19 nt, Artificial Sequence
  Description of Artificial Sequence: Synthetic oligonucleotide
gcuguugaggaggagcagc

SEQ ID NO: 2228934 - RNA, 19 nt, Artificial Sequence
  Description of Artificial Sequence: Synthetic oligonucleotide
aucugugacugcugugaaa

SEQ ID NO: 2228935 - RNA, 19 nt, Artificial Sequence
  Description of Artificial Sequence: Synthetic oligonucleotide
uugggaucaucugcaccug

SEQ ID NO: 2228936 - RNA, 19 nt, Artificial Sequence
  Description of Artificial Sequence: Synthetic oligonucleotide
gggagaugggugugguuag

SEQ ID NO: 2228937 - RNA, 19 nt, Artificial Sequence
  Description of Artificial Sequence: Synthetic oligonucleotide
guggcggugggguauguaa

SEQ ID NO: 2228938 - RNA, 19 nt, Artificial Sequence
  Description of Artificial Sequence: Synthetic oligonucleotide
aggacaucgguguccuuuu

SEQ ID NO: 2228939 - RNA, 19 nt, Artificial Sequence
  Description of Artificial Sequence: Synthetic oligonucleotide
cugugguuaccaccugcug

SEQ ID NO: 2228940 - RNA, 19 nt, Artificial Sequence
  Description of Artificial Sequence: Synthetic oligonucleotide
acugggauuuggagcugcg

SEQ ID NO: 2228941 - RNA, 19 nt, Artificial Sequence
  Description of Artificial Sequence: Synthetic oligonucleotide
uggguuuuaagggcugguu

SEQ ID NO: 2228942 - RNA, 19 nt, Artificial Sequence
  Description of Artificial Sequence: Synthetic oligonucleotide
gcaaccuguuggaugcugg

SEQ ID NO: 2228943 - RNA, 19 nt, Artificial Sequence
  Description of Artificial Sequence: Synthetic oligonucleotide
ggcggugggguauguaagc

SEQ ID NO: 2228944 - RNA, 19 nt, Artificial Sequence
  Description of Artificial Sequence: Synthetic oligonucleotide
gcugcacaacuugaggaag

SEQ ID NO: 2228945 - RNA, 19 nt, Artificial Sequence
  Description of Artificial Sequence: Synthetic oligonucleotide
gaacguggagggcugggcu

SEQ ID NO: 2228946 - RNA, 19 nt, Artificial Sequence
  Description of Artificial Sequence: Synthetic oligonucleotide
gcuugguaggacaucggug

SEQ ID NO: 2228947 - RNA, 19 nt, Artificial Sequence
  Description of Artificial Sequence: Synthetic oligonucleotide
uggcuuggacugucagagc

SEQ ID NO: 2228948 - RNA, 19 nt, Artificial Sequence
  Description of Artificial Sequence: Synthetic oligonucleotide
acaguacaacauucugcua

SEQ ID NO: 2228949 - RNA, 19 nt, Artificial Sequence
  Description of Artificial Sequence: Synthetic oligonucleotide
agcaggcacucgcaucugu

SEQ ID NO: 2228950 - RNA, 19 nt, Artificial Sequence
  Description of Artificial Sequence: Synthetic oligonucleotide
cacugggauuuggagcugc

SEQ ID NO: 2228951 - RNA, 19 nt, Artificial Sequence
  Description of Artificial Sequence: Synthetic oligonucleotide
ggcugugguuaccaccugc

SEQ ID NO: 2228952 - RNA, 19 nt, Artificial Sequence
  Description of Artificial Sequence: Synthetic oligonucleotide
auuugcgucugcaccugcu

SEQ ID NO: 2228953 - RNA, 19 nt, Artificial Sequence
  Description of Artificial Sequence: Synthetic oligonucleotide
ggcuuggacugucagagcu

SEQ ID NO: 2228954 - RNA, 19 nt, Artificial Sequence
  Description of Artificial Sequence: Synthetic oligonucleotide
cgguguccuuuuaaaaucc

SEQ ID NO: 2228955 - RNA, 19 nt, Artificial Sequence
  Description of Artificial Sequence: Synthetic oligonucleotide
gucacgguugggaucaucu

SEQ ID NO: 2228956 - RNA, 19 nt, Artificial Sequence
  Description of Artificial Sequence: Synthetic oligonucleotide
accuggauuugcgucugca

SEQ ID NO: 2228957 - RNA, 19 nt, Artificial Sequence
  Description of Artificial Sequence: Synthetic oligonucleotide
gcugcguuggagcuuccac

SEQ ID NO: 2228958 - RNA, 19 nt, Artificial Sequence
  Description of Artificial Sequence: Synthetic oligonucleotide
uaguaccaaccaguuuccu

SEQ ID NO: 2228959 - RNA, 19 nt, Artificial Sequence
  Description of Artificial Sequence: Synthetic oligonucleotide
ucggaacguggagggcugg

SEQ ID NO: 2228960 - RNA, 19 nt, Artificial Sequence
  Description of Artificial Sequence: Synthetic oligonucleotide
gcuuggaccaccagggguc

SEQ ID NO: 2228961 - RNA, 19 nt, Artificial Sequence
  Description of Artificial Sequence: Synthetic oligonucleotide
cuaaaacagccuugucaua

SEQ ID NO: 2228962 - RNA, 19 nt, Artificial Sequence
  Description of Artificial Sequence: Synthetic oligonucleotide
cugcuaaaacagccuuguc

SEQ ID NO: 2228963 - RNA, 19 nt, Artificial Sequence
  Description of Artificial Sequence: Synthetic oligonucleotide
gccuuugcuugguaggaca

SEQ ID NO: 2228964 - RNA, 19 nt, Artificial Sequence
  Description of Artificial Sequence: Synthetic oligonucleotide
ccuguuucuuacaauuaaa

SEQ ID NO: 2228965 - RNA, 19 nt, Artificial Sequence
  Description of Artificial Sequence: Synthetic oligonucleotide
aucggaacguggagggcug

SEQ ID NO: 2228966 - RNA, 19 nt, Artificial Sequence
  Description of Artificial Sequence: Synthetic oligonucleotide
agcuggcggcguucugcac

SEQ ID NO: 2228967 - RNA, 19 nt, Artificial Sequence
  Description of Artificial Sequence: Synthetic oligonucleotide
cagccuugucauaguacca

SEQ ID NO: 2228968 - RNA, 19 nt, Artificial Sequence
  Description of Artificial Sequence: Synthetic oligonucleotide
uacuggcacggaggcuugg

SEQ ID NO: 2228969 - RNA, 19 nt, Artificial Sequence
  Description of Artificial Sequence: Synthetic oligonucleotide
ggcguucugcacaggaggc

SEQ ID NO: 2228970 - RNA, 19 nt, Artificial Sequence
  Description of Artificial Sequence: Synthetic oligonucleotide
guuuugcaaccuggauuug

SEQ ID NO: 2228971 - RNA, 19 nt, Artificial Sequence
  Description of Artificial Sequence: Synthetic oligonucleotide
gcaaccuggauuugcgucu

SEQ ID NO: 2228972 - RNA, 19 nt, Artificial Sequence
  Description of Artificial Sequence: Synthetic oligonucleotide
cggcguucugcacaggagg

SEQ ID NO: 2228973 - RNA, 19 nt, Artificial Sequence
  Description of Artificial Sequence: Synthetic oligonucleotide
caggcacucgcaucuguaa

SEQ ID NO: 2228974 - RNA, 19 nt, Artificial Sequence
  Description of Artificial Sequence: Synthetic oligonucleotide
acggaggcuuggugggugu

SEQ ID NO: 2228975 - RNA, 19 nt, Artificial Sequence
  Description of Artificial Sequence: Synthetic oligonucleotide
ggucugggaggaaagcuga

SEQ ID NO: 2228976 - RNA, 19 nt, Artificial Sequence
  Description of Artificial Sequence: Synthetic oligonucleotide
ucacugggauuuggagcug

SEQ ID NO: 2228977 - RNA, 19 nt, Artificial Sequence
  Description of Artificial Sequence: Synthetic oligonucleotide
ggagcugcguuggagcuuc

SEQ ID NO: 2228978 - RNA, 19 nt, Artificial Sequence
  Description of Artificial Sequence: Synthetic oligonucleotide
guguccuuuuaaaauccua

SEQ ID NO: 2228979 - RNA, 19 nt, Artificial Sequence
  Description of Artificial Sequence: Synthetic oligonucleotide
ugguuaccaccugcugcug

SEQ ID NO: 2228980 - RNA, 19 nt, Artificial Sequence
  Description of Artificial Sequence: Synthetic oligonucleotide
ucccuggcaucggaacgug

SEQ ID NO: 2228981 - RNA, 19 nt, Artificial Sequence
  Description of Artificial Sequence: Synthetic oligonucleotide
gcugagcgggcuguugagg

SEQ ID NO: 2228982 - RNA, 19 nt, Artificial Sequence
  Description of Artificial Sequence: Synthetic oligonucleotide
ggaagcugugcugggcuug

SEQ ID NO: 2228983 - RNA, 19 nt, Artificial Sequence
  Description of Artificial Sequence: Synthetic oligonucleotide
ggcugagcgggcuguugag

SEQ ID NO: 2228984 - RNA, 19 nt, Artificial Sequence
  Description of Artificial Sequence: Synthetic oligonucleotide
caccugggcuguugcaguc

SEQ ID NO: 2228985 - RNA, 19 nt, Artificial Sequence
  Description of Artificial Sequence: Synthetic oligonucleotide
gcuggcggcguucugcaca

SEQ ID NO: 2228986 - RNA, 19 nt, Artificial Sequence
  Description of Artificial Sequence: Synthetic oligonucleotide
acuggcacggaggcuuggu

SEQ ID NO: 2228987 - RNA, 19 nt, Artificial Sequence
  Description of Artificial Sequence: Synthetic oligonucleotide
cagagcuggcuggaagcug

SEQ ID NO: 2228988 - RNA, 19 nt, Artificial Sequence
  Description of Artificial Sequence: Synthetic oligonucleotide
ccuggcaucggaacgugga

SEQ ID NO: 2228989 - RNA, 19 nt, Artificial Sequence
  Description of Artificial Sequence: Synthetic oligonucleotide
cugcacaacuugaggaagu

SEQ ID NO: 2228990 - RNA, 19 nt, Artificial Sequence
  Description of Artificial Sequence: Synthetic oligonucleotide
ugggcugagcgggcuguug

SEQ ID NO: 2228991 - RNA, 19 nt, Artificial Sequence
  Description of Artificial Sequence: Synthetic oligonucleotide
cacggaggcuuggugggug

SEQ ID NO: 2228992 - RNA, 19 nt, Artificial Sequence
  Description of Artificial Sequence: Synthetic oligonucleotide
caauuucaguccuguuucu

SEQ ID NO: 2228993 - RNA, 19 nt, Artificial Sequence
  Description of Artificial Sequence: Synthetic oligonucleotide
ccaggggucugcagugagg

SEQ ID NO: 2228994 - RNA, 19 nt, Artificial Sequence
  Description of Artificial Sequence: Synthetic oligonucleotide
ggauuugcgucugcaccug

SEQ ID NO: 2228995 - RNA, 19 nt, Artificial Sequence
  Description of Artificial Sequence: Synthetic oligonucleotide
aggggucugcagugaggca

SEQ ID NO: 2228996 - RNA, 19 nt, Artificial Sequence
  Description of Artificial Sequence: Synthetic oligonucleotide
ggcacucgcaucuguaacu

SEQ ID NO: 2228997 - RNA, 19 nt, Artificial Sequence
  Description of Artificial Sequence: Synthetic oligonucleotide
acguggagggcugggcuga

SEQ ID NO: 2228998 - RNA, 19 nt, Artificial Sequence
  Description of Artificial Sequence: Synthetic oligonucleotide
caucggaacguggagggcu

SEQ ID NO: 2228999 - RNA, 19 nt, Artificial Sequence
  Description of Artificial Sequence: Synthetic oligonucleotide
agccaguuucugggcuugg

SEQ ID NO: 2229000 - RNA, 19 nt, Artificial Sequence
  Description of Artificial Sequence: Synthetic oligonucleotide
cguucugcacaggaggccc

SEQ ID NO: 2229001 - RNA, 19 nt, Artificial Sequence
  Description of Artificial Sequence: Synthetic oligonucleotide
guauguaagcuggcggcgu

SEQ ID NO: 2229002 - RNA, 19 nt, Artificial Sequence
  Description of Artificial Sequence: Synthetic oligonucleotide
cugguugggccugggucug

SEQ ID NO: 2229003 - RNA, 19 nt, Artificial Sequence
  Description of Artificial Sequence: Synthetic oligonucleotide
gccaguuucugggcuuggg

SEQ ID NO: 2229004 - RNA, 19 nt, Artificial Sequence
  Description of Artificial Sequence: Synthetic oligonucleotide
ggcggcguucugcacagga

SEQ ID NO: 2229005 - RNA, 19 nt, Artificial Sequence
  Description of Artificial Sequence: Synthetic oligonucleotide
guacaacauucugcuaaaa

SEQ ID NO: 2229006 - RNA, 19 nt, Artificial Sequence
  Description of Artificial Sequence: Synthetic oligonucleotide
caucugcgccuucccuggc

SEQ ID NO: 2229007 - RNA, 19 nt, Artificial Sequence
  Description of Artificial Sequence: Synthetic oligonucleotide
ggcuguugcagucacgguu

SEQ ID NO: 2229008 - RNA, 19 nt, Artificial Sequence
  Description of Artificial Sequence: Synthetic oligonucleotide
accugggcuguugcaguca

SEQ ID NO: 2229009 - RNA, 19 nt, Artificial Sequence
  Description of Artificial Sequence: Synthetic oligonucleotide
gugugguuagaaacugggu

SEQ ID NO: 2229010 - RNA, 19 nt, Artificial Sequence
  Description of Artificial Sequence: Synthetic oligonucleotide
gguaggacaucgguguccu

SEQ ID NO: 2229011 - RNA, 19 nt, Artificial Sequence
  Description of Artificial Sequence: Synthetic oligonucleotide
uguggcggugggguaugua

SEQ ID NO: 2229012 - RNA, 19 nt, Artificial Sequence
  Description of Artificial Sequence: Synthetic oligonucleotide
uggagcugcguuggagcuu

SEQ ID NO: 2229013 - RNA, 19 nt, Artificial Sequence
  Description of Artificial Sequence: Synthetic oligonucleotide
agcugcguuggagcuucca

SEQ ID NO: 2229014 - RNA, 19 nt, Artificial Sequence
  Description of Artificial Sequence: Synthetic oligonucleotide
cguuggagcuuccaccauc

SEQ ID NO: 2229015 - RNA, 19 nt, Artificial Sequence
  Description of Artificial Sequence: Synthetic oligonucleotide
cgggcuguugaggaggagc

SEQ ID NO: 2229016 - RNA, 19 nt, Artificial Sequence
  Description of Artificial Sequence: Synthetic oligonucleotide
gcguucugcacaggaggcc

SEQ ID NO: 2229017 - RNA, 19 nt, Artificial Sequence
  Description of Artificial Sequence: Synthetic oligonucleotide
gaugcuggccacagguguu

SEQ ID NO: 2229018 - RNA, 19 nt, Artificial Sequence
  Description of Artificial Sequence: Synthetic oligonucleotide
gcggcguucugcacaggag

SEQ ID NO: 2229019 - RNA, 19 nt, Artificial Sequence
  Description of Artificial Sequence: Synthetic oligonucleotide
cuugggagauggguguggu

SEQ ID NO: 2229020 - RNA, 19 nt, Artificial Sequence
  Description of Artificial Sequence: Synthetic oligonucleotide
ggcugggacacuggcugug

SEQ ID NO: 2229021 - RNA, 19 nt, Artificial Sequence
  Description of Artificial Sequence: Synthetic oligonucleotide
ccucgcggggagcuguggc

SEQ ID NO: 2229022 - RNA, 19 nt, Artificial Sequence
  Description of Artificial Sequence: Synthetic oligonucleotide
ccuguuguccugcugcugu

SEQ ID NO: 2229023 - RNA, 19 nt, Artificial Sequence
  Description of Artificial Sequence: Synthetic oligonucleotide
uccuuccuacuggcacgga

SEQ ID NO: 2229024 - RNA, 19 nt, Artificial Sequence
  Description of Artificial Sequence: Synthetic oligonucleotide
cugcgccuucccuggcauc

SEQ ID NO: 2229025 - RNA, 19 nt, Artificial Sequence
  Description of Artificial Sequence: Synthetic oligonucleotide
caguccuguuucuuacaau

SEQ ID NO: 2229026 - RNA, 19 nt, Artificial Sequence
  Description of Artificial Sequence: Synthetic oligonucleotide
caccuguuguccugcugcu

SEQ ID NO: 2229027 - RNA, 19 nt, Artificial Sequence
  Description of Artificial Sequence: Synthetic oligonucleotide
ggagaugggugugguuaga

SEQ ID NO: 2229028 - RNA, 19 nt, Artificial Sequence
  Description of Artificial Sequence: Synthetic oligonucleotide
gagcuguggcgguggggua

SEQ ID NO: 2229029 - RNA, 19 nt, Artificial Sequence
  Description of Artificial Sequence: Synthetic oligonucleotide
gcaucggaacguggagggc

SEQ ID NO: 2229030 - RNA, 19 nt, Artificial Sequence
  Description of Artificial Sequence: Synthetic oligonucleotide
cugcagugaggcagaggcu

SEQ ID NO: 2229031 - RNA, 19 nt, Artificial Sequence
  Description of Artificial Sequence: Synthetic oligonucleotide
gguuagaaacuggguuuua

SEQ ID NO: 2229032 - RNA, 19 nt, Artificial Sequence
  Description of Artificial Sequence: Synthetic oligonucleotide
uggcggcguucugcacagg

SEQ ID NO: 2229033 - RNA, 19 nt, Artificial Sequence
  Description of Artificial Sequence: Synthetic oligonucleotide
gaggcuuggugggugucuu

SEQ ID NO: 2229034 - RNA, 19 nt, Artificial Sequence
  Description of Artificial Sequence: Synthetic oligonucleotide
cugggauuuggagcugcgu

SEQ ID NO: 2229035 - RNA, 19 nt, Artificial Sequence
  Description of Artificial Sequence: Synthetic oligonucleotide
cuuggaccaccaggggucu

SEQ ID NO: 2229036 - RNA, 19 nt, Artificial Sequence
  Description of Artificial Sequence: Synthetic oligonucleotide
ccuacuggcacggaggcuu

SEQ ID NO: 2229037 - RNA, 19 nt, Artificial Sequence
  Description of Artificial Sequence: Synthetic oligonucleotide
cgucugcaccugcugaguc

SEQ ID NO: 2229038 - RNA, 19 nt, Artificial Sequence
  Description of Artificial Sequence: Synthetic oligonucleotide
gccacagguguuugcugcu

SEQ ID NO: 2229039 - RNA, 19 nt, Artificial Sequence
  Description of Artificial Sequence: Synthetic oligonucleotide
cugaugcaaccuguuggau

SEQ ID NO: 2229040 - RNA, 19 nt, Artificial Sequence
  Description of Artificial Sequence: Synthetic oligonucleotide
gcaggcacucgcaucugua

SEQ ID NO: 2229041 - RNA, 19 nt, Artificial Sequence
  Description of Artificial Sequence: Synthetic oligonucleotide
ggacaucgguguccuuuua

SEQ ID NO: 2229042 - RNA, 19 nt, Artificial Sequence
  Description of Artificial Sequence: Synthetic oligonucleotide
gagcugcguuggagcuucc

SEQ ID NO: 2229043 - RNA, 19 nt, Artificial Sequence
  Description of Artificial Sequence: Synthetic oligonucleotide
cugcaccugcugaguccca

SEQ ID NO: 2229044 - RNA, 19 nt, Artificial Sequence
  Description of Artificial Sequence: Synthetic oligonucleotide
ggaggcuuggugggugucu

SEQ ID NO: 2229045 - RNA, 19 nt, Artificial Sequence
  Description of Artificial Sequence: Synthetic oligonucleotide
ggaccaccaggggucugca

SEQ ID NO: 2229046 - RNA, 19 nt, Artificial Sequence
  Description of Artificial Sequence: Synthetic oligonucleotide
cacucgcaucuguaacuuu

SEQ ID NO: 2229047 - RNA, 19 nt, Artificial Sequence
  Description of Artificial Sequence: Synthetic oligonucleotide
gcacucgcaucuguaacuu

SEQ ID NO: 2229048 - RNA, 19 nt, Artificial Sequence
  Description of Artificial Sequence: Synthetic oligonucleotide
gcggggagcuguggcggug

SEQ ID NO: 2229049 - RNA, 19 nt, Artificial Sequence
  Description of Artificial Sequence: Synthetic oligonucleotide
gcagccucgcggggagcug

SEQ ID NO: 2229050 - RNA, 19 nt, Artificial Sequence
  Description of Artificial Sequence: Synthetic oligonucleotide
ggcagccucgcggggagcu

SEQ ID NO: 2229051 - RNA, 19 nt, Artificial Sequence
  Description of Artificial Sequence: Synthetic oligonucleotide
ggucugcaucugcgccuuc

SEQ ID NO: 2229052 - RNA, 19 nt, Artificial Sequence
  Description of Artificial Sequence: Synthetic oligonucleotide
guaggacaucgguguccuu

SEQ ID NO: 2229053 - RNA, 19 nt, Artificial Sequence
  Description of Artificial Sequence: Synthetic oligonucleotide
gcguuggagcuuccaccau

SEQ ID NO: 2229054 - RNA, 19 nt, Artificial Sequence
  Description of Artificial Sequence: Synthetic oligonucleotide
gcacggaggcuuggugggu

SEQ ID NO: 2229055 - RNA, 19 nt, Artificial Sequence
  Description of Artificial Sequence: Synthetic oligonucleotide
cggaggcuugguggguguc

SEQ ID NO: 2229056 - RNA, 19 nt, Artificial Sequence
  Description of Artificial Sequence: Synthetic oligonucleotide
cuguggcggugggguaugu

SEQ ID NO: 2229057 - RNA, 19 nt, Artificial Sequence
  Description of Artificial Sequence: Synthetic oligonucleotide
cagucacgguugggaucau

SEQ ID NO: 2229058 - RNA, 19 nt, Artificial Sequence
  Description of Artificial Sequence: Synthetic oligonucleotide
ggccugggucugggaggaa

SEQ ID NO: 2229059 - RNA, 19 nt, Artificial Sequence
  Description of Artificial Sequence: Synthetic oligonucleotide
cugcaccaccugggcuguu

SEQ ID NO: 2229060 - RNA, 19 nt, Artificial Sequence
  Description of Artificial Sequence: Synthetic oligonucleotide
aaaaccuacauuuaaggga

SEQ ID NO: 2229061 - RNA, 19 nt, Artificial Sequence
  Description of Artificial Sequence: Synthetic oligonucleotide
uguguaaagaaccagcuug

SEQ ID NO: 2229062 - RNA, 19 nt, Artificial Sequence
  Description of Artificial Sequence: Synthetic oligonucleotide
auuucuuaaaccuggcagc

SEQ ID NO: 2229063 - RNA, 19 nt, Artificial Sequence
  Description of Artificial Sequence: Synthetic oligonucleotide
cugguuaucccauugaugg

SEQ ID NO: 2229064 - RNA, 19 nt, Artificial Sequence
  Description of Artificial Sequence: Synthetic oligonucleotide
cauauaagaaaacuugucc

SEQ ID NO: 2229065 - RNA, 19 nt, Artificial Sequence
  Description of Artificial Sequence: Synthetic oligonucleotide
uaaaaccuacauuuaaggg

SEQ ID NO: 2229066 - RNA, 19 nt, Artificial Sequence
  Description of Artificial Sequence: Synthetic oligonucleotide
ucuaaaaccuacauuuaag

SEQ ID NO: 2229067 - RNA, 19 nt, Artificial Sequence
  Description of Artificial Sequence: Synthetic oligonucleotide
uaaaggaacagccacugcc

SEQ ID NO: 2229068 - RNA, 19 nt, Artificial Sequence
  Description of Artificial Sequence: Synthetic oligonucleotide
ucccauauaagaaaacuug

SEQ ID NO: 2229069 - RNA, 19 nt, Artificial Sequence
  Description of Artificial Sequence: Synthetic oligonucleotide
ucuuaaaccuggcagcagg

SEQ ID NO: 2229070 - RNA, 19 nt, Artificial Sequence
  Description of Artificial Sequence: Synthetic oligonucleotide
uugucugucgcccaggaag

SEQ ID NO: 2229071 - RNA, 19 nt, Artificial Sequence
  Description of Artificial Sequence: Synthetic oligonucleotide
aacugauucucccauauaa

SEQ ID NO: 2229072 - RNA, 19 nt, Artificial Sequence
  Description of Artificial Sequence: Synthetic oligonucleotide
aaaacuuguccuugcucac

SEQ ID NO: 2229073 - RNA, 19 nt, Artificial Sequence
  Description of Artificial Sequence: Synthetic oligonucleotide
uacauuuaagggauggccu

SEQ ID NO: 2229074 - RNA, 19 nt, Artificial Sequence
  Description of Artificial Sequence: Synthetic oligonucleotide
auccacuugauguccauac

SEQ ID NO: 2229075 - RNA, 19 nt, Artificial Sequence
  Description of Artificial Sequence: Synthetic oligonucleotide
aguaaacgccaauuccugc

SEQ ID NO: 2229076 - RNA, 19 nt, Artificial Sequence
  Description of Artificial Sequence: Synthetic oligonucleotide
ucuguagcaaauuucuuaa

SEQ ID NO: 2229077 - RNA, 19 nt, Artificial Sequence
  Description of Artificial Sequence: Synthetic oligonucleotide
ugaguguacagcaacugcu

SEQ ID NO: 2229078 - RNA, 19 nt, Artificial Sequence
  Description of Artificial Sequence: Synthetic oligonucleotide
agaaaacuuguccuugcuc

SEQ ID NO: 2229079 - RNA, 19 nt, Artificial Sequence
  Description of Artificial Sequence: Synthetic oligonucleotide
gauuccugcacacgagugg

SEQ ID NO: 2229080 - RNA, 19 nt, Artificial Sequence
  Description of Artificial Sequence: Synthetic oligonucleotide
guuacugugugggacagcg

SEQ ID NO: 2229081 - RNA, 19 nt, Artificial Sequence
  Description of Artificial Sequence: Synthetic oligonucleotide
aagacgccgguccugcggc

SEQ ID NO: 2229082 - RNA, 19 nt, Artificial Sequence
  Description of Artificial Sequence: Synthetic oligonucleotide
ugcccacaaauccagagug

SEQ ID NO: 2229083 - RNA, 19 nt, Artificial Sequence
  Description of Artificial Sequence: Synthetic oligonucleotide
gacaacaacugauucuccc

SEQ ID NO: 2229084 - RNA, 19 nt, Artificial Sequence
  Description of Artificial Sequence: Synthetic oligonucleotide
uaagcacuucucaucaagc

SEQ ID NO: 2229085 - RNA, 19 nt, Artificial Sequence
  Description of Artificial Sequence: Synthetic oligonucleotide
cuucguugcccacaaaucc

SEQ ID NO: 2229086 - RNA, 19 nt, Artificial Sequence
  Description of Artificial Sequence: Synthetic oligonucleotide
uuugcacucacuccaacuc

SEQ ID NO: 2229087 - RNA, 19 nt, Artificial Sequence
  Description of Artificial Sequence: Synthetic oligonucleotide
agaaccagcuugcugaugu

SEQ ID NO: 2229088 - RNA, 19 nt, Artificial Sequence
  Description of Artificial Sequence: Synthetic oligonucleotide
ugauucucccauauaagaa

SEQ ID NO: 2229089 - RNA, 19 nt, Artificial Sequence
  Description of Artificial Sequence: Synthetic oligonucleotide
aaaccuacauuuaagggau

SEQ ID NO: 2229090 - RNA, 19 nt, Artificial Sequence
  Description of Artificial Sequence: Synthetic oligonucleotide
uauaagaaaacuuguccuu

SEQ ID NO: 2229091 - RNA, 19 nt, Artificial Sequence
  Description of Artificial Sequence: Synthetic oligonucleotide
uaagaaaacuuguccuugc

SEQ ID NO: 2229092 - RNA, 19 nt, Artificial Sequence
  Description of Artificial Sequence: Synthetic oligonucleotide
cuacauuuaagggauggcc

SEQ ID NO: 2229093 - RNA, 19 nt, Artificial Sequence
  Description of Artificial Sequence: Synthetic oligonucleotide
cuccaacucaggaagacgc

SEQ ID NO: 2229094 - RNA, 19 nt, Artificial Sequence
  Description of Artificial Sequence: Synthetic oligonucleotide
aaugccucgccucacgcgu

SEQ ID NO: 2229095 - RNA, 19 nt, Artificial Sequence
  Description of Artificial Sequence: Synthetic oligonucleotide
aaaugccucgccucacgcg

SEQ ID NO: 2229096 - RNA, 19 nt, Artificial Sequence
  Description of Artificial Sequence: Synthetic oligonucleotide
uaucacaggucccagucga

SEQ ID NO: 2229097 - RNA, 19 nt, Artificial Sequence
  Description of Artificial Sequence: Synthetic oligonucleotide
uucuguagcaaauuucuua

SEQ ID NO: 2229098 - RNA, 19 nt, Artificial Sequence
  Description of Artificial Sequence: Synthetic oligonucleotide
ugacaaaggcccaagcuuc

SEQ ID NO: 2229099 - RNA, 19 nt, Artificial Sequence
  Description of Artificial Sequence: Synthetic oligonucleotide
uccguguagacaacaacug

SEQ ID NO: 2229100 - RNA, 19 nt, Artificial Sequence
  Description of Artificial Sequence: Synthetic oligonucleotide
uugaucacgucuuucccug

SEQ ID NO: 2229101 - RNA, 19 nt, Artificial Sequence
  Description of Artificial Sequence: Synthetic oligonucleotide
cucaccgcauagaacaucc

SEQ ID NO: 2229102 - RNA, 19 nt, Artificial Sequence
  Description of Artificial Sequence: Synthetic oligonucleotide
uugauguccauaccccgag

SEQ ID NO: 2229103 - RNA, 19 nt, Artificial Sequence
  Description of Artificial Sequence: Synthetic oligonucleotide
ugugauuccugcacacgag

SEQ ID NO: 2229104 - RNA, 19 nt, Artificial Sequence
  Description of Artificial Sequence: Synthetic oligonucleotide
gauucucccauauaagaaa

SEQ ID NO: 2229105 - RNA, 19 nt, Artificial Sequence
  Description of Artificial Sequence: Synthetic oligonucleotide
gcauagaacaucccgagcc

SEQ ID NO: 2229106 - RNA, 19 nt, Artificial Sequence
  Description of Artificial Sequence: Synthetic oligonucleotide
acacgagugguuuccugcc

SEQ ID NO: 2229107 - RNA, 19 nt, Artificial Sequence
  Description of Artificial Sequence: Synthetic oligonucleotide
gauguccauaccccgagug

SEQ ID NO: 2229108 - RNA, 19 nt, Artificial Sequence
  Description of Artificial Sequence: Synthetic oligonucleotide
ucccuugccagccugucag

SEQ ID NO: 2229109 - RNA, 19 nt, Artificial Sequence
  Description of Artificial Sequence: Synthetic oligonucleotide
auaagaaaacuuguccuug

SEQ ID NO: 2229110 - RNA, 19 nt, Artificial Sequence
  Description of Artificial Sequence: Synthetic oligonucleotide
uggagaguuccugacaaag

SEQ ID NO: 2229111 - RNA, 19 nt, Artificial Sequence
  Description of Artificial Sequence: Synthetic oligonucleotide
ccauugauggugaacaugc

SEQ ID NO: 2229112 - RNA, 19 nt, Artificial Sequence
  Description of Artificial Sequence: Synthetic oligonucleotide
uucguugcccacaaaucca

SEQ ID NO: 2229113 - RNA, 19 nt, Artificial Sequence
  Description of Artificial Sequence: Synthetic oligonucleotide
caaauuucuuaaaccuggc

SEQ ID NO: 2229114 - RNA, 19 nt, Artificial Sequence
  Description of Artificial Sequence: Synthetic oligonucleotide
ucugguuugucugucgccc

SEQ ID NO: 2229115 - RNA, 19 nt, Artificial Sequence
  Description of Artificial Sequence: Synthetic oligonucleotide
ucugcagacugcuucgcgc

SEQ ID NO: 2229116 - RNA, 19 nt, Artificial Sequence
  Description of Artificial Sequence: Synthetic oligonucleotide
cacuugauguccauacccc

SEQ ID NO: 2229117 - RNA, 19 nt, Artificial Sequence
  Description of Artificial Sequence: Synthetic oligonucleotide
ugcacucacuccaacucag

SEQ ID NO: 2229118 - RNA, 19 nt, Artificial Sequence
  Description of Artificial Sequence: Synthetic oligonucleotide
guaaagaaccagcuugcug

SEQ ID NO: 2229119 - RNA, 19 nt, Artificial Sequence
  Description of Artificial Sequence: Synthetic oligonucleotide
agcacuucucaucaagcug

SEQ ID NO: 2229120 - RNA, 19 nt, Artificial Sequence
  Description of Artificial Sequence: Synthetic oligonucleotide
cauaccccgagugagcucg

SEQ ID NO: 2229121 - RNA, 19 nt, Artificial Sequence
  Description of Artificial Sequence: Synthetic oligonucleotide
ugaacaugcugucugugua

SEQ ID NO: 2229122 - RNA, 19 nt, Artificial Sequence
  Description of Artificial Sequence: Synthetic oligonucleotide
ugauuccugcacacgagug

SEQ ID NO: 2229123 - RNA, 19 nt, Artificial Sequence
  Description of Artificial Sequence: Synthetic oligonucleotide
cuccucaccgcauagaaca

SEQ ID NO: 2229124 - RNA, 19 nt, Artificial Sequence
  Description of Artificial Sequence: Synthetic oligonucleotide
ugugcauccacuugauguc

SEQ ID NO: 2229125 - RNA, 19 nt, Artificial Sequence
  Description of Artificial Sequence: Synthetic oligonucleotide
accaggaaugugcauccac

SEQ ID NO: 2229126 - RNA, 19 nt, Artificial Sequence
  Description of Artificial Sequence: Synthetic oligonucleotide
cagccugucagccucuucg

SEQ ID NO: 2229127 - RNA, 19 nt, Artificial Sequence
  Description of Artificial Sequence: Synthetic oligonucleotide
ugucuggugugcuuugacc

SEQ ID NO: 2229128 - RNA, 19 nt, Artificial Sequence
  Description of Artificial Sequence: Synthetic oligonucleotide
cuuguccuugcucacuggg

SEQ ID NO: 2229129 - RNA, 19 nt, Artificial Sequence
  Description of Artificial Sequence: Synthetic oligonucleotide
aacgccaauuccugcucuc

SEQ ID NO: 2229130 - RNA, 19 nt, Artificial Sequence
  Description of Artificial Sequence: Synthetic oligonucleotide
aaugugcauccacuugaug

SEQ ID NO: 2229131 - RNA, 19 nt, Artificial Sequence
  Description of Artificial Sequence: Synthetic oligonucleotide
accuacauuuaagggaugg

SEQ ID NO: 2229132 - RNA, 19 nt, Artificial Sequence
  Description of Artificial Sequence: Synthetic oligonucleotide
uggagcagcagccauccgu

SEQ ID NO: 2229133 - RNA, 19 nt, Artificial Sequence
  Description of Artificial Sequence: Synthetic oligonucleotide
gcccuuuugaaccaucugg

SEQ ID NO: 2229134 - RNA, 19 nt, Artificial Sequence
  Description of Artificial Sequence: Synthetic oligonucleotide
gacggacagaguuacugug

SEQ ID NO: 2229135 - RNA, 19 nt, Artificial Sequence
  Description of Artificial Sequence: Synthetic oligonucleotide
agaguuacugugugggaca

SEQ ID NO: 2229136 - RNA, 19 nt, Artificial Sequence
  Description of Artificial Sequence: Synthetic oligonucleotide
auuuaagggauggccuggc

SEQ ID NO: 2229137 - RNA, 19 nt, Artificial Sequence
  Description of Artificial Sequence: Synthetic oligonucleotide
ucguugcccacaaauccag

SEQ ID NO: 2229138 - RNA, 19 nt, Artificial Sequence
  Description of Artificial Sequence: Synthetic oligonucleotide
uugcucagucugcagacug

SEQ ID NO: 2229139 - RNA, 19 nt, Artificial Sequence
  Description of Artificial Sequence: Synthetic oligonucleotide
cugauucucccauauaaga

SEQ ID NO: 2229140 - RNA, 19 nt, Artificial Sequence
  Description of Artificial Sequence: Synthetic oligonucleotide
cuuugcucagucugcagac

SEQ ID NO: 2229141 - RNA, 19 nt, Artificial Sequence
  Description of Artificial Sequence: Synthetic oligonucleotide
gaagacgccgguccugcgg

SEQ ID NO: 2229142 - RNA, 19 nt, Artificial Sequence
  Description of Artificial Sequence: Synthetic oligonucleotide
cacacgagugguuuccugc

SEQ ID NO: 2229143 - RNA, 19 nt, Artificial Sequence
  Description of Artificial Sequence: Synthetic oligonucleotide
cugaguguacagcaacugc

SEQ ID NO: 2229144 - RNA, 19 nt, Artificial Sequence
  Description of Artificial Sequence: Synthetic oligonucleotide
acaacugauucucccauau

SEQ ID NO: 2229145 - RNA, 19 nt, Artificial Sequence
  Description of Artificial Sequence: Synthetic oligonucleotide
aucacgucuuucccuguac

SEQ ID NO: 2229146 - RNA, 19 nt, Artificial Sequence
  Description of Artificial Sequence: Synthetic oligonucleotide
caccgcauagaacaucccg

SEQ ID NO: 2229147 - RNA, 19 nt, Artificial Sequence
  Description of Artificial Sequence: Synthetic oligonucleotide
acgucuuucccuguacucg

SEQ ID NO: 2229148 - RNA, 19 nt, Artificial Sequence
  Description of Artificial Sequence: Synthetic oligonucleotide
agcucguccagcuccauga

SEQ ID NO: 2229149 - RNA, 19 nt, Artificial Sequence
  Description of Artificial Sequence: Synthetic oligonucleotide
aaauccagagugaccagga

SEQ ID NO: 2229150 - RNA, 19 nt, Artificial Sequence
  Description of Artificial Sequence: Synthetic oligonucleotide
agcaaauuucuuaaaccug

SEQ ID NO: 2229151 - RNA, 19 nt, Artificial Sequence
  Description of Artificial Sequence: Synthetic oligonucleotide
ucaagcuguaucacagguc

SEQ ID NO: 2229152 - RNA, 19 nt, Artificial Sequence
  Description of Artificial Sequence: Synthetic oligonucleotide
caacucaggaagacgccgg

SEQ ID NO: 2229153 - RNA, 19 nt, Artificial Sequence
  Description of Artificial Sequence: Synthetic oligonucleotide
guaucacaggucccagucg

SEQ ID NO: 2229154 - RNA, 19 nt, Artificial Sequence
  Description of Artificial Sequence: Synthetic oligonucleotide
uccacuugauguccauacc

SEQ ID NO: 2229155 - RNA, 19 nt, Artificial Sequence
  Description of Artificial Sequence: Synthetic oligonucleotide
aaaccuggcagcaggaaau

SEQ ID NO: 2229156 - RNA, 19 nt, Artificial Sequence
  Description of Artificial Sequence: Synthetic oligonucleotide
caguaaacgccaauuccug

SEQ ID NO: 2229157 - RNA, 19 nt, Artificial Sequence
  Description of Artificial Sequence: Synthetic oligonucleotide
aaagaaccagcuugcugau

SEQ ID NO: 2229158 - RNA, 19 nt, Artificial Sequence
  Description of Artificial Sequence: Synthetic oligonucleotide
guuuccugcccuuuugaac

SEQ ID NO: 2229159 - RNA, 19 nt, Artificial Sequence
  Description of Artificial Sequence: Synthetic oligonucleotide
aaacgccaauuccugcucu

SEQ ID NO: 2229160 - RNA, 19 nt, Artificial Sequence
  Description of Artificial Sequence: Synthetic oligonucleotide
ugcugucuguguaaagaac

SEQ ID NO: 2229161 - RNA, 19 nt, Artificial Sequence
  Description of Artificial Sequence: Synthetic oligonucleotide
auccguguagacaacaacu

SEQ ID NO: 2229162 - RNA, 19 nt, Artificial Sequence
  Description of Artificial Sequence: Synthetic oligonucleotide
gauguucugagccuuggcu

SEQ ID NO: 2229163 - RNA, 19 nt, Artificial Sequence
  Description of Artificial Sequence: Synthetic oligonucleotide
caucaagcuguaucacagg

SEQ ID NO: 2229164 - RNA, 19 nt, Artificial Sequence
  Description of Artificial Sequence: Synthetic oligonucleotide
ugucugucgcccaggaagu

SEQ ID NO: 2229165 - RNA, 19 nt, Artificial Sequence
  Description of Artificial Sequence: Synthetic oligonucleotide
acgcguacgacggacagag

SEQ ID NO: 2229166 - RNA, 19 nt, Artificial Sequence
  Description of Artificial Sequence: Synthetic oligonucleotide
guguacagcaacugcuuug

SEQ ID NO: 2229167 - RNA, 19 nt, Artificial Sequence
  Description of Artificial Sequence: Synthetic oligonucleotide
cauuuaagggauggccugg

SEQ ID NO: 2229168 - RNA, 19 nt, Artificial Sequence
  Description of Artificial Sequence: Synthetic oligonucleotide
ucacgcguacgacggacag

SEQ ID NO: 2229169 - RNA, 19 nt, Artificial Sequence
  Description of Artificial Sequence: Synthetic oligonucleotide
guguaaagaaccagcuugc

SEQ ID NO: 2229170 - RNA, 19 nt, Artificial Sequence
  Description of Artificial Sequence: Synthetic oligonucleotide
uccuuguugaucacgucuu

SEQ ID NO: 2229171 - RNA, 19 nt, Artificial Sequence
  Description of Artificial Sequence: Synthetic oligonucleotide
agcaggaaaucgguccacc

SEQ ID NO: 2229172 - RNA, 19 nt, Artificial Sequence
  Description of Artificial Sequence: Synthetic oligonucleotide
ucgccucacgcguacgacg

SEQ ID NO: 2229173 - RNA, 19 nt, Artificial Sequence
  Description of Artificial Sequence: Synthetic oligonucleotide
uuacugugugggacagcgg

SEQ ID NO: 2229174 - RNA, 19 nt, Artificial Sequence
  Description of Artificial Sequence: Synthetic oligonucleotide
aacucaggaagacgccggu

SEQ ID NO: 2229175 - RNA, 19 nt, Artificial Sequence
  Description of Artificial Sequence: Synthetic oligonucleotide
cuugggucugaguguacag

SEQ ID NO: 2229176 - RNA, 19 nt, Artificial Sequence
  Description of Artificial Sequence: Synthetic oligonucleotide
aaucgguccaccuguucuu

SEQ ID NO: 2229177 - RNA, 19 nt, Artificial Sequence
  Description of Artificial Sequence: Synthetic oligonucleotide
gcugucuguguaaagaacc

SEQ ID NO: 2229178 - RNA, 19 nt, Artificial Sequence
  Description of Artificial Sequence: Synthetic oligonucleotide
gaacccagcugguuauccc

SEQ ID NO: 2229179 - RNA, 19 nt, Artificial Sequence
  Description of Artificial Sequence: Synthetic oligonucleotide
guagacaacaacugauucu

SEQ ID NO: 2229180 - RNA, 19 nt, Artificial Sequence
  Description of Artificial Sequence: Synthetic oligonucleotide
acgacggacagaguuacug

SEQ ID NO: 2229181 - RNA, 19 nt, Artificial Sequence
  Description of Artificial Sequence: Synthetic oligonucleotide
ugguuugucugucgcccag

SEQ ID NO: 2229182 - RNA, 19 nt, Artificial Sequence
  Description of Artificial Sequence: Synthetic oligonucleotide
ucacgucuuucccuguacu

SEQ ID NO: 2229183 - RNA, 19 nt, Artificial Sequence
  Description of Artificial Sequence: Synthetic oligonucleotide
aagcuguaucacagguccc

SEQ ID NO: 2229184 - RNA, 19 nt, Artificial Sequence
  Description of Artificial Sequence: Synthetic oligonucleotide
cugcagacugcuucgcgcc

SEQ ID NO: 2229185 - RNA, 19 nt, Artificial Sequence
  Description of Artificial Sequence: Synthetic oligonucleotide
caauuccugcucucgcccg

SEQ ID NO: 2229186 - RNA, 19 nt, Artificial Sequence
  Description of Artificial Sequence: Synthetic oligonucleotide
auguucugagccuuggcuu

SEQ ID NO: 2229187 - RNA, 19 nt, Artificial Sequence
  Description of Artificial Sequence: Synthetic oligonucleotide
uccugacaaaggcccaagc

SEQ ID NO: 2229188 - RNA, 19 nt, Artificial Sequence
  Description of Artificial Sequence: Synthetic oligonucleotide
uguaaagaaccagcuugcu

SEQ ID NO: 2229189 - RNA, 19 nt, Artificial Sequence
  Description of Artificial Sequence: Synthetic oligonucleotide
uugggucugaguguacagc

SEQ ID NO: 2229190 - RNA, 19 nt, Artificial Sequence
  Description of Artificial Sequence: Synthetic oligonucleotide
ugaacccagcugguuaucc

SEQ ID NO: 2229191 - RNA, 19 nt, Artificial Sequence
  Description of Artificial Sequence: Synthetic oligonucleotide
aaacuuguccuugcucacu

SEQ ID NO: 2229192 - RNA, 19 nt, Artificial Sequence
  Description of Artificial Sequence: Synthetic oligonucleotide
acugcuucgcgccuucccu

SEQ ID NO: 2229193 - RNA, 19 nt, Artificial Sequence
  Description of Artificial Sequence: Synthetic oligonucleotide
ggaacagccacugccuugg

SEQ ID NO: 2229194 - RNA, 19 nt, Artificial Sequence
  Description of Artificial Sequence: Synthetic oligonucleotide
caggaaaucgguccaccug

SEQ ID NO: 2229195 - RNA, 19 nt, Artificial Sequence
  Description of Artificial Sequence: Synthetic oligonucleotide
uucccuguacucguucucc

SEQ ID NO: 2229196 - RNA, 19 nt, Artificial Sequence
  Description of Artificial Sequence: Synthetic oligonucleotide
ugcccuuuugaaccaucug

SEQ ID NO: 2229197 - RNA, 19 nt, Artificial Sequence
  Description of Artificial Sequence: Synthetic oligonucleotide
aacaacugauucucccaua

SEQ ID NO: 2229198 - RNA, 19 nt, Artificial Sequence
  Description of Artificial Sequence: Synthetic oligonucleotide
uguacucguucuccagcca

SEQ ID NO: 2229199 - RNA, 19 nt, Artificial Sequence
  Description of Artificial Sequence: Synthetic oligonucleotide
cauccguguagacaacaac

SEQ ID NO: 2229200 - RNA, 19 nt, Artificial Sequence
  Description of Artificial Sequence: Synthetic oligonucleotide
caaaugccucgccucacgc

SEQ ID NO: 2229201 - RNA, 19 nt, Artificial Sequence
  Description of Artificial Sequence: Synthetic oligonucleotide
ucuuucccuguacucguuc

SEQ ID NO: 2229202 - RNA, 19 nt, Artificial Sequence
  Description of Artificial Sequence: Synthetic oligonucleotide
aacaucccgagcccgcaaa

SEQ ID NO: 2229203 - RNA, 19 nt, Artificial Sequence
  Description of Artificial Sequence: Synthetic oligonucleotide
agacaacaacugauucucc

SEQ ID NO: 2229204 - RNA, 19 nt, Artificial Sequence
  Description of Artificial Sequence: Synthetic oligonucleotide
ccacuugauguccauaccc

SEQ ID NO: 2229205 - RNA, 19 nt, Artificial Sequence
  Description of Artificial Sequence: Synthetic oligonucleotide
auguccauaccccgaguga

SEQ ID NO: 2229206 - RNA, 19 nt, Artificial Sequence
  Description of Artificial Sequence: Synthetic oligonucleotide
ugcugaucuucaccuguga

SEQ ID NO: 2229207 - RNA, 19 nt, Artificial Sequence
  Description of Artificial Sequence: Synthetic oligonucleotide
ugcauccacuugaugucca

SEQ ID NO: 2229208 - RNA, 19 nt, Artificial Sequence
  Description of Artificial Sequence: Synthetic oligonucleotide
uucuuaaaccuggcagcag

SEQ ID NO: 2229209 - RNA, 19 nt, Artificial Sequence
  Description of Artificial Sequence: Synthetic oligonucleotide
uuugaaccaucugggcuug

SEQ ID NO: 2229210 - RNA, 19 nt, Artificial Sequence
  Description of Artificial Sequence: Synthetic oligonucleotide
cuugauguccauaccccga

SEQ ID NO: 2229211 - RNA, 19 nt, Artificial Sequence
  Description of Artificial Sequence: Synthetic oligonucleotide
gugaccaggaaugugcauc

SEQ ID NO: 2229212 - RNA, 19 nt, Artificial Sequence
  Description of Artificial Sequence: Synthetic oligonucleotide
agcugguuaucccauugau

SEQ ID NO: 2229213 - RNA, 19 nt, Artificial Sequence
  Description of Artificial Sequence: Synthetic oligonucleotide
guaaacgccaauuccugcu

SEQ ID NO: 2229214 - RNA, 19 nt, Artificial Sequence
  Description of Artificial Sequence: Synthetic oligonucleotide
gaagucuaaaaccuacauu

SEQ ID NO: 2229215 - RNA, 19 nt, Artificial Sequence
  Description of Artificial Sequence: Synthetic oligonucleotide
auuccugcacacgaguggu

SEQ ID NO: 2229216 - RNA, 19 nt, Artificial Sequence
  Description of Artificial Sequence: Synthetic oligonucleotide
ucacuccaacucaggaaga

SEQ ID NO: 2229217 - RNA, 19 nt, Artificial Sequence
  Description of Artificial Sequence: Synthetic oligonucleotide
cucugguuugucugucgcc

SEQ ID NO: 2229218 - RNA, 19 nt, Artificial Sequence
  Description of Artificial Sequence: Synthetic oligonucleotide
aggaacagccacugccuug

SEQ ID NO: 2229219 - RNA, 19 nt, Artificial Sequence
  Description of Artificial Sequence: Synthetic oligonucleotide
uugcugauguucugagccu

SEQ ID NO: 2229220 - RNA, 19 nt, Artificial Sequence
  Description of Artificial Sequence: Synthetic oligonucleotide
uuucccuguacucguucuc

SEQ ID NO: 2229221 - RNA, 19 nt, Artificial Sequence
  Description of Artificial Sequence: Synthetic oligonucleotide
cccaguaaacgccaauucc

SEQ ID NO: 2229222 - RNA, 19 nt, Artificial Sequence
  Description of Artificial Sequence: Synthetic oligonucleotide
cugugauuccugcacacga

SEQ ID NO: 2229223 - RNA, 19 nt, Artificial Sequence
  Description of Artificial Sequence: Synthetic oligonucleotide
uaucccauugauggugaac

SEQ ID NO: 2229224 - RNA, 19 nt, Artificial Sequence
  Description of Artificial Sequence: Synthetic oligonucleotide
aaggaacagccacugccuu

SEQ ID NO: 2229225 - RNA, 19 nt, Artificial Sequence
  Description of Artificial Sequence: Synthetic oligonucleotide
ucugguagcucuuccucuu

SEQ ID NO: 2229226 - RNA, 19 nt, Artificial Sequence
  Description of Artificial Sequence: Synthetic oligonucleotide
acagaguuacuguguggga

SEQ ID NO: 2229227 - RNA, 19 nt, Artificial Sequence
  Description of Artificial Sequence: Synthetic oligonucleotide
gaguuacugugugggacag

SEQ ID NO: 2229228 - RNA, 19 nt, Artificial Sequence
  Description of Artificial Sequence: Synthetic oligonucleotide
acaugcugucuguguaaag

SEQ ID NO: 2229229 - RNA, 19 nt, Artificial Sequence
  Description of Artificial Sequence: Synthetic oligonucleotide
acucguucuccagccauuc

SEQ ID NO: 2229230 - RNA, 19 nt, Artificial Sequence
  Description of Artificial Sequence: Synthetic oligonucleotide
ccuggcagcaggaaaucgg

SEQ ID NO: 2229231 - RNA, 19 nt, Artificial Sequence
  Description of Artificial Sequence: Synthetic oligonucleotide
ugguuaucccauugauggu

SEQ ID NO: 2229232 - RNA, 19 nt, Artificial Sequence
  Description of Artificial Sequence: Synthetic oligonucleotide
gucugcagacugcuucgcg

SEQ ID NO: 2229233 - RNA, 19 nt, Artificial Sequence
  Description of Artificial Sequence: Synthetic oligonucleotide
agcuguaucacagguccca

SEQ ID NO: 2229234 - RNA, 19 nt, Artificial Sequence
  Description of Artificial Sequence: Synthetic oligonucleotide
gacugcuucgcgccuuccc

SEQ ID NO: 2229235 - RNA, 19 nt, Artificial Sequence
  Description of Artificial Sequence: Synthetic oligonucleotide
gaucuucaccugugauucc

SEQ ID NO: 2229236 - RNA, 19 nt, Artificial Sequence
  Description of Artificial Sequence: Synthetic oligonucleotide
ucgcccaggaagucuaaaa

SEQ ID NO: 2229237 - RNA, 19 nt, Artificial Sequence
  Description of Artificial Sequence: Synthetic oligonucleotide
agucugcagacugcuucgc

SEQ ID NO: 2229238 - RNA, 19 nt, Artificial Sequence
  Description of Artificial Sequence: Synthetic oligonucleotide
aguguacagcaacugcuuu

SEQ ID NO: 2229239 - RNA, 19 nt, Artificial Sequence
  Description of Artificial Sequence: Synthetic oligonucleotide
accgcauagaacaucccga

SEQ ID NO: 2229240 - RNA, 19 nt, Artificial Sequence
  Description of Artificial Sequence: Synthetic oligonucleotide
acgagugguuuccugcccu

SEQ ID NO: 2229241 - RNA, 19 nt, Artificial Sequence
  Description of Artificial Sequence: Synthetic oligonucleotide
ugaaccaucugggcuugga

SEQ ID NO: 2229242 - RNA, 19 nt, Artificial Sequence
  Description of Artificial Sequence: Synthetic oligonucleotide
gucccagucgaguccuccg

SEQ ID NO: 2229243 - RNA, 19 nt, Artificial Sequence
  Description of Artificial Sequence: Synthetic oligonucleotide
ucugucgcccaggaagucu

SEQ ID NO: 2229244 - RNA, 19 nt, Artificial Sequence
  Description of Artificial Sequence: Synthetic oligonucleotide
cacgucuuucccuguacuc

SEQ ID NO: 2229245 - RNA, 19 nt, Artificial Sequence
  Description of Artificial Sequence: Synthetic oligonucleotide
uuugucugucgcccaggaa

SEQ ID NO: 2229246 - RNA, 19 nt, Artificial Sequence
  Description of Artificial Sequence: Synthetic oligonucleotide
cuggguaaaggaacagcca

SEQ ID NO: 2229247 - RNA, 19 nt, Artificial Sequence
  Description of Artificial Sequence: Synthetic oligonucleotide
aucuccgcccucugguuug

SEQ ID NO: 2229248 - RNA, 19 nt, Artificial Sequence
  Description of Artificial Sequence: Synthetic oligonucleotide
ugauguccauaccccgagu

SEQ ID NO: 2229249 - RNA, 19 nt, Artificial Sequence
  Description of Artificial Sequence: Synthetic oligonucleotide
aguuacugugugggacagc

SEQ ID NO: 2229250 - RNA, 19 nt, Artificial Sequence
  Description of Artificial Sequence: Synthetic oligonucleotide
ucaccgcauagaacauccc

SEQ ID NO: 2229251 - RNA, 19 nt, Artificial Sequence
  Description of Artificial Sequence: Synthetic oligonucleotide
guacgacggacagaguuac

SEQ ID NO: 2229252 - RNA, 19 nt, Artificial Sequence
  Description of Artificial Sequence: Synthetic oligonucleotide
gcaaaugccucgccucacg

SEQ ID NO: 2229253 - RNA, 19 nt, Artificial Sequence
  Description of Artificial Sequence: Synthetic oligonucleotide
ugcuucgcgccuucccuug

SEQ ID NO: 2229254 - RNA, 19 nt, Artificial Sequence
  Description of Artificial Sequence: Synthetic oligonucleotide
ucccuguacucguucucca

SEQ ID NO: 2229255 - RNA, 19 nt, Artificial Sequence
  Description of Artificial Sequence: Synthetic oligonucleotide
ucccagucgaguccuccgu

SEQ ID NO: 2229256 - RNA, 19 nt, Artificial Sequence
  Description of Artificial Sequence: Synthetic oligonucleotide
acgccaauuccugcucucg

SEQ ID NO: 2229257 - RNA, 19 nt, Artificial Sequence
  Description of Artificial Sequence: Synthetic oligonucleotide
aggaagucuaaaaccuaca

SEQ ID NO: 2229258 - RNA, 19 nt, Artificial Sequence
  Description of Artificial Sequence: Synthetic oligonucleotide
caaaggcccaagcuucauc

SEQ ID NO: 2229259 - RNA, 19 nt, Artificial Sequence
  Description of Artificial Sequence: Synthetic oligonucleotide
ucccgaggccgcuugcuga

SEQ ID NO: 2229260 - RNA, 19 nt, Artificial Sequence
  Description of Artificial Sequence: Synthetic oligonucleotide
caucuggguaaaggaacag

SEQ ID NO: 2229261 - RNA, 19 nt, Artificial Sequence
  Description of Artificial Sequence: Synthetic oligonucleotide
cucuguguucugucuggug

SEQ ID NO: 2229262 - RNA, 19 nt, Artificial Sequence
  Description of Artificial Sequence: Synthetic oligonucleotide
cguuacuggagcagcagcc

SEQ ID NO: 2229263 - RNA, 19 nt, Artificial Sequence
  Description of Artificial Sequence: Synthetic oligonucleotide
guuugucugucgcccagga

SEQ ID NO: 2229264 - RNA, 19 nt, Artificial Sequence
  Description of Artificial Sequence: Synthetic oligonucleotide
agcccgcaaaugccucgcc

SEQ ID NO: 2229265 - RNA, 19 nt, Artificial Sequence
  Description of Artificial Sequence: Synthetic oligonucleotide
uuggagaguuccugacaaa

SEQ ID NO: 2229266 - RNA, 19 nt, Artificial Sequence
  Description of Artificial Sequence: Synthetic oligonucleotide
uucgcgccuucccuugcca

SEQ ID NO: 2229267 - RNA, 19 nt, Artificial Sequence
  Description of Artificial Sequence: Synthetic oligonucleotide
ccaauuccugcucucgccc

SEQ ID NO: 2229268 - RNA, 19 nt, Artificial Sequence
  Description of Artificial Sequence: Synthetic oligonucleotide
cuugcaugauggcuuugca

SEQ ID NO: 2229269 - RNA, 19 nt, Artificial Sequence
  Description of Artificial Sequence: Synthetic oligonucleotide
acucaggaagacgccgguc

SEQ ID NO: 2229270 - RNA, 19 nt, Artificial Sequence
  Description of Artificial Sequence: Synthetic oligonucleotide
cacuccaacucaggaagac

SEQ ID NO: 2229271 - RNA, 19 nt, Artificial Sequence
  Description of Artificial Sequence: Synthetic oligonucleotide
gcaacugcuuugcucaguc

SEQ ID NO: 2229272 - RNA, 19 nt, Artificial Sequence
  Description of Artificial Sequence: Synthetic oligonucleotide
ugcagacugcuucgcgccu

SEQ ID NO: 2229273 - RNA, 19 nt, Artificial Sequence
  Description of Artificial Sequence: Synthetic oligonucleotide
uccgcccucugguuugucu

SEQ ID NO: 2229274 - RNA, 19 nt, Artificial Sequence
  Description of Artificial Sequence: Synthetic oligonucleotide
uacucguucuccagccauu

SEQ ID NO: 2229275 - RNA, 19 nt, Artificial Sequence
  Description of Artificial Sequence: Synthetic oligonucleotide
ugaucacgucuuucccugu

SEQ ID NO: 2229276 - RNA, 19 nt, Artificial Sequence
  Description of Artificial Sequence: Synthetic oligonucleotide
cuuugcacucacuccaacu

SEQ ID NO: 2229277 - RNA, 19 nt, Artificial Sequence
  Description of Artificial Sequence: Synthetic oligonucleotide
cugacaaaggcccaagcuu

SEQ ID NO: 2229278 - RNA, 19 nt, Artificial Sequence
  Description of Artificial Sequence: Synthetic oligonucleotide
ucccauugauggugaacau

SEQ ID NO: 2229279 - RNA, 19 nt, Artificial Sequence
  Description of Artificial Sequence: Synthetic oligonucleotide
cagagugaccaggaaugug

SEQ ID NO: 2229280 - RNA, 19 nt, Artificial Sequence
  Description of Artificial Sequence: Synthetic oligonucleotide
gcugguuaucccauugaug

SEQ ID NO: 2229281 - RNA, 19 nt, Artificial Sequence
  Description of Artificial Sequence: Synthetic oligonucleotide
acggacagaguuacugugu

SEQ ID NO: 2229282 - RNA, 19 nt, Artificial Sequence
  Description of Artificial Sequence: Synthetic oligonucleotide
gacaaaggcccaagcuuca

SEQ ID NO: 2229283 - RNA, 19 nt, Artificial Sequence
  Description of Artificial Sequence: Synthetic oligonucleotide
ucgguccaccuguucuuug

SEQ ID NO: 2229284 - RNA, 19 nt, Artificial Sequence
  Description of Artificial Sequence: Synthetic oligonucleotide
ucgcgccuucccuugccag

SEQ ID NO: 2229285 - RNA, 19 nt, Artificial Sequence
  Description of Artificial Sequence: Synthetic oligonucleotide
ccacaaauccagagugacc

SEQ ID NO: 2229286 - RNA, 19 nt, Artificial Sequence
  Description of Artificial Sequence: Synthetic oligonucleotide
uccucaccgcauagaacau

SEQ ID NO: 2229287 - RNA, 19 nt, Artificial Sequence
  Description of Artificial Sequence: Synthetic oligonucleotide
guccaccuguucuuugcac

SEQ ID NO: 2229288 - RNA, 19 nt, Artificial Sequence
  Description of Artificial Sequence: Synthetic oligonucleotide
agccugucagccucuucgu

SEQ ID NO: 2229289 - RNA, 19 nt, Artificial Sequence
  Description of Artificial Sequence: Synthetic oligonucleotide
ccgcauagaacaucccgag

SEQ ID NO: 2229290 - RNA, 19 nt, Artificial Sequence
  Description of Artificial Sequence: Synthetic oligonucleotide
gaucacgucuuucccugua

SEQ ID NO: 2229291 - RNA, 19 nt, Artificial Sequence
  Description of Artificial Sequence: Synthetic oligonucleotide
cucuucguugcccacaaau

SEQ ID NO: 2229292 - RNA, 19 nt, Artificial Sequence
  Description of Artificial Sequence: Synthetic oligonucleotide
aaccuacauuuaagggaug

SEQ ID NO: 2229293 - RNA, 19 nt, Artificial Sequence
  Description of Artificial Sequence: Synthetic oligonucleotide
gcuugcaugauggcuuugc

SEQ ID NO: 2229294 - RNA, 19 nt, Artificial Sequence
  Description of Artificial Sequence: Synthetic oligonucleotide
cuucgcgccuucccuugcc

SEQ ID NO: 2229295 - RNA, 19 nt, Artificial Sequence
  Description of Artificial Sequence: Synthetic oligonucleotide
ugcuuugacccuggcucug

SEQ ID NO: 2229296 - RNA, 19 nt, Artificial Sequence
  Description of Artificial Sequence: Synthetic oligonucleotide
ugccuugggucugagugua

SEQ ID NO: 2229297 - RNA, 19 nt, Artificial Sequence
  Description of Artificial Sequence: Synthetic oligonucleotide
ccuacauuuaagggauggc

SEQ ID NO: 2229298 - RNA, 19 nt, Artificial Sequence
  Description of Artificial Sequence: Synthetic oligonucleotide
gugauuccugcacacgagu

SEQ ID NO: 2229299 - RNA, 19 nt, Artificial Sequence
  Description of Artificial Sequence: Synthetic oligonucleotide
uacgacggacagaguuacu

SEQ ID NO: 2229300 - RNA, 19 nt, Artificial Sequence
  Description of Artificial Sequence: Synthetic oligonucleotide
cugcggccccuccucaccg

SEQ ID NO: 2229301 - RNA, 19 nt, Artificial Sequence
  Description of Artificial Sequence: Synthetic oligonucleotide
guccauaccccgagugagc

SEQ ID NO: 2229302 - RNA, 19 nt, Artificial Sequence
  Description of Artificial Sequence: Synthetic oligonucleotide
gcaggcugcauggaucucc

SEQ ID NO: 2229303 - RNA, 19 nt, Artificial Sequence
  Description of Artificial Sequence: Synthetic oligonucleotide
acaucccgagcccgcaaau

SEQ ID NO: 2229304 - RNA, 19 nt, Artificial Sequence
  Description of Artificial Sequence: Synthetic oligonucleotide
aguuccugacaaaggccca

SEQ ID NO: 2229305 - RNA, 19 nt, Artificial Sequence
  Description of Artificial Sequence: Synthetic oligonucleotide
cauggaucuccgcccucug

SEQ ID NO: 2229306 - RNA, 19 nt, Artificial Sequence
  Description of Artificial Sequence: Synthetic oligonucleotide
gguuugucugucgcccagg

SEQ ID NO: 2229307 - RNA, 19 nt, Artificial Sequence
  Description of Artificial Sequence: Synthetic oligonucleotide
cagcaacugcuuugcucag

SEQ ID NO: 2229308 - RNA, 19 nt, Artificial Sequence
  Description of Artificial Sequence: Synthetic oligonucleotide
uggcuugcaugauggcuuu

SEQ ID NO: 2229309 - RNA, 19 nt, Artificial Sequence
  Description of Artificial Sequence: Synthetic oligonucleotide
ccucugguuugucugucgc

SEQ ID NO: 2229310 - RNA, 19 nt, Artificial Sequence
  Description of Artificial Sequence: Synthetic oligonucleotide
ccagucgaguccuccgugc

SEQ ID NO: 2229311 - RNA, 19 nt, Artificial Sequence
  Description of Artificial Sequence: Synthetic oligonucleotide
ugccucgccucacgcguac

SEQ ID NO: 2229312 - RNA, 19 nt, Artificial Sequence
  Description of Artificial Sequence: Synthetic oligonucleotide
aucacaggucccagucgag

SEQ ID NO: 2229313 - RNA, 19 nt, Artificial Sequence
  Description of Artificial Sequence: Synthetic oligonucleotide
ugcacacgagugguuuccu

SEQ ID NO: 2229314 - RNA, 19 nt, Artificial Sequence
  Description of Artificial Sequence: Synthetic oligonucleotide
cuggcagcaggaaaucggu

SEQ ID NO: 2229315 - RNA, 19 nt, Artificial Sequence
  Description of Artificial Sequence: Synthetic oligonucleotide
cuuucccuguacucguucu

SEQ ID NO: 2229316 - RNA, 19 nt, Artificial Sequence
  Description of Artificial Sequence: Synthetic oligonucleotide
cugcgcccguuacuggagc

SEQ ID NO: 2229317 - RNA, 19 nt, Artificial Sequence
  Description of Artificial Sequence: Synthetic oligonucleotide
ccguuacuggagcagcagc

SEQ ID NO: 2229318 - RNA, 19 nt, Artificial Sequence
  Description of Artificial Sequence: Synthetic oligonucleotide
agcaacugcuuugcucagu

SEQ ID NO: 2229319 - RNA, 19 nt, Artificial Sequence
  Description of Artificial Sequence: Synthetic oligonucleotide
cccaggaagucuaaaaccu

SEQ ID NO: 2229320 - RNA, 19 nt, Artificial Sequence
  Description of Artificial Sequence: Synthetic oligonucleotide
ccugugauuccugcacacg

SEQ ID NO: 2229321 - RNA, 19 nt, Artificial Sequence
  Description of Artificial Sequence: Synthetic oligonucleotide
caacaacugauucucccau

SEQ ID NO: 2229322 - RNA, 19 nt, Artificial Sequence
  Description of Artificial Sequence: Synthetic oligonucleotide
cucacgcguacgacggaca

SEQ ID NO: 2229323 - RNA, 19 nt, Artificial Sequence
  Description of Artificial Sequence: Synthetic oligonucleotide
cugguuugucugucgccca

SEQ ID NO: 2229324 - RNA, 19 nt, Artificial Sequence
  Description of Artificial Sequence: Synthetic oligonucleotide
ugcucucgcccgccugcgc

SEQ ID NO: 2229325 - RNA, 19 nt, Artificial Sequence
  Description of Artificial Sequence: Synthetic oligonucleotide
cucccgaggccgcuugcug

SEQ ID NO: 2229326 - RNA, 19 nt, Artificial Sequence
  Description of Artificial Sequence: Synthetic oligonucleotide
guacucguucuccagccau

SEQ ID NO: 2229327 - RNA, 19 nt, Artificial Sequence
  Description of Artificial Sequence: Synthetic oligonucleotide
caucuucuguagcaaauuu

SEQ ID NO: 2229328 - RNA, 19 nt, Artificial Sequence
  Description of Artificial Sequence: Synthetic oligonucleotide
gcuguaucacaggucccag

SEQ ID NO: 2229329 - RNA, 19 nt, Artificial Sequence
  Description of Artificial Sequence: Synthetic oligonucleotide
ugucgcccaggaagucuaa

SEQ ID NO: 2229330 - RNA, 19 nt, Artificial Sequence
  Description of Artificial Sequence: Synthetic oligonucleotide
cucgccucacgcguacgac

SEQ ID NO: 2229331 - RNA, 19 nt, Artificial Sequence
  Description of Artificial Sequence: Synthetic oligonucleotide
uuccugcacacgagugguu

SEQ ID NO: 2229332 - RNA, 19 nt, Artificial Sequence
  Description of Artificial Sequence: Synthetic oligonucleotide
acaaaggcccaagcuucau

SEQ ID NO: 2229333 - RNA, 19 nt, Artificial Sequence
  Description of Artificial Sequence: Synthetic oligonucleotide
guuccugacaaaggcccaa

SEQ ID NO: 2229334 - RNA, 19 nt, Artificial Sequence
  Description of Artificial Sequence: Synthetic oligonucleotide
gaaugugcauccacuugau

SEQ ID NO: 2229335 - RNA, 19 nt, Artificial Sequence
  Description of Artificial Sequence: Synthetic oligonucleotide
cccgcaaaugccucgccuc

SEQ ID NO: 2229336 - RNA, 19 nt, Artificial Sequence
  Description of Artificial Sequence: Synthetic oligonucleotide
ggaagacgccgguccugcg

SEQ ID NO: 2229337 - RNA, 19 nt, Artificial Sequence
  Description of Artificial Sequence: Synthetic oligonucleotide
cgcccaggaagucuaaaac

SEQ ID NO: 2229338 - RNA, 19 nt, Artificial Sequence
  Description of Artificial Sequence: Synthetic oligonucleotide
gaguguacagcaacugcuu

SEQ ID NO: 2229339 - RNA, 19 nt, Artificial Sequence
  Description of Artificial Sequence: Synthetic oligonucleotide
cauugauggugaacaugcu

SEQ ID NO: 2229340 - RNA, 19 nt, Artificial Sequence
  Description of Artificial Sequence: Synthetic oligonucleotide
cagacugcuucgcgccuuc

SEQ ID NO: 2229341 - RNA, 19 nt, Artificial Sequence
  Description of Artificial Sequence: Synthetic oligonucleotide
guguagacaacaacugauu

SEQ ID NO: 2229342 - RNA, 19 nt, Artificial Sequence
  Description of Artificial Sequence: Synthetic oligonucleotide
aggcucccgaggccgcuug

SEQ ID NO: 2229343 - RNA, 19 nt, Artificial Sequence
  Description of Artificial Sequence: Synthetic oligonucleotide
agccauccguguagacaac

SEQ ID NO: 2229344 - RNA, 19 nt, Artificial Sequence
  Description of Artificial Sequence: Synthetic oligonucleotide
cccucugguuugucugucg

SEQ ID NO: 2229345 - RNA, 19 nt, Artificial Sequence
  Description of Artificial Sequence: Synthetic oligonucleotide
cggacagaguuacugugug

SEQ ID NO: 2229346 - RNA, 19 nt, Artificial Sequence
  Description of Artificial Sequence: Synthetic oligonucleotide
gcacacgagugguuuccug

SEQ ID NO: 2229347 - RNA, 19 nt, Artificial Sequence
  Description of Artificial Sequence: Synthetic oligonucleotide
gaucuccgcccucugguuu

SEQ ID NO: 2229348 - RNA, 19 nt, Artificial Sequence
  Description of Artificial Sequence: Synthetic oligonucleotide
uccgugcuguggccucacu

SEQ ID NO: 2229349 - RNA, 19 nt, Artificial Sequence
  Description of Artificial Sequence: Synthetic oligonucleotide
gcugauguucugagccuug

SEQ ID NO: 2229350 - RNA, 19 nt, Artificial Sequence
  Description of Artificial Sequence: Synthetic oligonucleotide
aucugggcuuggagaguuc

SEQ ID NO: 2229351 - RNA, 19 nt, Artificial Sequence
  Description of Artificial Sequence: Synthetic oligonucleotide
ccauucuucuuccagcccu

SEQ ID NO: 2229352 - RNA, 19 nt, Artificial Sequence
  Description of Artificial Sequence: Synthetic oligonucleotide
ccguguagacaacaacuga

SEQ ID NO: 2229353 - RNA, 19 nt, Artificial Sequence
  Description of Artificial Sequence: Synthetic oligonucleotide
ccuugccagccugucagcc

SEQ ID NO: 2229354 - RNA, 19 nt, Artificial Sequence
  Description of Artificial Sequence: Synthetic oligonucleotide
cgcauagaacaucccgagc

SEQ ID NO: 2229355 - RNA, 19 nt, Artificial Sequence
  Description of Artificial Sequence: Synthetic oligonucleotide
ccugacaaaggcccaagcu

SEQ ID NO: 2229356 - RNA, 19 nt, Artificial Sequence
  Description of Artificial Sequence: Synthetic oligonucleotide
cugaacccagcugguuauc

SEQ ID NO: 2229357 - RNA, 19 nt, Artificial Sequence
  Description of Artificial Sequence: Synthetic oligonucleotide
ccugcgcccguuacuggag

SEQ ID NO: 2229358 - RNA, 19 nt, Artificial Sequence
  Description of Artificial Sequence: Synthetic oligonucleotide
aucgguccaccuguucuuu

SEQ ID NO: 2229359 - RNA, 19 nt, Artificial Sequence
  Description of Artificial Sequence: Synthetic oligonucleotide
gcguacgacggacagaguu

SEQ ID NO: 2229360 - RNA, 19 nt, Artificial Sequence
  Description of Artificial Sequence: Synthetic oligonucleotide
ccgcccucugguuugucug

SEQ ID NO: 2229361 - RNA, 19 nt, Artificial Sequence
  Description of Artificial Sequence: Synthetic oligonucleotide
gaccaggaaugugcaucca

SEQ ID NO: 2229362 - RNA, 19 nt, Artificial Sequence
  Description of Artificial Sequence: Synthetic oligonucleotide
cguguagacaacaacugau

SEQ ID NO: 2229363 - RNA, 19 nt, Artificial Sequence
  Description of Artificial Sequence: Synthetic oligonucleotide
ccgugcuguggccucacug

SEQ ID NO: 2229364 - RNA, 19 nt, Artificial Sequence
  Description of Artificial Sequence: Synthetic oligonucleotide
cuucacccacaggcucccg

SEQ ID NO: 2229365 - RNA, 19 nt, Artificial Sequence
  Description of Artificial Sequence: Synthetic oligonucleotide
gccgcuugcugaucuucac

SEQ ID NO: 2229366 - RNA, 19 nt, Artificial Sequence
  Description of Artificial Sequence: Synthetic oligonucleotide
cgagcccgcaaaugccucg

SEQ ID NO: 2229367 - RNA, 19 nt, Artificial Sequence
  Description of Artificial Sequence: Synthetic oligonucleotide
gcaggaaaucgguccaccu

SEQ ID NO: 2229368 - RNA, 19 nt, Artificial Sequence
  Description of Artificial Sequence: Synthetic oligonucleotide
ucuccgcccucugguuugu

SEQ ID NO: 2229369 - RNA, 19 nt, Artificial Sequence
  Description of Artificial Sequence: Synthetic oligonucleotide
ccgagugagcucguccagc

SEQ ID NO: 2229370 - RNA, 19 nt, Artificial Sequence
  Description of Artificial Sequence: Synthetic oligonucleotide
ccaggaagucuaaaaccua

SEQ ID NO: 2229371 - RNA, 19 nt, Artificial Sequence
  Description of Artificial Sequence: Synthetic oligonucleotide
gccugcgcccguuacugga

SEQ ID NO: 2229372 - RNA, 19 nt, Artificial Sequence
  Description of Artificial Sequence: Synthetic oligonucleotide
cauccacuugauguccaua

SEQ ID NO: 2229373 - RNA, 19 nt, Artificial Sequence
  Description of Artificial Sequence: Synthetic oligonucleotide
gccauccguguagacaaca

SEQ ID NO: 2229374 - RNA, 19 nt, Artificial Sequence
  Description of Artificial Sequence: Synthetic oligonucleotide
ccucacgcguacgacggac

SEQ ID NO: 2229375 - RNA, 19 nt, Artificial Sequence
  Description of Artificial Sequence: Synthetic oligonucleotide
cccagucgaguccuccgug

SEQ ID NO: 2229376 - RNA, 19 nt, Artificial Sequence
  Description of Artificial Sequence: Synthetic oligonucleotide
agccggcucuguguucugu

SEQ ID NO: 2229377 - RNA, 19 nt, Artificial Sequence
  Description of Artificial Sequence: Synthetic oligonucleotide
ccauccguguagacaacaa

SEQ ID NO: 2229378 - RNA, 19 nt, Artificial Sequence
  Description of Artificial Sequence: Synthetic oligonucleotide
gcuucgcgccuucccuugc

SEQ ID NO: 2229379 - RNA, 19 nt, Artificial Sequence
  Description of Artificial Sequence: Synthetic oligonucleotide
gccggcucuguguucuguc

SEQ ID NO: 2229380 - RNA, 19 nt, Artificial Sequence
  Description of Artificial Sequence: Synthetic oligonucleotide
cguacgacggacagaguua

SEQ ID NO: 2229381 - RNA, 19 nt, Artificial Sequence
  Description of Artificial Sequence: Synthetic oligonucleotide
gucugucgcccaggaaguc

SEQ ID NO: 2229382 - RNA, 19 nt, Artificial Sequence
  Description of Artificial Sequence: Synthetic oligonucleotide
cagucgaguccuccgugcu

SEQ ID NO: 2229383 - RNA, 19 nt, Artificial Sequence
  Description of Artificial Sequence: Synthetic oligonucleotide
ggagccggcucuguguucu

SEQ ID NO: 2229384 - RNA, 19 nt, Artificial Sequence
  Description of Artificial Sequence: Synthetic oligonucleotide
cacgcguacgacggacaga

SEQ ID NO: 2229385 - RNA, 19 nt, Artificial Sequence
  Description of Artificial Sequence: Synthetic oligonucleotide
uaccccgagugagcucguc

SEQ ID NO: 2229386 - RNA, 19 nt, Artificial Sequence
  Description of Artificial Sequence: Synthetic oligonucleotide
cgcgccuucccuugccagc

SEQ ID NO: 2229387 - RNA, 19 nt, Artificial Sequence
  Description of Artificial Sequence: Synthetic oligonucleotide
gcgcccguuacuggagcag

SEQ ID NO: 2229388 - RNA, 19 nt, Artificial Sequence
  Description of Artificial Sequence: Synthetic oligonucleotide
cccugaacccagcugguua

SEQ ID NO: 2229389 - RNA, 19 nt, Artificial Sequence
  Description of Artificial Sequence: Synthetic oligonucleotide
ccucaccgcauagaacauc

SEQ ID NO: 2229390 - RNA, 19 nt, Artificial Sequence
  Description of Artificial Sequence: Synthetic oligonucleotide
gucgcccaggaagucuaaa

SEQ ID NO: 2229391 - RNA, 19 nt, Artificial Sequence
  Description of Artificial Sequence: Synthetic oligonucleotide
cucguucuccagccauucu

SEQ ID NO: 2229392 - RNA, 19 nt, Artificial Sequence
  Description of Artificial Sequence: Synthetic oligonucleotide
ccgcaaaugccucgccuca

SEQ ID NO: 2229393 - RNA, 19 nt, Artificial Sequence
  Description of Artificial Sequence: Synthetic oligonucleotide
ccgccugcgcccguuacug

SEQ ID NO: 2229394 - RNA, 19 nt, Artificial Sequence
  Description of Artificial Sequence: Synthetic oligonucleotide
ggccgcuugcugaucuuca

SEQ ID NO: 2229395 - RNA, 19 nt, Artificial Sequence
  Description of Artificial Sequence: Synthetic oligonucleotide
gggucugaguguacagcaa

SEQ ID NO: 2229396 - RNA, 19 nt, Artificial Sequence
  Description of Artificial Sequence: Synthetic oligonucleotide
ccgagcccgcaaaugccuc

SEQ ID NO: 2229397 - RNA, 19 nt, Artificial Sequence
  Description of Artificial Sequence: Synthetic oligonucleotide
ccauaccccgagugagcuc

SEQ ID NO: 2229398 - RNA, 19 nt, Artificial Sequence
  Description of Artificial Sequence: Synthetic oligonucleotide
ccugaacccagcugguuau

SEQ ID NO: 2229399 - RNA, 19 nt, Artificial Sequence
  Description of Artificial Sequence: Synthetic oligonucleotide
gcauggaucuccgcccucu

SEQ ID NO: 2229400 - RNA, 19 nt, Artificial Sequence
  Description of Artificial Sequence: Synthetic oligonucleotide
ggcuugcaugauggcuuug

SEQ ID NO: 2229401 - RNA, 19 nt, Artificial Sequence
  Description of Artificial Sequence: Synthetic oligonucleotide
auaccccgagugagcucgu

SEQ ID NO: 2229402 - RNA, 19 nt, Artificial Sequence
  Description of Artificial Sequence: Synthetic oligonucleotide
cgcccguuacuggagcagc

SEQ ID NO: 2229403 - RNA, 19 nt, Artificial Sequence
  Description of Artificial Sequence: Synthetic oligonucleotide
gggagccggcucuguguuc

SEQ ID NO: 2229404 - RNA, 19 nt, Artificial Sequence
  Description of Artificial Sequence: Synthetic oligonucleotide
ccucgccucacgcguacga

SEQ ID NO: 2229405 - RNA, 19 nt, Artificial Sequence
  Description of Artificial Sequence: Synthetic oligonucleotide
gcccguuacuggagcagca

SEQ ID NO: 2229406 - RNA, 19 nt, Artificial Sequence
  Description of Artificial Sequence: Synthetic oligonucleotide
cugcuucgcgccuucccuu

SEQ ID NO: 2229407 - RNA, 19 nt, Artificial Sequence
  Description of Artificial Sequence: Synthetic oligonucleotide
gcccgcaaaugccucgccu

SEQ ID NO: 2229408 - RNA, 19 nt, Artificial Sequence
  Description of Artificial Sequence: Synthetic oligonucleotide
gaggccgcuugcugaucuu

SEQ ID NO: 2229409 - RNA, 19 nt, Artificial Sequence
  Description of Artificial Sequence: Synthetic oligonucleotide
cgucuuucccuguacucgu

SEQ ID NO: 2229410 - RNA, 19 nt, Artificial Sequence
  Description of Artificial Sequence: Synthetic oligonucleotide
gcauccacuugauguccau

SEQ ID NO: 2229411 - RNA, 19 nt, Artificial Sequence
  Description of Artificial Sequence: Synthetic oligonucleotide
gccucgccucacgcguacg

SEQ ID NO: 2229412 - RNA, 19 nt, Artificial Sequence
  Description of Artificial Sequence: Synthetic oligonucleotide
augccucgccucacgcgua

SEQ ID NO: 2229413 - RNA, 19 nt, Artificial Sequence
  Description of Artificial Sequence: Synthetic oligonucleotide
cgagugagcucguccagcu

SEQ ID NO: 2229414 - RNA, 19 nt, Artificial Sequence
  Description of Artificial Sequence: Synthetic oligonucleotide
cacugccuugggucugagu

SEQ ID NO: 2229415 - RNA, 19 nt, Artificial Sequence
  Description of Artificial Sequence: Synthetic oligonucleotide
cgcaaaugccucgccucac

SEQ ID NO: 2229416 - RNA, 19 nt, Artificial Sequence
  Description of Artificial Sequence: Synthetic oligonucleotide
gcggccccuccucaccgca

SEQ ID NO: 2229417 - RNA, 19 nt, Artificial Sequence
  Description of Artificial Sequence: Synthetic oligonucleotide
ggccccuccucaccgcaua

SEQ ID NO: 2229418 - RNA, 19 nt, Artificial Sequence
  Description of Artificial Sequence: Synthetic oligonucleotide
ggggagccggcucuguguu

SEQ ID NO: 2229419 - RNA, 19 nt, Artificial Sequence
  Description of Artificial Sequence: Synthetic oligonucleotide
cgacggacagaguuacugu

SEQ ID NO: 2229420 - RNA, 19 nt, Artificial Sequence
  Description of Artificial Sequence: Synthetic oligonucleotide
cccgagcccgcaaaugccu

SEQ ID NO: 2229421 - RNA, 19 nt, Artificial Sequence
  Description of Artificial Sequence: Synthetic oligonucleotide
gccucacgcguacgacgga

SEQ ID NO: 2229422 - RNA, 19 nt, Artificial Sequence
  Description of Artificial Sequence: Synthetic oligonucleotide
cuguggccucacugcacau

SEQ ID NO: 2229423 - RNA, 19 nt, Artificial Sequence
  Description of Artificial Sequence: Synthetic oligonucleotide
ggaaaucgguccaccuguu

SEQ ID NO: 2229424 - RNA, 19 nt, Artificial Sequence
  Description of Artificial Sequence: Synthetic oligonucleotide
gcccgccugcgcccguuac

SEQ ID NO: 2229425 - RNA, 19 nt, Artificial Sequence
  Description of Artificial Sequence: Synthetic oligonucleotide
ccggcucuguguucugucu

SEQ ID NO: 2229426 - RNA, 19 nt, Artificial Sequence
  Description of Artificial Sequence: Synthetic oligonucleotide
cuccgcccucugguuuguc

SEQ ID NO: 2229427 - RNA, 19 nt, Artificial Sequence
  Description of Artificial Sequence: Synthetic oligonucleotide
gccuugggucugaguguac

SEQ ID NO: 2229428 - RNA, 19 nt, Artificial Sequence
  Description of Artificial Sequence: Synthetic oligonucleotide
ccaugaaguccuccuuguu

SEQ ID NO: 2229429 - RNA, 19 nt, Artificial Sequence
  Description of Artificial Sequence: Synthetic oligonucleotide
cgaggccgcuugcugaucu

SEQ ID NO: 2229430 - RNA, 19 nt, Artificial Sequence
  Description of Artificial Sequence: Synthetic oligonucleotide
gcucccgaggccgcuugcu

SEQ ID NO: 2229431 - RNA, 19 nt, Artificial Sequence
  Description of Artificial Sequence: Synthetic oligonucleotide
gcagacugcuucgcgccuu

SEQ ID NO: 2229432 - RNA, 19 nt, Artificial Sequence
  Description of Artificial Sequence: Synthetic oligonucleotide
cccgaggccgcuugcugau

SEQ ID NO: 2229433 - RNA, 19 nt, Artificial Sequence
  Description of Artificial Sequence: Synthetic oligonucleotide
ccuccgugcuguggccuca

SEQ ID NO: 2229434 - RNA, 19 nt, Artificial Sequence
  Description of Artificial Sequence: Synthetic oligonucleotide
ccucuucguugcccacaaa

SEQ ID NO: 2229435 - RNA, 19 nt, Artificial Sequence
  Description of Artificial Sequence: Synthetic oligonucleotide
cgcccucugguuugucugu

SEQ ID NO: 2229436 - RNA, 19 nt, Artificial Sequence
  Description of Artificial Sequence: Synthetic oligonucleotide
gcccugaacccagcugguu

SEQ ID NO: 2229437 - RNA, 19 nt, Artificial Sequence
  Description of Artificial Sequence: Synthetic oligonucleotide
cgagugguuuccugcccuu

SEQ ID NO: 2229438 - RNA, 19 nt, Artificial Sequence
  Description of Artificial Sequence: Synthetic oligonucleotide
caggcucccgaggccgcuu

SEQ ID NO: 2229439 - RNA, 19 nt, Artificial Sequence
  Description of Artificial Sequence: Synthetic oligonucleotide
cucgcccgccugcgcccgu

SEQ ID NO: 2229440 - RNA, 19 nt, Artificial Sequence
  Description of Artificial Sequence: Synthetic oligonucleotide
cgguccugcggccccuccu

SEQ ID NO: 2229441 - RNA, 19 nt, Artificial Sequence
  Description of Artificial Sequence: Synthetic oligonucleotide
cgcguacgacggacagagu

SEQ ID NO: 2229442 - RNA, 19 nt, Artificial Sequence
  Description of Artificial Sequence: Synthetic oligonucleotide
cgcccgccugcgcccguua

SEQ ID NO: 2229443 - RNA, 19 nt, Artificial Sequence
  Description of Artificial Sequence: Synthetic oligonucleotide
uauauuauaguuuacaaga

SEQ ID NO: 2229444 - RNA, 19 nt, Artificial Sequence
  Description of Artificial Sequence: Synthetic oligonucleotide
aauaauauuuguuuccaag

SEQ ID NO: 2229445 - RNA, 19 nt, Artificial Sequence
  Description of Artificial Sequence: Synthetic oligonucleotide
aaugcuucaaauuugugug

SEQ ID NO: 2229446 - RNA, 19 nt, Artificial Sequence
  Description of Artificial Sequence: Synthetic oligonucleotide
auaauucagauucucaucg

SEQ ID NO: 2229447 - RNA, 19 nt, Artificial Sequence
  Description of Artificial Sequence: Synthetic oligonucleotide
aacaccaacauccugucac

SEQ ID NO: 2229448 - RNA, 19 nt, Artificial Sequence
  Description of Artificial Sequence: Synthetic oligonucleotide
uaaacauuuauuaccagag

SEQ ID NO: 2229449 - RNA, 19 nt, Artificial Sequence
  Description of Artificial Sequence: Synthetic oligonucleotide
aauucguucuacuuugacg

SEQ ID NO: 2229450 - RNA, 19 nt, Artificial Sequence
  Description of Artificial Sequence: Synthetic oligonucleotide
aaagugaucaagacaagcc

SEQ ID NO: 2229451 - RNA, 19 nt, Artificial Sequence
  Description of Artificial Sequence: Synthetic oligonucleotide
ucuccuaacaccaacacca

SEQ ID NO: 2229452 - RNA, 19 nt, Artificial Sequence
  Description of Artificial Sequence: Synthetic oligonucleotide
aaaugcuucaaauuugugu

SEQ ID NO: 2229453 - RNA, 19 nt, Artificial Sequence
  Description of Artificial Sequence: Synthetic oligonucleotide
aaaagugaucaagacaagc

SEQ ID NO: 2229454 - RNA, 19 nt, Artificial Sequence
  Description of Artificial Sequence: Synthetic oligonucleotide
uuacaagaagcucagagca

SEQ ID NO: 2229455 - RNA, 19 nt, Artificial Sequence
  Description of Artificial Sequence: Synthetic oligonucleotide
uuuaaguuugguaagguaa

SEQ ID NO: 2229456 - RNA, 19 nt, Artificial Sequence
  Description of Artificial Sequence: Synthetic oligonucleotide
gaugugaacaaggaaaugg

SEQ ID NO: 2229457 - RNA, 19 nt, Artificial Sequence
  Description of Artificial Sequence: Synthetic oligonucleotide
uaauuaauugaugugaaca

SEQ ID NO: 2229458 - RNA, 19 nt, Artificial Sequence
  Description of Artificial Sequence: Synthetic oligonucleotide
uauguauuaaacagagaag

SEQ ID NO: 2229459 - RNA, 19 nt, Artificial Sequence
  Description of Artificial Sequence: Synthetic oligonucleotide
agagaaaacauacauagaa

SEQ ID NO: 2229460 - RNA, 19 nt, Artificial Sequence
  Description of Artificial Sequence: Synthetic oligonucleotide
uauacugcaaacuaaguau

SEQ ID NO: 2229461 - RNA, 19 nt, Artificial Sequence
  Description of Artificial Sequence: Synthetic oligonucleotide
uaauauuuguuuccaaggc

SEQ ID NO: 2229462 - RNA, 19 nt, Artificial Sequence
  Description of Artificial Sequence: Synthetic oligonucleotide
uuuauuaccagagaagaga

SEQ ID NO: 2229463 - RNA, 19 nt, Artificial Sequence
  Description of Artificial Sequence: Synthetic oligonucleotide
uaauguagaauuuauuuuc

SEQ ID NO: 2229464 - RNA, 19 nt, Artificial Sequence
  Description of Artificial Sequence: Synthetic oligonucleotide
aauuaauugaugugaacaa

SEQ ID NO: 2229465 - RNA, 19 nt, Artificial Sequence
  Description of Artificial Sequence: Synthetic oligonucleotide
uguaaugaaguccaauuac

SEQ ID NO: 2229466 - RNA, 19 nt, Artificial Sequence
  Description of Artificial Sequence: Synthetic oligonucleotide
auagucauaacucuccuug

SEQ ID NO: 2229467 - RNA, 19 nt, Artificial Sequence
  Description of Artificial Sequence: Synthetic oligonucleotide
cauuauaugccccaguggc

SEQ ID NO: 2229468 - RNA, 19 nt, Artificial Sequence
  Description of Artificial Sequence: Synthetic oligonucleotide
guauguauuaaacagagaa

SEQ ID NO: 2229469 - RNA, 19 nt, Artificial Sequence
  Description of Artificial Sequence: Synthetic oligonucleotide
auucguucuacuuugacgu

SEQ ID NO: 2229470 - RNA, 19 nt, Artificial Sequence
  Description of Artificial Sequence: Synthetic oligonucleotide
ucuugagauagucauaacu

SEQ ID NO: 2229471 - RNA, 19 nt, Artificial Sequence
  Description of Artificial Sequence: Synthetic oligonucleotide
aaguauguauuaaacagag

SEQ ID NO: 2229472 - RNA, 19 nt, Artificial Sequence
  Description of Artificial Sequence: Synthetic oligonucleotide
guauauuauaguuuacaag

SEQ ID NO: 2229473 - RNA, 19 nt, Artificial Sequence
  Description of Artificial Sequence: Synthetic oligonucleotide
aucuccaauaagcugauag

SEQ ID NO: 2229474 - RNA, 19 nt, Artificial Sequence
  Description of Artificial Sequence: Synthetic oligonucleotide
uccaauaagcugauagacg

SEQ ID NO: 2229475 - RNA, 19 nt, Artificial Sequence
  Description of Artificial Sequence: Synthetic oligonucleotide
cuugagauagucauaacuc

SEQ ID NO: 2229476 - RNA, 19 nt, Artificial Sequence
  Description of Artificial Sequence: Synthetic oligonucleotide
uaggaagauauuuacaagu

SEQ ID NO: 2229477 - RNA, 19 nt, Artificial Sequence
  Description of Artificial Sequence: Synthetic oligonucleotide
aaacuaaguauauuauagu

SEQ ID NO: 2229478 - RNA, 19 nt, Artificial Sequence
  Description of Artificial Sequence: Synthetic oligonucleotide
aguaggaagauauuuacaa

SEQ ID NO: 2229479 - RNA, 19 nt, Artificial Sequence
  Description of Artificial Sequence: Synthetic oligonucleotide
uuuaauuaauugaugugaa

SEQ ID NO: 2229480 - RNA, 19 nt, Artificial Sequence
  Description of Artificial Sequence: Synthetic oligonucleotide
aguccaauuaccaaguagg

SEQ ID NO: 2229481 - RNA, 19 nt, Artificial Sequence
  Description of Artificial Sequence: Synthetic oligonucleotide
agugcaaaauauuauaaaa

SEQ ID NO: 2229482 - RNA, 19 nt, Artificial Sequence
  Description of Artificial Sequence: Synthetic oligonucleotide
uuaccaaguaggaagauau

SEQ ID NO: 2229483 - RNA, 19 nt, Artificial Sequence
  Description of Artificial Sequence: Synthetic oligonucleotide
gcaaguauguauuaaacag

SEQ ID NO: 2229484 - RNA, 19 nt, Artificial Sequence
  Description of Artificial Sequence: Synthetic oligonucleotide
auguauuaaacagagaaga

SEQ ID NO: 2229485 - RNA, 19 nt, Artificial Sequence
  Description of Artificial Sequence: Synthetic oligonucleotide
aaguccaauuaccaaguag

SEQ ID NO: 2229486 - RNA, 19 nt, Artificial Sequence
  Description of Artificial Sequence: Synthetic oligonucleotide
uaaugaaguccaauuacca

SEQ ID NO: 2229487 - RNA, 19 nt, Artificial Sequence
  Description of Artificial Sequence: Synthetic oligonucleotide
ucauaacucuccuuggugc

SEQ ID NO: 2229488 - RNA, 19 nt, Artificial Sequence
  Description of Artificial Sequence: Synthetic oligonucleotide
uuuguaaugaaguccaauu

SEQ ID NO: 2229489 - RNA, 19 nt, Artificial Sequence
  Description of Artificial Sequence: Synthetic oligonucleotide
uguauuaaacagagaagac

SEQ ID NO: 2229490 - RNA, 19 nt, Artificial Sequence
  Description of Artificial Sequence: Synthetic oligonucleotide
aguauauuauaguuuacaa

SEQ ID NO: 2229491 - RNA, 19 nt, Artificial Sequence
  Description of Artificial Sequence: Synthetic oligonucleotide
acggaauaauauuuguuuc

SEQ ID NO: 2229492 - RNA, 19 nt, Artificial Sequence
  Description of Artificial Sequence: Synthetic oligonucleotide
ugagauaagaauguccaca

SEQ ID NO: 2229493 - RNA, 19 nt, Artificial Sequence
  Description of Artificial Sequence: Synthetic oligonucleotide
guuuaauuaauugauguga

SEQ ID NO: 2229494 - RNA, 19 nt, Artificial Sequence
  Description of Artificial Sequence: Synthetic oligonucleotide
accaaucuugaacugcccc

SEQ ID NO: 2229495 - RNA, 19 nt, Artificial Sequence
  Description of Artificial Sequence: Synthetic oligonucleotide
uuauuaccagagaagagaa

SEQ ID NO: 2229496 - RNA, 19 nt, Artificial Sequence
  Description of Artificial Sequence: Synthetic oligonucleotide
auugaugugaacaaggaaa

SEQ ID NO: 2229497 - RNA, 19 nt, Artificial Sequence
  Description of Artificial Sequence: Synthetic oligonucleotide
ccaauuaccaaguaggaag

SEQ ID NO: 2229498 - RNA, 19 nt, Artificial Sequence
  Description of Artificial Sequence: Synthetic oligonucleotide
acuaguuuuguaaugaagu

SEQ ID NO: 2229499 - RNA, 19 nt, Artificial Sequence
  Description of Artificial Sequence: Synthetic oligonucleotide
cauggaauaacuugguguc

SEQ ID NO: 2229500 - RNA, 19 nt, Artificial Sequence
  Description of Artificial Sequence: Synthetic oligonucleotide
uuauaugccccaguggcgg

SEQ ID NO: 2229501 - RNA, 19 nt, Artificial Sequence
  Description of Artificial Sequence: Synthetic oligonucleotide
auaguuuacaagaagcuca

SEQ ID NO: 2229502 - RNA, 19 nt, Artificial Sequence
  Description of Artificial Sequence: Synthetic oligonucleotide
uguagaagccuggauaucc

SEQ ID NO: 2229503 - RNA, 19 nt, Artificial Sequence
  Description of Artificial Sequence: Synthetic oligonucleotide
ugcagaucuccuaacacca

SEQ ID NO: 2229504 - RNA, 19 nt, Artificial Sequence
  Description of Artificial Sequence: Synthetic oligonucleotide
aaacagagaagacauuuua

SEQ ID NO: 2229505 - RNA, 19 nt, Artificial Sequence
  Description of Artificial Sequence: Synthetic oligonucleotide
gaagucuccucuuacgaug

SEQ ID NO: 2229506 - RNA, 19 nt, Artificial Sequence
  Description of Artificial Sequence: Synthetic oligonucleotide
uaguuuuguaaugaagucc

SEQ ID NO: 2229507 - RNA, 19 nt, Artificial Sequence
  Description of Artificial Sequence: Synthetic oligonucleotide
ucuucaugcacuaguuuug

SEQ ID NO: 2229508 - RNA, 19 nt, Artificial Sequence
  Description of Artificial Sequence: Synthetic oligonucleotide
cuaaguauauuauaguuua

SEQ ID NO: 2229509 - RNA, 19 nt, Artificial Sequence
  Description of Artificial Sequence: Synthetic oligonucleotide
aaugacggaauaauauuug

SEQ ID NO: 2229510 - RNA, 19 nt, Artificial Sequence
  Description of Artificial Sequence: Synthetic oligonucleotide
aaguguuuaauuaauugau

SEQ ID NO: 2229511 - RNA, 19 nt, Artificial Sequence
  Description of Artificial Sequence: Synthetic oligonucleotide
aauaagcugauagacguaa

SEQ ID NO: 2229512 - RNA, 19 nt, Artificial Sequence
  Description of Artificial Sequence: Synthetic oligonucleotide
agcaaguauguauuaaaca

SEQ ID NO: 2229513 - RNA, 19 nt, Artificial Sequence
  Description of Artificial Sequence: Synthetic oligonucleotide
gaauuuagccggcaggcug

SEQ ID NO: 2229514 - RNA, 19 nt, Artificial Sequence
  Description of Artificial Sequence: Synthetic oligonucleotide
aagcuagccaugucucccc

SEQ ID NO: 2229515 - RNA, 19 nt, Artificial Sequence
  Description of Artificial Sequence: Synthetic oligonucleotide
aacagagaagacauuuuag

SEQ ID NO: 2229516 - RNA, 19 nt, Artificial Sequence
  Description of Artificial Sequence: Synthetic oligonucleotide
uugagauagucauaacucu

SEQ ID NO: 2229517 - RNA, 19 nt, Artificial Sequence
  Description of Artificial Sequence: Synthetic oligonucleotide
uuccaaggcauuauaugcc

SEQ ID NO: 2229518 - RNA, 19 nt, Artificial Sequence
  Description of Artificial Sequence: Synthetic oligonucleotide
uguccugagauaagaaugu

SEQ ID NO: 2229519 - RNA, 19 nt, Artificial Sequence
  Description of Artificial Sequence: Synthetic oligonucleotide
ucaugcacuaguuuuguaa

SEQ ID NO: 2229520 - RNA, 19 nt, Artificial Sequence
  Description of Artificial Sequence: Synthetic oligonucleotide
cauacauagaaauucugga

SEQ ID NO: 2229521 - RNA, 19 nt, Artificial Sequence
  Description of Artificial Sequence: Synthetic oligonucleotide
uccagugcagagaaugugc

SEQ ID NO: 2229522 - RNA, 19 nt, Artificial Sequence
  Description of Artificial Sequence: Synthetic oligonucleotide
auauacugcaaacuaagua

SEQ ID NO: 2229523 - RNA, 19 nt, Artificial Sequence
  Description of Artificial Sequence: Synthetic oligonucleotide
ugauagacguaagugacca

SEQ ID NO: 2229524 - RNA, 19 nt, Artificial Sequence
  Description of Artificial Sequence: Synthetic oligonucleotide
auuaauugaugugaacaag

SEQ ID NO: 2229525 - RNA, 19 nt, Artificial Sequence
  Description of Artificial Sequence: Synthetic oligonucleotide
aagcugauagacguaagug

SEQ ID NO: 2229526 - RNA, 19 nt, Artificial Sequence
  Description of Artificial Sequence: Synthetic oligonucleotide
acaacugugugccuuuaag

SEQ ID NO: 2229527 - RNA, 19 nt, Artificial Sequence
  Description of Artificial Sequence: Synthetic oligonucleotide
auauccaucagcacaaaug

SEQ ID NO: 2229528 - RNA, 19 nt, Artificial Sequence
  Description of Artificial Sequence: Synthetic oligonucleotide
acauauacugcaaacuaag

SEQ ID NO: 2229529 - RNA, 19 nt, Artificial Sequence
  Description of Artificial Sequence: Synthetic oligonucleotide
uuguaaugaaguccaauua

SEQ ID NO: 2229530 - RNA, 19 nt, Artificial Sequence
  Description of Artificial Sequence: Synthetic oligonucleotide
guaggaagauauuuacaag

SEQ ID NO: 2229531 - RNA, 19 nt, Artificial Sequence
  Description of Artificial Sequence: Synthetic oligonucleotide
ugagauagucauaacucuc

SEQ ID NO: 2229532 - RNA, 19 nt, Artificial Sequence
  Description of Artificial Sequence: Synthetic oligonucleotide
aacuugguguccauggauc

SEQ ID NO: 2229533 - RNA, 19 nt, Artificial Sequence
  Description of Artificial Sequence: Synthetic oligonucleotide
auacauagaaauucuggau

SEQ ID NO: 2229534 - RNA, 19 nt, Artificial Sequence
  Description of Artificial Sequence: Synthetic oligonucleotide
guuaauguagaauuuauuu

SEQ ID NO: 2229535 - RNA, 19 nt, Artificial Sequence
  Description of Artificial Sequence: Synthetic oligonucleotide
uauaguuuacaagaagcuc

SEQ ID NO: 2229536 - RNA, 19 nt, Artificial Sequence
  Description of Artificial Sequence: Synthetic oligonucleotide
ucuccaauaagcugauaga

SEQ ID NO: 2229537 - RNA, 19 nt, Artificial Sequence
  Description of Artificial Sequence: Synthetic oligonucleotide
agcugauagacguaaguga

SEQ ID NO: 2229538 - RNA, 19 nt, Artificial Sequence
  Description of Artificial Sequence: Synthetic oligonucleotide
uggauauccaucagcacaa

SEQ ID NO: 2229539 - RNA, 19 nt, Artificial Sequence
  Description of Artificial Sequence: Synthetic oligonucleotide
cuaguuuuguaaugaaguc

SEQ ID NO: 2229540 - RNA, 19 nt, Artificial Sequence
  Description of Artificial Sequence: Synthetic oligonucleotide
gagauagucauaacucucc

SEQ ID NO: 2229541 - RNA, 19 nt, Artificial Sequence
  Description of Artificial Sequence: Synthetic oligonucleotide
uuagccggcaggcuguugc

SEQ ID NO: 2229542 - RNA, 19 nt, Artificial Sequence
  Description of Artificial Sequence: Synthetic oligonucleotide
agaccaaucuugaacugcc

SEQ ID NO: 2229543 - RNA, 19 nt, Artificial Sequence
  Description of Artificial Sequence: Synthetic oligonucleotide
uccaaggcauuauaugccc

SEQ ID NO: 2229544 - RNA, 19 nt, Artificial Sequence
  Description of Artificial Sequence: Synthetic oligonucleotide
gaagcucagagcaaguaug

SEQ ID NO: 2229545 - RNA, 19 nt, Artificial Sequence
  Description of Artificial Sequence: Synthetic oligonucleotide
uguucuggauaauucagau

SEQ ID NO: 2229546 - RNA, 19 nt, Artificial Sequence
  Description of Artificial Sequence: Synthetic oligonucleotide
acuguagaagccuggauau

SEQ ID NO: 2229547 - RNA, 19 nt, Artificial Sequence
  Description of Artificial Sequence: Synthetic oligonucleotide
aucgaagucuccucuuacg

SEQ ID NO: 2229548 - RNA, 19 nt, Artificial Sequence
  Description of Artificial Sequence: Synthetic oligonucleotide
aaaugacggaauaauauuu

SEQ ID NO: 2229549 - RNA, 19 nt, Artificial Sequence
  Description of Artificial Sequence: Synthetic oligonucleotide
uagucauaacucuccuugg

SEQ ID NO: 2229550 - RNA, 19 nt, Artificial Sequence
  Description of Artificial Sequence: Synthetic oligonucleotide
ugcaaagguuuccagugca

SEQ ID NO: 2229551 - RNA, 19 nt, Artificial Sequence
  Description of Artificial Sequence: Synthetic oligonucleotide
acaccaacauccugucacc

SEQ ID NO: 2229552 - RNA, 19 nt, Artificial Sequence
  Description of Artificial Sequence: Synthetic oligonucleotide
ucgaagucuccucuuacga

SEQ ID NO: 2229553 - RNA, 19 nt, Artificial Sequence
  Description of Artificial Sequence: Synthetic oligonucleotide
uacgauguggacgucacca

SEQ ID NO: 2229554 - RNA, 19 nt, Artificial Sequence
  Description of Artificial Sequence: Synthetic oligonucleotide
ugcacuaguuuuguaauga

SEQ ID NO: 2229555 - RNA, 19 nt, Artificial Sequence
  Description of Artificial Sequence: Synthetic oligonucleotide
gcuucguucagucaccacg

SEQ ID NO: 2229556 - RNA, 19 nt, Artificial Sequence
  Description of Artificial Sequence: Synthetic oligonucleotide
acaaaugacggaauaauau

SEQ ID NO: 2229557 - RNA, 19 nt, Artificial Sequence
  Description of Artificial Sequence: Synthetic oligonucleotide
acaagaagcucagagcaag

SEQ ID NO: 2229558 - RNA, 19 nt, Artificial Sequence
  Description of Artificial Sequence: Synthetic oligonucleotide
agagcaaguauguauuaaa

SEQ ID NO: 2229559 - RNA, 19 nt, Artificial Sequence
  Description of Artificial Sequence: Synthetic oligonucleotide
uaaguauauuauaguuuac

SEQ ID NO: 2229560 - RNA, 19 nt, Artificial Sequence
  Description of Artificial Sequence: Synthetic oligonucleotide
uaagaauguccacaucaaa

SEQ ID NO: 2229561 - RNA, 19 nt, Artificial Sequence
  Description of Artificial Sequence: Synthetic oligonucleotide
aacauauacugcaaacuaa

SEQ ID NO: 2229562 - RNA, 19 nt, Artificial Sequence
  Description of Artificial Sequence: Synthetic oligonucleotide
uccacaucaaacugccucu

SEQ ID NO: 2229563 - RNA, 19 nt, Artificial Sequence
  Description of Artificial Sequence: Synthetic oligonucleotide
caaguauguauuaaacaga

SEQ ID NO: 2229564 - RNA, 19 nt, Artificial Sequence
  Description of Artificial Sequence: Synthetic oligonucleotide
uagacguaagugaccacug

SEQ ID NO: 2229565 - RNA, 19 nt, Artificial Sequence
  Description of Artificial Sequence: Synthetic oligonucleotide
auuuuagugcaaaauauua

SEQ ID NO: 2229566 - RNA, 19 nt, Artificial Sequence
  Description of Artificial Sequence: Synthetic oligonucleotide
uggaucagaccaaucuuga

SEQ ID NO: 2229567 - RNA, 19 nt, Artificial Sequence
  Description of Artificial Sequence: Synthetic oligonucleotide
ggugcaaagguuuccagug

SEQ ID NO: 2229568 - RNA, 19 nt, Artificial Sequence
  Description of Artificial Sequence: Synthetic oligonucleotide
gcaaaauauuauaaaagug

SEQ ID NO: 2229569 - RNA, 19 nt, Artificial Sequence
  Description of Artificial Sequence: Synthetic oligonucleotide
auuuucaugcucaaaugcu

SEQ ID NO: 2229570 - RNA, 19 nt, Artificial Sequence
  Description of Artificial Sequence: Synthetic oligonucleotide
auagacguaagugaccacu

SEQ ID NO: 2229571 - RNA, 19 nt, Artificial Sequence
  Description of Artificial Sequence: Synthetic oligonucleotide
acagucacaaccuucuguu

SEQ ID NO: 2229572 - RNA, 19 nt, Artificial Sequence
  Description of Artificial Sequence: Synthetic oligonucleotide
ugguaagguaaacauuuau

SEQ ID NO: 2229573 - RNA, 19 nt, Artificial Sequence
  Description of Artificial Sequence: Synthetic oligonucleotide
caucaaacugccucugcag

SEQ ID NO: 2229574 - RNA, 19 nt, Artificial Sequence
  Description of Artificial Sequence: Synthetic oligonucleotide
guguccugagauaagaaug

SEQ ID NO: 2229575 - RNA, 19 nt, Artificial Sequence
  Description of Artificial Sequence: Synthetic oligonucleotide
cuccccauggaauaacuug

SEQ ID NO: 2229576 - RNA, 19 nt, Artificial Sequence
  Description of Artificial Sequence: Synthetic oligonucleotide
cuccaauaagcugauagac

SEQ ID NO: 2229577 - RNA, 19 nt, Artificial Sequence
  Description of Artificial Sequence: Synthetic oligonucleotide
augacggaauaauauuugu

SEQ ID NO: 2229578 - RNA, 19 nt, Artificial Sequence
  Description of Artificial Sequence: Synthetic oligonucleotide
uaagcuagccaugucuccc

SEQ ID NO: 2229579 - RNA, 19 nt, Artificial Sequence
  Description of Artificial Sequence: Synthetic oligonucleotide
auuuauuaccagagaagag

SEQ ID NO: 2229580 - RNA, 19 nt, Artificial Sequence
  Description of Artificial Sequence: Synthetic oligonucleotide
uguguguccugagauaaga

SEQ ID NO: 2229581 - RNA, 19 nt, Artificial Sequence
  Description of Artificial Sequence: Synthetic oligonucleotide
ucucaucgaagucuccucu

SEQ ID NO: 2229582 - RNA, 19 nt, Artificial Sequence
  Description of Artificial Sequence: Synthetic oligonucleotide
gucauaacucuccuuggug

SEQ ID NO: 2229583 - RNA, 19 nt, Artificial Sequence
  Description of Artificial Sequence: Synthetic oligonucleotide
uggaauaacuuggugucca

SEQ ID NO: 2229584 - RNA, 19 nt, Artificial Sequence
  Description of Artificial Sequence: Synthetic oligonucleotide
gaucuccuaacaccaacac

SEQ ID NO: 2229585 - RNA, 19 nt, Artificial Sequence
  Description of Artificial Sequence: Synthetic oligonucleotide
auuauaugccccaguggcg

SEQ ID NO: 2229586 - RNA, 19 nt, Artificial Sequence
  Description of Artificial Sequence: Synthetic oligonucleotide
cugauagacguaagugacc

SEQ ID NO: 2229587 - RNA, 19 nt, Artificial Sequence
  Description of Artificial Sequence: Synthetic oligonucleotide
gacggaauaauauuuguuu

SEQ ID NO: 2229588 - RNA, 19 nt, Artificial Sequence
  Description of Artificial Sequence: Synthetic oligonucleotide
ugacggaauaauauuuguu

SEQ ID NO: 2229589 - RNA, 19 nt, Artificial Sequence
  Description of Artificial Sequence: Synthetic oligonucleotide
cuagcauggcccuauccug

SEQ ID NO: 2229590 - RNA, 19 nt, Artificial Sequence
  Description of Artificial Sequence: Synthetic oligonucleotide
agaagcucagagcaaguau

SEQ ID NO: 2229591 - RNA, 19 nt, Artificial Sequence
  Description of Artificial Sequence: Synthetic oligonucleotide
guccacaucaaacugccuc

SEQ ID NO: 2229592 - RNA, 19 nt, Artificial Sequence
  Description of Artificial Sequence: Synthetic oligonucleotide
aaguaggaagauauuuaca

SEQ ID NO: 2229593 - RNA, 19 nt, Artificial Sequence
  Description of Artificial Sequence: Synthetic oligonucleotide
agucauaacucuccuuggu

SEQ ID NO: 2229594 - RNA, 19 nt, Artificial Sequence
  Description of Artificial Sequence: Synthetic oligonucleotide
uuuuguaaugaaguccaau

SEQ ID NO: 2229595 - RNA, 19 nt, Artificial Sequence
  Description of Artificial Sequence: Synthetic oligonucleotide
ccaucagcacaaaugacgg

SEQ ID NO: 2229596 - RNA, 19 nt, Artificial Sequence
  Description of Artificial Sequence: Synthetic oligonucleotide
cuaagcuagccaugucucc

SEQ ID NO: 2229597 - RNA, 19 nt, Artificial Sequence
  Description of Artificial Sequence: Synthetic oligonucleotide
aauuuguguguguguccug

SEQ ID NO: 2229598 - RNA, 19 nt, Artificial Sequence
  Description of Artificial Sequence: Synthetic oligonucleotide
uuuccuggcaccagcaguu

SEQ ID NO: 2229599 - RNA, 19 nt, Artificial Sequence
  Description of Artificial Sequence: Synthetic oligonucleotide
aauuuagccggcaggcugu

SEQ ID NO: 2229600 - RNA, 19 nt, Artificial Sequence
  Description of Artificial Sequence: Synthetic oligonucleotide
agauucucaucgaagucuc

SEQ ID NO: 2229601 - RNA, 19 nt, Artificial Sequence
  Description of Artificial Sequence: Synthetic oligonucleotide
cugcaaacuaaguauauua

SEQ ID NO: 2229602 - RNA, 19 nt, Artificial Sequence
  Description of Artificial Sequence: Synthetic oligonucleotide
uauccuguaugauggacuu

SEQ ID NO: 2229603 - RNA, 19 nt, Artificial Sequence
  Description of Artificial Sequence: Synthetic oligonucleotide
ggcauuauaugccccagug

SEQ ID NO: 2229604 - RNA, 19 nt, Artificial Sequence
  Description of Artificial Sequence: Synthetic oligonucleotide
acuuccuuucaaagaaaac

SEQ ID NO: 2229605 - RNA, 19 nt, Artificial Sequence
  Description of Artificial Sequence: Synthetic oligonucleotide
acguaagugaccacuguag

SEQ ID NO: 2229606 - RNA, 19 nt, Artificial Sequence
  Description of Artificial Sequence: Synthetic oligonucleotide
uccuuucaaagaaaacaua

SEQ ID NO: 2229607 - RNA, 19 nt, Artificial Sequence
  Description of Artificial Sequence: Synthetic oligonucleotide
uucuagcauggcccuaucc

SEQ ID NO: 2229608 - RNA, 19 nt, Artificial Sequence
  Description of Artificial Sequence: Synthetic oligonucleotide
caauuaccaaguaggaaga

SEQ ID NO: 2229609 - RNA, 19 nt, Artificial Sequence
  Description of Artificial Sequence: Synthetic oligonucleotide
agacaagccuagcuuaaga

SEQ ID NO: 2229610 - RNA, 19 nt, Artificial Sequence
  Description of Artificial Sequence: Synthetic oligonucleotide
gugaucaagacaagccuag

SEQ ID NO: 2229611 - RNA, 19 nt, Artificial Sequence
  Description of Artificial Sequence: Synthetic oligonucleotide
auggaucagaccaaucuug

SEQ ID NO: 2229612 - RNA, 19 nt, Artificial Sequence
  Description of Artificial Sequence: Synthetic oligonucleotide
uggugcaaagguuuccagu

SEQ ID NO: 2229613 - RNA, 19 nt, Artificial Sequence
  Description of Artificial Sequence: Synthetic oligonucleotide
gaauaauauuuguuuccaa

SEQ ID NO: 2229614 - RNA, 19 nt, Artificial Sequence
  Description of Artificial Sequence: Synthetic oligonucleotide
ugccuuuaaguguuuaauu

SEQ ID NO: 2229615 - RNA, 19 nt, Artificial Sequence
  Description of Artificial Sequence: Synthetic oligonucleotide
ggaaccuggguuaauguag

SEQ ID NO: 2229616 - RNA, 19 nt, Artificial Sequence
  Description of Artificial Sequence: Synthetic oligonucleotide
acaagccuagcuuaagauu

SEQ ID NO: 2229617 - RNA, 19 nt, Artificial Sequence
  Description of Artificial Sequence: Synthetic oligonucleotide
uguggacgucaccagccag

SEQ ID NO: 2229618 - RNA, 19 nt, Artificial Sequence
  Description of Artificial Sequence: Synthetic oligonucleotide
aaggcauuauaugccccag

SEQ ID NO: 2229619 - RNA, 19 nt, Artificial Sequence
  Description of Artificial Sequence: Synthetic oligonucleotide
acuugguguccauggauca

SEQ ID NO: 2229620 - RNA, 19 nt, Artificial Sequence
  Description of Artificial Sequence: Synthetic oligonucleotide
uccaauuaccaaguaggaa

SEQ ID NO: 2229621 - RNA, 19 nt, Artificial Sequence
  Description of Artificial Sequence: Synthetic oligonucleotide
auauuauaguuuacaagaa

SEQ ID NO: 2229622 - RNA, 19 nt, Artificial Sequence
  Description of Artificial Sequence: Synthetic oligonucleotide
ugacgucaucuccaauaag

SEQ ID NO: 2229623 - RNA, 19 nt, Artificial Sequence
  Description of Artificial Sequence: Synthetic oligonucleotide
cugccccacagucacaacc

SEQ ID NO: 2229624 - RNA, 19 nt, Artificial Sequence
  Description of Artificial Sequence: Synthetic oligonucleotide
aaucuugaacugccccaca

SEQ ID NO: 2229625 - RNA, 19 nt, Artificial Sequence
  Description of Artificial Sequence: Synthetic oligonucleotide
augcacuaguuuuguaaug

SEQ ID NO: 2229626 - RNA, 19 nt, Artificial Sequence
  Description of Artificial Sequence: Synthetic oligonucleotide
acaaccuucuguucuggau

SEQ ID NO: 2229627 - RNA, 19 nt, Artificial Sequence
  Description of Artificial Sequence: Synthetic oligonucleotide
gucaccacgaaagccgccg

SEQ ID NO: 2229628 - RNA, 19 nt, Artificial Sequence
  Description of Artificial Sequence: Synthetic oligonucleotide
ucguucuacuuugacguca

SEQ ID NO: 2229629 - RNA, 19 nt, Artificial Sequence
  Description of Artificial Sequence: Synthetic oligonucleotide
agugaccacuguagaagcc

SEQ ID NO: 2229630 - RNA, 19 nt, Artificial Sequence
  Description of Artificial Sequence: Synthetic oligonucleotide
uguacucaauucguucuac

SEQ ID NO: 2229631 - RNA, 19 nt, Artificial Sequence
  Description of Artificial Sequence: Synthetic oligonucleotide
uguugcaccggugugggau

SEQ ID NO: 2229632 - RNA, 19 nt, Artificial Sequence
  Description of Artificial Sequence: Synthetic oligonucleotide
gcauuauaugccccagugg

SEQ ID NO: 2229633 - RNA, 19 nt, Artificial Sequence
  Description of Artificial Sequence: Synthetic oligonucleotide
auguagaauuuauuuucau

SEQ ID NO: 2229634 - RNA, 19 nt, Artificial Sequence
  Description of Artificial Sequence: Synthetic oligonucleotide
gaucaagacaagccuagcu

SEQ ID NO: 2229635 - RNA, 19 nt, Artificial Sequence
  Description of Artificial Sequence: Synthetic oligonucleotide
uuuucuagcauggcccuau

SEQ ID NO: 2229636 - RNA, 19 nt, Artificial Sequence
  Description of Artificial Sequence: Synthetic oligonucleotide
auuuguguguguguccuga

SEQ ID NO: 2229637 - RNA, 19 nt, Artificial Sequence
  Description of Artificial Sequence: Synthetic oligonucleotide
cugagauaagaauguccac

SEQ ID NO: 2229638 - RNA, 19 nt, Artificial Sequence
  Description of Artificial Sequence: Synthetic oligonucleotide
guaagugaccacuguagaa

SEQ ID NO: 2229639 - RNA, 19 nt, Artificial Sequence
  Description of Artificial Sequence: Synthetic oligonucleotide
cagaccaaucuugaacugc

SEQ ID NO: 2229640 - RNA, 19 nt, Artificial Sequence
  Description of Artificial Sequence: Synthetic oligonucleotide
uagcauggcccuauccugu

SEQ ID NO: 2229641 - RNA, 19 nt, Artificial Sequence
  Description of Artificial Sequence: Synthetic oligonucleotide
uggguuaauguagaauuua

SEQ ID NO: 2229642 - RNA, 19 nt, Artificial Sequence
  Description of Artificial Sequence: Synthetic oligonucleotide
ucaucgaagucuccucuua

SEQ ID NO: 2229643 - RNA, 19 nt, Artificial Sequence
  Description of Artificial Sequence: Synthetic oligonucleotide
ccuaacaccaacaccaaca

SEQ ID NO: 2229644 - RNA, 19 nt, Artificial Sequence
  Description of Artificial Sequence: Synthetic oligonucleotide
uuguacucaauucguucua

SEQ ID NO: 2229645 - RNA, 19 nt, Artificial Sequence
  Description of Artificial Sequence: Synthetic oligonucleotide
uucucaucgaagucuccuc

SEQ ID NO: 2229646 - RNA, 19 nt, Artificial Sequence
  Description of Artificial Sequence: Synthetic oligonucleotide
caauucguucuacuuugac

SEQ ID NO: 2229647 - RNA, 19 nt, Artificial Sequence
  Description of Artificial Sequence: Synthetic oligonucleotide
cagaucuccuaacaccaac

SEQ ID NO: 2229648 - RNA, 19 nt, Artificial Sequence
  Description of Artificial Sequence: Synthetic oligonucleotide
aagcucagagcaaguaugu

SEQ ID NO: 2229649 - RNA, 19 nt, Artificial Sequence
  Description of Artificial Sequence: Synthetic oligonucleotide
ggaauaauauuuguuucca

SEQ ID NO: 2229650 - RNA, 19 nt, Artificial Sequence
  Description of Artificial Sequence: Synthetic oligonucleotide
cuucguucagucaccacga

SEQ ID NO: 2229651 - RNA, 19 nt, Artificial Sequence
  Description of Artificial Sequence: Synthetic oligonucleotide
cggaauaauauuuguuucc

SEQ ID NO: 2229652 - RNA, 19 nt, Artificial Sequence
  Description of Artificial Sequence: Synthetic oligonucleotide
acgauguggacgucaccag

SEQ ID NO: 2229653 - RNA, 19 nt, Artificial Sequence
  Description of Artificial Sequence: Synthetic oligonucleotide
ucguucagucaccacgaaa

SEQ ID NO: 2229654 - RNA, 19 nt, Artificial Sequence
  Description of Artificial Sequence: Synthetic oligonucleotide
ucagagcaaguauguauua

SEQ ID NO: 2229655 - RNA, 19 nt, Artificial Sequence
  Description of Artificial Sequence: Synthetic oligonucleotide
ugauacaacugugugccuu

SEQ ID NO: 2229656 - RNA, 19 nt, Artificial Sequence
  Description of Artificial Sequence: Synthetic oligonucleotide
uugguaagguaaacauuua

SEQ ID NO: 2229657 - RNA, 19 nt, Artificial Sequence
  Description of Artificial Sequence: Synthetic oligonucleotide
aauuaccaaguaggaagau

SEQ ID NO: 2229658 - RNA, 19 nt, Artificial Sequence
  Description of Artificial Sequence: Synthetic oligonucleotide
gcccuauccuguaugaugg

SEQ ID NO: 2229659 - RNA, 19 nt, Artificial Sequence
  Description of Artificial Sequence: Synthetic oligonucleotide
aagaagcucagagcaagua

SEQ ID NO: 2229660 - RNA, 19 nt, Artificial Sequence
  Description of Artificial Sequence: Synthetic oligonucleotide
ugaauuuagccggcaggcu

SEQ ID NO: 2229661 - RNA, 19 nt, Artificial Sequence
  Description of Artificial Sequence: Synthetic oligonucleotide
uuacgauguggacgucacc

SEQ ID NO: 2229662 - RNA, 19 nt, Artificial Sequence
  Description of Artificial Sequence: Synthetic oligonucleotide
gacguaagugaccacugua

SEQ ID NO: 2229663 - RNA, 19 nt, Artificial Sequence
  Description of Artificial Sequence: Synthetic oligonucleotide
ugaucaagacaagccuagc

SEQ ID NO: 2229664 - RNA, 19 nt, Artificial Sequence
  Description of Artificial Sequence: Synthetic oligonucleotide
accggugugggaugugcag

SEQ ID NO: 2229665 - RNA, 19 nt, Artificial Sequence
  Description of Artificial Sequence: Synthetic oligonucleotide
cauggcccuauccuguaug

SEQ ID NO: 2229666 - RNA, 19 nt, Artificial Sequence
  Description of Artificial Sequence: Synthetic oligonucleotide
caucgaagucuccucuuac

SEQ ID NO: 2229667 - RNA, 19 nt, Artificial Sequence
  Description of Artificial Sequence: Synthetic oligonucleotide
agaucuccuaacaccaaca

SEQ ID NO: 2229668 - RNA, 19 nt, Artificial Sequence
  Description of Artificial Sequence: Synthetic oligonucleotide
cuguucuggauaauucaga

SEQ ID NO: 2229669 - RNA, 19 nt, Artificial Sequence
  Description of Artificial Sequence: Synthetic oligonucleotide
aguggcggaaccuggguua

SEQ ID NO: 2229670 - RNA, 19 nt, Artificial Sequence
  Description of Artificial Sequence: Synthetic oligonucleotide
uggacgucaccagccagag

SEQ ID NO: 2229671 - RNA, 19 nt, Artificial Sequence
  Description of Artificial Sequence: Synthetic oligonucleotide
agacguaagugaccacugu

SEQ ID NO: 2229672 - RNA, 19 nt, Artificial Sequence
  Description of Artificial Sequence: Synthetic oligonucleotide
auagaaauucuggauucuu

SEQ ID NO: 2229673 - RNA, 19 nt, Artificial Sequence
  Description of Artificial Sequence: Synthetic oligonucleotide
gauagacguaagugaccac

SEQ ID NO: 2229674 - RNA, 19 nt, Artificial Sequence
  Description of Artificial Sequence: Synthetic oligonucleotide
ugguguccauggaucagac

SEQ ID NO: 2229675 - RNA, 19 nt, Artificial Sequence
  Description of Artificial Sequence: Synthetic oligonucleotide
ugucaccgggcuucguuca

SEQ ID NO: 2229676 - RNA, 19 nt, Artificial Sequence
  Description of Artificial Sequence: Synthetic oligonucleotide
ggcccuauccuguaugaug

SEQ ID NO: 2229677 - RNA, 19 nt, Artificial Sequence
  Description of Artificial Sequence: Synthetic oligonucleotide
agugaucaagacaagccua

SEQ ID NO: 2229678 - RNA, 19 nt, Artificial Sequence
  Description of Artificial Sequence: Synthetic oligonucleotide
ggauaauucagauucucau

SEQ ID NO: 2229679 - RNA, 19 nt, Artificial Sequence
  Description of Artificial Sequence: Synthetic oligonucleotide
cauccugucaccgggcuuc

SEQ ID NO: 2229680 - RNA, 19 nt, Artificial Sequence
  Description of Artificial Sequence: Synthetic oligonucleotide
uccuuggugcaaagguuuc

SEQ ID NO: 2229681 - RNA, 19 nt, Artificial Sequence
  Description of Artificial Sequence: Synthetic oligonucleotide
gaaccuggguuaauguaga

SEQ ID NO: 2229682 - RNA, 19 nt, Artificial Sequence
  Description of Artificial Sequence: Synthetic oligonucleotide
auaagcugauagacguaag

SEQ ID NO: 2229683 - RNA, 19 nt, Artificial Sequence
  Description of Artificial Sequence: Synthetic oligonucleotide
acgucaucuccaauaagcu

SEQ ID NO: 2229684 - RNA, 19 nt, Artificial Sequence
  Description of Artificial Sequence: Synthetic oligonucleotide
auggcccuauccuguauga

SEQ ID NO: 2229685 - RNA, 19 nt, Artificial Sequence
  Description of Artificial Sequence: Synthetic oligonucleotide
caaaugacggaauaauauu

SEQ ID NO: 2229686 - RNA, 19 nt, Artificial Sequence
  Description of Artificial Sequence: Synthetic oligonucleotide
gcaaacuaaguauauuaua

SEQ ID NO: 2229687 - RNA, 19 nt, Artificial Sequence
  Description of Artificial Sequence: Synthetic oligonucleotide
caacauccugucaccgggc

SEQ ID NO: 2229688 - RNA, 19 nt, Artificial Sequence
  Description of Artificial Sequence: Synthetic oligonucleotide
cuauccuguaugauggacu

SEQ ID NO: 2229689 - RNA, 19 nt, Artificial Sequence
  Description of Artificial Sequence: Synthetic oligonucleotide
uagaagccuggauauccau

SEQ ID NO: 2229690 - RNA, 19 nt, Artificial Sequence
  Description of Artificial Sequence: Synthetic oligonucleotide
aguauguauuaaacagaga

SEQ ID NO: 2229691 - RNA, 19 nt, Artificial Sequence
  Description of Artificial Sequence: Synthetic oligonucleotide
ucaccacgaaagccgccgc

SEQ ID NO: 2229692 - RNA, 19 nt, Artificial Sequence
  Description of Artificial Sequence: Synthetic oligonucleotide
cauuuuagugcaaaauauu

SEQ ID NO: 2229693 - RNA, 19 nt, Artificial Sequence
  Description of Artificial Sequence: Synthetic oligonucleotide
ccaauaagcugauagacgu

SEQ ID NO: 2229694 - RNA, 19 nt, Artificial Sequence
  Description of Artificial Sequence: Synthetic oligonucleotide
agggcuaagcuagccaugu

SEQ ID NO: 2229695 - RNA, 19 nt, Artificial Sequence
  Description of Artificial Sequence: Synthetic oligonucleotide
gugggaugugcagaucucc

SEQ ID NO: 2229696 - RNA, 19 nt, Artificial Sequence
  Description of Artificial Sequence: Synthetic oligonucleotide
aaccuggguuaauguagaa

SEQ ID NO: 2229697 - RNA, 19 nt, Artificial Sequence
  Description of Artificial Sequence: Synthetic oligonucleotide
acugcaaacuaaguauauu

SEQ ID NO: 2229698 - RNA, 19 nt, Artificial Sequence
  Description of Artificial Sequence: Synthetic oligonucleotide
cuugguguccauggaucag

SEQ ID NO: 2229699 - RNA, 19 nt, Artificial Sequence
  Description of Artificial Sequence: Synthetic oligonucleotide
caaccuucuguucuggaua

SEQ ID NO: 2229700 - RNA, 19 nt, Artificial Sequence
  Description of Artificial Sequence: Synthetic oligonucleotide
ucuccccauggaauaacuu

SEQ ID NO: 2229701 - RNA, 19 nt, Artificial Sequence
  Description of Artificial Sequence: Synthetic oligonucleotide
uucguucuacuuugacguc

SEQ ID NO: 2229702 - RNA, 19 nt, Artificial Sequence
  Description of Artificial Sequence: Synthetic oligonucleotide
caugucuccccauggaaua

SEQ ID NO: 2229703 - RNA, 19 nt, Artificial Sequence
  Description of Artificial Sequence: Synthetic oligonucleotide
cuuggugcaaagguuucca

SEQ ID NO: 2229704 - RNA, 19 nt, Artificial Sequence
  Description of Artificial Sequence: Synthetic oligonucleotide
cugucaccgggcuucguuc

SEQ ID NO: 2229705 - RNA, 19 nt, Artificial Sequence
  Description of Artificial Sequence: Synthetic oligonucleotide
guugcaccggugugggaug

SEQ ID NO: 2229706 - RNA, 19 nt, Artificial Sequence
  Description of Artificial Sequence: Synthetic oligonucleotide
aggcauuauaugccccagu

SEQ ID NO: 2229707 - RNA, 19 nt, Artificial Sequence
  Description of Artificial Sequence: Synthetic oligonucleotide
auguggacgucaccagcca

SEQ ID NO: 2229708 - RNA, 19 nt, Artificial Sequence
  Description of Artificial Sequence: Synthetic oligonucleotide
cagugcagagaaugugcug

SEQ ID NO: 2229709 - RNA, 19 nt, Artificial Sequence
  Description of Artificial Sequence: Synthetic oligonucleotide
cauauacugcaaacuaagu

SEQ ID NO: 2229710 - RNA, 19 nt, Artificial Sequence
  Description of Artificial Sequence: Synthetic oligonucleotide
caccaacauccugucaccg

SEQ ID NO: 2229711 - RNA, 19 nt, Artificial Sequence
  Description of Artificial Sequence: Synthetic oligonucleotide
uaccaaguaggaagauauu

SEQ ID NO: 2229712 - RNA, 19 nt, Artificial Sequence
  Description of Artificial Sequence: Synthetic oligonucleotide
agccaugucuccccaugga

SEQ ID NO: 2229713 - RNA, 19 nt, Artificial Sequence
  Description of Artificial Sequence: Synthetic oligonucleotide
caugcacuaguuuuguaau

SEQ ID NO: 2229714 - RNA, 19 nt, Artificial Sequence
  Description of Artificial Sequence: Synthetic oligonucleotide
gaccaaucuugaacugccc

SEQ ID NO: 2229715 - RNA, 19 nt, Artificial Sequence
  Description of Artificial Sequence: Synthetic oligonucleotide
gauauccaucagcacaaau

SEQ ID NO: 2229716 - RNA, 19 nt, Artificial Sequence
  Description of Artificial Sequence: Synthetic oligonucleotide
uuucuagcauggcccuauc

SEQ ID NO: 2229717 - RNA, 19 nt, Artificial Sequence
  Description of Artificial Sequence: Synthetic oligonucleotide
gugugggaugugcagaucu

SEQ ID NO: 2229718 - RNA, 19 nt, Artificial Sequence
  Description of Artificial Sequence: Synthetic oligonucleotide
guccaauuaccaaguagga

SEQ ID NO: 2229719 - RNA, 19 nt, Artificial Sequence
  Description of Artificial Sequence: Synthetic oligonucleotide
gauacaacugugugccuuu

SEQ ID NO: 2229720 - RNA, 19 nt, Artificial Sequence
  Description of Artificial Sequence: Synthetic oligonucleotide
cagauucucaucgaagucu

SEQ ID NO: 2229721 - RNA, 19 nt, Artificial Sequence
  Description of Artificial Sequence: Synthetic oligonucleotide
ggaugugcagaucuccuaa

SEQ ID NO: 2229722 - RNA, 19 nt, Artificial Sequence
  Description of Artificial Sequence: Synthetic oligonucleotide
acugccccacagucacaac

SEQ ID NO: 2229723 - RNA, 19 nt, Artificial Sequence
  Description of Artificial Sequence: Synthetic oligonucleotide
ugucuccccauggaauaac

SEQ ID NO: 2229724 - RNA, 19 nt, Artificial Sequence
  Description of Artificial Sequence: Synthetic oligonucleotide
cuccucuuacgauguggac

SEQ ID NO: 2229725 - RNA, 19 nt, Artificial Sequence
  Description of Artificial Sequence: Synthetic oligonucleotide
uucguucagucaccacgaa

SEQ ID NO: 2229726 - RNA, 19 nt, Artificial Sequence
  Description of Artificial Sequence: Synthetic oligonucleotide
accuggguuaauguagaau

SEQ ID NO: 2229727 - RNA, 19 nt, Artificial Sequence
  Description of Artificial Sequence: Synthetic oligonucleotide
gaaguccaauuaccaagua

SEQ ID NO: 2229728 - RNA, 19 nt, Artificial Sequence
  Description of Artificial Sequence: Synthetic oligonucleotide
cagggcuaagcuagccaug

SEQ ID NO: 2229729 - RNA, 19 nt, Artificial Sequence
  Description of Artificial Sequence: Synthetic oligonucleotide
gcuguugcaccgguguggg

SEQ ID NO: 2229730 - RNA, 19 nt, Artificial Sequence
  Description of Artificial Sequence: Synthetic oligonucleotide
ccauggaauaacuuggugu

SEQ ID NO: 2229731 - RNA, 19 nt, Artificial Sequence
  Description of Artificial Sequence: Synthetic oligonucleotide
ggcuaagcuagccaugucu

SEQ ID NO: 2229732 - RNA, 19 nt, Artificial Sequence
  Description of Artificial Sequence: Synthetic oligonucleotide
caccacgaaagccgccgcc

SEQ ID NO: 2229733 - RNA, 19 nt, Artificial Sequence
  Description of Artificial Sequence: Synthetic oligonucleotide
gcuaagcuagccaugucuc

SEQ ID NO: 2229734 - RNA, 19 nt, Artificial Sequence
  Description of Artificial Sequence: Synthetic oligonucleotide
ccaaggcauuauaugcccc

SEQ ID NO: 2229735 - RNA, 19 nt, Artificial Sequence
  Description of Artificial Sequence: Synthetic oligonucleotide
agucuccucuuacgaugug

SEQ ID NO: 2229736 - RNA, 19 nt, Artificial Sequence
  Description of Artificial Sequence: Synthetic oligonucleotide
cacagucacaaccuucugu

SEQ ID NO: 2229737 - RNA, 19 nt, Artificial Sequence
  Description of Artificial Sequence: Synthetic oligonucleotide
agcuagccaugucucccca

SEQ ID NO: 2229738 - RNA, 19 nt, Artificial Sequence
  Description of Artificial Sequence: Synthetic oligonucleotide
gguaagguaaacauuuauu

SEQ ID NO: 2229739 - RNA, 19 nt, Artificial Sequence
  Description of Artificial Sequence: Synthetic oligonucleotide
ccuggguuaauguagaauu

SEQ ID NO: 2229740 - RNA, 19 nt, Artificial Sequence
  Description of Artificial Sequence: Synthetic oligonucleotide
caucagcacaaaugacgga

SEQ ID NO: 2229741 - RNA, 19 nt, Artificial Sequence
  Description of Artificial Sequence: Synthetic oligonucleotide
uagccggcaggcuguugca

SEQ ID NO: 2229742 - RNA, 19 nt, Artificial Sequence
  Description of Artificial Sequence: Synthetic oligonucleotide
ggaagauauuuacaaguuu

SEQ ID NO: 2229743 - RNA, 19 nt, Artificial Sequence
  Description of Artificial Sequence: Synthetic oligonucleotide
aagccuagcuuaagauuuu

SEQ ID NO: 2229744 - RNA, 19 nt, Artificial Sequence
  Description of Artificial Sequence: Synthetic oligonucleotide
gucaccgggcuucguucag

SEQ ID NO: 2229745 - RNA, 19 nt, Artificial Sequence
  Description of Artificial Sequence: Synthetic oligonucleotide
agagaaugugcuggauuuu

SEQ ID NO: 2229746 - RNA, 19 nt, Artificial Sequence
  Description of Artificial Sequence: Synthetic oligonucleotide
cauggaucagaccaaucuu

SEQ ID NO: 2229747 - RNA, 19 nt, Artificial Sequence
  Description of Artificial Sequence: Synthetic oligonucleotide
gguguccauggaucagacc

SEQ ID NO: 2229748 - RNA, 19 nt, Artificial Sequence
  Description of Artificial Sequence: Synthetic oligonucleotide
guggacgucaccagccaga

SEQ ID NO: 2229749 - RNA, 19 nt, Artificial Sequence
  Description of Artificial Sequence: Synthetic oligonucleotide
guguguguccugagauaag

SEQ ID NO: 2229750 - RNA, 19 nt, Artificial Sequence
  Description of Artificial Sequence: Synthetic oligonucleotide
uaugccccaguggcggaac

SEQ ID NO: 2229751 - RNA, 19 nt, Artificial Sequence
  Description of Artificial Sequence: Synthetic oligonucleotide
gugaccacuguagaagccu

SEQ ID NO: 2229752 - RNA, 19 nt, Artificial Sequence
  Description of Artificial Sequence: Synthetic oligonucleotide
ggcggaaccuggguuaaug

SEQ ID NO: 2229753 - RNA, 19 nt, Artificial Sequence
  Description of Artificial Sequence: Synthetic oligonucleotide
caccgggcuucguucaguc

SEQ ID NO: 2229754 - RNA, 19 nt, Artificial Sequence
  Description of Artificial Sequence: Synthetic oligonucleotide
uuuagccggcaggcuguug

SEQ ID NO: 2229755 - RNA, 19 nt, Artificial Sequence
  Description of Artificial Sequence: Synthetic oligonucleotide
guccugagauaagaauguc

SEQ ID NO: 2229756 - RNA, 19 nt, Artificial Sequence
  Description of Artificial Sequence: Synthetic oligonucleotide
cugugugccuuuaaguguu

SEQ ID NO: 2229757 - RNA, 19 nt, Artificial Sequence
  Description of Artificial Sequence: Synthetic oligonucleotide
ccuauccuguaugauggac

SEQ ID NO: 2229758 - RNA, 19 nt, Artificial Sequence
  Description of Artificial Sequence: Synthetic oligonucleotide
cccauggaauaacuuggug

SEQ ID NO: 2229759 - RNA, 19 nt, Artificial Sequence
  Description of Artificial Sequence: Synthetic oligonucleotide
ccauggaucagaccaaucu

SEQ ID NO: 2229760 - RNA, 19 nt, Artificial Sequence
  Description of Artificial Sequence: Synthetic oligonucleotide
agccggcaggcuguugcac

SEQ ID NO: 2229761 - RNA, 19 nt, Artificial Sequence
  Description of Artificial Sequence: Synthetic oligonucleotide
agcauggcccuauccugua

SEQ ID NO: 2229762 - RNA, 19 nt, Artificial Sequence
  Description of Artificial Sequence: Synthetic oligonucleotide
cuguagaagccuggauauc

SEQ ID NO: 2229763 - RNA, 19 nt, Artificial Sequence
  Description of Artificial Sequence: Synthetic oligonucleotide
cauagaaauucuggauucu

SEQ ID NO: 2229764 - RNA, 19 nt, Artificial Sequence
  Description of Artificial Sequence: Synthetic oligonucleotide
gucaccagccagagucuug

SEQ ID NO: 2229765 - RNA, 19 nt, Artificial Sequence
  Description of Artificial Sequence: Synthetic oligonucleotide
ucaccgggcuucguucagu

SEQ ID NO: 2229766 - RNA, 19 nt, Artificial Sequence
  Description of Artificial Sequence: Synthetic oligonucleotide
cuccuaacaccaacaccaa

SEQ ID NO: 2229767 - RNA, 19 nt, Artificial Sequence
  Description of Artificial Sequence: Synthetic oligonucleotide
ggaucagaccaaucuugaa

SEQ ID NO: 2229768 - RNA, 19 nt, Artificial Sequence
  Description of Artificial Sequence: Synthetic oligonucleotide
guuuuguaaugaaguccaa

SEQ ID NO: 2229769 - RNA, 19 nt, Artificial Sequence
  Description of Artificial Sequence: Synthetic oligonucleotide
augucuccccauggaauaa

SEQ ID NO: 2229770 - RNA, 19 nt, Artificial Sequence
  Description of Artificial Sequence: Synthetic oligonucleotide
cuggguuaauguagaauuu

SEQ ID NO: 2229771 - RNA, 19 nt, Artificial Sequence
  Description of Artificial Sequence: Synthetic oligonucleotide
auccugucaccgggcuucg

SEQ ID NO: 2229772 - RNA, 19 nt, Artificial Sequence
  Description of Artificial Sequence: Synthetic oligonucleotide
cccaguggcggaaccuggg

SEQ ID NO: 2229773 - RNA, 19 nt, Artificial Sequence
  Description of Artificial Sequence: Synthetic oligonucleotide
ccggcaggcuguugcaccg

SEQ ID NO: 2229774 - RNA, 19 nt, Artificial Sequence
  Description of Artificial Sequence: Synthetic oligonucleotide
gccggcaggcuguugcacc

SEQ ID NO: 2229775 - RNA, 19 nt, Artificial Sequence
  Description of Artificial Sequence: Synthetic oligonucleotide
caccagccagagucuugag

SEQ ID NO: 2229776 - RNA, 19 nt, Artificial Sequence
  Description of Artificial Sequence: Synthetic oligonucleotide
ccuuggugcaaagguuucc

SEQ ID NO: 2229777 - RNA, 19 nt, Artificial Sequence
  Description of Artificial Sequence: Synthetic oligonucleotide
agcucagagcaaguaugua

SEQ ID NO: 2229778 - RNA, 19 nt, Artificial Sequence
  Description of Artificial Sequence: Synthetic oligonucleotide
gccaugucuccccauggaa

SEQ ID NO: 2229779 - RNA, 19 nt, Artificial Sequence
  Description of Artificial Sequence: Synthetic oligonucleotide
uggcccuauccuguaugau

SEQ ID NO: 2229780 - RNA, 19 nt, Artificial Sequence
  Description of Artificial Sequence: Synthetic oligonucleotide
ggguuaauguagaauuuau

SEQ ID NO: 2229781 - RNA, 19 nt, Artificial Sequence
  Description of Artificial Sequence: Synthetic oligonucleotide
acgucaccagccagagucu

SEQ ID NO: 2229782 - RNA, 19 nt, Artificial Sequence
  Description of Artificial Sequence: Synthetic oligonucleotide
caccggugugggaugugca

SEQ ID NO: 2229783 - RNA, 19 nt, Artificial Sequence
  Description of Artificial Sequence: Synthetic oligonucleotide
gcagggcuaagcuagccau

SEQ ID NO: 2229784 - RNA, 19 nt, Artificial Sequence
  Description of Artificial Sequence: Synthetic oligonucleotide
gggaugugcagaucuccua

SEQ ID NO: 2229785 - RNA, 19 nt, Artificial Sequence
  Description of Artificial Sequence: Synthetic oligonucleotide
gcaccggugugggaugugc

SEQ ID NO: 2229786 - RNA, 19 nt, Artificial Sequence
  Description of Artificial Sequence: Synthetic oligonucleotide
cucaucgaagucuccucuu

SEQ ID NO: 2229787 - RNA, 19 nt, Artificial Sequence
  Description of Artificial Sequence: Synthetic oligonucleotide
auuuagccggcaggcuguu

SEQ ID NO: 2229788 - RNA, 19 nt, Artificial Sequence
  Description of Artificial Sequence: Synthetic oligonucleotide
ggcuucguucagucaccac

SEQ ID NO: 2229789 - RNA, 19 nt, Artificial Sequence
  Description of Artificial Sequence: Synthetic oligonucleotide
gugauacaacugugugccu

SEQ ID NO: 2229790 - RNA, 19 nt, Artificial Sequence
  Description of Artificial Sequence: Synthetic oligonucleotide
gucuccccauggaauaacu

SEQ ID NO: 2229791 - RNA, 19 nt, Artificial Sequence
  Description of Artificial Sequence: Synthetic oligonucleotide
cagccagagucuugagaua

SEQ ID NO: 2229792 - RNA, 19 nt, Artificial Sequence
  Description of Artificial Sequence: Synthetic oligonucleotide
ccacaucaaacugccucug

SEQ ID NO: 2229793 - RNA, 19 nt, Artificial Sequence
  Description of Artificial Sequence: Synthetic oligonucleotide
cgggcuucguucagucacc

SEQ ID NO: 2229794 - RNA, 19 nt, Artificial Sequence
  Description of Artificial Sequence: Synthetic oligonucleotide
ccacagucacaaccuucug

SEQ ID NO: 2229795 - RNA, 19 nt, Artificial Sequence
  Description of Artificial Sequence: Synthetic oligonucleotide
gcggaaccuggguuaaugu

SEQ ID NO: 2229796 - RNA, 19 nt, Artificial Sequence
  Description of Artificial Sequence: Synthetic oligonucleotide
guggcggaaccuggguuaa

SEQ ID NO: 2229797 - RNA, 19 nt, Artificial Sequence
  Description of Artificial Sequence: Synthetic oligonucleotide
gggcuaagcuagccauguc

SEQ ID NO: 2229798 - RNA, 19 nt, Artificial Sequence
  Description of Artificial Sequence: Synthetic oligonucleotide
cuuugacgucaucuccaau

SEQ ID NO: 2229799 - RNA, 19 nt, Artificial Sequence
  Description of Artificial Sequence: Synthetic oligonucleotide
ccaugucuccccauggaau

SEQ ID NO: 2229800 - RNA, 19 nt, Artificial Sequence
  Description of Artificial Sequence: Synthetic oligonucleotide
ggauauccaucagcacaaa

SEQ ID NO: 2229801 - RNA, 19 nt, Artificial Sequence
  Description of Artificial Sequence: Synthetic oligonucleotide
gcagaucuccuaacaccaa

SEQ ID NO: 2229802 - RNA, 19 nt, Artificial Sequence
  Description of Artificial Sequence: Synthetic oligonucleotide
caguggcggaaccuggguu

SEQ ID NO: 2229803 - RNA, 19 nt, Artificial Sequence
  Description of Artificial Sequence: Synthetic oligonucleotide
uggcggaaccuggguuaau

SEQ ID NO: 2229804 - RNA, 19 nt, Artificial Sequence
  Description of Artificial Sequence: Synthetic oligonucleotide
cggaaccuggguuaaugua

SEQ ID NO: 2229805 - RNA, 19 nt, Artificial Sequence
  Description of Artificial Sequence: Synthetic oligonucleotide
cccuauccuguaugaugga

SEQ ID NO: 2229806 - RNA, 19 nt, Artificial Sequence
  Description of Artificial Sequence: Synthetic oligonucleotide
ccggugugggaugugcaga

SEQ ID NO: 2229807 - RNA, 19 nt, Artificial Sequence
  Description of Artificial Sequence: Synthetic oligonucleotide
caucuccaauaagcugaua

SEQ ID NO: 2229808 - RNA, 19 nt, Artificial Sequence
  Description of Artificial Sequence: Synthetic oligonucleotide
gcuagccaugucuccccau

SEQ ID NO: 2229809 - RNA, 19 nt, Artificial Sequence
  Description of Artificial Sequence: Synthetic oligonucleotide
ccugucaccgggcuucguu

SEQ ID NO: 2229810 - RNA, 19 nt, Artificial Sequence
  Description of Artificial Sequence: Synthetic oligonucleotide
ccaguggcggaaccugggu

SEQ ID NO: 2229811 - RNA, 19 nt, Artificial Sequence
  Description of Artificial Sequence: Synthetic oligonucleotide
gcauggcccuauccuguau

SEQ ID NO: 2229812 - RNA, 19 nt, Artificial Sequence
  Description of Artificial Sequence: Synthetic oligonucleotide
ggacgucaccagccagagu

SEQ ID NO: 2229813 - RNA, 19 nt, Artificial Sequence
  Description of Artificial Sequence: Synthetic oligonucleotide
cggugugggaugugcagau

SEQ ID NO: 2229814 - RNA, 19 nt, Artificial Sequence
  Description of Artificial Sequence: Synthetic oligonucleotide
gccccacagucacaaccuu

SEQ ID NO: 2229815 - RNA, 19 nt, Artificial Sequence
  Description of Artificial Sequence: Synthetic oligonucleotide
uuuauuguuauaaacaucg

SEQ ID NO: 2229816 - RNA, 19 nt, Artificial Sequence
  Description of Artificial Sequence: Synthetic oligonucleotide
aaauuuggaagccaguagg

SEQ ID NO: 2229817 - RNA, 19 nt, Artificial Sequence
  Description of Artificial Sequence: Synthetic oligonucleotide
aauggcucugauuuuauuc

SEQ ID NO: 2229818 - RNA, 19 nt, Artificial Sequence
  Description of Artificial Sequence: Synthetic oligonucleotide
aauguuuuaggauaguuaa

SEQ ID NO: 2229819 - RNA, 19 nt, Artificial Sequence
  Description of Artificial Sequence: Synthetic oligonucleotide
ugauuauugauaauaaacu

SEQ ID NO: 2229820 - RNA, 19 nt, Artificial Sequence
  Description of Artificial Sequence: Synthetic oligonucleotide
auaguuaaucuuuaaacuc

SEQ ID NO: 2229821 - RNA, 19 nt, Artificial Sequence
  Description of Artificial Sequence: Synthetic oligonucleotide
auuuccgaauacuuaaucc

SEQ ID NO: 2229822 - RNA, 19 nt, Artificial Sequence
  Description of Artificial Sequence: Synthetic oligonucleotide
  modified_base (9)..(9): a, c, u, g, unknown or other
gaaacugcngguuuaagag

SEQ ID NO: 2229823 - RNA, 19 nt, Artificial Sequence
  Description of Artificial Sequence: Synthetic oligonucleotide
uuuccgaauacuuaauccg

SEQ ID NO: 2229824 - RNA, 19 nt, Artificial Sequence
  Description of Artificial Sequence: Synthetic oligonucleotide
uauuguuauaaacaucgag

SEQ ID NO: 2229825 - RNA, 19 nt, Artificial Sequence
  Description of Artificial Sequence: Synthetic oligonucleotide
auugauaauaaacuguugu

SEQ ID NO: 2229826 - RNA, 19 nt, Artificial Sequence
  Description of Artificial Sequence: Synthetic oligonucleotide
uaaacaucgagguaauuag

SEQ ID NO: 2229827 - RNA, 19 nt, Artificial Sequence
  Description of Artificial Sequence: Synthetic oligonucleotide
agaauauugaccaacaucu

SEQ ID NO: 2229828 - RNA, 19 nt, Artificial Sequence
  Description of Artificial Sequence: Synthetic oligonucleotide
cauauuucaacacugcagc

SEQ ID NO: 2229829 - RNA, 19 nt, Artificial Sequence
  Description of Artificial Sequence: Synthetic oligonucleotide
ucucuuuucgaacugaaga

SEQ ID NO: 2229830 - RNA, 19 nt, Artificial Sequence
  Description of Artificial Sequence: Synthetic oligonucleotide
uuuucauauuucaacacug

SEQ ID NO: 2229831 - RNA, 19 nt, Artificial Sequence
  Description of Artificial Sequence: Synthetic oligonucleotide
aauauugaccaacaucucu

SEQ ID NO: 2229832 - RNA, 19 nt, Artificial Sequence
  Description of Artificial Sequence: Synthetic oligonucleotide
uaguuaaucuuuaaacucc

SEQ ID NO: 2229833 - RNA, 19 nt, Artificial Sequence
  Description of Artificial Sequence: Synthetic oligonucleotide
auauguugagaauauugac

SEQ ID NO: 2229834 - RNA, 19 nt, Artificial Sequence
  Description of Artificial Sequence: Synthetic oligonucleotide
uguaaugagugauggaaag

SEQ ID NO: 2229835 - RNA, 19 nt, Artificial Sequence
  Description of Artificial Sequence: Synthetic oligonucleotide
uaagggaucagaccaaagc

SEQ ID NO: 2229836 - RNA, 19 nt, Artificial Sequence
  Description of Artificial Sequence: Synthetic oligonucleotide
accaaagcaggucacacac

SEQ ID NO: 2229837 - RNA, 19 nt, Artificial Sequence
  Description of Artificial Sequence: Synthetic oligonucleotide
uuguuauaaacaucgaggu

SEQ ID NO: 2229838 - RNA, 19 nt, Artificial Sequence
  Description of Artificial Sequence: Synthetic oligonucleotide
uuuaggauaguuaaucuuu

SEQ ID NO: 2229839 - RNA, 19 nt, Artificial Sequence
  Description of Artificial Sequence: Synthetic oligonucleotide
aaccgaaaagacccgugcc

SEQ ID NO: 2229840 - RNA, 19 nt, Artificial Sequence
  Description of Artificial Sequence: Synthetic oligonucleotide
aguguuguggcuauagugc

SEQ ID NO: 2229841 - RNA, 19 nt, Artificial Sequence
  Description of Artificial Sequence: Synthetic oligonucleotide
caucuaaacaauuaauuuc

SEQ ID NO: 2229842 - RNA, 19 nt, Artificial Sequence
  Description of Artificial Sequence: Synthetic oligonucleotide
aagacagucgaauguguuc

SEQ ID NO: 2229843 - RNA, 19 nt, Artificial Sequence
  Description of Artificial Sequence: Synthetic oligonucleotide
auguugagaauauugacca

SEQ ID NO: 2229844 - RNA, 19 nt, Artificial Sequence
  Description of Artificial Sequence: Synthetic oligonucleotide
aagggaucagaccaaagca

SEQ ID NO: 2229845 - RNA, 19 nt, Artificial Sequence
  Description of Artificial Sequence: Synthetic oligonucleotide
uuucaggugacauuccucc

SEQ ID NO: 2229846 - RNA, 19 nt, Artificial Sequence
  Description of Artificial Sequence: Synthetic oligonucleotide
cuaaacaauuaauuucagg

SEQ ID NO: 2229847 - RNA, 19 nt, Artificial Sequence
  Description of Artificial Sequence: Synthetic oligonucleotide
uaaugagugauggaaagcc

SEQ ID NO: 2229848 - RNA, 19 nt, Artificial Sequence
  Description of Artificial Sequence: Synthetic oligonucleotide
uuguuuucauauuucaaca

SEQ ID NO: 2229849 - RNA, 19 nt, Artificial Sequence
  Description of Artificial Sequence: Synthetic oligonucleotide
aacaucgagguaauuaggg

SEQ ID NO: 2229850 - RNA, 19 nt, Artificial Sequence
  Description of Artificial Sequence: Synthetic oligonucleotide
ugccauacuccucuaaggg

SEQ ID NO: 2229851 - RNA, 19 nt, Artificial Sequence
  Description of Artificial Sequence: Synthetic oligonucleotide
cauccaugaaauuuggaag

SEQ ID NO: 2229852 - RNA, 19 nt, Artificial Sequence
  Description of Artificial Sequence: Synthetic oligonucleotide
aaauucacaaacagcgggg

SEQ ID NO: 2229853 - RNA, 19 nt, Artificial Sequence
  Description of Artificial Sequence: Synthetic oligonucleotide
aauccgacauuccuguuug

SEQ ID NO: 2229854 - RNA, 19 nt, Artificial Sequence
  Description of Artificial Sequence: Synthetic oligonucleotide
  modified_base (7)..(7): a, c, u, g, unknown or other
aacugcngguuuaagagag

SEQ ID NO: 2229855 - RNA, 19 nt, Artificial Sequence
  Description of Artificial Sequence: Synthetic oligonucleotide
  modified_base (10)..(10): a, c, u, g, unknown or other
agaaacugcngguuuaaga

SEQ ID NO: 2229856 - RNA, 19 nt, Artificial Sequence
  Description of Artificial Sequence: Synthetic oligonucleotide
uuaggggcagagaaaauug

SEQ ID NO: 2229857 - RNA, 19 nt, Artificial Sequence
  Description of Artificial Sequence: Synthetic oligonucleotide
  modified_base (19)..(19): a, c, u, g, unknown or other
uguacacagagaaacugcn

SEQ ID NO: 2229858 - RNA, 19 nt, Artificial Sequence
  Description of Artificial Sequence: Synthetic oligonucleotide
ucaucuaaacaauuaauuu

SEQ ID NO: 2229859 - RNA, 19 nt, Artificial Sequence
  Description of Artificial Sequence: Synthetic oligonucleotide
gauaguuaaucuuuaaacu

SEQ ID NO: 2229860 - RNA, 19 nt, Artificial Sequence
  Description of Artificial Sequence: Synthetic oligonucleotide
uguuuuaggauaguuaauc

SEQ ID NO: 2229861 - RNA, 19 nt, Artificial Sequence
  Description of Artificial Sequence: Synthetic oligonucleotide
auuauugauaauaaacugu

SEQ ID NO: 2229862 - RNA, 19 nt, Artificial Sequence
  Description of Artificial Sequence: Synthetic oligonucleotide
aaugagugauggaaagccc

SEQ ID NO: 2229863 - RNA, 19 nt, Artificial Sequence
  Description of Artificial Sequence: Synthetic oligonucleotide
ggauaguuaaucuuuaaac

SEQ ID NO: 2229864 - RNA, 19 nt, Artificial Sequence
  Description of Artificial Sequence: Synthetic oligonucleotide
aggguuagcacacucucac

SEQ ID NO: 2229865 - RNA, 19 nt, Artificial Sequence
  Description of Artificial Sequence: Synthetic oligonucleotide
uguacauucgguacccagc

SEQ ID NO: 2229866 - RNA, 19 nt, Artificial Sequence
  Description of Artificial Sequence: Synthetic oligonucleotide
aauuuggaagccaguaggg

SEQ ID NO: 2229867 - RNA, 19 nt, Artificial Sequence
  Description of Artificial Sequence: Synthetic oligonucleotide
uccaacgaaaggcaaagac

SEQ ID NO: 2229868 - RNA, 19 nt, Artificial Sequence
  Description of Artificial Sequence: Synthetic oligonucleotide
guucauacacgcuucauac

SEQ ID NO: 2229869 - RNA, 19 nt, Artificial Sequence
  Description of Artificial Sequence: Synthetic oligonucleotide
ugauaauaaacuguuguuc

SEQ ID NO: 2229870 - RNA, 19 nt, Artificial Sequence
  Description of Artificial Sequence: Synthetic oligonucleotide
aauuucaggugacauuccu

SEQ ID NO: 2229871 - RNA, 19 nt, Artificial Sequence
  Description of Artificial Sequence: Synthetic oligonucleotide
ucuaaacaauuaauuucag

SEQ ID NO: 2229872 - RNA, 19 nt, Artificial Sequence
  Description of Artificial Sequence: Synthetic oligonucleotide
uugaccaacaucucuguga

SEQ ID NO: 2229873 - RNA, 19 nt, Artificial Sequence
  Description of Artificial Sequence: Synthetic oligonucleotide
cucuuuucgaacugaagag

SEQ ID NO: 2229874 - RNA, 19 nt, Artificial Sequence
  Description of Artificial Sequence: Synthetic oligonucleotide
aucuaaacaauuaauuuca

SEQ ID NO: 2229875 - RNA, 19 nt, Artificial Sequence
  Description of Artificial Sequence: Synthetic oligonucleotide
caucgagguaauuaggggc

SEQ ID NO: 2229876 - RNA, 19 nt, Artificial Sequence
  Description of Artificial Sequence: Synthetic oligonucleotide
auuguaaugagugauggaa

SEQ ID NO: 2229877 - RNA, 19 nt, Artificial Sequence
  Description of Artificial Sequence: Synthetic oligonucleotide
uauugauaauaaacuguug

SEQ ID NO: 2229878 - RNA, 19 nt, Artificial Sequence
  Description of Artificial Sequence: Synthetic oligonucleotide
ugacauuccuccauguaca

SEQ ID NO: 2229879 - RNA, 19 nt, Artificial Sequence
  Description of Artificial Sequence: Synthetic oligonucleotide
aauuaauuucaggugacau

SEQ ID NO: 2229880 - RNA, 19 nt, Artificial Sequence
  Description of Artificial Sequence: Synthetic oligonucleotide
cuuuucgaacugaagagac

SEQ ID NO: 2229881 - RNA, 19 nt, Artificial Sequence
  Description of Artificial Sequence: Synthetic oligonucleotide
aaaccuaucuaauuuccuu

SEQ ID NO: 2229882 - RNA, 19 nt, Artificial Sequence
  Description of Artificial Sequence: Synthetic oligonucleotide
acauucgguacccagcauc

SEQ ID NO: 2229883 - RNA, 19 nt, Artificial Sequence
  Description of Artificial Sequence: Synthetic oligonucleotide
uguuuucauauuucaacac

SEQ ID NO: 2229884 - RNA, 19 nt, Artificial Sequence
  Description of Artificial Sequence: Synthetic oligonucleotide
uuuggaagccaguaggggu

SEQ ID NO: 2229885 - RNA, 19 nt, Artificial Sequence
  Description of Artificial Sequence: Synthetic oligonucleotide
aaagacccgugccauuuuc

SEQ ID NO: 2229886 - RNA, 19 nt, Artificial Sequence
  Description of Artificial Sequence: Synthetic oligonucleotide
aaacaauguuuuaggauag

SEQ ID NO: 2229887 - RNA, 19 nt, Artificial Sequence
  Description of Artificial Sequence: Synthetic oligonucleotide
aaaagcaggagguucggua

SEQ ID NO: 2229888 - RNA, 19 nt, Artificial Sequence
  Description of Artificial Sequence: Synthetic oligonucleotide
uaagaugccugcauucaug

SEQ ID NO: 2229889 - RNA, 19 nt, Artificial Sequence
  Description of Artificial Sequence: Synthetic oligonucleotide
aauuguaaugagugaugga

SEQ ID NO: 2229890 - RNA, 19 nt, Artificial Sequence
  Description of Artificial Sequence: Synthetic oligonucleotide
ugucaucuaaacaauuaau

SEQ ID NO: 2229891 - RNA, 19 nt, Artificial Sequence
  Description of Artificial Sequence: Synthetic oligonucleotide
aagaugccugcauucauga

SEQ ID NO: 2229892 - RNA, 19 nt, Artificial Sequence
  Description of Artificial Sequence: Synthetic oligonucleotide
uugaugaucucuuuucgaa

SEQ ID NO: 2229893 - RNA, 19 nt, Artificial Sequence
  Description of Artificial Sequence: Synthetic oligonucleotide
uuccuuaugucaucuaaac

SEQ ID NO: 2229894 - RNA, 19 nt, Artificial Sequence
  Description of Artificial Sequence: Synthetic oligonucleotide
ugaccaacaucucugugac

SEQ ID NO: 2229895 - RNA, 19 nt, Artificial Sequence
  Description of Artificial Sequence: Synthetic oligonucleotide
ugaagagacuccuucugug

SEQ ID NO: 2229896 - RNA, 19 nt, Artificial Sequence
  Description of Artificial Sequence: Synthetic oligonucleotide
uugauaauaaacuguuguu

SEQ ID NO: 2229897 - RNA, 19 nt, Artificial Sequence
  Description of Artificial Sequence: Synthetic oligonucleotide
uuuuaggauaguuaaucuu

SEQ ID NO: 2229898 - RNA, 19 nt, Artificial Sequence
  Description of Artificial Sequence: Synthetic oligonucleotide
  modified_base (8)..(8): a, c, u, g, unknown or other
aaacugcngguuuaagaga

SEQ ID NO: 2229899 - RNA, 19 nt, Artificial Sequence
  Description of Artificial Sequence: Synthetic oligonucleotide
ucugauuauugauaauaaa

SEQ ID NO: 2229900 - RNA, 19 nt, Artificial Sequence
  Description of Artificial Sequence: Synthetic oligonucleotide
uuccgaauacuuaauccga

SEQ ID NO: 2229901 - RNA, 19 nt, Artificial Sequence
  Description of Artificial Sequence: Synthetic oligonucleotide
uuucgaacugaagagacuc

SEQ ID NO: 2229902 - RNA, 19 nt, Artificial Sequence
  Description of Artificial Sequence: Synthetic oligonucleotide
cgaagaaccgaaaagaccc

SEQ ID NO: 2229903 - RNA, 19 nt, Artificial Sequence
  Description of Artificial Sequence: Synthetic oligonucleotide
ggagugaggcccuugaggg

SEQ ID NO: 2229904 - RNA, 19 nt, Artificial Sequence
  Description of Artificial Sequence: Synthetic oligonucleotide
aaacaucgagguaauuagg

SEQ ID NO: 2229905 - RNA, 19 nt, Artificial Sequence
  Description of Artificial Sequence: Synthetic oligonucleotide
ucauacaccauuuccgaau

SEQ ID NO: 2229906 - RNA, 19 nt, Artificial Sequence
  Description of Artificial Sequence: Synthetic oligonucleotide
aaccuaucuaauuuccuua

SEQ ID NO: 2229907 - RNA, 19 nt, Artificial Sequence
  Description of Artificial Sequence: Synthetic oligonucleotide
aagaccacgugaaaacauc

SEQ ID NO: 2229908 - RNA, 19 nt, Artificial Sequence
  Description of Artificial Sequence: Synthetic oligonucleotide
uccuuaugucaucuaaaca

SEQ ID NO: 2229909 - RNA, 19 nt, Artificial Sequence
  Description of Artificial Sequence: Synthetic oligonucleotide
agacccgugccauuuuccc

SEQ ID NO: 2229910 - RNA, 19 nt, Artificial Sequence
  Description of Artificial Sequence: Synthetic oligonucleotide
caugauuuccucgaagcag

SEQ ID NO: 2229911 - RNA, 19 nt, Artificial Sequence
  Description of Artificial Sequence: Synthetic oligonucleotide
uuauuguuauaaacaucga

SEQ ID NO: 2229912 - RNA, 19 nt, Artificial Sequence
  Description of Artificial Sequence: Synthetic oligonucleotide
auggcucugauuuuauucu

SEQ ID NO: 2229913 - RNA, 19 nt, Artificial Sequence
  Description of Artificial Sequence: Synthetic oligonucleotide
uguucauacacgcuucaua

SEQ ID NO: 2229914 - RNA, 19 nt, Artificial Sequence
  Description of Artificial Sequence: Synthetic oligonucleotide
gaaccgaaaagacccgugc

SEQ ID NO: 2229915 - RNA, 19 nt, Artificial Sequence
  Description of Artificial Sequence: Synthetic oligonucleotide
auauugaccaacaucucug

SEQ ID NO: 2229916 - RNA, 19 nt, Artificial Sequence
  Description of Artificial Sequence: Synthetic oligonucleotide
uuuccuuaugucaucuaaa

SEQ ID NO: 2229917 - RNA, 19 nt, Artificial Sequence
  Description of Artificial Sequence: Synthetic oligonucleotide
uuguaaugagugauggaaa

SEQ ID NO: 2229918 - RNA, 19 nt, Artificial Sequence
  Description of Artificial Sequence: Synthetic oligonucleotide
auuuccuuaugucaucuaa

SEQ ID NO: 2229919 - RNA, 19 nt, Artificial Sequence
  Description of Artificial Sequence: Synthetic oligonucleotide
ucuccaacgaaaggcaaag

SEQ ID NO: 2229920 - RNA, 19 nt, Artificial Sequence
  Description of Artificial Sequence: Synthetic oligonucleotide
gugacauuccuccauguac

SEQ ID NO: 2229921 - RNA, 19 nt, Artificial Sequence
  Description of Artificial Sequence: Synthetic oligonucleotide
caauggucugcuuuccucc

SEQ ID NO: 2229922 - RNA, 19 nt, Artificial Sequence
  Description of Artificial Sequence: Synthetic oligonucleotide
cacucgauacugaaguagc

SEQ ID NO: 2229923 - RNA, 19 nt, Artificial Sequence
  Description of Artificial Sequence: Synthetic oligonucleotide
ugccugauguucaugacau

SEQ ID NO: 2229924 - RNA, 19 nt, Artificial Sequence
  Description of Artificial Sequence: Synthetic oligonucleotide
cauucgguacccagcaucc

SEQ ID NO: 2229925 - RNA, 19 nt, Artificial Sequence
  Description of Artificial Sequence: Synthetic oligonucleotide
uccucuaagggaucagacc

SEQ ID NO: 2229926 - RNA, 19 nt, Artificial Sequence
  Description of Artificial Sequence: Synthetic oligonucleotide
gucgaauguguucauacac

SEQ ID NO: 2229927 - RNA, 19 nt, Artificial Sequence
  Description of Artificial Sequence: Synthetic oligonucleotide
guaaaccuaucuaauuucc

SEQ ID NO: 2229928 - RNA, 19 nt, Artificial Sequence
  Description of Artificial Sequence: Synthetic oligonucleotide
  modified_base (16)..(16): a, c, u, g, unknown or other
acacagagaaacugcnggu

SEQ ID NO: 2229929 - RNA, 19 nt, Artificial Sequence
  Description of Artificial Sequence: Synthetic oligonucleotide
agaaguaggagcagccucg

SEQ ID NO: 2229930 - RNA, 19 nt, Artificial Sequence
  Description of Artificial Sequence: Synthetic oligonucleotide
gguuuaagagagcagcaag

SEQ ID NO: 2229931 - RNA, 19 nt, Artificial Sequence
  Description of Artificial Sequence: Synthetic oligonucleotide
uguuauaaacaucgaggua

SEQ ID NO: 2229932 - RNA, 19 nt, Artificial Sequence
  Description of Artificial Sequence: Synthetic oligonucleotide
aggauaguuaaucuuuaaa

SEQ ID NO: 2229933 - RNA, 19 nt, Artificial Sequence
  Description of Artificial Sequence: Synthetic oligonucleotide
acgaaaggcaaagaccacg

SEQ ID NO: 2229934 - RNA, 19 nt, Artificial Sequence
  Description of Artificial Sequence: Synthetic oligonucleotide
uuaggauaguuaaucuuua

SEQ ID NO: 2229935 - RNA, 19 nt, Artificial Sequence
  Description of Artificial Sequence: Synthetic oligonucleotide
ugaggguuagcacacucuc

SEQ ID NO: 2229936 - RNA, 19 nt, Artificial Sequence
  Description of Artificial Sequence: Synthetic oligonucleotide
uuauaaacaucgagguaau

SEQ ID NO: 2229937 - RNA, 19 nt, Artificial Sequence
  Description of Artificial Sequence: Synthetic oligonucleotide
caguguuguggcuauagug

SEQ ID NO: 2229938 - RNA, 19 nt, Artificial Sequence
  Description of Artificial Sequence: Synthetic oligonucleotide
ugaugaucucuuuucgaac

SEQ ID NO: 2229939 - RNA, 19 nt, Artificial Sequence
  Description of Artificial Sequence: Synthetic oligonucleotide
uucgguaaaccuaucuaau

SEQ ID NO: 2229940 - RNA, 19 nt, Artificial Sequence
  Description of Artificial Sequence: Synthetic oligonucleotide
  modified_base (4)..(4): a, c, u, g, unknown or other
ugcngguuuaagagagcag

SEQ ID NO: 2229941 - RNA, 19 nt, Artificial Sequence
  Description of Artificial Sequence: Synthetic oligonucleotide
aauucacaaacagcggggu

SEQ ID NO: 2229942 - RNA, 19 nt, Artificial Sequence
  Description of Artificial Sequence: Synthetic oligonucleotide
auuuggaagccaguagggg

SEQ ID NO: 2229943 - RNA, 19 nt, Artificial Sequence
  Description of Artificial Sequence: Synthetic oligonucleotide
uuuucgaacugaagagacu

SEQ ID NO: 2229944 - RNA, 19 nt, Artificial Sequence
  Description of Artificial Sequence: Synthetic oligonucleotide
uucacaaacagcgggguaa

SEQ ID NO: 2229945 - RNA, 19 nt, Artificial Sequence
  Description of Artificial Sequence: Synthetic oligonucleotide
cagucgaauguguucauac

SEQ ID NO: 2229946 - RNA, 19 nt, Artificial Sequence
  Description of Artificial Sequence: Synthetic oligonucleotide
uaauuucaggugacauucc

SEQ ID NO: 2229947 - RNA, 19 nt, Artificial Sequence
  Description of Artificial Sequence: Synthetic oligonucleotide
ucaugggcucugauuauug

SEQ ID NO: 2229948 - RNA, 19 nt, Artificial Sequence
  Description of Artificial Sequence: Synthetic oligonucleotide
uccgaauacuuaauccgac

SEQ ID NO: 2229949 - RNA, 19 nt, Artificial Sequence
  Description of Artificial Sequence: Synthetic oligonucleotide
gaugaucucuuuucgaacu

SEQ ID NO: 2229950 - RNA, 19 nt, Artificial Sequence
  Description of Artificial Sequence: Synthetic oligonucleotide
cacgugaaaacauccauga

SEQ ID NO: 2229951 - RNA, 19 nt, Artificial Sequence
  Description of Artificial Sequence: Synthetic oligonucleotide
aagacccgugccauuuucc

SEQ ID NO: 2229952 - RNA, 19 nt, Artificial Sequence
  Description of Artificial Sequence: Synthetic oligonucleotide
ccaacgaaaggcaaagacc

SEQ ID NO: 2229953 - RNA, 19 nt, Artificial Sequence
  Description of Artificial Sequence: Synthetic oligonucleotide
uggaaagcccguugcuugg

SEQ ID NO: 2229954 - RNA, 19 nt, Artificial Sequence
  Description of Artificial Sequence: Synthetic oligonucleotide
uauugaccaacaucucugu

SEQ ID NO: 2229955 - RNA, 19 nt, Artificial Sequence
  Description of Artificial Sequence: Synthetic oligonucleotide
ccuuaugucaucuaaacaa

SEQ ID NO: 2229956 - RNA, 19 nt, Artificial Sequence
  Description of Artificial Sequence: Synthetic oligonucleotide
  modified_base (14)..(14): a, c, u, g, unknown or other
acagagaaacugcngguuu

SEQ ID NO: 2229957 - RNA, 19 nt, Artificial Sequence
  Description of Artificial Sequence: Synthetic oligonucleotide
caucagagcauauguugag

SEQ ID NO: 2229958 - RNA, 19 nt, Artificial Sequence
  Description of Artificial Sequence: Synthetic oligonucleotide
uucgaacugaagagacucc

SEQ ID NO: 2229959 - RNA, 19 nt, Artificial Sequence
  Description of Artificial Sequence: Synthetic oligonucleotide
gagguaauuaggggcagag

SEQ ID NO: 2229960 - RNA, 19 nt, Artificial Sequence
  Description of Artificial Sequence: Synthetic oligonucleotide
uguguucauacacgcuuca

SEQ ID NO: 2229961 - RNA, 19 nt, Artificial Sequence
  Description of Artificial Sequence: Synthetic oligonucleotide
caugacauuguuuucauau

SEQ ID NO: 2229962 - RNA, 19 nt, Artificial Sequence
  Description of Artificial Sequence: Synthetic oligonucleotide
ugagaauauugaccaacau

SEQ ID NO: 2229963 - RNA, 19 nt, Artificial Sequence
  Description of Artificial Sequence: Synthetic oligonucleotide
uaauccgacauuccuguuu

SEQ ID NO: 2229964 - RNA, 19 nt, Artificial Sequence
  Description of Artificial Sequence: Synthetic oligonucleotide
cuccauaaauacagcacac

SEQ ID NO: 2229965 - RNA, 19 nt, Artificial Sequence
  Description of Artificial Sequence: Synthetic oligonucleotide
uugaggguuagcacacucu

SEQ ID NO: 2229966 - RNA, 19 nt, Artificial Sequence
  Description of Artificial Sequence: Synthetic oligonucleotide
acacucgauacugaaguag

SEQ ID NO: 2229967 - RNA, 19 nt, Artificial Sequence
  Description of Artificial Sequence: Synthetic oligonucleotide
aggggagugugccuguggg

SEQ ID NO: 2229968 - RNA, 19 nt, Artificial Sequence
  Description of Artificial Sequence: Synthetic oligonucleotide
guuguggcuauagugcucc

SEQ ID NO: 2229969 - RNA, 19 nt, Artificial Sequence
  Description of Artificial Sequence: Synthetic oligonucleotide
uacaccauuuccgaauacu

SEQ ID NO: 2229970 - RNA, 19 nt, Artificial Sequence
  Description of Artificial Sequence: Synthetic oligonucleotide
ucugugucguccucggaga

SEQ ID NO: 2229971 - RNA, 19 nt, Artificial Sequence
  Description of Artificial Sequence: Synthetic oligonucleotide
agcaagaggaagacagucg

SEQ ID NO: 2229972 - RNA, 19 nt, Artificial Sequence
  Description of Artificial Sequence: Synthetic oligonucleotide
gguaaaccuaucuaauuuc

SEQ ID NO: 2229973 - RNA, 19 nt, Artificial Sequence
  Description of Artificial Sequence: Synthetic oligonucleotide
acuuaauccgacauuccug

SEQ ID NO: 2229974 - RNA, 19 nt, Artificial Sequence
  Description of Artificial Sequence: Synthetic oligonucleotide
agacagucgaauguguuca

SEQ ID NO: 2229975 - RNA, 19 nt, Artificial Sequence
  Description of Artificial Sequence: Synthetic oligonucleotide
cuaauuuccuuaugucauc

SEQ ID NO: 2229976 - RNA, 19 nt, Artificial Sequence
  Description of Artificial Sequence: Synthetic oligonucleotide
accgaaaagacccgugcca

SEQ ID NO: 2229977 - RNA, 19 nt, Artificial Sequence
  Description of Artificial Sequence: Synthetic oligonucleotide
gaagaaccgaaaagacccg

SEQ ID NO: 2229978 - RNA, 19 nt, Artificial Sequence
  Description of Artificial Sequence: Synthetic oligonucleotide
cauuuccgaauacuuaauc

SEQ ID NO: 2229979 - RNA, 19 nt, Artificial Sequence
  Description of Artificial Sequence: Synthetic oligonucleotide
gcauauguugagaauauug

SEQ ID NO: 2229980 - RNA, 19 nt, Artificial Sequence
  Description of Artificial Sequence: Synthetic oligonucleotide
uucauacacgcuucauaca

SEQ ID NO: 2229981 - RNA, 19 nt, Artificial Sequence
  Description of Artificial Sequence: Synthetic oligonucleotide
ugggcucugauuauugaua

SEQ ID NO: 2229982 - RNA, 19 nt, Artificial Sequence
  Description of Artificial Sequence: Synthetic oligonucleotide
agcgggguaacugaagaag

SEQ ID NO: 2229983 - RNA, 19 nt, Artificial Sequence
  Description of Artificial Sequence: Synthetic oligonucleotide
acucgauacugaaguagcc

SEQ ID NO: 2229984 - RNA, 19 nt, Artificial Sequence
  Description of Artificial Sequence: Synthetic oligonucleotide
aacgaaaggcaaagaccac

SEQ ID NO: 2229985 - RNA, 19 nt, Artificial Sequence
  Description of Artificial Sequence: Synthetic oligonucleotide
ugauggaaagcccguugcu

SEQ ID NO: 2229986 - RNA, 19 nt, Artificial Sequence
  Description of Artificial Sequence: Synthetic oligonucleotide
cuaucuaauuuccuuaugu

SEQ ID NO: 2229987 - RNA, 19 nt, Artificial Sequence
  Description of Artificial Sequence: Synthetic oligonucleotide
  modified_base (3)..(3): a, c, u, g, unknown or other
gcngguuuaagagagcagc

SEQ ID NO: 2229988 - RNA, 19 nt, Artificial Sequence
  Description of Artificial Sequence: Synthetic oligonucleotide
guaaugagugauggaaagc

SEQ ID NO: 2229989 - RNA, 19 nt, Artificial Sequence
  Description of Artificial Sequence: Synthetic oligonucleotide
cuguacauucgguacccag

SEQ ID NO: 2229990 - RNA, 19 nt, Artificial Sequence
  Description of Artificial Sequence: Synthetic oligonucleotide
agucgaauguguucauaca

SEQ ID NO: 2229991 - RNA, 19 nt, Artificial Sequence
  Description of Artificial Sequence: Synthetic oligonucleotide
cuguuugaaggugaaguac

SEQ ID NO: 2229992 - RNA, 19 nt, Artificial Sequence
  Description of Artificial Sequence: Synthetic oligonucleotide
gcaaagaccacgugaaaac

SEQ ID NO: 2229993 - RNA, 19 nt, Artificial Sequence
  Description of Artificial Sequence: Synthetic oligonucleotide
cgacauuccuguuugaagg

SEQ ID NO: 2229994 - RNA, 19 nt, Artificial Sequence
  Description of Artificial Sequence: Synthetic oligonucleotide
cuguaagaugccugcauuc

SEQ ID NO: 2229995 - RNA, 19 nt, Artificial Sequence
  Description of Artificial Sequence: Synthetic oligonucleotide
auacaccauuuccgaauac

SEQ ID NO: 2229996 - RNA, 19 nt, Artificial Sequence
  Description of Artificial Sequence: Synthetic oligonucleotide
uggcucuuccuguacauuc

SEQ ID NO: 2229997 - RNA, 19 nt, Artificial Sequence
  Description of Artificial Sequence: Synthetic oligonucleotide
auuucaggugacauuccuc

SEQ ID NO: 2229998 - RNA, 19 nt, Artificial Sequence
  Description of Artificial Sequence: Synthetic oligonucleotide
agggaucagaccaaagcag

SEQ ID NO: 2229999 - RNA, 19 nt, Artificial Sequence
  Description of Artificial Sequence: Synthetic oligonucleotide
auuaggggcagagaaaauu

SEQ ID NO: 2230000 - RNA, 19 nt, Artificial Sequence
  Description of Artificial Sequence: Synthetic oligonucleotide
ugauuuuauucuugaugau

SEQ ID NO: 2230001 - RNA, 19 nt, Artificial Sequence
  Description of Artificial Sequence: Synthetic oligonucleotide
caauguuuuaggauaguua

SEQ ID NO: 2230002 - RNA, 19 nt, Artificial Sequence
  Description of Artificial Sequence: Synthetic oligonucleotide
aagcccguugcuuggcucu

SEQ ID NO: 2230003 - RNA, 19 nt, Artificial Sequence
  Description of Artificial Sequence: Synthetic oligonucleotide
guacauucgguacccagca

SEQ ID NO: 2230004 - RNA, 19 nt, Artificial Sequence
  Description of Artificial Sequence: Synthetic oligonucleotide
aguuaaucuuuaaacucca

SEQ ID NO: 2230005 - RNA, 19 nt, Artificial Sequence
  Description of Artificial Sequence: Synthetic oligonucleotide
accacgugaaaacauccau

SEQ ID NO: 2230006 - RNA, 19 nt, Artificial Sequence
  Description of Artificial Sequence: Synthetic oligonucleotide
ucgaacugaagagacuccu

SEQ ID NO: 2230007 - RNA, 19 nt, Artificial Sequence
  Description of Artificial Sequence: Synthetic oligonucleotide
cuuaauccgacauuccugu

SEQ ID NO: 2230008 - RNA, 19 nt, Artificial Sequence
  Description of Artificial Sequence: Synthetic oligonucleotide
aguuaaacugccugauguu

SEQ ID NO: 2230009 - RNA, 19 nt, Artificial Sequence
  Description of Artificial Sequence: Synthetic oligonucleotide
augauuuccucgaagcaga

SEQ ID NO: 2230010 - RNA, 19 nt, Artificial Sequence
  Description of Artificial Sequence: Synthetic oligonucleotide
cucugauuauugauaauaa

SEQ ID NO: 2230011 - RNA, 19 nt, Artificial Sequence
  Description of Artificial Sequence: Synthetic oligonucleotide
accuaucuaauuuccuuau

SEQ ID NO: 2230012 - RNA, 19 nt, Artificial Sequence
  Description of Artificial Sequence: Synthetic oligonucleotide
ucagaccaaagcaggucac

SEQ ID NO: 2230013 - RNA, 19 nt, Artificial Sequence
  Description of Artificial Sequence: Synthetic oligonucleotide
uucauacaccauuuccgaa

SEQ ID NO: 2230014 - RNA, 19 nt, Artificial Sequence
  Description of Artificial Sequence: Synthetic oligonucleotide
cuaagggaucagaccaaag

SEQ ID NO: 2230015 - RNA, 19 nt, Artificial Sequence
  Description of Artificial Sequence: Synthetic oligonucleotide
caaacagcgggguaacuga

SEQ ID NO: 2230016 - RNA, 19 nt, Artificial Sequence
  Description of Artificial Sequence: Synthetic oligonucleotide
uaggauaguuaaucuuuaa

SEQ ID NO: 2230017 - RNA, 19 nt, Artificial Sequence
  Description of Artificial Sequence: Synthetic oligonucleotide
guuuuaggauaguuaaucu

SEQ ID NO: 2230018 - RNA, 19 nt, Artificial Sequence
  Description of Artificial Sequence: Synthetic oligonucleotide
ucgguaaaccuaucuaauu

SEQ ID NO: 2230019 - RNA, 19 nt, Artificial Sequence
  Description of Artificial Sequence: Synthetic oligonucleotide
agguucgguaaaccuaucu

SEQ ID NO: 2230020 - RNA, 19 nt, Artificial Sequence
  Description of Artificial Sequence: Synthetic oligonucleotide
aagaaccgaaaagacccgu

SEQ ID NO: 2230021 - RNA, 19 nt, Artificial Sequence
  Description of Artificial Sequence: Synthetic oligonucleotide
gagcaguuaaacugccuga

SEQ ID NO: 2230022 - RNA, 19 nt, Artificial Sequence
  Description of Artificial Sequence: Synthetic oligonucleotide
uccugguucuucucacugc

SEQ ID NO: 2230023 - RNA, 19 nt, Artificial Sequence
  Description of Artificial Sequence: Synthetic oligonucleotide
ucgaagcagaaacaauguu

SEQ ID NO: 2230024 - RNA, 19 nt, Artificial Sequence
  Description of Artificial Sequence: Synthetic oligonucleotide
ugaucucuuuucgaacuga

SEQ ID NO: 2230025 - RNA, 19 nt, Artificial Sequence
  Description of Artificial Sequence: Synthetic oligonucleotide
ugugccugugggagugagg

SEQ ID NO: 2230026 - RNA, 19 nt, Artificial Sequence
  Description of Artificial Sequence: Synthetic oligonucleotide
cucuccucccgaagaaccg

SEQ ID NO: 2230027 - RNA, 19 nt, Artificial Sequence
  Description of Artificial Sequence: Synthetic oligonucleotide
gaagccaguaggggugugg

SEQ ID NO: 2230028 - RNA, 19 nt, Artificial Sequence
  Description of Artificial Sequence: Synthetic oligonucleotide
aacaauguuuuaggauagu

SEQ ID NO: 2230029 - RNA, 19 nt, Artificial Sequence
  Description of Artificial Sequence: Synthetic oligonucleotide
gaggaagacagucgaaugu

SEQ ID NO: 2230030 - RNA, 19 nt, Artificial Sequence
  Description of Artificial Sequence: Synthetic oligonucleotide
aguagggguguggagagca

SEQ ID NO: 2230031 - RNA, 19 nt, Artificial Sequence
  Description of Artificial Sequence: Synthetic oligonucleotide
acacgcuucauacaccauu

SEQ ID NO: 2230032 - RNA, 19 nt, Artificial Sequence
  Description of Artificial Sequence: Synthetic oligonucleotide
uccuucugugucguccucg

SEQ ID NO: 2230033 - RNA, 19 nt, Artificial Sequence
  Description of Artificial Sequence: Synthetic oligonucleotide
aucgagguaauuaggggca

SEQ ID NO: 2230034 - RNA, 19 nt, Artificial Sequence
  Description of Artificial Sequence: Synthetic oligonucleotide
gguuagcacacucucacuc

SEQ ID NO: 2230035 - RNA, 19 nt, Artificial Sequence
  Description of Artificial Sequence: Synthetic oligonucleotide
guaggagcagccucggaca

SEQ ID NO: 2230036 - RNA, 19 nt, Artificial Sequence
  Description of Artificial Sequence: Synthetic oligonucleotide
gaaggugaaguacucugua

SEQ ID NO: 2230037 - RNA, 19 nt, Artificial Sequence
  Description of Artificial Sequence: Synthetic oligonucleotide
augacauuguuuucauauu

SEQ ID NO: 2230038 - RNA, 19 nt, Artificial Sequence
  Description of Artificial Sequence: Synthetic oligonucleotide
cccaaaagcaggagguucg

SEQ ID NO: 2230039 - RNA, 19 nt, Artificial Sequence
  Description of Artificial Sequence: Synthetic oligonucleotide
caguuaaacugccugaugu

SEQ ID NO: 2230040 - RNA, 19 nt, Artificial Sequence
  Description of Artificial Sequence: Synthetic oligonucleotide
cauuccuguuugaagguga

SEQ ID NO: 2230041 - RNA, 19 nt, Artificial Sequence
  Description of Artificial Sequence: Synthetic oligonucleotide
uagcacacucucacucucc

SEQ ID NO: 2230042 - RNA, 19 nt, Artificial Sequence
  Description of Artificial Sequence: Synthetic oligonucleotide
gaugccugcauucaugauu

SEQ ID NO: 2230043 - RNA, 19 nt, Artificial Sequence
  Description of Artificial Sequence: Synthetic oligonucleotide
acaauguuuuaggauaguu

SEQ ID NO: 2230044 - RNA, 19 nt, Artificial Sequence
  Description of Artificial Sequence: Synthetic oligonucleotide
uuccucgaagcagaaacaa

SEQ ID NO: 2230045 - RNA, 19 nt, Artificial Sequence
  Description of Artificial Sequence: Synthetic oligonucleotide
  modified_base (18)..(18): a, c, u, g, unknown or other
guacacagagaaacugcng

SEQ ID NO: 2230046 - RNA, 19 nt, Artificial Sequence
  Description of Artificial Sequence: Synthetic oligonucleotide
acaguguuguggcuauagu

SEQ ID NO: 2230047 - RNA, 19 nt, Artificial Sequence
  Description of Artificial Sequence: Synthetic oligonucleotide
ucuaagggaucagaccaaa

SEQ ID NO: 2230048 - RNA, 19 nt, Artificial Sequence
  Description of Artificial Sequence: Synthetic oligonucleotide
ccgaagaaccgaaaagacc

SEQ ID NO: 2230049 - RNA, 19 nt, Artificial Sequence
  Description of Artificial Sequence: Synthetic oligonucleotide
ucucaauggucugcuuucc

SEQ ID NO: 2230050 - RNA, 19 nt, Artificial Sequence
  Description of Artificial Sequence: Synthetic oligonucleotide
uucaggugacauuccucca

SEQ ID NO: 2230051 - RNA, 19 nt, Artificial Sequence
  Description of Artificial Sequence: Synthetic oligonucleotide
uccucgaagcagaaacaau

SEQ ID NO: 2230052 - RNA, 19 nt, Artificial Sequence
  Description of Artificial Sequence: Synthetic oligonucleotide
ggugaaguacucuguaaga

SEQ ID NO: 2230053 - RNA, 19 nt, Artificial Sequence
  Description of Artificial Sequence: Synthetic oligonucleotide
ggagaugagcucaucauca

SEQ ID NO: 2230054 - RNA, 19 nt, Artificial Sequence
  Description of Artificial Sequence: Synthetic oligonucleotide
aacagcgggguaacugaag

SEQ ID NO: 2230055 - RNA, 19 nt, Artificial Sequence
  Description of Artificial Sequence: Synthetic oligonucleotide
gcaagaggaagacagucga

SEQ ID NO: 2230056 - RNA, 19 nt, Artificial Sequence
  Description of Artificial Sequence: Synthetic oligonucleotide
cgaauguguucauacacgc

SEQ ID NO: 2230057 - RNA, 19 nt, Artificial Sequence
  Description of Artificial Sequence: Synthetic oligonucleotide
  modified_base (11)..(11): a, c, u, g, unknown or other
gagaaacugcngguuuaag

SEQ ID NO: 2230058 - RNA, 19 nt, Artificial Sequence
  Description of Artificial Sequence: Synthetic oligonucleotide
  modified_base (6)..(6): a, c, u, g, unknown or other
acugcngguuuaagagagc

SEQ ID NO: 2230059 - RNA, 19 nt, Artificial Sequence
  Description of Artificial Sequence: Synthetic oligonucleotide
aaaagacccgugccauuuu

SEQ ID NO: 2230060 - RNA, 19 nt, Artificial Sequence
  Description of Artificial Sequence: Synthetic oligonucleotide
gggguaacugaagaaguag

SEQ ID NO: 2230061 - RNA, 19 nt, Artificial Sequence
  Description of Artificial Sequence: Synthetic oligonucleotide
  modified_base (2)..(2): a, c, u, g, unknown or other
cngguuuaagagagcagca

SEQ ID NO: 2230062 - RNA, 19 nt, Artificial Sequence
  Description of Artificial Sequence: Synthetic oligonucleotide
ccucuaagggaucagacca

SEQ ID NO: 2230063 - RNA, 19 nt, Artificial Sequence
  Description of Artificial Sequence: Synthetic oligonucleotide
uguggcuauagugcuccug

SEQ ID NO: 2230064 - RNA, 19 nt, Artificial Sequence
  Description of Artificial Sequence: Synthetic oligonucleotide
cuccugguucuucucacug

SEQ ID NO: 2230065 - RNA, 19 nt, Artificial Sequence
  Description of Artificial Sequence: Synthetic oligonucleotide
acccgugccauuuucccaa

SEQ ID NO: 2230066 - RNA, 19 nt, Artificial Sequence
  Description of Artificial Sequence: Synthetic oligonucleotide
caggugacauuccuccaug

SEQ ID NO: 2230067 - RNA, 19 nt, Artificial Sequence
  Description of Artificial Sequence: Synthetic oligonucleotide
ucacaaacagcgggguaac

SEQ ID NO: 2230068 - RNA, 19 nt, Artificial Sequence
  Description of Artificial Sequence: Synthetic oligonucleotide
uccgacauuccuguuugaa

SEQ ID NO: 2230069 - RNA, 19 nt, Artificial Sequence
  Description of Artificial Sequence: Synthetic oligonucleotide
gagugugccugugggagug

SEQ ID NO: 2230070 - RNA, 19 nt, Artificial Sequence
  Description of Artificial Sequence: Synthetic oligonucleotide
agcaguuaaacugccugau

SEQ ID NO: 2230071 - RNA, 19 nt, Artificial Sequence
  Description of Artificial Sequence: Synthetic oligonucleotide
agaaccgaaaagacccgug

SEQ ID NO: 2230072 - RNA, 19 nt, Artificial Sequence
  Description of Artificial Sequence: Synthetic oligonucleotide
aaacugccugauguucaug

SEQ ID NO: 2230073 - RNA, 19 nt, Artificial Sequence
  Description of Artificial Sequence: Synthetic oligonucleotide
ucgagguaauuaggggcag

SEQ ID NO: 2230074 - RNA, 19 nt, Artificial Sequence
  Description of Artificial Sequence: Synthetic oligonucleotide
gggagugugccugugggag

SEQ ID NO: 2230075 - RNA, 19 nt, Artificial Sequence
  Description of Artificial Sequence: Synthetic oligonucleotide
guugcuuggcucuuccugu

SEQ ID NO: 2230076 - RNA, 19 nt, Artificial Sequence
  Description of Artificial Sequence: Synthetic oligonucleotide
uuccuguuugaaggugaag

SEQ ID NO: 2230077 - RNA, 19 nt, Artificial Sequence
  Description of Artificial Sequence: Synthetic oligonucleotide
gugucguccucggagauga

SEQ ID NO: 2230078 - RNA, 19 nt, Artificial Sequence
  Description of Artificial Sequence: Synthetic oligonucleotide
  modified_base (5)..(5): a, c, u, g, unknown or other
cugcngguuuaagagagca

SEQ ID NO: 2230079 - RNA, 19 nt, Artificial Sequence
  Description of Artificial Sequence: Synthetic oligonucleotide
ccgacauuccuguuugaag

SEQ ID NO: 2230080 - RNA, 19 nt, Artificial Sequence
  Description of Artificial Sequence: Synthetic oligonucleotide
ccacgugaaaacauccaug

SEQ ID NO: 2230081 - RNA, 19 nt, Artificial Sequence
  Description of Artificial Sequence: Synthetic oligonucleotide
auucacaaacagcggggua

SEQ ID NO: 2230082 - RNA, 19 nt, Artificial Sequence
  Description of Artificial Sequence: Synthetic oligonucleotide
ugugucguccucggagaug

SEQ ID NO: 2230083 - RNA, 19 nt, Artificial Sequence
  Description of Artificial Sequence: Synthetic oligonucleotide
cucgaagcagaaacaaugu

SEQ ID NO: 2230084 - RNA, 19 nt, Artificial Sequence
  Description of Artificial Sequence: Synthetic oligonucleotide
gcucugauuauugauaaua

SEQ ID NO: 2230085 - RNA, 19 nt, Artificial Sequence
  Description of Artificial Sequence: Synthetic oligonucleotide
gaucucuuuucgaacugaa

SEQ ID NO: 2230086 - RNA, 19 nt, Artificial Sequence
  Description of Artificial Sequence: Synthetic oligonucleotide
cccgaagaaccgaaaagac

SEQ ID NO: 2230087 - RNA, 19 nt, Artificial Sequence
  Description of Artificial Sequence: Synthetic oligonucleotide
ucggacaguguuguggcua

SEQ ID NO: 2230088 - RNA, 19 nt, Artificial Sequence
  Description of Artificial Sequence: Synthetic oligonucleotide
caauuaauuucaggugaca

SEQ ID NO: 2230089 - RNA, 19 nt, Artificial Sequence
  Description of Artificial Sequence: Synthetic oligonucleotide
acgugaaaacauccaugaa

SEQ ID NO: 2230090 - RNA, 19 nt, Artificial Sequence
  Description of Artificial Sequence: Synthetic oligonucleotide
cauacaccauuuccgaaua

SEQ ID NO: 2230091 - RNA, 19 nt, Artificial Sequence
  Description of Artificial Sequence: Synthetic oligonucleotide
cacucucacucuccucccg

SEQ ID NO: 2230092 - RNA, 19 nt, Artificial Sequence
  Description of Artificial Sequence: Synthetic oligonucleotide
gguucgguaaaccuaucua

SEQ ID NO: 2230093 - RNA, 19 nt, Artificial Sequence
  Description of Artificial Sequence: Synthetic oligonucleotide
auacuccucuaagggauca

SEQ ID NO: 2230094 - RNA, 19 nt, Artificial Sequence
  Description of Artificial Sequence: Synthetic oligonucleotide
uacuccucuaagggaucag

SEQ ID NO: 2230095 - RNA, 19 nt, Artificial Sequence
  Description of Artificial Sequence: Synthetic oligonucleotide
ccucggacaguguuguggc

SEQ ID NO: 2230096 - RNA, 19 nt, Artificial Sequence
  Description of Artificial Sequence: Synthetic oligonucleotide
gccucggacaguguugugg

SEQ ID NO: 2230097 - RNA, 19 nt, Artificial Sequence
  Description of Artificial Sequence: Synthetic oligonucleotide
uacauucgguacccagcau

SEQ ID NO: 2230098 - RNA, 19 nt, Artificial Sequence
  Description of Artificial Sequence: Synthetic oligonucleotide
aaacagcgggguaacugaa

SEQ ID NO: 2230099 - RNA, 19 nt, Artificial Sequence
  Description of Artificial Sequence: Synthetic oligonucleotide
uggcuauagugcuccuggu

SEQ ID NO: 2230100 - RNA, 19 nt, Artificial Sequence
  Description of Artificial Sequence: Synthetic oligonucleotide
caugggcucugauuauuga

SEQ ID NO: 2230101 - RNA, 19 nt, Artificial Sequence
  Description of Artificial Sequence: Synthetic oligonucleotide
agcucaucaucagagcaua

SEQ ID NO: 2230102 - RNA, 19 nt, Artificial Sequence
  Description of Artificial Sequence: Synthetic oligonucleotide
gacccgugccauuuuccca

SEQ ID NO: 2230103 - RNA, 19 nt, Artificial Sequence
  Description of Artificial Sequence: Synthetic oligonucleotide
  modified_base (13)..(13): a, c, u, g, unknown or other
cagagaaacugcngguuua

SEQ ID NO: 2230104 - RNA, 19 nt, Artificial Sequence
  Description of Artificial Sequence: Synthetic oligonucleotide
ccaguagggguguggagag

SEQ ID NO: 2230105 - RNA, 19 nt, Artificial Sequence
  Description of Artificial Sequence: Synthetic oligonucleotide
uuaauccgacauuccuguu

SEQ ID NO: 2230106 - RNA, 19 nt, Artificial Sequence
  Description of Artificial Sequence: Synthetic oligonucleotide
gaagaaguaggagcagccu

SEQ ID NO: 2230107 - RNA, 19 nt, Artificial Sequence
  Description of Artificial Sequence: Synthetic oligonucleotide
aggagguucgguaaaccua

SEQ ID NO: 2230108 - RNA, 19 nt, Artificial Sequence
  Description of Artificial Sequence: Synthetic oligonucleotide
caccauuuccgaauacuua

SEQ ID NO: 2230109 - RNA, 19 nt, Artificial Sequence
  Description of Artificial Sequence: Synthetic oligonucleotide
guguuguggcuauagugcu

SEQ ID NO: 2230110 - RNA, 19 nt, Artificial Sequence
  Description of Artificial Sequence: Synthetic oligonucleotide
gaggguuagcacacucuca

SEQ ID NO: 2230111 - RNA, 19 nt, Artificial Sequence
  Description of Artificial Sequence: Synthetic oligonucleotide
agguaauuaggggcagaga

SEQ ID NO: 2230112 - RNA, 19 nt, Artificial Sequence
  Description of Artificial Sequence: Synthetic oligonucleotide
gggcucugauuauugauaa

SEQ ID NO: 2230113 - RNA, 19 nt, Artificial Sequence
  Description of Artificial Sequence: Synthetic oligonucleotide
uccucggagaugagcucau

SEQ ID NO: 2230114 - RNA, 19 nt, Artificial Sequence
  Description of Artificial Sequence: Synthetic oligonucleotide
uugcuuggcucuuccugua

SEQ ID NO: 2230115 - RNA, 19 nt, Artificial Sequence
  Description of Artificial Sequence: Synthetic oligonucleotide
uccucccgaagaaccgaaa

SEQ ID NO: 2230116 - RNA, 19 nt, Artificial Sequence
  Description of Artificial Sequence: Synthetic oligonucleotide
agaugccugcauucaugau

SEQ ID NO: 2230117 - RNA, 19 nt, Artificial Sequence
  Description of Artificial Sequence: Synthetic oligonucleotide
gauggaaagcccguugcuu

SEQ ID NO: 2230118 - RNA, 19 nt, Artificial Sequence
  Description of Artificial Sequence: Synthetic oligonucleotide
agcauauguugagaauauu

SEQ ID NO: 2230119 - RNA, 19 nt, Artificial Sequence
  Description of Artificial Sequence: Synthetic oligonucleotide
guaagaugccugcauucau

SEQ ID NO: 2230120 - RNA, 19 nt, Artificial Sequence
  Description of Artificial Sequence: Synthetic oligonucleotide
agacuccuucugugucguc

SEQ ID NO: 2230121 - RNA, 19 nt, Artificial Sequence
  Description of Artificial Sequence: Synthetic oligonucleotide
caggagguucgguaaaccu

SEQ ID NO: 2230122 - RNA, 19 nt, Artificial Sequence
  Description of Artificial Sequence: Synthetic oligonucleotide
gaagacagucgaauguguu

SEQ ID NO: 2230123 - RNA, 19 nt, Artificial Sequence
  Description of Artificial Sequence: Synthetic oligonucleotide
cguugcuuggcucuuccug

SEQ ID NO: 2230124 - RNA, 19 nt, Artificial Sequence
  Description of Artificial Sequence: Synthetic oligonucleotide
gaaagcccguugcuuggcu

SEQ ID NO: 2230125 - RNA, 19 nt, Artificial Sequence
  Description of Artificial Sequence: Synthetic oligonucleotide
ugggcuucaugggcucuga

SEQ ID NO: 2230126 - RNA, 19 nt, Artificial Sequence
  Description of Artificial Sequence: Synthetic oligonucleotide
ggguguggagagcaguuaa

SEQ ID NO: 2230127 - RNA, 19 nt, Artificial Sequence
  Description of Artificial Sequence: Synthetic oligonucleotide
acagucgaauguguucaua

SEQ ID NO: 2230128 - RNA, 19 nt, Artificial Sequence
  Description of Artificial Sequence: Synthetic oligonucleotide
caucaucagagcauauguu

SEQ ID NO: 2230129 - RNA, 19 nt, Artificial Sequence
  Description of Artificial Sequence: Synthetic oligonucleotide
ccaaaagcaggagguucgg

SEQ ID NO: 2230130 - RNA, 19 nt, Artificial Sequence
  Description of Artificial Sequence: Synthetic oligonucleotide
ccgaauacuuaauccgaca

SEQ ID NO: 2230131 - RNA, 19 nt, Artificial Sequence
  Description of Artificial Sequence: Synthetic oligonucleotide
cacgcuucauacaccauuu

SEQ ID NO: 2230132 - RNA, 19 nt, Artificial Sequence
  Description of Artificial Sequence: Synthetic oligonucleotide
ugaggcccuugaggguuag

SEQ ID NO: 2230133 - RNA, 19 nt, Artificial Sequence
  Description of Artificial Sequence: Synthetic oligonucleotide
auccgacauuccuguuuga

SEQ ID NO: 2230134 - RNA, 19 nt, Artificial Sequence
  Description of Artificial Sequence: Synthetic oligonucleotide
gagacuccuucugugucgu

SEQ ID NO: 2230135 - RNA, 19 nt, Artificial Sequence
  Description of Artificial Sequence: Synthetic oligonucleotide
ggagguucgguaaaccuau

SEQ ID NO: 2230136 - RNA, 19 nt, Artificial Sequence
  Description of Artificial Sequence: Synthetic oligonucleotide
gcagccucggacaguguug

SEQ ID NO: 2230137 - RNA, 19 nt, Artificial Sequence
  Description of Artificial Sequence: Synthetic oligonucleotide
ggaaagcccguugcuuggc

SEQ ID NO: 2230138 - RNA, 19 nt, Artificial Sequence
  Description of Artificial Sequence: Synthetic oligonucleotide
gagugaggcccuugagggu

SEQ ID NO: 2230139 - RNA, 19 nt, Artificial Sequence
  Description of Artificial Sequence: Synthetic oligonucleotide
cggagaugagcucaucauc

SEQ ID NO: 2230140 - RNA, 19 nt, Artificial Sequence
  Description of Artificial Sequence: Synthetic oligonucleotide
cucucacucuccucccgaa

SEQ ID NO: 2230141 - RNA, 19 nt, Artificial Sequence
  Description of Artificial Sequence: Synthetic oligonucleotide
gacagucgaauguguucau

SEQ ID NO: 2230142 - RNA, 19 nt, Artificial Sequence
  Description of Artificial Sequence: Synthetic oligonucleotide
cagcgggguaacugaagaa

SEQ ID NO: 2230143 - RNA, 19 nt, Artificial Sequence
  Description of Artificial Sequence: Synthetic oligonucleotide
cucaauggucugcuuuccu

SEQ ID NO: 2230144 - RNA, 19 nt, Artificial Sequence
  Description of Artificial Sequence: Synthetic oligonucleotide
gagguucgguaaaccuauc

SEQ ID NO: 2230145 - RNA, 19 nt, Artificial Sequence
  Description of Artificial Sequence: Synthetic oligonucleotide
ugccugcauucaugauuuc

SEQ ID NO: 2230146 - RNA, 19 nt, Artificial Sequence
  Description of Artificial Sequence: Synthetic oligonucleotide
cuccaacgaaaggcaaaga

SEQ ID NO: 2230147 - RNA, 19 nt, Artificial Sequence
  Description of Artificial Sequence: Synthetic oligonucleotide
cuucaugggcucugauuau

SEQ ID NO: 2230148 - RNA, 19 nt, Artificial Sequence
  Description of Artificial Sequence: Synthetic oligonucleotide
ggaagacagucgaaugugu

SEQ ID NO: 2230149 - RNA, 19 nt, Artificial Sequence
  Description of Artificial Sequence: Synthetic oligonucleotide
cacugccauacuccucuaa

SEQ ID NO: 2230150 - RNA, 19 nt, Artificial Sequence
  Description of Artificial Sequence: Synthetic oligonucleotide
  modified_base (15)..(15): a, c, u, g, unknown or other
cacagagaaacugcngguu

SEQ ID NO: 2230151 - RNA, 19 nt, Artificial Sequence
  Description of Artificial Sequence: Synthetic oligonucleotide
ccucccgaagaaccgaaaa

SEQ ID NO: 2230152 - RNA, 19 nt, Artificial Sequence
  Description of Artificial Sequence: Synthetic oligonucleotide
ggcuauagugcuccugguu

SEQ ID NO: 2230153 - RNA, 19 nt, Artificial Sequence
  Description of Artificial Sequence: Synthetic oligonucleotide
caauggcucugauuuuauu

SEQ ID NO: 2230154 - RNA, 19 nt, Artificial Sequence
  Description of Artificial Sequence: Synthetic oligonucleotide
gagugauggaaagcccguu

SEQ ID NO: 2230155 - RNA, 19 nt, Artificial Sequence
  Description of Artificial Sequence: Synthetic oligonucleotide
caacaucucugugacuuuu

SEQ ID NO: 2230156 - RNA, 19 nt, Artificial Sequence
  Description of Artificial Sequence: Synthetic oligonucleotide
gcgggguaacugaagaagu

SEQ ID NO: 2230157 - RNA, 19 nt, Artificial Sequence
  Description of Artificial Sequence: Synthetic oligonucleotide
guguucauacacgcuucau

SEQ ID NO: 2230158 - RNA, 19 nt, Artificial Sequence
  Description of Artificial Sequence: Synthetic oligonucleotide
ggguuagcacacucucacu

SEQ ID NO: 2230159 - RNA, 19 nt, Artificial Sequence
  Description of Artificial Sequence: Synthetic oligonucleotide
cgguaaaccuaucuaauuu

SEQ ID NO: 2230160 - RNA, 19 nt, Artificial Sequence
  Description of Artificial Sequence: Synthetic oligonucleotide
ggagugugccugugggagu

SEQ ID NO: 2230161 - RNA, 19 nt, Artificial Sequence
  Description of Artificial Sequence: Synthetic oligonucleotide
cucggacaguguuguggcu

SEQ ID NO: 2230162 - RNA, 19 nt, Artificial Sequence
  Description of Artificial Sequence: Synthetic oligonucleotide
ccauuuccgaauacuuaau

SEQ ID NO: 2230163 - RNA, 19 nt, Artificial Sequence
  Description of Artificial Sequence: Synthetic oligonucleotide
ggcucugauuauugauaau

SEQ ID NO: 2230164 - RNA, 19 nt, Artificial Sequence
  Description of Artificial Sequence: Synthetic oligonucleotide
cugugucguccucggagau

SEQ ID NO: 2230165 - RNA, 19 nt, Artificial Sequence
  Description of Artificial Sequence: Synthetic oligonucleotide
ccgugccauuuucccaaug

SEQ ID NO: 2230166 - RNA, 19 nt, Artificial Sequence
  Description of Artificial Sequence: Synthetic oligonucleotide
agcccguugcuuggcucuu

SEQ ID NO: 2230167 - RNA, 19 nt, Artificial Sequence
  Description of Artificial Sequence: Synthetic oligonucleotide
gggguguggagagcaguua

SEQ ID NO: 2230168 - RNA, 19 nt, Artificial Sequence
  Description of Artificial Sequence: Synthetic oligonucleotide
gugaggcccuugaggguua

SEQ ID NO: 2230169 - RNA, 19 nt, Artificial Sequence
  Description of Artificial Sequence: Synthetic oligonucleotide
ccgaaaagacccgugccau

SEQ ID NO: 2230170 - RNA, 19 nt, Artificial Sequence
  Description of Artificial Sequence: Synthetic oligonucleotide
cacucucaauggucugcuu

SEQ ID NO: 2230171 - RNA, 19 nt, Artificial Sequence
  Description of Artificial Sequence: Synthetic oligonucleotide
cgagguaauuaggggcaga

SEQ ID NO: 2230172 - RNA, 19 nt, Artificial Sequence
  Description of Artificial Sequence: Synthetic oligonucleotide
ccaacaucucugugacuuu

SEQ ID NO: 2230173 - RNA, 19 nt, Artificial Sequence
  Description of Artificial Sequence: Synthetic oligonucleotide
gcucaucaucagagcauau

SEQ ID NO: 2230174 - RNA, 19 nt, Artificial Sequence
  Description of Artificial Sequence: Synthetic oligonucleotide
gcccguugcuuggcucuuc

SEQ ID NO: 2230175 - RNA, 19 nt, Artificial Sequence
  Description of Artificial Sequence: Synthetic oligonucleotide
gggcuucaugggcucugau

SEQ ID NO: 2230176 - RNA, 19 nt, Artificial Sequence
  Description of Artificial Sequence: Synthetic oligonucleotide
cgaaaagacccgugccauu

SEQ ID NO: 2230177 - RNA, 19 nt, Artificial Sequence
  Description of Artificial Sequence: Synthetic oligonucleotide
ccccaaggggagugugccu

SEQ ID NO: 2230178 - RNA, 19 nt, Artificial Sequence
  Description of Artificial Sequence: Synthetic oligonucleotide
cccgugccauuuucccaau

SEQ ID NO: 2230179 - RNA, 19 nt, Artificial Sequence
  Description of Artificial Sequence: Synthetic oligonucleotide
  modified_base (1)..(1): a, c, u, g, unknown or other
ngguuuaagagagcagcaa

SEQ ID NO: 2230180 - RNA, 19 nt, Artificial Sequence
  Description of Artificial Sequence: Synthetic oligonucleotide
ucuuaaaugacacacuagc

SEQ ID NO: 2230181 - RNA, 19 nt, Artificial Sequence
  Description of Artificial Sequence: Synthetic oligonucleotide
ugauguaagacauugggag

SEQ ID NO: 2230182 - RNA, 19 nt, Artificial Sequence
  Description of Artificial Sequence: Synthetic oligonucleotide
aaauucauugcgcuccugc

SEQ ID NO: 2230183 - RNA, 19 nt, Artificial Sequence
  Description of Artificial Sequence: Synthetic oligonucleotide
agugauguaagacauuggg

SEQ ID NO: 2230184 - RNA, 19 nt, Artificial Sequence
  Description of Artificial Sequence: Synthetic oligonucleotide
ugaagaauacacuucaucu

SEQ ID NO: 2230185 - RNA, 19 nt, Artificial Sequence
  Description of Artificial Sequence: Synthetic oligonucleotide
uuaaaugacacacuagcac

SEQ ID NO: 2230186 - RNA, 19 nt, Artificial Sequence
  Description of Artificial Sequence: Synthetic oligonucleotide
aaaccagugaagaauacac

SEQ ID NO: 2230187 - RNA, 19 nt, Artificial Sequence
  Description of Artificial Sequence: Synthetic oligonucleotide
uggaacagagauaacgccg

SEQ ID NO: 2230188 - RNA, 19 nt, Artificial Sequence
  Description of Artificial Sequence: Synthetic oligonucleotide
uaucgucuggcacugaagg

SEQ ID NO: 2230189 - RNA, 19 nt, Artificial Sequence
  Description of Artificial Sequence: Synthetic oligonucleotide
aaaucuggcucacugaccu

SEQ ID NO: 2230190 - RNA, 19 nt, Artificial Sequence
  Description of Artificial Sequence: Synthetic oligonucleotide
aggccuaucagucuuuacc

SEQ ID NO: 2230191 - RNA, 19 nt, Artificial Sequence
  Description of Artificial Sequence: Synthetic oligonucleotide
ugaaucuucacuagaguca

SEQ ID NO: 2230192 - RNA, 19 nt, Artificial Sequence
  Description of Artificial Sequence: Synthetic oligonucleotide
gaagauacaagguggccgg

SEQ ID NO: 2230193 - RNA, 19 nt, Artificial Sequence
  Description of Artificial Sequence: Synthetic oligonucleotide
aaccacugaucccaaagac

SEQ ID NO: 2230194 - RNA, 19 nt, Artificial Sequence
  Description of Artificial Sequence: Synthetic oligonucleotide
uguagauccacgcgcacgg

SEQ ID NO: 2230195 - RNA, 19 nt, Artificial Sequence
  Description of Artificial Sequence: Synthetic oligonucleotide
gauguaagacauugggagg

SEQ ID NO: 2230196 - RNA, 19 nt, Artificial Sequence
  Description of Artificial Sequence: Synthetic oligonucleotide
agcgcgagccuguagaucc

SEQ ID NO: 2230197 - RNA, 19 nt, Artificial Sequence
  Description of Artificial Sequence: Synthetic oligonucleotide
uagaaaacguucccgcugg

SEQ ID NO: 2230198 - RNA, 19 nt, Artificial Sequence
  Description of Artificial Sequence: Synthetic oligonucleotide
cugucugacaaauucauug

SEQ ID NO: 2230199 - RNA, 19 nt, Artificial Sequence
  Description of Artificial Sequence: Synthetic oligonucleotide
aguaccucacgcaagaugg

SEQ ID NO: 2230200 - RNA, 19 nt, Artificial Sequence
  Description of Artificial Sequence: Synthetic oligonucleotide
agucuuuaccagcaguggc

SEQ ID NO: 2230201 - RNA, 19 nt, Artificial Sequence
  Description of Artificial Sequence: Synthetic oligonucleotide
aggaagacgauuccgagug

SEQ ID NO: 2230202 - RNA, 19 nt, Artificial Sequence
  Description of Artificial Sequence: Synthetic oligonucleotide
aaacuuugccacaaaaucu

SEQ ID NO: 2230203 - RNA, 19 nt, Artificial Sequence
  Description of Artificial Sequence: Synthetic oligonucleotide
guucaggcaaucuuaaaug

SEQ ID NO: 2230204 - RNA, 19 nt, Artificial Sequence
  Description of Artificial Sequence: Synthetic oligonucleotide
uuguagaaaacguucccgc

SEQ ID NO: 2230205 - RNA, 19 nt, Artificial Sequence
  Description of Artificial Sequence: Synthetic oligonucleotide
aaacguucccgcuggggac

SEQ ID NO: 2230206 - RNA, 19 nt, Artificial Sequence
  Description of Artificial Sequence: Synthetic oligonucleotide
ugaucugaaggccuaucag

SEQ ID NO: 2230207 - RNA, 19 nt, Artificial Sequence
  Description of Artificial Sequence: Synthetic oligonucleotide
ugucugacaaauucauugc

SEQ ID NO: 2230208 - RNA, 19 nt, Artificial Sequence
  Description of Artificial Sequence: Synthetic oligonucleotide
ugcuugguaaaacuuugcc

SEQ ID NO: 2230209 - RNA, 19 nt, Artificial Sequence
  Description of Artificial Sequence: Synthetic oligonucleotide
gaagaauacacuucaucuc

SEQ ID NO: 2230210 - RNA, 19 nt, Artificial Sequence
  Description of Artificial Sequence: Synthetic oligonucleotide
agccuguagauccacgcgc

SEQ ID NO: 2230211 - RNA, 19 nt, Artificial Sequence
  Description of Artificial Sequence: Synthetic oligonucleotide
aguucaggcaaucuuaaau

SEQ ID NO: 2230212 - RNA, 19 nt, Artificial Sequence
  Description of Artificial Sequence: Synthetic oligonucleotide
aacggcagcggcgcgaucc

SEQ ID NO: 2230213 - RNA, 19 nt, Artificial Sequence
  Description of Artificial Sequence: Synthetic oligonucleotide
aauucauugcgcuccugcu

SEQ ID NO: 2230214 - RNA, 19 nt, Artificial Sequence
  Description of Artificial Sequence: Synthetic oligonucleotide
guagagacgagucuccgcc

SEQ ID NO: 2230215 - RNA, 19 nt, Artificial Sequence
  Description of Artificial Sequence: Synthetic oligonucleotide
cuuguagaaaacguucccg

SEQ ID NO: 2230216 - RNA, 19 nt, Artificial Sequence
  Description of Artificial Sequence: Synthetic oligonucleotide
agugcucuggucaagcggc

SEQ ID NO: 2230217 - RNA, 19 nt, Artificial Sequence
  Description of Artificial Sequence: Synthetic oligonucleotide
uucaggcaaucuuaaauga

SEQ ID NO: 2230218 - RNA, 19 nt, Artificial Sequence
  Description of Artificial Sequence: Synthetic oligonucleotide
caaaaucuggcucacugac

SEQ ID NO: 2230219 - RNA, 19 nt, Artificial Sequence
  Description of Artificial Sequence: Synthetic oligonucleotide
acuagcacugaaucuucac

SEQ ID NO: 2230220 - RNA, 19 nt, Artificial Sequence
  Description of Artificial Sequence: Synthetic oligonucleotide
acuggcaauaucgucuggc

SEQ ID NO: 2230221 - RNA, 19 nt, Artificial Sequence
  Description of Artificial Sequence: Synthetic oligonucleotide
aauaucgucuggcacugaa

SEQ ID NO: 2230222 - RNA, 19 nt, Artificial Sequence
  Description of Artificial Sequence: Synthetic oligonucleotide
ggucaagcggcucaaaggg

SEQ ID NO: 2230223 - RNA, 19 nt, Artificial Sequence
  Description of Artificial Sequence: Synthetic oligonucleotide
cacugaaucuucacuagag

SEQ ID NO: 2230224 - RNA, 19 nt, Artificial Sequence
  Description of Artificial Sequence: Synthetic oligonucleotide
ugaucacacauaguuaucu

SEQ ID NO: 2230225 - RNA, 19 nt, Artificial Sequence
  Description of Artificial Sequence: Synthetic oligonucleotide
ugcgcuggaacagagauaa

SEQ ID NO: 2230226 - RNA, 19 nt, Artificial Sequence
  Description of Artificial Sequence: Synthetic oligonucleotide
auucauugcgcuccugcuc

SEQ ID NO: 2230227 - RNA, 19 nt, Artificial Sequence
  Description of Artificial Sequence: Synthetic oligonucleotide
agaacuggcaauaucgucu

SEQ ID NO: 2230228 - RNA, 19 nt, Artificial Sequence
  Description of Artificial Sequence: Synthetic oligonucleotide
ucaggcaaucuuaaaugac

SEQ ID NO: 2230229 - RNA, 19 nt, Artificial Sequence
  Description of Artificial Sequence: Synthetic oligonucleotide
aaaugacacacuagcacug

SEQ ID NO: 2230230 - RNA, 19 nt, Artificial Sequence
  Description of Artificial Sequence: Synthetic oligonucleotide
ucuuuaccagcaguggcgg

SEQ ID NO: 2230231 - RNA, 19 nt, Artificial Sequence
  Description of Artificial Sequence: Synthetic oligonucleotide
agagacgagucuccgccgc

SEQ ID NO: 2230232 - RNA, 19 nt, Artificial Sequence
  Description of Artificial Sequence: Synthetic oligonucleotide
uguagaaaacguucccgcu

SEQ ID NO: 2230233 - RNA, 19 nt, Artificial Sequence
  Description of Artificial Sequence: Synthetic oligonucleotide
cuuaaaugacacacuagca

SEQ ID NO: 2230234 - RNA, 19 nt, Artificial Sequence
  Description of Artificial Sequence: Synthetic oligonucleotide
cuggaacagagauaacgcc

SEQ ID NO: 2230235 - RNA, 19 nt, Artificial Sequence
  Description of Artificial Sequence: Synthetic oligonucleotide
aucgucuggcacugaaggc

SEQ ID NO: 2230236 - RNA, 19 nt, Artificial Sequence
  Description of Artificial Sequence: Synthetic oligonucleotide
ugcaguucaggcaaucuua

SEQ ID NO: 2230237 - RNA, 19 nt, Artificial Sequence
  Description of Artificial Sequence: Synthetic oligonucleotide
cacauaguuaucuucuuga

SEQ ID NO: 2230238 - RNA, 19 nt, Artificial Sequence
  Description of Artificial Sequence: Synthetic oligonucleotide
gaaggcaacacagaaggga

SEQ ID NO: 2230239 - RNA, 19 nt, Artificial Sequence
  Description of Artificial Sequence: Synthetic oligonucleotide
gcaaucuuaaaugacacac

SEQ ID NO: 2230240 - RNA, 19 nt, Artificial Sequence
  Description of Artificial Sequence: Synthetic oligonucleotide
gucuuuaccagcaguggcg

SEQ ID NO: 2230241 - RNA, 19 nt, Artificial Sequence
  Description of Artificial Sequence: Synthetic oligonucleotide
gagugcucuggucaagcgg

SEQ ID NO: 2230242 - RNA, 19 nt, Artificial Sequence
  Description of Artificial Sequence: Synthetic oligonucleotide
cucgaagauacaagguggc

SEQ ID NO: 2230243 - RNA, 19 nt, Artificial Sequence
  Description of Artificial Sequence: Synthetic oligonucleotide
uaccaggucuuguagaaaa

SEQ ID NO: 2230244 - RNA, 19 nt, Artificial Sequence
  Description of Artificial Sequence: Synthetic oligonucleotide
acaaaaucuggcucacuga

SEQ ID NO: 2230245 - RNA, 19 nt, Artificial Sequence
  Description of Artificial Sequence: Synthetic oligonucleotide
acuagagucauggucuuug

SEQ ID NO: 2230246 - RNA, 19 nt, Artificial Sequence
  Description of Artificial Sequence: Synthetic oligonucleotide
uuuggcuugaucacacaua

SEQ ID NO: 2230247 - RNA, 19 nt, Artificial Sequence
  Description of Artificial Sequence: Synthetic oligonucleotide
aacguucccgcuggggacc

SEQ ID NO: 2230248 - RNA, 19 nt, Artificial Sequence
  Description of Artificial Sequence: Synthetic oligonucleotide
aggcaaucuuaaaugacac

SEQ ID NO: 2230249 - RNA, 19 nt, Artificial Sequence
  Description of Artificial Sequence: Synthetic oligonucleotide
uuagcuaccaggucuugua

SEQ ID NO: 2230250 - RNA, 19 nt, Artificial Sequence
  Description of Artificial Sequence: Synthetic oligonucleotide
gaguaccucacgcaagaug

SEQ ID NO: 2230251 - RNA, 19 nt, Artificial Sequence
  Description of Artificial Sequence: Synthetic oligonucleotide
acgauuccgaguggcaucc

SEQ ID NO: 2230252 - RNA, 19 nt, Artificial Sequence
  Description of Artificial Sequence: Synthetic oligonucleotide
aguuggaguggcuugcgcu

SEQ ID NO: 2230253 - RNA, 19 nt, Artificial Sequence
  Description of Artificial Sequence: Synthetic oligonucleotide
uggacgggaagccucuuca

SEQ ID NO: 2230254 - RNA, 19 nt, Artificial Sequence
  Description of Artificial Sequence: Synthetic oligonucleotide
aagaugcaccacuaccccu

SEQ ID NO: 2230255 - RNA, 19 nt, Artificial Sequence
  Description of Artificial Sequence: Synthetic oligonucleotide
auguaagacauugggagga

SEQ ID NO: 2230256 - RNA, 19 nt, Artificial Sequence
  Description of Artificial Sequence: Synthetic oligonucleotide
gaagacgauuccgaguggc

SEQ ID NO: 2230257 - RNA, 19 nt, Artificial Sequence
  Description of Artificial Sequence: Synthetic oligonucleotide
caggcaaucuuaaaugaca

SEQ ID NO: 2230258 - RNA, 19 nt, Artificial Sequence
  Description of Artificial Sequence: Synthetic oligonucleotide
uggggacccgaccaacugg

SEQ ID NO: 2230259 - RNA, 19 nt, Artificial Sequence
  Description of Artificial Sequence: Synthetic oligonucleotide
uugguaaaacuuugccaca

SEQ ID NO: 2230260 - RNA, 19 nt, Artificial Sequence
  Description of Artificial Sequence: Synthetic oligonucleotide
cucagcccaaccucgaaac

SEQ ID NO: 2230261 - RNA, 19 nt, Artificial Sequence
  Description of Artificial Sequence: Synthetic oligonucleotide
ucgucuggcacugaaggca

SEQ ID NO: 2230262 - RNA, 19 nt, Artificial Sequence
  Description of Artificial Sequence: Synthetic oligonucleotide
acguagcugacacucgaag

SEQ ID NO: 2230263 - RNA, 19 nt, Artificial Sequence
  Description of Artificial Sequence: Synthetic oligonucleotide
gagauaacgccgguucccg

SEQ ID NO: 2230264 - RNA, 19 nt, Artificial Sequence
  Description of Artificial Sequence: Synthetic oligonucleotide
acuggcaaaccagugaaga

SEQ ID NO: 2230265 - RNA, 19 nt, Artificial Sequence
  Description of Artificial Sequence: Synthetic oligonucleotide
aaggccgcacuggagcagc

SEQ ID NO: 2230266 - RNA, 19 nt, Artificial Sequence
  Description of Artificial Sequence: Synthetic oligonucleotide
uugccacaaaaucuggcuc

SEQ ID NO: 2230267 - RNA, 19 nt, Artificial Sequence
  Description of Artificial Sequence: Synthetic oligonucleotide
aagagcgggcagaagagug

SEQ ID NO: 2230268 - RNA, 19 nt, Artificial Sequence
  Description of Artificial Sequence: Synthetic oligonucleotide
gaucccaaagacguagcug

SEQ ID NO: 2230269 - RNA, 19 nt, Artificial Sequence
  Description of Artificial Sequence: Synthetic oligonucleotide
ugaucccaaagacguagcu

SEQ ID NO: 2230270 - RNA, 19 nt, Artificial Sequence
  Description of Artificial Sequence: Synthetic oligonucleotide
aucagucuuuaccagcagu

SEQ ID NO: 2230271 - RNA, 19 nt, Artificial Sequence
  Description of Artificial Sequence: Synthetic oligonucleotide
uagcuaccaggucuuguag

SEQ ID NO: 2230272 - RNA, 19 nt, Artificial Sequence
  Description of Artificial Sequence: Synthetic oligonucleotide
uaccucacgcaagauggcg

SEQ ID NO: 2230273 - RNA, 19 nt, Artificial Sequence
  Description of Artificial Sequence: Synthetic oligonucleotide
ggaacagagauaacgccgg

SEQ ID NO: 2230274 - RNA, 19 nt, Artificial Sequence
  Description of Artificial Sequence: Synthetic oligonucleotide
aaugacacacuagcacuga

SEQ ID NO: 2230275 - RNA, 19 nt, Artificial Sequence
  Description of Artificial Sequence: Synthetic oligonucleotide
cuugaucacacauaguuau

SEQ ID NO: 2230276 - RNA, 19 nt, Artificial Sequence
  Description of Artificial Sequence: Synthetic oligonucleotide
ggcacugaaggcaacacag

SEQ ID NO: 2230277 - RNA, 19 nt, Artificial Sequence
  Description of Artificial Sequence: Synthetic oligonucleotide
aguggcauccccgaagaug

SEQ ID NO: 2230278 - RNA, 19 nt, Artificial Sequence
  Description of Artificial Sequence: Synthetic oligonucleotide
gauuccgaguggcaucccc

SEQ ID NO: 2230279 - RNA, 19 nt, Artificial Sequence
  Description of Artificial Sequence: Synthetic oligonucleotide
acacacuagcacugaaucu

SEQ ID NO: 2230280 - RNA, 19 nt, Artificial Sequence
  Description of Artificial Sequence: Synthetic oligonucleotide
uggcaauaucgucuggcac

SEQ ID NO: 2230281 - RNA, 19 nt, Artificial Sequence
  Description of Artificial Sequence: Synthetic oligonucleotide
gagcggacccgguagagac

SEQ ID NO: 2230282 - RNA, 19 nt, Artificial Sequence
  Description of Artificial Sequence: Synthetic oligonucleotide
aucuuaaaugacacacuag

SEQ ID NO: 2230283 - RNA, 19 nt, Artificial Sequence
  Description of Artificial Sequence: Synthetic oligonucleotide
uagagacgagucuccgccg

SEQ ID NO: 2230284 - RNA, 19 nt, Artificial Sequence
  Description of Artificial Sequence: Synthetic oligonucleotide
caggcacugccuuagcuac

SEQ ID NO: 2230285 - RNA, 19 nt, Artificial Sequence
  Description of Artificial Sequence: Synthetic oligonucleotide
cucgaaaccacugauccca

SEQ ID NO: 2230286 - RNA, 19 nt, Artificial Sequence
  Description of Artificial Sequence: Synthetic oligonucleotide
uugaucacacauaguuauc

SEQ ID NO: 2230287 - RNA, 19 nt, Artificial Sequence
  Description of Artificial Sequence: Synthetic oligonucleotide
aagacguagcugacacucg

SEQ ID NO: 2230288 - RNA, 19 nt, Artificial Sequence
  Description of Artificial Sequence: Synthetic oligonucleotide
cucucaggccgccagcgcg

SEQ ID NO: 2230289 - RNA, 19 nt, Artificial Sequence
  Description of Artificial Sequence: Synthetic oligonucleotide
ggcaacacagaagggaagg

SEQ ID NO: 2230290 - RNA, 19 nt, Artificial Sequence
  Description of Artificial Sequence: Synthetic oligonucleotide
agagcgggcagaagagugc

SEQ ID NO: 2230291 - RNA, 19 nt, Artificial Sequence
  Description of Artificial Sequence: Synthetic oligonucleotide
gugaccgaccugaaggccg

SEQ ID NO: 2230292 - RNA, 19 nt, Artificial Sequence
  Description of Artificial Sequence: Synthetic oligonucleotide
agacguagcugacacucga

SEQ ID NO: 2230293 - RNA, 19 nt, Artificial Sequence
  Description of Artificial Sequence: Synthetic oligonucleotide
ucgaagauacaagguggcc

SEQ ID NO: 2230294 - RNA, 19 nt, Artificial Sequence
  Description of Artificial Sequence: Synthetic oligonucleotide
aagaugcccgaagccgucg

SEQ ID NO: 2230295 - RNA, 19 nt, Artificial Sequence
  Description of Artificial Sequence: Synthetic oligonucleotide
uccccgaagaugcccgaag

SEQ ID NO: 2230296 - RNA, 19 nt, Artificial Sequence
  Description of Artificial Sequence: Synthetic oligonucleotide
cagagauaacgccgguucc

SEQ ID NO: 2230297 - RNA, 19 nt, Artificial Sequence
  Description of Artificial Sequence: Synthetic oligonucleotide
ccaaagacguagcugacac

SEQ ID NO: 2230298 - RNA, 19 nt, Artificial Sequence
  Description of Artificial Sequence: Synthetic oligonucleotide
uucuugaucugaaggccua

SEQ ID NO: 2230299 - RNA, 19 nt, Artificial Sequence
  Description of Artificial Sequence: Synthetic oligonucleotide
cuguagauccacgcgcacg

SEQ ID NO: 2230300 - RNA, 19 nt, Artificial Sequence
  Description of Artificial Sequence: Synthetic oligonucleotide
cagucuuuaccagcagugg

SEQ ID NO: 2230301 - RNA, 19 nt, Artificial Sequence
  Description of Artificial Sequence: Synthetic oligonucleotide
ccuaucagucuuuaccagc

SEQ ID NO: 2230302 - RNA, 19 nt, Artificial Sequence
  Description of Artificial Sequence: Synthetic oligonucleotide
gacgauuccgaguggcauc

SEQ ID NO: 2230303 - RNA, 19 nt, Artificial Sequence
  Description of Artificial Sequence: Synthetic oligonucleotide
cuaccccugcaguucaggc

SEQ ID NO: 2230304 - RNA, 19 nt, Artificial Sequence
  Description of Artificial Sequence: Synthetic oligonucleotide
gaggugucggaggggagcg

SEQ ID NO: 2230305 - RNA, 19 nt, Artificial Sequence
  Description of Artificial Sequence: Synthetic oligonucleotide
gaggaggggaagaacuggc

SEQ ID NO: 2230306 - RNA, 19 nt, Artificial Sequence
  Description of Artificial Sequence: Synthetic oligonucleotide
gcuggaacagagauaacgc

SEQ ID NO: 2230307 - RNA, 19 nt, Artificial Sequence
  Description of Artificial Sequence: Synthetic oligonucleotide
ucggcgcgagcucucaggc

SEQ ID NO: 2230308 - RNA, 19 nt, Artificial Sequence
  Description of Artificial Sequence: Synthetic oligonucleotide
uaguuggaguggcuugcgc

SEQ ID NO: 2230309 - RNA, 19 nt, Artificial Sequence
  Description of Artificial Sequence: Synthetic oligonucleotide
aggccuagccaagagcggg

SEQ ID NO: 2230310 - RNA, 19 nt, Artificial Sequence
  Description of Artificial Sequence: Synthetic oligonucleotide
agcuaccaggucuuguaga

SEQ ID NO: 2230311 - RNA, 19 nt, Artificial Sequence
  Description of Artificial Sequence: Synthetic oligonucleotide
agaaaacguucccgcuggg

SEQ ID NO: 2230312 - RNA, 19 nt, Artificial Sequence
  Description of Artificial Sequence: Synthetic oligonucleotide
ugaccgaccugaaggccgc

SEQ ID NO: 2230313 - RNA, 19 nt, Artificial Sequence
  Description of Artificial Sequence: Synthetic oligonucleotide
gaagccgucgggacggacc

SEQ ID NO: 2230314 - RNA, 19 nt, Artificial Sequence
  Description of Artificial Sequence: Synthetic oligonucleotide
auuccgaguggcauccccg

SEQ ID NO: 2230315 - RNA, 19 nt, Artificial Sequence
  Description of Artificial Sequence: Synthetic oligonucleotide
agauggcggagcuggagga

SEQ ID NO: 2230316 - RNA, 19 nt, Artificial Sequence
  Description of Artificial Sequence: Synthetic oligonucleotide
agauccacgcgcacgguag

SEQ ID NO: 2230317 - RNA, 19 nt, Artificial Sequence
  Description of Artificial Sequence: Synthetic oligonucleotide
cgaggccuagccaagagcg

SEQ ID NO: 2230318 - RNA, 19 nt, Artificial Sequence
  Description of Artificial Sequence: Synthetic oligonucleotide
agcguugccgaggugucgg

SEQ ID NO: 2230319 - RNA, 19 nt, Artificial Sequence
  Description of Artificial Sequence: Synthetic oligonucleotide
gaugcccgaagccgucggg

SEQ ID NO: 2230320 - RNA, 19 nt, Artificial Sequence
  Description of Artificial Sequence: Synthetic oligonucleotide
gugauguaagacauuggga

SEQ ID NO: 2230321 - RNA, 19 nt, Artificial Sequence
  Description of Artificial Sequence: Synthetic oligonucleotide
agaugcccgaagccgucgg

SEQ ID NO: 2230322 - RNA, 19 nt, Artificial Sequence
  Description of Artificial Sequence: Synthetic oligonucleotide
gagacgagucuccgccgcg

SEQ ID NO: 2230323 - RNA, 19 nt, Artificial Sequence
  Description of Artificial Sequence: Synthetic oligonucleotide
caacuggcaaaccagugaa

SEQ ID NO: 2230324 - RNA, 19 nt, Artificial Sequence
  Description of Artificial Sequence: Synthetic oligonucleotide
gccgguucccgccuuaacg

SEQ ID NO: 2230325 - RNA, 19 nt, Artificial Sequence
  Description of Artificial Sequence: Synthetic oligonucleotide
guagcugacacucgaagau

SEQ ID NO: 2230326 - RNA, 19 nt, Artificial Sequence
  Description of Artificial Sequence: Synthetic oligonucleotide
gugacucuggacgggaagc

SEQ ID NO: 2230327 - RNA, 19 nt, Artificial Sequence
  Description of Artificial Sequence: Synthetic oligonucleotide
aguggcggccacugcuugg

SEQ ID NO: 2230328 - RNA, 19 nt, Artificial Sequence
  Description of Artificial Sequence: Synthetic oligonucleotide
ucuuuggcuugaucacaca

SEQ ID NO: 2230329 - RNA, 19 nt, Artificial Sequence
  Description of Artificial Sequence: Synthetic oligonucleotide
ggccuaucagucuuuacca

SEQ ID NO: 2230330 - RNA, 19 nt, Artificial Sequence
  Description of Artificial Sequence: Synthetic oligonucleotide
cucggcgcgagcucucagg

SEQ ID NO: 2230331 - RNA, 19 nt, Artificial Sequence
  Description of Artificial Sequence: Synthetic oligonucleotide
aacagagauaacgccgguu

SEQ ID NO: 2230332 - RNA, 19 nt, Artificial Sequence
  Description of Artificial Sequence: Synthetic oligonucleotide
auaucgucuggcacugaag

SEQ ID NO: 2230333 - RNA, 19 nt, Artificial Sequence
  Description of Artificial Sequence: Synthetic oligonucleotide
aggggugagaagucagcgu

SEQ ID NO: 2230334 - RNA, 19 nt, Artificial Sequence
  Description of Artificial Sequence: Synthetic oligonucleotide
accucacgcaagauggcgg

SEQ ID NO: 2230335 - RNA, 19 nt, Artificial Sequence
  Description of Artificial Sequence: Synthetic oligonucleotide
aagacgauuccgaguggca

SEQ ID NO: 2230336 - RNA, 19 nt, Artificial Sequence
  Description of Artificial Sequence: Synthetic oligonucleotide
agcgaggccuagccaagag

SEQ ID NO: 2230337 - RNA, 19 nt, Artificial Sequence
  Description of Artificial Sequence: Synthetic oligonucleotide
ucucaggccgccagcgcga

SEQ ID NO: 2230338 - RNA, 19 nt, Artificial Sequence
  Description of Artificial Sequence: Synthetic oligonucleotide
ucagcguugccgagguguc

SEQ ID NO: 2230339 - RNA, 19 nt, Artificial Sequence
  Description of Artificial Sequence: Synthetic oligonucleotide
acuaccccugcaguucagg

SEQ ID NO: 2230340 - RNA, 19 nt, Artificial Sequence
  Description of Artificial Sequence: Synthetic oligonucleotide
uuccgaguggcauccccga

SEQ ID NO: 2230341 - RNA, 19 nt, Artificial Sequence
  Description of Artificial Sequence: Synthetic oligonucleotide
gucaagcggcucaaagggg

SEQ ID NO: 2230342 - RNA, 19 nt, Artificial Sequence
  Description of Artificial Sequence: Synthetic oligonucleotide
guaguuggaguggcuugcg

SEQ ID NO: 2230343 - RNA, 19 nt, Artificial Sequence
  Description of Artificial Sequence: Synthetic oligonucleotide
uagauccacgcgcacggua

SEQ ID NO: 2230344 - RNA, 19 nt, Artificial Sequence
  Description of Artificial Sequence: Synthetic oligonucleotide
gacccgaccaacuggcaaa

SEQ ID NO: 2230345 - RNA, 19 nt, Artificial Sequence
  Description of Artificial Sequence: Synthetic oligonucleotide
cuggcaauaucgucuggca

SEQ ID NO: 2230346 - RNA, 19 nt, Artificial Sequence
  Description of Artificial Sequence: Synthetic oligonucleotide
auaacgccgguucccgccu

SEQ ID NO: 2230347 - RNA, 19 nt, Artificial Sequence
  Description of Artificial Sequence: Synthetic oligonucleotide
agcucucaggccgccagcg

SEQ ID NO: 2230348 - RNA, 19 nt, Artificial Sequence
  Description of Artificial Sequence: Synthetic oligonucleotide
ggaggaggggaagaacugg

SEQ ID NO: 2230349 - RNA, 19 nt, Artificial Sequence
  Description of Artificial Sequence: Synthetic oligonucleotide
ccaggucuuguagaaaacg

SEQ ID NO: 2230350 - RNA, 19 nt, Artificial Sequence
  Description of Artificial Sequence: Synthetic oligonucleotide
cgggugaccgaccugaagg

SEQ ID NO: 2230351 - RNA, 19 nt, Artificial Sequence
  Description of Artificial Sequence: Synthetic oligonucleotide
ggcaauaucgucuggcacu

SEQ ID NO: 2230352 - RNA, 19 nt, Artificial Sequence
  Description of Artificial Sequence: Synthetic oligonucleotide
caaucuuaaaugacacacu

SEQ ID NO: 2230353 - RNA, 19 nt, Artificial Sequence
  Description of Artificial Sequence: Synthetic oligonucleotide
acggcagcggcgcgauccc

SEQ ID NO: 2230354 - RNA, 19 nt, Artificial Sequence
  Description of Artificial Sequence: Synthetic oligonucleotide
gguagagacgagucuccgc

SEQ ID NO: 2230355 - RNA, 19 nt, Artificial Sequence
  Description of Artificial Sequence: Synthetic oligonucleotide
ucccaaagacguagcugac

SEQ ID NO: 2230356 - RNA, 19 nt, Artificial Sequence
  Description of Artificial Sequence: Synthetic oligonucleotide
gacggacccgaguaccuca

SEQ ID NO: 2230357 - RNA, 19 nt, Artificial Sequence
  Description of Artificial Sequence: Synthetic oligonucleotide
gacccgaguaccucacgca

SEQ ID NO: 2230358 - RNA, 19 nt, Artificial Sequence
  Description of Artificial Sequence: Synthetic oligonucleotide
ggugacucuggacgggaag

SEQ ID NO: 2230359 - RNA, 19 nt, Artificial Sequence
  Description of Artificial Sequence: Synthetic oligonucleotide
gaggaagacgauuccgagu

SEQ ID NO: 2230360 - RNA, 19 nt, Artificial Sequence
  Description of Artificial Sequence: Synthetic oligonucleotide
ccgguucccgccuuaacgg

SEQ ID NO: 2230361 - RNA, 19 nt, Artificial Sequence
  Description of Artificial Sequence: Synthetic oligonucleotide
cuagcacugaaucuucacu

SEQ ID NO: 2230362 - RNA, 19 nt, Artificial Sequence
  Description of Artificial Sequence: Synthetic oligonucleotide
gaguggcuugcgcuggaac

SEQ ID NO: 2230363 - RNA, 19 nt, Artificial Sequence
  Description of Artificial Sequence: Synthetic oligonucleotide
gaggccuagccaagagcgg

SEQ ID NO: 2230364 - RNA, 19 nt, Artificial Sequence
  Description of Artificial Sequence: Synthetic oligonucleotide
agauacaagguggccggcu

SEQ ID NO: 2230365 - RNA, 19 nt, Artificial Sequence
  Description of Artificial Sequence: Synthetic oligonucleotide
gauggcggagcuggaggag

SEQ ID NO: 2230366 - RNA, 19 nt, Artificial Sequence
  Description of Artificial Sequence: Synthetic oligonucleotide
ccaagagcgggcagaagag

SEQ ID NO: 2230367 - RNA, 19 nt, Artificial Sequence
  Description of Artificial Sequence: Synthetic oligonucleotide
acgagucuccgccgcggcg

SEQ ID NO: 2230368 - RNA, 19 nt, Artificial Sequence
  Description of Artificial Sequence: Synthetic oligonucleotide
acccgaguaccucacgcaa

SEQ ID NO: 2230369 - RNA, 19 nt, Artificial Sequence
  Description of Artificial Sequence: Synthetic oligonucleotide
cugacacucgaagauacaa

SEQ ID NO: 2230370 - RNA, 19 nt, Artificial Sequence
  Description of Artificial Sequence: Synthetic oligonucleotide
ggacccgaguaccucacgc

SEQ ID NO: 2230371 - RNA, 19 nt, Artificial Sequence
  Description of Artificial Sequence: Synthetic oligonucleotide
gccggcuugccccagacac

SEQ ID NO: 2230372 - RNA, 19 nt, Artificial Sequence
  Description of Artificial Sequence: Synthetic oligonucleotide
ucgaaaccacugaucccaa

SEQ ID NO: 2230373 - RNA, 19 nt, Artificial Sequence
  Description of Artificial Sequence: Synthetic oligonucleotide
cuugcgcuggaacagagau

SEQ ID NO: 2230374 - RNA, 19 nt, Artificial Sequence
  Description of Artificial Sequence: Synthetic oligonucleotide
ugaaggccuaucagucuuu

SEQ ID NO: 2230375 - RNA, 19 nt, Artificial Sequence
  Description of Artificial Sequence: Synthetic oligonucleotide
ucacuagagucauggucuu

SEQ ID NO: 2230376 - RNA, 19 nt, Artificial Sequence
  Description of Artificial Sequence: Synthetic oligonucleotide
ucugcgggugaccgaccug

SEQ ID NO: 2230377 - RNA, 19 nt, Artificial Sequence
  Description of Artificial Sequence: Synthetic oligonucleotide
agacgagucuccgccgcgg

SEQ ID NO: 2230378 - RNA, 19 nt, Artificial Sequence
  Description of Artificial Sequence: Synthetic oligonucleotide
uccacgcgcacgguaguug

SEQ ID NO: 2230379 - RNA, 19 nt, Artificial Sequence
  Description of Artificial Sequence: Synthetic oligonucleotide
agacgauuccgaguggcau

SEQ ID NO: 2230380 - RNA, 19 nt, Artificial Sequence
  Description of Artificial Sequence: Synthetic oligonucleotide
acccgaccaacuggcaaac

SEQ ID NO: 2230381 - RNA, 19 nt, Artificial Sequence
  Description of Artificial Sequence: Synthetic oligonucleotide
ucccgccuuaacggcagcg

SEQ ID NO: 2230382 - RNA, 19 nt, Artificial Sequence
  Description of Artificial Sequence: Synthetic oligonucleotide
cuucuugaucugaaggccu

SEQ ID NO: 2230383 - RNA, 19 nt, Artificial Sequence
  Description of Artificial Sequence: Synthetic oligonucleotide
gacgagucuccgccgcggc

SEQ ID NO: 2230384 - RNA, 19 nt, Artificial Sequence
  Description of Artificial Sequence: Synthetic oligonucleotide
gacccgguagagacgaguc

SEQ ID NO: 2230385 - RNA, 19 nt, Artificial Sequence
  Description of Artificial Sequence: Synthetic oligonucleotide
gccuaucagucuuuaccag

SEQ ID NO: 2230386 - RNA, 19 nt, Artificial Sequence
  Description of Artificial Sequence: Synthetic oligonucleotide
cgcaagauggcggagcugg

SEQ ID NO: 2230387 - RNA, 19 nt, Artificial Sequence
  Description of Artificial Sequence: Synthetic oligonucleotide
cuggggacccgaccaacug

SEQ ID NO: 2230388 - RNA, 19 nt, Artificial Sequence
  Description of Artificial Sequence: Synthetic oligonucleotide
ggaagacgauuccgagugg

SEQ ID NO: 2230389 - RNA, 19 nt, Artificial Sequence
  Description of Artificial Sequence: Synthetic oligonucleotide
gaggggaagaacuggcaau

SEQ ID NO: 2230390 - RNA, 19 nt, Artificial Sequence
  Description of Artificial Sequence: Synthetic oligonucleotide
aggggaagaacuggcaaua

SEQ ID NO: 2230391 - RNA, 19 nt, Artificial Sequence
  Description of Artificial Sequence: Synthetic oligonucleotide
uuaacggcagcggcgcgau

SEQ ID NO: 2230392 - RNA, 19 nt, Artificial Sequence
  Description of Artificial Sequence: Synthetic oligonucleotide
cccagacacacugagcugc

SEQ ID NO: 2230393 - RNA, 19 nt, Artificial Sequence
  Description of Artificial Sequence: Synthetic oligonucleotide
ucgggacggacccgaguac

SEQ ID NO: 2230394 - RNA, 19 nt, Artificial Sequence
  Description of Artificial Sequence: Synthetic oligonucleotide
gcaauaucgucuggcacug

SEQ ID NO: 2230395 - RNA, 19 nt, Artificial Sequence
  Description of Artificial Sequence: Synthetic oligonucleotide
gggugaccgaccugaaggc

SEQ ID NO: 2230396 - RNA, 19 nt, Artificial Sequence
  Description of Artificial Sequence: Synthetic oligonucleotide
guucccgccuuaacggcag

SEQ ID NO: 2230397 - RNA, 19 nt, Artificial Sequence
  Description of Artificial Sequence: Synthetic oligonucleotide
gggaagaacuggcaauauc

SEQ ID NO: 2230398 - RNA, 19 nt, Artificial Sequence
  Description of Artificial Sequence: Synthetic oligonucleotide
acccgguagagacgagucu

SEQ ID NO: 2230399 - RNA, 19 nt, Artificial Sequence
  Description of Artificial Sequence: Synthetic oligonucleotide
agugaagaauacacuucau

SEQ ID NO: 2230400 - RNA, 19 nt, Artificial Sequence
  Description of Artificial Sequence: Synthetic oligonucleotide
uugcgcuggaacagagaua

SEQ ID NO: 2230401 - RNA, 19 nt, Artificial Sequence
  Description of Artificial Sequence: Synthetic oligonucleotide
caguguccggggcucggcg

SEQ ID NO: 2230402 - RNA, 19 nt, Artificial Sequence
  Description of Artificial Sequence: Synthetic oligonucleotide
gggagaaagaugcaccacu

SEQ ID NO: 2230403 - RNA, 19 nt, Artificial Sequence
  Description of Artificial Sequence: Synthetic oligonucleotide
ucuugaucugaaggccuau

SEQ ID NO: 2230404 - RNA, 19 nt, Artificial Sequence
  Description of Artificial Sequence: Synthetic oligonucleotide
gucgggacggacccgagua

SEQ ID NO: 2230405 - RNA, 19 nt, Artificial Sequence
  Description of Artificial Sequence: Synthetic oligonucleotide
gaaggccgcacuggagcag

SEQ ID NO: 2230406 - RNA, 19 nt, Artificial Sequence
  Description of Artificial Sequence: Synthetic oligonucleotide
acgcgcacgguaguuggag

SEQ ID NO: 2230407 - RNA, 19 nt, Artificial Sequence
  Description of Artificial Sequence: Synthetic oligonucleotide
ucggaggggagcggacccg

SEQ ID NO: 2230408 - RNA, 19 nt, Artificial Sequence
  Description of Artificial Sequence: Synthetic oligonucleotide
gauacaagguggccggcuu

SEQ ID NO: 2230409 - RNA, 19 nt, Artificial Sequence
  Description of Artificial Sequence: Synthetic oligonucleotide
uggaguggcuugcgcugga

SEQ ID NO: 2230410 - RNA, 19 nt, Artificial Sequence
  Description of Artificial Sequence: Synthetic oligonucleotide
gucagcguugccgaggugu

SEQ ID NO: 2230411 - RNA, 19 nt, Artificial Sequence
  Description of Artificial Sequence: Synthetic oligonucleotide
accgaccugaaggccgcac

SEQ ID NO: 2230412 - RNA, 19 nt, Artificial Sequence
  Description of Artificial Sequence: Synthetic oligonucleotide
gaaggaugguggcauugau

SEQ ID NO: 2230413 - RNA, 19 nt, Artificial Sequence
  Description of Artificial Sequence: Synthetic oligonucleotide
cgagccuguagauccacgc

SEQ ID NO: 2230414 - RNA, 19 nt, Artificial Sequence
  Description of Artificial Sequence: Synthetic oligonucleotide
gaggugacucuggacggga

SEQ ID NO: 2230415 - RNA, 19 nt, Artificial Sequence
  Description of Artificial Sequence: Synthetic oligonucleotide
cugccuuagcuaccagguc

SEQ ID NO: 2230416 - RNA, 19 nt, Artificial Sequence
  Description of Artificial Sequence: Synthetic oligonucleotide
cccgaagaugcccgaagcc

SEQ ID NO: 2230417 - RNA, 19 nt, Artificial Sequence
  Description of Artificial Sequence: Synthetic oligonucleotide
ccaacuggcaaaccaguga

SEQ ID NO: 2230418 - RNA, 19 nt, Artificial Sequence
  Description of Artificial Sequence: Synthetic oligonucleotide
ccugagaagugauguaaga

SEQ ID NO: 2230419 - RNA, 19 nt, Artificial Sequence
  Description of Artificial Sequence: Synthetic oligonucleotide
ccucgaaaccacugauccc

SEQ ID NO: 2230420 - RNA, 19 nt, Artificial Sequence
  Description of Artificial Sequence: Synthetic oligonucleotide
cuuaacggcagcggcgcga

SEQ ID NO: 2230421 - RNA, 19 nt, Artificial Sequence
  Description of Artificial Sequence: Synthetic oligonucleotide
ggcaaaccagugaagaaua

SEQ ID NO: 2230422 - RNA, 19 nt, Artificial Sequence
  Description of Artificial Sequence: Synthetic oligonucleotide
gccgcacuggagcagcgag

SEQ ID NO: 2230423 - RNA, 19 nt, Artificial Sequence
  Description of Artificial Sequence: Synthetic oligonucleotide
acggacccgaguaccucac

SEQ ID NO: 2230424 - RNA, 19 nt, Artificial Sequence
  Description of Artificial Sequence: Synthetic oligonucleotide
cuggacgggaagccucuuc

SEQ ID NO: 2230425 - RNA, 19 nt, Artificial Sequence
  Description of Artificial Sequence: Synthetic oligonucleotide
ccacgcgcacgguaguugg

SEQ ID NO: 2230426 - RNA, 19 nt, Artificial Sequence
  Description of Artificial Sequence: Synthetic oligonucleotide
agaagugauguaagacauu

SEQ ID NO: 2230427 - RNA, 19 nt, Artificial Sequence
  Description of Artificial Sequence: Synthetic oligonucleotide
gcgcacgguaguuggagug

SEQ ID NO: 2230428 - RNA, 19 nt, Artificial Sequence
  Description of Artificial Sequence: Synthetic oligonucleotide
cccaaccucgaaaccacug

SEQ ID NO: 2230429 - RNA, 19 nt, Artificial Sequence
  Description of Artificial Sequence: Synthetic oligonucleotide
ggaggugacucuggacggg

SEQ ID NO: 2230430 - RNA, 19 nt, Artificial Sequence
  Description of Artificial Sequence: Synthetic oligonucleotide
uggcuugcgcuggaacaga

SEQ ID NO: 2230431 - RNA, 19 nt, Artificial Sequence
  Description of Artificial Sequence: Synthetic oligonucleotide
acguucccgcuggggaccc

SEQ ID NO: 2230432 - RNA, 19 nt, Artificial Sequence
  Description of Artificial Sequence: Synthetic oligonucleotide
ccgguagagacgagucucc

SEQ ID NO: 2230433 - RNA, 19 nt, Artificial Sequence
  Description of Artificial Sequence: Synthetic oligonucleotide
cuuuccaggcacugccuua

SEQ ID NO: 2230434 - RNA, 19 nt, Artificial Sequence
  Description of Artificial Sequence: Synthetic oligonucleotide
uggccggcuugccccagac

SEQ ID NO: 2230435 - RNA, 19 nt, Artificial Sequence
  Description of Artificial Sequence: Synthetic oligonucleotide
gccagcgcgagccuguaga

SEQ ID NO: 2230436 - RNA, 19 nt, Artificial Sequence
  Description of Artificial Sequence: Synthetic oligonucleotide
gccuuaacggcagcggcgc

SEQ ID NO: 2230437 - RNA, 19 nt, Artificial Sequence
  Description of Artificial Sequence: Synthetic oligonucleotide
gaccaacuggcaaaccagu

SEQ ID NO: 2230438 - RNA, 19 nt, Artificial Sequence
  Description of Artificial Sequence: Synthetic oligonucleotide
gcgaggccuagccaagagc

SEQ ID NO: 2230439 - RNA, 19 nt, Artificial Sequence
  Description of Artificial Sequence: Synthetic oligonucleotide
augcccgaagccgucggga

SEQ ID NO: 2230440 - RNA, 19 nt, Artificial Sequence
  Description of Artificial Sequence: Synthetic oligonucleotide
ggggacccgaccaacuggc

SEQ ID NO: 2230441 - RNA, 19 nt, Artificial Sequence
  Description of Artificial Sequence: Synthetic oligonucleotide
cauugcgcuccugcucagc

SEQ ID NO: 2230442 - RNA, 19 nt, Artificial Sequence
  Description of Artificial Sequence: Synthetic oligonucleotide
agcggacccgguagagacg

SEQ ID NO: 2230443 - RNA, 19 nt, Artificial Sequence
  Description of Artificial Sequence: Synthetic oligonucleotide
ggucuuuggcuugaucaca

SEQ ID NO: 2230444 - RNA, 19 nt, Artificial Sequence
  Description of Artificial Sequence: Synthetic oligonucleotide
gaacagagauaacgccggu

SEQ ID NO: 2230445 - RNA, 19 nt, Artificial Sequence
  Description of Artificial Sequence: Synthetic oligonucleotide
ggugaccgaccugaaggcc

SEQ ID NO: 2230446 - RNA, 19 nt, Artificial Sequence
  Description of Artificial Sequence: Synthetic oligonucleotide
cucacgcaagauggcggag

SEQ ID NO: 2230447 - RNA, 19 nt, Artificial Sequence
  Description of Artificial Sequence: Synthetic oligonucleotide
gacguagcugacacucgaa

SEQ ID NO: 2230448 - RNA, 19 nt, Artificial Sequence
  Description of Artificial Sequence: Synthetic oligonucleotide
uucccgccuuaacggcagc

SEQ ID NO: 2230449 - RNA, 19 nt, Artificial Sequence
  Description of Artificial Sequence: Synthetic oligonucleotide
aacgccgguucccgccuua

SEQ ID NO: 2230450 - RNA, 19 nt, Artificial Sequence
  Description of Artificial Sequence: Synthetic oligonucleotide
cacuaccccugcaguucag

SEQ ID NO: 2230451 - RNA, 19 nt, Artificial Sequence
  Description of Artificial Sequence: Synthetic oligonucleotide
ccaaccucgaaaccacuga

SEQ ID NO: 2230452 - RNA, 19 nt, Artificial Sequence
  Description of Artificial Sequence: Synthetic oligonucleotide
ccgaccaacuggcaaacca

SEQ ID NO: 2230453 - RNA, 19 nt, Artificial Sequence
  Description of Artificial Sequence: Synthetic oligonucleotide
cccgaagccgucgggacgg

SEQ ID NO: 2230454 - RNA, 19 nt, Artificial Sequence
  Description of Artificial Sequence: Synthetic oligonucleotide
ccccgaagaugcccgaagc

SEQ ID NO: 2230455 - RNA, 19 nt, Artificial Sequence
  Description of Artificial Sequence: Synthetic oligonucleotide
cccgaguaccucacgcaag

SEQ ID NO: 2230456 - RNA, 19 nt, Artificial Sequence
  Description of Artificial Sequence: Synthetic oligonucleotide
caguggcggccacugcuug

SEQ ID NO: 2230457 - RNA, 19 nt, Artificial Sequence
  Description of Artificial Sequence: Synthetic oligonucleotide
caguucaggcaaucuuaaa

SEQ ID NO: 2230458 - RNA, 19 nt, Artificial Sequence
  Description of Artificial Sequence: Synthetic oligonucleotide
cgccuuaacggcagcggcg

SEQ ID NO: 2230459 - RNA, 19 nt, Artificial Sequence
  Description of Artificial Sequence: Synthetic oligonucleotide
gcuugaucacacauaguua

SEQ ID NO: 2230460 - RNA, 19 nt, Artificial Sequence
  Description of Artificial Sequence: Synthetic oligonucleotide
gcccgaagccgucgggacg

SEQ ID NO: 2230461 - RNA, 19 nt, Artificial Sequence
  Description of Artificial Sequence: Synthetic oligonucleotide
cagcguugccgaggugucg

SEQ ID NO: 2230462 - RNA, 19 nt, Artificial Sequence
  Description of Artificial Sequence: Synthetic oligonucleotide
ugcgggugaccgaccugaa

SEQ ID NO: 2230463 - RNA, 19 nt, Artificial Sequence
  Description of Artificial Sequence: Synthetic oligonucleotide
cccgguagagacgagucuc

SEQ ID NO: 2230464 - RNA, 19 nt, Artificial Sequence
  Description of Artificial Sequence: Synthetic oligonucleotide
cguagcugacacucgaaga

SEQ ID NO: 2230465 - RNA, 19 nt, Artificial Sequence
  Description of Artificial Sequence: Synthetic oligonucleotide
ggcacugccuuagcuacca

SEQ ID NO: 2230466 - RNA, 19 nt, Artificial Sequence
  Description of Artificial Sequence: Synthetic oligonucleotide
augcaccacuaccccugca

SEQ ID NO: 2230467 - RNA, 19 nt, Artificial Sequence
  Description of Artificial Sequence: Synthetic oligonucleotide
cuuagcuaccaggucuugu

SEQ ID NO: 2230468 - RNA, 19 nt, Artificial Sequence
  Description of Artificial Sequence: Synthetic oligonucleotide
ggggagaaagaugcaccac

SEQ ID NO: 2230469 - RNA, 19 nt, Artificial Sequence
  Description of Artificial Sequence: Synthetic oligonucleotide
ggacccgaccaacuggcaa

SEQ ID NO: 2230470 - RNA, 19 nt, Artificial Sequence
  Description of Artificial Sequence: Synthetic oligonucleotide
caaagacguagcugacacu

SEQ ID NO: 2230471 - RNA, 19 nt, Artificial Sequence
  Description of Artificial Sequence: Synthetic oligonucleotide
ucaggccgccagcgcgagc

SEQ ID NO: 2230472 - RNA, 19 nt, Artificial Sequence
  Description of Artificial Sequence: Synthetic oligonucleotide
aggugucggaggggagcgg

SEQ ID NO: 2230473 - RNA, 19 nt, Artificial Sequence
  Description of Artificial Sequence: Synthetic oligonucleotide
gauccacgcgcacgguagu

SEQ ID NO: 2230474 - RNA, 19 nt, Artificial Sequence
  Description of Artificial Sequence: Synthetic oligonucleotide
ggcuugcgcuggaacagag

SEQ ID NO: 2230475 - RNA, 19 nt, Artificial Sequence
  Description of Artificial Sequence: Synthetic oligonucleotide
ccgaguaccucacgcaaga

SEQ ID NO: 2230476 - RNA, 19 nt, Artificial Sequence
  Description of Artificial Sequence: Synthetic oligonucleotide
ccgcacuggagcagcgagg

SEQ ID NO: 2230477 - RNA, 19 nt, Artificial Sequence
  Description of Artificial Sequence: Synthetic oligonucleotide
gcacgguaguuggaguggc

SEQ ID NO: 2230478 - RNA, 19 nt, Artificial Sequence
  Description of Artificial Sequence: Synthetic oligonucleotide
gagucuccgccgcggcgca

SEQ ID NO: 2230479 - RNA, 19 nt, Artificial Sequence
  Description of Artificial Sequence: Synthetic oligonucleotide
cccgccuuaacggcagcgg

SEQ ID NO: 2230480 - RNA, 19 nt, Artificial Sequence
  Description of Artificial Sequence: Synthetic oligonucleotide
gguucccgccuuaacggca

SEQ ID NO: 2230481 - RNA, 19 nt, Artificial Sequence
  Description of Artificial Sequence: Synthetic oligonucleotide
ugguggcauugaugaggaa

SEQ ID NO: 2230482 - RNA, 19 nt, Artificial Sequence
  Description of Artificial Sequence: Synthetic oligonucleotide
ggugucggaggggagcgga

SEQ ID NO: 2230483 - RNA, 19 nt, Artificial Sequence
  Description of Artificial Sequence: Synthetic oligonucleotide
cucuggacgggaagccucu

SEQ ID NO: 2230484 - RNA, 19 nt, Artificial Sequence
  Description of Artificial Sequence: Synthetic oligonucleotide
ccucacgcaagauggcgga

SEQ ID NO: 2230485 - RNA, 19 nt, Artificial Sequence
  Description of Artificial Sequence: Synthetic oligonucleotide
gcagcgaggccuagccaag

SEQ ID NO: 2230486 - RNA, 19 nt, Artificial Sequence
  Description of Artificial Sequence: Synthetic oligonucleotide
ccuguagauccacgcgcac

SEQ ID NO: 2230487 - RNA, 19 nt, Artificial Sequence
  Description of Artificial Sequence: Synthetic oligonucleotide
gccuguagauccacgcgca

SEQ ID NO: 2230488 - RNA, 19 nt, Artificial Sequence
  Description of Artificial Sequence: Synthetic oligonucleotide
ggccuagccaagagcgggc

SEQ ID NO: 2230489 - RNA, 19 nt, Artificial Sequence
  Description of Artificial Sequence: Synthetic oligonucleotide
gcgagccuguagauccacg

SEQ ID NO: 2230490 - RNA, 19 nt, Artificial Sequence
  Description of Artificial Sequence: Synthetic oligonucleotide
cauccccgaagaugcccga

SEQ ID NO: 2230491 - RNA, 19 nt, Artificial Sequence
  Description of Artificial Sequence: Synthetic oligonucleotide
uaacgccgguucccgccuu

SEQ ID NO: 2230492 - RNA, 19 nt, Artificial Sequence
  Description of Artificial Sequence: Synthetic oligonucleotide
cgcacgguaguuggagugg

SEQ ID NO: 2230493 - RNA, 19 nt, Artificial Sequence
  Description of Artificial Sequence: Synthetic oligonucleotide
cagcgcgagccuguagauc

SEQ ID NO: 2230494 - RNA, 19 nt, Artificial Sequence
  Description of Artificial Sequence: Synthetic oligonucleotide
cucaggccgccagcgcgag

SEQ ID NO: 2230495 - RNA, 19 nt, Artificial Sequence
  Description of Artificial Sequence: Synthetic oligonucleotide
gcggacccgguagagacga

SEQ ID NO: 2230496 - RNA, 19 nt, Artificial Sequence
  Description of Artificial Sequence: Synthetic oligonucleotide
gcggccacugcuugguaaa

SEQ ID NO: 2230497 - RNA, 19 nt, Artificial Sequence
  Description of Artificial Sequence: Synthetic oligonucleotide
cgaggugucggaggggagc

SEQ ID NO: 2230498 - RNA, 19 nt, Artificial Sequence
  Description of Artificial Sequence: Synthetic oligonucleotide
ggcggccacugcuugguaa

SEQ ID NO: 2230499 - RNA, 19 nt, Artificial Sequence
  Description of Artificial Sequence: Synthetic oligonucleotide
gcucucaggccgccagcgc

SEQ ID NO: 2230500 - RNA, 19 nt, Artificial Sequence
  Description of Artificial Sequence: Synthetic oligonucleotide
auccccgaagaugcccgaa

SEQ ID NO: 2230501 - RNA, 19 nt, Artificial Sequence
  Description of Artificial Sequence: Synthetic oligonucleotide
gugucggaggggagcggac

SEQ ID NO: 2230502 - RNA, 19 nt, Artificial Sequence
  Description of Artificial Sequence: Synthetic oligonucleotide
cacgcgcacgguaguugga

SEQ ID NO: 2230503 - RNA, 19 nt, Artificial Sequence
  Description of Artificial Sequence: Synthetic oligonucleotide
ucuggacgggaagccucuu

SEQ ID NO: 2230504 - RNA, 19 nt, Artificial Sequence
  Description of Artificial Sequence: Synthetic oligonucleotide
cccgcuggggacccgacca

SEQ ID NO: 2230505 - RNA, 19 nt, Artificial Sequence
  Description of Artificial Sequence: Synthetic oligonucleotide
uaacggcagcggcgcgauc

SEQ ID NO: 2230506 - RNA, 19 nt, Artificial Sequence
  Description of Artificial Sequence: Synthetic oligonucleotide
auccacgcgcacgguaguu

SEQ ID NO: 2230507 - RNA, 19 nt, Artificial Sequence
  Description of Artificial Sequence: Synthetic oligonucleotide
cucugcgggugaccgaccu

SEQ ID NO: 2230508 - RNA, 19 nt, Artificial Sequence
  Description of Artificial Sequence: Synthetic oligonucleotide
cgagucuccgccgcggcgc

SEQ ID NO: 2230509 - RNA, 19 nt, Artificial Sequence
  Description of Artificial Sequence: Synthetic oligonucleotide
cgguucccgccuuaacggc

SEQ ID NO: 2230510 - RNA, 19 nt, Artificial Sequence
  Description of Artificial Sequence: Synthetic oligonucleotide
uggcggccacugcuuggua

SEQ ID NO: 2230511 - RNA, 19 nt, Artificial Sequence
  Description of Artificial Sequence: Synthetic oligonucleotide
cacagaagggaaggauggu

SEQ ID NO: 2230512 - RNA, 19 nt, Artificial Sequence
  Description of Artificial Sequence: Synthetic oligonucleotide
cgguagagacgagucuccg

SEQ ID NO: 2230513 - RNA, 19 nt, Artificial Sequence
  Description of Artificial Sequence: Synthetic oligonucleotide
cccaaagacguagcugaca

SEQ ID NO: 2230514 - RNA, 19 nt, Artificial Sequence
  Description of Artificial Sequence: Synthetic oligonucleotide
caccacuaccccugcaguu

SEQ ID NO: 2230515 - RNA, 19 nt, Artificial Sequence
  Description of Artificial Sequence: Synthetic oligonucleotide
gcacugccuuagcuaccag

SEQ ID NO: 2230516 - RNA, 19 nt, Artificial Sequence
  Description of Artificial Sequence: Synthetic oligonucleotide
ggggagcggacccgguaga

SEQ ID NO: 2230517 - RNA, 19 nt, Artificial Sequence
  Description of Artificial Sequence: Synthetic oligonucleotide
ccagaccauccagcagugg

SEQ ID NO: 2230518 - RNA, 19 nt, Artificial Sequence
  Description of Artificial Sequence: Synthetic oligonucleotide
gcaccacuaccccugcagu

SEQ ID NO: 2230519 - RNA, 19 nt, Artificial Sequence
  Description of Artificial Sequence: Synthetic oligonucleotide
ccacuaccccugcaguuca

SEQ ID NO: 2230520 - RNA, 19 nt, Artificial Sequence
  Description of Artificial Sequence: Synthetic oligonucleotide
guggcggccacugcuuggu

SEQ ID NO: 2230521 - RNA, 19 nt, Artificial Sequence
  Description of Artificial Sequence: Synthetic oligonucleotide
ggacggacccgaguaccuc

SEQ ID NO: 2230522 - RNA, 19 nt, Artificial Sequence
  Description of Artificial Sequence: Synthetic oligonucleotide
caauaucgucuggcacuga

SEQ ID NO: 2230523 - RNA, 19 nt, Artificial Sequence
  Description of Artificial Sequence: Synthetic oligonucleotide
cggcuugccccagacacac

SEQ ID NO: 2230524 - RNA, 19 nt, Artificial Sequence
  Description of Artificial Sequence: Synthetic oligonucleotide
gcucggcgcgagcucucag

SEQ ID NO: 2230525 - RNA, 19 nt, Artificial Sequence
  Description of Artificial Sequence: Synthetic oligonucleotide
cgggacggacccgaguacc

SEQ ID NO: 2230526 - RNA, 19 nt, Artificial Sequence
  Description of Artificial Sequence: Synthetic oligonucleotide
ccgaggugucggaggggag

SEQ ID NO: 2230527 - RNA, 19 nt, Artificial Sequence
  Description of Artificial Sequence: Synthetic oligonucleotide
ccuuagcuaccaggucuug

SEQ ID NO: 2230528 - RNA, 19 nt, Artificial Sequence
  Description of Artificial Sequence: Synthetic oligonucleotide
cagcgaggccuagccaaga

SEQ ID NO: 2230529 - RNA, 19 nt, Artificial Sequence
  Description of Artificial Sequence: Synthetic oligonucleotide
guggccggcuugccccaga

SEQ ID NO: 2230530 - RNA, 19 nt, Artificial Sequence
  Description of Artificial Sequence: Synthetic oligonucleotide
guagauccacgcgcacggu

SEQ ID NO: 2230531 - RNA, 19 nt, Artificial Sequence
  Description of Artificial Sequence: Synthetic oligonucleotide
gccuagccaagagcgggca

SEQ ID NO: 2230532 - RNA, 19 nt, Artificial Sequence
  Description of Artificial Sequence: Synthetic oligonucleotide
ggacccgguagagacgagu

SEQ ID NO: 2230533 - RNA, 19 nt, Artificial Sequence
  Description of Artificial Sequence: Synthetic oligonucleotide
gcuuuccaggcacugccuu

SEQ ID NO: 2230534 - RNA, 19 nt, Artificial Sequence
  Description of Artificial Sequence: Synthetic oligonucleotide
gcgcaggcgcaguguccgg

SEQ ID NO: 2230535 - RNA, 19 nt, Artificial Sequence
  Description of Artificial Sequence: Synthetic oligonucleotide
acgccgguucccgccuuaa

SEQ ID NO: 2230536 - RNA, 19 nt, Artificial Sequence
  Description of Artificial Sequence: Synthetic oligonucleotide
gaccgaccugaaggccgca

SEQ ID NO: 2230537 - RNA, 19 nt, Artificial Sequence
  Description of Artificial Sequence: Synthetic oligonucleotide
gcaagauggcggagcugga

SEQ ID NO: 2230538 - RNA, 19 nt, Artificial Sequence
  Description of Artificial Sequence: Synthetic oligonucleotide
cggacccgaguaccucacg

SEQ ID NO: 2230539 - RNA, 19 nt, Artificial Sequence
  Description of Artificial Sequence: Synthetic oligonucleotide
cguugccgaggugucggag

SEQ ID NO: 2230540 - RNA, 19 nt, Artificial Sequence
  Description of Artificial Sequence: Synthetic oligonucleotide
ccggcuugccccagacaca

SEQ ID NO: 2230541 - RNA, 19 nt, Artificial Sequence
  Description of Artificial Sequence: Synthetic oligonucleotide
ggccggcuugccccagaca

SEQ ID NO: 2230542 - RNA, 19 nt, Artificial Sequence
  Description of Artificial Sequence: Synthetic oligonucleotide
gcgcaguguccggggcucg

SEQ ID NO: 2230543 - RNA, 19 nt, Artificial Sequence
  Description of Artificial Sequence: Synthetic oligonucleotide
gggacggacccgaguaccu

SEQ ID NO: 2230544 - RNA, 19 nt, Artificial Sequence
  Description of Artificial Sequence: Synthetic oligonucleotide
gcucugcgggugaccgacc

SEQ ID NO: 2230545 - RNA, 19 nt, Artificial Sequence
  Description of Artificial Sequence: Synthetic oligonucleotide
gcguugccgaggugucgga

SEQ ID NO: 2230546 - RNA, 19 nt, Artificial Sequence
  Description of Artificial Sequence: Synthetic oligonucleotide
gguggccggcuugccccag

SEQ ID NO: 2230547 - RNA, 19 nt, Artificial Sequence
  Description of Artificial Sequence: Synthetic oligonucleotide
gcuggggacccgaccaacu

SEQ ID NO: 2230548 - RNA, 19 nt, Artificial Sequence
  Description of Artificial Sequence: Synthetic oligonucleotide
gccuuagcuaccaggucuu

SEQ ID NO: 2230549 - RNA, 19 nt, Artificial Sequence
  Description of Artificial Sequence: Synthetic oligonucleotide
gcgcgagcucucaggccgc

SEQ ID NO: 2230550 - RNA, 19 nt, Artificial Sequence
  Description of Artificial Sequence: Synthetic oligonucleotide
ccgucgggacggacccgag

SEQ ID NO: 2230551 - RNA, 19 nt, Artificial Sequence
  Description of Artificial Sequence: Synthetic oligonucleotide
ggccgcacuggagcagcga

SEQ ID NO: 2230552 - RNA, 19 nt, Artificial Sequence
  Description of Artificial Sequence: Synthetic oligonucleotide
ggcucggcgcgagcucuca

SEQ ID NO: 2230553 - RNA, 19 nt, Artificial Sequence
  Description of Artificial Sequence: Synthetic oligonucleotide
cacuagagucauggucuuu

SEQ ID NO: 2230554 - RNA, 19 nt, Artificial Sequence
  Description of Artificial Sequence: Synthetic oligonucleotide
ggggcucggcgcgagcucu

SEQ ID NO: 2230555 - RNA, 19 nt, Artificial Sequence
  Description of Artificial Sequence: Synthetic oligonucleotide
cgcuggggacccgaccaac

SEQ ID NO: 2230556 - RNA, 19 nt, Artificial Sequence
  Description of Artificial Sequence: Synthetic oligonucleotide
gcgcuggaacagagauaac

SEQ ID NO: 2230557 - RNA, 19 nt, Artificial Sequence
  Description of Artificial Sequence: Synthetic oligonucleotide
ccagcgcgagccuguagau

SEQ ID NO: 2230558 - RNA, 19 nt, Artificial Sequence
  Description of Artificial Sequence: Synthetic oligonucleotide
cgauuccgaguggcauccc

SEQ ID NO: 2230559 - RNA, 19 nt, Artificial Sequence
  Description of Artificial Sequence: Synthetic oligonucleotide
gcgcgagccuguagaucca

SEQ ID NO: 2230560 - RNA, 19 nt, Artificial Sequence
  Description of Artificial Sequence: Synthetic oligonucleotide
gcaguggcggccacugcuu

SEQ ID NO: 2230561 - RNA, 19 nt, Artificial Sequence
  Description of Artificial Sequence: Synthetic oligonucleotide
cgccgguucccgccuuaac

SEQ ID NO: 2230562 - RNA, 19 nt, Artificial Sequence
  Description of Artificial Sequence: Synthetic oligonucleotide
cggacccgguagagacgag

SEQ ID NO: 2230563 - RNA, 19 nt, Artificial Sequence
  Description of Artificial Sequence: Synthetic oligonucleotide
cgaagccgucgggacggac

SEQ ID NO: 2230564 - RNA, 19 nt, Artificial Sequence
  Description of Artificial Sequence: Synthetic oligonucleotide
cgccagcgcgagccuguag

SEQ ID NO: 2230565 - RNA, 19 nt, Artificial Sequence
  Description of Artificial Sequence: Synthetic oligonucleotide
gggcucggcgcgagcucuc

SEQ ID NO: 2230566 - RNA, 19 nt, Artificial Sequence
  Description of Artificial Sequence: Synthetic oligonucleotide
ccgcuggggacccgaccaa

SEQ ID NO: 2230567 - RNA, 19 nt, Artificial Sequence
  Description of Artificial Sequence: Synthetic oligonucleotide
cgcgcacgguaguuggagu

SEQ ID NO: 2230568 - RNA, 19 nt, Artificial Sequence
  Description of Artificial Sequence: Synthetic oligonucleotide
cgucgggacggacccgagu

SEQ ID NO: 2230569 - RNA, 19 nt, Artificial Sequence
  Description of Artificial Sequence: Synthetic oligonucleotide
cgaguaccucacgcaagau

SEQ ID NO: 2230570 - RNA, 19 nt, Artificial Sequence
  Description of Artificial Sequence: Synthetic oligonucleotide
ccgaagccgucgggacgga

SEQ ID NO: 2230571 - RNA, 19 nt, Artificial Sequence
  Description of Artificial Sequence: Synthetic oligonucleotide
ccgccagcgcgagccugua

SEQ ID NO: 2230572 - RNA, 19 nt, Artificial Sequence
  Description of Artificial Sequence: Synthetic oligonucleotide
aauuuuaauggucaauagc

SEQ ID NO: 2230573 - RNA, 19 nt, Artificial Sequence
  Description of Artificial Sequence: Synthetic oligonucleotide
auauacuuaagacaacccc

SEQ ID NO: 2230574 - RNA, 19 nt, Artificial Sequence
  Description of Artificial Sequence: Synthetic oligonucleotide
aauucucauaauuuuaaug

SEQ ID NO: 2230575 - RNA, 19 nt, Artificial Sequence
  Description of Artificial Sequence: Synthetic oligonucleotide
ucagauuucaaccugggac

SEQ ID NO: 2230576 - RNA, 19 nt, Artificial Sequence
  Description of Artificial Sequence: Synthetic oligonucleotide
uauaguuaaacaauauacu

SEQ ID NO: 2230577 - RNA, 19 nt, Artificial Sequence
  Description of Artificial Sequence: Synthetic oligonucleotide
uauuccauugcccagucag

SEQ ID NO: 2230578 - RNA, 19 nt, Artificial Sequence
  Description of Artificial Sequence: Synthetic oligonucleotide
aaugagcugaauaaacccc

SEQ ID NO: 2230579 - RNA, 19 nt, Artificial Sequence
  Description of Artificial Sequence: Synthetic oligonucleotide
aauauacuuaagacaaccc

SEQ ID NO: 2230580 - RNA, 19 nt, Artificial Sequence
  Description of Artificial Sequence: Synthetic oligonucleotide
ugcacuauguagcagucgg

SEQ ID NO: 2230581 - RNA, 19 nt, Artificial Sequence
  Description of Artificial Sequence: Synthetic oligonucleotide
guauaguuaaacaauauac

SEQ ID NO: 2230582 - RNA, 19 nt, Artificial Sequence
  Description of Artificial Sequence: Synthetic oligonucleotide
aguuaaacaauauacuuaa

SEQ ID NO: 2230583 - RNA, 19 nt, Artificial Sequence
  Description of Artificial Sequence: Synthetic oligonucleotide
uguagugggaguaauccag

SEQ ID NO: 2230584 - RNA, 19 nt, Artificial Sequence
  Description of Artificial Sequence: Synthetic oligonucleotide
uaaugagcugaauaaaccc

SEQ ID NO: 2230585 - RNA, 19 nt, Artificial Sequence
  Description of Artificial Sequence: Synthetic oligonucleotide
ucauaaaccuucuuuacac

SEQ ID NO: 2230586 - RNA, 19 nt, Artificial Sequence
  Description of Artificial Sequence: Synthetic oligonucleotide
acaaguauuaaaccaaaca

SEQ ID NO: 2230587 - RNA, 19 nt, Artificial Sequence
  Description of Artificial Sequence: Synthetic oligonucleotide
uguaaugagcugaauaaac

SEQ ID NO: 2230588 - RNA, 19 nt, Artificial Sequence
  Description of Artificial Sequence: Synthetic oligonucleotide
ucuaucacaauguacuugu

SEQ ID NO: 2230589 - RNA, 19 nt, Artificial Sequence
  Description of Artificial Sequence: Synthetic oligonucleotide
ugucucaucuccaauucgg

SEQ ID NO: 2230590 - RNA, 19 nt, Artificial Sequence
  Description of Artificial Sequence: Synthetic oligonucleotide
aaagagacaucuuagugua

SEQ ID NO: 2230591 - RNA, 19 nt, Artificial Sequence
  Description of Artificial Sequence: Synthetic oligonucleotide
uucugaaugguauaguuaa

SEQ ID NO: 2230592 - RNA, 19 nt, Artificial Sequence
  Description of Artificial Sequence: Synthetic oligonucleotide
aacgugcugucucaucucc

SEQ ID NO: 2230593 - RNA, 19 nt, Artificial Sequence
  Description of Artificial Sequence: Synthetic oligonucleotide
aguguaaugagcugaauaa

SEQ ID NO: 2230594 - RNA, 19 nt, Artificial Sequence
  Description of Artificial Sequence: Synthetic oligonucleotide
ugaucuguuauuuuguuua

SEQ ID NO: 2230595 - RNA, 19 nt, Artificial Sequence
  Description of Artificial Sequence: Synthetic oligonucleotide
auaguuaaacaauauacuu

SEQ ID NO: 2230596 - RNA, 19 nt, Artificial Sequence
  Description of Artificial Sequence: Synthetic oligonucleotide
uucuuuacacaguacacca

SEQ ID NO: 2230597 - RNA, 19 nt, Artificial Sequence
  Description of Artificial Sequence: Synthetic oligonucleotide
acuuaagacaaccccacag

SEQ ID NO: 2230598 - RNA, 19 nt, Artificial Sequence
  Description of Artificial Sequence: Synthetic oligonucleotide
guagauuucaugcacuaug

SEQ ID NO: 2230599 - RNA, 19 nt, Artificial Sequence
  Description of Artificial Sequence: Synthetic oligonucleotide
aucacaauguacuuguacu

SEQ ID NO: 2230600 - RNA, 19 nt, Artificial Sequence
  Description of Artificial Sequence: Synthetic oligonucleotide
uacacaguacaccagggca

SEQ ID NO: 2230601 - RNA, 19 nt, Artificial Sequence
  Description of Artificial Sequence: Synthetic oligonucleotide
aauguacuuguacugggcu

SEQ ID NO: 2230602 - RNA, 19 nt, Artificial Sequence
  Description of Artificial Sequence: Synthetic oligonucleotide
aaugguauaguuaaacaau

SEQ ID NO: 2230603 - RNA, 19 nt, Artificial Sequence
  Description of Artificial Sequence: Synthetic oligonucleotide
auaaaccccuggcauaccc

SEQ ID NO: 2230604 - RNA, 19 nt, Artificial Sequence
  Description of Artificial Sequence: Synthetic oligonucleotide
caauauacuuaagacaacc

SEQ ID NO: 2230605 - RNA, 19 nt, Artificial Sequence
  Description of Artificial Sequence: Synthetic oligonucleotide
cagauuucaaccugggacc

SEQ ID NO: 2230606 - RNA, 19 nt, Artificial Sequence
  Description of Artificial Sequence: Synthetic oligonucleotide
auuaaaccaaacacuuucc

SEQ ID NO: 2230607 - RNA, 19 nt, Artificial Sequence
  Description of Artificial Sequence: Synthetic oligonucleotide
agugcuauuguguugugca

SEQ ID NO: 2230608 - RNA, 19 nt, Artificial Sequence
  Description of Artificial Sequence: Synthetic oligonucleotide
ucucauaauuuuaaugguc

SEQ ID NO: 2230609 - RNA, 19 nt, Artificial Sequence
  Description of Artificial Sequence: Synthetic oligonucleotide
cuuaagacaaccccacagc

SEQ ID NO: 2230610 - RNA, 19 nt, Artificial Sequence
  Description of Artificial Sequence: Synthetic oligonucleotide
uuguacugggcuuccagcg

SEQ ID NO: 2230611 - RNA, 19 nt, Artificial Sequence
  Description of Artificial Sequence: Synthetic oligonucleotide
aaccaaacacuuucccagg

SEQ ID NO: 2230612 - RNA, 19 nt, Artificial Sequence
  Description of Artificial Sequence: Synthetic oligonucleotide
ucaaacugccaggagaucc

SEQ ID NO: 2230613 - RNA, 19 nt, Artificial Sequence
  Description of Artificial Sequence: Synthetic oligonucleotide
cuggguuauggaaagagac

SEQ ID NO: 2230614 - RNA, 19 nt, Artificial Sequence
  Description of Artificial Sequence: Synthetic oligonucleotide
acggagaaaacccaaggug

SEQ ID NO: 2230615 - RNA, 19 nt, Artificial Sequence
  Description of Artificial Sequence: Synthetic oligonucleotide
uagauuucaugcacuaugu

SEQ ID NO: 2230616 - RNA, 19 nt, Artificial Sequence
  Description of Artificial Sequence: Synthetic oligonucleotide
aaguucauaccccucagua

SEQ ID NO: 2230617 - RNA, 19 nt, Artificial Sequence
  Description of Artificial Sequence: Synthetic oligonucleotide
gugggaguaauccaggggc

SEQ ID NO: 2230618 - RNA, 19 nt, Artificial Sequence
  Description of Artificial Sequence: Synthetic oligonucleotide
ucuuaguguaaugagcuga

SEQ ID NO: 2230619 - RNA, 19 nt, Artificial Sequence
  Description of Artificial Sequence: Synthetic oligonucleotide
ucaaccugggaccuacucc

SEQ ID NO: 2230620 - RNA, 19 nt, Artificial Sequence
  Description of Artificial Sequence: Synthetic oligonucleotide
acuauguagcagucggugg

SEQ ID NO: 2230621 - RNA, 19 nt, Artificial Sequence
  Description of Artificial Sequence: Synthetic oligonucleotide
gaaagagacaucuuagugu

SEQ ID NO: 2230622 - RNA, 19 nt, Artificial Sequence
  Description of Artificial Sequence: Synthetic oligonucleotide
uucucauaauuuuaauggu

SEQ ID NO: 2230623 - RNA, 19 nt, Artificial Sequence
  Description of Artificial Sequence: Synthetic oligonucleotide
aauggucaauagcuuccgg

SEQ ID NO: 2230624 - RNA, 19 nt, Artificial Sequence
  Description of Artificial Sequence: Synthetic oligonucleotide
ugcaaucucuuucugugca

SEQ ID NO: 2230625 - RNA, 19 nt, Artificial Sequence
  Description of Artificial Sequence: Synthetic oligonucleotide
aauagcuuccgguuggcuu

SEQ ID NO: 2230626 - RNA, 19 nt, Artificial Sequence
  Description of Artificial Sequence: Synthetic oligonucleotide
auaccccucaguaaguagc

SEQ ID NO: 2230627 - RNA, 19 nt, Artificial Sequence
  Description of Artificial Sequence: Synthetic oligonucleotide
uccgguuggcuucugaaug

SEQ ID NO: 2230628 - RNA, 19 nt, Artificial Sequence
  Description of Artificial Sequence: Synthetic oligonucleotide
uaguguaaugagcugaaua

SEQ ID NO: 2230629 - RNA, 19 nt, Artificial Sequence
  Description of Artificial Sequence: Synthetic oligonucleotide
ucccauagaggguacagca

SEQ ID NO: 2230630 - RNA, 19 nt, Artificial Sequence
  Description of Artificial Sequence: Synthetic oligonucleotide
gucaauagcuuccgguugg

SEQ ID NO: 2230631 - RNA, 19 nt, Artificial Sequence
  Description of Artificial Sequence: Synthetic oligonucleotide
ucauacagcguagagcuca

SEQ ID NO: 2230632 - RNA, 19 nt, Artificial Sequence
  Description of Artificial Sequence: Synthetic oligonucleotide
uaacaaguauuaaaccaaa

SEQ ID NO: 2230633 - RNA, 19 nt, Artificial Sequence
  Description of Artificial Sequence: Synthetic oligonucleotide
uuccgaaccagcaccacug

SEQ ID NO: 2230634 - RNA, 19 nt, Artificial Sequence
  Description of Artificial Sequence: Synthetic oligonucleotide
uuacacaguacaccagggc

SEQ ID NO: 2230635 - RNA, 19 nt, Artificial Sequence
  Description of Artificial Sequence: Synthetic oligonucleotide
ugccucacggagaaaaccc

SEQ ID NO: 2230636 - RNA, 19 nt, Artificial Sequence
  Description of Artificial Sequence: Synthetic oligonucleotide
agugggaguaauccagggg

SEQ ID NO: 2230637 - RNA, 19 nt, Artificial Sequence
  Description of Artificial Sequence: Synthetic oligonucleotide
cuucuuuacacaguacacc

SEQ ID NO: 2230638 - RNA, 19 nt, Artificial Sequence
  Description of Artificial Sequence: Synthetic oligonucleotide
ucuuuacacaguacaccag

SEQ ID NO: 2230639 - RNA, 19 nt, Artificial Sequence
  Description of Artificial Sequence: Synthetic oligonucleotide
auccauauuccauugccca

SEQ ID NO: 2230640 - RNA, 19 nt, Artificial Sequence
  Description of Artificial Sequence: Synthetic oligonucleotide
uggguuauggaaagagaca

SEQ ID NO: 2230641 - RNA, 19 nt, Artificial Sequence
  Description of Artificial Sequence: Synthetic oligonucleotide
uuucaugcacuauguagca

SEQ ID NO: 2230642 - RNA, 19 nt, Artificial Sequence
  Description of Artificial Sequence: Synthetic oligonucleotide
auuucaaccugggaccuac

SEQ ID NO: 2230643 - RNA, 19 nt, Artificial Sequence
  Description of Artificial Sequence: Synthetic oligonucleotide
caguaaguagcauuggcuc

SEQ ID NO: 2230644 - RNA, 19 nt, Artificial Sequence
  Description of Artificial Sequence: Synthetic oligonucleotide
aagguguugcuguagggau

SEQ ID NO: 2230645 - RNA, 19 nt, Artificial Sequence
  Description of Artificial Sequence: Synthetic oligonucleotide
agcguagagcucauaaacc

SEQ ID NO: 2230646 - RNA, 19 nt, Artificial Sequence
  Description of Artificial Sequence: Synthetic oligonucleotide
auaacaaguauuaaaccaa

SEQ ID NO: 2230647 - RNA, 19 nt, Artificial Sequence
  Description of Artificial Sequence: Synthetic oligonucleotide
cucaguaaguagcauuggc

SEQ ID NO: 2230648 - RNA, 19 nt, Artificial Sequence
  Description of Artificial Sequence: Synthetic oligonucleotide
ggaaagagacaucuuagug

SEQ ID NO: 2230649 - RNA, 19 nt, Artificial Sequence
  Description of Artificial Sequence: Synthetic oligonucleotide
aguuuauaggcaucauacu

SEQ ID NO: 2230650 - RNA, 19 nt, Artificial Sequence
  Description of Artificial Sequence: Synthetic oligonucleotide
gagacucucggcucgucgg

SEQ ID NO: 2230651 - RNA, 19 nt, Artificial Sequence
  Description of Artificial Sequence: Synthetic oligonucleotide
cacaauguacuuguacugg

SEQ ID NO: 2230652 - RNA, 19 nt, Artificial Sequence
  Description of Artificial Sequence: Synthetic oligonucleotide
gaauaaaccccuggcauac

SEQ ID NO: 2230653 - RNA, 19 nt, Artificial Sequence
  Description of Artificial Sequence: Synthetic oligonucleotide
cauccauauuccauugccc

SEQ ID NO: 2230654 - RNA, 19 nt, Artificial Sequence
  Description of Artificial Sequence: Synthetic oligonucleotide
aauucgggugggcucuauc

SEQ ID NO: 2230655 - RNA, 19 nt, Artificial Sequence
  Description of Artificial Sequence: Synthetic oligonucleotide
uaauggucaauagcuuccg

SEQ ID NO: 2230656 - RNA, 19 nt, Artificial Sequence
  Description of Artificial Sequence: Synthetic oligonucleotide
cugaaugguauaguuaaac

SEQ ID NO: 2230657 - RNA, 19 nt, Artificial Sequence
  Description of Artificial Sequence: Synthetic oligonucleotide
ugauccaacgugcugucuc

SEQ ID NO: 2230658 - RNA, 19 nt, Artificial Sequence
  Description of Artificial Sequence: Synthetic oligonucleotide
cagcguagagcucauaaac

SEQ ID NO: 2230659 - RNA, 19 nt, Artificial Sequence
  Description of Artificial Sequence: Synthetic oligonucleotide
aauaaaccccuggcauacc

SEQ ID NO: 2230660 - RNA, 19 nt, Artificial Sequence
  Description of Artificial Sequence: Synthetic oligonucleotide
caauguacuuguacugggc

SEQ ID NO: 2230661 - RNA, 19 nt, Artificial Sequence
  Description of Artificial Sequence: Synthetic oligonucleotide
auggucaauagcuuccggu

SEQ ID NO: 2230662 - RNA, 19 nt, Artificial Sequence
  Description of Artificial Sequence: Synthetic oligonucleotide
cagucagauuucaaccugg

SEQ ID NO: 2230663 - RNA, 19 nt, Artificial Sequence
  Description of Artificial Sequence: Synthetic oligonucleotide
ugguauaguuaaacaauau

SEQ ID NO: 2230664 - RNA, 19 nt, Artificial Sequence
  Description of Artificial Sequence: Synthetic oligonucleotide
uccuggguuauggaaagag

SEQ ID NO: 2230665 - RNA, 19 nt, Artificial Sequence
  Description of Artificial Sequence: Synthetic oligonucleotide
aauggggugaagagacagg

SEQ ID NO: 2230666 - RNA, 19 nt, Artificial Sequence
  Description of Artificial Sequence: Synthetic oligonucleotide
uacuccuggguuauggaaa

SEQ ID NO: 2230667 - RNA, 19 nt, Artificial Sequence
  Description of Artificial Sequence: Synthetic oligonucleotide
acagcaaguucauaccccu

SEQ ID NO: 2230668 - RNA, 19 nt, Artificial Sequence
  Description of Artificial Sequence: Synthetic oligonucleotide
auauucaaacugguccugg

SEQ ID NO: 2230669 - RNA, 19 nt, Artificial Sequence
  Description of Artificial Sequence: Synthetic oligonucleotide
cacagcaaguucauacccc

SEQ ID NO: 2230670 - RNA, 19 nt, Artificial Sequence
  Description of Artificial Sequence: Synthetic oligonucleotide
cuuggagacucucggcucg

SEQ ID NO: 2230671 - RNA, 19 nt, Artificial Sequence
  Description of Artificial Sequence: Synthetic oligonucleotide
caauugcccacggugaucc

SEQ ID NO: 2230672 - RNA, 19 nt, Artificial Sequence
  Description of Artificial Sequence: Synthetic oligonucleotide
ggcgggacaguuuauaggc

SEQ ID NO: 2230673 - RNA, 19 nt, Artificial Sequence
  Description of Artificial Sequence: Synthetic oligonucleotide
caggcuaacccucucucgg

SEQ ID NO: 2230674 - RNA, 19 nt, Artificial Sequence
  Description of Artificial Sequence: Synthetic oligonucleotide
acuccuggguuauggaaag

SEQ ID NO: 2230675 - RNA, 19 nt, Artificial Sequence
  Description of Artificial Sequence: Synthetic oligonucleotide
agacaucuuaguguaauga

SEQ ID NO: 2230676 - RNA, 19 nt, Artificial Sequence
  Description of Artificial Sequence: Synthetic oligonucleotide
acaggcuaacccucucucg

SEQ ID NO: 2230677 - RNA, 19 nt, Artificial Sequence
  Description of Artificial Sequence: Synthetic oligonucleotide
aaaacccaagguguugcug

SEQ ID NO: 2230678 - RNA, 19 nt, Artificial Sequence
  Description of Artificial Sequence: Synthetic oligonucleotide
uguacuuguacugggcuuc

SEQ ID NO: 2230679 - RNA, 19 nt, Artificial Sequence
  Description of Artificial Sequence: Synthetic oligonucleotide
auucgggugggcucuauca

SEQ ID NO: 2230680 - RNA, 19 nt, Artificial Sequence
  Description of Artificial Sequence: Synthetic oligonucleotide
cacuguagauuucaugcac

SEQ ID NO: 2230681 - RNA, 19 nt, Artificial Sequence
  Description of Artificial Sequence: Synthetic oligonucleotide
guuauggaaagagacaucu

SEQ ID NO: 2230682 - RNA, 19 nt, Artificial Sequence
  Description of Artificial Sequence: Synthetic oligonucleotide
gagacaucuuaguguaaug

SEQ ID NO: 2230683 - RNA, 19 nt, Artificial Sequence
  Description of Artificial Sequence: Synthetic oligonucleotide
gcaagggucaaacugccag

SEQ ID NO: 2230684 - RNA, 19 nt, Artificial Sequence
  Description of Artificial Sequence: Synthetic oligonucleotide
aggcgggacaguuuauagg

SEQ ID NO: 2230685 - RNA, 19 nt, Artificial Sequence
  Description of Artificial Sequence: Synthetic oligonucleotide
cuugcagcaagggucaaac

SEQ ID NO: 2230686 - RNA, 19 nt, Artificial Sequence
  Description of Artificial Sequence: Synthetic oligonucleotide
acaauauacuuaagacaac

SEQ ID NO: 2230687 - RNA, 19 nt, Artificial Sequence
  Description of Artificial Sequence: Synthetic oligonucleotide
aacacuuucccaggugcug

SEQ ID NO: 2230688 - RNA, 19 nt, Artificial Sequence
  Description of Artificial Sequence: Synthetic oligonucleotide
caucuuaguguaaugagcu

SEQ ID NO: 2230689 - RNA, 19 nt, Artificial Sequence
  Description of Artificial Sequence: Synthetic oligonucleotide
uugugcaggcaauugccca

SEQ ID NO: 2230690 - RNA, 19 nt, Artificial Sequence
  Description of Artificial Sequence: Synthetic oligonucleotide
acaguuuauaggcaucaua

SEQ ID NO: 2230691 - RNA, 19 nt, Artificial Sequence
  Description of Artificial Sequence: Synthetic oligonucleotide
aguucauaccccucaguaa

SEQ ID NO: 2230692 - RNA, 19 nt, Artificial Sequence
  Description of Artificial Sequence: Synthetic oligonucleotide
gucuugugcaggcaauugc

SEQ ID NO: 2230693 - RNA, 19 nt, Artificial Sequence
  Description of Artificial Sequence: Synthetic oligonucleotide
cucauaaaccuucuuuaca

SEQ ID NO: 2230694 - RNA, 19 nt, Artificial Sequence
  Description of Artificial Sequence: Synthetic oligonucleotide
cagucauacagcguagagc

SEQ ID NO: 2230695 - RNA, 19 nt, Artificial Sequence
  Description of Artificial Sequence: Synthetic oligonucleotide
aaaccccuggcauacccau

SEQ ID NO: 2230696 - RNA, 19 nt, Artificial Sequence
  Description of Artificial Sequence: Synthetic oligonucleotide
ugugcaggcaauugcccac

SEQ ID NO: 2230697 - RNA, 19 nt, Artificial Sequence
  Description of Artificial Sequence: Synthetic oligonucleotide
cacaccagcgggcagggag

SEQ ID NO: 2230698 - RNA, 19 nt, Artificial Sequence
  Description of Artificial Sequence: Synthetic oligonucleotide
aucccauagaggguacagc

SEQ ID NO: 2230699 - RNA, 19 nt, Artificial Sequence
  Description of Artificial Sequence: Synthetic oligonucleotide
acaaccccacagcaaguuc

SEQ ID NO: 2230700 - RNA, 19 nt, Artificial Sequence
  Description of Artificial Sequence: Synthetic oligonucleotide
uggucaauagcuuccgguu

SEQ ID NO: 2230701 - RNA, 19 nt, Artificial Sequence
  Description of Artificial Sequence: Synthetic oligonucleotide
caauggggugaagagacag

SEQ ID NO: 2230702 - RNA, 19 nt, Artificial Sequence
  Description of Artificial Sequence: Synthetic oligonucleotide
cucacggagaaaacccaag

SEQ ID NO: 2230703 - RNA, 19 nt, Artificial Sequence
  Description of Artificial Sequence: Synthetic oligonucleotide
caaucucuuucugugcagg

SEQ ID NO: 2230704 - RNA, 19 nt, Artificial Sequence
  Description of Artificial Sequence: Synthetic oligonucleotide
cagucgguggcugacaggc

SEQ ID NO: 2230705 - RNA, 19 nt, Artificial Sequence
  Description of Artificial Sequence: Synthetic oligonucleotide
guccuuccgaaccagcacc

SEQ ID NO: 2230706 - RNA, 19 nt, Artificial Sequence
  Description of Artificial Sequence: Synthetic oligonucleotide
aucuuaguguaaugagcug

SEQ ID NO: 2230707 - RNA, 19 nt, Artificial Sequence
  Description of Artificial Sequence: Synthetic oligonucleotide
ucguccuuccgaaccagca

SEQ ID NO: 2230708 - RNA, 19 nt, Artificial Sequence
  Description of Artificial Sequence: Synthetic oligonucleotide
caggucguccuuccgaacc

SEQ ID NO: 2230709 - RNA, 19 nt, Artificial Sequence
  Description of Artificial Sequence: Synthetic oligonucleotide
ugugcaggucguccuuccg

SEQ ID NO: 2230710 - RNA, 19 nt, Artificial Sequence
  Description of Artificial Sequence: Synthetic oligonucleotide
gguauaguuaaacaauaua

SEQ ID NO: 2230711 - RNA, 19 nt, Artificial Sequence
  Description of Artificial Sequence: Synthetic oligonucleotide
ucugaaugguauaguuaaa

SEQ ID NO: 2230712 - RNA, 19 nt, Artificial Sequence
  Description of Artificial Sequence: Synthetic oligonucleotide
uggcuucugaaugguauag

SEQ ID NO: 2230713 - RNA, 19 nt, Artificial Sequence
  Description of Artificial Sequence: Synthetic oligonucleotide
acggccgucuugugcaggc

SEQ ID NO: 2230714 - RNA, 19 nt, Artificial Sequence
  Description of Artificial Sequence: Synthetic oligonucleotide
auguagugggaguaaucca

SEQ ID NO: 2230715 - RNA, 19 nt, Artificial Sequence
  Description of Artificial Sequence: Synthetic oligonucleotide
cauaccccucaguaaguag

SEQ ID NO: 2230716 - RNA, 19 nt, Artificial Sequence
  Description of Artificial Sequence: Synthetic oligonucleotide
aggugcuguugccucacgg

SEQ ID NO: 2230717 - RNA, 19 nt, Artificial Sequence
  Description of Artificial Sequence: Synthetic oligonucleotide
uucaaccugggaccuacuc

SEQ ID NO: 2230718 - RNA, 19 nt, Artificial Sequence
  Description of Artificial Sequence: Synthetic oligonucleotide
guagugggaguaauccagg

SEQ ID NO: 2230719 - RNA, 19 nt, Artificial Sequence
  Description of Artificial Sequence: Synthetic oligonucleotide
auacccaugaucuguuauu

SEQ ID NO: 2230720 - RNA, 19 nt, Artificial Sequence
  Description of Artificial Sequence: Synthetic oligonucleotide
cacuauguagcagucggug

SEQ ID NO: 2230721 - RNA, 19 nt, Artificial Sequence
  Description of Artificial Sequence: Synthetic oligonucleotide
aaccuucuuuacacaguac

SEQ ID NO: 2230722 - RNA, 19 nt, Artificial Sequence
  Description of Artificial Sequence: Synthetic oligonucleotide
uggcugacaggcuaacccu

SEQ ID NO: 2230723 - RNA, 19 nt, Artificial Sequence
  Description of Artificial Sequence: Synthetic oligonucleotide
cucuaucacaauguacuug

SEQ ID NO: 2230724 - RNA, 19 nt, Artificial Sequence
  Description of Artificial Sequence: Synthetic oligonucleotide
gugcuguugccucacggag

SEQ ID NO: 2230725 - RNA, 19 nt, Artificial Sequence
  Description of Artificial Sequence: Synthetic oligonucleotide
agcgugugcagaggcaggc

SEQ ID NO: 2230726 - RNA, 19 nt, Artificial Sequence
  Description of Artificial Sequence: Synthetic oligonucleotide
accuacuccuggguuaugg

SEQ ID NO: 2230727 - RNA, 19 nt, Artificial Sequence
  Description of Artificial Sequence: Synthetic oligonucleotide
uguguugugcaaucucuuu

SEQ ID NO: 2230728 - RNA, 19 nt, Artificial Sequence
  Description of Artificial Sequence: Synthetic oligonucleotide
uugccucacggagaaaacc

SEQ ID NO: 2230729 - RNA, 19 nt, Artificial Sequence
  Description of Artificial Sequence: Synthetic oligonucleotide
gaguaauccaggggcaaug

SEQ ID NO: 2230730 - RNA, 19 nt, Artificial Sequence
  Description of Artificial Sequence: Synthetic oligonucleotide
gguguggaggaggugagcg

SEQ ID NO: 2230731 - RNA, 19 nt, Artificial Sequence
  Description of Artificial Sequence: Synthetic oligonucleotide
aggcuaacccucucucggg

SEQ ID NO: 2230732 - RNA, 19 nt, Artificial Sequence
  Description of Artificial Sequence: Synthetic oligonucleotide
agauguagugggaguaauc

SEQ ID NO: 2230733 - RNA, 19 nt, Artificial Sequence
  Description of Artificial Sequence: Synthetic oligonucleotide
uucgggugggcucuaucac

SEQ ID NO: 2230734 - RNA, 19 nt, Artificial Sequence
  Description of Artificial Sequence: Synthetic oligonucleotide
gacccagacgccuccuucc

SEQ ID NO: 2230735 - RNA, 19 nt, Artificial Sequence
  Description of Artificial Sequence: Synthetic oligonucleotide
ccauccauauuccauugcc

SEQ ID NO: 2230736 - RNA, 19 nt, Artificial Sequence
  Description of Artificial Sequence: Synthetic oligonucleotide
gacaggcuaacccucucuc

SEQ ID NO: 2230737 - RNA, 19 nt, Artificial Sequence
  Description of Artificial Sequence: Synthetic oligonucleotide
augaucuguuauuuuguuu

SEQ ID NO: 2230738 - RNA, 19 nt, Artificial Sequence
  Description of Artificial Sequence: Synthetic oligonucleotide
cauaaaccuucuuuacaca

SEQ ID NO: 2230739 - RNA, 19 nt, Artificial Sequence
  Description of Artificial Sequence: Synthetic oligonucleotide
uggcauacccaugaucugu

SEQ ID NO: 2230740 - RNA, 19 nt, Artificial Sequence
  Description of Artificial Sequence: Synthetic oligonucleotide
acccagacgccuccuuccc

SEQ ID NO: 2230741 - RNA, 19 nt, Artificial Sequence
  Description of Artificial Sequence: Synthetic oligonucleotide
cuuaguguaaugagcugaa

SEQ ID NO: 2230742 - RNA, 19 nt, Artificial Sequence
  Description of Artificial Sequence: Synthetic oligonucleotide
uccaauucgggugggcucu

SEQ ID NO: 2230743 - RNA, 19 nt, Artificial Sequence
  Description of Artificial Sequence: Synthetic oligonucleotide
agucagauuucaaccuggg

SEQ ID NO: 2230744 - RNA, 19 nt, Artificial Sequence
  Description of Artificial Sequence: Synthetic oligonucleotide
augagcugaauaaaccccu

SEQ ID NO: 2230745 - RNA, 19 nt, Artificial Sequence
  Description of Artificial Sequence: Synthetic oligonucleotide
uucacgucccacucuccug

SEQ ID NO: 2230746 - RNA, 19 nt, Artificial Sequence
  Description of Artificial Sequence: Synthetic oligonucleotide
aaacacuuucccaggugcu

SEQ ID NO: 2230747 - RNA, 19 nt, Artificial Sequence
  Description of Artificial Sequence: Synthetic oligonucleotide
gauccaacgugcugucuca

SEQ ID NO: 2230748 - RNA, 19 nt, Artificial Sequence
  Description of Artificial Sequence: Synthetic oligonucleotide
cagcaagggucaaacugcc

SEQ ID NO: 2230749 - RNA, 19 nt, Artificial Sequence
  Description of Artificial Sequence: Synthetic oligonucleotide
gucucaucuccaauucggg

SEQ ID NO: 2230750 - RNA, 19 nt, Artificial Sequence
  Description of Artificial Sequence: Synthetic oligonucleotide
gaucuguuauuuuguuuaa

SEQ ID NO: 2230751 - RNA, 19 nt, Artificial Sequence
  Description of Artificial Sequence: Synthetic oligonucleotide
aaguagcauuggcuccauc

SEQ ID NO: 2230752 - RNA, 19 nt, Artificial Sequence
  Description of Artificial Sequence: Synthetic oligonucleotide
gacgccuccuuccccacgc

SEQ ID NO: 2230753 - RNA, 19 nt, Artificial Sequence
  Description of Artificial Sequence: Synthetic oligonucleotide
caggcgggacaguuuauag

SEQ ID NO: 2230754 - RNA, 19 nt, Artificial Sequence
  Description of Artificial Sequence: Synthetic oligonucleotide
caugcacuauguagcaguc

SEQ ID NO: 2230755 - RNA, 19 nt, Artificial Sequence
  Description of Artificial Sequence: Synthetic oligonucleotide
acuguagauuucaugcacu

SEQ ID NO: 2230756 - RNA, 19 nt, Artificial Sequence
  Description of Artificial Sequence: Synthetic oligonucleotide
augguauaguuaaacaaua

SEQ ID NO: 2230757 - RNA, 19 nt, Artificial Sequence
  Description of Artificial Sequence: Synthetic oligonucleotide
ucgggugggcucuaucaca

SEQ ID NO: 2230758 - RNA, 19 nt, Artificial Sequence
  Description of Artificial Sequence: Synthetic oligonucleotide
agggagauguagugggagu

SEQ ID NO: 2230759 - RNA, 19 nt, Artificial Sequence
  Description of Artificial Sequence: Synthetic oligonucleotide
ugcuauuguguugugcaau

SEQ ID NO: 2230760 - RNA, 19 nt, Artificial Sequence
  Description of Artificial Sequence: Synthetic oligonucleotide
uauguagcagucgguggcu

SEQ ID NO: 2230761 - RNA, 19 nt, Artificial Sequence
  Description of Artificial Sequence: Synthetic oligonucleotide
ggugggcucuaucacaaug

SEQ ID NO: 2230762 - RNA, 19 nt, Artificial Sequence
  Description of Artificial Sequence: Synthetic oligonucleotide
ggucaauagcuuccgguug

SEQ ID NO: 2230763 - RNA, 19 nt, Artificial Sequence
  Description of Artificial Sequence: Synthetic oligonucleotide
gcugaauaaaccccuggca

SEQ ID NO: 2230764 - RNA, 19 nt, Artificial Sequence
  Description of Artificial Sequence: Synthetic oligonucleotide
uugcccacggugauccaac

SEQ ID NO: 2230765 - RNA, 19 nt, Artificial Sequence
  Description of Artificial Sequence: Synthetic oligonucleotide
cauauuccauugcccaguc

SEQ ID NO: 2230766 - RNA, 19 nt, Artificial Sequence
  Description of Artificial Sequence: Synthetic oligonucleotide
ugggcucuaucacaaugua

SEQ ID NO: 2230767 - RNA, 19 nt, Artificial Sequence
  Description of Artificial Sequence: Synthetic oligonucleotide
uuccauugcccagucagau

SEQ ID NO: 2230768 - RNA, 19 nt, Artificial Sequence
  Description of Artificial Sequence: Synthetic oligonucleotide
auguacuuguacugggcuu

SEQ ID NO: 2230769 - RNA, 19 nt, Artificial Sequence
  Description of Artificial Sequence: Synthetic oligonucleotide
agauuucaugcacuaugua

SEQ ID NO: 2230770 - RNA, 19 nt, Artificial Sequence
  Description of Artificial Sequence: Synthetic oligonucleotide
ucaauagcuuccgguuggc

SEQ ID NO: 2230771 - RNA, 19 nt, Artificial Sequence
  Description of Artificial Sequence: Synthetic oligonucleotide
gaaccagcaccacuggugu

SEQ ID NO: 2230772 - RNA, 19 nt, Artificial Sequence
  Description of Artificial Sequence: Synthetic oligonucleotide
ggcucuaucacaauguacu

SEQ ID NO: 2230773 - RNA, 19 nt, Artificial Sequence
  Description of Artificial Sequence: Synthetic oligonucleotide
ucagcacaccagcgggcag

SEQ ID NO: 2230774 - RNA, 19 nt, Artificial Sequence
  Description of Artificial Sequence: Synthetic oligonucleotide
cucucgggagccaccgccg

SEQ ID NO: 2230775 - RNA, 19 nt, Artificial Sequence
  Description of Artificial Sequence: Synthetic oligonucleotide
augcacuauguagcagucg

SEQ ID NO: 2230776 - RNA, 19 nt, Artificial Sequence
  Description of Artificial Sequence: Synthetic oligonucleotide
ggagacucucggcucgucg

SEQ ID NO: 2230777 - RNA, 19 nt, Artificial Sequence
  Description of Artificial Sequence: Synthetic oligonucleotide
uuccgguuggcuucugaau

SEQ ID NO: 2230778 - RNA, 19 nt, Artificial Sequence
  Description of Artificial Sequence: Synthetic oligonucleotide
uugcuguagggaucugagu

SEQ ID NO: 2230779 - RNA, 19 nt, Artificial Sequence
  Description of Artificial Sequence: Synthetic oligonucleotide
ggugagcgugugcagaggc

SEQ ID NO: 2230780 - RNA, 19 nt, Artificial Sequence
  Description of Artificial Sequence: Synthetic oligonucleotide
gcuauuguguugugcaauc

SEQ ID NO: 2230781 - RNA, 19 nt, Artificial Sequence
  Description of Artificial Sequence: Synthetic oligonucleotide
acggugauccaacgugcug

SEQ ID NO: 2230782 - RNA, 19 nt, Artificial Sequence
  Description of Artificial Sequence: Synthetic oligonucleotide
ugcagucauacagcguaga

SEQ ID NO: 2230783 - RNA, 19 nt, Artificial Sequence
  Description of Artificial Sequence: Synthetic oligonucleotide
cuccaauucgggugggcuc

SEQ ID NO: 2230784 - RNA, 19 nt, Artificial Sequence
  Description of Artificial Sequence: Synthetic oligonucleotide
ugcccacggugauccaacg

SEQ ID NO: 2230785 - RNA, 19 nt, Artificial Sequence
  Description of Artificial Sequence: Synthetic oligonucleotide
aucuccaauucgggugggc

SEQ ID NO: 2230786 - RNA, 19 nt, Artificial Sequence
  Description of Artificial Sequence: Synthetic oligonucleotide
uguagggaucugaguccug

SEQ ID NO: 2230787 - RNA, 19 nt, Artificial Sequence
  Description of Artificial Sequence: Synthetic oligonucleotide
caagguguugcuguaggga

SEQ ID NO: 2230788 - RNA, 19 nt, Artificial Sequence
  Description of Artificial Sequence: Synthetic oligonucleotide
acgcggccaucuuggagac

SEQ ID NO: 2230789 - RNA, 19 nt, Artificial Sequence
  Description of Artificial Sequence: Synthetic oligonucleotide
cacucuccugcagucauac

SEQ ID NO: 2230790 - RNA, 19 nt, Artificial Sequence
  Description of Artificial Sequence: Synthetic oligonucleotide
cccacagcaaguucauacc

SEQ ID NO: 2230791 - RNA, 19 nt, Artificial Sequence
  Description of Artificial Sequence: Synthetic oligonucleotide
cuggcauacccaugaucug

SEQ ID NO: 2230792 - RNA, 19 nt, Artificial Sequence
  Description of Artificial Sequence: Synthetic oligonucleotide
aggucguccuuccgaacca

SEQ ID NO: 2230793 - RNA, 19 nt, Artificial Sequence
  Description of Artificial Sequence: Synthetic oligonucleotide
ccacagcaaguucauaccc

SEQ ID NO: 2230794 - RNA, 19 nt, Artificial Sequence
  Description of Artificial Sequence: Synthetic oligonucleotide
ucauaccccucaguaagua

SEQ ID NO: 2230795 - RNA, 19 nt, Artificial Sequence
  Description of Artificial Sequence: Synthetic oligonucleotide
uccccacgcggccaucuug

SEQ ID NO: 2230796 - RNA, 19 nt, Artificial Sequence
  Description of Artificial Sequence: Synthetic oligonucleotide
auauuccauugcccaguca

SEQ ID NO: 2230797 - RNA, 19 nt, Artificial Sequence
  Description of Artificial Sequence: Synthetic oligonucleotide
caaccugggaccuacuccu

SEQ ID NO: 2230798 - RNA, 19 nt, Artificial Sequence
  Description of Artificial Sequence: Synthetic oligonucleotide
acacuuucccaggugcugu

SEQ ID NO: 2230799 - RNA, 19 nt, Artificial Sequence
  Description of Artificial Sequence: Synthetic oligonucleotide
ucucgggagccaccgccgc

SEQ ID NO: 2230800 - RNA, 19 nt, Artificial Sequence
  Description of Artificial Sequence: Synthetic oligonucleotide
ugggaccuacuccuggguu

SEQ ID NO: 2230801 - RNA, 19 nt, Artificial Sequence
  Description of Artificial Sequence: Synthetic oligonucleotide
cuacuccuggguuauggaa

SEQ ID NO: 2230802 - RNA, 19 nt, Artificial Sequence
  Description of Artificial Sequence: Synthetic oligonucleotide
cagugcuauuguguugugc

SEQ ID NO: 2230803 - RNA, 19 nt, Artificial Sequence
  Description of Artificial Sequence: Synthetic oligonucleotide
agguguugcuguagggauc

SEQ ID NO: 2230804 - RNA, 19 nt, Artificial Sequence
  Description of Artificial Sequence: Synthetic oligonucleotide
uuaguguaaugagcugaau

SEQ ID NO: 2230805 - RNA, 19 nt, Artificial Sequence
  Description of Artificial Sequence: Synthetic oligonucleotide
uuucaaccugggaccuacu

SEQ ID NO: 2230806 - RNA, 19 nt, Artificial Sequence
  Description of Artificial Sequence: Synthetic oligonucleotide
gacucucggcucgucgggg

SEQ ID NO: 2230807 - RNA, 19 nt, Artificial Sequence
  Description of Artificial Sequence: Synthetic oligonucleotide
ccuggcauacccaugaucu

SEQ ID NO: 2230808 - RNA, 19 nt, Artificial Sequence
  Description of Artificial Sequence: Synthetic oligonucleotide
uccaacgugcugucucauc

SEQ ID NO: 2230809 - RNA, 19 nt, Artificial Sequence
  Description of Artificial Sequence: Synthetic oligonucleotide
cccacggugauccaacgug

SEQ ID NO: 2230810 - RNA, 19 nt, Artificial Sequence
  Description of Artificial Sequence: Synthetic oligonucleotide
aggcaauugcccacgguga

SEQ ID NO: 2230811 - RNA, 19 nt, Artificial Sequence
  Description of Artificial Sequence: Synthetic oligonucleotide
ggcccugugguucugcuuc

SEQ ID NO: 2230812 - RNA, 19 nt, Artificial Sequence
  Description of Artificial Sequence: Synthetic oligonucleotide
caacgugcugucucaucuc

SEQ ID NO: 2230813 - RNA, 19 nt, Artificial Sequence
  Description of Artificial Sequence: Synthetic oligonucleotide
uccauugcccagucagauu

SEQ ID NO: 2230814 - RNA, 19 nt, Artificial Sequence
  Description of Artificial Sequence: Synthetic oligonucleotide
ggugcuguugccucacgga

SEQ ID NO: 2230815 - RNA, 19 nt, Artificial Sequence
  Description of Artificial Sequence: Synthetic oligonucleotide
agacgccuccuuccccacg

SEQ ID NO: 2230816 - RNA, 19 nt, Artificial Sequence
  Description of Artificial Sequence: Synthetic oligonucleotide
cugugguucugcuucacgu

SEQ ID NO: 2230817 - RNA, 19 nt, Artificial Sequence
  Description of Artificial Sequence: Synthetic oligonucleotide
ccgguuggcuucugaaugg

SEQ ID NO: 2230818 - RNA, 19 nt, Artificial Sequence
  Description of Artificial Sequence: Synthetic oligonucleotide
auuccauugcccagucaga

SEQ ID NO: 2230819 - RNA, 19 nt, Artificial Sequence
  Description of Artificial Sequence: Synthetic oligonucleotide
uucugugcaggucguccuu

SEQ ID NO: 2230820 - RNA, 19 nt, Artificial Sequence
  Description of Artificial Sequence: Synthetic oligonucleotide
ggacaguuuauaggcauca

SEQ ID NO: 2230821 - RNA, 19 nt, Artificial Sequence
  Description of Artificial Sequence: Synthetic oligonucleotide
ccagucagauuucaaccug

SEQ ID NO: 2230822 - RNA, 19 nt, Artificial Sequence
  Description of Artificial Sequence: Synthetic oligonucleotide
cuuccgguuggcuucugaa

SEQ ID NO: 2230823 - RNA, 19 nt, Artificial Sequence
  Description of Artificial Sequence: Synthetic oligonucleotide
guuggcuucugaaugguau

SEQ ID NO: 2230824 - RNA, 19 nt, Artificial Sequence
  Description of Artificial Sequence: Synthetic oligonucleotide
aggguacagcaggccaggc

SEQ ID NO: 2230825 - RNA, 19 nt, Artificial Sequence
  Description of Artificial Sequence: Synthetic oligonucleotide
uugcccagucagauuucaa

SEQ ID NO: 2230826 - RNA, 19 nt, Artificial Sequence
  Description of Artificial Sequence: Synthetic oligonucleotide
gccaucuuggagacucucg

SEQ ID NO: 2230827 - RNA, 19 nt, Artificial Sequence
  Description of Artificial Sequence: Synthetic oligonucleotide
ccacggugauccaacgugc

SEQ ID NO: 2230828 - RNA, 19 nt, Artificial Sequence
  Description of Artificial Sequence: Synthetic oligonucleotide
guugccucacggagaaaac

SEQ ID NO: 2230829 - RNA, 19 nt, Artificial Sequence
  Description of Artificial Sequence: Synthetic oligonucleotide
cauugcccagucagauuuc

SEQ ID NO: 2230830 - RNA, 19 nt, Artificial Sequence
  Description of Artificial Sequence: Synthetic oligonucleotide
cccauagaggguacagcag

SEQ ID NO: 2230831 - RNA, 19 nt, Artificial Sequence
  Description of Artificial Sequence: Synthetic oligonucleotide
guacuuguacugggcuucc

SEQ ID NO: 2230832 - RNA, 19 nt, Artificial Sequence
  Description of Artificial Sequence: Synthetic oligonucleotide
gcuaacccucucucgggag

SEQ ID NO: 2230833 - RNA, 19 nt, Artificial Sequence
  Description of Artificial Sequence: Synthetic oligonucleotide
ugccagccaacacggccgu

SEQ ID NO: 2230834 - RNA, 19 nt, Artificial Sequence
  Description of Artificial Sequence: Synthetic oligonucleotide
ggagaucccauagagggua

SEQ ID NO: 2230835 - RNA, 19 nt, Artificial Sequence
  Description of Artificial Sequence: Synthetic oligonucleotide
aaccccacagcaaguucau

SEQ ID NO: 2230836 - RNA, 19 nt, Artificial Sequence
  Description of Artificial Sequence: Synthetic oligonucleotide
agcgggcagggagauguag

SEQ ID NO: 2230837 - RNA, 19 nt, Artificial Sequence
  Description of Artificial Sequence: Synthetic oligonucleotide
auugcccacggugauccaa

SEQ ID NO: 2230838 - RNA, 19 nt, Artificial Sequence
  Description of Artificial Sequence: Synthetic oligonucleotide
ggguuauggaaagagacau

SEQ ID NO: 2230839 - RNA, 19 nt, Artificial Sequence
  Description of Artificial Sequence: Synthetic oligonucleotide
acgucccacucuccugcag

SEQ ID NO: 2230840 - RNA, 19 nt, Artificial Sequence
  Description of Artificial Sequence: Synthetic oligonucleotide
gucgguggcugacaggcua

SEQ ID NO: 2230841 - RNA, 19 nt, Artificial Sequence
  Description of Artificial Sequence: Synthetic oligonucleotide
gugcuauuguguugugcaa

SEQ ID NO: 2230842 - RNA, 19 nt, Artificial Sequence
  Description of Artificial Sequence: Synthetic oligonucleotide
ucuuucugugcaggucguc

SEQ ID NO: 2230843 - RNA, 19 nt, Artificial Sequence
  Description of Artificial Sequence: Synthetic oligonucleotide
caucauacuccaccuggua

SEQ ID NO: 2230844 - RNA, 19 nt, Artificial Sequence
  Description of Artificial Sequence: Synthetic oligonucleotide
gagaucccauagaggguac

SEQ ID NO: 2230845 - RNA, 19 nt, Artificial Sequence
  Description of Artificial Sequence: Synthetic oligonucleotide
uccccacuguagauuucau

SEQ ID NO: 2230846 - RNA, 19 nt, Artificial Sequence
  Description of Artificial Sequence: Synthetic oligonucleotide
cauacccaugaucuguuau

SEQ ID NO: 2230847 - RNA, 19 nt, Artificial Sequence
  Description of Artificial Sequence: Synthetic oligonucleotide
uaaguagcauuggcuccau

SEQ ID NO: 2230848 - RNA, 19 nt, Artificial Sequence
  Description of Artificial Sequence: Synthetic oligonucleotide
caugaucuguuauuuuguu

SEQ ID NO: 2230849 - RNA, 19 nt, Artificial Sequence
  Description of Artificial Sequence: Synthetic oligonucleotide
agaucccauagaggguaca

SEQ ID NO: 2230850 - RNA, 19 nt, Artificial Sequence
  Description of Artificial Sequence: Synthetic oligonucleotide
acacggccgucuugugcag

SEQ ID NO: 2230851 - RNA, 19 nt, Artificial Sequence
  Description of Artificial Sequence: Synthetic oligonucleotide
aaccugggaccuacuccug

SEQ ID NO: 2230852 - RNA, 19 nt, Artificial Sequence
  Description of Artificial Sequence: Synthetic oligonucleotide
caucuccaauucggguggg

SEQ ID NO: 2230853 - RNA, 19 nt, Artificial Sequence
  Description of Artificial Sequence: Synthetic oligonucleotide
ccccacgcggccaucuugg

SEQ ID NO: 2230854 - RNA, 19 nt, Artificial Sequence
  Description of Artificial Sequence: Synthetic oligonucleotide
gcggccaucuuggagacuc

SEQ ID NO: 2230855 - RNA, 19 nt, Artificial Sequence
  Description of Artificial Sequence: Synthetic oligonucleotide
cucgggagccaccgccgcc

SEQ ID NO: 2230856 - RNA, 19 nt, Artificial Sequence
  Description of Artificial Sequence: Synthetic oligonucleotide
acucuccugcagucauaca

SEQ ID NO: 2230857 - RNA, 19 nt, Artificial Sequence
  Description of Artificial Sequence: Synthetic oligonucleotide
guauuaaaccaaacacuuu

SEQ ID NO: 2230858 - RNA, 19 nt, Artificial Sequence
  Description of Artificial Sequence: Synthetic oligonucleotide
acuugcagcaagggucaaa

SEQ ID NO: 2230859 - RNA, 19 nt, Artificial Sequence
  Description of Artificial Sequence: Synthetic oligonucleotide
agacaaccccacagcaagu

SEQ ID NO: 2230860 - RNA, 19 nt, Artificial Sequence
  Description of Artificial Sequence: Synthetic oligonucleotide
uuggagacucucggcucgu

SEQ ID NO: 2230861 - RNA, 19 nt, Artificial Sequence
  Description of Artificial Sequence: Synthetic oligonucleotide
ccucaguaaguagcauugg

SEQ ID NO: 2230862 - RNA, 19 nt, Artificial Sequence
  Description of Artificial Sequence: Synthetic oligonucleotide
gcagucgguggcugacagg

SEQ ID NO: 2230863 - RNA, 19 nt, Artificial Sequence
  Description of Artificial Sequence: Synthetic oligonucleotide
gagauguagugggaguaau

SEQ ID NO: 2230864 - RNA, 19 nt, Artificial Sequence
  Description of Artificial Sequence: Synthetic oligonucleotide
ccuggguuauggaaagaga

SEQ ID NO: 2230865 - RNA, 19 nt, Artificial Sequence
  Description of Artificial Sequence: Synthetic oligonucleotide
gucguccuuccgaaccagc

SEQ ID NO: 2230866 - RNA, 19 nt, Artificial Sequence
  Description of Artificial Sequence: Synthetic oligonucleotide
gggcucuaucacaauguac

SEQ ID NO: 2230867 - RNA, 19 nt, Artificial Sequence
  Description of Artificial Sequence: Synthetic oligonucleotide
ccccacuguagauuucaug

SEQ ID NO: 2230868 - RNA, 19 nt, Artificial Sequence
  Description of Artificial Sequence: Synthetic oligonucleotide
caaguucauaccccucagu

SEQ ID NO: 2230869 - RNA, 19 nt, Artificial Sequence
  Description of Artificial Sequence: Synthetic oligonucleotide
ggcuaacccucucucggga

SEQ ID NO: 2230870 - RNA, 19 nt, Artificial Sequence
  Description of Artificial Sequence: Synthetic oligonucleotide
cucucucgggagccaccgc

SEQ ID NO: 2230871 - RNA, 19 nt, Artificial Sequence
  Description of Artificial Sequence: Synthetic oligonucleotide
ggaggugagcgugugcaga

SEQ ID NO: 2230872 - RNA, 19 nt, Artificial Sequence
  Description of Artificial Sequence: Synthetic oligonucleotide
gggaccuacuccuggguua

SEQ ID NO: 2230873 - RNA, 19 nt, Artificial Sequence
  Description of Artificial Sequence: Synthetic oligonucleotide
ggacccagacgccuccuuc

SEQ ID NO: 2230874 - RNA, 19 nt, Artificial Sequence
  Description of Artificial Sequence: Synthetic oligonucleotide
aacccucucucgggagcca

SEQ ID NO: 2230875 - RNA, 19 nt, Artificial Sequence
  Description of Artificial Sequence: Synthetic oligonucleotide
cauucuccccacuguagau

SEQ ID NO: 2230876 - RNA, 19 nt, Artificial Sequence
  Description of Artificial Sequence: Synthetic oligonucleotide
gauuucaaccugggaccua

SEQ ID NO: 2230877 - RNA, 19 nt, Artificial Sequence
  Description of Artificial Sequence: Synthetic oligonucleotide
gcaccacugguguggagga

SEQ ID NO: 2230878 - RNA, 19 nt, Artificial Sequence
  Description of Artificial Sequence: Synthetic oligonucleotide
gguggcugacaggcuaacc

SEQ ID NO: 2230879 - RNA, 19 nt, Artificial Sequence
  Description of Artificial Sequence: Synthetic oligonucleotide
gacaaccccacagcaaguu

SEQ ID NO: 2230880 - RNA, 19 nt, Artificial Sequence
  Description of Artificial Sequence: Synthetic oligonucleotide
cagacgccuccuuccccac

SEQ ID NO: 2230881 - RNA, 19 nt, Artificial Sequence
  Description of Artificial Sequence: Synthetic oligonucleotide
ccaacgugcugucucaucu

SEQ ID NO: 2230882 - RNA, 19 nt, Artificial Sequence
  Description of Artificial Sequence: Synthetic oligonucleotide
cacggccgucuugugcagg

SEQ ID NO: 2230883 - RNA, 19 nt, Artificial Sequence
  Description of Artificial Sequence: Synthetic oligonucleotide
gacaguuuauaggcaucau

SEQ ID NO: 2230884 - RNA, 19 nt, Artificial Sequence
  Description of Artificial Sequence: Synthetic oligonucleotide
acgugcugucucaucucca

SEQ ID NO: 2230885 - RNA, 19 nt, Artificial Sequence
  Description of Artificial Sequence: Synthetic oligonucleotide
ggucguccuuccgaaccag

SEQ ID NO: 2230886 - RNA, 19 nt, Artificial Sequence
  Description of Artificial Sequence: Synthetic oligonucleotide
ccauugcccagucagauuu

SEQ ID NO: 2230887 - RNA, 19 nt, Artificial Sequence
  Description of Artificial Sequence: Synthetic oligonucleotide
guguggaggaggugagcgu

SEQ ID NO: 2230888 - RNA, 19 nt, Artificial Sequence
  Description of Artificial Sequence: Synthetic oligonucleotide
ggcugacaggcuaacccuc

SEQ ID NO: 2230889 - RNA, 19 nt, Artificial Sequence
  Description of Artificial Sequence: Synthetic oligonucleotide
cucuuucugugcaggucgu

SEQ ID NO: 2230890 - RNA, 19 nt, Artificial Sequence
  Description of Artificial Sequence: Synthetic oligonucleotide
uacuugcagcaagggucaa

SEQ ID NO: 2230891 - RNA, 19 nt, Artificial Sequence
  Description of Artificial Sequence: Synthetic oligonucleotide
cccuggcauacccaugauc

SEQ ID NO: 2230892 - RNA, 19 nt, Artificial Sequence
  Description of Artificial Sequence: Synthetic oligonucleotide
auccaacgugcugucucau

SEQ ID NO: 2230893 - RNA, 19 nt, Artificial Sequence
  Description of Artificial Sequence: Synthetic oligonucleotide
gcaauugcccacggugauc

SEQ ID NO: 2230894 - RNA, 19 nt, Artificial Sequence
  Description of Artificial Sequence: Synthetic oligonucleotide
uggagacucucggcucguc

SEQ ID NO: 2230895 - RNA, 19 nt, Artificial Sequence
  Description of Artificial Sequence: Synthetic oligonucleotide
ccacgcggccaucuuggag

SEQ ID NO: 2230896 - RNA, 19 nt, Artificial Sequence
  Description of Artificial Sequence: Synthetic oligonucleotide
cauacagcguagagcucau

SEQ ID NO: 2230897 - RNA, 19 nt, Artificial Sequence
  Description of Artificial Sequence: Synthetic oligonucleotide
gaccuacuccuggguuaug

SEQ ID NO: 2230898 - RNA, 19 nt, Artificial Sequence
  Description of Artificial Sequence: Synthetic oligonucleotide
caaugccaauggggugaag

SEQ ID NO: 2230899 - RNA, 19 nt, Artificial Sequence
  Description of Artificial Sequence: Synthetic oligonucleotide
gccaacacggccgucuugu

SEQ ID NO: 2230900 - RNA, 19 nt, Artificial Sequence
  Description of Artificial Sequence: Synthetic oligonucleotide
gggaguaauccaggggcaa

SEQ ID NO: 2230901 - RNA, 19 nt, Artificial Sequence
  Description of Artificial Sequence: Synthetic oligonucleotide
ccucacggagaaaacccaa

SEQ ID NO: 2230902 - RNA, 19 nt, Artificial Sequence
  Description of Artificial Sequence: Synthetic oligonucleotide
agucgguggcugacaggcu

SEQ ID NO: 2230903 - RNA, 19 nt, Artificial Sequence
  Description of Artificial Sequence: Synthetic oligonucleotide
ggccgucuugugcaggcaa

SEQ ID NO: 2230904 - RNA, 19 nt, Artificial Sequence
  Description of Artificial Sequence: Synthetic oligonucleotide
gccucacggagaaaaccca

SEQ ID NO: 2230905 - RNA, 19 nt, Artificial Sequence
  Description of Artificial Sequence: Synthetic oligonucleotide
gcaggucguccuuccgaac

SEQ ID NO: 2230906 - RNA, 19 nt, Artificial Sequence
  Description of Artificial Sequence: Synthetic oligonucleotide
gcauuggcuccauccauau

SEQ ID NO: 2230907 - RNA, 19 nt, Artificial Sequence
  Description of Artificial Sequence: Synthetic oligonucleotide
cccagacgccuccuucccc

SEQ ID NO: 2230908 - RNA, 19 nt, Artificial Sequence
  Description of Artificial Sequence: Synthetic oligonucleotide
gcuuccgguuggcuucuga

SEQ ID NO: 2230909 - RNA, 19 nt, Artificial Sequence
  Description of Artificial Sequence: Synthetic oligonucleotide
gcuucacgucccacucucc

SEQ ID NO: 2230910 - RNA, 19 nt, Artificial Sequence
  Description of Artificial Sequence: Synthetic oligonucleotide
gcucuaucacaauguacuu

SEQ ID NO: 2230911 - RNA, 19 nt, Artificial Sequence
  Description of Artificial Sequence: Synthetic oligonucleotide
ccaauggggugaagagaca

SEQ ID NO: 2230912 - RNA, 19 nt, Artificial Sequence
  Description of Artificial Sequence: Synthetic oligonucleotide
ccaacacggccgucuugug

SEQ ID NO: 2230913 - RNA, 19 nt, Artificial Sequence
  Description of Artificial Sequence: Synthetic oligonucleotide
ccauauuccauugcccagu

SEQ ID NO: 2230914 - RNA, 19 nt, Artificial Sequence
  Description of Artificial Sequence: Synthetic oligonucleotide
auacagcguagagcucaua

SEQ ID NO: 2230915 - RNA, 19 nt, Artificial Sequence
  Description of Artificial Sequence: Synthetic oligonucleotide
cuccuggguuauggaaaga

SEQ ID NO: 2230916 - RNA, 19 nt, Artificial Sequence
  Description of Artificial Sequence: Synthetic oligonucleotide
gcauacccaugaucuguua

SEQ ID NO: 2230917 - RNA, 19 nt, Artificial Sequence
  Description of Artificial Sequence: Synthetic oligonucleotide
caauagcuuccgguuggcu

SEQ ID NO: 2230918 - RNA, 19 nt, Artificial Sequence
  Description of Artificial Sequence: Synthetic oligonucleotide
cccggacccagacgccucc

SEQ ID NO: 2230919 - RNA, 19 nt, Artificial Sequence
  Description of Artificial Sequence: Synthetic oligonucleotide
ggcuucugaaugguauagu

SEQ ID NO: 2230920 - RNA, 19 nt, Artificial Sequence
  Description of Artificial Sequence: Synthetic oligonucleotide
gcgggacaguuuauaggca

SEQ ID NO: 2230921 - RNA, 19 nt, Artificial Sequence
  Description of Artificial Sequence: Synthetic oligonucleotide
ggaguaauccaggggcaau

SEQ ID NO: 2230922 - RNA, 19 nt, Artificial Sequence
  Description of Artificial Sequence: Synthetic oligonucleotide
gguuggcuucugaauggua

SEQ ID NO: 2230923 - RNA, 19 nt, Artificial Sequence
  Description of Artificial Sequence: Synthetic oligonucleotide
gugauccaacgugcugucu

SEQ ID NO: 2230924 - RNA, 19 nt, Artificial Sequence
  Description of Artificial Sequence: Synthetic oligonucleotide
ggaccuacuccuggguuau

SEQ ID NO: 2230925 - RNA, 19 nt, Artificial Sequence
  Description of Artificial Sequence: Synthetic oligonucleotide
cgggugggcucuaucacaa

SEQ ID NO: 2230926 - RNA, 19 nt, Artificial Sequence
  Description of Artificial Sequence: Synthetic oligonucleotide
cuuccccacgcggccaucu

SEQ ID NO: 2230927 - RNA, 19 nt, Artificial Sequence
  Description of Artificial Sequence: Synthetic oligonucleotide
agcuuccgguuggcuucug

SEQ ID NO: 2230928 - RNA, 19 nt, Artificial Sequence
  Description of Artificial Sequence: Synthetic oligonucleotide
gcaggcaauugcccacggu

SEQ ID NO: 2230929 - RNA, 19 nt, Artificial Sequence
  Description of Artificial Sequence: Synthetic oligonucleotide
gcacuauguagcagucggu

SEQ ID NO: 2230930 - RNA, 19 nt, Artificial Sequence
  Description of Artificial Sequence: Synthetic oligonucleotide
gcccacggugauccaacgu

SEQ ID NO: 2230931 - RNA, 19 nt, Artificial Sequence
  Description of Artificial Sequence: Synthetic oligonucleotide
ccgcccggacccagacgcc

SEQ ID NO: 2230932 - RNA, 19 nt, Artificial Sequence
  Description of Artificial Sequence: Synthetic oligonucleotide
gggcagccagugcuauugu

SEQ ID NO: 2230933 - RNA, 19 nt, Artificial Sequence
  Description of Artificial Sequence: Synthetic oligonucleotide
cagcgggcagggagaugua

SEQ ID NO: 2230934 - RNA, 19 nt, Artificial Sequence
  Description of Artificial Sequence: Synthetic oligonucleotide
ccacucuccugcagucaua

SEQ ID NO: 2230935 - RNA, 19 nt, Artificial Sequence
  Description of Artificial Sequence: Synthetic oligonucleotide
caauucgggugggcucuau

SEQ ID NO: 2230936 - RNA, 19 nt, Artificial Sequence
  Description of Artificial Sequence: Synthetic oligonucleotide
gccgucuugugcaggcaau

SEQ ID NO: 2230937 - RNA, 19 nt, Artificial Sequence
  Description of Artificial Sequence: Synthetic oligonucleotide
cgggagccaccgccgcccg

SEQ ID NO: 2230938 - RNA, 19 nt, Artificial Sequence
  Description of Artificial Sequence: Synthetic oligonucleotide
gcccggacccagacgccuc

SEQ ID NO: 2230939 - RNA, 19 nt, Artificial Sequence
  Description of Artificial Sequence: Synthetic oligonucleotide
cccacgcggccaucuugga

SEQ ID NO: 2230940 - RNA, 19 nt, Artificial Sequence
  Description of Artificial Sequence: Synthetic oligonucleotide
gggugggcucuaucacaau

SEQ ID NO: 2230941 - RNA, 19 nt, Artificial Sequence
  Description of Artificial Sequence: Synthetic oligonucleotide
cgguggcugacaggcuaac

SEQ ID NO: 2230942 - RNA, 19 nt, Artificial Sequence
  Description of Artificial Sequence: Synthetic oligonucleotide
gcgccugcuccaacucaua

SEQ ID NO: 2230943 - RNA, 19 nt, Artificial Sequence
  Description of Artificial Sequence: Synthetic oligonucleotide
ggcaggcgggacaguuuau

SEQ ID NO: 2230944 - RNA, 19 nt, Artificial Sequence
  Description of Artificial Sequence: Synthetic oligonucleotide
ccgucuugugcaggcaauu

SEQ ID NO: 2230945 - RNA, 19 nt, Artificial Sequence
  Description of Artificial Sequence: Synthetic oligonucleotide
ccaauucgggugggcucua

SEQ ID NO: 2230946 - RNA, 19 nt, Artificial Sequence
  Description of Artificial Sequence: Synthetic oligonucleotide
cgguuggcuucugaauggu

SEQ ID NO: 2230947 - RNA, 19 nt, Artificial Sequence
  Description of Artificial Sequence: Synthetic oligonucleotide
cggccgucuugugcaggca

SEQ ID NO: 2230948 - RNA, 19 nt, Artificial Sequence
  Description of Artificial Sequence: Synthetic oligonucleotide
cggccaucuuggagacucu

SEQ ID NO: 2230949 - RNA, 19 nt, Artificial Sequence
  Description of Artificial Sequence: Synthetic oligonucleotide
ccggacccagacgccuccu

SEQ ID NO: 2230950 - RNA, 19 nt, Artificial Sequence
  Description of Artificial Sequence: Synthetic oligonucleotide
cgcggccaucuuggagacu

SEQ ID NO: 2230951 - RNA, 19 nt, Artificial Sequence
  Description of Artificial Sequence: Synthetic oligonucleotide
uguauuugaacacacagug

SEQ ID NO: 2230952 - RNA, 19 nt, Artificial Sequence
  Description of Artificial Sequence: Synthetic oligonucleotide
cauguaauaaucuugcagc

SEQ ID NO: 2230953 - RNA, 19 nt, Artificial Sequence
  Description of Artificial Sequence: Synthetic oligonucleotide
uuuagaacugugauugugg

SEQ ID NO: 2230954 - RNA, 19 nt, Artificial Sequence
  Description of Artificial Sequence: Synthetic oligonucleotide
ugacuuagggaacagaugc

SEQ ID NO: 2230955 - RNA, 19 nt, Artificial Sequence
  Description of Artificial Sequence: Synthetic oligonucleotide
ucauguaauaaucuugcag

SEQ ID NO: 2230956 - RNA, 19 nt, Artificial Sequence
  Description of Artificial Sequence: Synthetic oligonucleotide
aaguuguucuucuggauac

SEQ ID NO: 2230957 - RNA, 19 nt, Artificial Sequence
  Description of Artificial Sequence: Synthetic oligonucleotide
ucuuaaguuguucuucugg

SEQ ID NO: 2230958 - RNA, 19 nt, Artificial Sequence
  Description of Artificial Sequence: Synthetic oligonucleotide
ugggcugugaaccagaucu

SEQ ID NO: 2230959 - RNA, 19 nt, Artificial Sequence
  Description of Artificial Sequence: Synthetic oligonucleotide
ugucauguaauaaucuugc

SEQ ID NO: 2230960 - RNA, 19 nt, Artificial Sequence
  Description of Artificial Sequence: Synthetic oligonucleotide
ucuucaaucuccucaggcg

SEQ ID NO: 2230961 - RNA, 19 nt, Artificial Sequence
  Description of Artificial Sequence: Synthetic oligonucleotide
aauuuguggaaggaguuuc

SEQ ID NO: 2230962 - RNA, 19 nt, Artificial Sequence
  Description of Artificial Sequence: Synthetic oligonucleotide
aguuccagggcccuugucc

SEQ ID NO: 2230963 - RNA, 19 nt, Artificial Sequence
  Description of Artificial Sequence: Synthetic oligonucleotide
guaauaaucuugcagcagc

SEQ ID NO: 2230964 - RNA, 19 nt, Artificial Sequence
  Description of Artificial Sequence: Synthetic oligonucleotide
aucuucaaucuccucaggc

SEQ ID NO: 2230965 - RNA, 19 nt, Artificial Sequence
  Description of Artificial Sequence: Synthetic oligonucleotide
cucugaauaggcaucaccc

SEQ ID NO: 2230966 - RNA, 19 nt, Artificial Sequence
  Description of Artificial Sequence: Synthetic oligonucleotide
uuagaacugugauuguggg

SEQ ID NO: 2230967 - RNA, 19 nt, Artificial Sequence
  Description of Artificial Sequence: Synthetic oligonucleotide
ugugauugugggcugaggc

SEQ ID NO: 2230968 - RNA, 19 nt, Artificial Sequence
  Description of Artificial Sequence: Synthetic oligonucleotide
accucucugguacugaggc

SEQ ID NO: 2230969 - RNA, 19 nt, Artificial Sequence
  Description of Artificial Sequence: Synthetic oligonucleotide
ucagacaucucugaauagg

SEQ ID NO: 2230970 - RNA, 19 nt, Artificial Sequence
  Description of Artificial Sequence: Synthetic oligonucleotide
auugacuaccuucacagcu

SEQ ID NO: 2230971 - RNA, 19 nt, Artificial Sequence
  Description of Artificial Sequence: Synthetic oligonucleotide
ucuucguaccacuugagcu

SEQ ID NO: 2230972 - RNA, 19 nt, Artificial Sequence
  Description of Artificial Sequence: Synthetic oligonucleotide
ugacgagcagaccuggugg

SEQ ID NO: 2230973 - RNA, 19 nt, Artificial Sequence
  Description of Artificial Sequence: Synthetic oligonucleotide
uuguaucugccacagcccg

SEQ ID NO: 2230974 - RNA, 19 nt, Artificial Sequence
  Description of Artificial Sequence: Synthetic oligonucleotide
ucuucuggauacuugguca

SEQ ID NO: 2230975 - RNA, 19 nt, Artificial Sequence
  Description of Artificial Sequence: Synthetic oligonucleotide
uuugcaucaaggaaggcuu

SEQ ID NO: 2230976 - RNA, 19 nt, Artificial Sequence
  Description of Artificial Sequence: Synthetic oligonucleotide
ugugugucauguaauaauc

SEQ ID NO: 2230977 - RNA, 19 nt, Artificial Sequence
  Description of Artificial Sequence: Synthetic oligonucleotide
agaugcaguugucaagggc

SEQ ID NO: 2230978 - RNA, 19 nt, Artificial Sequence
  Description of Artificial Sequence: Synthetic oligonucleotide
ugggaaguuaugcuggggc

SEQ ID NO: 2230979 - RNA, 19 nt, Artificial Sequence
  Description of Artificial Sequence: Synthetic oligonucleotide
ucucagacaucucugaaua

SEQ ID NO: 2230980 - RNA, 19 nt, Artificial Sequence
  Description of Artificial Sequence: Synthetic oligonucleotide
ugauguuguauuugaacac

SEQ ID NO: 2230981 - RNA, 19 nt, Artificial Sequence
  Description of Artificial Sequence: Synthetic oligonucleotide
ugaauaggcaucacccagc

SEQ ID NO: 2230982 - RNA, 19 nt, Artificial Sequence
  Description of Artificial Sequence: Synthetic oligonucleotide
ugacaacuguucaugagac

SEQ ID NO: 2230983 - RNA, 19 nt, Artificial Sequence
  Description of Artificial Sequence: Synthetic oligonucleotide
agaagcucccuuucagagc

SEQ ID NO: 2230984 - RNA, 19 nt, Artificial Sequence
  Description of Artificial Sequence: Synthetic oligonucleotide
aagcuguuggaguccauag

SEQ ID NO: 2230985 - RNA, 19 nt, Artificial Sequence
  Description of Artificial Sequence: Synthetic oligonucleotide
uuucucagcaaaccauugc

SEQ ID NO: 2230986 - RNA, 19 nt, Artificial Sequence
  Description of Artificial Sequence: Synthetic oligonucleotide
acgucagagugucaaaggg

SEQ ID NO: 2230987 - RNA, 19 nt, Artificial Sequence
  Description of Artificial Sequence: Synthetic oligonucleotide
ucucugaauaggcaucacc

SEQ ID NO: 2230988 - RNA, 19 nt, Artificial Sequence
  Description of Artificial Sequence: Synthetic oligonucleotide
auagcugcauuguauguug

SEQ ID NO: 2230989 - RNA, 19 nt, Artificial Sequence
  Description of Artificial Sequence: Synthetic oligonucleotide
uagauguuugcaucaagga

SEQ ID NO: 2230990 - RNA, 19 nt, Artificial Sequence
  Description of Artificial Sequence: Synthetic oligonucleotide
uccauagcugcauuguaug

SEQ ID NO: 2230991 - RNA, 19 nt, Artificial Sequence
  Description of Artificial Sequence: Synthetic oligonucleotide
uaaguuguucuucuggaua

SEQ ID NO: 2230992 - RNA, 19 nt, Artificial Sequence
  Description of Artificial Sequence: Synthetic oligonucleotide
uucagaaagcuguuggagu

SEQ ID NO: 2230993 - RNA, 19 nt, Artificial Sequence
  Description of Artificial Sequence: Synthetic oligonucleotide
uucaugagacuucuuauuu

SEQ ID NO: 2230994 - RNA, 19 nt, Artificial Sequence
  Description of Artificial Sequence: Synthetic oligonucleotide
gacgucagagugucaaagg

SEQ ID NO: 2230995 - RNA, 19 nt, Artificial Sequence
  Description of Artificial Sequence: Synthetic oligonucleotide
uugacuuagggaacagaug

SEQ ID NO: 2230996 - RNA, 19 nt, Artificial Sequence
  Description of Artificial Sequence: Synthetic oligonucleotide
gaugcaguugucaagggca

SEQ ID NO: 2230997 - RNA, 19 nt, Artificial Sequence
  Description of Artificial Sequence: Synthetic oligonucleotide
cagacaucucugaauaggc

SEQ ID NO: 2230998 - RNA, 19 nt, Artificial Sequence
  Description of Artificial Sequence: Synthetic oligonucleotide
aguagcagagcucagcuuu

SEQ ID NO: 2230999 - RNA, 19 nt, Artificial Sequence
  Description of Artificial Sequence: Synthetic oligonucleotide
uguuguauuugaacacaca

SEQ ID NO: 2231000 - RNA, 19 nt, Artificial Sequence
  Description of Artificial Sequence: Synthetic oligonucleotide
uugcaagucucccucacac

SEQ ID NO: 2231001 - RNA, 19 nt, Artificial Sequence
  Description of Artificial Sequence: Synthetic oligonucleotide
agcuguuggaguccauagc

SEQ ID NO: 2231002 - RNA, 19 nt, Artificial Sequence
  Description of Artificial Sequence: Synthetic oligonucleotide
auguaauaaucuugcagca

SEQ ID NO: 2231003 - RNA, 19 nt, Artificial Sequence
  Description of Artificial Sequence: Synthetic oligonucleotide
agauguuugcaucaaggaa

SEQ ID NO: 2231004 - RNA, 19 nt, Artificial Sequence
  Description of Artificial Sequence: Synthetic oligonucleotide
ucacccagcacucugugaa

SEQ ID NO: 2231005 - RNA, 19 nt, Artificial Sequence
  Description of Artificial Sequence: Synthetic oligonucleotide
cugaauaggcaucacccag

SEQ ID NO: 2231006 - RNA, 19 nt, Artificial Sequence
  Description of Artificial Sequence: Synthetic oligonucleotide
ucugaauaggcaucaccca

SEQ ID NO: 2231007 - RNA, 19 nt, Artificial Sequence
  Description of Artificial Sequence: Synthetic oligonucleotide
uguucaugagacuucuuau

SEQ ID NO: 2231008 - RNA, 19 nt, Artificial Sequence
  Description of Artificial Sequence: Synthetic oligonucleotide
cuucguaccacuugagcug

SEQ ID NO: 2231009 - RNA, 19 nt, Artificial Sequence
  Description of Artificial Sequence: Synthetic oligonucleotide
  modified_base (13)..(13): a, c, u, g, unknown or other
uucacucugcccnggaaac

SEQ ID NO: 2231010 - RNA, 19 nt, Artificial Sequence
  Description of Artificial Sequence: Synthetic oligonucleotide
cucuuauagucuucguacc

SEQ ID NO: 2231011 - RNA, 19 nt, Artificial Sequence
  Description of Artificial Sequence: Synthetic oligonucleotide
cuuguaucugccacagccc

SEQ ID NO: 2231012 - RNA, 19 nt, Artificial Sequence
  Description of Artificial Sequence: Synthetic oligonucleotide
caugauucacuguucucag

SEQ ID NO: 2231013 - RNA, 19 nt, Artificial Sequence
  Description of Artificial Sequence: Synthetic oligonucleotide
agugucaaagggcucugag

SEQ ID NO: 2231014 - RNA, 19 nt, Artificial Sequence
  Description of Artificial Sequence: Synthetic oligonucleotide
ugugaacugccacaggcuc

SEQ ID NO: 2231015 - RNA, 19 nt, Artificial Sequence
  Description of Artificial Sequence: Synthetic oligonucleotide
augacuguauugaacaucu

SEQ ID NO: 2231016 - RNA, 19 nt, Artificial Sequence
  Description of Artificial Sequence: Synthetic oligonucleotide
aauaggcaucacccagcac

SEQ ID NO: 2231017 - RNA, 19 nt, Artificial Sequence
  Description of Artificial Sequence: Synthetic oligonucleotide
auagucuucguaccacuug

SEQ ID NO: 2231018 - RNA, 19 nt, Artificial Sequence
  Description of Artificial Sequence: Synthetic oligonucleotide
cagaagcucccuuucagag

SEQ ID NO: 2231019 - RNA, 19 nt, Artificial Sequence
  Description of Artificial Sequence: Synthetic oligonucleotide
  modified_base (19)..(19): a, c, u, g, unknown or other
cucuacuucacucugcccn

SEQ ID NO: 2231020 - RNA, 19 nt, Artificial Sequence
  Description of Artificial Sequence: Synthetic oligonucleotide
uccucaggcgaccagcuga

SEQ ID NO: 2231021 - RNA, 19 nt, Artificial Sequence
  Description of Artificial Sequence: Synthetic oligonucleotide
ucagcaaaccauugcuuga

SEQ ID NO: 2231022 - RNA, 19 nt, Artificial Sequence
  Description of Artificial Sequence: Synthetic oligonucleotide
agucaaguagcagagcuca

SEQ ID NO: 2231023 - RNA, 19 nt, Artificial Sequence
  Description of Artificial Sequence: Synthetic oligonucleotide
gauguuguauuugaacaca

SEQ ID NO: 2231024 - RNA, 19 nt, Artificial Sequence
  Description of Artificial Sequence: Synthetic oligonucleotide
uguauguugggaugcugcu

SEQ ID NO: 2231025 - RNA, 19 nt, Artificial Sequence
  Description of Artificial Sequence: Synthetic oligonucleotide
caaaccauugcuugaccug

SEQ ID NO: 2231026 - RNA, 19 nt, Artificial Sequence
  Description of Artificial Sequence: Synthetic oligonucleotide
ucaaguagcagagcucagc

SEQ ID NO: 2231027 - RNA, 19 nt, Artificial Sequence
  Description of Artificial Sequence: Synthetic oligonucleotide
uuccgcaccucucugguac

SEQ ID NO: 2231028 - RNA, 19 nt, Artificial Sequence
  Description of Artificial Sequence: Synthetic oligonucleotide
uucacccauuuucucagca

SEQ ID NO: 2231029 - RNA, 19 nt, Artificial Sequence
  Description of Artificial Sequence: Synthetic oligonucleotide
uggauacuuggucaccaca

SEQ ID NO: 2231030 - RNA, 19 nt, Artificial Sequence
  Description of Artificial Sequence: Synthetic oligonucleotide
gacuggggacgucagagug

SEQ ID NO: 2231031 - RNA, 19 nt, Artificial Sequence
  Description of Artificial Sequence: Synthetic oligonucleotide
ugauugugggcugaggcac

SEQ ID NO: 2231032 - RNA, 19 nt, Artificial Sequence
  Description of Artificial Sequence: Synthetic oligonucleotide
guuuagaacugugauugug

SEQ ID NO: 2231033 - RNA, 19 nt, Artificial Sequence
  Description of Artificial Sequence: Synthetic oligonucleotide
uuaaguuguucuucuggau

SEQ ID NO: 2231034 - RNA, 19 nt, Artificial Sequence
  Description of Artificial Sequence: Synthetic oligonucleotide
uucguaccacuugagcugg

SEQ ID NO: 2231035 - RNA, 19 nt, Artificial Sequence
  Description of Artificial Sequence: Synthetic oligonucleotide
aacuguucaugagacuucu

SEQ ID NO: 2231036 - RNA, 19 nt, Artificial Sequence
  Description of Artificial Sequence: Synthetic oligonucleotide
gacgagcagaccugguggg

SEQ ID NO: 2231037 - RNA, 19 nt, Artificial Sequence
  Description of Artificial Sequence: Synthetic oligonucleotide
auguuguauuugaacacac

SEQ ID NO: 2231038 - RNA, 19 nt, Artificial Sequence
  Description of Artificial Sequence: Synthetic oligonucleotide
ucaggcgaccagcugauuc

SEQ ID NO: 2231039 - RNA, 19 nt, Artificial Sequence
  Description of Artificial Sequence: Synthetic oligonucleotide
ccucuuauagucuucguac

SEQ ID NO: 2231040 - RNA, 19 nt, Artificial Sequence
  Description of Artificial Sequence: Synthetic oligonucleotide
ucacagaggguuugcaagu

SEQ ID NO: 2231041 - RNA, 19 nt, Artificial Sequence
  Description of Artificial Sequence: Synthetic oligonucleotide
agcugcauuguauguuggg

SEQ ID NO: 2231042 - RNA, 19 nt, Artificial Sequence
  Description of Artificial Sequence: Synthetic oligonucleotide
gaugacuguauugaacauc

SEQ ID NO: 2231043 - RNA, 19 nt, Artificial Sequence
  Description of Artificial Sequence: Synthetic oligonucleotide
uuaggugcucuacuucacu

SEQ ID NO: 2231044 - RNA, 19 nt, Artificial Sequence
  Description of Artificial Sequence: Synthetic oligonucleotide
cuuauagucuucguaccac

SEQ ID NO: 2231045 - RNA, 19 nt, Artificial Sequence
  Description of Artificial Sequence: Synthetic oligonucleotide
uuugcaagucucccucaca

SEQ ID NO: 2231046 - RNA, 19 nt, Artificial Sequence
  Description of Artificial Sequence: Synthetic oligonucleotide
ucccaugauucacuguucu

SEQ ID NO: 2231047 - RNA, 19 nt, Artificial Sequence
  Description of Artificial Sequence: Synthetic oligonucleotide
uucucagacaucucugaau

SEQ ID NO: 2231048 - RNA, 19 nt, Artificial Sequence
  Description of Artificial Sequence: Synthetic oligonucleotide
gaagcucccuuucagagcu

SEQ ID NO: 2231049 - RNA, 19 nt, Artificial Sequence
  Description of Artificial Sequence: Synthetic oligonucleotide
guguuaaugggugccacag

SEQ ID NO: 2231050 - RNA, 19 nt, Artificial Sequence
  Description of Artificial Sequence: Synthetic oligonucleotide
cugacaacuguucaugaga

SEQ ID NO: 2231051 - RNA, 19 nt, Artificial Sequence
  Description of Artificial Sequence: Synthetic oligonucleotide
  modified_base (6)..(6): a, c, u, g, unknown or other
ugcccnggaaacugguucc

SEQ ID NO: 2231052 - RNA, 19 nt, Artificial Sequence
  Description of Artificial Sequence: Synthetic oligonucleotide
augacgagcagaccuggug

SEQ ID NO: 2231053 - RNA, 19 nt, Artificial Sequence
  Description of Artificial Sequence: Synthetic oligonucleotide
agaccuggugggaaguugc

SEQ ID NO: 2231054 - RNA, 19 nt, Artificial Sequence
  Description of Artificial Sequence: Synthetic oligonucleotide
ucuggauacuuggucacca

SEQ ID NO: 2231055 - RNA, 19 nt, Artificial Sequence
  Description of Artificial Sequence: Synthetic oligonucleotide
uucaaucuccucaggcgac

SEQ ID NO: 2231056 - RNA, 19 nt, Artificial Sequence
  Description of Artificial Sequence: Synthetic oligonucleotide
ucugaaccacuuccgcacc

SEQ ID NO: 2231057 - RNA, 19 nt, Artificial Sequence
  Description of Artificial Sequence: Synthetic oligonucleotide
gaauaggcaucacccagca

SEQ ID NO: 2231058 - RNA, 19 nt, Artificial Sequence
  Description of Artificial Sequence: Synthetic oligonucleotide
agacuggaugacuguauug

SEQ ID NO: 2231059 - RNA, 19 nt, Artificial Sequence
  Description of Artificial Sequence: Synthetic oligonucleotide
ugacuaccuucacagcuga

SEQ ID NO: 2231060 - RNA, 19 nt, Artificial Sequence
  Description of Artificial Sequence: Synthetic oligonucleotide
acaucucugaauaggcauc

SEQ ID NO: 2231061 - RNA, 19 nt, Artificial Sequence
  Description of Artificial Sequence: Synthetic oligonucleotide
uagcugcauuguauguugg

SEQ ID NO: 2231062 - RNA, 19 nt, Artificial Sequence
  Description of Artificial Sequence: Synthetic oligonucleotide
cuucuggauacuuggucac

SEQ ID NO: 2231063 - RNA, 19 nt, Artificial Sequence
  Description of Artificial Sequence: Synthetic oligonucleotide
agaggguuugcaagucucc

SEQ ID NO: 2231064 - RNA, 19 nt, Artificial Sequence
  Description of Artificial Sequence: Synthetic oligonucleotide
acugcuuguaucugccaca

SEQ ID NO: 2231065 - RNA, 19 nt, Artificial Sequence
  Description of Artificial Sequence: Synthetic oligonucleotide
cacuuggcucccaugauuc

SEQ ID NO: 2231066 - RNA, 19 nt, Artificial Sequence
  Description of Artificial Sequence: Synthetic oligonucleotide
cacaguguuaaugggugcc

SEQ ID NO: 2231067 - RNA, 19 nt, Artificial Sequence
  Description of Artificial Sequence: Synthetic oligonucleotide
uugcuugaccugcugggca

SEQ ID NO: 2231068 - RNA, 19 nt, Artificial Sequence
  Description of Artificial Sequence: Synthetic oligonucleotide
ucaugagacuucuuauuuu

SEQ ID NO: 2231069 - RNA, 19 nt, Artificial Sequence
  Description of Artificial Sequence: Synthetic oligonucleotide
agagcugacaacuguucau

SEQ ID NO: 2231070 - RNA, 19 nt, Artificial Sequence
  Description of Artificial Sequence: Synthetic oligonucleotide
caggcgaccagcugauucc

SEQ ID NO: 2231071 - RNA, 19 nt, Artificial Sequence
  Description of Artificial Sequence: Synthetic oligonucleotide
  modified_base (7)..(7): a, c, u, g, unknown or other
cugcccnggaaacugguuc

SEQ ID NO: 2231072 - RNA, 19 nt, Artificial Sequence
  Description of Artificial Sequence: Synthetic oligonucleotide
guuaugcuggggcaugcug

SEQ ID NO: 2231073 - RNA, 19 nt, Artificial Sequence
  Description of Artificial Sequence: Synthetic oligonucleotide
guaucugccacagcccggg

SEQ ID NO: 2231074 - RNA, 19 nt, Artificial Sequence
  Description of Artificial Sequence: Synthetic oligonucleotide
gauucccugcuucagccuc

SEQ ID NO: 2231075 - RNA, 19 nt, Artificial Sequence
  Description of Artificial Sequence: Synthetic oligonucleotide
acuugugugucauguaaua

SEQ ID NO: 2231076 - RNA, 19 nt, Artificial Sequence
  Description of Artificial Sequence: Synthetic oligonucleotide
gagcugacaacuguucaug

SEQ ID NO: 2231077 - RNA, 19 nt, Artificial Sequence
  Description of Artificial Sequence: Synthetic oligonucleotide
uguuaaugggugccacagu

SEQ ID NO: 2231078 - RNA, 19 nt, Artificial Sequence
  Description of Artificial Sequence: Synthetic oligonucleotide
aguguuaaugggugccaca

SEQ ID NO: 2231079 - RNA, 19 nt, Artificial Sequence
  Description of Artificial Sequence: Synthetic oligonucleotide
aaucuccucaggcgaccag

SEQ ID NO: 2231080 - RNA, 19 nt, Artificial Sequence
  Description of Artificial Sequence: Synthetic oligonucleotide
gagugacugggcugcauug

SEQ ID NO: 2231081 - RNA, 19 nt, Artificial Sequence
  Description of Artificial Sequence: Synthetic oligonucleotide
gucuucguaccacuugagc

SEQ ID NO: 2231082 - RNA, 19 nt, Artificial Sequence
  Description of Artificial Sequence: Synthetic oligonucleotide
agggcucugagcuggccuc

SEQ ID NO: 2231083 - RNA, 19 nt, Artificial Sequence
  Description of Artificial Sequence: Synthetic oligonucleotide
ggucaccacagucaaguag

SEQ ID NO: 2231084 - RNA, 19 nt, Artificial Sequence
  Description of Artificial Sequence: Synthetic oligonucleotide
accagaucuuaaguuguuc

SEQ ID NO: 2231085 - RNA, 19 nt, Artificial Sequence
  Description of Artificial Sequence: Synthetic oligonucleotide
cacaguugacuuagggaac

SEQ ID NO: 2231086 - RNA, 19 nt, Artificial Sequence
  Description of Artificial Sequence: Synthetic oligonucleotide
gacaucucugaauaggcau

SEQ ID NO: 2231087 - RNA, 19 nt, Artificial Sequence
  Description of Artificial Sequence: Synthetic oligonucleotide
ugguuaggugcucuacuuc

SEQ ID NO: 2231088 - RNA, 19 nt, Artificial Sequence
  Description of Artificial Sequence: Synthetic oligonucleotide
uguuuagaacugugauugu

SEQ ID NO: 2231089 - RNA, 19 nt, Artificial Sequence
  Description of Artificial Sequence: Synthetic oligonucleotide
uugguuaggugcucuacuu

SEQ ID NO: 2231090 - RNA, 19 nt, Artificial Sequence
  Description of Artificial Sequence: Synthetic oligonucleotide
guaggggaauuuguggaag

SEQ ID NO: 2231091 - RNA, 19 nt, Artificial Sequence
  Description of Artificial Sequence: Synthetic oligonucleotide
aaagcuguuggaguccaua

SEQ ID NO: 2231092 - RNA, 19 nt, Artificial Sequence
  Description of Artificial Sequence: Synthetic oligonucleotide
uaggcaucacccagcacuc

SEQ ID NO: 2231093 - RNA, 19 nt, Artificial Sequence
  Description of Artificial Sequence: Synthetic oligonucleotide
aaguugccccucuuauagu

SEQ ID NO: 2231094 - RNA, 19 nt, Artificial Sequence
  Description of Artificial Sequence: Synthetic oligonucleotide
gguuaggugcucuacuuca

SEQ ID NO: 2231095 - RNA, 19 nt, Artificial Sequence
  Description of Artificial Sequence: Synthetic oligonucleotide
acaguugacuuagggaaca

SEQ ID NO: 2231096 - RNA, 19 nt, Artificial Sequence
  Description of Artificial Sequence: Synthetic oligonucleotide
uugggaaguuaugcugggg

SEQ ID NO: 2231097 - RNA, 19 nt, Artificial Sequence
  Description of Artificial Sequence: Synthetic oligonucleotide
gaggguuugcaagucuccc

SEQ ID NO: 2231098 - RNA, 19 nt, Artificial Sequence
  Description of Artificial Sequence: Synthetic oligonucleotide
gcaagucucccucacacac

SEQ ID NO: 2231099 - RNA, 19 nt, Artificial Sequence
  Description of Artificial Sequence: Synthetic oligonucleotide
gcugugaggagugacuggg

SEQ ID NO: 2231100 - RNA, 19 nt, Artificial Sequence
  Description of Artificial Sequence: Synthetic oligonucleotide
gacuguauugaacaucuuu

SEQ ID NO: 2231101 - RNA, 19 nt, Artificial Sequence
  Description of Artificial Sequence: Synthetic oligonucleotide
aucugccacagcccggguc

SEQ ID NO: 2231102 - RNA, 19 nt, Artificial Sequence
  Description of Artificial Sequence: Synthetic oligonucleotide
cuguuggaguccauagcug

SEQ ID NO: 2231103 - RNA, 19 nt, Artificial Sequence
  Description of Artificial Sequence: Synthetic oligonucleotide
uccagacuggggacgucag

SEQ ID NO: 2231104 - RNA, 19 nt, Artificial Sequence
  Description of Artificial Sequence: Synthetic oligonucleotide
ggcuugggaaguuaugcug

SEQ ID NO: 2231105 - RNA, 19 nt, Artificial Sequence
  Description of Artificial Sequence: Synthetic oligonucleotide
gagcuggccauucuucuga

SEQ ID NO: 2231106 - RNA, 19 nt, Artificial Sequence
  Description of Artificial Sequence: Synthetic oligonucleotide
gugauugugggcugaggca

SEQ ID NO: 2231107 - RNA, 19 nt, Artificial Sequence
  Description of Artificial Sequence: Synthetic oligonucleotide
aggcuugggaaguuaugcu

SEQ ID NO: 2231108 - RNA, 19 nt, Artificial Sequence
  Description of Artificial Sequence: Synthetic oligonucleotide
ucaaucuccucaggcgacc

SEQ ID NO: 2231109 - RNA, 19 nt, Artificial Sequence
  Description of Artificial Sequence: Synthetic oligonucleotide
ugcuugaccugcugggcac

SEQ ID NO: 2231110 - RNA, 19 nt, Artificial Sequence
  Description of Artificial Sequence: Synthetic oligonucleotide
ugcaagucucccucacaca

SEQ ID NO: 2231111 - RNA, 19 nt, Artificial Sequence
  Description of Artificial Sequence: Synthetic oligonucleotide
caaugacgagcagaccugg

SEQ ID NO: 2231112 - RNA, 19 nt, Artificial Sequence
  Description of Artificial Sequence: Synthetic oligonucleotide
acuuccgcaccucucuggu

SEQ ID NO: 2231113 - RNA, 19 nt, Artificial Sequence
  Description of Artificial Sequence: Synthetic oligonucleotide
gacguccagacuggggacg

SEQ ID NO: 2231114 - RNA, 19 nt, Artificial Sequence
  Description of Artificial Sequence: Synthetic oligonucleotide
agcugacaacuguucauga

SEQ ID NO: 2231115 - RNA, 19 nt, Artificial Sequence
  Description of Artificial Sequence: Synthetic oligonucleotide
ucacccauuuucucagcaa

SEQ ID NO: 2231116 - RNA, 19 nt, Artificial Sequence
  Description of Artificial Sequence: Synthetic oligonucleotide
caguugucaagggcaaggg

SEQ ID NO: 2231117 - RNA, 19 nt, Artificial Sequence
  Description of Artificial Sequence: Synthetic oligonucleotide
agcagcucucgguugccag

SEQ ID NO: 2231118 - RNA, 19 nt, Artificial Sequence
  Description of Artificial Sequence: Synthetic oligonucleotide
guuaaugggugccacaguu

SEQ ID NO: 2231119 - RNA, 19 nt, Artificial Sequence
  Description of Artificial Sequence: Synthetic oligonucleotide
ugaacugccacaggcucuc

SEQ ID NO: 2231120 - RNA, 19 nt, Artificial Sequence
  Description of Artificial Sequence: Synthetic oligonucleotide
cacuuccgcaccucucugg

SEQ ID NO: 2231121 - RNA, 19 nt, Artificial Sequence
  Description of Artificial Sequence: Synthetic oligonucleotide
gagcagaccuggugggaag

SEQ ID NO: 2231122 - RNA, 19 nt, Artificial Sequence
  Description of Artificial Sequence: Synthetic oligonucleotide
ggcagaagcucccuuucag

SEQ ID NO: 2231123 - RNA, 19 nt, Artificial Sequence
  Description of Artificial Sequence: Synthetic oligonucleotide
cuuugguuaggugcucuac

SEQ ID NO: 2231124 - RNA, 19 nt, Artificial Sequence
  Description of Artificial Sequence: Synthetic oligonucleotide
ggcaaugacgagcagaccu

SEQ ID NO: 2231125 - RNA, 19 nt, Artificial Sequence
  Description of Artificial Sequence: Synthetic oligonucleotide
gcugacaacuguucaugag

SEQ ID NO: 2231126 - RNA, 19 nt, Artificial Sequence
  Description of Artificial Sequence: Synthetic oligonucleotide
agggcccuuguccucacug

SEQ ID NO: 2231127 - RNA, 19 nt, Artificial Sequence
  Description of Artificial Sequence: Synthetic oligonucleotide
ccacaguugacuuagggaa

SEQ ID NO: 2231128 - RNA, 19 nt, Artificial Sequence
  Description of Artificial Sequence: Synthetic oligonucleotide
  modified_base (10)..(10): a, c, u, g, unknown or other
acucugcccnggaaacugg

SEQ ID NO: 2231129 - RNA, 19 nt, Artificial Sequence
  Description of Artificial Sequence: Synthetic oligonucleotide
augcugugaggagugacug

SEQ ID NO: 2231130 - RNA, 19 nt, Artificial Sequence
  Description of Artificial Sequence: Synthetic oligonucleotide
ugguuccggcagaagcucc

SEQ ID NO: 2231131 - RNA, 19 nt, Artificial Sequence
  Description of Artificial Sequence: Synthetic oligonucleotide
ucucugguacugaggccug

SEQ ID NO: 2231132 - RNA, 19 nt, Artificial Sequence
  Description of Artificial Sequence: Synthetic oligonucleotide
uuugguuggguaggggaau

SEQ ID NO: 2231133 - RNA, 19 nt, Artificial Sequence
  Description of Artificial Sequence: Synthetic oligonucleotide
augauucacuguucucaga

SEQ ID NO: 2231134 - RNA, 19 nt, Artificial Sequence
  Description of Artificial Sequence: Synthetic oligonucleotide
cuuggcucccaugauucac

SEQ ID NO: 2231135 - RNA, 19 nt, Artificial Sequence
  Description of Artificial Sequence: Synthetic oligonucleotide
  modified_base (2)..(2): a, c, u, g, unknown or other
cnggaaacugguuccggca

SEQ ID NO: 2231136 - RNA, 19 nt, Artificial Sequence
  Description of Artificial Sequence: Synthetic oligonucleotide
guugacuuagggaacagau

SEQ ID NO: 2231137 - RNA, 19 nt, Artificial Sequence
  Description of Artificial Sequence: Synthetic oligonucleotide
ugauucccugcuucagccu

SEQ ID NO: 2231138 - RNA, 19 nt, Artificial Sequence
  Description of Artificial Sequence: Synthetic oligonucleotide
agaaagcuguuggagucca

SEQ ID NO: 2231139 - RNA, 19 nt, Artificial Sequence
  Description of Artificial Sequence: Synthetic oligonucleotide
  modified_base (11)..(11): a, c, u, g, unknown or other
cacucugcccnggaaacug

SEQ ID NO: 2231140 - RNA, 19 nt, Artificial Sequence
  Description of Artificial Sequence: Synthetic oligonucleotide
caccucucugguacugagg

SEQ ID NO: 2231141 - RNA, 19 nt, Artificial Sequence
  Description of Artificial Sequence: Synthetic oligonucleotide
cagcaaaccauugcuugac

SEQ ID NO: 2231142 - RNA, 19 nt, Artificial Sequence
  Description of Artificial Sequence: Synthetic oligonucleotide
cuaccuucacagcugaugu

SEQ ID NO: 2231143 - RNA, 19 nt, Artificial Sequence
  Description of Artificial Sequence: Synthetic oligonucleotide
aacugugauugugggcuga

SEQ ID NO: 2231144 - RNA, 19 nt, Artificial Sequence
  Description of Artificial Sequence: Synthetic oligonucleotide
ucgguugccaggggcaaug

SEQ ID NO: 2231145 - RNA, 19 nt, Artificial Sequence
  Description of Artificial Sequence: Synthetic oligonucleotide
aaacugguuccggcagaag

SEQ ID NO: 2231146 - RNA, 19 nt, Artificial Sequence
  Description of Artificial Sequence: Synthetic oligonucleotide
ggguaggggaauuugugga

SEQ ID NO: 2231147 - RNA, 19 nt, Artificial Sequence
  Description of Artificial Sequence: Synthetic oligonucleotide
aggcgaccagcugauuccc

SEQ ID NO: 2231148 - RNA, 19 nt, Artificial Sequence
  Description of Artificial Sequence: Synthetic oligonucleotide
auuuguggaaggaguuucu

SEQ ID NO: 2231149 - RNA, 19 nt, Artificial Sequence
  Description of Artificial Sequence: Synthetic oligonucleotide
aguugacuuagggaacaga

SEQ ID NO: 2231150 - RNA, 19 nt, Artificial Sequence
  Description of Artificial Sequence: Synthetic oligonucleotide
acaguguuaaugggugcca

SEQ ID NO: 2231151 - RNA, 19 nt, Artificial Sequence
  Description of Artificial Sequence: Synthetic oligonucleotide
uggcucccaugauucacug

SEQ ID NO: 2231152 - RNA, 19 nt, Artificial Sequence
  Description of Artificial Sequence: Synthetic oligonucleotide
ggacgucagagugucaaag

SEQ ID NO: 2231153 - RNA, 19 nt, Artificial Sequence
  Description of Artificial Sequence: Synthetic oligonucleotide
gcugcauugacuaccuuca

SEQ ID NO: 2231154 - RNA, 19 nt, Artificial Sequence
  Description of Artificial Sequence: Synthetic oligonucleotide
cugugaggagugacugggc

SEQ ID NO: 2231155 - RNA, 19 nt, Artificial Sequence
  Description of Artificial Sequence: Synthetic oligonucleotide
gcuuugguuggguagggga

SEQ ID NO: 2231156 - RNA, 19 nt, Artificial Sequence
  Description of Artificial Sequence: Synthetic oligonucleotide
uugucacagaggguuugca

SEQ ID NO: 2231157 - RNA, 19 nt, Artificial Sequence
  Description of Artificial Sequence: Synthetic oligonucleotide
ggggaauuuguggaaggag

SEQ ID NO: 2231158 - RNA, 19 nt, Artificial Sequence
  Description of Artificial Sequence: Synthetic oligonucleotide
agacaucucugaauaggca

SEQ ID NO: 2231159 - RNA, 19 nt, Artificial Sequence
  Description of Artificial Sequence: Synthetic oligonucleotide
aucucugaauaggcaucac

SEQ ID NO: 2231160 - RNA, 19 nt, Artificial Sequence
  Description of Artificial Sequence: Synthetic oligonucleotide
gacuuagggaacagaugca

SEQ ID NO: 2231161 - RNA, 19 nt, Artificial Sequence
  Description of Artificial Sequence: Synthetic oligonucleotide
agacuggggacgucagagu

SEQ ID NO: 2231162 - RNA, 19 nt, Artificial Sequence
  Description of Artificial Sequence: Synthetic oligonucleotide
caaguagcagagcucagcu

SEQ ID NO: 2231163 - RNA, 19 nt, Artificial Sequence
  Description of Artificial Sequence: Synthetic oligonucleotide
ggaacagaugcaguuguca

SEQ ID NO: 2231164 - RNA, 19 nt, Artificial Sequence
  Description of Artificial Sequence: Synthetic oligonucleotide
auuugaacacacaguguua

SEQ ID NO: 2231165 - RNA, 19 nt, Artificial Sequence
  Description of Artificial Sequence: Synthetic oligonucleotide
  modified_base (3)..(3): a, c, u, g, unknown or other
ccnggaaacugguuccggc

SEQ ID NO: 2231166 - RNA, 19 nt, Artificial Sequence
  Description of Artificial Sequence: Synthetic oligonucleotide
uguuugcaucaaggaaggc

SEQ ID NO: 2231167 - RNA, 19 nt, Artificial Sequence
  Description of Artificial Sequence: Synthetic oligonucleotide
caucacccagcacucugug

SEQ ID NO: 2231168 - RNA, 19 nt, Artificial Sequence
  Description of Artificial Sequence: Synthetic oligonucleotide
guuaggugcucuacuucac

SEQ ID NO: 2231169 - RNA, 19 nt, Artificial Sequence
  Description of Artificial Sequence: Synthetic oligonucleotide
uccggcagaagcucccuuu

SEQ ID NO: 2231170 - RNA, 19 nt, Artificial Sequence
  Description of Artificial Sequence: Synthetic oligonucleotide
gaaacugguuccggcagaa

SEQ ID NO: 2231171 - RNA, 19 nt, Artificial Sequence
  Description of Artificial Sequence: Synthetic oligonucleotide
ggguuugcaagucucccuc

SEQ ID NO: 2231172 - RNA, 19 nt, Artificial Sequence
  Description of Artificial Sequence: Synthetic oligonucleotide
caucucugaauaggcauca

SEQ ID NO: 2231173 - RNA, 19 nt, Artificial Sequence
  Description of Artificial Sequence: Synthetic oligonucleotide
gucacuuugguuaggugcu

SEQ ID NO: 2231174 - RNA, 19 nt, Artificial Sequence
  Description of Artificial Sequence: Synthetic oligonucleotide
cagcucucgguugccaggg

SEQ ID NO: 2231175 - RNA, 19 nt, Artificial Sequence
  Description of Artificial Sequence: Synthetic oligonucleotide
cucccaugauucacuguuc

SEQ ID NO: 2231176 - RNA, 19 nt, Artificial Sequence
  Description of Artificial Sequence: Synthetic oligonucleotide
ggcaucacccagcacucug

SEQ ID NO: 2231177 - RNA, 19 nt, Artificial Sequence
  Description of Artificial Sequence: Synthetic oligonucleotide
agucuucguaccacuugag

SEQ ID NO: 2231178 - RNA, 19 nt, Artificial Sequence
  Description of Artificial Sequence: Synthetic oligonucleotide
cgucagagugucaaagggc

SEQ ID NO: 2231179 - RNA, 19 nt, Artificial Sequence
  Description of Artificial Sequence: Synthetic oligonucleotide
uugccccucuuauagucuu

SEQ ID NO: 2231180 - RNA, 19 nt, Artificial Sequence
  Description of Artificial Sequence: Synthetic oligonucleotide
ugaaccacuuccgcaccuc

SEQ ID NO: 2231181 - RNA, 19 nt, Artificial Sequence
  Description of Artificial Sequence: Synthetic oligonucleotide
  modified_base (8)..(8): a, c, u, g, unknown or other
ucugcccnggaaacugguu

SEQ ID NO: 2231182 - RNA, 19 nt, Artificial Sequence
  Description of Artificial Sequence: Synthetic oligonucleotide
ccaugauucacuguucuca

SEQ ID NO: 2231183 - RNA, 19 nt, Artificial Sequence
  Description of Artificial Sequence: Synthetic oligonucleotide
agcacuuggcucccaugau

SEQ ID NO: 2231184 - RNA, 19 nt, Artificial Sequence
  Description of Artificial Sequence: Synthetic oligonucleotide
  modified_base (17)..(17): a, c, u, g, unknown or other
cuacuucacucugcccngg

SEQ ID NO: 2231185 - RNA, 19 nt, Artificial Sequence
  Description of Artificial Sequence: Synthetic oligonucleotide
  modified_base (12)..(12): a, c, u, g, unknown or other
ucacucugcccnggaaacu

SEQ ID NO: 2231186 - RNA, 19 nt, Artificial Sequence
  Description of Artificial Sequence: Synthetic oligonucleotide
guauguugggaugcugcuc

SEQ ID NO: 2231187 - RNA, 19 nt, Artificial Sequence
  Description of Artificial Sequence: Synthetic oligonucleotide
ucaggagcacuuggcuccc

SEQ ID NO: 2231188 - RNA, 19 nt, Artificial Sequence
  Description of Artificial Sequence: Synthetic oligonucleotide
cacagucaaguagcagagc

SEQ ID NO: 2231189 - RNA, 19 nt, Artificial Sequence
  Description of Artificial Sequence: Synthetic oligonucleotide
gcaaugacgagcagaccug

SEQ ID NO: 2231190 - RNA, 19 nt, Artificial Sequence
  Description of Artificial Sequence: Synthetic oligonucleotide
aaccagaucuuaaguuguu

SEQ ID NO: 2231191 - RNA, 19 nt, Artificial Sequence
  Description of Artificial Sequence: Synthetic oligonucleotide
ugggugccacaguugacuu

SEQ ID NO: 2231192 - RNA, 19 nt, Artificial Sequence
  Description of Artificial Sequence: Synthetic oligonucleotide
gguaggggaauuuguggaa

SEQ ID NO: 2231193 - RNA, 19 nt, Artificial Sequence
  Description of Artificial Sequence: Synthetic oligonucleotide
ccauuuucucagcaaacca

SEQ ID NO: 2231194 - RNA, 19 nt, Artificial Sequence
  Description of Artificial Sequence: Synthetic oligonucleotide
gacaacuguucaugagacu

SEQ ID NO: 2231195 - RNA, 19 nt, Artificial Sequence
  Description of Artificial Sequence: Synthetic oligonucleotide
cugcauugacuaccuucac

SEQ ID NO: 2231196 - RNA, 19 nt, Artificial Sequence
  Description of Artificial Sequence: Synthetic oligonucleotide
gaccuggugggaaguugcc

SEQ ID NO: 2231197 - RNA, 19 nt, Artificial Sequence
  Description of Artificial Sequence: Synthetic oligonucleotide
aguuaugcuggggcaugcu

SEQ ID NO: 2231198 - RNA, 19 nt, Artificial Sequence
  Description of Artificial Sequence: Synthetic oligonucleotide
gaguccauagcugcauugu

SEQ ID NO: 2231199 - RNA, 19 nt, Artificial Sequence
  Description of Artificial Sequence: Synthetic oligonucleotide
uaccuucacagcugauguu

SEQ ID NO: 2231200 - RNA, 19 nt, Artificial Sequence
  Description of Artificial Sequence: Synthetic oligonucleotide
ugacuguauugaacaucuu

SEQ ID NO: 2231201 - RNA, 19 nt, Artificial Sequence
  Description of Artificial Sequence: Synthetic oligonucleotide
cagaccuggugggaaguug

SEQ ID NO: 2231202 - RNA, 19 nt, Artificial Sequence
  Description of Artificial Sequence: Synthetic oligonucleotide
gucaaguagcagagcucag

SEQ ID NO: 2231203 - RNA, 19 nt, Artificial Sequence
  Description of Artificial Sequence: Synthetic oligonucleotide
cacagaggguuugcaaguc

SEQ ID NO: 2231204 - RNA, 19 nt, Artificial Sequence
  Description of Artificial Sequence: Synthetic oligonucleotide
ucuccaguuccagggcccu

SEQ ID NO: 2231205 - RNA, 19 nt, Artificial Sequence
  Description of Artificial Sequence: Synthetic oligonucleotide
caguugacuuagggaacag

SEQ ID NO: 2231206 - RNA, 19 nt, Artificial Sequence
  Description of Artificial Sequence: Synthetic oligonucleotide
gggaauuuguggaaggagu

SEQ ID NO: 2231207 - RNA, 19 nt, Artificial Sequence
  Description of Artificial Sequence: Synthetic oligonucleotide
gauugugggcugaggcaca

SEQ ID NO: 2231208 - RNA, 19 nt, Artificial Sequence
  Description of Artificial Sequence: Synthetic oligonucleotide
gcagaagcucccuuucaga

SEQ ID NO: 2231209 - RNA, 19 nt, Artificial Sequence
  Description of Artificial Sequence: Synthetic oligonucleotide
cagcuuugguuggguaggg

SEQ ID NO: 2231210 - RNA, 19 nt, Artificial Sequence
  Description of Artificial Sequence: Synthetic oligonucleotide
gguguuuagaacugugauu

SEQ ID NO: 2231211 - RNA, 19 nt, Artificial Sequence
  Description of Artificial Sequence: Synthetic oligonucleotide
acuggggacgucagagugu

SEQ ID NO: 2231212 - RNA, 19 nt, Artificial Sequence
  Description of Artificial Sequence: Synthetic oligonucleotide
cacccagcacucugugaac

SEQ ID NO: 2231213 - RNA, 19 nt, Artificial Sequence
  Description of Artificial Sequence: Synthetic oligonucleotide
uccgggcaucuucaaucuc

SEQ ID NO: 2231214 - RNA, 19 nt, Artificial Sequence
  Description of Artificial Sequence: Synthetic oligonucleotide
gccaggggcaaugacgagc

SEQ ID NO: 2231215 - RNA, 19 nt, Artificial Sequence
  Description of Artificial Sequence: Synthetic oligonucleotide
gcaaaccauugcuugaccu

SEQ ID NO: 2231216 - RNA, 19 nt, Artificial Sequence
  Description of Artificial Sequence: Synthetic oligonucleotide
cugguacugaggccuguca

SEQ ID NO: 2231217 - RNA, 19 nt, Artificial Sequence
  Description of Artificial Sequence: Synthetic oligonucleotide
guuggguaggggaauuugu

SEQ ID NO: 2231218 - RNA, 19 nt, Artificial Sequence
  Description of Artificial Sequence: Synthetic oligonucleotide
ugccccucuuauagucuuc

SEQ ID NO: 2231219 - RNA, 19 nt, Artificial Sequence
  Description of Artificial Sequence: Synthetic oligonucleotide
aggagcacuuggcucccau

SEQ ID NO: 2231220 - RNA, 19 nt, Artificial Sequence
  Description of Artificial Sequence: Synthetic oligonucleotide
ucguaccacuugagcuggc

SEQ ID NO: 2231221 - RNA, 19 nt, Artificial Sequence
  Description of Artificial Sequence: Synthetic oligonucleotide
ggguguuuagaacugugau

SEQ ID NO: 2231222 - RNA, 19 nt, Artificial Sequence
  Description of Artificial Sequence: Synthetic oligonucleotide
agcagaccuggugggaagu

SEQ ID NO: 2231223 - RNA, 19 nt, Artificial Sequence
  Description of Artificial Sequence: Synthetic oligonucleotide
gcucucgguugccaggggc

SEQ ID NO: 2231224 - RNA, 19 nt, Artificial Sequence
  Description of Artificial Sequence: Synthetic oligonucleotide
uccgcaccucucugguacu

SEQ ID NO: 2231225 - RNA, 19 nt, Artificial Sequence
  Description of Artificial Sequence: Synthetic oligonucleotide
cagagugucaaagggcucu

SEQ ID NO: 2231226 - RNA, 19 nt, Artificial Sequence
  Description of Artificial Sequence: Synthetic oligonucleotide
uaucugccacagcccgggu

SEQ ID NO: 2231227 - RNA, 19 nt, Artificial Sequence
  Description of Artificial Sequence: Synthetic oligonucleotide
guccagacuggggacguca

SEQ ID NO: 2231228 - RNA, 19 nt, Artificial Sequence
  Description of Artificial Sequence: Synthetic oligonucleotide
cucccucacacacuugugu

SEQ ID NO: 2231229 - RNA, 19 nt, Artificial Sequence
  Description of Artificial Sequence: Synthetic oligonucleotide
gcucccaugauucacuguu

SEQ ID NO: 2231230 - RNA, 19 nt, Artificial Sequence
  Description of Artificial Sequence: Synthetic oligonucleotide
gggguguuuagaacuguga

SEQ ID NO: 2231231 - RNA, 19 nt, Artificial Sequence
  Description of Artificial Sequence: Synthetic oligonucleotide
ggaaguugccccucuuaua

SEQ ID NO: 2231232 - RNA, 19 nt, Artificial Sequence
  Description of Artificial Sequence: Synthetic oligonucleotide
gcucuacuucacucugccc

SEQ ID NO: 2231233 - RNA, 19 nt, Artificial Sequence
  Description of Artificial Sequence: Synthetic oligonucleotide
gguuccggcagaagcuccc

SEQ ID NO: 2231234 - RNA, 19 nt, Artificial Sequence
  Description of Artificial Sequence: Synthetic oligonucleotide
cacagcccgggucucuuca

SEQ ID NO: 2231235 - RNA, 19 nt, Artificial Sequence
  Description of Artificial Sequence: Synthetic oligonucleotide
ccuuucagagcugacaacu

SEQ ID NO: 2231236 - RNA, 19 nt, Artificial Sequence
  Description of Artificial Sequence: Synthetic oligonucleotide
aggaaggcuugggaaguua

SEQ ID NO: 2231237 - RNA, 19 nt, Artificial Sequence
  Description of Artificial Sequence: Synthetic oligonucleotide
ggggacgucagagugucaa

SEQ ID NO: 2231238 - RNA, 19 nt, Artificial Sequence
  Description of Artificial Sequence: Synthetic oligonucleotide
acgagcagaccugguggga

SEQ ID NO: 2231239 - RNA, 19 nt, Artificial Sequence
  Description of Artificial Sequence: Synthetic oligonucleotide
  modified_base (5)..(5): a, c, u, g, unknown or other
gcccnggaaacugguuccg

SEQ ID NO: 2231240 - RNA, 19 nt, Artificial Sequence
  Description of Artificial Sequence: Synthetic oligonucleotide
ccucacacacuuguguguc

SEQ ID NO: 2231241 - RNA, 19 nt, Artificial Sequence
  Description of Artificial Sequence: Synthetic oligonucleotide
accacuugagcuggccauu

SEQ ID NO: 2231242 - RNA, 19 nt, Artificial Sequence
  Description of Artificial Sequence: Synthetic oligonucleotide
cuuguccucacugcuugua

SEQ ID NO: 2231243 - RNA, 19 nt, Artificial Sequence
  Description of Artificial Sequence: Synthetic oligonucleotide
caagucucccucacacacu

SEQ ID NO: 2231244 - RNA, 19 nt, Artificial Sequence
  Description of Artificial Sequence: Synthetic oligonucleotide
ugguuggguaggggaauuu

SEQ ID NO: 2231245 - RNA, 19 nt, Artificial Sequence
  Description of Artificial Sequence: Synthetic oligonucleotide
gggaaguugccccucuuau

SEQ ID NO: 2231246 - RNA, 19 nt, Artificial Sequence
  Description of Artificial Sequence: Synthetic oligonucleotide
caaucuccucaggcgacca

SEQ ID NO: 2231247 - RNA, 19 nt, Artificial Sequence
  Description of Artificial Sequence: Synthetic oligonucleotide
gcugugaaccagaucuuaa

SEQ ID NO: 2231248 - RNA, 19 nt, Artificial Sequence
  Description of Artificial Sequence: Synthetic oligonucleotide
  modified_base (4)..(4): a, c, u, g, unknown or other
cccnggaaacugguuccgg

SEQ ID NO: 2231249 - RNA, 19 nt, Artificial Sequence
  Description of Artificial Sequence: Synthetic oligonucleotide
guugccccucuuauagucu

SEQ ID NO: 2231250 - RNA, 19 nt, Artificial Sequence
  Description of Artificial Sequence: Synthetic oligonucleotide
aagcucccuuucagagcug

SEQ ID NO: 2231251 - RNA, 19 nt, Artificial Sequence
  Description of Artificial Sequence: Synthetic oligonucleotide
guacugaggccugucacuu

SEQ ID NO: 2231252 - RNA, 19 nt, Artificial Sequence
  Description of Artificial Sequence: Synthetic oligonucleotide
ggaugacuguauugaacau

SEQ ID NO: 2231253 - RNA, 19 nt, Artificial Sequence
  Description of Artificial Sequence: Synthetic oligonucleotide
cagacuggaugacuguauu

SEQ ID NO: 2231254 - RNA, 19 nt, Artificial Sequence
  Description of Artificial Sequence: Synthetic oligonucleotide
caguuccagggcccuuguc

SEQ ID NO: 2231255 - RNA, 19 nt, Artificial Sequence
  Description of Artificial Sequence: Synthetic oligonucleotide
  modified_base (9)..(9): a, c, u, g, unknown or other
cucugcccnggaaacuggu

SEQ ID NO: 2231256 - RNA, 19 nt, Artificial Sequence
  Description of Artificial Sequence: Synthetic oligonucleotide
ggaaguuaugcuggggcau

SEQ ID NO: 2231257 - RNA, 19 nt, Artificial Sequence
  Description of Artificial Sequence: Synthetic oligonucleotide
cugaaccacuuccgcaccu

SEQ ID NO: 2231258 - RNA, 19 nt, Artificial Sequence
  Description of Artificial Sequence: Synthetic oligonucleotide
acuguucaugagacuucuu

SEQ ID NO: 2231259 - RNA, 19 nt, Artificial Sequence
  Description of Artificial Sequence: Synthetic oligonucleotide
ccggcagaagcucccuuuc

SEQ ID NO: 2231260 - RNA, 19 nt, Artificial Sequence
  Description of Artificial Sequence: Synthetic oligonucleotide
ggcugugaaccagaucuua

SEQ ID NO: 2231261 - RNA, 19 nt, Artificial Sequence
  Description of Artificial Sequence: Synthetic oligonucleotide
gggacgucagagugucaaa

SEQ ID NO: 2231262 - RNA, 19 nt, Artificial Sequence
  Description of Artificial Sequence: Synthetic oligonucleotide
ggagugacugggcugcauu

SEQ ID NO: 2231263 - RNA, 19 nt, Artificial Sequence
  Description of Artificial Sequence: Synthetic oligonucleotide
cuuccgcaccucucuggua

SEQ ID NO: 2231264 - RNA, 19 nt, Artificial Sequence
  Description of Artificial Sequence: Synthetic oligonucleotide
ccacuuccgcaccucucug

SEQ ID NO: 2231265 - RNA, 19 nt, Artificial Sequence
  Description of Artificial Sequence: Synthetic oligonucleotide
gggcaaugacgagcagacc

SEQ ID NO: 2231266 - RNA, 19 nt, Artificial Sequence
  Description of Artificial Sequence: Synthetic oligonucleotide
ggaaggcuugggaaguuau

SEQ ID NO: 2231267 - RNA, 19 nt, Artificial Sequence
  Description of Artificial Sequence: Synthetic oligonucleotide
ccauucuucugaaccacuu

SEQ ID NO: 2231268 - RNA, 19 nt, Artificial Sequence
  Description of Artificial Sequence: Synthetic oligonucleotide
gaaagcuguuggaguccau

SEQ ID NO: 2231269 - RNA, 19 nt, Artificial Sequence
  Description of Artificial Sequence: Synthetic oligonucleotide
guuccggcagaagcucccu

SEQ ID NO: 2231270 - RNA, 19 nt, Artificial Sequence
  Description of Artificial Sequence: Synthetic oligonucleotide
gcacucaucugggucuugu

SEQ ID NO: 2231271 - RNA, 19 nt, Artificial Sequence
  Description of Artificial Sequence: Synthetic oligonucleotide
gcucccuuucagagcugac

SEQ ID NO: 2231272 - RNA, 19 nt, Artificial Sequence
  Description of Artificial Sequence: Synthetic oligonucleotide
gacuaccuucacagcugau

SEQ ID NO: 2231273 - RNA, 19 nt, Artificial Sequence
  Description of Artificial Sequence: Synthetic oligonucleotide
ggcucccaugauucacugu

SEQ ID NO: 2231274 - RNA, 19 nt, Artificial Sequence
  Description of Artificial Sequence: Synthetic oligonucleotide
gugggaaguugccccucuu

SEQ ID NO: 2231275 - RNA, 19 nt, Artificial Sequence
  Description of Artificial Sequence: Synthetic oligonucleotide
gcugggcacucaucugggu

SEQ ID NO: 2231276 - RNA, 19 nt, Artificial Sequence
  Description of Artificial Sequence: Synthetic oligonucleotide
cucugguacugaggccugu

SEQ ID NO: 2231277 - RNA, 19 nt, Artificial Sequence
  Description of Artificial Sequence: Synthetic oligonucleotide
gggucuugucacagagggu

SEQ ID NO: 2231278 - RNA, 19 nt, Artificial Sequence
  Description of Artificial Sequence: Synthetic oligonucleotide
ccgcaccucucugguacug

SEQ ID NO: 2231279 - RNA, 19 nt, Artificial Sequence
  Description of Artificial Sequence: Synthetic oligonucleotide
cgagcagaccuggugggaa

SEQ ID NO: 2231280 - RNA, 19 nt, Artificial Sequence
  Description of Artificial Sequence: Synthetic oligonucleotide
ccucaggcgaccagcugau

SEQ ID NO: 2231281 - RNA, 19 nt, Artificial Sequence
  Description of Artificial Sequence: Synthetic oligonucleotide
cggcagaagcucccuuuca

SEQ ID NO: 2231282 - RNA, 19 nt, Artificial Sequence
  Description of Artificial Sequence: Synthetic oligonucleotide
gcuugaccugcugggcacu

SEQ ID NO: 2231283 - RNA, 19 nt, Artificial Sequence
  Description of Artificial Sequence: Synthetic oligonucleotide
cucgguugccaggggcaau

SEQ ID NO: 2231284 - RNA, 19 nt, Artificial Sequence
  Description of Artificial Sequence: Synthetic oligonucleotide
ccccucuuauagucuucgu

SEQ ID NO: 2231285 - RNA, 19 nt, Artificial Sequence
  Description of Artificial Sequence: Synthetic oligonucleotide
ggcgaccagcugauucccu

SEQ ID NO: 2231286 - RNA, 19 nt, Artificial Sequence
  Description of Artificial Sequence: Synthetic oligonucleotide
gcagaccuggugggaaguu

SEQ ID NO: 2231287 - RNA, 19 nt, Artificial Sequence
  Description of Artificial Sequence: Synthetic oligonucleotide
cguccagacuggggacguc

SEQ ID NO: 2231288 - RNA, 19 nt, Artificial Sequence
  Description of Artificial Sequence: Synthetic oligonucleotide
cucaggcgaccagcugauu

SEQ ID NO: 2231289 - RNA, 19 nt, Artificial Sequence
  Description of Artificial Sequence: Synthetic oligonucleotide
cgguugccaggggcaauga

SEQ ID NO: 2231290 - RNA, 19 nt, Artificial Sequence
  Description of Artificial Sequence: Synthetic oligonucleotide
auuugguuuauucagcagc

SEQ ID NO: 2231291 - RNA, 19 nt, Artificial Sequence
  Description of Artificial Sequence: Synthetic oligonucleotide
uuucuugcuaggcaggagg

SEQ ID NO: 2231292 - RNA, 19 nt, Artificial Sequence
  Description of Artificial Sequence: Synthetic oligonucleotide
aggauagagacucuugaac

SEQ ID NO: 2231293 - RNA, 19 nt, Artificial Sequence
  Description of Artificial Sequence: Synthetic oligonucleotide
gauagagacucuugaacgg

SEQ ID NO: 2231294 - RNA, 19 nt, Artificial Sequence
  Description of Artificial Sequence: Synthetic oligonucleotide
agugguggaguucacaggg

SEQ ID NO: 2231295 - RNA, 19 nt, Artificial Sequence
  Description of Artificial Sequence: Synthetic oligonucleotide
gaggcuggaauuuggaagg

SEQ ID NO: 2231296 - RNA, 19 nt, Artificial Sequence
  Description of Artificial Sequence: Synthetic oligonucleotide
uggggagagacacuggugg

SEQ ID NO: 2231297 - RNA, 19 nt, Artificial Sequence
  Description of Artificial Sequence: Synthetic oligonucleotide
ugguuuauucagcagcagg

SEQ ID NO: 2231298 - RNA, 19 nt, Artificial Sequence
  Description of Artificial Sequence: Synthetic oligonucleotide
aagaauggugcuguagagc

SEQ ID NO: 2231299 - RNA, 19 nt, Artificial Sequence
  Description of Artificial Sequence: Synthetic oligonucleotide
ucuugaacggucuugggga

SEQ ID NO: 2231300 - RNA, 19 nt, Artificial Sequence
  Description of Artificial Sequence: Synthetic oligonucleotide
uuugguuuauucagcagca

SEQ ID NO: 2231301 - RNA, 19 nt, Artificial Sequence
  Description of Artificial Sequence: Synthetic oligonucleotide
ugagguucgcuucagggcc

SEQ ID NO: 2231302 - RNA, 19 nt, Artificial Sequence
  Description of Artificial Sequence: Synthetic oligonucleotide
uucaggagggagaauuugg

SEQ ID NO: 2231303 - RNA, 19 nt, Artificial Sequence
  Description of Artificial Sequence: Synthetic oligonucleotide
uaaucuuccccuuuucuug

SEQ ID NO: 2231304 - RNA, 19 nt, Artificial Sequence
  Description of Artificial Sequence: Synthetic oligonucleotide
ggauagagacucuugaacg

SEQ ID NO: 2231305 - RNA, 19 nt, Artificial Sequence
  Description of Artificial Sequence: Synthetic oligonucleotide
ucaagguuaggguacuugc

SEQ ID NO: 2231306 - RNA, 19 nt, Artificial Sequence
  Description of Artificial Sequence: Synthetic oligonucleotide
gaauuuggaaggaggaccg

SEQ ID NO: 2231307 - RNA, 19 nt, Artificial Sequence
  Description of Artificial Sequence: Synthetic oligonucleotide
cucguuuucaagguuaggg

SEQ ID NO: 2231308 - RNA, 19 nt, Artificial Sequence
  Description of Artificial Sequence: Synthetic oligonucleotide
ucaggauagagacucuuga

SEQ ID NO: 2231309 - RNA, 19 nt, Artificial Sequence
  Description of Artificial Sequence: Synthetic oligonucleotide
agaauuugguuuauucagc

SEQ ID NO: 2231310 - RNA, 19 nt, Artificial Sequence
  Description of Artificial Sequence: Synthetic oligonucleotide
ugaacucucagcagcaacu

SEQ ID NO: 2231311 - RNA, 19 nt, Artificial Sequence
  Description of Artificial Sequence: Synthetic oligonucleotide
agagcagggagcccgaccg

SEQ ID NO: 2231312 - RNA, 19 nt, Artificial Sequence
  Description of Artificial Sequence: Synthetic oligonucleotide
uugguccucaagaagccgg

SEQ ID NO: 2231313 - RNA, 19 nt, Artificial Sequence
  Description of Artificial Sequence: Synthetic oligonucleotide
uggugacuaagaauggugc

SEQ ID NO: 2231314 - RNA, 19 nt, Artificial Sequence
  Description of Artificial Sequence: Synthetic oligonucleotide
uaagaauggugcuguagag

SEQ ID NO: 2231315 - RNA, 19 nt, Artificial Sequence
  Description of Artificial Sequence: Synthetic oligonucleotide
aggguugaaggcuugcggg

SEQ ID NO: 2231316 - RNA, 19 nt, Artificial Sequence
  Description of Artificial Sequence: Synthetic oligonucleotide
uucccugggaaaaugggug

SEQ ID NO: 2231317 - RNA, 19 nt, Artificial Sequence
  Description of Artificial Sequence: Synthetic oligonucleotide
gagagaaggggcugguugg

SEQ ID NO: 2231318 - RNA, 19 nt, Artificial Sequence
  Description of Artificial Sequence: Synthetic oligonucleotide
uucuugcuaggcaggaggg

SEQ ID NO: 2231319 - RNA, 19 nt, Artificial Sequence
  Description of Artificial Sequence: Synthetic oligonucleotide
ugaguagcuugacagcuca

SEQ ID NO: 2231320 - RNA, 19 nt, Artificial Sequence
  Description of Artificial Sequence: Synthetic oligonucleotide
gaagguggcccucuguucc

SEQ ID NO: 2231321 - RNA, 19 nt, Artificial Sequence
  Description of Artificial Sequence: Synthetic oligonucleotide
aauggugcuguagagcugu

SEQ ID NO: 2231322 - RNA, 19 nt, Artificial Sequence
  Description of Artificial Sequence: Synthetic oligonucleotide
ugggguuuggcuccugggg

SEQ ID NO: 2231323 - RNA, 19 nt, Artificial Sequence
  Description of Artificial Sequence: Synthetic oligonucleotide
aaggcuugcgggguggccc

SEQ ID NO: 2231324 - RNA, 19 nt, Artificial Sequence
  Description of Artificial Sequence: Synthetic oligonucleotide
cucuugaacggucuugggg

SEQ ID NO: 2231325 - RNA, 19 nt, Artificial Sequence
  Description of Artificial Sequence: Synthetic oligonucleotide
gguuuauucagcagcaggg

SEQ ID NO: 2231326 - RNA, 19 nt, Artificial Sequence
  Description of Artificial Sequence: Synthetic oligonucleotide
ucgcccuccacccugaacu

SEQ ID NO: 2231327 - RNA, 19 nt, Artificial Sequence
  Description of Artificial Sequence: Synthetic oligonucleotide
uuaaucuuccccuuuucuu

SEQ ID NO: 2231328 - RNA, 19 nt, Artificial Sequence
  Description of Artificial Sequence: Synthetic oligonucleotide
ucguuuucaagguuagggu

SEQ ID NO: 2231329 - RNA, 19 nt, Artificial Sequence
  Description of Artificial Sequence: Synthetic oligonucleotide
gacucuugaacggucuugg

SEQ ID NO: 2231330 - RNA, 19 nt, Artificial Sequence
  Description of Artificial Sequence: Synthetic oligonucleotide
ugggcgguugucuuaaucu

SEQ ID NO: 2231331 - RNA, 19 nt, Artificial Sequence
  Description of Artificial Sequence: Synthetic oligonucleotide
uccucaagaagccggggug

SEQ ID NO: 2231332 - RNA, 19 nt, Artificial Sequence
  Description of Artificial Sequence: Synthetic oligonucleotide
cuaagaauggugcuguaga

SEQ ID NO: 2231333 - RNA, 19 nt, Artificial Sequence
  Description of Artificial Sequence: Synthetic oligonucleotide
aguagcuugacagcucagg

SEQ ID NO: 2231334 - RNA, 19 nt, Artificial Sequence
  Description of Artificial Sequence: Synthetic oligonucleotide
cuuugcuccuccauucgcc

SEQ ID NO: 2231335 - RNA, 19 nt, Artificial Sequence
  Description of Artificial Sequence: Synthetic oligonucleotide
ggaggcuggaauuuggaag

SEQ ID NO: 2231336 - RNA, 19 nt, Artificial Sequence
  Description of Artificial Sequence: Synthetic oligonucleotide
ucaggagggagaauuuggu

SEQ ID NO: 2231337 - RNA, 19 nt, Artificial Sequence
  Description of Artificial Sequence: Synthetic oligonucleotide
uguggcggguuccugcagg

SEQ ID NO: 2231338 - RNA, 19 nt, Artificial Sequence
  Description of Artificial Sequence: Synthetic oligonucleotide
cuggugacuaagaauggug

SEQ ID NO: 2231339 - RNA, 19 nt, Artificial Sequence
  Description of Artificial Sequence: Synthetic oligonucleotide
aaaaugggugggucuucag

SEQ ID NO: 2231340 - RNA, 19 nt, Artificial Sequence
  Description of Artificial Sequence: Synthetic oligonucleotide
ggaauuuggaaggaggacc

SEQ ID NO: 2231341 - RNA, 19 nt, Artificial Sequence
  Description of Artificial Sequence: Synthetic oligonucleotide
caagguuaggguacuugcc

SEQ ID NO: 2231342 - RNA, 19 nt, Artificial Sequence
  Description of Artificial Sequence: Synthetic oligonucleotide
ucaggucucagcaggugug

SEQ ID NO: 2231343 - RNA, 19 nt, Artificial Sequence
  Description of Artificial Sequence: Synthetic oligonucleotide
aggagggagaauuugguuu

SEQ ID NO: 2231344 - RNA, 19 nt, Artificial Sequence
  Description of Artificial Sequence: Synthetic oligonucleotide
ucuuugcuccuccauucgc

SEQ ID NO: 2231345 - RNA, 19 nt, Artificial Sequence
  Description of Artificial Sequence: Synthetic oligonucleotide
uuugcuccuccauucgccc

SEQ ID NO: 2231346 - RNA, 19 nt, Artificial Sequence
  Description of Artificial Sequence: Synthetic oligonucleotide
acuaagaauggugcuguag

SEQ ID NO: 2231347 - RNA, 19 nt, Artificial Sequence
  Description of Artificial Sequence: Synthetic oligonucleotide
aggagcucugucugcaggg

SEQ ID NO: 2231348 - RNA, 19 nt, Artificial Sequence
  Description of Artificial Sequence: Synthetic oligonucleotide
ugcucguuuucaagguuag

SEQ ID NO: 2231349 - RNA, 19 nt, Artificial Sequence
  Description of Artificial Sequence: Synthetic oligonucleotide
uugacagcucaggauagag

SEQ ID NO: 2231350 - RNA, 19 nt, Artificial Sequence
  Description of Artificial Sequence: Synthetic oligonucleotide
aucuuugcuccuccauucg

SEQ ID NO: 2231351 - RNA, 19 nt, Artificial Sequence
  Description of Artificial Sequence: Synthetic oligonucleotide
gggagggaggcgcagaucg

SEQ ID NO: 2231352 - RNA, 19 nt, Artificial Sequence
  Description of Artificial Sequence: Synthetic oligonucleotide
ucuucagucucuggcaccc

SEQ ID NO: 2231353 - RNA, 19 nt, Artificial Sequence
  Description of Artificial Sequence: Synthetic oligonucleotide
gcacuggugacuaagaaug

SEQ ID NO: 2231354 - RNA, 19 nt, Artificial Sequence
  Description of Artificial Sequence: Synthetic oligonucleotide
uucaagguuaggguacuug

SEQ ID NO: 2231355 - RNA, 19 nt, Artificial Sequence
  Description of Artificial Sequence: Synthetic oligonucleotide
cuugcuaggcaggaggggc

SEQ ID NO: 2231356 - RNA, 19 nt, Artificial Sequence
  Description of Artificial Sequence: Synthetic oligonucleotide
aauuuggaaggaggaccgg

SEQ ID NO: 2231357 - RNA, 19 nt, Artificial Sequence
  Description of Artificial Sequence: Synthetic oligonucleotide
guccacccuaccuugcucg

SEQ ID NO: 2231358 - RNA, 19 nt, Artificial Sequence
  Description of Artificial Sequence: Synthetic oligonucleotide
cuccauucgcccuccaccc

SEQ ID NO: 2231359 - RNA, 19 nt, Artificial Sequence
  Description of Artificial Sequence: Synthetic oligonucleotide
ugggaaaaugggugggucu

SEQ ID NO: 2231360 - RNA, 19 nt, Artificial Sequence
  Description of Artificial Sequence: Synthetic oligonucleotide
uugcucguuuucaagguua

SEQ ID NO: 2231361 - RNA, 19 nt, Artificial Sequence
  Description of Artificial Sequence: Synthetic oligonucleotide
caggguugaaggcuugcgg

SEQ ID NO: 2231362 - RNA, 19 nt, Artificial Sequence
  Description of Artificial Sequence: Synthetic oligonucleotide
uggggagucguguccaccc

SEQ ID NO: 2231363 - RNA, 19 nt, Artificial Sequence
  Description of Artificial Sequence: Synthetic oligonucleotide
cucaggauagagacucuug

SEQ ID NO: 2231364 - RNA, 19 nt, Artificial Sequence
  Description of Artificial Sequence: Synthetic oligonucleotide
uaccuugcucguuuucaag

SEQ ID NO: 2231365 - RNA, 19 nt, Artificial Sequence
  Description of Artificial Sequence: Synthetic oligonucleotide
caguucccugggaaaaugg

SEQ ID NO: 2231366 - RNA, 19 nt, Artificial Sequence
  Description of Artificial Sequence: Synthetic oligonucleotide
gguugucuuaaucuucccc

SEQ ID NO: 2231367 - RNA, 19 nt, Artificial Sequence
  Description of Artificial Sequence: Synthetic oligonucleotide
gaccgcugggcuuccaucc

SEQ ID NO: 2231368 - RNA, 19 nt, Artificial Sequence
  Description of Artificial Sequence: Synthetic oligonucleotide
cuuggggugccagugcugg

SEQ ID NO: 2231369 - RNA, 19 nt, Artificial Sequence
  Description of Artificial Sequence: Synthetic oligonucleotide
cuuccccuuuucuugcuag

SEQ ID NO: 2231370 - RNA, 19 nt, Artificial Sequence
  Description of Artificial Sequence: Synthetic oligonucleotide
gcuggaauuuggaaggagg

SEQ ID NO: 2231371 - RNA, 19 nt, Artificial Sequence
  Description of Artificial Sequence: Synthetic oligonucleotide
agcccugaucaucuugcgg

SEQ ID NO: 2231372 - RNA, 19 nt, Artificial Sequence
  Description of Artificial Sequence: Synthetic oligonucleotide
uuccccuuuucuugcuagg

SEQ ID NO: 2231373 - RNA, 19 nt, Artificial Sequence
  Description of Artificial Sequence: Synthetic oligonucleotide
uggaauuuggaaggaggac

SEQ ID NO: 2231374 - RNA, 19 nt, Artificial Sequence
  Description of Artificial Sequence: Synthetic oligonucleotide
agucguguccacccuaccu

SEQ ID NO: 2231375 - RNA, 19 nt, Artificial Sequence
  Description of Artificial Sequence: Synthetic oligonucleotide
uccacccugaacucucagc

SEQ ID NO: 2231376 - RNA, 19 nt, Artificial Sequence
  Description of Artificial Sequence: Synthetic oligonucleotide
aguucccugggaaaauggg

SEQ ID NO: 2231377 - RNA, 19 nt, Artificial Sequence
  Description of Artificial Sequence: Synthetic oligonucleotide
ccguugaguagcuugacag

SEQ ID NO: 2231378 - RNA, 19 nt, Artificial Sequence
  Description of Artificial Sequence: Synthetic oligonucleotide
gaaggggcugguugggagc

SEQ ID NO: 2231379 - RNA, 19 nt, Artificial Sequence
  Description of Artificial Sequence: Synthetic oligonucleotide
cuugaacggucuuggggag

SEQ ID NO: 2231380 - RNA, 19 nt, Artificial Sequence
  Description of Artificial Sequence: Synthetic oligonucleotide
guagcuugacagcucagga

SEQ ID NO: 2231381 - RNA, 19 nt, Artificial Sequence
  Description of Artificial Sequence: Synthetic oligonucleotide
cacuggugacuaagaaugg

SEQ ID NO: 2231382 - RNA, 19 nt, Artificial Sequence
  Description of Artificial Sequence: Synthetic oligonucleotide
uuuucuugcuaggcaggag

SEQ ID NO: 2231383 - RNA, 19 nt, Artificial Sequence
  Description of Artificial Sequence: Synthetic oligonucleotide
ccucuguuccucuaggcgg

SEQ ID NO: 2231384 - RNA, 19 nt, Artificial Sequence
  Description of Artificial Sequence: Synthetic oligonucleotide
uuuucaagguuaggguacu

SEQ ID NO: 2231385 - RNA, 19 nt, Artificial Sequence
  Description of Artificial Sequence: Synthetic oligonucleotide
ucuugcuaggcaggagggg

SEQ ID NO: 2231386 - RNA, 19 nt, Artificial Sequence
  Description of Artificial Sequence: Synthetic oligonucleotide
uagagacucuugaacgguc

SEQ ID NO: 2231387 - RNA, 19 nt, Artificial Sequence
  Description of Artificial Sequence: Synthetic oligonucleotide
agaucgccaaggccgagug

SEQ ID NO: 2231388 - RNA, 19 nt, Artificial Sequence
  Description of Artificial Sequence: Synthetic oligonucleotide
auagagacucuugaacggu

SEQ ID NO: 2231389 - RNA, 19 nt, Artificial Sequence
  Description of Artificial Sequence: Synthetic oligonucleotide
acucuugaacggucuuggg

SEQ ID NO: 2231390 - RNA, 19 nt, Artificial Sequence
  Description of Artificial Sequence: Synthetic oligonucleotide
cucagcagguguguguagg

SEQ ID NO: 2231391 - RNA, 19 nt, Artificial Sequence
  Description of Artificial Sequence: Synthetic oligonucleotide
uugaguagcuugacagcuc

SEQ ID NO: 2231392 - RNA, 19 nt, Artificial Sequence
  Description of Artificial Sequence: Synthetic oligonucleotide
ucgcuucagggccucuggg

SEQ ID NO: 2231393 - RNA, 19 nt, Artificial Sequence
  Description of Artificial Sequence: Synthetic oligonucleotide
aucgccaaggccgaguggu

SEQ ID NO: 2231394 - RNA, 19 nt, Artificial Sequence
  Description of Artificial Sequence: Synthetic oligonucleotide
ucucuggcaccccugccac

SEQ ID NO: 2231395 - RNA, 19 nt, Artificial Sequence
  Description of Artificial Sequence: Synthetic oligonucleotide
cugaacucucagcagcaac

SEQ ID NO: 2231396 - RNA, 19 nt, Artificial Sequence
  Description of Artificial Sequence: Synthetic oligonucleotide
uguguggcggguuccugca

SEQ ID NO: 2231397 - RNA, 19 nt, Artificial Sequence
  Description of Artificial Sequence: Synthetic oligonucleotide
ucguguccacccuaccuug

SEQ ID NO: 2231398 - RNA, 19 nt, Artificial Sequence
  Description of Artificial Sequence: Synthetic oligonucleotide
ucuggcaccccugccacgc

SEQ ID NO: 2231399 - RNA, 19 nt, Artificial Sequence
  Description of Artificial Sequence: Synthetic oligonucleotide
uuccuggggucuuccagcc

SEQ ID NO: 2231400 - RNA, 19 nt, Artificial Sequence
  Description of Artificial Sequence: Synthetic oligonucleotide
ucagucucuggcaccccug

SEQ ID NO: 2231401 - RNA, 19 nt, Artificial Sequence
  Description of Artificial Sequence: Synthetic oligonucleotide
uugaaggcuugcggggugg

SEQ ID NO: 2231402 - RNA, 19 nt, Artificial Sequence
  Description of Artificial Sequence: Synthetic oligonucleotide
ugcgggguggcccagcuuu

SEQ ID NO: 2231403 - RNA, 19 nt, Artificial Sequence
  Description of Artificial Sequence: Synthetic oligonucleotide
gcgcagaucgccaaggccg

SEQ ID NO: 2231404 - RNA, 19 nt, Artificial Sequence
  Description of Artificial Sequence: Synthetic oligonucleotide
aggcgcagaucgccaaggc

SEQ ID NO: 2231405 - RNA, 19 nt, Artificial Sequence
  Description of Artificial Sequence: Synthetic oligonucleotide
uugcuaggcaggaggggca

SEQ ID NO: 2231406 - RNA, 19 nt, Artificial Sequence
  Description of Artificial Sequence: Synthetic oligonucleotide
ucuuggggagucgugucca

SEQ ID NO: 2231407 - RNA, 19 nt, Artificial Sequence
  Description of Artificial Sequence: Synthetic oligonucleotide
ucacaccccguugaguagc

SEQ ID NO: 2231408 - RNA, 19 nt, Artificial Sequence
  Description of Artificial Sequence: Synthetic oligonucleotide
cuguguggcggguuccugc

SEQ ID NO: 2231409 - RNA, 19 nt, Artificial Sequence
  Description of Artificial Sequence: Synthetic oligonucleotide
caccccguugaguagcuug

SEQ ID NO: 2231410 - RNA, 19 nt, Artificial Sequence
  Description of Artificial Sequence: Synthetic oligonucleotide
ucaagaagccggggugggg

SEQ ID NO: 2231411 - RNA, 19 nt, Artificial Sequence
  Description of Artificial Sequence: Synthetic oligonucleotide
gaaaaugggugggucuuca

SEQ ID NO: 2231412 - RNA, 19 nt, Artificial Sequence
  Description of Artificial Sequence: Synthetic oligonucleotide
gacccugcugcucaucauc

SEQ ID NO: 2231413 - RNA, 19 nt, Artificial Sequence
  Description of Artificial Sequence: Synthetic oligonucleotide
agaaggagcucugucugca

SEQ ID NO: 2231414 - RNA, 19 nt, Artificial Sequence
  Description of Artificial Sequence: Synthetic oligonucleotide
ggguugaaggcuugcgggg

SEQ ID NO: 2231415 - RNA, 19 nt, Artificial Sequence
  Description of Artificial Sequence: Synthetic oligonucleotide
cuugguccucaagaagccg

SEQ ID NO: 2231416 - RNA, 19 nt, Artificial Sequence
  Description of Artificial Sequence: Synthetic oligonucleotide
acuggugacuaagaauggu

SEQ ID NO: 2231417 - RNA, 19 nt, Artificial Sequence
  Description of Artificial Sequence: Synthetic oligonucleotide
uggcacuggugacuaagaa

SEQ ID NO: 2231418 - RNA, 19 nt, Artificial Sequence
  Description of Artificial Sequence: Synthetic oligonucleotide
cagaaggagcucugucugc

SEQ ID NO: 2231419 - RNA, 19 nt, Artificial Sequence
  Description of Artificial Sequence: Synthetic oligonucleotide
augggugggucuucagucu

SEQ ID NO: 2231420 - RNA, 19 nt, Artificial Sequence
  Description of Artificial Sequence: Synthetic oligonucleotide
agacucuugaacggucuug

SEQ ID NO: 2231421 - RNA, 19 nt, Artificial Sequence
  Description of Artificial Sequence: Synthetic oligonucleotide
gucuuggggagucgugucc

SEQ ID NO: 2231422 - RNA, 19 nt, Artificial Sequence
  Description of Artificial Sequence: Synthetic oligonucleotide
gaucgccaaggccgagugg

SEQ ID NO: 2231423 - RNA, 19 nt, Artificial Sequence
  Description of Artificial Sequence: Synthetic oligonucleotide
guugaguagcuugacagcu

SEQ ID NO: 2231424 - RNA, 19 nt, Artificial Sequence
  Description of Artificial Sequence: Synthetic oligonucleotide
uggcccagcuuugaguccc

SEQ ID NO: 2231425 - RNA, 19 nt, Artificial Sequence
  Description of Artificial Sequence: Synthetic oligonucleotide
gguggcccagcuuugaguc

SEQ ID NO: 2231426 - RNA, 19 nt, Artificial Sequence
  Description of Artificial Sequence: Synthetic oligonucleotide
guugaaggcuugcggggug

SEQ ID NO: 2231427 - RNA, 19 nt, Artificial Sequence
  Description of Artificial Sequence: Synthetic oligonucleotide
cugggcuggggagagacac

SEQ ID NO: 2231428 - RNA, 19 nt, Artificial Sequence
  Description of Artificial Sequence: Synthetic oligonucleotide
gaacucucagcagcaacuc

SEQ ID NO: 2231429 - RNA, 19 nt, Artificial Sequence
  Description of Artificial Sequence: Synthetic oligonucleotide
aacggucuuggggagucgu

SEQ ID NO: 2231430 - RNA, 19 nt, Artificial Sequence
  Description of Artificial Sequence: Synthetic oligonucleotide
aaggccgagugguggaguu

SEQ ID NO: 2231431 - RNA, 19 nt, Artificial Sequence
  Description of Artificial Sequence: Synthetic oligonucleotide
aaggggcugguugggagcu

SEQ ID NO: 2231432 - RNA, 19 nt, Artificial Sequence
  Description of Artificial Sequence: Synthetic oligonucleotide
ccuuuucuugcuaggcagg

SEQ ID NO: 2231433 - RNA, 19 nt, Artificial Sequence
  Description of Artificial Sequence: Synthetic oligonucleotide
cuuaaucuuccccuuuucu

SEQ ID NO: 2231434 - RNA, 19 nt, Artificial Sequence
  Description of Artificial Sequence: Synthetic oligonucleotide
cucacaccccguugaguag

SEQ ID NO: 2231435 - RNA, 19 nt, Artificial Sequence
  Description of Artificial Sequence: Synthetic oligonucleotide
ugggugggucuucagucuc

SEQ ID NO: 2231436 - RNA, 19 nt, Artificial Sequence
  Description of Artificial Sequence: Synthetic oligonucleotide
cucaagaagccgggguggg

SEQ ID NO: 2231437 - RNA, 19 nt, Artificial Sequence
  Description of Artificial Sequence: Synthetic oligonucleotide
uguccacccuaccuugcuc

SEQ ID NO: 2231438 - RNA, 19 nt, Artificial Sequence
  Description of Artificial Sequence: Synthetic oligonucleotide
accgcugggcuuccauccg

SEQ ID NO: 2231439 - RNA, 19 nt, Artificial Sequence
  Description of Artificial Sequence: Synthetic oligonucleotide
ccagcccugaucaucuugc

SEQ ID NO: 2231440 - RNA, 19 nt, Artificial Sequence
  Description of Artificial Sequence: Synthetic oligonucleotide
uggggugccagugcugggc

SEQ ID NO: 2231441 - RNA, 19 nt, Artificial Sequence
  Description of Artificial Sequence: Synthetic oligonucleotide
ucaguccucacaccccguu

SEQ ID NO: 2231442 - RNA, 19 nt, Artificial Sequence
  Description of Artificial Sequence: Synthetic oligonucleotide
ccuccauucgcccuccacc

SEQ ID NO: 2231443 - RNA, 19 nt, Artificial Sequence
  Description of Artificial Sequence: Synthetic oligonucleotide
agagacucuugaacggucu

SEQ ID NO: 2231444 - RNA, 19 nt, Artificial Sequence
  Description of Artificial Sequence: Synthetic oligonucleotide
gucucuggcaccccugcca

SEQ ID NO: 2231445 - RNA, 19 nt, Artificial Sequence
  Description of Artificial Sequence: Synthetic oligonucleotide
cagcagcaacuccaggagc

SEQ ID NO: 2231446 - RNA, 19 nt, Artificial Sequence
  Description of Artificial Sequence: Synthetic oligonucleotide
gaagccggggugggguugg

SEQ ID NO: 2231447 - RNA, 19 nt, Artificial Sequence
  Description of Artificial Sequence: Synthetic oligonucleotide
caggauagagacucuugaa

SEQ ID NO: 2231448 - RNA, 19 nt, Artificial Sequence
  Description of Artificial Sequence: Synthetic oligonucleotide
cagucucuggcaccccugc

SEQ ID NO: 2231449 - RNA, 19 nt, Artificial Sequence
  Description of Artificial Sequence: Synthetic oligonucleotide
ggugcuguagagcuguucu

SEQ ID NO: 2231450 - RNA, 19 nt, Artificial Sequence
  Description of Artificial Sequence: Synthetic oligonucleotide
agugcugggcgguugucuu

SEQ ID NO: 2231451 - RNA, 19 nt, Artificial Sequence
  Description of Artificial Sequence: Synthetic oligonucleotide
ggggagagacacugguggg

SEQ ID NO: 2231452 - RNA, 19 nt, Artificial Sequence
  Description of Artificial Sequence: Synthetic oligonucleotide
gaauggugcuguagagcug

SEQ ID NO: 2231453 - RNA, 19 nt, Artificial Sequence
  Description of Artificial Sequence: Synthetic oligonucleotide
cccucuguuccucuaggcg

SEQ ID NO: 2231454 - RNA, 19 nt, Artificial Sequence
  Description of Artificial Sequence: Synthetic oligonucleotide
gggagagacacuggugggg

SEQ ID NO: 2231455 - RNA, 19 nt, Artificial Sequence
  Description of Artificial Sequence: Synthetic oligonucleotide
ugcuaggcaggaggggcag

SEQ ID NO: 2231456 - RNA, 19 nt, Artificial Sequence
  Description of Artificial Sequence: Synthetic oligonucleotide
ggucuucagucucuggcac

SEQ ID NO: 2231457 - RNA, 19 nt, Artificial Sequence
  Description of Artificial Sequence: Synthetic oligonucleotide
cauccgcuggcacugguga

SEQ ID NO: 2231458 - RNA, 19 nt, Artificial Sequence
  Description of Artificial Sequence: Synthetic oligonucleotide
cagcccugaucaucuugcg

SEQ ID NO: 2231459 - RNA, 19 nt, Artificial Sequence
  Description of Artificial Sequence: Synthetic oligonucleotide
gggguugggguuuggcucc

SEQ ID NO: 2231460 - RNA, 19 nt, Artificial Sequence
  Description of Artificial Sequence: Synthetic oligonucleotide
agcaggguguguggguggg

SEQ ID NO: 2231461 - RNA, 19 nt, Artificial Sequence
  Description of Artificial Sequence: Synthetic oligonucleotide
ugaccgcugggcuuccauc

SEQ ID NO: 2231462 - RNA, 19 nt, Artificial Sequence
  Description of Artificial Sequence: Synthetic oligonucleotide
aagaagccggggugggguu

SEQ ID NO: 2231463 - RNA, 19 nt, Artificial Sequence
  Description of Artificial Sequence: Synthetic oligonucleotide
uccauucgcccuccacccu

SEQ ID NO: 2231464 - RNA, 19 nt, Artificial Sequence
  Description of Artificial Sequence: Synthetic oligonucleotide
cuaggcggcgggacugggc

SEQ ID NO: 2231465 - RNA, 19 nt, Artificial Sequence
  Description of Artificial Sequence: Synthetic oligonucleotide
uuggggagucguguccacc

SEQ ID NO: 2231466 - RNA, 19 nt, Artificial Sequence
  Description of Artificial Sequence: Synthetic oligonucleotide
gcgguugucuuaaucuucc

SEQ ID NO: 2231467 - RNA, 19 nt, Artificial Sequence
  Description of Artificial Sequence: Synthetic oligonucleotide
gagucguguccacccuacc

SEQ ID NO: 2231468 - RNA, 19 nt, Artificial Sequence
  Description of Artificial Sequence: Synthetic oligonucleotide
gaggggaggcuggaauuug

SEQ ID NO: 2231469 - RNA, 19 nt, Artificial Sequence
  Description of Artificial Sequence: Synthetic oligonucleotide
cagcagggugugugggugg

SEQ ID NO: 2231470 - RNA, 19 nt, Artificial Sequence
  Description of Artificial Sequence: Synthetic oligonucleotide
ccucaguccucacaccccg

SEQ ID NO: 2231471 - RNA, 19 nt, Artificial Sequence
  Description of Artificial Sequence: Synthetic oligonucleotide
uucgcccuccacccugaac

SEQ ID NO: 2231472 - RNA, 19 nt, Artificial Sequence
  Description of Artificial Sequence: Synthetic oligonucleotide
cagcaacuccaggagcucc

SEQ ID NO: 2231473 - RNA, 19 nt, Artificial Sequence
  Description of Artificial Sequence: Synthetic oligonucleotide
ucuaggcggcgggacuggg

SEQ ID NO: 2231474 - RNA, 19 nt, Artificial Sequence
  Description of Artificial Sequence: Synthetic oligonucleotide
cugggcgguugucuuaauc

SEQ ID NO: 2231475 - RNA, 19 nt, Artificial Sequence
  Description of Artificial Sequence: Synthetic oligonucleotide
uugcuccuccauucgcccu

SEQ ID NO: 2231476 - RNA, 19 nt, Artificial Sequence
  Description of Artificial Sequence: Synthetic oligonucleotide
cuaccuugcucguuuucaa

SEQ ID NO: 2231477 - RNA, 19 nt, Artificial Sequence
  Description of Artificial Sequence: Synthetic oligonucleotide
ggaggggcaggccucaguc

SEQ ID NO: 2231478 - RNA, 19 nt, Artificial Sequence
  Description of Artificial Sequence: Synthetic oligonucleotide
guccucacaccccguugag

SEQ ID NO: 2231479 - RNA, 19 nt, Artificial Sequence
  Description of Artificial Sequence: Synthetic oligonucleotide
cugcaggaggaggggaggg

SEQ ID NO: 2231480 - RNA, 19 nt, Artificial Sequence
  Description of Artificial Sequence: Synthetic oligonucleotide
ggcgcagaucgccaaggcc

SEQ ID NO: 2231481 - RNA, 19 nt, Artificial Sequence
  Description of Artificial Sequence: Synthetic oligonucleotide
gggucuucagucucuggca

SEQ ID NO: 2231482 - RNA, 19 nt, Artificial Sequence
  Description of Artificial Sequence: Synthetic oligonucleotide
ucgccaaggccgaguggug

SEQ ID NO: 2231483 - RNA, 19 nt, Artificial Sequence
  Description of Artificial Sequence: Synthetic oligonucleotide
gaguagcuugacagcucag

SEQ ID NO: 2231484 - RNA, 19 nt, Artificial Sequence
  Description of Artificial Sequence: Synthetic oligonucleotide
gcuggcacuggugacuaag

SEQ ID NO: 2231485 - RNA, 19 nt, Artificial Sequence
  Description of Artificial Sequence: Synthetic oligonucleotide
cuuggggagucguguccac

SEQ ID NO: 2231486 - RNA, 19 nt, Artificial Sequence
  Description of Artificial Sequence: Synthetic oligonucleotide
cuggcacuggugacuaaga

SEQ ID NO: 2231487 - RNA, 19 nt, Artificial Sequence
  Description of Artificial Sequence: Synthetic oligonucleotide
ugaaggcuugcgggguggc

SEQ ID NO: 2231488 - RNA, 19 nt, Artificial Sequence
  Description of Artificial Sequence: Synthetic oligonucleotide
gaaggcuugcgggguggcc

SEQ ID NO: 2231489 - RNA, 19 nt, Artificial Sequence
  Description of Artificial Sequence: Synthetic oligonucleotide
gcuugacagcucaggauag

SEQ ID NO: 2231490 - RNA, 19 nt, Artificial Sequence
  Description of Artificial Sequence: Synthetic oligonucleotide
ccacccugaacucucagca

SEQ ID NO: 2231491 - RNA, 19 nt, Artificial Sequence
  Description of Artificial Sequence: Synthetic oligonucleotide
ggugacuaagaauggugcu

SEQ ID NO: 2231492 - RNA, 19 nt, Artificial Sequence
  Description of Artificial Sequence: Synthetic oligonucleotide
gcaggguugaaggcuugcg

SEQ ID NO: 2231493 - RNA, 19 nt, Artificial Sequence
  Description of Artificial Sequence: Synthetic oligonucleotide
gaacggucuuggggagucg

SEQ ID NO: 2231494 - RNA, 19 nt, Artificial Sequence
  Description of Artificial Sequence: Synthetic oligonucleotide
ggcccucuguuccucuagg

SEQ ID NO: 2231495 - RNA, 19 nt, Artificial Sequence
  Description of Artificial Sequence: Synthetic oligonucleotide
ccucaagaagccggggugg

SEQ ID NO: 2231496 - RNA, 19 nt, Artificial Sequence
  Description of Artificial Sequence: Synthetic oligonucleotide
cagcagcaggguguguggg

SEQ ID NO: 2231497 - RNA, 19 nt, Artificial Sequence
  Description of Artificial Sequence: Synthetic oligonucleotide
cccugaucaucuugcgggg

SEQ ID NO: 2231498 - RNA, 19 nt, Artificial Sequence
  Description of Artificial Sequence: Synthetic oligonucleotide
guucgcuucagggccucug

SEQ ID NO: 2231499 - RNA, 19 nt, Artificial Sequence
  Description of Artificial Sequence: Synthetic oligonucleotide
ugggcuccucggccuuggg

SEQ ID NO: 2231500 - RNA, 19 nt, Artificial Sequence
  Description of Artificial Sequence: Synthetic oligonucleotide
gggguguggaagguggccc

SEQ ID NO: 2231501 - RNA, 19 nt, Artificial Sequence
  Description of Artificial Sequence: Synthetic oligonucleotide
ggguuuggcuccuggggac

SEQ ID NO: 2231502 - RNA, 19 nt, Artificial Sequence
  Description of Artificial Sequence: Synthetic oligonucleotide
ggggccgggaucuuugcuc

SEQ ID NO: 2231503 - RNA, 19 nt, Artificial Sequence
  Description of Artificial Sequence: Synthetic oligonucleotide
gacuaagaauggugcugua

SEQ ID NO: 2231504 - RNA, 19 nt, Artificial Sequence
  Description of Artificial Sequence: Synthetic oligonucleotide
accccguugaguagcuuga

SEQ ID NO: 2231505 - RNA, 19 nt, Artificial Sequence
  Description of Artificial Sequence: Synthetic oligonucleotide
gcucugucugcagggagag

SEQ ID NO: 2231506 - RNA, 19 nt, Artificial Sequence
  Description of Artificial Sequence: Synthetic oligonucleotide
agaagccggggugggguug

SEQ ID NO: 2231507 - RNA, 19 nt, Artificial Sequence
  Description of Artificial Sequence: Synthetic oligonucleotide
uccuggggucuuccagccu

SEQ ID NO: 2231508 - RNA, 19 nt, Artificial Sequence
  Description of Artificial Sequence: Synthetic oligonucleotide
ggcuggaauuuggaaggag

SEQ ID NO: 2231509 - RNA, 19 nt, Artificial Sequence
  Description of Artificial Sequence: Synthetic oligonucleotide
ccuggggucuuccagccuc

SEQ ID NO: 2231510 - RNA, 19 nt, Artificial Sequence
  Description of Artificial Sequence: Synthetic oligonucleotide
aggcuugcgggguggccca

SEQ ID NO: 2231511 - RNA, 19 nt, Artificial Sequence
  Description of Artificial Sequence: Synthetic oligonucleotide
cucuaggcggcgggacugg

SEQ ID NO: 2231512 - RNA, 19 nt, Artificial Sequence
  Description of Artificial Sequence: Synthetic oligonucleotide
gucucagcaggugugugua

SEQ ID NO: 2231513 - RNA, 19 nt, Artificial Sequence
  Description of Artificial Sequence: Synthetic oligonucleotide
cucaggucucagcaggugu

SEQ ID NO: 2231514 - RNA, 19 nt, Artificial Sequence
  Description of Artificial Sequence: Synthetic oligonucleotide
aggucucagcaggugugug

SEQ ID NO: 2231515 - RNA, 19 nt, Artificial Sequence
  Description of Artificial Sequence: Synthetic oligonucleotide
uuucaagguuaggguacuu

SEQ ID NO: 2231516 - RNA, 19 nt, Artificial Sequence
  Description of Artificial Sequence: Synthetic oligonucleotide
gccacgcaggguugaaggc

SEQ ID NO: 2231517 - RNA, 19 nt, Artificial Sequence
  Description of Artificial Sequence: Synthetic oligonucleotide
ggucuuggggagucguguc

SEQ ID NO: 2231518 - RNA, 19 nt, Artificial Sequence
  Description of Artificial Sequence: Synthetic oligonucleotide
ggcacuggugacuaagaau

SEQ ID NO: 2231519 - RNA, 19 nt, Artificial Sequence
  Description of Artificial Sequence: Synthetic oligonucleotide
gucguguccacccuaccuu

SEQ ID NO: 2231520 - RNA, 19 nt, Artificial Sequence
  Description of Artificial Sequence: Synthetic oligonucleotide
gccucugggcuccucggcc

SEQ ID NO: 2231521 - RNA, 19 nt, Artificial Sequence
  Description of Artificial Sequence: Synthetic oligonucleotide
ggcaggggcggcucugacc

SEQ ID NO: 2231522 - RNA, 19 nt, Artificial Sequence
  Description of Artificial Sequence: Synthetic oligonucleotide
aggccgagugguggaguuc

SEQ ID NO: 2231523 - RNA, 19 nt, Artificial Sequence
  Description of Artificial Sequence: Synthetic oligonucleotide
cagccaccagguccagaag

SEQ ID NO: 2231524 - RNA, 19 nt, Artificial Sequence
  Description of Artificial Sequence: Synthetic oligonucleotide
gccagcccugaucaucuug

SEQ ID NO: 2231525 - RNA, 19 nt, Artificial Sequence
  Description of Artificial Sequence: Synthetic oligonucleotide
agguucgcuucagggccuc

SEQ ID NO: 2231526 - RNA, 19 nt, Artificial Sequence
  Description of Artificial Sequence: Synthetic oligonucleotide
ccucacaccccguugagua

SEQ ID NO: 2231527 - RNA, 19 nt, Artificial Sequence
  Description of Artificial Sequence: Synthetic oligonucleotide
ggcgguugucuuaaucuuc

SEQ ID NO: 2231528 - RNA, 19 nt, Artificial Sequence
  Description of Artificial Sequence: Synthetic oligonucleotide
ggagucguguccacccuac

SEQ ID NO: 2231529 - RNA, 19 nt, Artificial Sequence
  Description of Artificial Sequence: Synthetic oligonucleotide
guggcggguuccugcagga

SEQ ID NO: 2231530 - RNA, 19 nt, Artificial Sequence
  Description of Artificial Sequence: Synthetic oligonucleotide
guguggcggguuccugcag

SEQ ID NO: 2231531 - RNA, 19 nt, Artificial Sequence
  Description of Artificial Sequence: Synthetic oligonucleotide
cauucgcccuccacccuga

SEQ ID NO: 2231532 - RNA, 19 nt, Artificial Sequence
  Description of Artificial Sequence: Synthetic oligonucleotide
gcucguuuucaagguuagg

SEQ ID NO: 2231533 - RNA, 19 nt, Artificial Sequence
  Description of Artificial Sequence: Synthetic oligonucleotide
ugccagugcugggcgguug

SEQ ID NO: 2231534 - RNA, 19 nt, Artificial Sequence
  Description of Artificial Sequence: Synthetic oligonucleotide
aggcuggaauuuggaagga

SEQ ID NO: 2231535 - RNA, 19 nt, Artificial Sequence
  Description of Artificial Sequence: Synthetic oligonucleotide
uggcggguuccugcaggag

SEQ ID NO: 2231536 - RNA, 19 nt, Artificial Sequence
  Description of Artificial Sequence: Synthetic oligonucleotide
agcucaggucucagcaggu

SEQ ID NO: 2231537 - RNA, 19 nt, Artificial Sequence
  Description of Artificial Sequence: Synthetic oligonucleotide
gguuuggcuccuggggacc

SEQ ID NO: 2231538 - RNA, 19 nt, Artificial Sequence
  Description of Artificial Sequence: Synthetic oligonucleotide
ccauucgcccuccacccug

SEQ ID NO: 2231539 - RNA, 19 nt, Artificial Sequence
  Description of Artificial Sequence: Synthetic oligonucleotide
caagaagccgggguggggu

SEQ ID NO: 2231540 - RNA, 19 nt, Artificial Sequence
  Description of Artificial Sequence: Synthetic oligonucleotide
ggugggucuucagucucug

SEQ ID NO: 2231541 - RNA, 19 nt, Artificial Sequence
  Description of Artificial Sequence: Synthetic oligonucleotide
gggccucugggcuccucgg

SEQ ID NO: 2231542 - RNA, 19 nt, Artificial Sequence
  Description of Artificial Sequence: Synthetic oligonucleotide
ggcugguugggagcucagg

SEQ ID NO: 2231543 - RNA, 19 nt, Artificial Sequence
  Description of Artificial Sequence: Synthetic oligonucleotide
ggaucuuugcuccuccauu

SEQ ID NO: 2231544 - RNA, 19 nt, Artificial Sequence
  Description of Artificial Sequence: Synthetic oligonucleotide
ggaaaaugggugggucuuc

SEQ ID NO: 2231545 - RNA, 19 nt, Artificial Sequence
  Description of Artificial Sequence: Synthetic oligonucleotide
cuguagagcuguucuuggu

SEQ ID NO: 2231546 - RNA, 19 nt, Artificial Sequence
  Description of Artificial Sequence: Synthetic oligonucleotide
gggguggcccagcuuugag

SEQ ID NO: 2231547 - RNA, 19 nt, Artificial Sequence
  Description of Artificial Sequence: Synthetic oligonucleotide
ggcggcucugaccgcuggg

SEQ ID NO: 2231548 - RNA, 19 nt, Artificial Sequence
  Description of Artificial Sequence: Synthetic oligonucleotide
gagacucuugaacggucuu

SEQ ID NO: 2231549 - RNA, 19 nt, Artificial Sequence
  Description of Artificial Sequence: Synthetic oligonucleotide
agggagaauuugguuuauu

SEQ ID NO: 2231550 - RNA, 19 nt, Artificial Sequence
  Description of Artificial Sequence: Synthetic oligonucleotide
ggguguguggguggggcug

SEQ ID NO: 2231551 - RNA, 19 nt, Artificial Sequence
  Description of Artificial Sequence: Synthetic oligonucleotide
aggggcggcucugaccgcu

SEQ ID NO: 2231552 - RNA, 19 nt, Artificial Sequence
  Description of Artificial Sequence: Synthetic oligonucleotide
gcuuccauccgcuggcacu

SEQ ID NO: 2231553 - RNA, 19 nt, Artificial Sequence
  Description of Artificial Sequence: Synthetic oligonucleotide
ccaguucccugggaaaaug

SEQ ID NO: 2231554 - RNA, 19 nt, Artificial Sequence
  Description of Artificial Sequence: Synthetic oligonucleotide
ggccgagugguggaguuca

SEQ ID NO: 2231555 - RNA, 19 nt, Artificial Sequence
  Description of Artificial Sequence: Synthetic oligonucleotide
ggucucagcaggugugugu

SEQ ID NO: 2231556 - RNA, 19 nt, Artificial Sequence
  Description of Artificial Sequence: Synthetic oligonucleotide
caucccugggcuggggaga

SEQ ID NO: 2231557 - RNA, 19 nt, Artificial Sequence
  Description of Artificial Sequence: Synthetic oligonucleotide
aagccggggugggguuggg

SEQ ID NO: 2231558 - RNA, 19 nt, Artificial Sequence
  Description of Artificial Sequence: Synthetic oligonucleotide
gggugccagugcugggcgg

SEQ ID NO: 2231559 - RNA, 19 nt, Artificial Sequence
  Description of Artificial Sequence: Synthetic oligonucleotide
guguccacccuaccuugcu

SEQ ID NO: 2231560 - RNA, 19 nt, Artificial Sequence
  Description of Artificial Sequence: Synthetic oligonucleotide
uggggucuuccagccucca

SEQ ID NO: 2231561 - RNA, 19 nt, Artificial Sequence
  Description of Artificial Sequence: Synthetic oligonucleotide
ccauccgcuggcacuggug

SEQ ID NO: 2231562 - RNA, 19 nt, Artificial Sequence
  Description of Artificial Sequence: Synthetic oligonucleotide
cuugcucguuuucaagguu

SEQ ID NO: 2231563 - RNA, 19 nt, Artificial Sequence
  Description of Artificial Sequence: Synthetic oligonucleotide
caggagggagaauuugguu

SEQ ID NO: 2231564 - RNA, 19 nt, Artificial Sequence
  Description of Artificial Sequence: Synthetic oligonucleotide
acccuaccuugcucguuuu

SEQ ID NO: 2231565 - RNA, 19 nt, Artificial Sequence
  Description of Artificial Sequence: Synthetic oligonucleotide
gccaaggccgaguggugga

SEQ ID NO: 2231566 - RNA, 19 nt, Artificial Sequence
  Description of Artificial Sequence: Synthetic oligonucleotide
ggccucugggcuccucggc

SEQ ID NO: 2231567 - RNA, 19 nt, Artificial Sequence
  Description of Artificial Sequence: Synthetic oligonucleotide
gcggcucugaccgcugggc

SEQ ID NO: 2231568 - RNA, 19 nt, Artificial Sequence
  Description of Artificial Sequence: Synthetic oligonucleotide
cccuguccaguucccuggg

SEQ ID NO: 2231569 - RNA, 19 nt, Artificial Sequence
  Description of Artificial Sequence: Synthetic oligonucleotide
ccccuuuucuugcuaggca

SEQ ID NO: 2231570 - RNA, 19 nt, Artificial Sequence
  Description of Artificial Sequence: Synthetic oligonucleotide
ucugaccgcugggcuucca

SEQ ID NO: 2231571 - RNA, 19 nt, Artificial Sequence
  Description of Artificial Sequence: Synthetic oligonucleotide
ggcuuccauccgcuggcac

SEQ ID NO: 2231572 - RNA, 19 nt, Artificial Sequence
  Description of Artificial Sequence: Synthetic oligonucleotide
aggcggcgggacugggccu

SEQ ID NO: 2231573 - RNA, 19 nt, Artificial Sequence
  Description of Artificial Sequence: Synthetic oligonucleotide
uuuggcuccuggggaccuu

SEQ ID NO: 2231574 - RNA, 19 nt, Artificial Sequence
  Description of Artificial Sequence: Synthetic oligonucleotide
cacgcaggguugaaggcuu

SEQ ID NO: 2231575 - RNA, 19 nt, Artificial Sequence
  Description of Artificial Sequence: Synthetic oligonucleotide
auucgcccuccacccugaa

SEQ ID NO: 2231576 - RNA, 19 nt, Artificial Sequence
  Description of Artificial Sequence: Synthetic oligonucleotide
cguguccacccuaccuugc

SEQ ID NO: 2231577 - RNA, 19 nt, Artificial Sequence
  Description of Artificial Sequence: Synthetic oligonucleotide
gguugaaggcuugcggggu

SEQ ID NO: 2231578 - RNA, 19 nt, Artificial Sequence
  Description of Artificial Sequence: Synthetic oligonucleotide
ccuugcucguuuucaaggu

SEQ ID NO: 2231579 - RNA, 19 nt, Artificial Sequence
  Description of Artificial Sequence: Synthetic oligonucleotide
ccucuaggcggcgggacug

SEQ ID NO: 2231580 - RNA, 19 nt, Artificial Sequence
  Description of Artificial Sequence: Synthetic oligonucleotide
uugcgggguggcccagcuu

SEQ ID NO: 2231581 - RNA, 19 nt, Artificial Sequence
  Description of Artificial Sequence: Synthetic oligonucleotide
aggggcugguugggagcuc

SEQ ID NO: 2231582 - RNA, 19 nt, Artificial Sequence
  Description of Artificial Sequence: Synthetic oligonucleotide
cgguugucuuaaucuuccc

SEQ ID NO: 2231583 - RNA, 19 nt, Artificial Sequence
  Description of Artificial Sequence: Synthetic oligonucleotide
agcccgaccggggccccag

SEQ ID NO: 2231584 - RNA, 19 nt, Artificial Sequence
  Description of Artificial Sequence: Synthetic oligonucleotide
cccguugaguagcuugaca

SEQ ID NO: 2231585 - RNA, 19 nt, Artificial Sequence
  Description of Artificial Sequence: Synthetic oligonucleotide
cccugggcuggggagagac

SEQ ID NO: 2231586 - RNA, 19 nt, Artificial Sequence
  Description of Artificial Sequence: Synthetic oligonucleotide
gagguucgcuucagggccu

SEQ ID NO: 2231587 - RNA, 19 nt, Artificial Sequence
  Description of Artificial Sequence: Synthetic oligonucleotide
ggcuuggggugccagugcu

SEQ ID NO: 2231588 - RNA, 19 nt, Artificial Sequence
  Description of Artificial Sequence: Synthetic oligonucleotide
cucggccuuggggcuuggg

SEQ ID NO: 2231589 - RNA, 19 nt, Artificial Sequence
  Description of Artificial Sequence: Synthetic oligonucleotide
cacccuaccuugcucguuu

SEQ ID NO: 2231590 - RNA, 19 nt, Artificial Sequence
  Description of Artificial Sequence: Synthetic oligonucleotide
gggaaaaugggugggucuu

SEQ ID NO: 2231591 - RNA, 19 nt, Artificial Sequence
  Description of Artificial Sequence: Synthetic oligonucleotide
acgcaggguugaaggcuug

SEQ ID NO: 2231592 - RNA, 19 nt, Artificial Sequence
  Description of Artificial Sequence: Synthetic oligonucleotide
caggggcggcucugaccgc

SEQ ID NO: 2231593 - RNA, 19 nt, Artificial Sequence
  Description of Artificial Sequence: Synthetic oligonucleotide
gagggagaauuugguuuau

SEQ ID NO: 2231594 - RNA, 19 nt, Artificial Sequence
  Description of Artificial Sequence: Synthetic oligonucleotide
cucugaccgcugggcuucc

SEQ ID NO: 2231595 - RNA, 19 nt, Artificial Sequence
  Description of Artificial Sequence: Synthetic oligonucleotide
cuugcgggguggcccagcu

SEQ ID NO: 2231596 - RNA, 19 nt, Artificial Sequence
  Description of Artificial Sequence: Synthetic oligonucleotide
ccgaccggggccccagggc

SEQ ID NO: 2231597 - RNA, 19 nt, Artificial Sequence
  Description of Artificial Sequence: Synthetic oligonucleotide
gguguguggguggggcuga

SEQ ID NO: 2231598 - RNA, 19 nt, Artificial Sequence
  Description of Artificial Sequence: Synthetic oligonucleotide
gccccagggcuguguggcg

SEQ ID NO: 2231599 - RNA, 19 nt, Artificial Sequence
  Description of Artificial Sequence: Synthetic oligonucleotide
ccaaggccgagugguggag

SEQ ID NO: 2231600 - RNA, 19 nt, Artificial Sequence
  Description of Artificial Sequence: Synthetic oligonucleotide
gugcugggcgguugucuua

SEQ ID NO: 2231601 - RNA, 19 nt, Artificial Sequence
  Description of Artificial Sequence: Synthetic oligonucleotide
ggggcugguugggagcuca

SEQ ID NO: 2231602 - RNA, 19 nt, Artificial Sequence
  Description of Artificial Sequence: Synthetic oligonucleotide
ccgcugggcuuccauccgc

SEQ ID NO: 2231603 - RNA, 19 nt, Artificial Sequence
  Description of Artificial Sequence: Synthetic oligonucleotide
guggggcugagguucgcuu

SEQ ID NO: 2231604 - RNA, 19 nt, Artificial Sequence
  Description of Artificial Sequence: Synthetic oligonucleotide
gggagucguguccacccua

SEQ ID NO: 2231605 - RNA, 19 nt, Artificial Sequence
  Description of Artificial Sequence: Synthetic oligonucleotide
guggcccucuguuccucua

SEQ ID NO: 2231606 - RNA, 19 nt, Artificial Sequence
  Description of Artificial Sequence: Synthetic oligonucleotide
cgccaaggccgaguggugg

SEQ ID NO: 2231607 - RNA, 19 nt, Artificial Sequence
  Description of Artificial Sequence: Synthetic oligonucleotide
ggguguggaagguggcccu

SEQ ID NO: 2231608 - RNA, 19 nt, Artificial Sequence
  Description of Artificial Sequence: Synthetic oligonucleotide
cccgaccggggccccaggg

SEQ ID NO: 2231609 - RNA, 19 nt, Artificial Sequence
  Description of Artificial Sequence: Synthetic oligonucleotide
gcuguguggcggguuccug

SEQ ID NO: 2231610 - RNA, 19 nt, Artificial Sequence
  Description of Artificial Sequence: Synthetic oligonucleotide
cacaccccguugaguagcu

SEQ ID NO: 2231611 - RNA, 19 nt, Artificial Sequence
  Description of Artificial Sequence: Synthetic oligonucleotide
gggcgguugucuuaaucuu

SEQ ID NO: 2231612 - RNA, 19 nt, Artificial Sequence
  Description of Artificial Sequence: Synthetic oligonucleotide
cagaucgccaaggccgagu

SEQ ID NO: 2231613 - RNA, 19 nt, Artificial Sequence
  Description of Artificial Sequence: Synthetic oligonucleotide
caggucucagcaggugugu

SEQ ID NO: 2231614 - RNA, 19 nt, Artificial Sequence
  Description of Artificial Sequence: Synthetic oligonucleotide
cagugcugggcgguugucu

SEQ ID NO: 2231615 - RNA, 19 nt, Artificial Sequence
  Description of Artificial Sequence: Synthetic oligonucleotide
cucaguccucacaccccgu

SEQ ID NO: 2231616 - RNA, 19 nt, Artificial Sequence
  Description of Artificial Sequence: Synthetic oligonucleotide
gcagaucgccaaggccgag

SEQ ID NO: 2231617 - RNA, 19 nt, Artificial Sequence
  Description of Artificial Sequence: Synthetic oligonucleotide
gggccagcccugaucaucu

SEQ ID NO: 2231618 - RNA, 19 nt, Artificial Sequence
  Description of Artificial Sequence: Synthetic oligonucleotide
gggcaggccucaguccuca

SEQ ID NO: 2231619 - RNA, 19 nt, Artificial Sequence
  Description of Artificial Sequence: Synthetic oligonucleotide
cugaccgcugggcuuccau

SEQ ID NO: 2231620 - RNA, 19 nt, Artificial Sequence
  Description of Artificial Sequence: Synthetic oligonucleotide
ggugccagugcugggcggu

SEQ ID NO: 2231621 - RNA, 19 nt, Artificial Sequence
  Description of Artificial Sequence: Synthetic oligonucleotide
cuggcaccccugccacgca

SEQ ID NO: 2231622 - RNA, 19 nt, Artificial Sequence
  Description of Artificial Sequence: Synthetic oligonucleotide
caaggccgagugguggagu

SEQ ID NO: 2231623 - RNA, 19 nt, Artificial Sequence
  Description of Artificial Sequence: Synthetic oligonucleotide
cgcagaucgccaaggccga

SEQ ID NO: 2231624 - RNA, 19 nt, Artificial Sequence
  Description of Artificial Sequence: Synthetic oligonucleotide
ggaggggaggcuggaauuu

SEQ ID NO: 2231625 - RNA, 19 nt, Artificial Sequence
  Description of Artificial Sequence: Synthetic oligonucleotide
ggcucugaccgcugggcuu

SEQ ID NO: 2231626 - RNA, 19 nt, Artificial Sequence
  Description of Artificial Sequence: Synthetic oligonucleotide
ggggagucguguccacccu

SEQ ID NO: 2231627 - RNA, 19 nt, Artificial Sequence
  Description of Artificial Sequence: Synthetic oligonucleotide
gcuugcgggguggcccagc

SEQ ID NO: 2231628 - RNA, 19 nt, Artificial Sequence
  Description of Artificial Sequence: Synthetic oligonucleotide
acaccccguugaguagcuu

SEQ ID NO: 2231629 - RNA, 19 nt, Artificial Sequence
  Description of Artificial Sequence: Synthetic oligonucleotide
ggggugggguugggguuug

SEQ ID NO: 2231630 - RNA, 19 nt, Artificial Sequence
  Description of Artificial Sequence: Synthetic oligonucleotide
gcucaggauagagacucuu

SEQ ID NO: 2231631 - RNA, 19 nt, Artificial Sequence
  Description of Artificial Sequence: Synthetic oligonucleotide
ccccguugaguagcuugac

SEQ ID NO: 2231632 - RNA, 19 nt, Artificial Sequence
  Description of Artificial Sequence: Synthetic oligonucleotide
ccuguccaguucccuggga

SEQ ID NO: 2231633 - RNA, 19 nt, Artificial Sequence
  Description of Artificial Sequence: Synthetic oligonucleotide
ccacgcaggguugaaggcu

SEQ ID NO: 2231634 - RNA, 19 nt, Artificial Sequence
  Description of Artificial Sequence: Synthetic oligonucleotide
cugagagaaggggcugguu

SEQ ID NO: 2231635 - RNA, 19 nt, Artificial Sequence
  Description of Artificial Sequence: Synthetic oligonucleotide
gggugggucuucagucucu

SEQ ID NO: 2231636 - RNA, 19 nt, Artificial Sequence
  Description of Artificial Sequence: Synthetic oligonucleotide
ccugggaaaaugggugggu

SEQ ID NO: 2231637 - RNA, 19 nt, Artificial Sequence
  Description of Artificial Sequence: Synthetic oligonucleotide
cgcccuccacccugaacuc

SEQ ID NO: 2231638 - RNA, 19 nt, Artificial Sequence
  Description of Artificial Sequence: Synthetic oligonucleotide
gcccgaccggggccccagg

SEQ ID NO: 2231639 - RNA, 19 nt, Artificial Sequence
  Description of Artificial Sequence: Synthetic oligonucleotide
gcccagcuuugagucccug

SEQ ID NO: 2231640 - RNA, 19 nt, Artificial Sequence
  Description of Artificial Sequence: Synthetic oligonucleotide
ggggcggcucugaccgcug

SEQ ID NO: 2231641 - RNA, 19 nt, Artificial Sequence
  Description of Artificial Sequence: Synthetic oligonucleotide
ggcuugcgggguggcccag

SEQ ID NO: 2231642 - RNA, 19 nt, Artificial Sequence
  Description of Artificial Sequence: Synthetic oligonucleotide
ggagcccgaccggggcccc

SEQ ID NO: 2231643 - RNA, 19 nt, Artificial Sequence
  Description of Artificial Sequence: Synthetic oligonucleotide
ggggucuuccagccuccau

SEQ ID NO: 2231644 - RNA, 19 nt, Artificial Sequence
  Description of Artificial Sequence: Synthetic oligonucleotide
gagcccgaccggggcccca

SEQ ID NO: 2231645 - RNA, 19 nt, Artificial Sequence
  Description of Artificial Sequence: Synthetic oligonucleotide
cgggaucuuugcuccucca

SEQ ID NO: 2231646 - RNA, 19 nt, Artificial Sequence
  Description of Artificial Sequence: Synthetic oligonucleotide
ccugagagaaggggcuggu

SEQ ID NO: 2231647 - RNA, 19 nt, Artificial Sequence
  Description of Artificial Sequence: Synthetic oligonucleotide
gcccuccacccugaacucu

SEQ ID NO: 2231648 - RNA, 19 nt, Artificial Sequence
  Description of Artificial Sequence: Synthetic oligonucleotide
cgaccggggccccagggcu

SEQ ID NO: 2231649 - RNA, 19 nt, Artificial Sequence
  Description of Artificial Sequence: Synthetic oligonucleotide
caccccugccacgcagggu

SEQ ID NO: 2231650 - RNA, 19 nt, Artificial Sequence
  Description of Artificial Sequence: Synthetic oligonucleotide
cggucuuggggagucgugu

SEQ ID NO: 2231651 - RNA, 19 nt, Artificial Sequence
  Description of Artificial Sequence: Synthetic oligonucleotide
ccugccacgcaggguugaa

SEQ ID NO: 2231652 - RNA, 19 nt, Artificial Sequence
  Description of Artificial Sequence: Synthetic oligonucleotide
ccgcuggcacuggugacua

SEQ ID NO: 2231653 - RNA, 19 nt, Artificial Sequence
  Description of Artificial Sequence: Synthetic oligonucleotide
cccugccacgcaggguuga

SEQ ID NO: 2231654 - RNA, 19 nt, Artificial Sequence
  Description of Artificial Sequence: Synthetic oligonucleotide
gguucgcuucagggccucu

SEQ ID NO: 2231655 - RNA, 19 nt, Artificial Sequence
  Description of Artificial Sequence: Synthetic oligonucleotide
gugccagugcugggcgguu

SEQ ID NO: 2231656 - RNA, 19 nt, Artificial Sequence
  Description of Artificial Sequence: Synthetic oligonucleotide
cagggcuguguggcggguu

SEQ ID NO: 2231657 - RNA, 19 nt, Artificial Sequence
  Description of Artificial Sequence: Synthetic oligonucleotide
cgcugggcuuccauccgcu

SEQ ID NO: 2231658 - RNA, 19 nt, Artificial Sequence
  Description of Artificial Sequence: Synthetic oligonucleotide
ccucggccuuggggcuugg

SEQ ID NO: 2231659 - RNA, 19 nt, Artificial Sequence
  Description of Artificial Sequence: Synthetic oligonucleotide
gcugggcgguugucuuaau

SEQ ID NO: 2231660 - RNA, 19 nt, Artificial Sequence
  Description of Artificial Sequence: Synthetic oligonucleotide
ggcccagcuuugagucccu

SEQ ID NO: 2231661 - RNA, 19 nt, Artificial Sequence
  Description of Artificial Sequence: Synthetic oligonucleotide
ggccagcccugaucaucuu

SEQ ID NO: 2231662 - RNA, 19 nt, Artificial Sequence
  Description of Artificial Sequence: Synthetic oligonucleotide
gcggcgggacugggccuca

SEQ ID NO: 2231663 - RNA, 19 nt, Artificial Sequence
  Description of Artificial Sequence: Synthetic oligonucleotide
ccacccuaccuugcucguu

SEQ ID NO: 2231664 - RNA, 19 nt, Artificial Sequence
  Description of Artificial Sequence: Synthetic oligonucleotide
aacuuagugagguagaccu

SEQ ID NO: 2231665 - RNA, 19 nt, Artificial Sequence
  Description of Artificial Sequence: Synthetic oligonucleotide
caaacaagcaaauagccag

SEQ ID NO: 2231666 - RNA, 19 nt, Artificial Sequence
  Description of Artificial Sequence: Synthetic oligonucleotide
caagcaaauagccagaaag

SEQ ID NO: 2231667 - RNA, 19 nt, Artificial Sequence
  Description of Artificial Sequence: Synthetic oligonucleotide
caagguauucccaagaagc

SEQ ID NO: 2231668 - RNA, 19 nt, Artificial Sequence
  Description of Artificial Sequence: Synthetic oligonucleotide
uuacuaaucacgaugucca

SEQ ID NO: 2231669 - RNA, 19 nt, Artificial Sequence
  Description of Artificial Sequence: Synthetic oligonucleotide
aaagugaccacgccguuuc

SEQ ID NO: 2231670 - RNA, 19 nt, Artificial Sequence
  Description of Artificial Sequence: Synthetic oligonucleotide
accaguagcguuaagacgc

SEQ ID NO: 2231671 - RNA, 19 nt, Artificial Sequence
  Description of Artificial Sequence: Synthetic oligonucleotide
uuauguuacaaaacuguug

SEQ ID NO: 2231672 - RNA, 19 nt, Artificial Sequence
  Description of Artificial Sequence: Synthetic oligonucleotide
aaguacaugaccaaguuga

SEQ ID NO: 2231673 - RNA, 19 nt, Artificial Sequence
  Description of Artificial Sequence: Synthetic oligonucleotide
agaaaaguagaugaggauc

SEQ ID NO: 2231674 - RNA, 19 nt, Artificial Sequence
  Description of Artificial Sequence: Synthetic oligonucleotide
aaguauccugcagagaagc

SEQ ID NO: 2231675 - RNA, 19 nt, Artificial Sequence
  Description of Artificial Sequence: Synthetic oligonucleotide
cuaaucacgauguccaccg

SEQ ID NO: 2231676 - RNA, 19 nt, Artificial Sequence
  Description of Artificial Sequence: Synthetic oligonucleotide
uguuuacuaaucacgaugu

SEQ ID NO: 2231677 - RNA, 19 nt, Artificial Sequence
  Description of Artificial Sequence: Synthetic oligonucleotide
aguaggugcaugcuggccc

SEQ ID NO: 2231678 - RNA, 19 nt, Artificial Sequence
  Description of Artificial Sequence: Synthetic oligonucleotide
uuuacuaaucacgaugucc

SEQ ID NO: 2231679 - RNA, 19 nt, Artificial Sequence
  Description of Artificial Sequence: Synthetic oligonucleotide
aagaauuugucuuuguguu

SEQ ID NO: 2231680 - RNA, 19 nt, Artificial Sequence
  Description of Artificial Sequence: Synthetic oligonucleotide
uugacauacuuguugaccc

SEQ ID NO: 2231681 - RNA, 19 nt, Artificial Sequence
  Description of Artificial Sequence: Synthetic oligonucleotide
caaauagccagaaagugac

SEQ ID NO: 2231682 - RNA, 19 nt, Artificial Sequence
  Description of Artificial Sequence: Synthetic oligonucleotide
aguagguugugccaacgcc

SEQ ID NO: 2231683 - RNA, 19 nt, Artificial Sequence
  Description of Artificial Sequence: Synthetic oligonucleotide
agucgagaaaaguagauga

SEQ ID NO: 2231684 - RNA, 19 nt, Artificial Sequence
  Description of Artificial Sequence: Synthetic oligonucleotide
gaugaaguauccugcagag

SEQ ID NO: 2231685 - RNA, 19 nt, Artificial Sequence
  Description of Artificial Sequence: Synthetic oligonucleotide
uacaugaccaaguugacau

SEQ ID NO: 2231686 - RNA, 19 nt, Artificial Sequence
  Description of Artificial Sequence: Synthetic oligonucleotide
aagauaccagagaagaagg

SEQ ID NO: 2231687 - RNA, 19 nt, Artificial Sequence
  Description of Artificial Sequence: Synthetic oligonucleotide
gacgccaccaccaacaaag

SEQ ID NO: 2231688 - RNA, 19 nt, Artificial Sequence
  Description of Artificial Sequence: Synthetic oligonucleotide
gaaggagacgaguagguug

SEQ ID NO: 2231689 - RNA, 19 nt, Artificial Sequence
  Description of Artificial Sequence: Synthetic oligonucleotide
  modified_base (5)..(5): a, c, u, g, unknown or other
uuuanccuuucucacucag

SEQ ID NO: 2231690 - RNA, 19 nt, Artificial Sequence
  Description of Artificial Sequence: Synthetic oligonucleotide
guuacaaaacuguuggcug

SEQ ID NO: 2231691 - RNA, 19 nt, Artificial Sequence
  Description of Artificial Sequence: Synthetic oligonucleotide
aauggagugggugaaggag

SEQ ID NO: 2231692 - RNA, 19 nt, Artificial Sequence
  Description of Artificial Sequence: Synthetic oligonucleotide
aaaauguucccagaguccu

SEQ ID NO: 2231693 - RNA, 19 nt, Artificial Sequence
  Description of Artificial Sequence: Synthetic oligonucleotide
uguuacaaaacuguuggcu

SEQ ID NO: 2231694 - RNA, 19 nt, Artificial Sequence
  Description of Artificial Sequence: Synthetic oligonucleotide
uaagacgccaccaccaaca

SEQ ID NO: 2231695 - RNA, 19 nt, Artificial Sequence
  Description of Artificial Sequence: Synthetic oligonucleotide
gauacaauggaguggguga

SEQ ID NO: 2231696 - RNA, 19 nt, Artificial Sequence
  Description of Artificial Sequence: Synthetic oligonucleotide
  modified_base (3)..(3): a, c, u, g, unknown or other
uanccuuucucacucaguc

SEQ ID NO: 2231697 - RNA, 19 nt, Artificial Sequence
  Description of Artificial Sequence: Synthetic oligonucleotide
ugugccaacgccaggugcg

SEQ ID NO: 2231698 - RNA, 19 nt, Artificial Sequence
  Description of Artificial Sequence: Synthetic oligonucleotide
guagaugaggaucaucaag

SEQ ID NO: 2231699 - RNA, 19 nt, Artificial Sequence
  Description of Artificial Sequence: Synthetic oligonucleotide
acugguuauuuauuauaac

SEQ ID NO: 2231700 - RNA, 19 nt, Artificial Sequence
  Description of Artificial Sequence: Synthetic oligonucleotide
cuguuuacuaaucacgaug

SEQ ID NO: 2231701 - RNA, 19 nt, Artificial Sequence
  Description of Artificial Sequence: Synthetic oligonucleotide
uuuguguuggcgucugggg

SEQ ID NO: 2231702 - RNA, 19 nt, Artificial Sequence
  Description of Artificial Sequence: Synthetic oligonucleotide
gaagauguugcugaccucc

SEQ ID NO: 2231703 - RNA, 19 nt, Artificial Sequence
  Description of Artificial Sequence: Synthetic oligonucleotide
uuugccauaugcacagcag

SEQ ID NO: 2231704 - RNA, 19 nt, Artificial Sequence
  Description of Artificial Sequence: Synthetic oligonucleotide
ucagggguuugccauaugc

SEQ ID NO: 2231705 - RNA, 19 nt, Artificial Sequence
  Description of Artificial Sequence: Synthetic oligonucleotide
acacuacucagucucuggc

SEQ ID NO: 2231706 - RNA, 19 nt, Artificial Sequence
  Description of Artificial Sequence: Synthetic oligonucleotide
uuuauguuacaaaacuguu

SEQ ID NO: 2231707 - RNA, 19 nt, Artificial Sequence
  Description of Artificial Sequence: Synthetic oligonucleotide
ucucacucagucaagaauu

SEQ ID NO: 2231708 - RNA, 19 nt, Artificial Sequence
  Description of Artificial Sequence: Synthetic oligonucleotide
cugaccuccaccaguagcg

SEQ ID NO: 2231709 - RNA, 19 nt, Artificial Sequence
  Description of Artificial Sequence: Synthetic oligonucleotide
gaaaaguagaugaggauca

SEQ ID NO: 2231710 - RNA, 19 nt, Artificial Sequence
  Description of Artificial Sequence: Synthetic oligonucleotide
ucagucucuggccagcgag

SEQ ID NO: 2231711 - RNA, 19 nt, Artificial Sequence
  Description of Artificial Sequence: Synthetic oligonucleotide
uuguugacccgguagagga

SEQ ID NO: 2231712 - RNA, 19 nt, Artificial Sequence
  Description of Artificial Sequence: Synthetic oligonucleotide
acuaaucacgauguccacc

SEQ ID NO: 2231713 - RNA, 19 nt, Artificial Sequence
  Description of Artificial Sequence: Synthetic oligonucleotide
agaagaaggcacccauagc

SEQ ID NO: 2231714 - RNA, 19 nt, Artificial Sequence
  Description of Artificial Sequence: Synthetic oligonucleotide
aaucacgauguccaccgug

SEQ ID NO: 2231715 - RNA, 19 nt, Artificial Sequence
  Description of Artificial Sequence: Synthetic oligonucleotide
caaaagauaccagagaaga

SEQ ID NO: 2231716 - RNA, 19 nt, Artificial Sequence
  Description of Artificial Sequence: Synthetic oligonucleotide
gagacgaguagguugugcc

SEQ ID NO: 2231717 - RNA, 19 nt, Artificial Sequence
  Description of Artificial Sequence: Synthetic oligonucleotide
cacgugagcaggcagaggc

SEQ ID NO: 2231718 - RNA, 19 nt, Artificial Sequence
  Description of Artificial Sequence: Synthetic oligonucleotide
uuccaaaagauaccagaga

SEQ ID NO: 2231719 - RNA, 19 nt, Artificial Sequence
  Description of Artificial Sequence: Synthetic oligonucleotide
ugucuguccgcccucuagg

SEQ ID NO: 2231720 - RNA, 19 nt, Artificial Sequence
  Description of Artificial Sequence: Synthetic oligonucleotide
auguuacaaaacuguuggc

SEQ ID NO: 2231721 - RNA, 19 nt, Artificial Sequence
  Description of Artificial Sequence: Synthetic oligonucleotide
acaagguauucccaagaag

SEQ ID NO: 2231722 - RNA, 19 nt, Artificial Sequence
  Description of Artificial Sequence: Synthetic oligonucleotide
uuauuauaacacccaggcu

SEQ ID NO: 2231723 - RNA, 19 nt, Artificial Sequence
  Description of Artificial Sequence: Synthetic oligonucleotide
ugcaacaguaggugcaugc

SEQ ID NO: 2231724 - RNA, 19 nt, Artificial Sequence
  Description of Artificial Sequence: Synthetic oligonucleotide
ucugggaacacuacucagu

SEQ ID NO: 2231725 - RNA, 19 nt, Artificial Sequence
  Description of Artificial Sequence: Synthetic oligonucleotide
aacuguuggcugugcuugc

SEQ ID NO: 2231726 - RNA, 19 nt, Artificial Sequence
  Description of Artificial Sequence: Synthetic oligonucleotide
ucccaagaagcucuggucu

SEQ ID NO: 2231727 - RNA, 19 nt, Artificial Sequence
  Description of Artificial Sequence: Synthetic oligonucleotide
  modified_base (10)..(10): a, c, u, g, unknown or other
cuggguuuanccuuucuca

SEQ ID NO: 2231728 - RNA, 19 nt, Artificial Sequence
  Description of Artificial Sequence: Synthetic oligonucleotide
uacuuguugacccgguaga

SEQ ID NO: 2231729 - RNA, 19 nt, Artificial Sequence
  Description of Artificial Sequence: Synthetic oligonucleotide
agcguuaagacgccaccac

SEQ ID NO: 2231730 - RNA, 19 nt, Artificial Sequence
  Description of Artificial Sequence: Synthetic oligonucleotide
gagaaaguacaugaccaag

SEQ ID NO: 2231731 - RNA, 19 nt, Artificial Sequence
  Description of Artificial Sequence: Synthetic oligonucleotide
ugacauacuuguugacccg

SEQ ID NO: 2231732 - RNA, 19 nt, Artificial Sequence
  Description of Artificial Sequence: Synthetic oligonucleotide
aaaacuguuggcugugcuu

SEQ ID NO: 2231733 - RNA, 19 nt, Artificial Sequence
  Description of Artificial Sequence: Synthetic oligonucleotide
gacaugaugaacaagguau

SEQ ID NO: 2231734 - RNA, 19 nt, Artificial Sequence
  Description of Artificial Sequence: Synthetic oligonucleotide
agcaaauagccagaaagug

SEQ ID NO: 2231735 - RNA, 19 nt, Artificial Sequence
  Description of Artificial Sequence: Synthetic oligonucleotide
cuuagggugaggaagaugu

SEQ ID NO: 2231736 - RNA, 19 nt, Artificial Sequence
  Description of Artificial Sequence: Synthetic oligonucleotide
agaacuuagugagguagac

SEQ ID NO: 2231737 - RNA, 19 nt, Artificial Sequence
  Description of Artificial Sequence: Synthetic oligonucleotide
aguugacauacuuguugac

SEQ ID NO: 2231738 - RNA, 19 nt, Artificial Sequence
  Description of Artificial Sequence: Synthetic oligonucleotide
uucucacucagucaagaau

SEQ ID NO: 2231739 - RNA, 19 nt, Artificial Sequence
  Description of Artificial Sequence: Synthetic oligonucleotide
aguucugggaacacuacuc

SEQ ID NO: 2231740 - RNA, 19 nt, Artificial Sequence
  Description of Artificial Sequence: Synthetic oligonucleotide
aaauagccagaaagugacc

SEQ ID NO: 2231741 - RNA, 19 nt, Artificial Sequence
  Description of Artificial Sequence: Synthetic oligonucleotide
aguuuauguuacaaaacug

SEQ ID NO: 2231742 - RNA, 19 nt, Artificial Sequence
  Description of Artificial Sequence: Synthetic oligonucleotide
agaauuugucuuuguguug

SEQ ID NO: 2231743 - RNA, 19 nt, Artificial Sequence
  Description of Artificial Sequence: Synthetic oligonucleotide
aaaucagagcggaggaguc

SEQ ID NO: 2231744 - RNA, 19 nt, Artificial Sequence
  Description of Artificial Sequence: Synthetic oligonucleotide
uguucccagaguccucugg

SEQ ID NO: 2231745 - RNA, 19 nt, Artificial Sequence
  Description of Artificial Sequence: Synthetic oligonucleotide
gauaccagagaagaaggca

SEQ ID NO: 2231746 - RNA, 19 nt, Artificial Sequence
  Description of Artificial Sequence: Synthetic oligonucleotide
auagccaugacaugaugaa

SEQ ID NO: 2231747 - RNA, 19 nt, Artificial Sequence
  Description of Artificial Sequence: Synthetic oligonucleotide
auuauaacacccaggcuug

SEQ ID NO: 2231748 - RNA, 19 nt, Artificial Sequence
  Description of Artificial Sequence: Synthetic oligonucleotide
cugcagagaagcaaacaag

SEQ ID NO: 2231749 - RNA, 19 nt, Artificial Sequence
  Description of Artificial Sequence: Synthetic oligonucleotide
accaacaaagcuuuuccaa

SEQ ID NO: 2231750 - RNA, 19 nt, Artificial Sequence
  Description of Artificial Sequence: Synthetic oligonucleotide
aaucagagcggaggagucg

SEQ ID NO: 2231751 - RNA, 19 nt, Artificial Sequence
  Description of Artificial Sequence: Synthetic oligonucleotide
uagguugugccaacgccag

SEQ ID NO: 2231752 - RNA, 19 nt, Artificial Sequence
  Description of Artificial Sequence: Synthetic oligonucleotide
  modified_base (4)..(4): a, c, u, g, unknown or other
uuanccuuucucacucagu

SEQ ID NO: 2231753 - RNA, 19 nt, Artificial Sequence
  Description of Artificial Sequence: Synthetic oligonucleotide
gugagguagaccugagggg

SEQ ID NO: 2231754 - RNA, 19 nt, Artificial Sequence
  Description of Artificial Sequence: Synthetic oligonucleotide
  modified_base (9)..(9): a, c, u, g, unknown or other
uggguuuanccuuucucac

SEQ ID NO: 2231755 - RNA, 19 nt, Artificial Sequence
  Description of Artificial Sequence: Synthetic oligonucleotide
acaauggagugggugaagg

SEQ ID NO: 2231756 - RNA, 19 nt, Artificial Sequence
  Description of Artificial Sequence: Synthetic oligonucleotide
ucccugauacaauggagug

SEQ ID NO: 2231757 - RNA, 19 nt, Artificial Sequence
  Description of Artificial Sequence: Synthetic oligonucleotide
ugacaugaugaacaaggua

SEQ ID NO: 2231758 - RNA, 19 nt, Artificial Sequence
  Description of Artificial Sequence: Synthetic oligonucleotide
ucuaggccgacuccuccgg

SEQ ID NO: 2231759 - RNA, 19 nt, Artificial Sequence
  Description of Artificial Sequence: Synthetic oligonucleotide
agauaccagagaagaaggc

SEQ ID NO: 2231760 - RNA, 19 nt, Artificial Sequence
  Description of Artificial Sequence: Synthetic oligonucleotide
uaccagagaagaaggcacc

SEQ ID NO: 2231761 - RNA, 19 nt, Artificial Sequence
  Description of Artificial Sequence: Synthetic oligonucleotide
  modified_base (7)..(7): a, c, u, g, unknown or other
gguuuanccuuucucacuc

SEQ ID NO: 2231762 - RNA, 19 nt, Artificial Sequence
  Description of Artificial Sequence: Synthetic oligonucleotide
  modified_base (2)..(2): a, c, u, g, unknown or other
anccuuucucacucaguca

SEQ ID NO: 2231763 - RNA, 19 nt, Artificial Sequence
  Description of Artificial Sequence: Synthetic oligonucleotide
gacauacuuguugacccgg

SEQ ID NO: 2231764 - RNA, 19 nt, Artificial Sequence
  Description of Artificial Sequence: Synthetic oligonucleotide
caccaguagcguuaagacg

SEQ ID NO: 2231765 - RNA, 19 nt, Artificial Sequence
  Description of Artificial Sequence: Synthetic oligonucleotide
cuguccgcccucuaggccg

SEQ ID NO: 2231766 - RNA, 19 nt, Artificial Sequence
  Description of Artificial Sequence: Synthetic oligonucleotide
ugucguggaugaaguaucc

SEQ ID NO: 2231767 - RNA, 19 nt, Artificial Sequence
  Description of Artificial Sequence: Synthetic oligonucleotide
aaggagacgaguagguugu

SEQ ID NO: 2231768 - RNA, 19 nt, Artificial Sequence
  Description of Artificial Sequence: Synthetic oligonucleotide
gaacaagguauucccaaga

SEQ ID NO: 2231769 - RNA, 19 nt, Artificial Sequence
  Description of Artificial Sequence: Synthetic oligonucleotide
guuuauguuacaaaacugu

SEQ ID NO: 2231770 - RNA, 19 nt, Artificial Sequence
  Description of Artificial Sequence: Synthetic oligonucleotide
acacguucagggcagaaau

SEQ ID NO: 2231771 - RNA, 19 nt, Artificial Sequence
  Description of Artificial Sequence: Synthetic oligonucleotide
aagguauucccaagaagcu

SEQ ID NO: 2231772 - RNA, 19 nt, Artificial Sequence
  Description of Artificial Sequence: Synthetic oligonucleotide
agaaaguacaugaccaagu

SEQ ID NO: 2231773 - RNA, 19 nt, Artificial Sequence
  Description of Artificial Sequence: Synthetic oligonucleotide
cauagccaugacaugauga

SEQ ID NO: 2231774 - RNA, 19 nt, Artificial Sequence
  Description of Artificial Sequence: Synthetic oligonucleotide
ugaggaucaucaaguccag

SEQ ID NO: 2231775 - RNA, 19 nt, Artificial Sequence
  Description of Artificial Sequence: Synthetic oligonucleotide
cuuuguguuggcgucuggg

SEQ ID NO: 2231776 - RNA, 19 nt, Artificial Sequence
  Description of Artificial Sequence: Synthetic oligonucleotide
caugaccaaguugacauac

SEQ ID NO: 2231777 - RNA, 19 nt, Artificial Sequence
  Description of Artificial Sequence: Synthetic oligonucleotide
aguagcguuaagacgccac

SEQ ID NO: 2231778 - RNA, 19 nt, Artificial Sequence
  Description of Artificial Sequence: Synthetic oligonucleotide
gagucgagaaaaguagaug

SEQ ID NO: 2231779 - RNA, 19 nt, Artificial Sequence
  Description of Artificial Sequence: Synthetic oligonucleotide
cauaugcacagcagugccc

SEQ ID NO: 2231780 - RNA, 19 nt, Artificial Sequence
  Description of Artificial Sequence: Synthetic oligonucleotide
agagaaaguacaugaccaa

SEQ ID NO: 2231781 - RNA, 19 nt, Artificial Sequence
  Description of Artificial Sequence: Synthetic oligonucleotide
uuaagacgccaccaccaac

SEQ ID NO: 2231782 - RNA, 19 nt, Artificial Sequence
  Description of Artificial Sequence: Synthetic oligonucleotide
gggaacacuacucagucuc

SEQ ID NO: 2231783 - RNA, 19 nt, Artificial Sequence
  Description of Artificial Sequence: Synthetic oligonucleotide
guagcguuaagacgccacc

SEQ ID NO: 2231784 - RNA, 19 nt, Artificial Sequence
  Description of Artificial Sequence: Synthetic oligonucleotide
agguauucccaagaagcuc

SEQ ID NO: 2231785 - RNA, 19 nt, Artificial Sequence
  Description of Artificial Sequence: Synthetic oligonucleotide
ucuguuuacuaaucacgau

SEQ ID NO: 2231786 - RNA, 19 nt, Artificial Sequence
  Description of Artificial Sequence: Synthetic oligonucleotide
gaacuuagugagguagacc

SEQ ID NO: 2231787 - RNA, 19 nt, Artificial Sequence
  Description of Artificial Sequence: Synthetic oligonucleotide
aaaagauaccagagaagaa

SEQ ID NO: 2231788 - RNA, 19 nt, Artificial Sequence
  Description of Artificial Sequence: Synthetic oligonucleotide
caagaauuugucuuugugu

SEQ ID NO: 2231789 - RNA, 19 nt, Artificial Sequence
  Description of Artificial Sequence: Synthetic oligonucleotide
uauaacacccaggcuugag

SEQ ID NO: 2231790 - RNA, 19 nt, Artificial Sequence
  Description of Artificial Sequence: Synthetic oligonucleotide
guugacccgguagaggagg

SEQ ID NO: 2231791 - RNA, 19 nt, Artificial Sequence
  Description of Artificial Sequence: Synthetic oligonucleotide
uugucuuuguguuggcguc

SEQ ID NO: 2231792 - RNA, 19 nt, Artificial Sequence
  Description of Artificial Sequence: Synthetic oligonucleotide
aagaacuuagugagguaga

SEQ ID NO: 2231793 - RNA, 19 nt, Artificial Sequence
  Description of Artificial Sequence: Synthetic oligonucleotide
cacgauguccaccgugucg

SEQ ID NO: 2231794 - RNA, 19 nt, Artificial Sequence
  Description of Artificial Sequence: Synthetic oligonucleotide
auaugcacagcagugccca

SEQ ID NO: 2231795 - RNA, 19 nt, Artificial Sequence
  Description of Artificial Sequence: Synthetic oligonucleotide
gagugggugaaggagacga

SEQ ID NO: 2231796 - RNA, 19 nt, Artificial Sequence
  Description of Artificial Sequence: Synthetic oligonucleotide
acaaaacuguuggcugugc

SEQ ID NO: 2231797 - RNA, 19 nt, Artificial Sequence
  Description of Artificial Sequence: Synthetic oligonucleotide
gaccaaguugacauacuug

SEQ ID NO: 2231798 - RNA, 19 nt, Artificial Sequence
  Description of Artificial Sequence: Synthetic oligonucleotide
agagcccuaguuuauguua

SEQ ID NO: 2231799 - RNA, 19 nt, Artificial Sequence
  Description of Artificial Sequence: Synthetic oligonucleotide
gaaguauccugcagagaag

SEQ ID NO: 2231800 - RNA, 19 nt, Artificial Sequence
  Description of Artificial Sequence: Synthetic oligonucleotide
acguucagggcagaaauca

SEQ ID NO: 2231801 - RNA, 19 nt, Artificial Sequence
  Description of Artificial Sequence: Synthetic oligonucleotide
gaguagguugugccaacgc

SEQ ID NO: 2231802 - RNA, 19 nt, Artificial Sequence
  Description of Artificial Sequence: Synthetic oligonucleotide
uguugacccgguagaggag

SEQ ID NO: 2231803 - RNA, 19 nt, Artificial Sequence
  Description of Artificial Sequence: Synthetic oligonucleotide
caggaagaacuuagugagg

SEQ ID NO: 2231804 - RNA, 19 nt, Artificial Sequence
  Description of Artificial Sequence: Synthetic oligonucleotide
ccagaaagugaccacgccg

SEQ ID NO: 2231805 - RNA, 19 nt, Artificial Sequence
  Description of Artificial Sequence: Synthetic oligonucleotide
aacaagcaaauagccagaa

SEQ ID NO: 2231806 - RNA, 19 nt, Artificial Sequence
  Description of Artificial Sequence: Synthetic oligonucleotide
  modified_base (14)..(14): a, c, u, g, unknown or other
uguccuggguuuanccuuu

SEQ ID NO: 2231807 - RNA, 19 nt, Artificial Sequence
  Description of Artificial Sequence: Synthetic oligonucleotide
aaauguucccagaguccuc

SEQ ID NO: 2231808 - RNA, 19 nt, Artificial Sequence
  Description of Artificial Sequence: Synthetic oligonucleotide
acccauagccaugacauga

SEQ ID NO: 2231809 - RNA, 19 nt, Artificial Sequence
  Description of Artificial Sequence: Synthetic oligonucleotide
uuucucacucagucaagaa

SEQ ID NO: 2231810 - RNA, 19 nt, Artificial Sequence
  Description of Artificial Sequence: Synthetic oligonucleotide
guuugccauaugcacagca

SEQ ID NO: 2231811 - RNA, 19 nt, Artificial Sequence
  Description of Artificial Sequence: Synthetic oligonucleotide
ucuguccgcccucuaggcc

SEQ ID NO: 2231812 - RNA, 19 nt, Artificial Sequence
  Description of Artificial Sequence: Synthetic oligonucleotide
uccugggcguuguuuaucu

SEQ ID NO: 2231813 - RNA, 19 nt, Artificial Sequence
  Description of Artificial Sequence: Synthetic oligonucleotide
gauguccaccgugucgugg

SEQ ID NO: 2231814 - RNA, 19 nt, Artificial Sequence
  Description of Artificial Sequence: Synthetic oligonucleotide
aucccugauacaauggagu

SEQ ID NO: 2231815 - RNA, 19 nt, Artificial Sequence
  Description of Artificial Sequence: Synthetic oligonucleotide
acgaguagguugugccaac

SEQ ID NO: 2231816 - RNA, 19 nt, Artificial Sequence
  Description of Artificial Sequence: Synthetic oligonucleotide
aaggcacccauagccauga

SEQ ID NO: 2231817 - RNA, 19 nt, Artificial Sequence
  Description of Artificial Sequence: Synthetic oligonucleotide
ccaaaagauaccagagaag

SEQ ID NO: 2231818 - RNA, 19 nt, Artificial Sequence
  Description of Artificial Sequence: Synthetic oligonucleotide
cucuaggccgacuccuccg

SEQ ID NO: 2231819 - RNA, 19 nt, Artificial Sequence
  Description of Artificial Sequence: Synthetic oligonucleotide
ucuuuguguuggcgucugg

SEQ ID NO: 2231820 - RNA, 19 nt, Artificial Sequence
  Description of Artificial Sequence: Synthetic oligonucleotide
gaaaucagagcggaggagu

SEQ ID NO: 2231821 - RNA, 19 nt, Artificial Sequence
  Description of Artificial Sequence: Synthetic oligonucleotide
gaggcagagcccuaguuua

SEQ ID NO: 2231822 - RNA, 19 nt, Artificial Sequence
  Description of Artificial Sequence: Synthetic oligonucleotide
agagcggaggagucgagaa

SEQ ID NO: 2231823 - RNA, 19 nt, Artificial Sequence
  Description of Artificial Sequence: Synthetic oligonucleotide
ucucuggccagcgagccac

SEQ ID NO: 2231824 - RNA, 19 nt, Artificial Sequence
  Description of Artificial Sequence: Synthetic oligonucleotide
agauccugggcguuguuua

SEQ ID NO: 2231825 - RNA, 19 nt, Artificial Sequence
  Description of Artificial Sequence: Synthetic oligonucleotide
uggccagcgagccacgauc

SEQ ID NO: 2231826 - RNA, 19 nt, Artificial Sequence
  Description of Artificial Sequence: Synthetic oligonucleotide
agaccugaggggccaggcg

SEQ ID NO: 2231827 - RNA, 19 nt, Artificial Sequence
  Description of Artificial Sequence: Synthetic oligonucleotide
aaaaguagaugaggaucau

SEQ ID NO: 2231828 - RNA, 19 nt, Artificial Sequence
  Description of Artificial Sequence: Synthetic oligonucleotide
gaaaguacaugaccaaguu

SEQ ID NO: 2231829 - RNA, 19 nt, Artificial Sequence
  Description of Artificial Sequence: Synthetic oligonucleotide
uucccagaguccucuggcc

SEQ ID NO: 2231830 - RNA, 19 nt, Artificial Sequence
  Description of Artificial Sequence: Synthetic oligonucleotide
ugcgcacgugagcaggcag

SEQ ID NO: 2231831 - RNA, 19 nt, Artificial Sequence
  Description of Artificial Sequence: Synthetic oligonucleotide
agacgaguagguugugcca

SEQ ID NO: 2231832 - RNA, 19 nt, Artificial Sequence
  Description of Artificial Sequence: Synthetic oligonucleotide
ucacucagucaagaauuug

SEQ ID NO: 2231833 - RNA, 19 nt, Artificial Sequence
  Description of Artificial Sequence: Synthetic oligonucleotide
uacuaaucacgauguccac

SEQ ID NO: 2231834 - RNA, 19 nt, Artificial Sequence
  Description of Artificial Sequence: Synthetic oligonucleotide
gaacacuacucagucucug

SEQ ID NO: 2231835 - RNA, 19 nt, Artificial Sequence
  Description of Artificial Sequence: Synthetic oligonucleotide
ccaccaacaaagcuuuucc

SEQ ID NO: 2231836 - RNA, 19 nt, Artificial Sequence
  Description of Artificial Sequence: Synthetic oligonucleotide
guagguugugccaacgcca

SEQ ID NO: 2231837 - RNA, 19 nt, Artificial Sequence
  Description of Artificial Sequence: Synthetic oligonucleotide
accacgccguuucaaucuc

SEQ ID NO: 2231838 - RNA, 19 nt, Artificial Sequence
  Description of Artificial Sequence: Synthetic oligonucleotide
uugcugaccuccaccagua

SEQ ID NO: 2231839 - RNA, 19 nt, Artificial Sequence
  Description of Artificial Sequence: Synthetic oligonucleotide
gagcccuaguuuauguuac

SEQ ID NO: 2231840 - RNA, 19 nt, Artificial Sequence
  Description of Artificial Sequence: Synthetic oligonucleotide
uagcguuaagacgccacca

SEQ ID NO: 2231841 - RNA, 19 nt, Artificial Sequence
  Description of Artificial Sequence: Synthetic oligonucleotide
augagcaggaugaccaaca

SEQ ID NO: 2231842 - RNA, 19 nt, Artificial Sequence
  Description of Artificial Sequence: Synthetic oligonucleotide
aacgccaggugcgcagggg

SEQ ID NO: 2231843 - RNA, 19 nt, Artificial Sequence
  Description of Artificial Sequence: Synthetic oligonucleotide
aucacgauguccaccgugu

SEQ ID NO: 2231844 - RNA, 19 nt, Artificial Sequence
  Description of Artificial Sequence: Synthetic oligonucleotide
cacucagucaagaauuugu

SEQ ID NO: 2231845 - RNA, 19 nt, Artificial Sequence
  Description of Artificial Sequence: Synthetic oligonucleotide
guuuacuaaucacgauguc

SEQ ID NO: 2231846 - RNA, 19 nt, Artificial Sequence
  Description of Artificial Sequence: Synthetic oligonucleotide
gccguuucaaucuccacca

SEQ ID NO: 2231847 - RNA, 19 nt, Artificial Sequence
  Description of Artificial Sequence: Synthetic oligonucleotide
acaagcaaauagccagaaa

SEQ ID NO: 2231848 - RNA, 19 nt, Artificial Sequence
  Description of Artificial Sequence: Synthetic oligonucleotide
ccaccaguagcguuaagac

SEQ ID NO: 2231849 - RNA, 19 nt, Artificial Sequence
  Description of Artificial Sequence: Synthetic oligonucleotide
agcggaggagucgagaaaa

SEQ ID NO: 2231850 - RNA, 19 nt, Artificial Sequence
  Description of Artificial Sequence: Synthetic oligonucleotide
aguccucuggccagcguac

SEQ ID NO: 2231851 - RNA, 19 nt, Artificial Sequence
  Description of Artificial Sequence: Synthetic oligonucleotide
augacaugaugaacaaggu

SEQ ID NO: 2231852 - RNA, 19 nt, Artificial Sequence
  Description of Artificial Sequence: Synthetic oligonucleotide
uggcgucuggggcacacgu

SEQ ID NO: 2231853 - RNA, 19 nt, Artificial Sequence
  Description of Artificial Sequence: Synthetic oligonucleotide
  modified_base (16)..(16): a, c, u, g, unknown or other
cauguccuggguuuanccu

SEQ ID NO: 2231854 - RNA, 19 nt, Artificial Sequence
  Description of Artificial Sequence: Synthetic oligonucleotide
gcaaauagccagaaaguga

SEQ ID NO: 2231855 - RNA, 19 nt, Artificial Sequence
  Description of Artificial Sequence: Synthetic oligonucleotide
cagaaagugaccacgccgu

SEQ ID NO: 2231856 - RNA, 19 nt, Artificial Sequence
  Description of Artificial Sequence: Synthetic oligonucleotide
cugucuguccgcccucuag

SEQ ID NO: 2231857 - RNA, 19 nt, Artificial Sequence
  Description of Artificial Sequence: Synthetic oligonucleotide
aucagagcggaggagucga

SEQ ID NO: 2231858 - RNA, 19 nt, Artificial Sequence
  Description of Artificial Sequence: Synthetic oligonucleotide
cuggucuguuuacuaauca

SEQ ID NO: 2231859 - RNA, 19 nt, Artificial Sequence
  Description of Artificial Sequence: Synthetic oligonucleotide
agcguacugcaggaagaac

SEQ ID NO: 2231860 - RNA, 19 nt, Artificial Sequence
  Description of Artificial Sequence: Synthetic oligonucleotide
  modified_base (12)..(12): a, c, u, g, unknown or other
uccuggguuuanccuuucu

SEQ ID NO: 2231861 - RNA, 19 nt, Artificial Sequence
  Description of Artificial Sequence: Synthetic oligonucleotide
ucagagcggaggagucgag

SEQ ID NO: 2231862 - RNA, 19 nt, Artificial Sequence
  Description of Artificial Sequence: Synthetic oligonucleotide
gaaggcacccauagccaug

SEQ ID NO: 2231863 - RNA, 19 nt, Artificial Sequence
  Description of Artificial Sequence: Synthetic oligonucleotide
  modified_base (6)..(6): a, c, u, g, unknown or other
guuuanccuuucucacuca

SEQ ID NO: 2231864 - RNA, 19 nt, Artificial Sequence
  Description of Artificial Sequence: Synthetic oligonucleotide
agaagcaaacaagcaaaua

SEQ ID NO: 2231865 - RNA, 19 nt, Artificial Sequence
  Description of Artificial Sequence: Synthetic oligonucleotide
guuaagacgccaccaccaa

SEQ ID NO: 2231866 - RNA, 19 nt, Artificial Sequence
  Description of Artificial Sequence: Synthetic oligonucleotide
  modified_base (17)..(17): a, c, u, g, unknown or other
gcauguccuggguuuancc

SEQ ID NO: 2231867 - RNA, 19 nt, Artificial Sequence
  Description of Artificial Sequence: Synthetic oligonucleotide
acgccguuucaaucuccac

SEQ ID NO: 2231868 - RNA, 19 nt, Artificial Sequence
  Description of Artificial Sequence: Synthetic oligonucleotide
gucuguccgcccucuaggc

SEQ ID NO: 2231869 - RNA, 19 nt, Artificial Sequence
  Description of Artificial Sequence: Synthetic oligonucleotide
gugucguggaugaaguauc

SEQ ID NO: 2231870 - RNA, 19 nt, Artificial Sequence
  Description of Artificial Sequence: Synthetic oligonucleotide
guauccugcagagaagcaa

SEQ ID NO: 2231871 - RNA, 19 nt, Artificial Sequence
  Description of Artificial Sequence: Synthetic oligonucleotide
cggaagagaaaguacauga

SEQ ID NO: 2231872 - RNA, 19 nt, Artificial Sequence
  Description of Artificial Sequence: Synthetic oligonucleotide
ccugccgucugucuguccg

SEQ ID NO: 2231873 - RNA, 19 nt, Artificial Sequence
  Description of Artificial Sequence: Synthetic oligonucleotide
auccuuagggugaggaaga

SEQ ID NO: 2231874 - RNA, 19 nt, Artificial Sequence
  Description of Artificial Sequence: Synthetic oligonucleotide
cagcauuucagggguuugc

SEQ ID NO: 2231875 - RNA, 19 nt, Artificial Sequence
  Description of Artificial Sequence: Synthetic oligonucleotide
cgagaaaaguagaugagga

SEQ ID NO: 2231876 - RNA, 19 nt, Artificial Sequence
  Description of Artificial Sequence: Synthetic oligonucleotide
guugugccaacgccaggug

SEQ ID NO: 2231877 - RNA, 19 nt, Artificial Sequence
  Description of Artificial Sequence: Synthetic oligonucleotide
gcugaccuccaccaguagc

SEQ ID NO: 2231878 - RNA, 19 nt, Artificial Sequence
  Description of Artificial Sequence: Synthetic oligonucleotide
ggaaggucaguguggcgcc

SEQ ID NO: 2231879 - RNA, 19 nt, Artificial Sequence
  Description of Artificial Sequence: Synthetic oligonucleotide
uaaucacgauguccaccgu

SEQ ID NO: 2231880 - RNA, 19 nt, Artificial Sequence
  Description of Artificial Sequence: Synthetic oligonucleotide
guacaugaccaaguugaca

SEQ ID NO: 2231881 - RNA, 19 nt, Artificial Sequence
  Description of Artificial Sequence: Synthetic oligonucleotide
cagggguuugccauaugca

SEQ ID NO: 2231882 - RNA, 19 nt, Artificial Sequence
  Description of Artificial Sequence: Synthetic oligonucleotide
uuauaacacccaggcuuga

SEQ ID NO: 2231883 - RNA, 19 nt, Artificial Sequence
  Description of Artificial Sequence: Synthetic oligonucleotide
agugcccggaaggucagug

SEQ ID NO: 2231884 - RNA, 19 nt, Artificial Sequence
  Description of Artificial Sequence: Synthetic oligonucleotide
aggugcaugcuggcccucc

SEQ ID NO: 2231885 - RNA, 19 nt, Artificial Sequence
  Description of Artificial Sequence: Synthetic oligonucleotide
caccaacaaagcuuuucca

SEQ ID NO: 2231886 - RNA, 19 nt, Artificial Sequence
  Description of Artificial Sequence: Synthetic oligonucleotide
cucagucaagaauuugucu

SEQ ID NO: 2231887 - RNA, 19 nt, Artificial Sequence
  Description of Artificial Sequence: Synthetic oligonucleotide
cacguucagggcagaaauc

SEQ ID NO: 2231888 - RNA, 19 nt, Artificial Sequence
  Description of Artificial Sequence: Synthetic oligonucleotide
caccgugucguggaugaag

SEQ ID NO: 2231889 - RNA, 19 nt, Artificial Sequence
  Description of Artificial Sequence: Synthetic oligonucleotide
gcaaacaagcaaauagcca

SEQ ID NO: 2231890 - RNA, 19 nt, Artificial Sequence
  Description of Artificial Sequence: Synthetic oligonucleotide
gaguccucuggccagcgua

SEQ ID NO: 2231891 - RNA, 19 nt, Artificial Sequence
  Description of Artificial Sequence: Synthetic oligonucleotide
uccggcaguucugggaaca

SEQ ID NO: 2231892 - RNA, 19 nt, Artificial Sequence
  Description of Artificial Sequence: Synthetic oligonucleotide
aguguggcgcccaggagca

SEQ ID NO: 2231893 - RNA, 19 nt, Artificial Sequence
  Description of Artificial Sequence: Synthetic oligonucleotide
gccagcguacugcaggaag

SEQ ID NO: 2231894 - RNA, 19 nt, Artificial Sequence
  Description of Artificial Sequence: Synthetic oligonucleotide
ccgguagaggaggagaucc

SEQ ID NO: 2231895 - RNA, 19 nt, Artificial Sequence
  Description of Artificial Sequence: Synthetic oligonucleotide
aggccgacuccuccggcag

SEQ ID NO: 2231896 - RNA, 19 nt, Artificial Sequence
  Description of Artificial Sequence: Synthetic oligonucleotide
gucggugcgcacgugagca

SEQ ID NO: 2231897 - RNA, 19 nt, Artificial Sequence
  Description of Artificial Sequence: Synthetic oligonucleotide
aagugaccacgccguuuca

SEQ ID NO: 2231898 - RNA, 19 nt, Artificial Sequence
  Description of Artificial Sequence: Synthetic oligonucleotide
cagcaugagcaggaugacc

SEQ ID NO: 2231899 - RNA, 19 nt, Artificial Sequence
  Description of Artificial Sequence: Synthetic oligonucleotide
gguauucccaagaagcucu

SEQ ID NO: 2231900 - RNA, 19 nt, Artificial Sequence
  Description of Artificial Sequence: Synthetic oligonucleotide
  modified_base (11)..(11): a, c, u, g, unknown or other
ccuggguuuanccuuucuc

SEQ ID NO: 2231901 - RNA, 19 nt, Artificial Sequence
  Description of Artificial Sequence: Synthetic oligonucleotide
accgugucguggaugaagu

SEQ ID NO: 2231902 - RNA, 19 nt, Artificial Sequence
  Description of Artificial Sequence: Synthetic oligonucleotide
auccugggcguuguuuauc

SEQ ID NO: 2231903 - RNA, 19 nt, Artificial Sequence
  Description of Artificial Sequence: Synthetic oligonucleotide
gcguuaagacgccaccacc

SEQ ID NO: 2231904 - RNA, 19 nt, Artificial Sequence
  Description of Artificial Sequence: Synthetic oligonucleotide
gucuggggcacacguucag

SEQ ID NO: 2231905 - RNA, 19 nt, Artificial Sequence
  Description of Artificial Sequence: Synthetic oligonucleotide
acuuagugagguagaccug

SEQ ID NO: 2231906 - RNA, 19 nt, Artificial Sequence
  Description of Artificial Sequence: Synthetic oligonucleotide
gaggagauccugggcguug

SEQ ID NO: 2231907 - RNA, 19 nt, Artificial Sequence
  Description of Artificial Sequence: Synthetic oligonucleotide
agcccuaguuuauguuaca

SEQ ID NO: 2231908 - RNA, 19 nt, Artificial Sequence
  Description of Artificial Sequence: Synthetic oligonucleotide
gacccgguagaggaggaga

SEQ ID NO: 2231909 - RNA, 19 nt, Artificial Sequence
  Description of Artificial Sequence: Synthetic oligonucleotide
acaugaccaaguugacaua

SEQ ID NO: 2231910 - RNA, 19 nt, Artificial Sequence
  Description of Artificial Sequence: Synthetic oligonucleotide
aaggucaguguggcgccca

SEQ ID NO: 2231911 - RNA, 19 nt, Artificial Sequence
  Description of Artificial Sequence: Synthetic oligonucleotide
ggaggagucgagaaaagua

SEQ ID NO: 2231912 - RNA, 19 nt, Artificial Sequence
  Description of Artificial Sequence: Synthetic oligonucleotide
aguauccugcagagaagca

SEQ ID NO: 2231913 - RNA, 19 nt, Artificial Sequence
  Description of Artificial Sequence: Synthetic oligonucleotide
caguaggugcaugcuggcc

SEQ ID NO: 2231914 - RNA, 19 nt, Artificial Sequence
  Description of Artificial Sequence: Synthetic oligonucleotide
agaaagugaccacgccguu

SEQ ID NO: 2231915 - RNA, 19 nt, Artificial Sequence
  Description of Artificial Sequence: Synthetic oligonucleotide
ucggugcgcacgugagcag

SEQ ID NO: 2231916 - RNA, 19 nt, Artificial Sequence
  Description of Artificial Sequence: Synthetic oligonucleotide
aggcgacagagcgcgcgcc

SEQ ID NO: 2231917 - RNA, 19 nt, Artificial Sequence
  Description of Artificial Sequence: Synthetic oligonucleotide
cguuucaaucuccaccagc

SEQ ID NO: 2231918 - RNA, 19 nt, Artificial Sequence
  Description of Artificial Sequence: Synthetic oligonucleotide
ggggugcaacaguaggugc

SEQ ID NO: 2231919 - RNA, 19 nt, Artificial Sequence
  Description of Artificial Sequence: Synthetic oligonucleotide
cgccguuucaaucuccacc

SEQ ID NO: 2231920 - RNA, 19 nt, Artificial Sequence
  Description of Artificial Sequence: Synthetic oligonucleotide
cagagcgcgcgccggagug

SEQ ID NO: 2231921 - RNA, 19 nt, Artificial Sequence
  Description of Artificial Sequence: Synthetic oligonucleotide
guagaccugaggggccagg

SEQ ID NO: 2231922 - RNA, 19 nt, Artificial Sequence
  Description of Artificial Sequence: Synthetic oligonucleotide
cacccauagccaugacaug

SEQ ID NO: 2231923 - RNA, 19 nt, Artificial Sequence
  Description of Artificial Sequence: Synthetic oligonucleotide
uguccgcccucuaggccga

SEQ ID NO: 2231924 - RNA, 19 nt, Artificial Sequence
  Description of Artificial Sequence: Synthetic oligonucleotide
cacgccguuucaaucucca

SEQ ID NO: 2231925 - RNA, 19 nt, Artificial Sequence
  Description of Artificial Sequence: Synthetic oligonucleotide
gacagagcgcgcgccggag

SEQ ID NO: 2231926 - RNA, 19 nt, Artificial Sequence
  Description of Artificial Sequence: Synthetic oligonucleotide
ggggcacacguucagggca

SEQ ID NO: 2231927 - RNA, 19 nt, Artificial Sequence
  Description of Artificial Sequence: Synthetic oligonucleotide
uuggcgucuggggcacacg

SEQ ID NO: 2231928 - RNA, 19 nt, Artificial Sequence
  Description of Artificial Sequence: Synthetic oligonucleotide
ugccgucugucuguccgcc

SEQ ID NO: 2231929 - RNA, 19 nt, Artificial Sequence
  Description of Artificial Sequence: Synthetic oligonucleotide
gucaagaauuugucuuugu

SEQ ID NO: 2231930 - RNA, 19 nt, Artificial Sequence
  Description of Artificial Sequence: Synthetic oligonucleotide
caggcgacagagcgcgcgc

SEQ ID NO: 2231931 - RNA, 19 nt, Artificial Sequence
  Description of Artificial Sequence: Synthetic oligonucleotide
ugaccuccaccaguagcgu

SEQ ID NO: 2231932 - RNA, 19 nt, Artificial Sequence
  Description of Artificial Sequence: Synthetic oligonucleotide
cggaaggucaguguggcgc

SEQ ID NO: 2231933 - RNA, 19 nt, Artificial Sequence
  Description of Artificial Sequence: Synthetic oligonucleotide
ggcacccauagccaugaca

SEQ ID NO: 2231934 - RNA, 19 nt, Artificial Sequence
  Description of Artificial Sequence: Synthetic oligonucleotide
ggagacgaguagguugugc

SEQ ID NO: 2231935 - RNA, 19 nt, Artificial Sequence
  Description of Artificial Sequence: Synthetic oligonucleotide
cugccgucugucuguccgc

SEQ ID NO: 2231936 - RNA, 19 nt, Artificial Sequence
  Description of Artificial Sequence: Synthetic oligonucleotide
auguucccagaguccucug

SEQ ID NO: 2231937 - RNA, 19 nt, Artificial Sequence
  Description of Artificial Sequence: Synthetic oligonucleotide
caacgccaggugcgcaggg

SEQ ID NO: 2231938 - RNA, 19 nt, Artificial Sequence
  Description of Artificial Sequence: Synthetic oligonucleotide
acagagcgcgcgccggagu

SEQ ID NO: 2231939 - RNA, 19 nt, Artificial Sequence
  Description of Artificial Sequence: Synthetic oligonucleotide
gagcggaggagucgagaaa

SEQ ID NO: 2231940 - RNA, 19 nt, Artificial Sequence
  Description of Artificial Sequence: Synthetic oligonucleotide
cauacuuguugacccggua

SEQ ID NO: 2231941 - RNA, 19 nt, Artificial Sequence
  Description of Artificial Sequence: Synthetic oligonucleotide
cguuaagacgccaccacca

SEQ ID NO: 2231942 - RNA, 19 nt, Artificial Sequence
  Description of Artificial Sequence: Synthetic oligonucleotide
gggguuugccauaugcaca

SEQ ID NO: 2231943 - RNA, 19 nt, Artificial Sequence
  Description of Artificial Sequence: Synthetic oligonucleotide
gcgucuggggcacacguuc

SEQ ID NO: 2231944 - RNA, 19 nt, Artificial Sequence
  Description of Artificial Sequence: Synthetic oligonucleotide
gcaggcgacagagcgcgcg

SEQ ID NO: 2231945 - RNA, 19 nt, Artificial Sequence
  Description of Artificial Sequence: Synthetic oligonucleotide
gccaacgccaggugcgcag

SEQ ID NO: 2231946 - RNA, 19 nt, Artificial Sequence
  Description of Artificial Sequence: Synthetic oligonucleotide
ggccagcgagccacgaucg

SEQ ID NO: 2231947 - RNA, 19 nt, Artificial Sequence
  Description of Artificial Sequence: Synthetic oligonucleotide
agacgccaccaccaacaaa

SEQ ID NO: 2231948 - RNA, 19 nt, Artificial Sequence
  Description of Artificial Sequence: Synthetic oligonucleotide
ccaguagcguuaagacgcc

SEQ ID NO: 2231949 - RNA, 19 nt, Artificial Sequence
  Description of Artificial Sequence: Synthetic oligonucleotide
agaguccucuggccagcgu

SEQ ID NO: 2231950 - RNA, 19 nt, Artificial Sequence
  Description of Artificial Sequence: Synthetic oligonucleotide
uccuuagggugaggaagau

SEQ ID NO: 2231951 - RNA, 19 nt, Artificial Sequence
  Description of Artificial Sequence: Synthetic oligonucleotide
  modified_base (8)..(8): a, c, u, g, unknown or other
ggguuuanccuuucucacu

SEQ ID NO: 2231952 - RNA, 19 nt, Artificial Sequence
  Description of Artificial Sequence: Synthetic oligonucleotide
gggugcaacaguaggugca

SEQ ID NO: 2231953 - RNA, 19 nt, Artificial Sequence
  Description of Artificial Sequence: Synthetic oligonucleotide
gcucuggucuguuuacuaa

SEQ ID NO: 2231954 - RNA, 19 nt, Artificial Sequence
  Description of Artificial Sequence: Synthetic oligonucleotide
cucuggccagcgagccacg

SEQ ID NO: 2231955 - RNA, 19 nt, Artificial Sequence
  Description of Artificial Sequence: Synthetic oligonucleotide
cuccuccggcaguucuggg

SEQ ID NO: 2231956 - RNA, 19 nt, Artificial Sequence
  Description of Artificial Sequence: Synthetic oligonucleotide
gcuugaggcagagcccuag

SEQ ID NO: 2231957 - RNA, 19 nt, Artificial Sequence
  Description of Artificial Sequence: Synthetic oligonucleotide
gcguacugcaggaagaacu

SEQ ID NO: 2231958 - RNA, 19 nt, Artificial Sequence
  Description of Artificial Sequence: Synthetic oligonucleotide
aggcacccauagccaugac

SEQ ID NO: 2231959 - RNA, 19 nt, Artificial Sequence
  Description of Artificial Sequence: Synthetic oligonucleotide
caaucuccaccagcauuuc

SEQ ID NO: 2231960 - RNA, 19 nt, Artificial Sequence
  Description of Artificial Sequence: Synthetic oligonucleotide
ggcagaaaucagagcggag

SEQ ID NO: 2231961 - RNA, 19 nt, Artificial Sequence
  Description of Artificial Sequence: Synthetic oligonucleotide
guuggcgucuggggcacac

SEQ ID NO: 2231962 - RNA, 19 nt, Artificial Sequence
  Description of Artificial Sequence: Synthetic oligonucleotide
gagcgcgcgccggagugcc

SEQ ID NO: 2231963 - RNA, 19 nt, Artificial Sequence
  Description of Artificial Sequence: Synthetic oligonucleotide
caucauccuuagggugagg

SEQ ID NO: 2231964 - RNA, 19 nt, Artificial Sequence
  Description of Artificial Sequence: Synthetic oligonucleotide
ggugcaugcuggcccuccc

SEQ ID NO: 2231965 - RNA, 19 nt, Artificial Sequence
  Description of Artificial Sequence: Synthetic oligonucleotide
ccauagccaugacaugaug

SEQ ID NO: 2231966 - RNA, 19 nt, Artificial Sequence
  Description of Artificial Sequence: Synthetic oligonucleotide
ggcagagcccuaguuuaug

SEQ ID NO: 2231967 - RNA, 19 nt, Artificial Sequence
  Description of Artificial Sequence: Synthetic oligonucleotide
gaaagugaccacgccguuu

SEQ ID NO: 2231968 - RNA, 19 nt, Artificial Sequence
  Description of Artificial Sequence: Synthetic oligonucleotide
cacacguucagggcagaaa

SEQ ID NO: 2231969 - RNA, 19 nt, Artificial Sequence
  Description of Artificial Sequence: Synthetic oligonucleotide
ggucggugcgcacgugagc

SEQ ID NO: 2231970 - RNA, 19 nt, Artificial Sequence
  Description of Artificial Sequence: Synthetic oligonucleotide
cccuaguuuauguuacaaa

SEQ ID NO: 2231971 - RNA, 19 nt, Artificial Sequence
  Description of Artificial Sequence: Synthetic oligonucleotide
acccgguagaggaggagau

SEQ ID NO: 2231972 - RNA, 19 nt, Artificial Sequence
  Description of Artificial Sequence: Synthetic oligonucleotide
acgugagcaggcagaggca

SEQ ID NO: 2231973 - RNA, 19 nt, Artificial Sequence
  Description of Artificial Sequence: Synthetic oligonucleotide
gugcaacaguaggugcaug

SEQ ID NO: 2231974 - RNA, 19 nt, Artificial Sequence
  Description of Artificial Sequence: Synthetic oligonucleotide
gggcacacguucagggcag

SEQ ID NO: 2231975 - RNA, 19 nt, Artificial Sequence
  Description of Artificial Sequence: Synthetic oligonucleotide
gcaguucugggaacacuac

SEQ ID NO: 2231976 - RNA, 19 nt, Artificial Sequence
  Description of Artificial Sequence: Synthetic oligonucleotide
guguuggcgucuggggcac

SEQ ID NO: 2231977 - RNA, 19 nt, Artificial Sequence
  Description of Artificial Sequence: Synthetic oligonucleotide
cucacucagucaagaauuu

SEQ ID NO: 2231978 - RNA, 19 nt, Artificial Sequence
  Description of Artificial Sequence: Synthetic oligonucleotide
ugccaacgccaggugcgca

SEQ ID NO: 2231979 - RNA, 19 nt, Artificial Sequence
  Description of Artificial Sequence: Synthetic oligonucleotide
ggagucgagaaaaguagau

SEQ ID NO: 2231980 - RNA, 19 nt, Artificial Sequence
  Description of Artificial Sequence: Synthetic oligonucleotide
cucagucucuggccagcga

SEQ ID NO: 2231981 - RNA, 19 nt, Artificial Sequence
  Description of Artificial Sequence: Synthetic oligonucleotide
aggagacgaguagguugug

SEQ ID NO: 2231982 - RNA, 19 nt, Artificial Sequence
  Description of Artificial Sequence: Synthetic oligonucleotide
gccaccaccaacaaagcuu

SEQ ID NO: 2231983 - RNA, 19 nt, Artificial Sequence
  Description of Artificial Sequence: Synthetic oligonucleotide
gcagagcccuaguuuaugu

SEQ ID NO: 2231984 - RNA, 19 nt, Artificial Sequence
  Description of Artificial Sequence: Synthetic oligonucleotide
ggugcgcacgugagcaggc

SEQ ID NO: 2231985 - RNA, 19 nt, Artificial Sequence
  Description of Artificial Sequence: Synthetic oligonucleotide
ccuuagggugaggaagaug

SEQ ID NO: 2231986 - RNA, 19 nt, Artificial Sequence
  Description of Artificial Sequence: Synthetic oligonucleotide
gggucggugcgcacgugag

SEQ ID NO: 2231987 - RNA, 19 nt, Artificial Sequence
  Description of Artificial Sequence: Synthetic oligonucleotide
cagagcggaggagucgaga

SEQ ID NO: 2231988 - RNA, 19 nt, Artificial Sequence
  Description of Artificial Sequence: Synthetic oligonucleotide
ccucccugccgucugucug

SEQ ID NO: 2231989 - RNA, 19 nt, Artificial Sequence
  Description of Artificial Sequence: Synthetic oligonucleotide
ggagugcccggaaggucag

SEQ ID NO: 2231990 - RNA, 19 nt, Artificial Sequence
  Description of Artificial Sequence: Synthetic oligonucleotide
ccacgccguuucaaucucc

SEQ ID NO: 2231991 - RNA, 19 nt, Artificial Sequence
  Description of Artificial Sequence: Synthetic oligonucleotide
gcggaggagucgagaaaag

SEQ ID NO: 2231992 - RNA, 19 nt, Artificial Sequence
  Description of Artificial Sequence: Synthetic oligonucleotide
gcgacagagcgcgcgccgg

SEQ ID NO: 2231993 - RNA, 19 nt, Artificial Sequence
  Description of Artificial Sequence: Synthetic oligonucleotide
aggcagagcccuaguuuau

SEQ ID NO: 2231994 - RNA, 19 nt, Artificial Sequence
  Description of Artificial Sequence: Synthetic oligonucleotide
gguuugccauaugcacagc

SEQ ID NO: 2231995 - RNA, 19 nt, Artificial Sequence
  Description of Artificial Sequence: Synthetic oligonucleotide
gguagaccugaggggccag

SEQ ID NO: 2231996 - RNA, 19 nt, Artificial Sequence
  Description of Artificial Sequence: Synthetic oligonucleotide
gcccuaguuuauguuacaa

SEQ ID NO: 2231997 - RNA, 19 nt, Artificial Sequence
  Description of Artificial Sequence: Synthetic oligonucleotide
cucccugccgucugucugu

SEQ ID NO: 2231998 - RNA, 19 nt, Artificial Sequence
  Description of Artificial Sequence: Synthetic oligonucleotide
ccaacgccaggugcgcagg

SEQ ID NO: 2231999 - RNA, 19 nt, Artificial Sequence
  Description of Artificial Sequence: Synthetic oligonucleotide
cggagugcccggaagguca

SEQ ID NO: 2232000 - RNA, 19 nt, Artificial Sequence
  Description of Artificial Sequence: Synthetic oligonucleotide
gucguggaugaaguauccu

SEQ ID NO: 2232001 - RNA, 19 nt, Artificial Sequence
  Description of Artificial Sequence: Synthetic oligonucleotide
ccagcauuucagggguuug

SEQ ID NO: 2232002 - RNA, 19 nt, Artificial Sequence
  Description of Artificial Sequence: Synthetic oligonucleotide
cggggugcaacaguaggug

SEQ ID NO: 2232003 - RNA, 19 nt, Artificial Sequence
  Description of Artificial Sequence: Synthetic oligonucleotide
ccguuucaaucuccaccag

SEQ ID NO: 2232004 - RNA, 19 nt, Artificial Sequence
  Description of Artificial Sequence: Synthetic oligonucleotide
cgccggagugcccggaagg

SEQ ID NO: 2232005 - RNA, 19 nt, Artificial Sequence
  Description of Artificial Sequence: Synthetic oligonucleotide
cagagcccuaguuuauguu

SEQ ID NO: 2232006 - RNA, 19 nt, Artificial Sequence
  Description of Artificial Sequence: Synthetic oligonucleotide
gcacgugagcaggcagagg

SEQ ID NO: 2232007 - RNA, 19 nt, Artificial Sequence
  Description of Artificial Sequence: Synthetic oligonucleotide
ccaggcggaagagaaagua

SEQ ID NO: 2232008 - RNA, 19 nt, Artificial Sequence
  Description of Artificial Sequence: Synthetic oligonucleotide
gugcccggaaggucagugu

SEQ ID NO: 2232009 - RNA, 19 nt, Artificial Sequence
  Description of Artificial Sequence: Synthetic oligonucleotide
cacccaggcuugaggcaga

SEQ ID NO: 2232010 - RNA, 19 nt, Artificial Sequence
  Description of Artificial Sequence: Synthetic oligonucleotide
uccgcccucuaggccgacu

SEQ ID NO: 2232011 - RNA, 19 nt, Artificial Sequence
  Description of Artificial Sequence: Synthetic oligonucleotide
caguagcguuaagacgcca

SEQ ID NO: 2232012 - RNA, 19 nt, Artificial Sequence
  Description of Artificial Sequence: Synthetic oligonucleotide
  modified_base (13)..(13): a, c, u, g, unknown or other
guccuggguuuanccuuuc

SEQ ID NO: 2232013 - RNA, 19 nt, Artificial Sequence
  Description of Artificial Sequence: Synthetic oligonucleotide
ccaccaccaacaaagcuuu

SEQ ID NO: 2232014 - RNA, 19 nt, Artificial Sequence
  Description of Artificial Sequence: Synthetic oligonucleotide
gcgccggagugcccggaag

SEQ ID NO: 2232015 - RNA, 19 nt, Artificial Sequence
  Description of Artificial Sequence: Synthetic oligonucleotide
ggugcaacaguaggugcau

SEQ ID NO: 2232016 - RNA, 19 nt, Artificial Sequence
  Description of Artificial Sequence: Synthetic oligonucleotide
agcgcgcgccggagugccc

SEQ ID NO: 2232017 - RNA, 19 nt, Artificial Sequence
  Description of Artificial Sequence: Synthetic oligonucleotide
cgcacgugagcaggcagag

SEQ ID NO: 2232018 - RNA, 19 nt, Artificial Sequence
  Description of Artificial Sequence: Synthetic oligonucleotide
gugcgcacgugagcaggca

SEQ ID NO: 2232019 - RNA, 19 nt, Artificial Sequence
  Description of Artificial Sequence: Synthetic oligonucleotide
cagcggccaggcggggugc

SEQ ID NO: 2232020 - RNA, 19 nt, Artificial Sequence
  Description of Artificial Sequence: Synthetic oligonucleotide
gcgcacgugagcaggcaga

SEQ ID NO: 2232021 - RNA, 19 nt, Artificial Sequence
  Description of Artificial Sequence: Synthetic oligonucleotide
cggugcgcacgugagcagg

SEQ ID NO: 2232022 - RNA, 19 nt, Artificial Sequence
  Description of Artificial Sequence: Synthetic oligonucleotide
gccaggcggggugcaacag

SEQ ID NO: 2232023 - RNA, 19 nt, Artificial Sequence
  Description of Artificial Sequence: Synthetic oligonucleotide
guguggcgcccaggagcag

SEQ ID NO: 2232024 - RNA, 19 nt, Artificial Sequence
  Description of Artificial Sequence: Synthetic oligonucleotide
  modified_base (18)..(18): a, c, u, g, unknown or other
cgcauguccuggguuuanc

SEQ ID NO: 2232025 - RNA, 19 nt, Artificial Sequence
  Description of Artificial Sequence: Synthetic oligonucleotide
ccaaguugacauacuuguu

SEQ ID NO: 2232026 - RNA, 19 nt, Artificial Sequence
  Description of Artificial Sequence: Synthetic oligonucleotide
cgugucguggaugaaguau

SEQ ID NO: 2232027 - RNA, 19 nt, Artificial Sequence
  Description of Artificial Sequence: Synthetic oligonucleotide
ccggcaguucugggaacac

SEQ ID NO: 2232028 - RNA, 19 nt, Artificial Sequence
  Description of Artificial Sequence: Synthetic oligonucleotide
cgcccucuaggccgacucc

SEQ ID NO: 2232029 - RNA, 19 nt, Artificial Sequence
  Description of Artificial Sequence: Synthetic oligonucleotide
ccggagugcccggaagguc

SEQ ID NO: 2232030 - RNA, 19 nt, Artificial Sequence
  Description of Artificial Sequence: Synthetic oligonucleotide
cuggccagcgagccacgau

SEQ ID NO: 2232031 - RNA, 19 nt, Artificial Sequence
  Description of Artificial Sequence: Synthetic oligonucleotide
cgucuggggcacacguuca

SEQ ID NO: 2232032 - RNA, 19 nt, Artificial Sequence
  Description of Artificial Sequence: Synthetic oligonucleotide
cgauguccaccgugucgug

SEQ ID NO: 2232033 - RNA, 19 nt, Artificial Sequence
  Description of Artificial Sequence: Synthetic oligonucleotide
cugccgcauguccuggguu

SEQ ID NO: 2232034 - RNA, 19 nt, Artificial Sequence
  Description of Artificial Sequence: Synthetic oligonucleotide
gcccucuaggccgacuccu

SEQ ID NO: 2232035 - RNA, 19 nt, Artificial Sequence
  Description of Artificial Sequence: Synthetic oligonucleotide
cccugccgucugucugucc

SEQ ID NO: 2232036 - RNA, 19 nt, Artificial Sequence
  Description of Artificial Sequence: Synthetic oligonucleotide
ggcacacguucagggcaga

SEQ ID NO: 2232037 - RNA, 19 nt, Artificial Sequence
  Description of Artificial Sequence: Synthetic oligonucleotide
gagugcccggaaggucagu

SEQ ID NO: 2232038 - RNA, 19 nt, Artificial Sequence
  Description of Artificial Sequence: Synthetic oligonucleotide
gccggagugcccggaaggu

SEQ ID NO: 2232039 - RNA, 19 nt, Artificial Sequence
  Description of Artificial Sequence: Synthetic oligonucleotide
gggcguuguuuaucuucau

SEQ ID NO: 2232040 - RNA, 19 nt, Artificial Sequence
  Description of Artificial Sequence: Synthetic oligonucleotide
gggccaggcggaagagaaa

SEQ ID NO: 2232041 - RNA, 19 nt, Artificial Sequence
  Description of Artificial Sequence: Synthetic oligonucleotide
ggcaggcgacagagcgcgc

SEQ ID NO: 2232042 - RNA, 19 nt, Artificial Sequence
  Description of Artificial Sequence: Synthetic oligonucleotide
gccgcauguccuggguuua

SEQ ID NO: 2232043 - RNA, 19 nt, Artificial Sequence
  Description of Artificial Sequence: Synthetic oligonucleotide
caccagcauuucagggguu

SEQ ID NO: 2232044 - RNA, 19 nt, Artificial Sequence
  Description of Artificial Sequence: Synthetic oligonucleotide
ccuccaccaguagcguuaa

SEQ ID NO: 2232045 - RNA, 19 nt, Artificial Sequence
  Description of Artificial Sequence: Synthetic oligonucleotide
ccgugucguggaugaagua

SEQ ID NO: 2232046 - RNA, 19 nt, Artificial Sequence
  Description of Artificial Sequence: Synthetic oligonucleotide
gccaggcggaagagaaagu

SEQ ID NO: 2232047 - RNA, 19 nt, Artificial Sequence
  Description of Artificial Sequence: Synthetic oligonucleotide
ggaggagauccugggcguu

SEQ ID NO: 2232048 - RNA, 19 nt, Artificial Sequence
  Description of Artificial Sequence: Synthetic oligonucleotide
ggccgacuccuccggcagu

SEQ ID NO: 2232049 - RNA, 19 nt, Artificial Sequence
  Description of Artificial Sequence: Synthetic oligonucleotide
ggcuugaggcagagcccua

SEQ ID NO: 2232050 - RNA, 19 nt, Artificial Sequence
  Description of Artificial Sequence: Synthetic oligonucleotide
cgacagagcgcgcgccgga

SEQ ID NO: 2232051 - RNA, 19 nt, Artificial Sequence
  Description of Artificial Sequence: Synthetic oligonucleotide
cgcgcgccggagugcccgg

SEQ ID NO: 2232052 - RNA, 19 nt, Artificial Sequence
  Description of Artificial Sequence: Synthetic oligonucleotide
gccgacuccuccggcaguu

SEQ ID NO: 2232053 - RNA, 19 nt, Artificial Sequence
  Description of Artificial Sequence: Synthetic oligonucleotide
  modified_base (19)..(19): a, c, u, g, unknown or other
ccgcauguccuggguuuan

SEQ ID NO: 2232054 - RNA, 19 nt, Artificial Sequence
  Description of Artificial Sequence: Synthetic oligonucleotide
ggcgucuggggcacacguu

SEQ ID NO: 2232055 - RNA, 19 nt, Artificial Sequence
  Description of Artificial Sequence: Synthetic oligonucleotide
cggcaguucugggaacacu

SEQ ID NO: 2232056 - RNA, 19 nt, Artificial Sequence
  Description of Artificial Sequence: Synthetic oligonucleotide
gcggccaggcggggugcaa

SEQ ID NO: 2232057 - RNA, 19 nt, Artificial Sequence
  Description of Artificial Sequence: Synthetic oligonucleotide
ccaccgugucguggaugaa

SEQ ID NO: 2232058 - RNA, 19 nt, Artificial Sequence
  Description of Artificial Sequence: Synthetic oligonucleotide
gcgcgccggagugcccgga

SEQ ID NO: 2232059 - RNA, 19 nt, Artificial Sequence
  Description of Artificial Sequence: Synthetic oligonucleotide
cgcgccggagugcccggaa

SEQ ID NO: 2232060 - RNA, 19 nt, Artificial Sequence
  Description of Artificial Sequence: Synthetic oligonucleotide
  modified_base (1)..(1): a, c, u, g, unknown or other
nccuuucucacucagucaa

SEQ ID NO: 2232061 - RNA, 19 nt, Artificial Sequence
  Description of Artificial Sequence: Synthetic oligonucleotide
aagauagugaaguugaggg

SEQ ID NO: 2232062 - RNA, 19 nt, Artificial Sequence
  Description of Artificial Sequence: Synthetic oligonucleotide
uuugcuaaagcuaauaaug

SEQ ID NO: 2232063 - RNA, 19 nt, Artificial Sequence
  Description of Artificial Sequence: Synthetic oligonucleotide
ugucaaucaaaacagcucg

SEQ ID NO: 2232064 - RNA, 19 nt, Artificial Sequence
  Description of Artificial Sequence: Synthetic oligonucleotide
uguucauugcaucaaaagg

SEQ ID NO: 2232065 - RNA, 19 nt, Artificial Sequence
  Description of Artificial Sequence: Synthetic oligonucleotide
ucaaguuucauuauacucc

SEQ ID NO: 2232066 - RNA, 19 nt, Artificial Sequence
  Description of Artificial Sequence: Synthetic oligonucleotide
uuauacuccuguaugagcg

SEQ ID NO: 2232067 - RNA, 19 nt, Artificial Sequence
  Description of Artificial Sequence: Synthetic oligonucleotide
aaagcuaauaaugaauggg

SEQ ID NO: 2232068 - RNA, 19 nt, Artificial Sequence
  Description of Artificial Sequence: Synthetic oligonucleotide
aagguguaaggcuugacac

SEQ ID NO: 2232069 - RNA, 19 nt, Artificial Sequence
  Description of Artificial Sequence: Synthetic oligonucleotide
aaacacaucucuuaguggu

SEQ ID NO: 2232070 - RNA, 19 nt, Artificial Sequence
  Description of Artificial Sequence: Synthetic oligonucleotide
auagugauggagaugagcc

SEQ ID NO: 2232071 - RNA, 19 nt, Artificial Sequence
  Description of Artificial Sequence: Synthetic oligonucleotide
aaugguuaacaucugccag

SEQ ID NO: 2232072 - RNA, 19 nt, Artificial Sequence
  Description of Artificial Sequence: Synthetic oligonucleotide
ugagccagaaauaucagug

SEQ ID NO: 2232073 - RNA, 19 nt, Artificial Sequence
  Description of Artificial Sequence: Synthetic oligonucleotide
aaucaaaacagcucgugcu

SEQ ID NO: 2232074 - RNA, 19 nt, Artificial Sequence
  Description of Artificial Sequence: Synthetic oligonucleotide
ugccagaguauacagaagg

SEQ ID NO: 2232075 - RNA, 19 nt, Artificial Sequence
  Description of Artificial Sequence: Synthetic oligonucleotide
aauaaugaaugggagugac

SEQ ID NO: 2232076 - RNA, 19 nt, Artificial Sequence
  Description of Artificial Sequence: Synthetic oligonucleotide
cuaaagcuaauaaugaaug

SEQ ID NO: 2232077 - RNA, 19 nt, Artificial Sequence
  Description of Artificial Sequence: Synthetic oligonucleotide
ucuuguagagaccucauga

SEQ ID NO: 2232078 - RNA, 19 nt, Artificial Sequence
  Description of Artificial Sequence: Synthetic oligonucleotide
uguuacaguuuccugagcc

SEQ ID NO: 2232079 - RNA, 19 nt, Artificial Sequence
  Description of Artificial Sequence: Synthetic oligonucleotide
gauuccaggaaacaauugc

SEQ ID NO: 2232080 - RNA, 19 nt, Artificial Sequence
  Description of Artificial Sequence: Synthetic oligonucleotide
aauguuguucauugcauca

SEQ ID NO: 2232081 - RNA, 19 nt, Artificial Sequence
  Description of Artificial Sequence: Synthetic oligonucleotide
cuaauaaugaaugggagug

SEQ ID NO: 2232082 - RNA, 19 nt, Artificial Sequence
  Description of Artificial Sequence: Synthetic oligonucleotide
augaaggugggcuucacac

SEQ ID NO: 2232083 - RNA, 19 nt, Artificial Sequence
  Description of Artificial Sequence: Synthetic oligonucleotide
auucacuacuccuucuucc

SEQ ID NO: 2232084 - RNA, 19 nt, Artificial Sequence
  Description of Artificial Sequence: Synthetic oligonucleotide
ucagggaucccucaaaucu

SEQ ID NO: 2232085 - RNA, 19 nt, Artificial Sequence
  Description of Artificial Sequence: Synthetic oligonucleotide
gaagauauucuuccuuugg

SEQ ID NO: 2232086 - RNA, 19 nt, Artificial Sequence
  Description of Artificial Sequence: Synthetic oligonucleotide
uguaugagcgcugacagag

SEQ ID NO: 2232087 - RNA, 19 nt, Artificial Sequence
  Description of Artificial Sequence: Synthetic oligonucleotide
aucaaaaggcuucuugugg

SEQ ID NO: 2232088 - RNA, 19 nt, Artificial Sequence
  Description of Artificial Sequence: Synthetic oligonucleotide
uguacgaccaccgacuggg

SEQ ID NO: 2232089 - RNA, 19 nt, Artificial Sequence
  Description of Artificial Sequence: Synthetic oligonucleotide
gaaguugcuuauugcaucg

SEQ ID NO: 2232090 - RNA, 19 nt, Artificial Sequence
  Description of Artificial Sequence: Synthetic oligonucleotide
ucaacuugcagauagugau

SEQ ID NO: 2232091 - RNA, 19 nt, Artificial Sequence
  Description of Artificial Sequence: Synthetic oligonucleotide
uccugagccagaaauauca

SEQ ID NO: 2232092 - RNA, 19 nt, Artificial Sequence
  Description of Artificial Sequence: Synthetic oligonucleotide
uauacagaagguguaaggc

SEQ ID NO: 2232093 - RNA, 19 nt, Artificial Sequence
  Description of Artificial Sequence: Synthetic oligonucleotide
agcgccaggucccagaagc

SEQ ID NO: 2232094 - RNA, 19 nt, Artificial Sequence
  Description of Artificial Sequence: Synthetic oligonucleotide
auggagaugagccuucuuc

SEQ ID NO: 2232095 - RNA, 19 nt, Artificial Sequence
  Description of Artificial Sequence: Synthetic oligonucleotide
uguuguuugcuaaagcuaa

SEQ ID NO: 2232096 - RNA, 19 nt, Artificial Sequence
  Description of Artificial Sequence: Synthetic oligonucleotide
agaaguugcuuauugcauc

SEQ ID NO: 2232097 - RNA, 19 nt, Artificial Sequence
  Description of Artificial Sequence: Synthetic oligonucleotide
aagauauucuuccuuugga

SEQ ID NO: 2232098 - RNA, 19 nt, Artificial Sequence
  Description of Artificial Sequence: Synthetic oligonucleotide
uuguucauugcaucaaaag

SEQ ID NO: 2232099 - RNA, 19 nt, Artificial Sequence
  Description of Artificial Sequence: Synthetic oligonucleotide
ucugguccaaucuucgagg

SEQ ID NO: 2232100 - RNA, 19 nt, Artificial Sequence
  Description of Artificial Sequence: Synthetic oligonucleotide
agagcgaaaacaucugguc

SEQ ID NO: 2232101 - RNA, 19 nt, Artificial Sequence
  Description of Artificial Sequence: Synthetic oligonucleotide
ucaaaaggcuucuuguggc

SEQ ID NO: 2232102 - RNA, 19 nt, Artificial Sequence
  Description of Artificial Sequence: Synthetic oligonucleotide
agcacuuuccuccaucccg

SEQ ID NO: 2232103 - RNA, 19 nt, Artificial Sequence
  Description of Artificial Sequence: Synthetic oligonucleotide
aggaaacaauugcagagcg

SEQ ID NO: 2232104 - RNA, 19 nt, Artificial Sequence
  Description of Artificial Sequence: Synthetic oligonucleotide
uucauugcaucaaaaggcu

SEQ ID NO: 2232105 - RNA, 19 nt, Artificial Sequence
  Description of Artificial Sequence: Synthetic oligonucleotide
ucauucaaguccauauuca

SEQ ID NO: 2232106 - RNA, 19 nt, Artificial Sequence
  Description of Artificial Sequence: Synthetic oligonucleotide
guuaacaucugccagagua

SEQ ID NO: 2232107 - RNA, 19 nt, Artificial Sequence
  Description of Artificial Sequence: Synthetic oligonucleotide
acaggcuagucuuccagcc

SEQ ID NO: 2232108 - RNA, 19 nt, Artificial Sequence
  Description of Artificial Sequence: Synthetic oligonucleotide
ucugccagaguauacagaa

SEQ ID NO: 2232109 - RNA, 19 nt, Artificial Sequence
  Description of Artificial Sequence: Synthetic oligonucleotide
uagucuuccagccuucuug

SEQ ID NO: 2232110 - RNA, 19 nt, Artificial Sequence
  Description of Artificial Sequence: Synthetic oligonucleotide
uugcagagcgaaaacaucu

SEQ ID NO: 2232111 - RNA, 19 nt, Artificial Sequence
  Description of Artificial Sequence: Synthetic oligonucleotide
ugacacaagauagugaagu

SEQ ID NO: 2232112 - RNA, 19 nt, Artificial Sequence
  Description of Artificial Sequence: Synthetic oligonucleotide
acaauugcagagcgaaaac

SEQ ID NO: 2232113 - RNA, 19 nt, Artificial Sequence
  Description of Artificial Sequence: Synthetic oligonucleotide
ucaaaucucgcagagcuug

SEQ ID NO: 2232114 - RNA, 19 nt, Artificial Sequence
  Description of Artificial Sequence: Synthetic oligonucleotide
aaaaggcuucuuguggcgc

SEQ ID NO: 2232115 - RNA, 19 nt, Artificial Sequence
  Description of Artificial Sequence: Synthetic oligonucleotide
gaucccucaaaucucgcag

SEQ ID NO: 2232116 - RNA, 19 nt, Artificial Sequence
  Description of Artificial Sequence: Synthetic oligonucleotide
ucuuguggcgcuuuguuac

SEQ ID NO: 2232117 - RNA, 19 nt, Artificial Sequence
  Description of Artificial Sequence: Synthetic oligonucleotide
uaaccccuaacgcacuugg

SEQ ID NO: 2232118 - RNA, 19 nt, Artificial Sequence
  Description of Artificial Sequence: Synthetic oligonucleotide
aagcuaauaaugaauggga

SEQ ID NO: 2232119 - RNA, 19 nt, Artificial Sequence
  Description of Artificial Sequence: Synthetic oligonucleotide
aguuuccugagccagaaau

SEQ ID NO: 2232120 - RNA, 19 nt, Artificial Sequence
  Description of Artificial Sequence: Synthetic oligonucleotide
aacaauugcagagcgaaaa

SEQ ID NO: 2232121 - RNA, 19 nt, Artificial Sequence
  Description of Artificial Sequence: Synthetic oligonucleotide
cuugacacaagauagugaa

SEQ ID NO: 2232122 - RNA, 19 nt, Artificial Sequence
  Description of Artificial Sequence: Synthetic oligonucleotide
ugagggaaggaccaaguuc

SEQ ID NO: 2232123 - RNA, 19 nt, Artificial Sequence
  Description of Artificial Sequence: Synthetic oligonucleotide
ucuuagugguccuuggaga

SEQ ID NO: 2232124 - RNA, 19 nt, Artificial Sequence
  Description of Artificial Sequence: Synthetic oligonucleotide
gagcgaaaacaucuggucc

SEQ ID NO: 2232125 - RNA, 19 nt, Artificial Sequence
  Description of Artificial Sequence: Synthetic oligonucleotide
uuagccuaggcacgucugg

SEQ ID NO: 2232126 - RNA, 19 nt, Artificial Sequence
  Description of Artificial Sequence: Synthetic oligonucleotide
aacaucugguccaaucuuc

SEQ ID NO: 2232127 - RNA, 19 nt, Artificial Sequence
  Description of Artificial Sequence: Synthetic oligonucleotide
cauugcaucaaaaggcuuc

SEQ ID NO: 2232128 - RNA, 19 nt, Artificial Sequence
  Description of Artificial Sequence: Synthetic oligonucleotide
aagcacuuuccuccauccc

SEQ ID NO: 2232129 - RNA, 19 nt, Artificial Sequence
  Description of Artificial Sequence: Synthetic oligonucleotide
uggagaauuucauucacua

SEQ ID NO: 2232130 - RNA, 19 nt, Artificial Sequence
  Description of Artificial Sequence: Synthetic oligonucleotide
gaaugguuaacaucugcca

SEQ ID NO: 2232131 - RNA, 19 nt, Artificial Sequence
  Description of Artificial Sequence: Synthetic oligonucleotide
auacagaagguguaaggcu

SEQ ID NO: 2232132 - RNA, 19 nt, Artificial Sequence
  Description of Artificial Sequence: Synthetic oligonucleotide
aucucauucaaguccauau

SEQ ID NO: 2232133 - RNA, 19 nt, Artificial Sequence
  Description of Artificial Sequence: Synthetic oligonucleotide
augaaugggagugacccac

SEQ ID NO: 2232134 - RNA, 19 nt, Artificial Sequence
  Description of Artificial Sequence: Synthetic oligonucleotide
gauagugauggagaugagc

SEQ ID NO: 2232135 - RNA, 19 nt, Artificial Sequence
  Description of Artificial Sequence: Synthetic oligonucleotide
uuguagagaccucaugaac

SEQ ID NO: 2232136 - RNA, 19 nt, Artificial Sequence
  Description of Artificial Sequence: Synthetic oligonucleotide
uaaagaagauauucuuccu

SEQ ID NO: 2232137 - RNA, 19 nt, Artificial Sequence
  Description of Artificial Sequence: Synthetic oligonucleotide
agcgaaaacaucuggucca

SEQ ID NO: 2232138 - RNA, 19 nt, Artificial Sequence
  Description of Artificial Sequence: Synthetic oligonucleotide
acagcucgugcuuuuaaag

SEQ ID NO: 2232139 - RNA, 19 nt, Artificial Sequence
  Description of Artificial Sequence: Synthetic oligonucleotide
caaacacaucucuuagugg

SEQ ID NO: 2232140 - RNA, 19 nt, Artificial Sequence
  Description of Artificial Sequence: Synthetic oligonucleotide
caaucaaaacagcucgugc

SEQ ID NO: 2232141 - RNA, 19 nt, Artificial Sequence
  Description of Artificial Sequence: Synthetic oligonucleotide
gacugggucaucccggccg

SEQ ID NO: 2232142 - RNA, 19 nt, Artificial Sequence
  Description of Artificial Sequence: Synthetic oligonucleotide
gaagguguaaggcuugaca

SEQ ID NO: 2232143 - RNA, 19 nt, Artificial Sequence
  Description of Artificial Sequence: Synthetic oligonucleotide
aguugcuuauugcaucguc

SEQ ID NO: 2232144 - RNA, 19 nt, Artificial Sequence
  Description of Artificial Sequence: Synthetic oligonucleotide
aauugcagagcgaaaacau

SEQ ID NO: 2232145 - RNA, 19 nt, Artificial Sequence
  Description of Artificial Sequence: Synthetic oligonucleotide
gcugaucucauucaagucc

SEQ ID NO: 2232146 - RNA, 19 nt, Artificial Sequence
  Description of Artificial Sequence: Synthetic oligonucleotide
caagauagugaaguugagg

SEQ ID NO: 2232147 - RNA, 19 nt, Artificial Sequence
  Description of Artificial Sequence: Synthetic oligonucleotide
aguccauauucagggaucc

SEQ ID NO: 2232148 - RNA, 19 nt, Artificial Sequence
  Description of Artificial Sequence: Synthetic oligonucleotide
cugguuuccgcacugcccg

SEQ ID NO: 2232149 - RNA, 19 nt, Artificial Sequence
  Description of Artificial Sequence: Synthetic oligonucleotide
gaaggugggcuucacacac

SEQ ID NO: 2232150 - RNA, 19 nt, Artificial Sequence
  Description of Artificial Sequence: Synthetic oligonucleotide
aucugguccaaucuucgag

SEQ ID NO: 2232151 - RNA, 19 nt, Artificial Sequence
  Description of Artificial Sequence: Synthetic oligonucleotide
acguguuguuugcuaaagc

SEQ ID NO: 2232152 - RNA, 19 nt, Artificial Sequence
  Description of Artificial Sequence: Synthetic oligonucleotide
gauagugaaguugagggaa

SEQ ID NO: 2232153 - RNA, 19 nt, Artificial Sequence
  Description of Artificial Sequence: Synthetic oligonucleotide
uuucauucacuacuccuuc

SEQ ID NO: 2232154 - RNA, 19 nt, Artificial Sequence
  Description of Artificial Sequence: Synthetic oligonucleotide
ucgucauaaauuccuuucu

SEQ ID NO: 2232155 - RNA, 19 nt, Artificial Sequence
  Description of Artificial Sequence: Synthetic oligonucleotide
aaucucgcagagcuuguca

SEQ ID NO: 2232156 - RNA, 19 nt, Artificial Sequence
  Description of Artificial Sequence: Synthetic oligonucleotide
uuaacaucugccagaguau

SEQ ID NO: 2232157 - RNA, 19 nt, Artificial Sequence
  Description of Artificial Sequence: Synthetic oligonucleotide
gagggaaggaccaaguuca

SEQ ID NO: 2232158 - RNA, 19 nt, Artificial Sequence
  Description of Artificial Sequence: Synthetic oligonucleotide
uuacaguuuccugagccag

SEQ ID NO: 2232159 - RNA, 19 nt, Artificial Sequence
  Description of Artificial Sequence: Synthetic oligonucleotide
uucacacacguguuguuug

SEQ ID NO: 2232160 - RNA, 19 nt, Artificial Sequence
  Description of Artificial Sequence: Synthetic oligonucleotide
uacagaagguguaaggcuu

SEQ ID NO: 2232161 - RNA, 19 nt, Artificial Sequence
  Description of Artificial Sequence: Synthetic oligonucleotide
ucugguugaccgcagcgug

SEQ ID NO: 2232162 - RNA, 19 nt, Artificial Sequence
  Description of Artificial Sequence: Synthetic oligonucleotide
aaguccauauucagggauc

SEQ ID NO: 2232163 - RNA, 19 nt, Artificial Sequence
  Description of Artificial Sequence: Synthetic oligonucleotide
aguuccaugaaggugggcu

SEQ ID NO: 2232164 - RNA, 19 nt, Artificial Sequence
  Description of Artificial Sequence: Synthetic oligonucleotide
guucaugcugaucucauuc

SEQ ID NO: 2232165 - RNA, 19 nt, Artificial Sequence
  Description of Artificial Sequence: Synthetic oligonucleotide
ugauuccaggaaacaauug

SEQ ID NO: 2232166 - RNA, 19 nt, Artificial Sequence
  Description of Artificial Sequence: Synthetic oligonucleotide
cacucugguauccacauuc

SEQ ID NO: 2232167 - RNA, 19 nt, Artificial Sequence
  Description of Artificial Sequence: Synthetic oligonucleotide
cacacuuagccuaggcacg

SEQ ID NO: 2232168 - RNA, 19 nt, Artificial Sequence
  Description of Artificial Sequence: Synthetic oligonucleotide
uggagaugagccuucuucu

SEQ ID NO: 2232169 - RNA, 19 nt, Artificial Sequence
  Description of Artificial Sequence: Synthetic oligonucleotide
auaaugaaugggagugacc

SEQ ID NO: 2232170 - RNA, 19 nt, Artificial Sequence
  Description of Artificial Sequence: Synthetic oligonucleotide
aggcacgucuggcacaggc

SEQ ID NO: 2232171 - RNA, 19 nt, Artificial Sequence
  Description of Artificial Sequence: Synthetic oligonucleotide
uucacuacuccuucuucca

SEQ ID NO: 2232172 - RNA, 19 nt, Artificial Sequence
  Description of Artificial Sequence: Synthetic oligonucleotide
agcgugcucccucagcgcc

SEQ ID NO: 2232173 - RNA, 19 nt, Artificial Sequence
  Description of Artificial Sequence: Synthetic oligonucleotide
gagaugagccuucuucuug

SEQ ID NO: 2232174 - RNA, 19 nt, Artificial Sequence
  Description of Artificial Sequence: Synthetic oligonucleotide
aaacaucugguccaaucuu

SEQ ID NO: 2232175 - RNA, 19 nt, Artificial Sequence
  Description of Artificial Sequence: Synthetic oligonucleotide
cauuauacuccuguaugag

SEQ ID NO: 2232176 - RNA, 19 nt, Artificial Sequence
  Description of Artificial Sequence: Synthetic oligonucleotide
aguauacagaagguguaag

SEQ ID NO: 2232177 - RNA, 19 nt, Artificial Sequence
  Description of Artificial Sequence: Synthetic oligonucleotide
cuuuuaaagaagauauucu

SEQ ID NO: 2232178 - RNA, 19 nt, Artificial Sequence
  Description of Artificial Sequence: Synthetic oligonucleotide
uugacacaagauagugaag

SEQ ID NO: 2232179 - RNA, 19 nt, Artificial Sequence
  Description of Artificial Sequence: Synthetic oligonucleotide
ugcagagcgaaaacaucug

SEQ ID NO: 2232180 - RNA, 19 nt, Artificial Sequence
  Description of Artificial Sequence: Synthetic oligonucleotide
uucuuguagagaccucaug

SEQ ID NO: 2232181 - RNA, 19 nt, Artificial Sequence
  Description of Artificial Sequence: Synthetic oligonucleotide
gaccucaugaaccuuucuc

SEQ ID NO: 2232182 - RNA, 19 nt, Artificial Sequence
  Description of Artificial Sequence: Synthetic oligonucleotide
agauagugaaguugaggga

SEQ ID NO: 2232183 - RNA, 19 nt, Artificial Sequence
  Description of Artificial Sequence: Synthetic oligonucleotide
acacaagauagugaaguug

SEQ ID NO: 2232184 - RNA, 19 nt, Artificial Sequence
  Description of Artificial Sequence: Synthetic oligonucleotide
ucuugauuccaggaaacaa

SEQ ID NO: 2232185 - RNA, 19 nt, Artificial Sequence
  Description of Artificial Sequence: Synthetic oligonucleotide
agcuaauaaugaaugggag

SEQ ID NO: 2232186 - RNA, 19 nt, Artificial Sequence
  Description of Artificial Sequence: Synthetic oligonucleotide
ucaguuccaugaagguggg

SEQ ID NO: 2232187 - RNA, 19 nt, Artificial Sequence
  Description of Artificial Sequence: Synthetic oligonucleotide
ucccucaaaucucgcagag

SEQ ID NO: 2232188 - RNA, 19 nt, Artificial Sequence
  Description of Artificial Sequence: Synthetic oligonucleotide
uauacuccuguaugagcgc

SEQ ID NO: 2232189 - RNA, 19 nt, Artificial Sequence
  Description of Artificial Sequence: Synthetic oligonucleotide
acuacuccuucuuccaugu

SEQ ID NO: 2232190 - RNA, 19 nt, Artificial Sequence
  Description of Artificial Sequence: Synthetic oligonucleotide
acgucuggcacaggcaugc

SEQ ID NO: 2232191 - RNA, 19 nt, Artificial Sequence
  Description of Artificial Sequence: Synthetic oligonucleotide
aacagcucgugcuuuuaaa

SEQ ID NO: 2232192 - RNA, 19 nt, Artificial Sequence
  Description of Artificial Sequence: Synthetic oligonucleotide
agaugagccuucuucuugu

SEQ ID NO: 2232193 - RNA, 19 nt, Artificial Sequence
  Description of Artificial Sequence: Synthetic oligonucleotide
ucucgcagagcuugucagg

SEQ ID NO: 2232194 - RNA, 19 nt, Artificial Sequence
  Description of Artificial Sequence: Synthetic oligonucleotide
aucucuuagugguccuugg

SEQ ID NO: 2232195 - RNA, 19 nt, Artificial Sequence
  Description of Artificial Sequence: Synthetic oligonucleotide
caauguuguucauugcauc

SEQ ID NO: 2232196 - RNA, 19 nt, Artificial Sequence
  Description of Artificial Sequence: Synthetic oligonucleotide
uaauaaugaaugggaguga

SEQ ID NO: 2232197 - RNA, 19 nt, Artificial Sequence
  Description of Artificial Sequence: Synthetic oligonucleotide
aacacaucucuuagugguc

SEQ ID NO: 2232198 - RNA, 19 nt, Artificial Sequence
  Description of Artificial Sequence: Synthetic oligonucleotide
aaaucucgcagagcuuguc

SEQ ID NO: 2232199 - RNA, 19 nt, Artificial Sequence
  Description of Artificial Sequence: Synthetic oligonucleotide
agcucgugcuuuuaaagaa

SEQ ID NO: 2232200 - RNA, 19 nt, Artificial Sequence
  Description of Artificial Sequence: Synthetic oligonucleotide
gaaugggagugacccacag

SEQ ID NO: 2232201 - RNA, 19 nt, Artificial Sequence
  Description of Artificial Sequence: Synthetic oligonucleotide
uccuguaugagcgcugaca

SEQ ID NO: 2232202 - RNA, 19 nt, Artificial Sequence
  Description of Artificial Sequence: Synthetic oligonucleotide
uagugaaguugagggaagg

SEQ ID NO: 2232203 - RNA, 19 nt, Artificial Sequence
  Description of Artificial Sequence: Synthetic oligonucleotide
ucucuuagugguccuugga

SEQ ID NO: 2232204 - RNA, 19 nt, Artificial Sequence
  Description of Artificial Sequence: Synthetic oligonucleotide
auuccaggaaacaauugca

SEQ ID NO: 2232205 - RNA, 19 nt, Artificial Sequence
  Description of Artificial Sequence: Synthetic oligonucleotide
ggaaugguuaacaucugcc

SEQ ID NO: 2232206 - RNA, 19 nt, Artificial Sequence
  Description of Artificial Sequence: Synthetic oligonucleotide
ugguccaaucuucgagggg

SEQ ID NO: 2232207 - RNA, 19 nt, Artificial Sequence
  Description of Artificial Sequence: Synthetic oligonucleotide
ggaaauacugucaccauca

SEQ ID NO: 2232208 - RNA, 19 nt, Artificial Sequence
  Description of Artificial Sequence: Synthetic oligonucleotide
agcgcugacagagaggaca

SEQ ID NO: 2232209 - RNA, 19 nt, Artificial Sequence
  Description of Artificial Sequence: Synthetic oligonucleotide
ugggagugacccacaggcg

SEQ ID NO: 2232210 - RNA, 19 nt, Artificial Sequence
  Description of Artificial Sequence: Synthetic oligonucleotide
gggagugacccacaggcgg

SEQ ID NO: 2232211 - RNA, 19 nt, Artificial Sequence
  Description of Artificial Sequence: Synthetic oligonucleotide
caggcgguacugaacacag

SEQ ID NO: 2232212 - RNA, 19 nt, Artificial Sequence
  Description of Artificial Sequence: Synthetic oligonucleotide
accccuaacgcacuuggga

SEQ ID NO: 2232213 - RNA, 19 nt, Artificial Sequence
  Description of Artificial Sequence: Synthetic oligonucleotide
aucaaaacagcucgugcuu

SEQ ID NO: 2232214 - RNA, 19 nt, Artificial Sequence
  Description of Artificial Sequence: Synthetic oligonucleotide
agccagaaauaucagugau

SEQ ID NO: 2232215 - RNA, 19 nt, Artificial Sequence
  Description of Artificial Sequence: Synthetic oligonucleotide
ugcccgaccuguacgacca

SEQ ID NO: 2232216 - RNA, 19 nt, Artificial Sequence
  Description of Artificial Sequence: Synthetic oligonucleotide
cugacagagaggacacagc

SEQ ID NO: 2232217 - RNA, 19 nt, Artificial Sequence
  Description of Artificial Sequence: Synthetic oligonucleotide
agguguaaggcuugacaca

SEQ ID NO: 2232218 - RNA, 19 nt, Artificial Sequence
  Description of Artificial Sequence: Synthetic oligonucleotide
augagccuucuucuuguag

SEQ ID NO: 2232219 - RNA, 19 nt, Artificial Sequence
  Description of Artificial Sequence: Synthetic oligonucleotide
cagaguauacagaaggugu

SEQ ID NO: 2232220 - RNA, 19 nt, Artificial Sequence
  Description of Artificial Sequence: Synthetic oligonucleotide
acucugguauccacauucc

SEQ ID NO: 2232221 - RNA, 19 nt, Artificial Sequence
  Description of Artificial Sequence: Synthetic oligonucleotide
ccuuuaaccccuaacgcac

SEQ ID NO: 2232222 - RNA, 19 nt, Artificial Sequence
  Description of Artificial Sequence: Synthetic oligonucleotide
aguugagggaaggaccaag

SEQ ID NO: 2232223 - RNA, 19 nt, Artificial Sequence
  Description of Artificial Sequence: Synthetic oligonucleotide
acuuagccuaggcacgucu

SEQ ID NO: 2232224 - RNA, 19 nt, Artificial Sequence
  Description of Artificial Sequence: Synthetic oligonucleotide
uacaguuuccugagccaga

SEQ ID NO: 2232225 - RNA, 19 nt, Artificial Sequence
  Description of Artificial Sequence: Synthetic oligonucleotide
uccuucuuccaugucaauc

SEQ ID NO: 2232226 - RNA, 19 nt, Artificial Sequence
  Description of Artificial Sequence: Synthetic oligonucleotide
caacuugcagauagugaug

SEQ ID NO: 2232227 - RNA, 19 nt, Artificial Sequence
  Description of Artificial Sequence: Synthetic oligonucleotide
cuuguagagaccucaugaa

SEQ ID NO: 2232228 - RNA, 19 nt, Artificial Sequence
  Description of Artificial Sequence: Synthetic oligonucleotide
gaccuguacgaccaccgac

SEQ ID NO: 2232229 - RNA, 19 nt, Artificial Sequence
  Description of Artificial Sequence: Synthetic oligonucleotide
guugcuuauugcaucguca

SEQ ID NO: 2232230 - RNA, 19 nt, Artificial Sequence
  Description of Artificial Sequence: Synthetic oligonucleotide
ugcugaucucauucaaguc

SEQ ID NO: 2232231 - RNA, 19 nt, Artificial Sequence
  Description of Artificial Sequence: Synthetic oligonucleotide
aucccgucaacuugcagau

SEQ ID NO: 2232232 - RNA, 19 nt, Artificial Sequence
  Description of Artificial Sequence: Synthetic oligonucleotide
cuuagccuaggcacgucug

SEQ ID NO: 2232233 - RNA, 19 nt, Artificial Sequence
  Description of Artificial Sequence: Synthetic oligonucleotide
cacuacuccuucuuccaug

SEQ ID NO: 2232234 - RNA, 19 nt, Artificial Sequence
  Description of Artificial Sequence: Synthetic oligonucleotide
ccuguaugagcgcugacag

SEQ ID NO: 2232235 - RNA, 19 nt, Artificial Sequence
  Description of Artificial Sequence: Synthetic oligonucleotide
cuuagugguccuuggagaa

SEQ ID NO: 2232236 - RNA, 19 nt, Artificial Sequence
  Description of Artificial Sequence: Synthetic oligonucleotide
gcagagcgaaaacaucugg

SEQ ID NO: 2232237 - RNA, 19 nt, Artificial Sequence
  Description of Artificial Sequence: Synthetic oligonucleotide
agcuugucaggcugaggag

SEQ ID NO: 2232238 - RNA, 19 nt, Artificial Sequence
  Description of Artificial Sequence: Synthetic oligonucleotide
agggaucccucaaaucucg

SEQ ID NO: 2232239 - RNA, 19 nt, Artificial Sequence
  Description of Artificial Sequence: Synthetic oligonucleotide
auagugaaguugagggaag

SEQ ID NO: 2232240 - RNA, 19 nt, Artificial Sequence
  Description of Artificial Sequence: Synthetic oligonucleotide
cucgugcuuuuaaagaaga

SEQ ID NO: 2232241 - RNA, 19 nt, Artificial Sequence
  Description of Artificial Sequence: Synthetic oligonucleotide
uuccuuucugguugaccgc

SEQ ID NO: 2232242 - RNA, 19 nt, Artificial Sequence
  Description of Artificial Sequence: Synthetic oligonucleotide
auauucagggaucccucaa

SEQ ID NO: 2232243 - RNA, 19 nt, Artificial Sequence
  Description of Artificial Sequence: Synthetic oligonucleotide
uccuuucugguugaccgca

SEQ ID NO: 2232244 - RNA, 19 nt, Artificial Sequence
  Description of Artificial Sequence: Synthetic oligonucleotide
gcagcgugcucccucagcg

SEQ ID NO: 2232245 - RNA, 19 nt, Artificial Sequence
  Description of Artificial Sequence: Synthetic oligonucleotide
agugauggagaugagccuu

SEQ ID NO: 2232246 - RNA, 19 nt, Artificial Sequence
  Description of Artificial Sequence: Synthetic oligonucleotide
ggcgcuuuguuacaguuuc

SEQ ID NO: 2232247 - RNA, 19 nt, Artificial Sequence
  Description of Artificial Sequence: Synthetic oligonucleotide
cuugauuccaggaaacaau

SEQ ID NO: 2232248 - RNA, 19 nt, Artificial Sequence
  Description of Artificial Sequence: Synthetic oligonucleotide
uuuaaccccuaacgcacuu

SEQ ID NO: 2232249 - RNA, 19 nt, Artificial Sequence
  Description of Artificial Sequence: Synthetic oligonucleotide
uugagggaaggaccaaguu

SEQ ID NO: 2232250 - RNA, 19 nt, Artificial Sequence
  Description of Artificial Sequence: Synthetic oligonucleotide
gcuuauugcaucgucauaa

SEQ ID NO: 2232251 - RNA, 19 nt, Artificial Sequence
  Description of Artificial Sequence: Synthetic oligonucleotide
caggcaugcucuugguggc

SEQ ID NO: 2232252 - RNA, 19 nt, Artificial Sequence
  Description of Artificial Sequence: Synthetic oligonucleotide
cccgucaacuugcagauag

SEQ ID NO: 2232253 - RNA, 19 nt, Artificial Sequence
  Description of Artificial Sequence: Synthetic oligonucleotide
guugaccgcagcgugcucc

SEQ ID NO: 2232254 - RNA, 19 nt, Artificial Sequence
  Description of Artificial Sequence: Synthetic oligonucleotide
gggaaugguuaacaucugc

SEQ ID NO: 2232255 - RNA, 19 nt, Artificial Sequence
  Description of Artificial Sequence: Synthetic oligonucleotide
uucuuguggcgcuuuguua

SEQ ID NO: 2232256 - RNA, 19 nt, Artificial Sequence
  Description of Artificial Sequence: Synthetic oligonucleotide
uuaaccccuaacgcacuug

SEQ ID NO: 2232257 - RNA, 19 nt, Artificial Sequence
  Description of Artificial Sequence: Synthetic oligonucleotide
uuuccgcacugcccgaccu

SEQ ID NO: 2232258 - RNA, 19 nt, Artificial Sequence
  Description of Artificial Sequence: Synthetic oligonucleotide
caauugcagagcgaaaaca

SEQ ID NO: 2232259 - RNA, 19 nt, Artificial Sequence
  Description of Artificial Sequence: Synthetic oligonucleotide
agugaugagcugcuugcua

SEQ ID NO: 2232260 - RNA, 19 nt, Artificial Sequence
  Description of Artificial Sequence: Synthetic oligonucleotide
ucgugcuuuuaaagaagau

SEQ ID NO: 2232261 - RNA, 19 nt, Artificial Sequence
  Description of Artificial Sequence: Synthetic oligonucleotide
cacguguuguuugcuaaag

SEQ ID NO: 2232262 - RNA, 19 nt, Artificial Sequence
  Description of Artificial Sequence: Synthetic oligonucleotide
uuccugagccagaaauauc

SEQ ID NO: 2232263 - RNA, 19 nt, Artificial Sequence
  Description of Artificial Sequence: Synthetic oligonucleotide
ugaugagcugcuugcuauc

SEQ ID NO: 2232264 - RNA, 19 nt, Artificial Sequence
  Description of Artificial Sequence: Synthetic oligonucleotide
agugaaguugagggaagga

SEQ ID NO: 2232265 - RNA, 19 nt, Artificial Sequence
  Description of Artificial Sequence: Synthetic oligonucleotide
cugguugaccgcagcgugc

SEQ ID NO: 2232266 - RNA, 19 nt, Artificial Sequence
  Description of Artificial Sequence: Synthetic oligonucleotide
aggugggcuucacacacgu

SEQ ID NO: 2232267 - RNA, 19 nt, Artificial Sequence
  Description of Artificial Sequence: Synthetic oligonucleotide
guagagaccucaugaaccu

SEQ ID NO: 2232268 - RNA, 19 nt, Artificial Sequence
  Description of Artificial Sequence: Synthetic oligonucleotide
uaacgcacuugggagggca

SEQ ID NO: 2232269 - RNA, 19 nt, Artificial Sequence
  Description of Artificial Sequence: Synthetic oligonucleotide
aaguucaugcugaucucau

SEQ ID NO: 2232270 - RNA, 19 nt, Artificial Sequence
  Description of Artificial Sequence: Synthetic oligonucleotide
cagggaucccucaaaucuc

SEQ ID NO: 2232271 - RNA, 19 nt, Artificial Sequence
  Description of Artificial Sequence: Synthetic oligonucleotide
accuguacgaccaccgacu

SEQ ID NO: 2232272 - RNA, 19 nt, Artificial Sequence
  Description of Artificial Sequence: Synthetic oligonucleotide
agagaggacacagcuucug

SEQ ID NO: 2232273 - RNA, 19 nt, Artificial Sequence
  Description of Artificial Sequence: Synthetic oligonucleotide
cuaggcacgucuggcacag

SEQ ID NO: 2232274 - RNA, 19 nt, Artificial Sequence
  Description of Artificial Sequence: Synthetic oligonucleotide
aucacugaccacucuggua

SEQ ID NO: 2232275 - RNA, 19 nt, Artificial Sequence
  Description of Artificial Sequence: Synthetic oligonucleotide
ugacccacaggcgguacug

SEQ ID NO: 2232276 - RNA, 19 nt, Artificial Sequence
  Description of Artificial Sequence: Synthetic oligonucleotide
ucacuacuccuucuuccau

SEQ ID NO: 2232277 - RNA, 19 nt, Artificial Sequence
  Description of Artificial Sequence: Synthetic oligonucleotide
gucaacuugcagauaguga

SEQ ID NO: 2232278 - RNA, 19 nt, Artificial Sequence
  Description of Artificial Sequence: Synthetic oligonucleotide
ucaaaacagcucgugcuuu

SEQ ID NO: 2232279 - RNA, 19 nt, Artificial Sequence
  Description of Artificial Sequence: Synthetic oligonucleotide
uugaccgcagcgugcuccc

SEQ ID NO: 2232280 - RNA, 19 nt, Artificial Sequence
  Description of Artificial Sequence: Synthetic oligonucleotide
ugcuuauugcaucgucaua

SEQ ID NO: 2232281 - RNA, 19 nt, Artificial Sequence
  Description of Artificial Sequence: Synthetic oligonucleotide
cauggccacacuuagccua

SEQ ID NO: 2232282 - RNA, 19 nt, Artificial Sequence
  Description of Artificial Sequence: Synthetic oligonucleotide
gcuaauaaugaaugggagu

SEQ ID NO: 2232283 - RNA, 19 nt, Artificial Sequence
  Description of Artificial Sequence: Synthetic oligonucleotide
gaguauacagaagguguaa

SEQ ID NO: 2232284 - RNA, 19 nt, Artificial Sequence
  Description of Artificial Sequence: Synthetic oligonucleotide
caccgacugggucaucccg

SEQ ID NO: 2232285 - RNA, 19 nt, Artificial Sequence
  Description of Artificial Sequence: Synthetic oligonucleotide
agaguauacagaaggugua

SEQ ID NO: 2232286 - RNA, 19 nt, Artificial Sequence
  Description of Artificial Sequence: Synthetic oligonucleotide
gagcugcuugcuaucaaac

SEQ ID NO: 2232287 - RNA, 19 nt, Artificial Sequence
  Description of Artificial Sequence: Synthetic oligonucleotide
cagcucgugcuuuuaaaga

SEQ ID NO: 2232288 - RNA, 19 nt, Artificial Sequence
  Description of Artificial Sequence: Synthetic oligonucleotide
agccgaucugguuuccgca

SEQ ID NO: 2232289 - RNA, 19 nt, Artificial Sequence
  Description of Artificial Sequence: Synthetic oligonucleotide
caucucuuagugguccuug

SEQ ID NO: 2232290 - RNA, 19 nt, Artificial Sequence
  Description of Artificial Sequence: Synthetic oligonucleotide
cugccagaguauacagaag

SEQ ID NO: 2232291 - RNA, 19 nt, Artificial Sequence
  Description of Artificial Sequence: Synthetic oligonucleotide
aaccccuaacgcacuuggg

SEQ ID NO: 2232292 - RNA, 19 nt, Artificial Sequence
  Description of Artificial Sequence: Synthetic oligonucleotide
aaacaauugcagagcgaaa

SEQ ID NO: 2232293 - RNA, 19 nt, Artificial Sequence
  Description of Artificial Sequence: Synthetic oligonucleotide
uguggcgcuuuguuacagu

SEQ ID NO: 2232294 - RNA, 19 nt, Artificial Sequence
  Description of Artificial Sequence: Synthetic oligonucleotide
ugggcuucacacacguguu

SEQ ID NO: 2232295 - RNA, 19 nt, Artificial Sequence
  Description of Artificial Sequence: Synthetic oligonucleotide
uuguggcgcuuuguuacag

SEQ ID NO: 2232296 - RNA, 19 nt, Artificial Sequence
  Description of Artificial Sequence: Synthetic oligonucleotide
acaggcgguacugaacaca

SEQ ID NO: 2232297 - RNA, 19 nt, Artificial Sequence
  Description of Artificial Sequence: Synthetic oligonucleotide
ugggucaucccggccggcg

SEQ ID NO: 2232298 - RNA, 19 nt, Artificial Sequence
  Description of Artificial Sequence: Synthetic oligonucleotide
uagccuaggcacgucuggc

SEQ ID NO: 2232299 - RNA, 19 nt, Artificial Sequence
  Description of Artificial Sequence: Synthetic oligonucleotide
cuguacgaccaccgacugg

SEQ ID NO: 2232300 - RNA, 19 nt, Artificial Sequence
  Description of Artificial Sequence: Synthetic oligonucleotide
auacuccuguaugagcgcu

SEQ ID NO: 2232301 - RNA, 19 nt, Artificial Sequence
  Description of Artificial Sequence: Synthetic oligonucleotide
accgacugggucaucccgg

SEQ ID NO: 2232302 - RNA, 19 nt, Artificial Sequence
  Description of Artificial Sequence: Synthetic oligonucleotide
aaguugcuuauugcaucgu

SEQ ID NO: 2232303 - RNA, 19 nt, Artificial Sequence
  Description of Artificial Sequence: Synthetic oligonucleotide
cugcccgaccuguacgacc

SEQ ID NO: 2232304 - RNA, 19 nt, Artificial Sequence
  Description of Artificial Sequence: Synthetic oligonucleotide
ugguugaccgcagcgugcu

SEQ ID NO: 2232305 - RNA, 19 nt, Artificial Sequence
  Description of Artificial Sequence: Synthetic oligonucleotide
auguuguucauugcaucaa

SEQ ID NO: 2232306 - RNA, 19 nt, Artificial Sequence
  Description of Artificial Sequence: Synthetic oligonucleotide
acuugcagauagugaugga

SEQ ID NO: 2232307 - RNA, 19 nt, Artificial Sequence
  Description of Artificial Sequence: Synthetic oligonucleotide
gaaggaccaaguucaugcu

SEQ ID NO: 2232308 - RNA, 19 nt, Artificial Sequence
  Description of Artificial Sequence: Synthetic oligonucleotide
agccuaggcacgucuggca

SEQ ID NO: 2232309 - RNA, 19 nt, Artificial Sequence
  Description of Artificial Sequence: Synthetic oligonucleotide
guuguucauugcaucaaaa

SEQ ID NO: 2232310 - RNA, 19 nt, Artificial Sequence
  Description of Artificial Sequence: Synthetic oligonucleotide
ccagaguauacagaaggug

SEQ ID NO: 2232311 - RNA, 19 nt, Artificial Sequence
  Description of Artificial Sequence: Synthetic oligonucleotide
cacaggcaugcucuuggug

SEQ ID NO: 2232312 - RNA, 19 nt, Artificial Sequence
  Description of Artificial Sequence: Synthetic oligonucleotide
acacacguguuguuugcua

SEQ ID NO: 2232313 - RNA, 19 nt, Artificial Sequence
  Description of Artificial Sequence: Synthetic oligonucleotide
guguuguuugcuaaagcua

SEQ ID NO: 2232314 - RNA, 19 nt, Artificial Sequence
  Description of Artificial Sequence: Synthetic oligonucleotide
ccccuaacgcacuugggag

SEQ ID NO: 2232315 - RNA, 19 nt, Artificial Sequence
  Description of Artificial Sequence: Synthetic oligonucleotide
cacacguguuguuugcuaa

SEQ ID NO: 2232316 - RNA, 19 nt, Artificial Sequence
  Description of Artificial Sequence: Synthetic oligonucleotide
agaccucaugaaccuuucu

SEQ ID NO: 2232317 - RNA, 19 nt, Artificial Sequence
  Description of Artificial Sequence: Synthetic oligonucleotide
uccaucccgucaacuugca

SEQ ID NO: 2232318 - RNA, 19 nt, Artificial Sequence
  Description of Artificial Sequence: Synthetic oligonucleotide
agagaccucaugaaccuuu

SEQ ID NO: 2232319 - RNA, 19 nt, Artificial Sequence
  Description of Artificial Sequence: Synthetic oligonucleotide
uggcaucaaguuucauuau

SEQ ID NO: 2232320 - RNA, 19 nt, Artificial Sequence
  Description of Artificial Sequence: Synthetic oligonucleotide
uuccgcacugcccgaccug

SEQ ID NO: 2232321 - RNA, 19 nt, Artificial Sequence
  Description of Artificial Sequence: Synthetic oligonucleotide
augagcgcugacagagagg

SEQ ID NO: 2232322 - RNA, 19 nt, Artificial Sequence
  Description of Artificial Sequence: Synthetic oligonucleotide
uuccuucacauggccacac

SEQ ID NO: 2232323 - RNA, 19 nt, Artificial Sequence
  Description of Artificial Sequence: Synthetic oligonucleotide
ccuaacgcacuugggaggg

SEQ ID NO: 2232324 - RNA, 19 nt, Artificial Sequence
  Description of Artificial Sequence: Synthetic oligonucleotide
guuuccgcacugcccgacc

SEQ ID NO: 2232325 - RNA, 19 nt, Artificial Sequence
  Description of Artificial Sequence: Synthetic oligonucleotide
ugauggagaugagccuucu

SEQ ID NO: 2232326 - RNA, 19 nt, Artificial Sequence
  Description of Artificial Sequence: Synthetic oligonucleotide
ugguauccacauuccugaa

SEQ ID NO: 2232327 - RNA, 19 nt, Artificial Sequence
  Description of Artificial Sequence: Synthetic oligonucleotide
acacuuagccuaggcacgu

SEQ ID NO: 2232328 - RNA, 19 nt, Artificial Sequence
  Description of Artificial Sequence: Synthetic oligonucleotide
cccuaacgcacuugggagg

SEQ ID NO: 2232329 - RNA, 19 nt, Artificial Sequence
  Description of Artificial Sequence: Synthetic oligonucleotide
ccgaccuguacgaccaccg

SEQ ID NO: 2232330 - RNA, 19 nt, Artificial Sequence
  Description of Artificial Sequence: Synthetic oligonucleotide
uggcgcuuuguuacaguuu

SEQ ID NO: 2232331 - RNA, 19 nt, Artificial Sequence
  Description of Artificial Sequence: Synthetic oligonucleotide
cagagcgaaaacaucuggu

SEQ ID NO: 2232332 - RNA, 19 nt, Artificial Sequence
  Description of Artificial Sequence: Synthetic oligonucleotide
ccauauucagggaucccuc

SEQ ID NO: 2232333 - RNA, 19 nt, Artificial Sequence
  Description of Artificial Sequence: Synthetic oligonucleotide
gcucgugcuuuuaaagaag

SEQ ID NO: 2232334 - RNA, 19 nt, Artificial Sequence
  Description of Artificial Sequence: Synthetic oligonucleotide
ccucaaaucucgcagagcu

SEQ ID NO: 2232335 - RNA, 19 nt, Artificial Sequence
  Description of Artificial Sequence: Synthetic oligonucleotide
aaccuuucucucaguucca

SEQ ID NO: 2232336 - RNA, 19 nt, Artificial Sequence
  Description of Artificial Sequence: Synthetic oligonucleotide
acugcccgaccuguacgac

SEQ ID NO: 2232337 - RNA, 19 nt, Artificial Sequence
  Description of Artificial Sequence: Synthetic oligonucleotide
gaccacucugguauccaca

SEQ ID NO: 2232338 - RNA, 19 nt, Artificial Sequence
  Description of Artificial Sequence: Synthetic oligonucleotide
augagcugcuugcuaucaa

SEQ ID NO: 2232339 - RNA, 19 nt, Artificial Sequence
  Description of Artificial Sequence: Synthetic oligonucleotide
gagaccucaugaaccuuuc

SEQ ID NO: 2232340 - RNA, 19 nt, Artificial Sequence
  Description of Artificial Sequence: Synthetic oligonucleotide
cuuguggcgcuuuguuaca

SEQ ID NO: 2232341 - RNA, 19 nt, Artificial Sequence
  Description of Artificial Sequence: Synthetic oligonucleotide
gaucucauucaaguccaua

SEQ ID NO: 2232342 - RNA, 19 nt, Artificial Sequence
  Description of Artificial Sequence: Synthetic oligonucleotide
caaguccauauucagggau

SEQ ID NO: 2232343 - RNA, 19 nt, Artificial Sequence
  Description of Artificial Sequence: Synthetic oligonucleotide
gcacugcccgaccuguacg

SEQ ID NO: 2232344 - RNA, 19 nt, Artificial Sequence
  Description of Artificial Sequence: Synthetic oligonucleotide
ucgcagagcuugucaggcu

SEQ ID NO: 2232345 - RNA, 19 nt, Artificial Sequence
  Description of Artificial Sequence: Synthetic oligonucleotide
aaguugagggaaggaccaa

SEQ ID NO: 2232346 - RNA, 19 nt, Artificial Sequence
  Description of Artificial Sequence: Synthetic oligonucleotide
guuuccugagccagaaaua

SEQ ID NO: 2232347 - RNA, 19 nt, Artificial Sequence
  Description of Artificial Sequence: Synthetic oligonucleotide
ggaucccucaaaucucgca

SEQ ID NO: 2232348 - RNA, 19 nt, Artificial Sequence
  Description of Artificial Sequence: Synthetic oligonucleotide
accgcagcgugcucccuca

SEQ ID NO: 2232349 - RNA, 19 nt, Artificial Sequence
  Description of Artificial Sequence: Synthetic oligonucleotide
cacgucuggcacaggcaug

SEQ ID NO: 2232350 - RNA, 19 nt, Artificial Sequence
  Description of Artificial Sequence: Synthetic oligonucleotide
agauagugauggagaugag

SEQ ID NO: 2232351 - RNA, 19 nt, Artificial Sequence
  Description of Artificial Sequence: Synthetic oligonucleotide
aggcuugacacaagauagu

SEQ ID NO: 2232352 - RNA, 19 nt, Artificial Sequence
  Description of Artificial Sequence: Synthetic oligonucleotide
gccacacuuagccuaggca

SEQ ID NO: 2232353 - RNA, 19 nt, Artificial Sequence
  Description of Artificial Sequence: Synthetic oligonucleotide
agcagccgaucugguuucc

SEQ ID NO: 2232354 - RNA, 19 nt, Artificial Sequence
  Description of Artificial Sequence: Synthetic oligonucleotide
gucuggcacaggcaugcuc

SEQ ID NO: 2232355 - RNA, 19 nt, Artificial Sequence
  Description of Artificial Sequence: Synthetic oligonucleotide
agcuucugcaaaagcacuu

SEQ ID NO: 2232356 - RNA, 19 nt, Artificial Sequence
  Description of Artificial Sequence: Synthetic oligonucleotide
gguggcaucaaguuucauu

SEQ ID NO: 2232357 - RNA, 19 nt, Artificial Sequence
  Description of Artificial Sequence: Synthetic oligonucleotide
uuccuccaucccgucaacu

SEQ ID NO: 2232358 - RNA, 19 nt, Artificial Sequence
  Description of Artificial Sequence: Synthetic oligonucleotide
cagcgugcucccucagcgc

SEQ ID NO: 2232359 - RNA, 19 nt, Artificial Sequence
  Description of Artificial Sequence: Synthetic oligonucleotide
cuguaugagcgcugacaga

SEQ ID NO: 2232360 - RNA, 19 nt, Artificial Sequence
  Description of Artificial Sequence: Synthetic oligonucleotide
cagagcuugucaggcugag

SEQ ID NO: 2232361 - RNA, 19 nt, Artificial Sequence
  Description of Artificial Sequence: Synthetic oligonucleotide
gaugagccuucuucuugua

SEQ ID NO: 2232362 - RNA, 19 nt, Artificial Sequence
  Description of Artificial Sequence: Synthetic oligonucleotide
gaccaaguucaugcugauc

SEQ ID NO: 2232363 - RNA, 19 nt, Artificial Sequence
  Description of Artificial Sequence: Synthetic oligonucleotide
cacugcccgaccuguacga

SEQ ID NO: 2232364 - RNA, 19 nt, Artificial Sequence
  Description of Artificial Sequence: Synthetic oligonucleotide
guccauauucagggauccc

SEQ ID NO: 2232365 - RNA, 19 nt, Artificial Sequence
  Description of Artificial Sequence: Synthetic oligonucleotide
ugguuuccgcacugcccga

SEQ ID NO: 2232366 - RNA, 19 nt, Artificial Sequence
  Description of Artificial Sequence: Synthetic oligonucleotide
gaccgcagcgugcucccuc

SEQ ID NO: 2232367 - RNA, 19 nt, Artificial Sequence
  Description of Artificial Sequence: Synthetic oligonucleotide
gcuugacacaagauaguga

SEQ ID NO: 2232368 - RNA, 19 nt, Artificial Sequence
  Description of Artificial Sequence: Synthetic oligonucleotide
ccacaggcgguacugaaca

SEQ ID NO: 2232369 - RNA, 19 nt, Artificial Sequence
  Description of Artificial Sequence: Synthetic oligonucleotide
ggaaacaauugcagagcga

SEQ ID NO: 2232370 - RNA, 19 nt, Artificial Sequence
  Description of Artificial Sequence: Synthetic oligonucleotide
gggucaucccggccggcgg

SEQ ID NO: 2232371 - RNA, 19 nt, Artificial Sequence
  Description of Artificial Sequence: Synthetic oligonucleotide
cuuuaaccccuaacgcacu

SEQ ID NO: 2232372 - RNA, 19 nt, Artificial Sequence
  Description of Artificial Sequence: Synthetic oligonucleotide
cguguuguuugcuaaagcu

SEQ ID NO: 2232373 - RNA, 19 nt, Artificial Sequence
  Description of Artificial Sequence: Synthetic oligonucleotide
gccuaggcacgucuggcac

SEQ ID NO: 2232374 - RNA, 19 nt, Artificial Sequence
  Description of Artificial Sequence: Synthetic oligonucleotide
accuuucucucaguuccau

SEQ ID NO: 2232375 - RNA, 19 nt, Artificial Sequence
  Description of Artificial Sequence: Synthetic oligonucleotide
cuaacgcacuugggagggc

SEQ ID NO: 2232376 - RNA, 19 nt, Artificial Sequence
  Description of Artificial Sequence: Synthetic oligonucleotide
gucaaucaaaacagcucgu

SEQ ID NO: 2232377 - RNA, 19 nt, Artificial Sequence
  Description of Artificial Sequence: Synthetic oligonucleotide
cacuuuccuccaucccguc

SEQ ID NO: 2232378 - RNA, 19 nt, Artificial Sequence
  Description of Artificial Sequence: Synthetic oligonucleotide
gggaaggaccaaguucaug

SEQ ID NO: 2232379 - RNA, 19 nt, Artificial Sequence
  Description of Artificial Sequence: Synthetic oligonucleotide
uaucagugaugagcugcuu

SEQ ID NO: 2232380 - RNA, 19 nt, Artificial Sequence
  Description of Artificial Sequence: Synthetic oligonucleotide
cgucaacuugcagauagug

SEQ ID NO: 2232381 - RNA, 19 nt, Artificial Sequence
  Description of Artificial Sequence: Synthetic oligonucleotide
guuccaugaaggugggcuu

SEQ ID NO: 2232382 - RNA, 19 nt, Artificial Sequence
  Description of Artificial Sequence: Synthetic oligonucleotide
caucgucauaaauuccuuu

SEQ ID NO: 2232383 - RNA, 19 nt, Artificial Sequence
  Description of Artificial Sequence: Synthetic oligonucleotide
guaugagcgcugacagaga

SEQ ID NO: 2232384 - RNA, 19 nt, Artificial Sequence
  Description of Artificial Sequence: Synthetic oligonucleotide
guacugaacacaggcuagu

SEQ ID NO: 2232385 - RNA, 19 nt, Artificial Sequence
  Description of Artificial Sequence: Synthetic oligonucleotide
cccacaggcgguacugaac

SEQ ID NO: 2232386 - RNA, 19 nt, Artificial Sequence
  Description of Artificial Sequence: Synthetic oligonucleotide
ccuguacgaccaccgacug

SEQ ID NO: 2232387 - RNA, 19 nt, Artificial Sequence
  Description of Artificial Sequence: Synthetic oligonucleotide
gcagcagccgaucugguuu

SEQ ID NO: 2232388 - RNA, 19 nt, Artificial Sequence
  Description of Artificial Sequence: Synthetic oligonucleotide
cucugguauccacauuccu

SEQ ID NO: 2232389 - RNA, 19 nt, Artificial Sequence
  Description of Artificial Sequence: Synthetic oligonucleotide
guggcgcuuuguuacaguu

SEQ ID NO: 2232390 - RNA, 19 nt, Artificial Sequence
  Description of Artificial Sequence: Synthetic oligonucleotide
ucaucccggccggcggacc

SEQ ID NO: 2232391 - RNA, 19 nt, Artificial Sequence
  Description of Artificial Sequence: Synthetic oligonucleotide
cagaagguguaaggcuuga

SEQ ID NO: 2232392 - RNA, 19 nt, Artificial Sequence
  Description of Artificial Sequence: Synthetic oligonucleotide
ccgacugggucaucccggc

SEQ ID NO: 2232393 - RNA, 19 nt, Artificial Sequence
  Description of Artificial Sequence: Synthetic oligonucleotide
ggggaaugguuaacaucug

SEQ ID NO: 2232394 - RNA, 19 nt, Artificial Sequence
  Description of Artificial Sequence: Synthetic oligonucleotide
gauggagaugagccuucuu

SEQ ID NO: 2232395 - RNA, 19 nt, Artificial Sequence
  Description of Artificial Sequence: Synthetic oligonucleotide
caguuccaugaaggugggc

SEQ ID NO: 2232396 - RNA, 19 nt, Artificial Sequence
  Description of Artificial Sequence: Synthetic oligonucleotide
gcagccgaucugguuuccg

SEQ ID NO: 2232397 - RNA, 19 nt, Artificial Sequence
  Description of Artificial Sequence: Synthetic oligonucleotide
guuguuugcuaaagcuaau

SEQ ID NO: 2232398 - RNA, 19 nt, Artificial Sequence
  Description of Artificial Sequence: Synthetic oligonucleotide
caugaaccuuucucucagu

SEQ ID NO: 2232399 - RNA, 19 nt, Artificial Sequence
  Description of Artificial Sequence: Synthetic oligonucleotide
uaggcacgucuggcacagg

SEQ ID NO: 2232400 - RNA, 19 nt, Artificial Sequence
  Description of Artificial Sequence: Synthetic oligonucleotide
cagcgccaggucccagaag

SEQ ID NO: 2232401 - RNA, 19 nt, Artificial Sequence
  Description of Artificial Sequence: Synthetic oligonucleotide
cacuuagccuaggcacguc

SEQ ID NO: 2232402 - RNA, 19 nt, Artificial Sequence
  Description of Artificial Sequence: Synthetic oligonucleotide
caucccggccggcggacca

SEQ ID NO: 2232403 - RNA, 19 nt, Artificial Sequence
  Description of Artificial Sequence: Synthetic oligonucleotide
agugguccuuggagaauuu

SEQ ID NO: 2232404 - RNA, 19 nt, Artificial Sequence
  Description of Artificial Sequence: Synthetic oligonucleotide
ggagaugagccuucuucuu

SEQ ID NO: 2232405 - RNA, 19 nt, Artificial Sequence
  Description of Artificial Sequence: Synthetic oligonucleotide
gguuuccgcacugcccgac

SEQ ID NO: 2232406 - RNA, 19 nt, Artificial Sequence
  Description of Artificial Sequence: Synthetic oligonucleotide
cgguacugaacacaggcua

SEQ ID NO: 2232407 - RNA, 19 nt, Artificial Sequence
  Description of Artificial Sequence: Synthetic oligonucleotide
gggaucccucaaaucucgc

SEQ ID NO: 2232408 - RNA, 19 nt, Artificial Sequence
  Description of Artificial Sequence: Synthetic oligonucleotide
ggucaucccggccggcgga

SEQ ID NO: 2232409 - RNA, 19 nt, Artificial Sequence
  Description of Artificial Sequence: Synthetic oligonucleotide
agggaaggaccaaguucau

SEQ ID NO: 2232410 - RNA, 19 nt, Artificial Sequence
  Description of Artificial Sequence: Synthetic oligonucleotide
gagugacccacaggcggua

SEQ ID NO: 2232411 - RNA, 19 nt, Artificial Sequence
  Description of Artificial Sequence: Synthetic oligonucleotide
gccagaguauacagaaggu

SEQ ID NO: 2232412 - RNA, 19 nt, Artificial Sequence
  Description of Artificial Sequence: Synthetic oligonucleotide
aucccggccggcggaccag

SEQ ID NO: 2232413 - RNA, 19 nt, Artificial Sequence
  Description of Artificial Sequence: Synthetic oligonucleotide
ccaucccgucaacuugcag

SEQ ID NO: 2232414 - RNA, 19 nt, Artificial Sequence
  Description of Artificial Sequence: Synthetic oligonucleotide
gagcgcugacagagaggac

SEQ ID NO: 2232415 - RNA, 19 nt, Artificial Sequence
  Description of Artificial Sequence: Synthetic oligonucleotide
gcagagcuugucaggcuga

SEQ ID NO: 2232416 - RNA, 19 nt, Artificial Sequence
  Description of Artificial Sequence: Synthetic oligonucleotide
gcgcuuuguuacaguuucc

SEQ ID NO: 2232417 - RNA, 19 nt, Artificial Sequence
  Description of Artificial Sequence: Synthetic oligonucleotide
gcgaaaacaucugguccaa

SEQ ID NO: 2232418 - RNA, 19 nt, Artificial Sequence
  Description of Artificial Sequence: Synthetic oligonucleotide
caguuuccugagccagaaa

SEQ ID NO: 2232419 - RNA, 19 nt, Artificial Sequence
  Description of Artificial Sequence: Synthetic oligonucleotide
ugaccgcagcgugcucccu

SEQ ID NO: 2232420 - RNA, 19 nt, Artificial Sequence
  Description of Artificial Sequence: Synthetic oligonucleotide
ucccgucaacuugcagaua

SEQ ID NO: 2232421 - RNA, 19 nt, Artificial Sequence
  Description of Artificial Sequence: Synthetic oligonucleotide
ggugggcuucacacacgug

SEQ ID NO: 2232422 - RNA, 19 nt, Artificial Sequence
  Description of Artificial Sequence: Synthetic oligonucleotide
ggagugacccacaggcggu

SEQ ID NO: 2232423 - RNA, 19 nt, Artificial Sequence
  Description of Artificial Sequence: Synthetic oligonucleotide
cacacacguguuguuugcu

SEQ ID NO: 2232424 - RNA, 19 nt, Artificial Sequence
  Description of Artificial Sequence: Synthetic oligonucleotide
gguuaacaucugccagagu

SEQ ID NO: 2232425 - RNA, 19 nt, Artificial Sequence
  Description of Artificial Sequence: Synthetic oligonucleotide
cgcagcgugcucccucagc

SEQ ID NO: 2232426 - RNA, 19 nt, Artificial Sequence
  Description of Artificial Sequence: Synthetic oligonucleotide
gguugaccgcagcgugcuc

SEQ ID NO: 2232427 - RNA, 19 nt, Artificial Sequence
  Description of Artificial Sequence: Synthetic oligonucleotide
ccggccggcggaccagcag

SEQ ID NO: 2232428 - RNA, 19 nt, Artificial Sequence
  Description of Artificial Sequence: Synthetic oligonucleotide
cgacugggucaucccggcc

SEQ ID NO: 2232429 - RNA, 19 nt, Artificial Sequence
  Description of Artificial Sequence: Synthetic oligonucleotide
gcuagucuuccagccuucu

SEQ ID NO: 2232430 - RNA, 19 nt, Artificial Sequence
  Description of Artificial Sequence: Synthetic oligonucleotide
guacgaccaccgacugggu

SEQ ID NO: 2232431 - RNA, 19 nt, Artificial Sequence
  Description of Artificial Sequence: Synthetic oligonucleotide
gcgccaggucccagaagca

SEQ ID NO: 2232432 - RNA, 19 nt, Artificial Sequence
  Description of Artificial Sequence: Synthetic oligonucleotide
cgaccuguacgaccaccga

SEQ ID NO: 2232433 - RNA, 19 nt, Artificial Sequence
  Description of Artificial Sequence: Synthetic oligonucleotide
ccgucaacuugcagauagu

SEQ ID NO: 2232434 - RNA, 19 nt, Artificial Sequence
  Description of Artificial Sequence: Synthetic oligonucleotide
gaccaccgacugggucauc

SEQ ID NO: 2232435 - RNA, 19 nt, Artificial Sequence
  Description of Artificial Sequence: Synthetic oligonucleotide
gcccgaccuguacgaccac

SEQ ID NO: 2232436 - RNA, 19 nt, Artificial Sequence
  Description of Artificial Sequence: Synthetic oligonucleotide
ccgcagcgugcucccucag

SEQ ID NO: 2232437 - RNA, 19 nt, Artificial Sequence
  Description of Artificial Sequence: Synthetic oligonucleotide
cccucagcgccagguccca

SEQ ID NO: 2232438 - RNA, 19 nt, Artificial Sequence
  Description of Artificial Sequence: Synthetic oligonucleotide
cgcugacagagaggacaca

SEQ ID NO: 2232439 - RNA, 19 nt, Artificial Sequence
  Description of Artificial Sequence: Synthetic oligonucleotide
cccggccggcggaccagca

SEQ ID NO: 2232440 - RNA, 19 nt, Artificial Sequence
  Description of Artificial Sequence: Synthetic oligonucleotide
ccacucugguauccacauu

SEQ ID NO: 2232441 - RNA, 19 nt, Artificial Sequence
  Description of Artificial Sequence: Synthetic oligonucleotide
cgaaaacaucugguccaau

SEQ ID NO: 2232442 - RNA, 19 nt, Artificial Sequence
  Description of Artificial Sequence: Synthetic oligonucleotide
cgaccaccgacugggucau

SEQ ID NO: 2232443 - RNA, 19 nt, Artificial Sequence
  Description of Artificial Sequence: Synthetic oligonucleotide
aaaguaaaaugacacuggc

SEQ ID NO: 2232444 - RNA, 19 nt, Artificial Sequence
  Description of Artificial Sequence: Synthetic oligonucleotide
aaauuagucagccucgguc

SEQ ID NO: 2232445 - RNA, 19 nt, Artificial Sequence
  Description of Artificial Sequence: Synthetic oligonucleotide
ucuggaucuaccuauacgg

SEQ ID NO: 2232446 - RNA, 19 nt, Artificial Sequence
  Description of Artificial Sequence: Synthetic oligonucleotide
aagaguaaaacacuuucag

SEQ ID NO: 2232447 - RNA, 19 nt, Artificial Sequence
  Description of Artificial Sequence: Synthetic oligonucleotide
ugagaaucagcucaaaagc

SEQ ID NO: 2232448 - RNA, 19 nt, Artificial Sequence
  Description of Artificial Sequence: Synthetic oligonucleotide
aaagucaguucucagaaca

SEQ ID NO: 2232449 - RNA, 19 nt, Artificial Sequence
  Description of Artificial Sequence: Synthetic oligonucleotide
aaacgcuccagcuuggccg

SEQ ID NO: 2232450 - RNA, 19 nt, Artificial Sequence
  Description of Artificial Sequence: Synthetic oligonucleotide
aaaaguaaaaugacacugg

SEQ ID NO: 2232451 - RNA, 19 nt, Artificial Sequence
  Description of Artificial Sequence: Synthetic oligonucleotide
ucugauaagauugggacag

SEQ ID NO: 2232452 - RNA, 19 nt, Artificial Sequence
  Description of Artificial Sequence: Synthetic oligonucleotide
ucuuuggauauuuaggaug

SEQ ID NO: 2232453 - RNA, 19 nt, Artificial Sequence
  Description of Artificial Sequence: Synthetic oligonucleotide
aagugaacagauaaucagc

SEQ ID NO: 2232454 - RNA, 19 nt, Artificial Sequence
  Description of Artificial Sequence: Synthetic oligonucleotide
guaaagagagcccugcucg

SEQ ID NO: 2232455 - RNA, 19 nt, Artificial Sequence
  Description of Artificial Sequence: Synthetic oligonucleotide
aaaggggaaaaucggggac

SEQ ID NO: 2232456 - RNA, 19 nt, Artificial Sequence
  Description of Artificial Sequence: Synthetic oligonucleotide
uacaguacuagccauuacc

SEQ ID NO: 2232457 - RNA, 19 nt, Artificial Sequence
  Description of Artificial Sequence: Synthetic oligonucleotide
aaugacacuggccaguaca

SEQ ID NO: 2232458 - RNA, 19 nt, Artificial Sequence
  Description of Artificial Sequence: Synthetic oligonucleotide
aauuagucagccucggucu

SEQ ID NO: 2232459 - RNA, 19 nt, Artificial Sequence
  Description of Artificial Sequence: Synthetic oligonucleotide
aagauugggacagaauugg

SEQ ID NO: 2232460 - RNA, 19 nt, Artificial Sequence
  Description of Artificial Sequence: Synthetic oligonucleotide
aaguggagaagaugcaacg

SEQ ID NO: 2232461 - RNA, 19 nt, Artificial Sequence
  Description of Artificial Sequence: Synthetic oligonucleotide
gauaaucagcaucuaacag

SEQ ID NO: 2232462 - RNA, 19 nt, Artificial Sequence
  Description of Artificial Sequence: Synthetic oligonucleotide
ugaacagauaaucagcauc

SEQ ID NO: 2232463 - RNA, 19 nt, Artificial Sequence
  Description of Artificial Sequence: Synthetic oligonucleotide
auagcuacguuagaaagac

SEQ ID NO: 2232464 - RNA, 19 nt, Artificial Sequence
  Description of Artificial Sequence: Synthetic oligonucleotide
auaagauugggacagaauu

SEQ ID NO: 2232465 - RNA, 19 nt, Artificial Sequence
  Description of Artificial Sequence: Synthetic oligonucleotide
uuuauuaaccauucaagua

SEQ ID NO: 2232466 - RNA, 19 nt, Artificial Sequence
  Description of Artificial Sequence: Synthetic oligonucleotide
aguacuagccauuacccag

SEQ ID NO: 2232467 - RNA, 19 nt, Artificial Sequence
  Description of Artificial Sequence: Synthetic oligonucleotide
ucaccugaauaucagaaga

SEQ ID NO: 2232468 - RNA, 19 nt, Artificial Sequence
  Description of Artificial Sequence: Synthetic oligonucleotide
agucaauacaguacuagcc

SEQ ID NO: 2232469 - RNA, 19 nt, Artificial Sequence
  Description of Artificial Sequence: Synthetic oligonucleotide
ucuagaauauuugucagga

SEQ ID NO: 2232470 - RNA, 19 nt, Artificial Sequence
  Description of Artificial Sequence: Synthetic oligonucleotide
caucugauaagauugggac

SEQ ID NO: 2232471 - RNA, 19 nt, Artificial Sequence
  Description of Artificial Sequence: Synthetic oligonucleotide
aauccacugguaaagagag

SEQ ID NO: 2232472 - RNA, 19 nt, Artificial Sequence
  Description of Artificial Sequence: Synthetic oligonucleotide
aucagaagaugccaugucg

SEQ ID NO: 2232473 - RNA, 19 nt, Artificial Sequence
  Description of Artificial Sequence: Synthetic oligonucleotide
aaguaaaaugacacuggcc

SEQ ID NO: 2232474 - RNA, 19 nt, Artificial Sequence
  Description of Artificial Sequence: Synthetic oligonucleotide
cugaauaucagaagaugcc

SEQ ID NO: 2232475 - RNA, 19 nt, Artificial Sequence
  Description of Artificial Sequence: Synthetic oligonucleotide
accauucaaguacaguagc

SEQ ID NO: 2232476 - RNA, 19 nt, Artificial Sequence
  Description of Artificial Sequence: Synthetic oligonucleotide
uaaccauucaaguacagua

SEQ ID NO: 2232477 - RNA, 19 nt, Artificial Sequence
  Description of Artificial Sequence: Synthetic oligonucleotide
cagauaaucagcaucuaac

SEQ ID NO: 2232478 - RNA, 19 nt, Artificial Sequence
  Description of Artificial Sequence: Synthetic oligonucleotide
aacaaauuagucagccucg

SEQ ID NO: 2232479 - RNA, 19 nt, Artificial Sequence
  Description of Artificial Sequence: Synthetic oligonucleotide
aguuuauuaaccauucaag

SEQ ID NO: 2232480 - RNA, 19 nt, Artificial Sequence
  Description of Artificial Sequence: Synthetic oligonucleotide
uucuagaauauuugucagg

SEQ ID NO: 2232481 - RNA, 19 nt, Artificial Sequence
  Description of Artificial Sequence: Synthetic oligonucleotide
ucgaacagaagacaagaga

SEQ ID NO: 2232482 - RNA, 19 nt, Artificial Sequence
  Description of Artificial Sequence: Synthetic oligonucleotide
gaagaugccaugucgaaca

SEQ ID NO: 2232483 - RNA, 19 nt, Artificial Sequence
  Description of Artificial Sequence: Synthetic oligonucleotide
uauacgguccuacaucagc

SEQ ID NO: 2232484 - RNA, 19 nt, Artificial Sequence
  Description of Artificial Sequence: Synthetic oligonucleotide
auuuuacugaaguuguugu

SEQ ID NO: 2232485 - RNA, 19 nt, Artificial Sequence
  Description of Artificial Sequence: Synthetic oligonucleotide
uacguuagaaagaccaaca

SEQ ID NO: 2232486 - RNA, 19 nt, Artificial Sequence
  Description of Artificial Sequence: Synthetic oligonucleotide
agauaaucagcaucuaaca

SEQ ID NO: 2232487 - RNA, 19 nt, Artificial Sequence
  Description of Artificial Sequence: Synthetic oligonucleotide
acuugcgucuuucuucugc

SEQ ID NO: 2232488 - RNA, 19 nt, Artificial Sequence
  Description of Artificial Sequence: Synthetic oligonucleotide
acaguacuagccauuaccc

SEQ ID NO: 2232489 - RNA, 19 nt, Artificial Sequence
  Description of Artificial Sequence: Synthetic oligonucleotide
ucacaaacgucuuccacag

SEQ ID NO: 2232490 - RNA, 19 nt, Artificial Sequence
  Description of Artificial Sequence: Synthetic oligonucleotide
uccuacaucagcuucuaga

SEQ ID NO: 2232491 - RNA, 19 nt, Artificial Sequence
  Description of Artificial Sequence: Synthetic oligonucleotide
uacaguagcaucugauaag

SEQ ID NO: 2232492 - RNA, 19 nt, Artificial Sequence
  Description of Artificial Sequence: Synthetic oligonucleotide
ucagaagaugccaugucga

SEQ ID NO: 2232493 - RNA, 19 nt, Artificial Sequence
  Description of Artificial Sequence: Synthetic oligonucleotide
uggcaaagugaacagauaa

SEQ ID NO: 2232494 - RNA, 19 nt, Artificial Sequence
  Description of Artificial Sequence: Synthetic oligonucleotide
cauuuugugggucagcuuc

SEQ ID NO: 2232495 - RNA, 19 nt, Artificial Sequence
  Description of Artificial Sequence: Synthetic oligonucleotide
ugaauaucagaagaugcca

SEQ ID NO: 2232496 - RNA, 19 nt, Artificial Sequence
  Description of Artificial Sequence: Synthetic oligonucleotide
gauucuuuguucuuccgca

SEQ ID NO: 2232497 - RNA, 19 nt, Artificial Sequence
  Description of Artificial Sequence: Synthetic oligonucleotide
acguuagaaagaccaacac

SEQ ID NO: 2232498 - RNA, 19 nt, Artificial Sequence
  Description of Artificial Sequence: Synthetic oligonucleotide
gagucaauacaguacuagc

SEQ ID NO: 2232499 - RNA, 19 nt, Artificial Sequence
  Description of Artificial Sequence: Synthetic oligonucleotide
ucuucaacgugcuuguccu

SEQ ID NO: 2232500 - RNA, 19 nt, Artificial Sequence
  Description of Artificial Sequence: Synthetic oligonucleotide
ugccauuuuacugaaguug

SEQ ID NO: 2232501 - RNA, 19 nt, Artificial Sequence
  Description of Artificial Sequence: Synthetic oligonucleotide
uuuaggauggggucgggga

SEQ ID NO: 2232502 - RNA, 19 nt, Artificial Sequence
  Description of Artificial Sequence: Synthetic oligonucleotide
uaggacuuccgcuucauga

SEQ ID NO: 2232503 - RNA, 19 nt, Artificial Sequence
  Description of Artificial Sequence: Synthetic oligonucleotide
accuauacgguccuacauc

SEQ ID NO: 2232504 - RNA, 19 nt, Artificial Sequence
  Description of Artificial Sequence: Synthetic oligonucleotide
ugugcugaaguggagaaga

SEQ ID NO: 2232505 - RNA, 19 nt, Artificial Sequence
  Description of Artificial Sequence: Synthetic oligonucleotide
uucaccugaauaucagaag

SEQ ID NO: 2232506 - RNA, 19 nt, Artificial Sequence
  Description of Artificial Sequence: Synthetic oligonucleotide
aagacaagagacuggccgu

SEQ ID NO: 2232507 - RNA, 19 nt, Artificial Sequence
  Description of Artificial Sequence: Synthetic oligonucleotide
aguuucuccccuugagccc

SEQ ID NO: 2232508 - RNA, 19 nt, Artificial Sequence
  Description of Artificial Sequence: Synthetic oligonucleotide
aaagaccaacacuuuaaaa

SEQ ID NO: 2232509 - RNA, 19 nt, Artificial Sequence
  Description of Artificial Sequence: Synthetic oligonucleotide
gcaucuaacagguuggaag

SEQ ID NO: 2232510 - RNA, 19 nt, Artificial Sequence
  Description of Artificial Sequence: Synthetic oligonucleotide
agaguaaaacacuuucagu

SEQ ID NO: 2232511 - RNA, 19 nt, Artificial Sequence
  Description of Artificial Sequence: Synthetic oligonucleotide
auugggacagaauugggau

SEQ ID NO: 2232512 - RNA, 19 nt, Artificial Sequence
  Description of Artificial Sequence: Synthetic oligonucleotide
aaccauucaaguacaguag

SEQ ID NO: 2232513 - RNA, 19 nt, Artificial Sequence
  Description of Artificial Sequence: Synthetic oligonucleotide
aaagccuggccugaagcac

SEQ ID NO: 2232514 - RNA, 19 nt, Artificial Sequence
  Description of Artificial Sequence: Synthetic oligonucleotide
gaguaaaacacuuucaguu

SEQ ID NO: 2232515 - RNA, 19 nt, Artificial Sequence
  Description of Artificial Sequence: Synthetic oligonucleotide
aauagcuacguuagaaaga

SEQ ID NO: 2232516 - RNA, 19 nt, Artificial Sequence
  Description of Artificial Sequence: Synthetic oligonucleotide
ugggauggcaaagugaaca

SEQ ID NO: 2232517 - RNA, 19 nt, Artificial Sequence
  Description of Artificial Sequence: Synthetic oligonucleotide
ggacggauucuuuugaccg

SEQ ID NO: 2232518 - RNA, 19 nt, Artificial Sequence
  Description of Artificial Sequence: Synthetic oligonucleotide
ugucgaacagaagacaaga

SEQ ID NO: 2232519 - RNA, 19 nt, Artificial Sequence
  Description of Artificial Sequence: Synthetic oligonucleotide
agcacgcuucuccaguucc

SEQ ID NO: 2232520 - RNA, 19 nt, Artificial Sequence
  Description of Artificial Sequence: Synthetic oligonucleotide
acaucucacggucuggauc

SEQ ID NO: 2232521 - RNA, 19 nt, Artificial Sequence
  Description of Artificial Sequence: Synthetic oligonucleotide
ucagcgagcugcuuuagga

SEQ ID NO: 2232522 - RNA, 19 nt, Artificial Sequence
  Description of Artificial Sequence: Synthetic oligonucleotide
ucgcgguucucuuuguugg

SEQ ID NO: 2232523 - RNA, 19 nt, Artificial Sequence
  Description of Artificial Sequence: Synthetic oligonucleotide
gagaaucagcucaaaagcc

SEQ ID NO: 2232524 - RNA, 19 nt, Artificial Sequence
  Description of Artificial Sequence: Synthetic oligonucleotide
uuacugaaguuguuguucu

SEQ ID NO: 2232525 - RNA, 19 nt, Artificial Sequence
  Description of Artificial Sequence: Synthetic oligonucleotide
gauggggucggggagaaag

SEQ ID NO: 2232526 - RNA, 19 nt, Artificial Sequence
  Description of Artificial Sequence: Synthetic oligonucleotide
agagucaauacaguacuag

SEQ ID NO: 2232527 - RNA, 19 nt, Artificial Sequence
  Description of Artificial Sequence: Synthetic oligonucleotide
gucaauacaguacuagcca

SEQ ID NO: 2232528 - RNA, 19 nt, Artificial Sequence
  Description of Artificial Sequence: Synthetic oligonucleotide
aguucucagaacaaauuag

SEQ ID NO: 2232529 - RNA, 19 nt, Artificial Sequence
  Description of Artificial Sequence: Synthetic oligonucleotide
ucgcaaacgcuccagcuug

SEQ ID NO: 2232530 - RNA, 19 nt, Artificial Sequence
  Description of Artificial Sequence: Synthetic oligonucleotide
uugagccccgaaaacaucu

SEQ ID NO: 2232531 - RNA, 19 nt, Artificial Sequence
  Description of Artificial Sequence: Synthetic oligonucleotide
acaauccacugguaaagag

SEQ ID NO: 2232532 - RNA, 19 nt, Artificial Sequence
  Description of Artificial Sequence: Synthetic oligonucleotide
aguaaaacacuuucaguuu

SEQ ID NO: 2232533 - RNA, 19 nt, Artificial Sequence
  Description of Artificial Sequence: Synthetic oligonucleotide
aauauuugucaggagggaa

SEQ ID NO: 2232534 - RNA, 19 nt, Artificial Sequence
  Description of Artificial Sequence: Synthetic oligonucleotide
aaaacaucucacggucugg

SEQ ID NO: 2232535 - RNA, 19 nt, Artificial Sequence
  Description of Artificial Sequence: Synthetic oligonucleotide
guaaaaugacacuggccag

SEQ ID NO: 2232536 - RNA, 19 nt, Artificial Sequence
  Description of Artificial Sequence: Synthetic oligonucleotide
cagaacaaauuagucagcc

SEQ ID NO: 2232537 - RNA, 19 nt, Artificial Sequence
  Description of Artificial Sequence: Synthetic oligonucleotide
ucuaacagguuggaagaag

SEQ ID NO: 2232538 - RNA, 19 nt, Artificial Sequence
  Description of Artificial Sequence: Synthetic oligonucleotide
uucuuuguucuuccgcacc

SEQ ID NO: 2232539 - RNA, 19 nt, Artificial Sequence
  Description of Artificial Sequence: Synthetic oligonucleotide
agcuacguuagaaagacca

SEQ ID NO: 2232540 - RNA, 19 nt, Artificial Sequence
  Description of Artificial Sequence: Synthetic oligonucleotide
gagacuugcgucuuucuuc

SEQ ID NO: 2232541 - RNA, 19 nt, Artificial Sequence
  Description of Artificial Sequence: Synthetic oligonucleotide
cauuuuacugaaguuguug

SEQ ID NO: 2232542 - RNA, 19 nt, Artificial Sequence
  Description of Artificial Sequence: Synthetic oligonucleotide
guggagaagaugcaacgag

SEQ ID NO: 2232543 - RNA, 19 nt, Artificial Sequence
  Description of Artificial Sequence: Synthetic oligonucleotide
ccugaauaucagaagaugc

SEQ ID NO: 2232544 - RNA, 19 nt, Artificial Sequence
  Description of Artificial Sequence: Synthetic oligonucleotide
gaauugggauggcaaagug

SEQ ID NO: 2232545 - RNA, 19 nt, Artificial Sequence
  Description of Artificial Sequence: Synthetic oligonucleotide
acugugcaguuuauuaacc

SEQ ID NO: 2232546 - RNA, 19 nt, Artificial Sequence
  Description of Artificial Sequence: Synthetic oligonucleotide
ugugcaguuuauuaaccau

SEQ ID NO: 2232547 - RNA, 19 nt, Artificial Sequence
  Description of Artificial Sequence: Synthetic oligonucleotide
agagacuggccgugcaccc

SEQ ID NO: 2232548 - RNA, 19 nt, Artificial Sequence
  Description of Artificial Sequence: Synthetic oligonucleotide
cucuucaacgugcuugucc

SEQ ID NO: 2232549 - RNA, 19 nt, Artificial Sequence
  Description of Artificial Sequence: Synthetic oligonucleotide
aauugggauggcaaaguga

SEQ ID NO: 2232550 - RNA, 19 nt, Artificial Sequence
  Description of Artificial Sequence: Synthetic oligonucleotide
uuucucaugcucacgcuuc

SEQ ID NO: 2232551 - RNA, 19 nt, Artificial Sequence
  Description of Artificial Sequence: Synthetic oligonucleotide
ugaagcacgcuucuccagu

SEQ ID NO: 2232552 - RNA, 19 nt, Artificial Sequence
  Description of Artificial Sequence: Synthetic oligonucleotide
agaagaugccaugucgaac

SEQ ID NO: 2232553 - RNA, 19 nt, Artificial Sequence
  Description of Artificial Sequence: Synthetic oligonucleotide
gaaaaucggggacggauuc

SEQ ID NO: 2232554 - RNA, 19 nt, Artificial Sequence
  Description of Artificial Sequence: Synthetic oligonucleotide
guuagaaagaccaacacuu

SEQ ID NO: 2232555 - RNA, 19 nt, Artificial Sequence
  Description of Artificial Sequence: Synthetic oligonucleotide
caucuaacagguuggaaga

SEQ ID NO: 2232556 - RNA, 19 nt, Artificial Sequence
  Description of Artificial Sequence: Synthetic oligonucleotide
gagagguccuucuucuuug

SEQ ID NO: 2232557 - RNA, 19 nt, Artificial Sequence
  Description of Artificial Sequence: Synthetic oligonucleotide
uuaaccauucaaguacagu

SEQ ID NO: 2232558 - RNA, 19 nt, Artificial Sequence
  Description of Artificial Sequence: Synthetic oligonucleotide
gaugccaugucgaacagaa

SEQ ID NO: 2232559 - RNA, 19 nt, Artificial Sequence
  Description of Artificial Sequence: Synthetic oligonucleotide
agaacaaauuagucagccu

SEQ ID NO: 2232560 - RNA, 19 nt, Artificial Sequence
  Description of Artificial Sequence: Synthetic oligonucleotide
acagauaaucagcaucuaa

SEQ ID NO: 2232561 - RNA, 19 nt, Artificial Sequence
  Description of Artificial Sequence: Synthetic oligonucleotide
gaaguggagaagaugcaac

SEQ ID NO: 2232562 - RNA, 19 nt, Artificial Sequence
  Description of Artificial Sequence: Synthetic oligonucleotide
cgaacagaagacaagagac

SEQ ID NO: 2232563 - RNA, 19 nt, Artificial Sequence
  Description of Artificial Sequence: Synthetic oligonucleotide
uccacaauccacugguaaa

SEQ ID NO: 2232564 - RNA, 19 nt, Artificial Sequence
  Description of Artificial Sequence: Synthetic oligonucleotide
agacuugcgucuuucuucu

SEQ ID NO: 2232565 - RNA, 19 nt, Artificial Sequence
  Description of Artificial Sequence: Synthetic oligonucleotide
agcucaaaagccuggccug

SEQ ID NO: 2232566 - RNA, 19 nt, Artificial Sequence
  Description of Artificial Sequence: Synthetic oligonucleotide
ucaugcucacgcuucucag

SEQ ID NO: 2232567 - RNA, 19 nt, Artificial Sequence
  Description of Artificial Sequence: Synthetic oligonucleotide
agcacugugcaguuuauua

SEQ ID NO: 2232568 - RNA, 19 nt, Artificial Sequence
  Description of Artificial Sequence: Synthetic oligonucleotide
ugaccgagggcugagaauc

SEQ ID NO: 2232569 - RNA, 19 nt, Artificial Sequence
  Description of Artificial Sequence: Synthetic oligonucleotide
acaguagcaucugauaaga

SEQ ID NO: 2232570 - RNA, 19 nt, Artificial Sequence
  Description of Artificial Sequence: Synthetic oligonucleotide
cuagaauauuugucaggag

SEQ ID NO: 2232571 - RNA, 19 nt, Artificial Sequence
  Description of Artificial Sequence: Synthetic oligonucleotide
auuagucagccucggucuc

SEQ ID NO: 2232572 - RNA, 19 nt, Artificial Sequence
  Description of Artificial Sequence: Synthetic oligonucleotide
uggaucuaccuauacgguc

SEQ ID NO: 2232573 - RNA, 19 nt, Artificial Sequence
  Description of Artificial Sequence: Synthetic oligonucleotide
uggauucuuuguucuuccg

SEQ ID NO: 2232574 - RNA, 19 nt, Artificial Sequence
  Description of Artificial Sequence: Synthetic oligonucleotide
aagaugccaugucgaacag

SEQ ID NO: 2232575 - RNA, 19 nt, Artificial Sequence
  Description of Artificial Sequence: Synthetic oligonucleotide
uuugaccgagggcugagaa

SEQ ID NO: 2232576 - RNA, 19 nt, Artificial Sequence
  Description of Artificial Sequence: Synthetic oligonucleotide
ucuaccuauacgguccuac

SEQ ID NO: 2232577 - RNA, 19 nt, Artificial Sequence
  Description of Artificial Sequence: Synthetic oligonucleotide
auaucagaagaugccaugu

SEQ ID NO: 2232578 - RNA, 19 nt, Artificial Sequence
  Description of Artificial Sequence: Synthetic oligonucleotide
gaacagauaaucagcaucu

SEQ ID NO: 2232579 - RNA, 19 nt, Artificial Sequence
  Description of Artificial Sequence: Synthetic oligonucleotide
uaaagagagcccugcucgc

SEQ ID NO: 2232580 - RNA, 19 nt, Artificial Sequence
  Description of Artificial Sequence: Synthetic oligonucleotide
auacaguacuagccauuac

SEQ ID NO: 2232581 - RNA, 19 nt, Artificial Sequence
  Description of Artificial Sequence: Synthetic oligonucleotide
gaaagaccaacacuuuaaa

SEQ ID NO: 2232582 - RNA, 19 nt, Artificial Sequence
  Description of Artificial Sequence: Synthetic oligonucleotide
aaacaucucacggucugga

SEQ ID NO: 2232583 - RNA, 19 nt, Artificial Sequence
  Description of Artificial Sequence: Synthetic oligonucleotide
ggaaaggggaaaaucgggg

SEQ ID NO: 2232584 - RNA, 19 nt, Artificial Sequence
  Description of Artificial Sequence: Synthetic oligonucleotide
agaaucagcucaaaagccu

SEQ ID NO: 2232585 - RNA, 19 nt, Artificial Sequence
  Description of Artificial Sequence: Synthetic oligonucleotide
agccacuacauacucuuca

SEQ ID NO: 2232586 - RNA, 19 nt, Artificial Sequence
  Description of Artificial Sequence: Synthetic oligonucleotide
acuacauacucuucacaaa

SEQ ID NO: 2232587 - RNA, 19 nt, Artificial Sequence
  Description of Artificial Sequence: Synthetic oligonucleotide
cuacguuagaaagaccaac

SEQ ID NO: 2232588 - RNA, 19 nt, Artificial Sequence
  Description of Artificial Sequence: Synthetic oligonucleotide
caauccacugguaaagaga

SEQ ID NO: 2232589 - RNA, 19 nt, Artificial Sequence
  Description of Artificial Sequence: Synthetic oligonucleotide
cucggucucauccgcaggg

SEQ ID NO: 2232590 - RNA, 19 nt, Artificial Sequence
  Description of Artificial Sequence: Synthetic oligonucleotide
ucauccgcagggucuuugg

SEQ ID NO: 2232591 - RNA, 19 nt, Artificial Sequence
  Description of Artificial Sequence: Synthetic oligonucleotide
acgguccuacaucagcuuc

SEQ ID NO: 2232592 - RNA, 19 nt, Artificial Sequence
  Description of Artificial Sequence: Synthetic oligonucleotide
gauugggacagaauuggga

SEQ ID NO: 2232593 - RNA, 19 nt, Artificial Sequence
  Description of Artificial Sequence: Synthetic oligonucleotide
uuguuggccuccauuuugu

SEQ ID NO: 2232594 - RNA, 19 nt, Artificial Sequence
  Description of Artificial Sequence: Synthetic oligonucleotide
accugaauaucagaagaug

SEQ ID NO: 2232595 - RNA, 19 nt, Artificial Sequence
  Description of Artificial Sequence: Synthetic oligonucleotide
cacuacauacucuucacaa

SEQ ID NO: 2232596 - RNA, 19 nt, Artificial Sequence
  Description of Artificial Sequence: Synthetic oligonucleotide
agaaagaccaacacuuuaa

SEQ ID NO: 2232597 - RNA, 19 nt, Artificial Sequence
  Description of Artificial Sequence: Synthetic oligonucleotide
aagcacgcuucuccaguuc

SEQ ID NO: 2232598 - RNA, 19 nt, Artificial Sequence
  Description of Artificial Sequence: Synthetic oligonucleotide
gaaagucaguucucagaac

SEQ ID NO: 2232599 - RNA, 19 nt, Artificial Sequence
  Description of Artificial Sequence: Synthetic oligonucleotide
uuuggauauuuaggauggg

SEQ ID NO: 2232600 - RNA, 19 nt, Artificial Sequence
  Description of Artificial Sequence: Synthetic oligonucleotide
uagccauuacccagcacac

SEQ ID NO: 2232601 - RNA, 19 nt, Artificial Sequence
  Description of Artificial Sequence: Synthetic oligonucleotide
cuucucucgcaaacgcucc

SEQ ID NO: 2232602 - RNA, 19 nt, Artificial Sequence
  Description of Artificial Sequence: Synthetic oligonucleotide
uuguucuccucaauggcuu

SEQ ID NO: 2232603 - RNA, 19 nt, Artificial Sequence
  Description of Artificial Sequence: Synthetic oligonucleotide
ggaucuaccuauacggucc

SEQ ID NO: 2232604 - RNA, 19 nt, Artificial Sequence
  Description of Artificial Sequence: Synthetic oligonucleotide
agcaucugauaagauuggg

SEQ ID NO: 2232605 - RNA, 19 nt, Artificial Sequence
  Description of Artificial Sequence: Synthetic oligonucleotide
ucucgcaaacgcuccagcu

SEQ ID NO: 2232606 - RNA, 19 nt, Artificial Sequence
  Description of Artificial Sequence: Synthetic oligonucleotide
uaccuauacgguccuacau

SEQ ID NO: 2232607 - RNA, 19 nt, Artificial Sequence
  Description of Artificial Sequence: Synthetic oligonucleotide
agcgagcugcuuuaggacu

SEQ ID NO: 2232608 - RNA, 19 nt, Artificial Sequence
  Description of Artificial Sequence: Synthetic oligonucleotide
agagguccuucuucuuugg

SEQ ID NO: 2232609 - RNA, 19 nt, Artificial Sequence
  Description of Artificial Sequence: Synthetic oligonucleotide
aaguacaguagcaucugau

SEQ ID NO: 2232610 - RNA, 19 nt, Artificial Sequence
  Description of Artificial Sequence: Synthetic oligonucleotide
caugcucacgcuucucagc

SEQ ID NO: 2232611 - RNA, 19 nt, Artificial Sequence
  Description of Artificial Sequence: Synthetic oligonucleotide
agaauugggauggcaaagu

SEQ ID NO: 2232612 - RNA, 19 nt, Artificial Sequence
  Description of Artificial Sequence: Synthetic oligonucleotide
ugauaagauugggacagaa

SEQ ID NO: 2232613 - RNA, 19 nt, Artificial Sequence
  Description of Artificial Sequence: Synthetic oligonucleotide
ugagacuugcgucuuucuu

SEQ ID NO: 2232614 - RNA, 19 nt, Artificial Sequence
  Description of Artificial Sequence: Synthetic oligonucleotide
uccccuugagccccgaaaa

SEQ ID NO: 2232615 - RNA, 19 nt, Artificial Sequence
  Description of Artificial Sequence: Synthetic oligonucleotide
ggauucuuuguucuuccgc

SEQ ID NO: 2232616 - RNA, 19 nt, Artificial Sequence
  Description of Artificial Sequence: Synthetic oligonucleotide
auuuaggauggggucgggg

SEQ ID NO: 2232617 - RNA, 19 nt, Artificial Sequence
  Description of Artificial Sequence: Synthetic oligonucleotide
acggucuggaucuaccuau

SEQ ID NO: 2232618 - RNA, 19 nt, Artificial Sequence
  Description of Artificial Sequence: Synthetic oligonucleotide
cagaauugggauggcaaag

SEQ ID NO: 2232619 - RNA, 19 nt, Artificial Sequence
  Description of Artificial Sequence: Synthetic oligonucleotide
gacagaauugggauggcaa

SEQ ID NO: 2232620 - RNA, 19 nt, Artificial Sequence
  Description of Artificial Sequence: Synthetic oligonucleotide
gcaaagugaacagauaauc

SEQ ID NO: 2232621 - RNA, 19 nt, Artificial Sequence
  Description of Artificial Sequence: Synthetic oligonucleotide
cucacggucuggaucuacc

SEQ ID NO: 2232622 - RNA, 19 nt, Artificial Sequence
  Description of Artificial Sequence: Synthetic oligonucleotide
ucggggacggauucuuuug

SEQ ID NO: 2232623 - RNA, 19 nt, Artificial Sequence
  Description of Artificial Sequence: Synthetic oligonucleotide
uuaggacuuccgcuucaug

SEQ ID NO: 2232624 - RNA, 19 nt, Artificial Sequence
  Description of Artificial Sequence: Synthetic oligonucleotide
gaagccacuacauacucuu

SEQ ID NO: 2232625 - RNA, 19 nt, Artificial Sequence
  Description of Artificial Sequence: Synthetic oligonucleotide
gcugcuuuaggacuuccgc

SEQ ID NO: 2232626 - RNA, 19 nt, Artificial Sequence
  Description of Artificial Sequence: Synthetic oligonucleotide
accucuucaacgugcuugu

SEQ ID NO: 2232627 - RNA, 19 nt, Artificial Sequence
  Description of Artificial Sequence: Synthetic oligonucleotide
aaaaucggggacggauucu

SEQ ID NO: 2232628 - RNA, 19 nt, Artificial Sequence
  Description of Artificial Sequence: Synthetic oligonucleotide
auauuugucaggagggaaa

SEQ ID NO: 2232629 - RNA, 19 nt, Artificial Sequence
  Description of Artificial Sequence: Synthetic oligonucleotide
gaagcacuucuuucucaug

SEQ ID NO: 2232630 - RNA, 19 nt, Artificial Sequence
  Description of Artificial Sequence: Synthetic oligonucleotide
cucgcgguucucuuuguug

SEQ ID NO: 2232631 - RNA, 19 nt, Artificial Sequence
  Description of Artificial Sequence: Synthetic oligonucleotide
ugguaaagagagcccugcu

SEQ ID NO: 2232632 - RNA, 19 nt, Artificial Sequence
  Description of Artificial Sequence: Synthetic oligonucleotide
ugcacccuccacaauccac

SEQ ID NO: 2232633 - RNA, 19 nt, Artificial Sequence
  Description of Artificial Sequence: Synthetic oligonucleotide
aacaucucacggucuggau

SEQ ID NO: 2232634 - RNA, 19 nt, Artificial Sequence
  Description of Artificial Sequence: Synthetic oligonucleotide
uggccaguacagucuuugg

SEQ ID NO: 2232635 - RNA, 19 nt, Artificial Sequence
  Description of Artificial Sequence: Synthetic oligonucleotide
cacuucuuucucaugcuca

SEQ ID NO: 2232636 - RNA, 19 nt, Artificial Sequence
  Description of Artificial Sequence: Synthetic oligonucleotide
auuaaccauucaaguacag

SEQ ID NO: 2232637 - RNA, 19 nt, Artificial Sequence
  Description of Artificial Sequence: Synthetic oligonucleotide
agacuggccgugcacccuc

SEQ ID NO: 2232638 - RNA, 19 nt, Artificial Sequence
  Description of Artificial Sequence: Synthetic oligonucleotide
uucaacgugcuuguccuuc

SEQ ID NO: 2232639 - RNA, 19 nt, Artificial Sequence
  Description of Artificial Sequence: Synthetic oligonucleotide
aguggagaagaugcaacga

SEQ ID NO: 2232640 - RNA, 19 nt, Artificial Sequence
  Description of Artificial Sequence: Synthetic oligonucleotide
caaacgcuccagcuuggcc

SEQ ID NO: 2232641 - RNA, 19 nt, Artificial Sequence
  Description of Artificial Sequence: Synthetic oligonucleotide
uacuagccauuacccagca

SEQ ID NO: 2232642 - RNA, 19 nt, Artificial Sequence
  Description of Artificial Sequence: Synthetic oligonucleotide
ucaacgugcuuguccuucu

SEQ ID NO: 2232643 - RNA, 19 nt, Artificial Sequence
  Description of Artificial Sequence: Synthetic oligonucleotide
acggauucuuuugaccgag

SEQ ID NO: 2232644 - RNA, 19 nt, Artificial Sequence
  Description of Artificial Sequence: Synthetic oligonucleotide
uggccgugcacccuccaca

SEQ ID NO: 2232645 - RNA, 19 nt, Artificial Sequence
  Description of Artificial Sequence: Synthetic oligonucleotide
ucacggucuggaucuaccu

SEQ ID NO: 2232646 - RNA, 19 nt, Artificial Sequence
  Description of Artificial Sequence: Synthetic oligonucleotide
uacucuucacaaacgucuu

SEQ ID NO: 2232647 - RNA, 19 nt, Artificial Sequence
  Description of Artificial Sequence: Synthetic oligonucleotide
guacuagccauuacccagc

SEQ ID NO: 2232648 - RNA, 19 nt, Artificial Sequence
  Description of Artificial Sequence: Synthetic oligonucleotide
acuagccauuacccagcac

SEQ ID NO: 2232649 - RNA, 19 nt, Artificial Sequence
  Description of Artificial Sequence: Synthetic oligonucleotide
gguaaagagagcccugcuc

SEQ ID NO: 2232650 - RNA, 19 nt, Artificial Sequence
  Description of Artificial Sequence: Synthetic oligonucleotide
ucacgcuucucagcgagcu

SEQ ID NO: 2232651 - RNA, 19 nt, Artificial Sequence
  Description of Artificial Sequence: Synthetic oligonucleotide
gucgaacagaagacaagag

SEQ ID NO: 2232652 - RNA, 19 nt, Artificial Sequence
  Description of Artificial Sequence: Synthetic oligonucleotide
ggggaaaggggaaaaucgg

SEQ ID NO: 2232653 - RNA, 19 nt, Artificial Sequence
  Description of Artificial Sequence: Synthetic oligonucleotide
gugcuuguccuucucucgc

SEQ ID NO: 2232654 - RNA, 19 nt, Artificial Sequence
  Description of Artificial Sequence: Synthetic oligonucleotide
agccccgaaaacaucucac

SEQ ID NO: 2232655 - RNA, 19 nt, Artificial Sequence
  Description of Artificial Sequence: Synthetic oligonucleotide
cugugcaguuuauuaacca

SEQ ID NO: 2232656 - RNA, 19 nt, Artificial Sequence
  Description of Artificial Sequence: Synthetic oligonucleotide
caguucucagaacaaauua

SEQ ID NO: 2232657 - RNA, 19 nt, Artificial Sequence
  Description of Artificial Sequence: Synthetic oligonucleotide
uucucagcgagcugcuuua

SEQ ID NO: 2232658 - RNA, 19 nt, Artificial Sequence
  Description of Artificial Sequence: Synthetic oligonucleotide
auacgguccuacaucagcu

SEQ ID NO: 2232659 - RNA, 19 nt, Artificial Sequence
  Description of Artificial Sequence: Synthetic oligonucleotide
aaaucggggacggauucuu

SEQ ID NO: 2232660 - RNA, 19 nt, Artificial Sequence
  Description of Artificial Sequence: Synthetic oligonucleotide
gagaagaugcaacgagaaa

SEQ ID NO: 2232661 - RNA, 19 nt, Artificial Sequence
  Description of Artificial Sequence: Synthetic oligonucleotide
cuauacgguccuacaucag

SEQ ID NO: 2232662 - RNA, 19 nt, Artificial Sequence
  Description of Artificial Sequence: Synthetic oligonucleotide
augucgaacagaagacaag

SEQ ID NO: 2232663 - RNA, 19 nt, Artificial Sequence
  Description of Artificial Sequence: Synthetic oligonucleotide
cuucaugagacuugcgucu

SEQ ID NO: 2232664 - RNA, 19 nt, Artificial Sequence
  Description of Artificial Sequence: Synthetic oligonucleotide
uucucucgcaaacgcucca

SEQ ID NO: 2232665 - RNA, 19 nt, Artificial Sequence
  Description of Artificial Sequence: Synthetic oligonucleotide
agccauuacccagcacacc

SEQ ID NO: 2232666 - RNA, 19 nt, Artificial Sequence
  Description of Artificial Sequence: Synthetic oligonucleotide
gacggauucuuuugaccga

SEQ ID NO: 2232667 - RNA, 19 nt, Artificial Sequence
  Description of Artificial Sequence: Synthetic oligonucleotide
uguuggccuccauuuugug

SEQ ID NO: 2232668 - RNA, 19 nt, Artificial Sequence
  Description of Artificial Sequence: Synthetic oligonucleotide
gacuuccgcuucaugagac

SEQ ID NO: 2232669 - RNA, 19 nt, Artificial Sequence
  Description of Artificial Sequence: Synthetic oligonucleotide
uccgcagggucuuuggauu

SEQ ID NO: 2232670 - RNA, 19 nt, Artificial Sequence
  Description of Artificial Sequence: Synthetic oligonucleotide
uuggccgccaucugcgccu

SEQ ID NO: 2232671 - RNA, 19 nt, Artificial Sequence
  Description of Artificial Sequence: Synthetic oligonucleotide
ucggggagaaagucaguuc

SEQ ID NO: 2232672 - RNA, 19 nt, Artificial Sequence
  Description of Artificial Sequence: Synthetic oligonucleotide
cugaagcacgcuucuccag

SEQ ID NO: 2232673 - RNA, 19 nt, Artificial Sequence
  Description of Artificial Sequence: Synthetic oligonucleotide
caagugugcugaaguggag

SEQ ID NO: 2232674 - RNA, 19 nt, Artificial Sequence
  Description of Artificial Sequence: Synthetic oligonucleotide
ugcuuguccuucucucgca

SEQ ID NO: 2232675 - RNA, 19 nt, Artificial Sequence
  Description of Artificial Sequence: Synthetic oligonucleotide
gccauuacccagcacacca

SEQ ID NO: 2232676 - RNA, 19 nt, Artificial Sequence
  Description of Artificial Sequence: Synthetic oligonucleotide
ucucucgcaaacgcuccag

SEQ ID NO: 2232677 - RNA, 19 nt, Artificial Sequence
  Description of Artificial Sequence: Synthetic oligonucleotide
cucagcgagcugcuuuagg

SEQ ID NO: 2232678 - RNA, 19 nt, Artificial Sequence
  Description of Artificial Sequence: Synthetic oligonucleotide
uugcgucuuucuucugcag

SEQ ID NO: 2232679 - RNA, 19 nt, Artificial Sequence
  Description of Artificial Sequence: Synthetic oligonucleotide
caucucacggucuggaucu

SEQ ID NO: 2232680 - RNA, 19 nt, Artificial Sequence
  Description of Artificial Sequence: Synthetic oligonucleotide
uauuuaggauggggucggg

SEQ ID NO: 2232681 - RNA, 19 nt, Artificial Sequence
  Description of Artificial Sequence: Synthetic oligonucleotide
caagagacuggccgugcac

SEQ ID NO: 2232682 - RNA, 19 nt, Artificial Sequence
  Description of Artificial Sequence: Synthetic oligonucleotide
cagcgagcugcuuuaggac

SEQ ID NO: 2232683 - RNA, 19 nt, Artificial Sequence
  Description of Artificial Sequence: Synthetic oligonucleotide
uagcuacguuagaaagacc

SEQ ID NO: 2232684 - RNA, 19 nt, Artificial Sequence
  Description of Artificial Sequence: Synthetic oligonucleotide
uccgcaccucuucaacgug

SEQ ID NO: 2232685 - RNA, 19 nt, Artificial Sequence
  Description of Artificial Sequence: Synthetic oligonucleotide
aagucaguucucagaacaa

SEQ ID NO: 2232686 - RNA, 19 nt, Artificial Sequence
  Description of Artificial Sequence: Synthetic oligonucleotide
gggacggauucuuuugacc

SEQ ID NO: 2232687 - RNA, 19 nt, Artificial Sequence
  Description of Artificial Sequence: Synthetic oligonucleotide
cuggccaguacagucuuug

SEQ ID NO: 2232688 - RNA, 19 nt, Artificial Sequence
  Description of Artificial Sequence: Synthetic oligonucleotide
guuccuucaccugaauauc

SEQ ID NO: 2232689 - RNA, 19 nt, Artificial Sequence
  Description of Artificial Sequence: Synthetic oligonucleotide
aagccacuacauacucuuc

SEQ ID NO: 2232690 - RNA, 19 nt, Artificial Sequence
  Description of Artificial Sequence: Synthetic oligonucleotide
uugggauggcaaagugaac

SEQ ID NO: 2232691 - RNA, 19 nt, Artificial Sequence
  Description of Artificial Sequence: Synthetic oligonucleotide
ccgaaaacaucucacgguc

SEQ ID NO: 2232692 - RNA, 19 nt, Artificial Sequence
  Description of Artificial Sequence: Synthetic oligonucleotide
cuugagccccgaaaacauc

SEQ ID NO: 2232693 - RNA, 19 nt, Artificial Sequence
  Description of Artificial Sequence: Synthetic oligonucleotide
augagacuugcgucuuucu

SEQ ID NO: 2232694 - RNA, 19 nt, Artificial Sequence
  Description of Artificial Sequence: Synthetic oligonucleotide
gccccgaaaacaucucacg

SEQ ID NO: 2232695 - RNA, 19 nt, Artificial Sequence
  Description of Artificial Sequence: Synthetic oligonucleotide
cucaugcucacgcuucuca

SEQ ID NO: 2232696 - RNA, 19 nt, Artificial Sequence
  Description of Artificial Sequence: Synthetic oligonucleotide
cuuggccgccaucugcgcc

SEQ ID NO: 2232697 - RNA, 19 nt, Artificial Sequence
  Description of Artificial Sequence: Synthetic oligonucleotide
ugagccccgaaaacaucuc

SEQ ID NO: 2232698 - RNA, 19 nt, Artificial Sequence
  Description of Artificial Sequence: Synthetic oligonucleotide
gguuggaagaagccacuac

SEQ ID NO: 2232699 - RNA, 19 nt, Artificial Sequence
  Description of Artificial Sequence: Synthetic oligonucleotide
ccccgaaaacaucucacgg

SEQ ID NO: 2232700 - RNA, 19 nt, Artificial Sequence
  Description of Artificial Sequence: Synthetic oligonucleotide
uggccugaagcacgcuucu

SEQ ID NO: 2232701 - RNA, 19 nt, Artificial Sequence
  Description of Artificial Sequence: Synthetic oligonucleotide
gaauaucagaagaugccau

SEQ ID NO: 2232702 - RNA, 19 nt, Artificial Sequence
  Description of Artificial Sequence: Synthetic oligonucleotide
gacaagagacuggccgugc

SEQ ID NO: 2232703 - RNA, 19 nt, Artificial Sequence
  Description of Artificial Sequence: Synthetic oligonucleotide
uugaccgagggcugagaau

SEQ ID NO: 2232704 - RNA, 19 nt, Artificial Sequence
  Description of Artificial Sequence: Synthetic oligonucleotide
cuaccuauacgguccuaca

SEQ ID NO: 2232705 - RNA, 19 nt, Artificial Sequence
  Description of Artificial Sequence: Synthetic oligonucleotide
acuuccgcuucaugagacu

SEQ ID NO: 2232706 - RNA, 19 nt, Artificial Sequence
  Description of Artificial Sequence: Synthetic oligonucleotide
caguacuagccauuaccca

SEQ ID NO: 2232707 - RNA, 19 nt, Artificial Sequence
  Description of Artificial Sequence: Synthetic oligonucleotide
ccuauacgguccuacauca

SEQ ID NO: 2232708 - RNA, 19 nt, Artificial Sequence
  Description of Artificial Sequence: Synthetic oligonucleotide
acugguaaagagagcccug

SEQ ID NO: 2232709 - RNA, 19 nt, Artificial Sequence
  Description of Artificial Sequence: Synthetic oligonucleotide
cuuuugaccgagggcugag

SEQ ID NO: 2232710 - RNA, 19 nt, Artificial Sequence
  Description of Artificial Sequence: Synthetic oligonucleotide
cacaccaagugugcugaag

SEQ ID NO: 2232711 - RNA, 19 nt, Artificial Sequence
  Description of Artificial Sequence: Synthetic oligonucleotide
ccuucucucgcaaacgcuc

SEQ ID NO: 2232712 - RNA, 19 nt, Artificial Sequence
  Description of Artificial Sequence: Synthetic oligonucleotide
gagccccgaaaacaucuca

SEQ ID NO: 2232713 - RNA, 19 nt, Artificial Sequence
  Description of Artificial Sequence: Synthetic oligonucleotide
aucggggacggauucuuuu

SEQ ID NO: 2232714 - RNA, 19 nt, Artificial Sequence
  Description of Artificial Sequence: Synthetic oligonucleotide
auuacccagcacaccaagu

SEQ ID NO: 2232715 - RNA, 19 nt, Artificial Sequence
  Description of Artificial Sequence: Synthetic oligonucleotide
gauaagauugggacagaau

SEQ ID NO: 2232716 - RNA, 19 nt, Artificial Sequence
  Description of Artificial Sequence: Synthetic oligonucleotide
uuuugaccgagggcugaga

SEQ ID NO: 2232717 - RNA, 19 nt, Artificial Sequence
  Description of Artificial Sequence: Synthetic oligonucleotide
ccacaauccacugguaaag

SEQ ID NO: 2232718 - RNA, 19 nt, Artificial Sequence
  Description of Artificial Sequence: Synthetic oligonucleotide
agaagccacuacauacucu

SEQ ID NO: 2232719 - RNA, 19 nt, Artificial Sequence
  Description of Artificial Sequence: Synthetic oligonucleotide
cuuuaggacuuccgcuuca

SEQ ID NO: 2232720 - RNA, 19 nt, Artificial Sequence
  Description of Artificial Sequence: Synthetic oligonucleotide
ggagaagaugcaacgagaa

SEQ ID NO: 2232721 - RNA, 19 nt, Artificial Sequence
  Description of Artificial Sequence: Synthetic oligonucleotide
uguucuccucaauggcuuu

SEQ ID NO: 2232722 - RNA, 19 nt, Artificial Sequence
  Description of Artificial Sequence: Synthetic oligonucleotide
cagaagaugccaugucgaa

SEQ ID NO: 2232723 - RNA, 19 nt, Artificial Sequence
  Description of Artificial Sequence: Synthetic oligonucleotide
uucaugagacuugcgucuu

SEQ ID NO: 2232724 - RNA, 19 nt, Artificial Sequence
  Description of Artificial Sequence: Synthetic oligonucleotide
cagcucaaaagccuggccu

SEQ ID NO: 2232725 - RNA, 19 nt, Artificial Sequence
  Description of Artificial Sequence: Synthetic oligonucleotide
cucacgcuucucagcgagc

SEQ ID NO: 2232726 - RNA, 19 nt, Artificial Sequence
  Description of Artificial Sequence: Synthetic oligonucleotide
aguacagucuuuggauauu

SEQ ID NO: 2232727 - RNA, 19 nt, Artificial Sequence
  Description of Artificial Sequence: Synthetic oligonucleotide
ucucagcgagcugcuuuag

SEQ ID NO: 2232728 - RNA, 19 nt, Artificial Sequence
  Description of Artificial Sequence: Synthetic oligonucleotide
ucaugagacuugcgucuuu

SEQ ID NO: 2232729 - RNA, 19 nt, Artificial Sequence
  Description of Artificial Sequence: Synthetic oligonucleotide
gagcccugcucgcuccgag

SEQ ID NO: 2232730 - RNA, 19 nt, Artificial Sequence
  Description of Artificial Sequence: Synthetic oligonucleotide
gcaucugauaagauuggga

SEQ ID NO: 2232731 - RNA, 19 nt, Artificial Sequence
  Description of Artificial Sequence: Synthetic oligonucleotide
gugugcugaaguggagaag

SEQ ID NO: 2232732 - RNA, 19 nt, Artificial Sequence
  Description of Artificial Sequence: Synthetic oligonucleotide
ggccaguacagucuuugga

SEQ ID NO: 2232733 - RNA, 19 nt, Artificial Sequence
  Description of Artificial Sequence: Synthetic oligonucleotide
gcugagaaucagcucaaaa

SEQ ID NO: 2232734 - RNA, 19 nt, Artificial Sequence
  Description of Artificial Sequence: Synthetic oligonucleotide
uggggucggggagaaaguc

SEQ ID NO: 2232735 - RNA, 19 nt, Artificial Sequence
  Description of Artificial Sequence: Synthetic oligonucleotide
cugcuuuaggacuuccgcu

SEQ ID NO: 2232736 - RNA, 19 nt, Artificial Sequence
  Description of Artificial Sequence: Synthetic oligonucleotide
cacccuccacaauccacug

SEQ ID NO: 2232737 - RNA, 19 nt, Artificial Sequence
  Description of Artificial Sequence: Synthetic oligonucleotide
gaucuaccuauacgguccu

SEQ ID NO: 2232738 - RNA, 19 nt, Artificial Sequence
  Description of Artificial Sequence: Synthetic oligonucleotide
cagcuucuagaauauuugu

SEQ ID NO: 2232739 - RNA, 19 nt, Artificial Sequence
  Description of Artificial Sequence: Synthetic oligonucleotide
agcaucuaacagguuggaa

SEQ ID NO: 2232740 - RNA, 19 nt, Artificial Sequence
  Description of Artificial Sequence: Synthetic oligonucleotide
ccucaauggcuuucugaag

SEQ ID NO: 2232741 - RNA, 19 nt, Artificial Sequence
  Description of Artificial Sequence: Synthetic oligonucleotide
ggucuggaucuaccuauac

SEQ ID NO: 2232742 - RNA, 19 nt, Artificial Sequence
  Description of Artificial Sequence: Synthetic oligonucleotide
accgagggcugagaaucag

SEQ ID NO: 2232743 - RNA, 19 nt, Artificial Sequence
  Description of Artificial Sequence: Synthetic oligonucleotide
cgugcuuguccuucucucg

SEQ ID NO: 2232744 - RNA, 19 nt, Artificial Sequence
  Description of Artificial Sequence: Synthetic oligonucleotide
ccacugguaaagagagccc

SEQ ID NO: 2232745 - RNA, 19 nt, Artificial Sequence
  Description of Artificial Sequence: Synthetic oligonucleotide
cagccucggucucauccgc

SEQ ID NO: 2232746 - RNA, 19 nt, Artificial Sequence
  Description of Artificial Sequence: Synthetic oligonucleotide
guccuacaucagcuucuag

SEQ ID NO: 2232747 - RNA, 19 nt, Artificial Sequence
  Description of Artificial Sequence: Synthetic oligonucleotide
aucugcgccucgcgguucu

SEQ ID NO: 2232748 - RNA, 19 nt, Artificial Sequence
  Description of Artificial Sequence: Synthetic oligonucleotide
cacaauccacugguaaaga

SEQ ID NO: 2232749 - RNA, 19 nt, Artificial Sequence
  Description of Artificial Sequence: Synthetic oligonucleotide
gacuugcgucuuucuucug

SEQ ID NO: 2232750 - RNA, 19 nt, Artificial Sequence
  Description of Artificial Sequence: Synthetic oligonucleotide
gccaguacagucuuuggau

SEQ ID NO: 2232751 - RNA, 19 nt, Artificial Sequence
  Description of Artificial Sequence: Synthetic oligonucleotide
cuggaucuaccuauacggu

SEQ ID NO: 2232752 - RNA, 19 nt, Artificial Sequence
  Description of Artificial Sequence: Synthetic oligonucleotide
gcuuuaggacuuccgcuuc

SEQ ID NO: 2232753 - RNA, 19 nt, Artificial Sequence
  Description of Artificial Sequence: Synthetic oligonucleotide
cucauccgcagggucuuug

SEQ ID NO: 2232754 - RNA, 19 nt, Artificial Sequence
  Description of Artificial Sequence: Synthetic oligonucleotide
ggggacggauucuuuugac

SEQ ID NO: 2232755 - RNA, 19 nt, Artificial Sequence
  Description of Artificial Sequence: Synthetic oligonucleotide
gugaacagauaaucagcau

SEQ ID NO: 2232756 - RNA, 19 nt, Artificial Sequence
  Description of Artificial Sequence: Synthetic oligonucleotide
caaacgucuuccacagagu

SEQ ID NO: 2232757 - RNA, 19 nt, Artificial Sequence
  Description of Artificial Sequence: Synthetic oligonucleotide
caccugaauaucagaagau

SEQ ID NO: 2232758 - RNA, 19 nt, Artificial Sequence
  Description of Artificial Sequence: Synthetic oligonucleotide
cgugcacccuccacaaucc

SEQ ID NO: 2232759 - RNA, 19 nt, Artificial Sequence
  Description of Artificial Sequence: Synthetic oligonucleotide
ucggucucauccgcagggu

SEQ ID NO: 2232760 - RNA, 19 nt, Artificial Sequence
  Description of Artificial Sequence: Synthetic oligonucleotide
ccgugcacccuccacaauc

SEQ ID NO: 2232761 - RNA, 19 nt, Artificial Sequence
  Description of Artificial Sequence: Synthetic oligonucleotide
cacugguaaagagagcccu

SEQ ID NO: 2232762 - RNA, 19 nt, Artificial Sequence
  Description of Artificial Sequence: Synthetic oligonucleotide
uagucagccucggucucau

SEQ ID NO: 2232763 - RNA, 19 nt, Artificial Sequence
  Description of Artificial Sequence: Synthetic oligonucleotide
cuuucucaugcucacgcuu

SEQ ID NO: 2232764 - RNA, 19 nt, Artificial Sequence
  Description of Artificial Sequence: Synthetic oligonucleotide
cagagucaauacaguacua

SEQ ID NO: 2232765 - RNA, 19 nt, Artificial Sequence
  Description of Artificial Sequence: Synthetic oligonucleotide
cuggccgugcacccuccac

SEQ ID NO: 2232766 - RNA, 19 nt, Artificial Sequence
  Description of Artificial Sequence: Synthetic oligonucleotide
gaagcacgcuucuccaguu

SEQ ID NO: 2232767 - RNA, 19 nt, Artificial Sequence
  Description of Artificial Sequence: Synthetic oligonucleotide
agguuggaagaagccacua

SEQ ID NO: 2232768 - RNA, 19 nt, Artificial Sequence
  Description of Artificial Sequence: Synthetic oligonucleotide
ccgcaccucuucaacgugc

SEQ ID NO: 2232769 - RNA, 19 nt, Artificial Sequence
  Description of Artificial Sequence: Synthetic oligonucleotide
gccuccauuuuguggguca

SEQ ID NO: 2232770 - RNA, 19 nt, Artificial Sequence
  Description of Artificial Sequence: Synthetic oligonucleotide
caaauuagucagccucggu

SEQ ID NO: 2232771 - RNA, 19 nt, Artificial Sequence
  Description of Artificial Sequence: Synthetic oligonucleotide
augccaugucgaacagaag

SEQ ID NO: 2232772 - RNA, 19 nt, Artificial Sequence
  Description of Artificial Sequence: Synthetic oligonucleotide
gcgucuuucuucugcagcu

SEQ ID NO: 2232773 - RNA, 19 nt, Artificial Sequence
  Description of Artificial Sequence: Synthetic oligonucleotide
ugcgccucgcgguucucuu

SEQ ID NO: 2232774 - RNA, 19 nt, Artificial Sequence
  Description of Artificial Sequence: Synthetic oligonucleotide
gcgguucucuuuguuggcc

SEQ ID NO: 2232775 - RNA, 19 nt, Artificial Sequence
  Description of Artificial Sequence: Synthetic oligonucleotide
ucuccccuugagccccgaa

SEQ ID NO: 2232776 - RNA, 19 nt, Artificial Sequence
  Description of Artificial Sequence: Synthetic oligonucleotide
ccacagagucaauacagua

SEQ ID NO: 2232777 - RNA, 19 nt, Artificial Sequence
  Description of Artificial Sequence: Synthetic oligonucleotide
cacggucuggaucuaccua

SEQ ID NO: 2232778 - RNA, 19 nt, Artificial Sequence
  Description of Artificial Sequence: Synthetic oligonucleotide
ggacagaauugggauggca

SEQ ID NO: 2232779 - RNA, 19 nt, Artificial Sequence
  Description of Artificial Sequence: Synthetic oligonucleotide
gggaaaaucggggacggau

SEQ ID NO: 2232780 - RNA, 19 nt, Artificial Sequence
  Description of Artificial Sequence: Synthetic oligonucleotide
gaccgagggcugagaauca

SEQ ID NO: 2232781 - RNA, 19 nt, Artificial Sequence
  Description of Artificial Sequence: Synthetic oligonucleotide
gcuacguuagaaagaccaa

SEQ ID NO: 2232782 - RNA, 19 nt, Artificial Sequence
  Description of Artificial Sequence: Synthetic oligonucleotide
cuacaucagcuucuagaau

SEQ ID NO: 2232783 - RNA, 19 nt, Artificial Sequence
  Description of Artificial Sequence: Synthetic oligonucleotide
guacagucuuuggauauuu

SEQ ID NO: 2232784 - RNA, 19 nt, Artificial Sequence
  Description of Artificial Sequence: Synthetic oligonucleotide
cugauaagauugggacaga

SEQ ID NO: 2232785 - RNA, 19 nt, Artificial Sequence
  Description of Artificial Sequence: Synthetic oligonucleotide
cucgcaaacgcuccagcuu

SEQ ID NO: 2232786 - RNA, 19 nt, Artificial Sequence
  Description of Artificial Sequence: Synthetic oligonucleotide
gacuggccgugcacccucc

SEQ ID NO: 2232787 - RNA, 19 nt, Artificial Sequence
  Description of Artificial Sequence: Synthetic oligonucleotide
ccaguacagucuuuggaua

SEQ ID NO: 2232788 - RNA, 19 nt, Artificial Sequence
  Description of Artificial Sequence: Synthetic oligonucleotide
ccacuacauacucuucaca

SEQ ID NO: 2232789 - RNA, 19 nt, Artificial Sequence
  Description of Artificial Sequence: Synthetic oligonucleotide
ggagagguccuucuucuuu

SEQ ID NO: 2232790 - RNA, 19 nt, Artificial Sequence
  Description of Artificial Sequence: Synthetic oligonucleotide
cccgaaaacaucucacggu

SEQ ID NO: 2232791 - RNA, 19 nt, Artificial Sequence
  Description of Artificial Sequence: Synthetic oligonucleotide
cagcaucuaacagguugga

SEQ ID NO: 2232792 - RNA, 19 nt, Artificial Sequence
  Description of Artificial Sequence: Synthetic oligonucleotide
ggcaaagugaacagauaau

SEQ ID NO: 2232793 - RNA, 19 nt, Artificial Sequence
  Description of Artificial Sequence: Synthetic oligonucleotide
cacaaacgucuuccacaga

SEQ ID NO: 2232794 - RNA, 19 nt, Artificial Sequence
  Description of Artificial Sequence: Synthetic oligonucleotide
cccuugagccccgaaaaca

SEQ ID NO: 2232795 - RNA, 19 nt, Artificial Sequence
  Description of Artificial Sequence: Synthetic oligonucleotide
gcaaacgcuccagcuuggc

SEQ ID NO: 2232796 - RNA, 19 nt, Artificial Sequence
  Description of Artificial Sequence: Synthetic oligonucleotide
cugcucgcuccgagccgcc

SEQ ID NO: 2232797 - RNA, 19 nt, Artificial Sequence
  Description of Artificial Sequence: Synthetic oligonucleotide
cggauucuuuugaccgagg

SEQ ID NO: 2232798 - RNA, 19 nt, Artificial Sequence
  Description of Artificial Sequence: Synthetic oligonucleotide
ggucucauccgcagggucu

SEQ ID NO: 2232799 - RNA, 19 nt, Artificial Sequence
  Description of Artificial Sequence: Synthetic oligonucleotide
cgcaaacgcuccagcuugg

SEQ ID NO: 2232800 - RNA, 19 nt, Artificial Sequence
  Description of Artificial Sequence: Synthetic oligonucleotide
agagcccugcucgcuccga

SEQ ID NO: 2232801 - RNA, 19 nt, Artificial Sequence
  Description of Artificial Sequence: Synthetic oligonucleotide
ggaaaaucggggacggauu

SEQ ID NO: 2232802 - RNA, 19 nt, Artificial Sequence
  Description of Artificial Sequence: Synthetic oligonucleotide
cuuccgcuucaugagacuu

SEQ ID NO: 2232803 - RNA, 19 nt, Artificial Sequence
  Description of Artificial Sequence: Synthetic oligonucleotide
gcacccuccacaauccacu

SEQ ID NO: 2232804 - RNA, 19 nt, Artificial Sequence
  Description of Artificial Sequence: Synthetic oligonucleotide
caucugcgccucgcgguuc

SEQ ID NO: 2232805 - RNA, 19 nt, Artificial Sequence
  Description of Artificial Sequence: Synthetic oligonucleotide
agccucggucucauccgca

SEQ ID NO: 2232806 - RNA, 19 nt, Artificial Sequence
  Description of Artificial Sequence: Synthetic oligonucleotide
ccgcagggucuuuggauuc

SEQ ID NO: 2232807 - RNA, 19 nt, Artificial Sequence
  Description of Artificial Sequence: Synthetic oligonucleotide
gagacuggccgugcacccu

SEQ ID NO: 2232808 - RNA, 19 nt, Artificial Sequence
  Description of Artificial Sequence: Synthetic oligonucleotide
cgcgguucucuuuguuggc

SEQ ID NO: 2232809 - RNA, 19 nt, Artificial Sequence
  Description of Artificial Sequence: Synthetic oligonucleotide
ccgcuucaugagacuugcg

SEQ ID NO: 2232810 - RNA, 19 nt, Artificial Sequence
  Description of Artificial Sequence: Synthetic oligonucleotide
cgcuucaugagacuugcgu

SEQ ID NO: 2232811 - RNA, 19 nt, Artificial Sequence
  Description of Artificial Sequence: Synthetic oligonucleotide
cccugcucgcuccgagccg

SEQ ID NO: 2232812 - RNA, 19 nt, Artificial Sequence
  Description of Artificial Sequence: Synthetic oligonucleotide
ccauuacccagcacaccaa

SEQ ID NO: 2232813 - RNA, 19 nt, Artificial Sequence
  Description of Artificial Sequence: Synthetic oligonucleotide
gguccuacaucagcuucua

SEQ ID NO: 2232814 - RNA, 19 nt, Artificial Sequence
  Description of Artificial Sequence: Synthetic oligonucleotide
aucuaccuauacgguccua

SEQ ID NO: 2232815 - RNA, 19 nt, Artificial Sequence
  Description of Artificial Sequence: Synthetic oligonucleotide
ucucauccgcagggucuuu

SEQ ID NO: 2232816 - RNA, 19 nt, Artificial Sequence
  Description of Artificial Sequence: Synthetic oligonucleotide
ccgccaucugcgccucgcg

SEQ ID NO: 2232817 - RNA, 19 nt, Artificial Sequence
  Description of Artificial Sequence: Synthetic oligonucleotide
cgccucgcgguucucuuug

SEQ ID NO: 2232818 - RNA, 19 nt, Artificial Sequence
  Description of Artificial Sequence: Synthetic oligonucleotide
ucugcgccucgcgguucuc

SEQ ID NO: 2232819 - RNA, 19 nt, Artificial Sequence
  Description of Artificial Sequence: Synthetic oligonucleotide
cuucaacgugcuuguccuu

SEQ ID NO: 2232820 - RNA, 19 nt, Artificial Sequence
  Description of Artificial Sequence: Synthetic oligonucleotide
ggcugagaaucagcucaaa

SEQ ID NO: 2232821 - RNA, 19 nt, Artificial Sequence
  Description of Artificial Sequence: Synthetic oligonucleotide
cggggacggauucuuuuga

SEQ ID NO: 2232822 - RNA, 19 nt, Artificial Sequence
  Description of Artificial Sequence: Synthetic oligonucleotide
gcacaccaagugugcugaa

SEQ ID NO: 2232823 - RNA, 19 nt, Artificial Sequence
  Description of Artificial Sequence: Synthetic oligonucleotide
gggagagguccuucuucuu

SEQ ID NO: 2232824 - RNA, 19 nt, Artificial Sequence
  Description of Artificial Sequence: Synthetic oligonucleotide
gcgagcugcuuuaggacuu

SEQ ID NO: 2232825 - RNA, 19 nt, Artificial Sequence
  Description of Artificial Sequence: Synthetic oligonucleotide
ccauuuugugggucagcuu

SEQ ID NO: 2232826 - RNA, 19 nt, Artificial Sequence
  Description of Artificial Sequence: Synthetic oligonucleotide
cagcacugugcaguuuauu

SEQ ID NO: 2232827 - RNA, 19 nt, Artificial Sequence
  Description of Artificial Sequence: Synthetic oligonucleotide
cugcgccucgcgguucucu

SEQ ID NO: 2232828 - RNA, 19 nt, Artificial Sequence
  Description of Artificial Sequence: Synthetic oligonucleotide
cggucuggaucuaccuaua

SEQ ID NO: 2232829 - RNA, 19 nt, Artificial Sequence
  Description of Artificial Sequence: Synthetic oligonucleotide
gccucgcgguucucuuugu

SEQ ID NO: 2232830 - RNA, 19 nt, Artificial Sequence
  Description of Artificial Sequence: Synthetic oligonucleotide
ccaucugcgccucgcgguu

SEQ ID NO: 2232831 - RNA, 19 nt, Artificial Sequence
  Description of Artificial Sequence: Synthetic oligonucleotide
ccaguuccuucaccugaau

SEQ ID NO: 2232832 - RNA, 19 nt, Artificial Sequence
  Description of Artificial Sequence: Synthetic oligonucleotide
ggauggggucggggagaaa

SEQ ID NO: 2232833 - RNA, 19 nt, Artificial Sequence
  Description of Artificial Sequence: Synthetic oligonucleotide
gcgccucgcgguucucuuu

SEQ ID NO: 2232834 - RNA, 19 nt, Artificial Sequence
  Description of Artificial Sequence: Synthetic oligonucleotide
ccucgcgguucucuuuguu

SEQ ID NO: 2232835 - RNA, 19 nt, Artificial Sequence
  Description of Artificial Sequence: Synthetic oligonucleotide
aauuuugucauacacaagg

SEQ ID NO: 2232836 - RNA, 19 nt, Artificial Sequence
  Description of Artificial Sequence: Synthetic oligonucleotide
aacaagaagauuuguaugc

SEQ ID NO: 2232837 - RNA, 19 nt, Artificial Sequence
  Description of Artificial Sequence: Synthetic oligonucleotide
uauuacaaaguucuggagg

SEQ ID NO: 2232838 - RNA, 19 nt, Artificial Sequence
  Description of Artificial Sequence: Synthetic oligonucleotide
auuacaaaguucuggaggc

SEQ ID NO: 2232839 - RNA, 19 nt, Artificial Sequence
  Description of Artificial Sequence: Synthetic oligonucleotide
aagauuuguaugcacacgg

SEQ ID NO: 2232840 - RNA, 19 nt, Artificial Sequence
  Description of Artificial Sequence: Synthetic oligonucleotide
uauauuucacaacuuaaag

SEQ ID NO: 2232841 - RNA, 19 nt, Artificial Sequence
  Description of Artificial Sequence: Synthetic oligonucleotide
uuauguauauuucacaacu

SEQ ID NO: 2232842 - RNA, 19 nt, Artificial Sequence
  Description of Artificial Sequence: Synthetic oligonucleotide
cacaaaaucauccagcucc

SEQ ID NO: 2232843 - RNA, 19 nt, Artificial Sequence
  Description of Artificial Sequence: Synthetic oligonucleotide
aaagauggcuuccuguccc

SEQ ID NO: 2232844 - RNA, 19 nt, Artificial Sequence
  Description of Artificial Sequence: Synthetic oligonucleotide
aaaaugggaaacuuuauau

SEQ ID NO: 2232845 - RNA, 19 nt, Artificial Sequence
  Description of Artificial Sequence: Synthetic oligonucleotide
aauauauucaaugccacug

SEQ ID NO: 2232846 - RNA, 19 nt, Artificial Sequence
  Description of Artificial Sequence: Synthetic oligonucleotide
uugaauauauucaaugcca

SEQ ID NO: 2232847 - RNA, 19 nt, Artificial Sequence
  Description of Artificial Sequence: Synthetic oligonucleotide
ucuaaauuuugucauacac

SEQ ID NO: 2232848 - RNA, 19 nt, Artificial Sequence
  Description of Artificial Sequence: Synthetic oligonucleotide
uguagcuuggguaaaguag

SEQ ID NO: 2232849 - RNA, 19 nt, Artificial Sequence
  Description of Artificial Sequence: Synthetic oligonucleotide
uguaucagagguuucuucg

SEQ ID NO: 2232850 - RNA, 19 nt, Artificial Sequence
  Description of Artificial Sequence: Synthetic oligonucleotide
uuauauuauguauauuuca

SEQ ID NO: 2232851 - RNA, 19 nt, Artificial Sequence
  Description of Artificial Sequence: Synthetic oligonucleotide
ugaacuggaagacagacuc

SEQ ID NO: 2232852 - RNA, 19 nt, Artificial Sequence
  Description of Artificial Sequence: Synthetic oligonucleotide
aaggauacagcaaaggcuc

SEQ ID NO: 2232853 - RNA, 19 nt, Artificial Sequence
  Description of Artificial Sequence: Synthetic oligonucleotide
aaaucucuccucuggaggg

SEQ ID NO: 2232854 - RNA, 19 nt, Artificial Sequence
  Description of Artificial Sequence: Synthetic oligonucleotide
cauaccauagcauagauaa

SEQ ID NO: 2232855 - RNA, 19 nt, Artificial Sequence
  Description of Artificial Sequence: Synthetic oligonucleotide
aaauacauaccauagcaua

SEQ ID NO: 2232856 - RNA, 19 nt, Artificial Sequence
  Description of Artificial Sequence: Synthetic oligonucleotide
ugaaggauacagcaaaggc

SEQ ID NO: 2232857 - RNA, 19 nt, Artificial Sequence
  Description of Artificial Sequence: Synthetic oligonucleotide
uuugucauacacaaggaaa

SEQ ID NO: 2232858 - RNA, 19 nt, Artificial Sequence
  Description of Artificial Sequence: Synthetic oligonucleotide
auaaagauggcuuccuguc

SEQ ID NO: 2232859 - RNA, 19 nt, Artificial Sequence
  Description of Artificial Sequence: Synthetic oligonucleotide
aauccaaagucccuucuag

SEQ ID NO: 2232860 - RNA, 19 nt, Artificial Sequence
  Description of Artificial Sequence: Synthetic oligonucleotide
auuaucuaaauuuugucau

SEQ ID NO: 2232861 - RNA, 19 nt, Artificial Sequence
  Description of Artificial Sequence: Synthetic oligonucleotide
uacuguuccauguacauga

SEQ ID NO: 2232862 - RNA, 19 nt, Artificial Sequence
  Description of Artificial Sequence: Synthetic oligonucleotide
agaagauuuguaugcacac

SEQ ID NO: 2232863 - RNA, 19 nt, Artificial Sequence
  Description of Artificial Sequence: Synthetic oligonucleotide
uuugcaauggucuccacga

SEQ ID NO: 2232864 - RNA, 19 nt, Artificial Sequence
  Description of Artificial Sequence: Synthetic oligonucleotide
ucauacacaaggaaagucu

SEQ ID NO: 2232865 - RNA, 19 nt, Artificial Sequence
  Description of Artificial Sequence: Synthetic oligonucleotide
uguggagaauguaucagag

SEQ ID NO: 2232866 - RNA, 19 nt, Artificial Sequence
  Description of Artificial Sequence: Synthetic oligonucleotide
cauuauuacaaaguucugg

SEQ ID NO: 2232867 - RNA, 19 nt, Artificial Sequence
  Description of Artificial Sequence: Synthetic oligonucleotide
uguauauuucacaacuuaa

SEQ ID NO: 2232868 - RNA, 19 nt, Artificial Sequence
  Description of Artificial Sequence: Synthetic oligonucleotide
agaacaagaagauuuguau

SEQ ID NO: 2232869 - RNA, 19 nt, Artificial Sequence
  Description of Artificial Sequence: Synthetic oligonucleotide
aagaccuuuauccugguuu

SEQ ID NO: 2232870 - RNA, 19 nt, Artificial Sequence
  Description of Artificial Sequence: Synthetic oligonucleotide
ugagaacauuauuacaaag

SEQ ID NO: 2232871 - RNA, 19 nt, Artificial Sequence
  Description of Artificial Sequence: Synthetic oligonucleotide
aaaaucauccagcuccgca

SEQ ID NO: 2232872 - RNA, 19 nt, Artificial Sequence
  Description of Artificial Sequence: Synthetic oligonucleotide
uuuguaugcacacggacuc

SEQ ID NO: 2232873 - RNA, 19 nt, Artificial Sequence
  Description of Artificial Sequence: Synthetic oligonucleotide
uuuauccugguuuuccucc

SEQ ID NO: 2232874 - RNA, 19 nt, Artificial Sequence
  Description of Artificial Sequence: Synthetic oligonucleotide
aacauuaucuaaauuuugu

SEQ ID NO: 2232875 - RNA, 19 nt, Artificial Sequence
  Description of Artificial Sequence: Synthetic oligonucleotide
agaacauuauuacaaaguu

SEQ ID NO: 2232876 - RNA, 19 nt, Artificial Sequence
  Description of Artificial Sequence: Synthetic oligonucleotide
acagcaaaggcucacaaaa

SEQ ID NO: 2232877 - RNA, 19 nt, Artificial Sequence
  Description of Artificial Sequence: Synthetic oligonucleotide
uccgcaauuaauccaaagu

SEQ ID NO: 2232878 - RNA, 19 nt, Artificial Sequence
  Description of Artificial Sequence: Synthetic oligonucleotide
gguaaaguagaacaagaag

SEQ ID NO: 2232879 - RNA, 19 nt, Artificial Sequence
  Description of Artificial Sequence: Synthetic oligonucleotide
uaaaaugggaaacuuuaua

SEQ ID NO: 2232880 - RNA, 19 nt, Artificial Sequence
  Description of Artificial Sequence: Synthetic oligonucleotide
uguacaugauguuccaggc

SEQ ID NO: 2232881 - RNA, 19 nt, Artificial Sequence
  Description of Artificial Sequence: Synthetic oligonucleotide
ugagcaacacacugaaaag

SEQ ID NO: 2232882 - RNA, 19 nt, Artificial Sequence
  Description of Artificial Sequence: Synthetic oligonucleotide
cauuaucuaaauuuuguca

SEQ ID NO: 2232883 - RNA, 19 nt, Artificial Sequence
  Description of Artificial Sequence: Synthetic oligonucleotide
aggcaaaugaugguaaugg

SEQ ID NO: 2232884 - RNA, 19 nt, Artificial Sequence
  Description of Artificial Sequence: Synthetic oligonucleotide
auuaauccaaagucccuuc

SEQ ID NO: 2232885 - RNA, 19 nt, Artificial Sequence
  Description of Artificial Sequence: Synthetic oligonucleotide
uucuauugcauuauccaaa

SEQ ID NO: 2232886 - RNA, 19 nt, Artificial Sequence
  Description of Artificial Sequence: Synthetic oligonucleotide
aaaugggaaacuuuauauu

SEQ ID NO: 2232887 - RNA, 19 nt, Artificial Sequence
  Description of Artificial Sequence: Synthetic oligonucleotide
gaagacuuuguggagaaug

SEQ ID NO: 2232888 - RNA, 19 nt, Artificial Sequence
  Description of Artificial Sequence: Synthetic oligonucleotide
cuucuagaaaagcaaauuc

SEQ ID NO: 2232889 - RNA, 19 nt, Artificial Sequence
  Description of Artificial Sequence: Synthetic oligonucleotide
uggguaaaguagaacaaga

SEQ ID NO: 2232890 - RNA, 19 nt, Artificial Sequence
  Description of Artificial Sequence: Synthetic oligonucleotide
gaaacuuuauauuauguau

SEQ ID NO: 2232891 - RNA, 19 nt, Artificial Sequence
  Description of Artificial Sequence: Synthetic oligonucleotide
aggcugagaacauuauuac

SEQ ID NO: 2232892 - RNA, 19 nt, Artificial Sequence
  Description of Artificial Sequence: Synthetic oligonucleotide
uguugagcgcagcaguagg

SEQ ID NO: 2232893 - RNA, 19 nt, Artificial Sequence
  Description of Artificial Sequence: Synthetic oligonucleotide
uccgccuucaccaaagccu

SEQ ID NO: 2232894 - RNA, 19 nt, Artificial Sequence
  Description of Artificial Sequence: Synthetic oligonucleotide
acacaaggaaagucugugc

SEQ ID NO: 2232895 - RNA, 19 nt, Artificial Sequence
  Description of Artificial Sequence: Synthetic oligonucleotide
agaugaaggauacagcaaa

SEQ ID NO: 2232896 - RNA, 19 nt, Artificial Sequence
  Description of Artificial Sequence: Synthetic oligonucleotide
gauuuguaugcacacggac

SEQ ID NO: 2232897 - RNA, 19 nt, Artificial Sequence
  Description of Artificial Sequence: Synthetic oligonucleotide
uaucuaaauuuugucauac

SEQ ID NO: 2232898 - RNA, 19 nt, Artificial Sequence
  Description of Artificial Sequence: Synthetic oligonucleotide
caacacacugaaaagcaag

SEQ ID NO: 2232899 - RNA, 19 nt, Artificial Sequence
  Description of Artificial Sequence: Synthetic oligonucleotide
aagacagacucgaauaaug

SEQ ID NO: 2232900 - RNA, 19 nt, Artificial Sequence
  Description of Artificial Sequence: Synthetic oligonucleotide
uuuguggagaauguaucag

SEQ ID NO: 2232901 - RNA, 19 nt, Artificial Sequence
  Description of Artificial Sequence: Synthetic oligonucleotide
ugcaauacaguccuuucau

SEQ ID NO: 2232902 - RNA, 19 nt, Artificial Sequence
  Description of Artificial Sequence: Synthetic oligonucleotide
aagaagauuuguaugcaca

SEQ ID NO: 2232903 - RNA, 19 nt, Artificial Sequence
  Description of Artificial Sequence: Synthetic oligonucleotide
auuauccaaaucucuccuc

SEQ ID NO: 2232904 - RNA, 19 nt, Artificial Sequence
  Description of Artificial Sequence: Synthetic oligonucleotide
uaccauagcauagauaaaa

SEQ ID NO: 2232905 - RNA, 19 nt, Artificial Sequence
  Description of Artificial Sequence: Synthetic oligonucleotide
acagggcaagagcaaaggc

SEQ ID NO: 2232906 - RNA, 19 nt, Artificial Sequence
  Description of Artificial Sequence: Synthetic oligonucleotide
auauucaaugccacugagc

SEQ ID NO: 2232907 - RNA, 19 nt, Artificial Sequence
  Description of Artificial Sequence: Synthetic oligonucleotide
ugggaaacuuuauauuaug

SEQ ID NO: 2232908 - RNA, 19 nt, Artificial Sequence
  Description of Artificial Sequence: Synthetic oligonucleotide
auauauucaaugccacuga

SEQ ID NO: 2232909 - RNA, 19 nt, Artificial Sequence
  Description of Artificial Sequence: Synthetic oligonucleotide
aaacuuuauauuauguaua

SEQ ID NO: 2232910 - RNA, 19 nt, Artificial Sequence
  Description of Artificial Sequence: Synthetic oligonucleotide
gaggcuuacacagggaaag

SEQ ID NO: 2232911 - RNA, 19 nt, Artificial Sequence
  Description of Artificial Sequence: Synthetic oligonucleotide
aaagcaaguuaaaauggga

SEQ ID NO: 2232912 - RNA, 19 nt, Artificial Sequence
  Description of Artificial Sequence: Synthetic oligonucleotide
agcuucuauugcauuaucc

SEQ ID NO: 2232913 - RNA, 19 nt, Artificial Sequence
  Description of Artificial Sequence: Synthetic oligonucleotide
ucuauugcauuauccaaau

SEQ ID NO: 2232914 - RNA, 19 nt, Artificial Sequence
  Description of Artificial Sequence: Synthetic oligonucleotide
cuucacucucgccagaggc

SEQ ID NO: 2232915 - RNA, 19 nt, Artificial Sequence
  Description of Artificial Sequence: Synthetic oligonucleotide
uacacaaggaaagucugug

SEQ ID NO: 2232916 - RNA, 19 nt, Artificial Sequence
  Description of Artificial Sequence: Synthetic oligonucleotide
accuuuauccugguuuucc

SEQ ID NO: 2232917 - RNA, 19 nt, Artificial Sequence
  Description of Artificial Sequence: Synthetic oligonucleotide
cagacucgaauaauggaag

SEQ ID NO: 2232918 - RNA, 19 nt, Artificial Sequence
  Description of Artificial Sequence: Synthetic oligonucleotide
aggguacaaauacauacca

SEQ ID NO: 2232919 - RNA, 19 nt, Artificial Sequence
  Description of Artificial Sequence: Synthetic oligonucleotide
agcaaguuaaaaugggaaa

SEQ ID NO: 2232920 - RNA, 19 nt, Artificial Sequence
  Description of Artificial Sequence: Synthetic oligonucleotide
uccaaagucccuucuagaa

SEQ ID NO: 2232921 - RNA, 19 nt, Artificial Sequence
  Description of Artificial Sequence: Synthetic oligonucleotide
accaaagaccuuuauccug

SEQ ID NO: 2232922 - RNA, 19 nt, Artificial Sequence
  Description of Artificial Sequence: Synthetic oligonucleotide
uccagcuccgcaauuaauc

SEQ ID NO: 2232923 - RNA, 19 nt, Artificial Sequence
  Description of Artificial Sequence: Synthetic oligonucleotide
guaggcaucuuuugcaaug

SEQ ID NO: 2232924 - RNA, 19 nt, Artificial Sequence
  Description of Artificial Sequence: Synthetic oligonucleotide
cugagcaacacacugaaaa

SEQ ID NO: 2232925 - RNA, 19 nt, Artificial Sequence
  Description of Artificial Sequence: Synthetic oligonucleotide
auguauauuucacaacuua

SEQ ID NO: 2232926 - RNA, 19 nt, Artificial Sequence
  Description of Artificial Sequence: Synthetic oligonucleotide
augaaggauacagcaaagg

SEQ ID NO: 2232927 - RNA, 19 nt, Artificial Sequence
  Description of Artificial Sequence: Synthetic oligonucleotide
augaugguaauggcugugc

SEQ ID NO: 2232928 - RNA, 19 nt, Artificial Sequence
  Description of Artificial Sequence: Synthetic oligonucleotide
aagcaaguuaaaaugggaa

SEQ ID NO: 2232929 - RNA, 19 nt, Artificial Sequence
  Description of Artificial Sequence: Synthetic oligonucleotide
agacagacucgaauaaugg

SEQ ID NO: 2232930 - RNA, 19 nt, Artificial Sequence
  Description of Artificial Sequence: Synthetic oligonucleotide
uaugcaauacaguccuuuc

SEQ ID NO: 2232931 - RNA, 19 nt, Artificial Sequence
  Description of Artificial Sequence: Synthetic oligonucleotide
gaugaaggauacagcaaag

SEQ ID NO: 2232932 - RNA, 19 nt, Artificial Sequence
  Description of Artificial Sequence: Synthetic oligonucleotide
aguagaacaagaagauuug

SEQ ID NO: 2232933 - RNA, 19 nt, Artificial Sequence
  Description of Artificial Sequence: Synthetic oligonucleotide
ugcaugguucuccagucac

SEQ ID NO: 2232934 - RNA, 19 nt, Artificial Sequence
  Description of Artificial Sequence: Synthetic oligonucleotide
agggaaagaugaaggauac

SEQ ID NO: 2232935 - RNA, 19 nt, Artificial Sequence
  Description of Artificial Sequence: Synthetic oligonucleotide
ucuucgucuuguagcuugg

SEQ ID NO: 2232936 - RNA, 19 nt, Artificial Sequence
  Description of Artificial Sequence: Synthetic oligonucleotide
gauaaagauggcuuccugu

SEQ ID NO: 2232937 - RNA, 19 nt, Artificial Sequence
  Description of Artificial Sequence: Synthetic oligonucleotide
caagaagauuuguaugcac

SEQ ID NO: 2232938 - RNA, 19 nt, Artificial Sequence
  Description of Artificial Sequence: Synthetic oligonucleotide
acucgaauaauggaagacu

SEQ ID NO: 2232939 - RNA, 19 nt, Artificial Sequence
  Description of Artificial Sequence: Synthetic oligonucleotide
auuuguaugcacacggacu

SEQ ID NO: 2232940 - RNA, 19 nt, Artificial Sequence
  Description of Artificial Sequence: Synthetic oligonucleotide
gcaauuaauccaaaguccc

SEQ ID NO: 2232941 - RNA, 19 nt, Artificial Sequence
  Description of Artificial Sequence: Synthetic oligonucleotide
gacagacucgaauaaugga

SEQ ID NO: 2232942 - RNA, 19 nt, Artificial Sequence
  Description of Artificial Sequence: Synthetic oligonucleotide
aagacuuuguggagaaugu

SEQ ID NO: 2232943 - RNA, 19 nt, Artificial Sequence
  Description of Artificial Sequence: Synthetic oligonucleotide
ugaugguaauggcugugca

SEQ ID NO: 2232944 - RNA, 19 nt, Artificial Sequence
  Description of Artificial Sequence: Synthetic oligonucleotide
gagaacauuauuacaaagu

SEQ ID NO: 2232945 - RNA, 19 nt, Artificial Sequence
  Description of Artificial Sequence: Synthetic oligonucleotide
aaguuaaaaugggaaacuu

SEQ ID NO: 2232946 - RNA, 19 nt, Artificial Sequence
  Description of Artificial Sequence: Synthetic oligonucleotide
uucacucucgccagaggca

SEQ ID NO: 2232947 - RNA, 19 nt, Artificial Sequence
  Description of Artificial Sequence: Synthetic oligonucleotide
uacauaccauagcauagau

SEQ ID NO: 2232948 - RNA, 19 nt, Artificial Sequence
  Description of Artificial Sequence: Synthetic oligonucleotide
uaugcacacggacucucca

SEQ ID NO: 2232949 - RNA, 19 nt, Artificial Sequence
  Description of Artificial Sequence: Synthetic oligonucleotide
uaucagagguuucuucguc

SEQ ID NO: 2232950 - RNA, 19 nt, Artificial Sequence
  Description of Artificial Sequence: Synthetic oligonucleotide
cgcgccaggauaaagaugg

SEQ ID NO: 2232951 - RNA, 19 nt, Artificial Sequence
  Description of Artificial Sequence: Synthetic oligonucleotide
augcaauacaguccuuuca

SEQ ID NO: 2232952 - RNA, 19 nt, Artificial Sequence
  Description of Artificial Sequence: Synthetic oligonucleotide
cuuuguggagaauguauca

SEQ ID NO: 2232953 - RNA, 19 nt, Artificial Sequence
  Description of Artificial Sequence: Synthetic oligonucleotide
acaaaaucauccagcuccg

SEQ ID NO: 2232954 - RNA, 19 nt, Artificial Sequence
  Description of Artificial Sequence: Synthetic oligonucleotide
acagacucgaauaauggaa

SEQ ID NO: 2232955 - RNA, 19 nt, Artificial Sequence
  Description of Artificial Sequence: Synthetic oligonucleotide
acuuaaaggaaaggguaca

SEQ ID NO: 2232956 - RNA, 19 nt, Artificial Sequence
  Description of Artificial Sequence: Synthetic oligonucleotide
acacggacucuccaaagcu

SEQ ID NO: 2232957 - RNA, 19 nt, Artificial Sequence
  Description of Artificial Sequence: Synthetic oligonucleotide
ucacugagccacuuaugca

SEQ ID NO: 2232958 - RNA, 19 nt, Artificial Sequence
  Description of Artificial Sequence: Synthetic oligonucleotide
aucuaaauuuugucauaca

SEQ ID NO: 2232959 - RNA, 19 nt, Artificial Sequence
  Description of Artificial Sequence: Synthetic oligonucleotide
cugaccaaagaccuuuauc

SEQ ID NO: 2232960 - RNA, 19 nt, Artificial Sequence
  Description of Artificial Sequence: Synthetic oligonucleotide
uucgucuuguagcuugggu

SEQ ID NO: 2232961 - RNA, 19 nt, Artificial Sequence
  Description of Artificial Sequence: Synthetic oligonucleotide
aucagagguuucuucgucu

SEQ ID NO: 2232962 - RNA, 19 nt, Artificial Sequence
  Description of Artificial Sequence: Synthetic oligonucleotide
uggaggcaaaugaugguaa

SEQ ID NO: 2232963 - RNA, 19 nt, Artificial Sequence
  Description of Artificial Sequence: Synthetic oligonucleotide
agccacuuaugcaauacag

SEQ ID NO: 2232964 - RNA, 19 nt, Artificial Sequence
  Description of Artificial Sequence: Synthetic oligonucleotide
uaauccaaagucccuucua

SEQ ID NO: 2232965 - RNA, 19 nt, Artificial Sequence
  Description of Artificial Sequence: Synthetic oligonucleotide
gacucgaauaauggaagac

SEQ ID NO: 2232966 - RNA, 19 nt, Artificial Sequence
  Description of Artificial Sequence: Synthetic oligonucleotide
ccacuuaugcaauacaguc

SEQ ID NO: 2232967 - RNA, 19 nt, Artificial Sequence
  Description of Artificial Sequence: Synthetic oligonucleotide
guagcuuggguaaaguaga

SEQ ID NO: 2232968 - RNA, 19 nt, Artificial Sequence
  Description of Artificial Sequence: Synthetic oligonucleotide
cgcaauuaauccaaagucc

SEQ ID NO: 2232969 - RNA, 19 nt, Artificial Sequence
  Description of Artificial Sequence: Synthetic oligonucleotide
uaauggcugugcaacacuu

SEQ ID NO: 2232970 - RNA, 19 nt, Artificial Sequence
  Description of Artificial Sequence: Synthetic oligonucleotide
gcaaguuaaaaugggaaac

SEQ ID NO: 2232971 - RNA, 19 nt, Artificial Sequence
  Description of Artificial Sequence: Synthetic oligonucleotide
acucucgccagaggcagcc

SEQ ID NO: 2232972 - RNA, 19 nt, Artificial Sequence
  Description of Artificial Sequence: Synthetic oligonucleotide
ucuggaggcaaaugauggu

SEQ ID NO: 2232973 - RNA, 19 nt, Artificial Sequence
  Description of Artificial Sequence: Synthetic oligonucleotide
ugaggcuuacacagggaaa

SEQ ID NO: 2232974 - RNA, 19 nt, Artificial Sequence
  Description of Artificial Sequence: Synthetic oligonucleotide
cuucuauugcauuauccaa

SEQ ID NO: 2232975 - RNA, 19 nt, Artificial Sequence
  Description of Artificial Sequence: Synthetic oligonucleotide
ucacucucgccagaggcag

SEQ ID NO: 2232976 - RNA, 19 nt, Artificial Sequence
  Description of Artificial Sequence: Synthetic oligonucleotide
acaagaagauuuguaugca

SEQ ID NO: 2232977 - RNA, 19 nt, Artificial Sequence
  Description of Artificial Sequence: Synthetic oligonucleotide
uuauccugguuuuccucca

SEQ ID NO: 2232978 - RNA, 19 nt, Artificial Sequence
  Description of Artificial Sequence: Synthetic oligonucleotide
gaauauauucaaugccacu

SEQ ID NO: 2232979 - RNA, 19 nt, Artificial Sequence
  Description of Artificial Sequence: Synthetic oligonucleotide
ugagccacuuaugcaauac

SEQ ID NO: 2232980 - RNA, 19 nt, Artificial Sequence
  Description of Artificial Sequence: Synthetic oligonucleotide
cacacggacucuccaaagc

SEQ ID NO: 2232981 - RNA, 19 nt, Artificial Sequence
  Description of Artificial Sequence: Synthetic oligonucleotide
caauacaguccuuucaucu

SEQ ID NO: 2232982 - RNA, 19 nt, Artificial Sequence
  Description of Artificial Sequence: Synthetic oligonucleotide
auuuugucauacacaagga

SEQ ID NO: 2232983 - RNA, 19 nt, Artificial Sequence
  Description of Artificial Sequence: Synthetic oligonucleotide
uacagcaaaggcucacaaa

SEQ ID NO: 2232984 - RNA, 19 nt, Artificial Sequence
  Description of Artificial Sequence: Synthetic oligonucleotide
acagcuccgcggcacgcgc

SEQ ID NO: 2232985 - RNA, 19 nt, Artificial Sequence
  Description of Artificial Sequence: Synthetic oligonucleotide
gucugugccugauugcaug

SEQ ID NO: 2232986 - RNA, 19 nt, Artificial Sequence
  Description of Artificial Sequence: Synthetic oligonucleotide
agucccuucuagaaaagca

SEQ ID NO: 2232987 - RNA, 19 nt, Artificial Sequence
  Description of Artificial Sequence: Synthetic oligonucleotide
agcuuggguaaaguagaac

SEQ ID NO: 2232988 - RNA, 19 nt, Artificial Sequence
  Description of Artificial Sequence: Synthetic oligonucleotide
uuguugagcgcagcaguag

SEQ ID NO: 2232989 - RNA, 19 nt, Artificial Sequence
  Description of Artificial Sequence: Synthetic oligonucleotide
ugcacacggacucuccaaa

SEQ ID NO: 2232990 - RNA, 19 nt, Artificial Sequence
  Description of Artificial Sequence: Synthetic oligonucleotide
cagggaaagaugaaggaua

SEQ ID NO: 2232991 - RNA, 19 nt, Artificial Sequence
  Description of Artificial Sequence: Synthetic oligonucleotide
cacucgucgggacuggggc

SEQ ID NO: 2232992 - RNA, 19 nt, Artificial Sequence
  Description of Artificial Sequence: Synthetic oligonucleotide
cacugagccacuuaugcaa

SEQ ID NO: 2232993 - RNA, 19 nt, Artificial Sequence
  Description of Artificial Sequence: Synthetic oligonucleotide
uuguagcuuggguaaagua

SEQ ID NO: 2232994 - RNA, 19 nt, Artificial Sequence
  Description of Artificial Sequence: Synthetic oligonucleotide
agaccuuuauccugguuuu

SEQ ID NO: 2232995 - RNA, 19 nt, Artificial Sequence
  Description of Artificial Sequence: Synthetic oligonucleotide
agccucgagagccgagccc

SEQ ID NO: 2232996 - RNA, 19 nt, Artificial Sequence
  Description of Artificial Sequence: Synthetic oligonucleotide
ccgcaauuaauccaaaguc

SEQ ID NO: 2232997 - RNA, 19 nt, Artificial Sequence
  Description of Artificial Sequence: Synthetic oligonucleotide
guuucuucgucuuguagcu

SEQ ID NO: 2232998 - RNA, 19 nt, Artificial Sequence
  Description of Artificial Sequence: Synthetic oligonucleotide
aguuaaaaugggaaacuuu

SEQ ID NO: 2232999 - RNA, 19 nt, Artificial Sequence
  Description of Artificial Sequence: Synthetic oligonucleotide
ugucccgcgagcguuacgu

SEQ ID NO: 2233000 - RNA, 19 nt, Artificial Sequence
  Description of Artificial Sequence: Synthetic oligonucleotide
ggguuuuccucuuuccuug

SEQ ID NO: 2233001 - RNA, 19 nt, Artificial Sequence
  Description of Artificial Sequence: Synthetic oligonucleotide
gagcguuacgucagggucc

SEQ ID NO: 2233002 - RNA, 19 nt, Artificial Sequence
  Description of Artificial Sequence: Synthetic oligonucleotide
cuccgcaauuaauccaaag

SEQ ID NO: 2233003 - RNA, 19 nt, Artificial Sequence
  Description of Artificial Sequence: Synthetic oligonucleotide
aggcucacaaaaucaucca

SEQ ID NO: 2233004 - RNA, 19 nt, Artificial Sequence
  Description of Artificial Sequence: Synthetic oligonucleotide
accaaagccuucacucucg

SEQ ID NO: 2233005 - RNA, 19 nt, Artificial Sequence
  Description of Artificial Sequence: Synthetic oligonucleotide
uugcaugguucuccaguca

SEQ ID NO: 2233006 - RNA, 19 nt, Artificial Sequence
  Description of Artificial Sequence: Synthetic oligonucleotide
uggaggguuuuccucuuuc

SEQ ID NO: 2233007 - RNA, 19 nt, Artificial Sequence
  Description of Artificial Sequence: Synthetic oligonucleotide
ggcaaaugaugguaauggc

SEQ ID NO: 2233008 - RNA, 19 nt, Artificial Sequence
  Description of Artificial Sequence: Synthetic oligonucleotide
agcguuacgucaggguccg

SEQ ID NO: 2233009 - RNA, 19 nt, Artificial Sequence
  Description of Artificial Sequence: Synthetic oligonucleotide
uugagcgcagcaguaggca

SEQ ID NO: 2233010 - RNA, 19 nt, Artificial Sequence
  Description of Artificial Sequence: Synthetic oligonucleotide
ugauugcaugguucuccag

SEQ ID NO: 2233011 - RNA, 19 nt, Artificial Sequence
  Description of Artificial Sequence: Synthetic oligonucleotide
acgaacagcuccgcggcac

SEQ ID NO: 2233012 - RNA, 19 nt, Artificial Sequence
  Description of Artificial Sequence: Synthetic oligonucleotide
cugagaacauuauuacaaa

SEQ ID NO: 2233013 - RNA, 19 nt, Artificial Sequence
  Description of Artificial Sequence: Synthetic oligonucleotide
uccagucacagggcaagag

SEQ ID NO: 2233014 - RNA, 19 nt, Artificial Sequence
  Description of Artificial Sequence: Synthetic oligonucleotide
gccacugagcaacacacug

SEQ ID NO: 2233015 - RNA, 19 nt, Artificial Sequence
  Description of Artificial Sequence: Synthetic oligonucleotide
aaagaccuuuauccugguu

SEQ ID NO: 2233016 - RNA, 19 nt, Artificial Sequence
  Description of Artificial Sequence: Synthetic oligonucleotide
acaggaagcuacuguucca

SEQ ID NO: 2233017 - RNA, 19 nt, Artificial Sequence
  Description of Artificial Sequence: Synthetic oligonucleotide
agaauguaucagagguuuc

SEQ ID NO: 2233018 - RNA, 19 nt, Artificial Sequence
  Description of Artificial Sequence: Synthetic oligonucleotide
aggaaagaagcugaccaaa

SEQ ID NO: 2233019 - RNA, 19 nt, Artificial Sequence
  Description of Artificial Sequence: Synthetic oligonucleotide
uuacaaaguucuggaggca

SEQ ID NO: 2233020 - RNA, 19 nt, Artificial Sequence
  Description of Artificial Sequence: Synthetic oligonucleotide
agggcaagagcaaaggcaa

SEQ ID NO: 2233021 - RNA, 19 nt, Artificial Sequence
  Description of Artificial Sequence: Synthetic oligonucleotide
gagaauguaucagagguuu

SEQ ID NO: 2233022 - RNA, 19 nt, Artificial Sequence
  Description of Artificial Sequence: Synthetic oligonucleotide
cacggacucuccaaagcug

SEQ ID NO: 2233023 - RNA, 19 nt, Artificial Sequence
  Description of Artificial Sequence: Synthetic oligonucleotide
uguaugcacacggacucuc

SEQ ID NO: 2233024 - RNA, 19 nt, Artificial Sequence
  Description of Artificial Sequence: Synthetic oligonucleotide
ugugccugauugcaugguu

SEQ ID NO: 2233025 - RNA, 19 nt, Artificial Sequence
  Description of Artificial Sequence: Synthetic oligonucleotide
caucacugagccacuuaug

SEQ ID NO: 2233026 - RNA, 19 nt, Artificial Sequence
  Description of Artificial Sequence: Synthetic oligonucleotide
aguaggcaucuuuugcaau

SEQ ID NO: 2233027 - RNA, 19 nt, Artificial Sequence
  Description of Artificial Sequence: Synthetic oligonucleotide
caauggucuccacgaacag

SEQ ID NO: 2233028 - RNA, 19 nt, Artificial Sequence
  Description of Artificial Sequence: Synthetic oligonucleotide
ccagcuccgcaauuaaucc

SEQ ID NO: 2233029 - RNA, 19 nt, Artificial Sequence
  Description of Artificial Sequence: Synthetic oligonucleotide
aggaaaggguacaaauaca

SEQ ID NO: 2233030 - RNA, 19 nt, Artificial Sequence
  Description of Artificial Sequence: Synthetic oligonucleotide
uagcuuggguaaaguagaa

SEQ ID NO: 2233031 - RNA, 19 nt, Artificial Sequence
  Description of Artificial Sequence: Synthetic oligonucleotide
gcaguaggcaucuuuugca

SEQ ID NO: 2233032 - RNA, 19 nt, Artificial Sequence
  Description of Artificial Sequence: Synthetic oligonucleotide
gaccaaagaccuuuauccu

SEQ ID NO: 2233033 - RNA, 19 nt, Artificial Sequence
  Description of Artificial Sequence: Synthetic oligonucleotide
ucccgcgagcguuacguca

SEQ ID NO: 2233034 - RNA, 19 nt, Artificial Sequence
  Description of Artificial Sequence: Synthetic oligonucleotide
guugagcgcagcaguaggc

SEQ ID NO: 2233035 - RNA, 19 nt, Artificial Sequence
  Description of Artificial Sequence: Synthetic oligonucleotide
gaauaauggaagacuuugu

SEQ ID NO: 2233036 - RNA, 19 nt, Artificial Sequence
  Description of Artificial Sequence: Synthetic oligonucleotide
uccaggcugagaacauuau

SEQ ID NO: 2233037 - RNA, 19 nt, Artificial Sequence
  Description of Artificial Sequence: Synthetic oligonucleotide
cugaggcuuacacagggaa

SEQ ID NO: 2233038 - RNA, 19 nt, Artificial Sequence
  Description of Artificial Sequence: Synthetic oligonucleotide
cagcaguaggcaucuuuug

SEQ ID NO: 2233039 - RNA, 19 nt, Artificial Sequence
  Description of Artificial Sequence: Synthetic oligonucleotide
gaaaggguacaaauacaua

SEQ ID NO: 2233040 - RNA, 19 nt, Artificial Sequence
  Description of Artificial Sequence: Synthetic oligonucleotide
ggaggguuuuccucuuucc

SEQ ID NO: 2233041 - RNA, 19 nt, Artificial Sequence
  Description of Artificial Sequence: Synthetic oligonucleotide
agauuuguaugcacacgga

SEQ ID NO: 2233042 - RNA, 19 nt, Artificial Sequence
  Description of Artificial Sequence: Synthetic oligonucleotide
auacacaaggaaagucugu

SEQ ID NO: 2233043 - RNA, 19 nt, Artificial Sequence
  Description of Artificial Sequence: Synthetic oligonucleotide
cuuaaaggaaaggguacaa

SEQ ID NO: 2233044 - RNA, 19 nt, Artificial Sequence
  Description of Artificial Sequence: Synthetic oligonucleotide
accauagcauagauaaaau

SEQ ID NO: 2233045 - RNA, 19 nt, Artificial Sequence
  Description of Artificial Sequence: Synthetic oligonucleotide
cuauugcauuauccaaauc

SEQ ID NO: 2233046 - RNA, 19 nt, Artificial Sequence
  Description of Artificial Sequence: Synthetic oligonucleotide
cacugagcaacacacugaa

SEQ ID NO: 2233047 - RNA, 19 nt, Artificial Sequence
  Description of Artificial Sequence: Synthetic oligonucleotide
ccugauugcaugguucucc

SEQ ID NO: 2233048 - RNA, 19 nt, Artificial Sequence
  Description of Artificial Sequence: Synthetic oligonucleotide
ugagcgcagcaguaggcau

SEQ ID NO: 2233049 - RNA, 19 nt, Artificial Sequence
  Description of Artificial Sequence: Synthetic oligonucleotide
uacgucaggguccgccuuc

SEQ ID NO: 2233050 - RNA, 19 nt, Artificial Sequence
  Description of Artificial Sequence: Synthetic oligonucleotide
caaauacauaccauagcau

SEQ ID NO: 2233051 - RNA, 19 nt, Artificial Sequence
  Description of Artificial Sequence: Synthetic oligonucleotide
uccaucacugagccacuua

SEQ ID NO: 2233052 - RNA, 19 nt, Artificial Sequence
  Description of Artificial Sequence: Synthetic oligonucleotide
ggaagacagacucgaauaa

SEQ ID NO: 2233053 - RNA, 19 nt, Artificial Sequence
  Description of Artificial Sequence: Synthetic oligonucleotide
caugauguuccaggcugag

SEQ ID NO: 2233054 - RNA, 19 nt, Artificial Sequence
  Description of Artificial Sequence: Synthetic oligonucleotide
acuuuauauuauguauauu

SEQ ID NO: 2233055 - RNA, 19 nt, Artificial Sequence
  Description of Artificial Sequence: Synthetic oligonucleotide
ugccacugagcaacacacu

SEQ ID NO: 2233056 - RNA, 19 nt, Artificial Sequence
  Description of Artificial Sequence: Synthetic oligonucleotide
gcuacauccaggccugaac

SEQ ID NO: 2233057 - RNA, 19 nt, Artificial Sequence
  Description of Artificial Sequence: Synthetic oligonucleotide
ccagucacagggcaagagc

SEQ ID NO: 2233058 - RNA, 19 nt, Artificial Sequence
  Description of Artificial Sequence: Synthetic oligonucleotide
agcuccgcaauuaauccaa

SEQ ID NO: 2233059 - RNA, 19 nt, Artificial Sequence
  Description of Artificial Sequence: Synthetic oligonucleotide
cucgaauaauggaagacuu

SEQ ID NO: 2233060 - RNA, 19 nt, Artificial Sequence
  Description of Artificial Sequence: Synthetic oligonucleotide
cugcguagcugcugccucc

SEQ ID NO: 2233061 - RNA, 19 nt, Artificial Sequence
  Description of Artificial Sequence: Synthetic oligonucleotide
uggcuuccugucccgcgag

SEQ ID NO: 2233062 - RNA, 19 nt, Artificial Sequence
  Description of Artificial Sequence: Synthetic oligonucleotide
caaaggcucacaaaaucau

SEQ ID NO: 2233063 - RNA, 19 nt, Artificial Sequence
  Description of Artificial Sequence: Synthetic oligonucleotide
ggcugagaacauuauuaca

SEQ ID NO: 2233064 - RNA, 19 nt, Artificial Sequence
  Description of Artificial Sequence: Synthetic oligonucleotide
acggacucuccaaagcuga

SEQ ID NO: 2233065 - RNA, 19 nt, Artificial Sequence
  Description of Artificial Sequence: Synthetic oligonucleotide
ccugaacuggaagacagac

SEQ ID NO: 2233066 - RNA, 19 nt, Artificial Sequence
  Description of Artificial Sequence: Synthetic oligonucleotide
uuguaugcacacggacucu

SEQ ID NO: 2233067 - RNA, 19 nt, Artificial Sequence
  Description of Artificial Sequence: Synthetic oligonucleotide
cucuuuccuuguugagcgc

SEQ ID NO: 2233068 - RNA, 19 nt, Artificial Sequence
  Description of Artificial Sequence: Synthetic oligonucleotide
cuuguugagcgcagcagua

SEQ ID NO: 2233069 - RNA, 19 nt, Artificial Sequence
  Description of Artificial Sequence: Synthetic oligonucleotide
gguaauggcugugcaacac

SEQ ID NO: 2233070 - RNA, 19 nt, Artificial Sequence
  Description of Artificial Sequence: Synthetic oligonucleotide
gucccuucuagaaaagcaa

SEQ ID NO: 2233071 - RNA, 19 nt, Artificial Sequence
  Description of Artificial Sequence: Synthetic oligonucleotide
ggacucuccaaagcugagg

SEQ ID NO: 2233072 - RNA, 19 nt, Artificial Sequence
  Description of Artificial Sequence: Synthetic oligonucleotide
augcacacggacucuccaa

SEQ ID NO: 2233073 - RNA, 19 nt, Artificial Sequence
  Description of Artificial Sequence: Synthetic oligonucleotide
aauggcugugcaacacuuu

SEQ ID NO: 2233074 - RNA, 19 nt, Artificial Sequence
  Description of Artificial Sequence: Synthetic oligonucleotide
guaugcacacggacucucc

SEQ ID NO: 2233075 - RNA, 19 nt, Artificial Sequence
  Description of Artificial Sequence: Synthetic oligonucleotide
caguaggcaucuuuugcaa

SEQ ID NO: 2233076 - RNA, 19 nt, Artificial Sequence
  Description of Artificial Sequence: Synthetic oligonucleotide
agcgcagcaguaggcaucu

SEQ ID NO: 2233077 - RNA, 19 nt, Artificial Sequence
  Description of Artificial Sequence: Synthetic oligonucleotide
cuucgucuuguagcuuggg

SEQ ID NO: 2233078 - RNA, 19 nt, Artificial Sequence
  Description of Artificial Sequence: Synthetic oligonucleotide
ugcguagcugcugccuccc

SEQ ID NO: 2233079 - RNA, 19 nt, Artificial Sequence
  Description of Artificial Sequence: Synthetic oligonucleotide
uuacgucaggguccgccuu

SEQ ID NO: 2233080 - RNA, 19 nt, Artificial Sequence
  Description of Artificial Sequence: Synthetic oligonucleotide
gcaauacaguccuuucauc

SEQ ID NO: 2233081 - RNA, 19 nt, Artificial Sequence
  Description of Artificial Sequence: Synthetic oligonucleotide
ugcacucgucgggacuggg

SEQ ID NO: 2233082 - RNA, 19 nt, Artificial Sequence
  Description of Artificial Sequence: Synthetic oligonucleotide
guagaacaagaagauuugu

SEQ ID NO: 2233083 - RNA, 19 nt, Artificial Sequence
  Description of Artificial Sequence: Synthetic oligonucleotide
ggcaucuuuugcaaugguc

SEQ ID NO: 2233084 - RNA, 19 nt, Artificial Sequence
  Description of Artificial Sequence: Synthetic oligonucleotide
guacaugauguuccaggcu

SEQ ID NO: 2233085 - RNA, 19 nt, Artificial Sequence
  Description of Artificial Sequence: Synthetic oligonucleotide
acaugauguuccaggcuga

SEQ ID NO: 2233086 - RNA, 19 nt, Artificial Sequence
  Description of Artificial Sequence: Synthetic oligonucleotide
cagccucgagagccgagcc

SEQ ID NO: 2233087 - RNA, 19 nt, Artificial Sequence
  Description of Artificial Sequence: Synthetic oligonucleotide
acauaccauagcauagaua

SEQ ID NO: 2233088 - RNA, 19 nt, Artificial Sequence
  Description of Artificial Sequence: Synthetic oligonucleotide
gcuuccugucccgcgagcg

SEQ ID NO: 2233089 - RNA, 19 nt, Artificial Sequence
  Description of Artificial Sequence: Synthetic oligonucleotide
ggguaaaguagaacaagaa

SEQ ID NO: 2233090 - RNA, 19 nt, Artificial Sequence
  Description of Artificial Sequence: Synthetic oligonucleotide
cagcuccgcaauuaaucca

SEQ ID NO: 2233091 - RNA, 19 nt, Artificial Sequence
  Description of Artificial Sequence: Synthetic oligonucleotide
ggugcacucgucgggacug

SEQ ID NO: 2233092 - RNA, 19 nt, Artificial Sequence
  Description of Artificial Sequence: Synthetic oligonucleotide
cauccaggccugaacugga

SEQ ID NO: 2233093 - RNA, 19 nt, Artificial Sequence
  Description of Artificial Sequence: Synthetic oligonucleotide
guuacgucaggguccgccu

SEQ ID NO: 2233094 - RNA, 19 nt, Artificial Sequence
  Description of Artificial Sequence: Synthetic oligonucleotide
cagcuucuauugcauuauc

SEQ ID NO: 2233095 - RNA, 19 nt, Artificial Sequence
  Description of Artificial Sequence: Synthetic oligonucleotide
cuggaagacagacucgaau

SEQ ID NO: 2233096 - RNA, 19 nt, Artificial Sequence
  Description of Artificial Sequence: Synthetic oligonucleotide
gagcgcagcaguaggcauc

SEQ ID NO: 2233097 - RNA, 19 nt, Artificial Sequence
  Description of Artificial Sequence: Synthetic oligonucleotide
ggauacagcaaaggcucac

SEQ ID NO: 2233098 - RNA, 19 nt, Artificial Sequence
  Description of Artificial Sequence: Synthetic oligonucleotide
aggcuuacacagggaaaga

SEQ ID NO: 2233099 - RNA, 19 nt, Artificial Sequence
  Description of Artificial Sequence: Synthetic oligonucleotide
cgagcguuacgucaggguc

SEQ ID NO: 2233100 - RNA, 19 nt, Artificial Sequence
  Description of Artificial Sequence: Synthetic oligonucleotide
auaccauagcauagauaaa

SEQ ID NO: 2233101 - RNA, 19 nt, Artificial Sequence
  Description of Artificial Sequence: Synthetic oligonucleotide
gccucgagagccgagcccc

SEQ ID NO: 2233102 - RNA, 19 nt, Artificial Sequence
  Description of Artificial Sequence: Synthetic oligonucleotide
gaccuuuauccugguuuuc

SEQ ID NO: 2233103 - RNA, 19 nt, Artificial Sequence
  Description of Artificial Sequence: Synthetic oligonucleotide
gccagaggcagccucgaga

SEQ ID NO: 2233104 - RNA, 19 nt, Artificial Sequence
  Description of Artificial Sequence: Synthetic oligonucleotide
cuccccuccgggagccucc

SEQ ID NO: 2233105 - RNA, 19 nt, Artificial Sequence
  Description of Artificial Sequence: Synthetic oligonucleotide
agcuccgcggcacgcgcca

SEQ ID NO: 2233106 - RNA, 19 nt, Artificial Sequence
  Description of Artificial Sequence: Synthetic oligonucleotide
cacucucgccagaggcagc

SEQ ID NO: 2233107 - RNA, 19 nt, Artificial Sequence
  Description of Artificial Sequence: Synthetic oligonucleotide
cucgagagccgagccccgg

SEQ ID NO: 2233108 - RNA, 19 nt, Artificial Sequence
  Description of Artificial Sequence: Synthetic oligonucleotide
ccaggccugaacuggaaga

SEQ ID NO: 2233109 - RNA, 19 nt, Artificial Sequence
  Description of Artificial Sequence: Synthetic oligonucleotide
cccgcgagcguuacgucag

SEQ ID NO: 2233110 - RNA, 19 nt, Artificial Sequence
  Description of Artificial Sequence: Synthetic oligonucleotide
ucgggacuggggccugcgu

SEQ ID NO: 2233111 - RNA, 19 nt, Artificial Sequence
  Description of Artificial Sequence: Synthetic oligonucleotide
uccugucccgcgagcguua

SEQ ID NO: 2233112 - RNA, 19 nt, Artificial Sequence
  Description of Artificial Sequence: Synthetic oligonucleotide
uccgcggcacgcgccagga

SEQ ID NO: 2233113 - RNA, 19 nt, Artificial Sequence
  Description of Artificial Sequence: Synthetic oligonucleotide
ggguccgccuucaccaaag

SEQ ID NO: 2233114 - RNA, 19 nt, Artificial Sequence
  Description of Artificial Sequence: Synthetic oligonucleotide
cuuguagcuuggguaaagu

SEQ ID NO: 2233115 - RNA, 19 nt, Artificial Sequence
  Description of Artificial Sequence: Synthetic oligonucleotide
ccuucacucucgccagagg

SEQ ID NO: 2233116 - RNA, 19 nt, Artificial Sequence
  Description of Artificial Sequence: Synthetic oligonucleotide
cguuacgucaggguccgcc

SEQ ID NO: 2233117 - RNA, 19 nt, Artificial Sequence
  Description of Artificial Sequence: Synthetic oligonucleotide
ccucuggaggguuuuccuc

SEQ ID NO: 2233118 - RNA, 19 nt, Artificial Sequence
  Description of Artificial Sequence: Synthetic oligonucleotide
gccccgggugcacucgucg

SEQ ID NO: 2233119 - RNA, 19 nt, Artificial Sequence
  Description of Artificial Sequence: Synthetic oligonucleotide
cccuccgggagccuccucc

SEQ ID NO: 2233120 - RNA, 19 nt, Artificial Sequence
  Description of Artificial Sequence: Synthetic oligonucleotide
aggguccgccuucaccaaa

SEQ ID NO: 2233121 - RNA, 19 nt, Artificial Sequence
  Description of Artificial Sequence: Synthetic oligonucleotide
cugggcgccccgcucccag

SEQ ID NO: 2233122 - RNA, 19 nt, Artificial Sequence
  Description of Artificial Sequence: Synthetic oligonucleotide
agccuucacucucgccaga

SEQ ID NO: 2233123 - RNA, 19 nt, Artificial Sequence
  Description of Artificial Sequence: Synthetic oligonucleotide
cucugggcgccccgcuccc

SEQ ID NO: 2233124 - RNA, 19 nt, Artificial Sequence
  Description of Artificial Sequence: Synthetic oligonucleotide
ucgccagaggcagccucga

SEQ ID NO: 2233125 - RNA, 19 nt, Artificial Sequence
  Description of Artificial Sequence: Synthetic oligonucleotide
cuccucucugggcgccccg

SEQ ID NO: 2233126 - RNA, 19 nt, Artificial Sequence
  Description of Artificial Sequence: Synthetic oligonucleotide
gcagccucgagagccgagc

SEQ ID NO: 2233127 - RNA, 19 nt, Artificial Sequence
  Description of Artificial Sequence: Synthetic oligonucleotide
cgucuuguagcuuggguaa

SEQ ID NO: 2233128 - RNA, 19 nt, Artificial Sequence
  Description of Artificial Sequence: Synthetic oligonucleotide
cacgcgccaggauaaagau

SEQ ID NO: 2233129 - RNA, 19 nt, Artificial Sequence
  Description of Artificial Sequence: Synthetic oligonucleotide
cagcaaaggcucacaaaau

SEQ ID NO: 2233130 - RNA, 19 nt, Artificial Sequence
  Description of Artificial Sequence: Synthetic oligonucleotide
cagcuccgcggcacgcgcc

SEQ ID NO: 2233131 - RNA, 19 nt, Artificial Sequence
  Description of Artificial Sequence: Synthetic oligonucleotide
cugucccgcgagcguuacg

SEQ ID NO: 2233132 - RNA, 19 nt, Artificial Sequence
  Description of Artificial Sequence: Synthetic oligonucleotide
gcacgcgccaggauaaaga

SEQ ID NO: 2233133 - RNA, 19 nt, Artificial Sequence
  Description of Artificial Sequence: Synthetic oligonucleotide
caaaguucuggaggcaaau

SEQ ID NO: 2233134 - RNA, 19 nt, Artificial Sequence
  Description of Artificial Sequence: Synthetic oligonucleotide
gcacucgucgggacugggg

SEQ ID NO: 2233135 - RNA, 19 nt, Artificial Sequence
  Description of Artificial Sequence: Synthetic oligonucleotide
acugagcaacacacugaaa

SEQ ID NO: 2233136 - RNA, 19 nt, Artificial Sequence
  Description of Artificial Sequence: Synthetic oligonucleotide
gugcacucgucgggacugg

SEQ ID NO: 2233137 - RNA, 19 nt, Artificial Sequence
  Description of Artificial Sequence: Synthetic oligonucleotide
acgucaggguccgccuuca

SEQ ID NO: 2233138 - RNA, 19 nt, Artificial Sequence
  Description of Artificial Sequence: Synthetic oligonucleotide
cccgggugcacucgucggg

SEQ ID NO: 2233139 - RNA, 19 nt, Artificial Sequence
  Description of Artificial Sequence: Synthetic oligonucleotide
gccacuuaugcaauacagu

SEQ ID NO: 2233140 - RNA, 19 nt, Artificial Sequence
  Description of Artificial Sequence: Synthetic oligonucleotide
ccugcguagcugcugccuc

SEQ ID NO: 2233141 - RNA, 19 nt, Artificial Sequence
  Description of Artificial Sequence: Synthetic oligonucleotide
gucuuguagcuuggguaaa

SEQ ID NO: 2233142 - RNA, 19 nt, Artificial Sequence
  Description of Artificial Sequence: Synthetic oligonucleotide
caaagaccuuuauccuggu

SEQ ID NO: 2233143 - RNA, 19 nt, Artificial Sequence
  Description of Artificial Sequence: Synthetic oligonucleotide
cgaacagcuccgcggcacg

SEQ ID NO: 2233144 - RNA, 19 nt, Artificial Sequence
  Description of Artificial Sequence: Synthetic oligonucleotide
ggcuuccugucccgcgagc

SEQ ID NO: 2233145 - RNA, 19 nt, Artificial Sequence
  Description of Artificial Sequence: Synthetic oligonucleotide
gagccgagccccgggugca

SEQ ID NO: 2233146 - RNA, 19 nt, Artificial Sequence
  Description of Artificial Sequence: Synthetic oligonucleotide
agccgagccccgggugcac

SEQ ID NO: 2233147 - RNA, 19 nt, Artificial Sequence
  Description of Artificial Sequence: Synthetic oligonucleotide
ccccgggugcacucgucgg

SEQ ID NO: 2233148 - RNA, 19 nt, Artificial Sequence
  Description of Artificial Sequence: Synthetic oligonucleotide
gucccgcgagcguuacguc

SEQ ID NO: 2233149 - RNA, 19 nt, Artificial Sequence
  Description of Artificial Sequence: Synthetic oligonucleotide
cuuccugucccgcgagcgu

SEQ ID NO: 2233150 - RNA, 19 nt, Artificial Sequence
  Description of Artificial Sequence: Synthetic oligonucleotide
ucugggcgccccgcuccca

SEQ ID NO: 2233151 - RNA, 19 nt, Artificial Sequence
  Description of Artificial Sequence: Synthetic oligonucleotide
ggagaauguaucagagguu

SEQ ID NO: 2233152 - RNA, 19 nt, Artificial Sequence
  Description of Artificial Sequence: Synthetic oligonucleotide
gcagcaguaggcaucuuuu

SEQ ID NO: 2233153 - RNA, 19 nt, Artificial Sequence
  Description of Artificial Sequence: Synthetic oligonucleotide
cuuaugcaauacaguccuu

SEQ ID NO: 2233154 - RNA, 19 nt, Artificial Sequence
  Description of Artificial Sequence: Synthetic oligonucleotide
cccuucuagaaaagcaaau

SEQ ID NO: 2233155 - RNA, 19 nt, Artificial Sequence
  Description of Artificial Sequence: Synthetic oligonucleotide
agccccgggugcacucguc

SEQ ID NO: 2233156 - RNA, 19 nt, Artificial Sequence
  Description of Artificial Sequence: Synthetic oligonucleotide
gcgagcguuacgucagggu

SEQ ID NO: 2233157 - RNA, 19 nt, Artificial Sequence
  Description of Artificial Sequence: Synthetic oligonucleotide
caggguccgccuucaccaa

SEQ ID NO: 2233158 - RNA, 19 nt, Artificial Sequence
  Description of Artificial Sequence: Synthetic oligonucleotide
ggccugcguagcugcugcc

SEQ ID NO: 2233159 - RNA, 19 nt, Artificial Sequence
  Description of Artificial Sequence: Synthetic oligonucleotide
gcugaccaaagaccuuuau

SEQ ID NO: 2233160 - RNA, 19 nt, Artificial Sequence
  Description of Artificial Sequence: Synthetic oligonucleotide
ggcagccucgagagccgag

SEQ ID NO: 2233161 - RNA, 19 nt, Artificial Sequence
  Description of Artificial Sequence: Synthetic oligonucleotide
gccugaacuggaagacaga

SEQ ID NO: 2233162 - RNA, 19 nt, Artificial Sequence
  Description of Artificial Sequence: Synthetic oligonucleotide
ggcgccccgcucccagcag

SEQ ID NO: 2233163 - RNA, 19 nt, Artificial Sequence
  Description of Artificial Sequence: Synthetic oligonucleotide
gggugcacucgucgggacu

SEQ ID NO: 2233164 - RNA, 19 nt, Artificial Sequence
  Description of Artificial Sequence: Synthetic oligonucleotide
gcggcacgcgccaggauaa

SEQ ID NO: 2233165 - RNA, 19 nt, Artificial Sequence
  Description of Artificial Sequence: Synthetic oligonucleotide
gcguagcugcugccucccc

SEQ ID NO: 2233166 - RNA, 19 nt, Artificial Sequence
  Description of Artificial Sequence: Synthetic oligonucleotide
ccgcgagcguuacgucagg

SEQ ID NO: 2233167 - RNA, 19 nt, Artificial Sequence
  Description of Artificial Sequence: Synthetic oligonucleotide
cgcgagcguuacgucaggg

SEQ ID NO: 2233168 - RNA, 19 nt, Artificial Sequence
  Description of Artificial Sequence: Synthetic oligonucleotide
gcuccgcaauuaauccaaa

SEQ ID NO: 2233169 - RNA, 19 nt, Artificial Sequence
  Description of Artificial Sequence: Synthetic oligonucleotide
ccugucccgcgagcguuac

SEQ ID NO: 2233170 - RNA, 19 nt, Artificial Sequence
  Description of Artificial Sequence: Synthetic oligonucleotide
ccgagccccgggugcacuc

SEQ ID NO: 2233171 - RNA, 19 nt, Artificial Sequence
  Description of Artificial Sequence: Synthetic oligonucleotide
ccgccuucaccaaagccuu

SEQ ID NO: 2233172 - RNA, 19 nt, Artificial Sequence
  Description of Artificial Sequence: Synthetic oligonucleotide
ccgggugcacucgucggga

SEQ ID NO: 2233173 - RNA, 19 nt, Artificial Sequence
  Description of Artificial Sequence: Synthetic oligonucleotide
cgcggcacgcgccaggaua

SEQ ID NO: 2233174 - RNA, 19 nt, Artificial Sequence
  Description of Artificial Sequence: Synthetic oligonucleotide
gccugcguagcugcugccu

SEQ ID NO: 2233175 - RNA, 19 nt, Artificial Sequence
  Description of Artificial Sequence: Synthetic oligonucleotide
cuccaucacugagccacuu

SEQ ID NO: 2233176 - RNA, 19 nt, Artificial Sequence
  Description of Artificial Sequence: Synthetic oligonucleotide
ccuccgggagccuccuccu

SEQ ID NO: 2233177 - RNA, 19 nt, Artificial Sequence
  Description of Artificial Sequence: Synthetic oligonucleotide
gcguuacgucaggguccgc

SEQ ID NO: 2233178 - RNA, 19 nt, Artificial Sequence
  Description of Artificial Sequence: Synthetic oligonucleotide
cgagagccgagccccgggu

SEQ ID NO: 2233179 - RNA, 19 nt, Artificial Sequence
  Description of Artificial Sequence: Synthetic oligonucleotide
gccgagccccgggugcacu

SEQ ID NO: 2233180 - RNA, 19 nt, Artificial Sequence
  Description of Artificial Sequence: Synthetic oligonucleotide
cggcacgcgccaggauaaa

SEQ ID NO: 2233181 - RNA, 19 nt, Artificial Sequence
  Description of Artificial Sequence: Synthetic oligonucleotide
ccgcggcacgcgccaggau

SEQ ID NO: 2233182 - RNA, 19 nt, Artificial Sequence
  Description of Artificial Sequence: Synthetic oligonucleotide
gcgcagcaguaggcaucuu

SEQ ID NO: 2233183 - RNA, 19 nt, Artificial Sequence
  Description of Artificial Sequence: Synthetic oligonucleotide
acaaugaugccauuggggc

SEQ ID NO: 2233184 - RNA, 19 nt, Artificial Sequence
  Description of Artificial Sequence: Synthetic oligonucleotide
aaaguccucugucacgucc

SEQ ID NO: 2233185 - RNA, 19 nt, Artificial Sequence
  Description of Artificial Sequence: Synthetic oligonucleotide
aaagcuguagacaugguag

SEQ ID NO: 2233186 - RNA, 19 nt, Artificial Sequence
  Description of Artificial Sequence: Synthetic oligonucleotide
uuggcuuuugaauagaacu

SEQ ID NO: 2233187 - RNA, 19 nt, Artificial Sequence
  Description of Artificial Sequence: Synthetic oligonucleotide
uccaccacccugaagagcg

SEQ ID NO: 2233188 - RNA, 19 nt, Artificial Sequence
  Description of Artificial Sequence: Synthetic oligonucleotide
cuuagcuuuggccagaaag

SEQ ID NO: 2233189 - RNA, 19 nt, Artificial Sequence
  Description of Artificial Sequence: Synthetic oligonucleotide
agaacuguuucucaucuuc

SEQ ID NO: 2233190 - RNA, 19 nt, Artificial Sequence
  Description of Artificial Sequence: Synthetic oligonucleotide
uuugaauagaacuguuucu

SEQ ID NO: 2233191 - RNA, 19 nt, Artificial Sequence
  Description of Artificial Sequence: Synthetic oligonucleotide
aaugccagcgccacagucc

SEQ ID NO: 2233192 - RNA, 19 nt, Artificial Sequence
  Description of Artificial Sequence: Synthetic oligonucleotide
uccagaucacaucauagga

SEQ ID NO: 2233193 - RNA, 19 nt, Artificial Sequence
  Description of Artificial Sequence: Synthetic oligonucleotide
aguccugcaacccacagca

SEQ ID NO: 2233194 - RNA, 19 nt, Artificial Sequence
  Description of Artificial Sequence: Synthetic oligonucleotide
uaggucuuagcuuuggcca

SEQ ID NO: 2233195 - RNA, 19 nt, Artificial Sequence
  Description of Artificial Sequence: Synthetic oligonucleotide
gacaaugaugccauugggg

SEQ ID NO: 2233196 - RNA, 19 nt, Artificial Sequence
  Description of Artificial Sequence: Synthetic oligonucleotide
uggccuaucacccacugga

SEQ ID NO: 2233197 - RNA, 19 nt, Artificial Sequence
  Description of Artificial Sequence: Synthetic oligonucleotide
acucuaccggaccagacac

SEQ ID NO: 2233198 - RNA, 19 nt, Artificial Sequence
  Description of Artificial Sequence: Synthetic oligonucleotide
ucacuugucaugaugucac

SEQ ID NO: 2233199 - RNA, 19 nt, Artificial Sequence
  Description of Artificial Sequence: Synthetic oligonucleotide
ugacaaugaugccauuggg

SEQ ID NO: 2233200 - RNA, 19 nt, Artificial Sequence
  Description of Artificial Sequence: Synthetic oligonucleotide
auccagaucacaucauagg

SEQ ID NO: 2233201 - RNA, 19 nt, Artificial Sequence
  Description of Artificial Sequence: Synthetic oligonucleotide
uggagaguugccaggaugc

SEQ ID NO: 2233202 - RNA, 19 nt, Artificial Sequence
  Description of Artificial Sequence: Synthetic oligonucleotide
uaauccacagcacaccuuc

SEQ ID NO: 2233203 - RNA, 19 nt, Artificial Sequence
  Description of Artificial Sequence: Synthetic oligonucleotide
ucgauguuggagauguggc

SEQ ID NO: 2233204 - RNA, 19 nt, Artificial Sequence
  Description of Artificial Sequence: Synthetic oligonucleotide
gaggucacggcacacacug

SEQ ID NO: 2233205 - RNA, 19 nt, Artificial Sequence
  Description of Artificial Sequence: Synthetic oligonucleotide
ucuuguuaggaccuucccu

SEQ ID NO: 2233206 - RNA, 19 nt, Artificial Sequence
  Description of Artificial Sequence: Synthetic oligonucleotide
uugaauagaacuguuucuc

SEQ ID NO: 2233207 - RNA, 19 nt, Artificial Sequence
  Description of Artificial Sequence: Synthetic oligonucleotide
cuugcagcggcgcagaaac

SEQ ID NO: 2233208 - RNA, 19 nt, Artificial Sequence
  Description of Artificial Sequence: Synthetic oligonucleotide
acaucauaggaguugggcu

SEQ ID NO: 2233209 - RNA, 19 nt, Artificial Sequence
  Description of Artificial Sequence: Synthetic oligonucleotide
gaaguccccgucuuguuag

SEQ ID NO: 2233210 - RNA, 19 nt, Artificial Sequence
  Description of Artificial Sequence: Synthetic oligonucleotide
aaucaccucacuugucaug

SEQ ID NO: 2233211 - RNA, 19 nt, Artificial Sequence
  Description of Artificial Sequence: Synthetic oligonucleotide
aaaggaccagagcccacgg

SEQ ID NO: 2233212 - RNA, 19 nt, Artificial Sequence
  Description of Artificial Sequence: Synthetic oligonucleotide
guaggucuuagcuuuggcc

SEQ ID NO: 2233213 - RNA, 19 nt, Artificial Sequence
  Description of Artificial Sequence: Synthetic oligonucleotide
aagcaugccguccaccgug

SEQ ID NO: 2233214 - RNA, 19 nt, Artificial Sequence
  Description of Artificial Sequence: Synthetic oligonucleotide
auccacagcacaccuuccc

SEQ ID NO: 2233215 - RNA, 19 nt, Artificial Sequence
  Description of Artificial Sequence: Synthetic oligonucleotide
cagaaguaguuccucaccc

SEQ ID NO: 2233216 - RNA, 19 nt, Artificial Sequence
  Description of Artificial Sequence: Synthetic oligonucleotide
gauccagaucacaucauag

SEQ ID NO: 2233217 - RNA, 19 nt, Artificial Sequence
  Description of Artificial Sequence: Synthetic oligonucleotide
agucaaaggucauggcagg

SEQ ID NO: 2233218 - RNA, 19 nt, Artificial Sequence
  Description of Artificial Sequence: Synthetic oligonucleotide
uaguuccucacccucuugc

SEQ ID NO: 2233219 - RNA, 19 nt, Artificial Sequence
  Description of Artificial Sequence: Synthetic oligonucleotide
gaugauccggcguaccacc

SEQ ID NO: 2233220 - RNA, 19 nt, Artificial Sequence
  Description of Artificial Sequence: Synthetic oligonucleotide
aaggaccagagcccacggc

SEQ ID NO: 2233221 - RNA, 19 nt, Artificial Sequence
  Description of Artificial Sequence: Synthetic oligonucleotide
ugcacugcggaugauccgg

SEQ ID NO: 2233222 - RNA, 19 nt, Artificial Sequence
  Description of Artificial Sequence: Synthetic oligonucleotide
caucauaggaguugggcuc

SEQ ID NO: 2233223 - RNA, 19 nt, Artificial Sequence
  Description of Artificial Sequence: Synthetic oligonucleotide
gaucacaucauaggaguug

SEQ ID NO: 2233224 - RNA, 19 nt, Artificial Sequence
  Description of Artificial Sequence: Synthetic oligonucleotide
uggugauccuuccaaugcc

SEQ ID NO: 2233225 - RNA, 19 nt, Artificial Sequence
  Description of Artificial Sequence: Synthetic oligonucleotide
gauccggcguaccaccucg

SEQ ID NO: 2233226 - RNA, 19 nt, Artificial Sequence
  Description of Artificial Sequence: Synthetic oligonucleotide
aagcuguagacaugguaga

SEQ ID NO: 2233227 - RNA, 19 nt, Artificial Sequence
  Description of Artificial Sequence: Synthetic oligonucleotide
ugcccuaauccacagcaca

SEQ ID NO: 2233228 - RNA, 19 nt, Artificial Sequence
  Description of Artificial Sequence: Synthetic oligonucleotide
agggcaaagcuguagacau

SEQ ID NO: 2233229 - RNA, 19 nt, Artificial Sequence
  Description of Artificial Sequence: Synthetic oligonucleotide
ugcuguucgaguggcaggg

SEQ ID NO: 2233230 - RNA, 19 nt, Artificial Sequence
  Description of Artificial Sequence: Synthetic oligonucleotide
uccugcaacccacagcaga

SEQ ID NO: 2233231 - RNA, 19 nt, Artificial Sequence
  Description of Artificial Sequence: Synthetic oligonucleotide
gaaguaguuccucacccuc

SEQ ID NO: 2233232 - RNA, 19 nt, Artificial Sequence
  Description of Artificial Sequence: Synthetic oligonucleotide
augccauuggggcgcaggc

SEQ ID NO: 2233233 - RNA, 19 nt, Artificial Sequence
  Description of Artificial Sequence: Synthetic oligonucleotide
agaaaguccucugucacgu

SEQ ID NO: 2233234 - RNA, 19 nt, Artificial Sequence
  Description of Artificial Sequence: Synthetic oligonucleotide
cagaaaguccucugucacg

SEQ ID NO: 2233235 - RNA, 19 nt, Artificial Sequence
  Description of Artificial Sequence: Synthetic oligonucleotide
ugcacugcccuaauccaca

SEQ ID NO: 2233236 - RNA, 19 nt, Artificial Sequence
  Description of Artificial Sequence: Synthetic oligonucleotide
ucugucagguggccuauca

SEQ ID NO: 2233237 - RNA, 19 nt, Artificial Sequence
  Description of Artificial Sequence: Synthetic oligonucleotide
ggcgcagaaacucagccag

SEQ ID NO: 2233238 - RNA, 19 nt, Artificial Sequence
  Description of Artificial Sequence: Synthetic oligonucleotide
ccuaucacccacuggaucc

SEQ ID NO: 2233239 - RNA, 19 nt, Artificial Sequence
  Description of Artificial Sequence: Synthetic oligonucleotide
cacacugcuguccacauca

SEQ ID NO: 2233240 - RNA, 19 nt, Artificial Sequence
  Description of Artificial Sequence: Synthetic oligonucleotide
uguucgaguggcagggcug

SEQ ID NO: 2233241 - RNA, 19 nt, Artificial Sequence
  Description of Artificial Sequence: Synthetic oligonucleotide
ugcaacccacagcagaagu

SEQ ID NO: 2233242 - RNA, 19 nt, Artificial Sequence
  Description of Artificial Sequence: Synthetic oligonucleotide
agagacaagggcgaggcga

SEQ ID NO: 2233243 - RNA, 19 nt, Artificial Sequence
  Description of Artificial Sequence: Synthetic oligonucleotide
ucaaaggucauggcaggug

SEQ ID NO: 2233244 - RNA, 19 nt, Artificial Sequence
  Description of Artificial Sequence: Synthetic oligonucleotide
gaggcgagaagaaggcugg

SEQ ID NO: 2233245 - RNA, 19 nt, Artificial Sequence
  Description of Artificial Sequence: Synthetic oligonucleotide
uuaggaccuucccuuaaaa

SEQ ID NO: 2233246 - RNA, 19 nt, Artificial Sequence
  Description of Artificial Sequence: Synthetic oligonucleotide
agaaguaguuccucacccu

SEQ ID NO: 2233247 - RNA, 19 nt, Artificial Sequence
  Description of Artificial Sequence: Synthetic oligonucleotide
cuuugaugacaaugaugcc

SEQ ID NO: 2233248 - RNA, 19 nt, Artificial Sequence
  Description of Artificial Sequence: Synthetic oligonucleotide
ucacgaaccacagcuuugc

SEQ ID NO: 2233249 - RNA, 19 nt, Artificial Sequence
  Description of Artificial Sequence: Synthetic oligonucleotide
ucuaccggaccagacaccu

SEQ ID NO: 2233250 - RNA, 19 nt, Artificial Sequence
  Description of Artificial Sequence: Synthetic oligonucleotide
caacccacagcagaaguag

SEQ ID NO: 2233251 - RNA, 19 nt, Artificial Sequence
  Description of Artificial Sequence: Synthetic oligonucleotide
uugggcucugggcugaagu

SEQ ID NO: 2233252 - RNA, 19 nt, Artificial Sequence
  Description of Artificial Sequence: Synthetic oligonucleotide
uccccgucuuguuaggacc

SEQ ID NO: 2233253 - RNA, 19 nt, Artificial Sequence
  Description of Artificial Sequence: Synthetic oligonucleotide
aguagaucuuggcuuuuga

SEQ ID NO: 2233254 - RNA, 19 nt, Artificial Sequence
  Description of Artificial Sequence: Synthetic oligonucleotide
ugucccuccccacuggagu

SEQ ID NO: 2233255 - RNA, 19 nt, Artificial Sequence
  Description of Artificial Sequence: Synthetic oligonucleotide
agaaacuuccgggagcugu

SEQ ID NO: 2233256 - RNA, 19 nt, Artificial Sequence
  Description of Artificial Sequence: Synthetic oligonucleotide
cugaaguccugcaacccac

SEQ ID NO: 2233257 - RNA, 19 nt, Artificial Sequence
  Description of Artificial Sequence: Synthetic oligonucleotide
agaguugccaggaugcugu

SEQ ID NO: 2233258 - RNA, 19 nt, Artificial Sequence
  Description of Artificial Sequence: Synthetic oligonucleotide
aggucuuagcuuuggccag

SEQ ID NO: 2233259 - RNA, 19 nt, Artificial Sequence
  Description of Artificial Sequence: Synthetic oligonucleotide
ugggaucugcuuccaguag

SEQ ID NO: 2233260 - RNA, 19 nt, Artificial Sequence
  Description of Artificial Sequence: Synthetic oligonucleotide
ugucacgaaccacagcuuu

SEQ ID NO: 2233261 - RNA, 19 nt, Artificial Sequence
  Description of Artificial Sequence: Synthetic oligonucleotide
gaugccauuggggcgcagg

SEQ ID NO: 2233262 - RNA, 19 nt, Artificial Sequence
  Description of Artificial Sequence: Synthetic oligonucleotide
ugcugaucugucagguggc

SEQ ID NO: 2233263 - RNA, 19 nt, Artificial Sequence
  Description of Artificial Sequence: Synthetic oligonucleotide
ucacggcacacacugcugu

SEQ ID NO: 2233264 - RNA, 19 nt, Artificial Sequence
  Description of Artificial Sequence: Synthetic oligonucleotide
uuggagauguggccauacc

SEQ ID NO: 2233265 - RNA, 19 nt, Artificial Sequence
  Description of Artificial Sequence: Synthetic oligonucleotide
aucaccucacuugucauga

SEQ ID NO: 2233266 - RNA, 19 nt, Artificial Sequence
  Description of Artificial Sequence: Synthetic oligonucleotide
ucgaggucacggcacacac

SEQ ID NO: 2233267 - RNA, 19 nt, Artificial Sequence
  Description of Artificial Sequence: Synthetic oligonucleotide
augcuguucgaguggcagg

SEQ ID NO: 2233268 - RNA, 19 nt, Artificial Sequence
  Description of Artificial Sequence: Synthetic oligonucleotide
ucagggcaaagcuguagac

SEQ ID NO: 2233269 - RNA, 19 nt, Artificial Sequence
  Description of Artificial Sequence: Synthetic oligonucleotide
guggagaguugccaggaug

SEQ ID NO: 2233270 - RNA, 19 nt, Artificial Sequence
  Description of Artificial Sequence: Synthetic oligonucleotide
uccuuccaaugccagcgcc

SEQ ID NO: 2233271 - RNA, 19 nt, Artificial Sequence
  Description of Artificial Sequence: Synthetic oligonucleotide
ggcugcacugcccuaaucc

SEQ ID NO: 2233272 - RNA, 19 nt, Artificial Sequence
  Description of Artificial Sequence: Synthetic oligonucleotide
uggaaaggaccagagccca

SEQ ID NO: 2233273 - RNA, 19 nt, Artificial Sequence
  Description of Artificial Sequence: Synthetic oligonucleotide
acuuccgggagcuguugag

SEQ ID NO: 2233274 - RNA, 19 nt, Artificial Sequence
  Description of Artificial Sequence: Synthetic oligonucleotide
aaguccccgucuuguuagg

SEQ ID NO: 2233275 - RNA, 19 nt, Artificial Sequence
  Description of Artificial Sequence: Synthetic oligonucleotide
uguuaggaccuucccuuaa

SEQ ID NO: 2233276 - RNA, 19 nt, Artificial Sequence
  Description of Artificial Sequence: Synthetic oligonucleotide
uccaguagaucuuggcuuu

SEQ ID NO: 2233277 - RNA, 19 nt, Artificial Sequence
  Description of Artificial Sequence: Synthetic oligonucleotide
caggaugcuguucgagugg

SEQ ID NO: 2233278 - RNA, 19 nt, Artificial Sequence
  Description of Artificial Sequence: Synthetic oligonucleotide
ccagaucacaucauaggag

SEQ ID NO: 2233279 - RNA, 19 nt, Artificial Sequence
  Description of Artificial Sequence: Synthetic oligonucleotide
ggagauguggccauacccc

SEQ ID NO: 2233280 - RNA, 19 nt, Artificial Sequence
  Description of Artificial Sequence: Synthetic oligonucleotide
gaauagaacuguuucucau

SEQ ID NO: 2233281 - RNA, 19 nt, Artificial Sequence
  Description of Artificial Sequence: Synthetic oligonucleotide
ugaaguccugcaacccaca

SEQ ID NO: 2233282 - RNA, 19 nt, Artificial Sequence
  Description of Artificial Sequence: Synthetic oligonucleotide
acuugucaugaugucacug

SEQ ID NO: 2233283 - RNA, 19 nt, Artificial Sequence
  Description of Artificial Sequence: Synthetic oligonucleotide
aaacucagccaggugcuga

SEQ ID NO: 2233284 - RNA, 19 nt, Artificial Sequence
  Description of Artificial Sequence: Synthetic oligonucleotide
aacuuccgggagcuguuga

SEQ ID NO: 2233285 - RNA, 19 nt, Artificial Sequence
  Description of Artificial Sequence: Synthetic oligonucleotide
guuucucaucuucaaucac

SEQ ID NO: 2233286 - RNA, 19 nt, Artificial Sequence
  Description of Artificial Sequence: Synthetic oligonucleotide
ucaugaugucacuggcugu

SEQ ID NO: 2233287 - RNA, 19 nt, Artificial Sequence
  Description of Artificial Sequence: Synthetic oligonucleotide
gagacaagggcgaggcgag

SEQ ID NO: 2233288 - RNA, 19 nt, Artificial Sequence
  Description of Artificial Sequence: Synthetic oligonucleotide
uggagucaaaggucauggc

SEQ ID NO: 2233289 - RNA, 19 nt, Artificial Sequence
  Description of Artificial Sequence: Synthetic oligonucleotide
agcaggcgcuuggugaucc

SEQ ID NO: 2233290 - RNA, 19 nt, Artificial Sequence
  Description of Artificial Sequence: Synthetic oligonucleotide
ugaagagcggcaggagcag

SEQ ID NO: 2233291 - RNA, 19 nt, Artificial Sequence
  Description of Artificial Sequence: Synthetic oligonucleotide
uagacaugguagaucucau

SEQ ID NO: 2233292 - RNA, 19 nt, Artificial Sequence
  Description of Artificial Sequence: Synthetic oligonucleotide
guuccucacccucuugccc

SEQ ID NO: 2233293 - RNA, 19 nt, Artificial Sequence
  Description of Artificial Sequence: Synthetic oligonucleotide
gucuuguuaggaccuuccc

SEQ ID NO: 2233294 - RNA, 19 nt, Artificial Sequence
  Description of Artificial Sequence: Synthetic oligonucleotide
uucuccgggagagugcucu

SEQ ID NO: 2233295 - RNA, 19 nt, Artificial Sequence
  Description of Artificial Sequence: Synthetic oligonucleotide
uggccagaaaguccucugu

SEQ ID NO: 2233296 - RNA, 19 nt, Artificial Sequence
  Description of Artificial Sequence: Synthetic oligonucleotide
gcugucacgaaccacagcu

SEQ ID NO: 2233297 - RNA, 19 nt, Artificial Sequence
  Description of Artificial Sequence: Synthetic oligonucleotide
acaagggcgaggcgagaag

SEQ ID NO: 2233298 - RNA, 19 nt, Artificial Sequence
  Description of Artificial Sequence: Synthetic oligonucleotide
gccgccaccacucuaccgg

SEQ ID NO: 2233299 - RNA, 19 nt, Artificial Sequence
  Description of Artificial Sequence: Synthetic oligonucleotide
ccaagcaugccguccaccg

SEQ ID NO: 2233300 - RNA, 19 nt, Artificial Sequence
  Description of Artificial Sequence: Synthetic oligonucleotide
ugcuucuccgggagagugc

SEQ ID NO: 2233301 - RNA, 19 nt, Artificial Sequence
  Description of Artificial Sequence: Synthetic oligonucleotide
cucucgggaccugagagac

SEQ ID NO: 2233302 - RNA, 19 nt, Artificial Sequence
  Description of Artificial Sequence: Synthetic oligonucleotide
uugucccuccccacuggag

SEQ ID NO: 2233303 - RNA, 19 nt, Artificial Sequence
  Description of Artificial Sequence: Synthetic oligonucleotide
cuuccgggagcuguugagg

SEQ ID NO: 2233304 - RNA, 19 nt, Artificial Sequence
  Description of Artificial Sequence: Synthetic oligonucleotide
cuuguuaggaccuucccuu

SEQ ID NO: 2233305 - RNA, 19 nt, Artificial Sequence
  Description of Artificial Sequence: Synthetic oligonucleotide
gagaguugccaggaugcug

SEQ ID NO: 2233306 - RNA, 19 nt, Artificial Sequence
  Description of Artificial Sequence: Synthetic oligonucleotide
acuggagucaaaggucaug

SEQ ID NO: 2233307 - RNA, 19 nt, Artificial Sequence
  Description of Artificial Sequence: Synthetic oligonucleotide
augccguccaccgugggug

SEQ ID NO: 2233308 - RNA, 19 nt, Artificial Sequence
  Description of Artificial Sequence: Synthetic oligonucleotide
ugaggucgauguuggagau

SEQ ID NO: 2233309 - RNA, 19 nt, Artificial Sequence
  Description of Artificial Sequence: Synthetic oligonucleotide
gcagaaguaguuccucacc

SEQ ID NO: 2233310 - RNA, 19 nt, Artificial Sequence
  Description of Artificial Sequence: Synthetic oligonucleotide
augccagcgccacagucca

SEQ ID NO: 2233311 - RNA, 19 nt, Artificial Sequence
  Description of Artificial Sequence: Synthetic oligonucleotide
ucagccaggugcugaucug

SEQ ID NO: 2233312 - RNA, 19 nt, Artificial Sequence
  Description of Artificial Sequence: Synthetic oligonucleotide
gaggccugcacugcggaug

SEQ ID NO: 2233313 - RNA, 19 nt, Artificial Sequence
  Description of Artificial Sequence: Synthetic oligonucleotide
ugcagcggcgcagaaacuc

SEQ ID NO: 2233314 - RNA, 19 nt, Artificial Sequence
  Description of Artificial Sequence: Synthetic oligonucleotide
aguaguuccucacccucuu

SEQ ID NO: 2233315 - RNA, 19 nt, Artificial Sequence
  Description of Artificial Sequence: Synthetic oligonucleotide
aaacuuccgggagcuguug

SEQ ID NO: 2233316 - RNA, 19 nt, Artificial Sequence
  Description of Artificial Sequence: Synthetic oligonucleotide
cuccuggcgcuccucagcc

SEQ ID NO: 2233317 - RNA, 19 nt, Artificial Sequence
  Description of Artificial Sequence: Synthetic oligonucleotide
caucucagggcaaagcugu

SEQ ID NO: 2233318 - RNA, 19 nt, Artificial Sequence
  Description of Artificial Sequence: Synthetic oligonucleotide
acgaaccacagcuuugcuu

SEQ ID NO: 2233319 - RNA, 19 nt, Artificial Sequence
  Description of Artificial Sequence: Synthetic oligonucleotide
caccucacuugucaugaug

SEQ ID NO: 2233320 - RNA, 19 nt, Artificial Sequence
  Description of Artificial Sequence: Synthetic oligonucleotide
gaaggcuggaaaggaccag

SEQ ID NO: 2233321 - RNA, 19 nt, Artificial Sequence
  Description of Artificial Sequence: Synthetic oligonucleotide
caaagcuguagacauggua

SEQ ID NO: 2233322 - RNA, 19 nt, Artificial Sequence
  Description of Artificial Sequence: Synthetic oligonucleotide
cugcacugcccuaauccac

SEQ ID NO: 2233323 - RNA, 19 nt, Artificial Sequence
  Description of Artificial Sequence: Synthetic oligonucleotide
aaguccucugucacgucca

SEQ ID NO: 2233324 - RNA, 19 nt, Artificial Sequence
  Description of Artificial Sequence: Synthetic oligonucleotide
acacacugcuguccacauc

SEQ ID NO: 2233325 - RNA, 19 nt, Artificial Sequence
  Description of Artificial Sequence: Synthetic oligonucleotide
ugcugucacgaaccacagc

SEQ ID NO: 2233326 - RNA, 19 nt, Artificial Sequence
  Description of Artificial Sequence: Synthetic oligonucleotide
cacccucuugcccucuucc

SEQ ID NO: 2233327 - RNA, 19 nt, Artificial Sequence
  Description of Artificial Sequence: Synthetic oligonucleotide
aucauaggaguugggcucu

SEQ ID NO: 2233328 - RNA, 19 nt, Artificial Sequence
  Description of Artificial Sequence: Synthetic oligonucleotide
cauggcagguguguuuaag

SEQ ID NO: 2233329 - RNA, 19 nt, Artificial Sequence
  Description of Artificial Sequence: Synthetic oligonucleotide
cucacuugucaugauguca

SEQ ID NO: 2233330 - RNA, 19 nt, Artificial Sequence
  Description of Artificial Sequence: Synthetic oligonucleotide
agguaggucuuagcuuugg

SEQ ID NO: 2233331 - RNA, 19 nt, Artificial Sequence
  Description of Artificial Sequence: Synthetic oligonucleotide
uccggcguaccaccucgag

SEQ ID NO: 2233332 - RNA, 19 nt, Artificial Sequence
  Description of Artificial Sequence: Synthetic oligonucleotide
cuuccaguagaucuuggcu

SEQ ID NO: 2233333 - RNA, 19 nt, Artificial Sequence
  Description of Artificial Sequence: Synthetic oligonucleotide
agcacaccuucccacugga

SEQ ID NO: 2233334 - RNA, 19 nt, Artificial Sequence
  Description of Artificial Sequence: Synthetic oligonucleotide
acccuccugggccauguug

SEQ ID NO: 2233335 - RNA, 19 nt, Artificial Sequence
  Description of Artificial Sequence: Synthetic oligonucleotide
uuguuaggaccuucccuua

SEQ ID NO: 2233336 - RNA, 19 nt, Artificial Sequence
  Description of Artificial Sequence: Synthetic oligonucleotide
guggccuaucacccacugg

SEQ ID NO: 2233337 - RNA, 19 nt, Artificial Sequence
  Description of Artificial Sequence: Synthetic oligonucleotide
auguuggagauguggccau

SEQ ID NO: 2233338 - RNA, 19 nt, Artificial Sequence
  Description of Artificial Sequence: Synthetic oligonucleotide
cucaucucagggcaaagcu

SEQ ID NO: 2233339 - RNA, 19 nt, Artificial Sequence
  Description of Artificial Sequence: Synthetic oligonucleotide
guuaggaccuucccuuaaa

SEQ ID NO: 2233340 - RNA, 19 nt, Artificial Sequence
  Description of Artificial Sequence: Synthetic oligonucleotide
cucuaccggaccagacacc

SEQ ID NO: 2233341 - RNA, 19 nt, Artificial Sequence
  Description of Artificial Sequence: Synthetic oligonucleotide
uguugaggucgauguugga

SEQ ID NO: 2233342 - RNA, 19 nt, Artificial Sequence
  Description of Artificial Sequence: Synthetic oligonucleotide
acggcagccgccaccacuc

SEQ ID NO: 2233343 - RNA, 19 nt, Artificial Sequence
  Description of Artificial Sequence: Synthetic oligonucleotide
gaccagagcccacggcagc

SEQ ID NO: 2233344 - RNA, 19 nt, Artificial Sequence
  Description of Artificial Sequence: Synthetic oligonucleotide
agagcggcaggagcaggcg

SEQ ID NO: 2233345 - RNA, 19 nt, Artificial Sequence
  Description of Artificial Sequence: Synthetic oligonucleotide
cugcacugcggaugauccg

SEQ ID NO: 2233346 - RNA, 19 nt, Artificial Sequence
  Description of Artificial Sequence: Synthetic oligonucleotide
guuggagauguggccauac

SEQ ID NO: 2233347 - RNA, 19 nt, Artificial Sequence
  Description of Artificial Sequence: Synthetic oligonucleotide
ggagagugcucucgggacc

SEQ ID NO: 2233348 - RNA, 19 nt, Artificial Sequence
  Description of Artificial Sequence: Synthetic oligonucleotide
gggcgaggcgagaagaagg

SEQ ID NO: 2233349 - RNA, 19 nt, Artificial Sequence
  Description of Artificial Sequence: Synthetic oligonucleotide
gucacgaaccacagcuuug

SEQ ID NO: 2233350 - RNA, 19 nt, Artificial Sequence
  Description of Artificial Sequence: Synthetic oligonucleotide
aguugccaggaugcuguuc

SEQ ID NO: 2233351 - RNA, 19 nt, Artificial Sequence
  Description of Artificial Sequence: Synthetic oligonucleotide
gaaacucagccaggugcug

SEQ ID NO: 2233352 - RNA, 19 nt, Artificial Sequence
  Description of Artificial Sequence: Synthetic oligonucleotide
cacucuaccggaccagaca

SEQ ID NO: 2233353 - RNA, 19 nt, Artificial Sequence
  Description of Artificial Sequence: Synthetic oligonucleotide
ccaggugcugaucugucag

SEQ ID NO: 2233354 - RNA, 19 nt, Artificial Sequence
  Description of Artificial Sequence: Synthetic oligonucleotide
cacccugaagagcggcagg

SEQ ID NO: 2233355 - RNA, 19 nt, Artificial Sequence
  Description of Artificial Sequence: Synthetic oligonucleotide
cacugcggaugauccggcg

SEQ ID NO: 2233356 - RNA, 19 nt, Artificial Sequence
  Description of Artificial Sequence: Synthetic oligonucleotide
guaguuccucacccucuug

SEQ ID NO: 2233357 - RNA, 19 nt, Artificial Sequence
  Description of Artificial Sequence: Synthetic oligonucleotide
cagguguguuuaaggcccc

SEQ ID NO: 2233358 - RNA, 19 nt, Artificial Sequence
  Description of Artificial Sequence: Synthetic oligonucleotide
agcggcgcagaaacucagc

SEQ ID NO: 2233359 - RNA, 19 nt, Artificial Sequence
  Description of Artificial Sequence: Synthetic oligonucleotide
gugggaucugcuuccagua

SEQ ID NO: 2233360 - RNA, 19 nt, Artificial Sequence
  Description of Artificial Sequence: Synthetic oligonucleotide
cauaggaguugggcucugg

SEQ ID NO: 2233361 - RNA, 19 nt, Artificial Sequence
  Description of Artificial Sequence: Synthetic oligonucleotide
aacccacagcagaaguagu

SEQ ID NO: 2233362 - RNA, 19 nt, Artificial Sequence
  Description of Artificial Sequence: Synthetic oligonucleotide
cauguccaccacccugaag

SEQ ID NO: 2233363 - RNA, 19 nt, Artificial Sequence
  Description of Artificial Sequence: Synthetic oligonucleotide
gggagagugcucucgggac

SEQ ID NO: 2233364 - RNA, 19 nt, Artificial Sequence
  Description of Artificial Sequence: Synthetic oligonucleotide
guccccgucuuguuaggac

SEQ ID NO: 2233365 - RNA, 19 nt, Artificial Sequence
  Description of Artificial Sequence: Synthetic oligonucleotide
aggcuugucccuccccacu

SEQ ID NO: 2233366 - RNA, 19 nt, Artificial Sequence
  Description of Artificial Sequence: Synthetic oligonucleotide
gaaaguccucugucacguc

SEQ ID NO: 2233367 - RNA, 19 nt, Artificial Sequence
  Description of Artificial Sequence: Synthetic oligonucleotide
ugccauuggggcgcaggcc

SEQ ID NO: 2233368 - RNA, 19 nt, Artificial Sequence
  Description of Artificial Sequence: Synthetic oligonucleotide
gcggcgcagaaacucagcc

SEQ ID NO: 2233369 - RNA, 19 nt, Artificial Sequence
  Description of Artificial Sequence: Synthetic oligonucleotide
accucgaggucacggcaca

SEQ ID NO: 2233370 - RNA, 19 nt, Artificial Sequence
  Description of Artificial Sequence: Synthetic oligonucleotide
gcugaaguccugcaaccca

SEQ ID NO: 2233371 - RNA, 19 nt, Artificial Sequence
  Description of Artificial Sequence: Synthetic oligonucleotide
gcgagaagaaggcuggaaa

SEQ ID NO: 2233372 - RNA, 19 nt, Artificial Sequence
  Description of Artificial Sequence: Synthetic oligonucleotide
cucgggaccugagagacaa

SEQ ID NO: 2233373 - RNA, 19 nt, Artificial Sequence
  Description of Artificial Sequence: Synthetic oligonucleotide
agcuguagacaugguagau

SEQ ID NO: 2233374 - RNA, 19 nt, Artificial Sequence
  Description of Artificial Sequence: Synthetic oligonucleotide
ggagcuguugaggucgaug

SEQ ID NO: 2233375 - RNA, 19 nt, Artificial Sequence
  Description of Artificial Sequence: Synthetic oligonucleotide
cgaggcgagaagaaggcug

SEQ ID NO: 2233376 - RNA, 19 nt, Artificial Sequence
  Description of Artificial Sequence: Synthetic oligonucleotide
cagcggcgcagaaacucag

SEQ ID NO: 2233377 - RNA, 19 nt, Artificial Sequence
  Description of Artificial Sequence: Synthetic oligonucleotide
cuccgggagagugcucucg

SEQ ID NO: 2233378 - RNA, 19 nt, Artificial Sequence
  Description of Artificial Sequence: Synthetic oligonucleotide
agagcccacggcagccgcc

SEQ ID NO: 2233379 - RNA, 19 nt, Artificial Sequence
  Description of Artificial Sequence: Synthetic oligonucleotide
uccgggagcuguugagguc

SEQ ID NO: 2233380 - RNA, 19 nt, Artificial Sequence
  Description of Artificial Sequence: Synthetic oligonucleotide
ccgggagcuguugaggucg

SEQ ID NO: 2233381 - RNA, 19 nt, Artificial Sequence
  Description of Artificial Sequence: Synthetic oligonucleotide
agcaugccguccaccgugg

SEQ ID NO: 2233382 - RNA, 19 nt, Artificial Sequence
  Description of Artificial Sequence: Synthetic oligonucleotide
aagggcgaggcgagaagaa

SEQ ID NO: 2233383 - RNA, 19 nt, Artificial Sequence
  Description of Artificial Sequence: Synthetic oligonucleotide
cacugcccuaauccacagc

SEQ ID NO: 2233384 - RNA, 19 nt, Artificial Sequence
  Description of Artificial Sequence: Synthetic oligonucleotide
gcuguagacaugguagauc

SEQ ID NO: 2233385 - RNA, 19 nt, Artificial Sequence
  Description of Artificial Sequence: Synthetic oligonucleotide
ucgaguggcagggcugcac

SEQ ID NO: 2233386 - RNA, 19 nt, Artificial Sequence
  Description of Artificial Sequence: Synthetic oligonucleotide
ggccagaaaguccucuguc

SEQ ID NO: 2233387 - RNA, 19 nt, Artificial Sequence
  Description of Artificial Sequence: Synthetic oligonucleotide
ggcgaggcgagaagaaggc

SEQ ID NO: 2233388 - RNA, 19 nt, Artificial Sequence
  Description of Artificial Sequence: Synthetic oligonucleotide
uggccccggccucaucuca

SEQ ID NO: 2233389 - RNA, 19 nt, Artificial Sequence
  Description of Artificial Sequence: Synthetic oligonucleotide
gguggccuaucacccacug

SEQ ID NO: 2233390 - RNA, 19 nt, Artificial Sequence
  Description of Artificial Sequence: Synthetic oligonucleotide
ggauccagaucacaucaua

SEQ ID NO: 2233391 - RNA, 19 nt, Artificial Sequence
  Description of Artificial Sequence: Synthetic oligonucleotide
gccaccacucuaccggacc

SEQ ID NO: 2233392 - RNA, 19 nt, Artificial Sequence
  Description of Artificial Sequence: Synthetic oligonucleotide
caagggcgaggcgagaaga

SEQ ID NO: 2233393 - RNA, 19 nt, Artificial Sequence
  Description of Artificial Sequence: Synthetic oligonucleotide
agccaggugcugaucuguc

SEQ ID NO: 2233394 - RNA, 19 nt, Artificial Sequence
  Description of Artificial Sequence: Synthetic oligonucleotide
cugcaacccacagcagaag

SEQ ID NO: 2233395 - RNA, 19 nt, Artificial Sequence
  Description of Artificial Sequence: Synthetic oligonucleotide
gaucugcuuccaguagauc

SEQ ID NO: 2233396 - RNA, 19 nt, Artificial Sequence
  Description of Artificial Sequence: Synthetic oligonucleotide
cuggaggcuugucccuccc

SEQ ID NO: 2233397 - RNA, 19 nt, Artificial Sequence
  Description of Artificial Sequence: Synthetic oligonucleotide
cacggcacacacugcuguc

SEQ ID NO: 2233398 - RNA, 19 nt, Artificial Sequence
  Description of Artificial Sequence: Synthetic oligonucleotide
accacucuaccggaccaga

SEQ ID NO: 2233399 - RNA, 19 nt, Artificial Sequence
  Description of Artificial Sequence: Synthetic oligonucleotide
aggucacggcacacacugc

SEQ ID NO: 2233400 - RNA, 19 nt, Artificial Sequence
  Description of Artificial Sequence: Synthetic oligonucleotide
gucacggcacacacugcug

SEQ ID NO: 2233401 - RNA, 19 nt, Artificial Sequence
  Description of Artificial Sequence: Synthetic oligonucleotide
cagagcccacggcagccgc

SEQ ID NO: 2233402 - RNA, 19 nt, Artificial Sequence
  Description of Artificial Sequence: Synthetic oligonucleotide
ucgggaccugagagacaag

SEQ ID NO: 2233403 - RNA, 19 nt, Artificial Sequence
  Description of Artificial Sequence: Synthetic oligonucleotide
gucccuccccacuggaguc

SEQ ID NO: 2233404 - RNA, 19 nt, Artificial Sequence
  Description of Artificial Sequence: Synthetic oligonucleotide
uugcagcggcgcagaaacu

SEQ ID NO: 2233405 - RNA, 19 nt, Artificial Sequence
  Description of Artificial Sequence: Synthetic oligonucleotide
ugcggaugauccggcguac

SEQ ID NO: 2233406 - RNA, 19 nt, Artificial Sequence
  Description of Artificial Sequence: Synthetic oligonucleotide
cuugucccuccccacugga

SEQ ID NO: 2233407 - RNA, 19 nt, Artificial Sequence
  Description of Artificial Sequence: Synthetic oligonucleotide
agcggcaggagcaggcgcu

SEQ ID NO: 2233408 - RNA, 19 nt, Artificial Sequence
  Description of Artificial Sequence: Synthetic oligonucleotide
cccuaauccacagcacacc

SEQ ID NO: 2233409 - RNA, 19 nt, Artificial Sequence
  Description of Artificial Sequence: Synthetic oligonucleotide
caccacccugaagagcggc

SEQ ID NO: 2233410 - RNA, 19 nt, Artificial Sequence
  Description of Artificial Sequence: Synthetic oligonucleotide
ucaccucacuugucaugau

SEQ ID NO: 2233411 - RNA, 19 nt, Artificial Sequence
  Description of Artificial Sequence: Synthetic oligonucleotide
ggcacaggaaguccccguc

SEQ ID NO: 2233412 - RNA, 19 nt, Artificial Sequence
  Description of Artificial Sequence: Synthetic oligonucleotide
cagcuuugcuucuccggga

SEQ ID NO: 2233413 - RNA, 19 nt, Artificial Sequence
  Description of Artificial Sequence: Synthetic oligonucleotide
ggucacggcacacacugcu

SEQ ID NO: 2233414 - RNA, 19 nt, Artificial Sequence
  Description of Artificial Sequence: Synthetic oligonucleotide
gccuaucacccacuggauc

SEQ ID NO: 2233415 - RNA, 19 nt, Artificial Sequence
  Description of Artificial Sequence: Synthetic oligonucleotide
caccacucuaccggaccag

SEQ ID NO: 2233416 - RNA, 19 nt, Artificial Sequence
  Description of Artificial Sequence: Synthetic oligonucleotide
uggcgcuccucagccagga

SEQ ID NO: 2233417 - RNA, 19 nt, Artificial Sequence
  Description of Artificial Sequence: Synthetic oligonucleotide
uguuggagauguggccaua

SEQ ID NO: 2233418 - RNA, 19 nt, Artificial Sequence
  Description of Artificial Sequence: Synthetic oligonucleotide
uccucacccucuugcccuc

SEQ ID NO: 2233419 - RNA, 19 nt, Artificial Sequence
  Description of Artificial Sequence: Synthetic oligonucleotide
aguccccgucuuguuagga

SEQ ID NO: 2233420 - RNA, 19 nt, Artificial Sequence
  Description of Artificial Sequence: Synthetic oligonucleotide
ccggcguaccaccucgagg

SEQ ID NO: 2233421 - RNA, 19 nt, Artificial Sequence
  Description of Artificial Sequence: Synthetic oligonucleotide
ggaaguccccgucuuguua

SEQ ID NO: 2233422 - RNA, 19 nt, Artificial Sequence
  Description of Artificial Sequence: Synthetic oligonucleotide
gcacugcccuaauccacag

SEQ ID NO: 2233423 - RNA, 19 nt, Artificial Sequence
  Description of Artificial Sequence: Synthetic oligonucleotide
gcccuaauccacagcacac

SEQ ID NO: 2233424 - RNA, 19 nt, Artificial Sequence
  Description of Artificial Sequence: Synthetic oligonucleotide
ccauguugucuuugaugac

SEQ ID NO: 2233425 - RNA, 19 nt, Artificial Sequence
  Description of Artificial Sequence: Synthetic oligonucleotide
cuaccggaccagacaccuc

SEQ ID NO: 2233426 - RNA, 19 nt, Artificial Sequence
  Description of Artificial Sequence: Synthetic oligonucleotide
ccugcaacccacagcagaa

SEQ ID NO: 2233427 - RNA, 19 nt, Artificial Sequence
  Description of Artificial Sequence: Synthetic oligonucleotide
cacagcacaccuucccacu

SEQ ID NO: 2233428 - RNA, 19 nt, Artificial Sequence
  Description of Artificial Sequence: Synthetic oligonucleotide
cugggcugaaguccugcaa

SEQ ID NO: 2233429 - RNA, 19 nt, Artificial Sequence
  Description of Artificial Sequence: Synthetic oligonucleotide
cucgaggucacggcacaca

SEQ ID NO: 2233430 - RNA, 19 nt, Artificial Sequence
  Description of Artificial Sequence: Synthetic oligonucleotide
caccgugggugggaucugc

SEQ ID NO: 2233431 - RNA, 19 nt, Artificial Sequence
  Description of Artificial Sequence: Synthetic oligonucleotide
augauccggcguaccaccu

SEQ ID NO: 2233432 - RNA, 19 nt, Artificial Sequence
  Description of Artificial Sequence: Synthetic oligonucleotide
cagccgccaccacucuacc

SEQ ID NO: 2233433 - RNA, 19 nt, Artificial Sequence
  Description of Artificial Sequence: Synthetic oligonucleotide
ccucacuugucaugauguc

SEQ ID NO: 2233434 - RNA, 19 nt, Artificial Sequence
  Description of Artificial Sequence: Synthetic oligonucleotide
cuguucgaguggcagggcu

SEQ ID NO: 2233435 - RNA, 19 nt, Artificial Sequence
  Description of Artificial Sequence: Synthetic oligonucleotide
cguaccaccucgaggucac

SEQ ID NO: 2233436 - RNA, 19 nt, Artificial Sequence
  Description of Artificial Sequence: Synthetic oligonucleotide
gcugaucugucagguggcc

SEQ ID NO: 2233437 - RNA, 19 nt, Artificial Sequence
  Description of Artificial Sequence: Synthetic oligonucleotide
cccggccucaucucagggc

SEQ ID NO: 2233438 - RNA, 19 nt, Artificial Sequence
  Description of Artificial Sequence: Synthetic oligonucleotide
ccuuccaaugccagcgcca

SEQ ID NO: 2233439 - RNA, 19 nt, Artificial Sequence
  Description of Artificial Sequence: Synthetic oligonucleotide
uucgaguggcagggcugca

SEQ ID NO: 2233440 - RNA, 19 nt, Artificial Sequence
  Description of Artificial Sequence: Synthetic oligonucleotide
ccagguaggucuuagcuuu

SEQ ID NO: 2233441 - RNA, 19 nt, Artificial Sequence
  Description of Artificial Sequence: Synthetic oligonucleotide
gcucucgggaccugagaga

SEQ ID NO: 2233442 - RNA, 19 nt, Artificial Sequence
  Description of Artificial Sequence: Synthetic oligonucleotide
gagcccacggcagccgcca

SEQ ID NO: 2233443 - RNA, 19 nt, Artificial Sequence
  Description of Artificial Sequence: Synthetic oligonucleotide
ccggccucaucucagggca

SEQ ID NO: 2233444 - RNA, 19 nt, Artificial Sequence
  Description of Artificial Sequence: Synthetic oligonucleotide
cuaauccacagcacaccuu

SEQ ID NO: 2233445 - RNA, 19 nt, Artificial Sequence
  Description of Artificial Sequence: Synthetic oligonucleotide
ccacucuaccggaccagac

SEQ ID NO: 2233446 - RNA, 19 nt, Artificial Sequence
  Description of Artificial Sequence: Synthetic oligonucleotide
cuucuccgggagagugcuc

SEQ ID NO: 2233447 - RNA, 19 nt, Artificial Sequence
  Description of Artificial Sequence: Synthetic oligonucleotide
cauuggggcgcaggcccug

SEQ ID NO: 2233448 - RNA, 19 nt, Artificial Sequence
  Description of Artificial Sequence: Synthetic oligonucleotide
ccuaauccacagcacaccu

SEQ ID NO: 2233449 - RNA, 19 nt, Artificial Sequence
  Description of Artificial Sequence: Synthetic oligonucleotide
ccgggagagugcucucggg

SEQ ID NO: 2233450 - RNA, 19 nt, Artificial Sequence
  Description of Artificial Sequence: Synthetic oligonucleotide
ugaugccauuggggcgcag

SEQ ID NO: 2233451 - RNA, 19 nt, Artificial Sequence
  Description of Artificial Sequence: Synthetic oligonucleotide
ccacccugaagagcggcag

SEQ ID NO: 2233452 - RNA, 19 nt, Artificial Sequence
  Description of Artificial Sequence: Synthetic oligonucleotide
agagugcucucgggaccug

SEQ ID NO: 2233453 - RNA, 19 nt, Artificial Sequence
  Description of Artificial Sequence: Synthetic oligonucleotide
ggagcaggcgcuuggugau

SEQ ID NO: 2233454 - RNA, 19 nt, Artificial Sequence
  Description of Artificial Sequence: Synthetic oligonucleotide
caugccguccaccgugggu

SEQ ID NO: 2233455 - RNA, 19 nt, Artificial Sequence
  Description of Artificial Sequence: Synthetic oligonucleotide
accgugggugggaucugcu

SEQ ID NO: 2233456 - RNA, 19 nt, Artificial Sequence
  Description of Artificial Sequence: Synthetic oligonucleotide
gcaugccguccaccguggg

SEQ ID NO: 2233457 - RNA, 19 nt, Artificial Sequence
  Description of Artificial Sequence: Synthetic oligonucleotide
aggcgagaagaaggcugga

SEQ ID NO: 2233458 - RNA, 19 nt, Artificial Sequence
  Description of Artificial Sequence: Synthetic oligonucleotide
ggcgagaagaaggcuggaa

SEQ ID NO: 2233459 - RNA, 19 nt, Artificial Sequence
  Description of Artificial Sequence: Synthetic oligonucleotide
cacuugucaugaugucacu

SEQ ID NO: 2233460 - RNA, 19 nt, Artificial Sequence
  Description of Artificial Sequence: Synthetic oligonucleotide
augaugccauuggggcgca

SEQ ID NO: 2233461 - RNA, 19 nt, Artificial Sequence
  Description of Artificial Sequence: Synthetic oligonucleotide
cugucacguccaccauguc

SEQ ID NO: 2233462 - RNA, 19 nt, Artificial Sequence
  Description of Artificial Sequence: Synthetic oligonucleotide
gcaacccacagcagaagua

SEQ ID NO: 2233463 - RNA, 19 nt, Artificial Sequence
  Description of Artificial Sequence: Synthetic oligonucleotide
caagcaugccguccaccgu

SEQ ID NO: 2233464 - RNA, 19 nt, Artificial Sequence
  Description of Artificial Sequence: Synthetic oligonucleotide
gcagcggcgcagaaacuca

SEQ ID NO: 2233465 - RNA, 19 nt, Artificial Sequence
  Description of Artificial Sequence: Synthetic oligonucleotide
gccucaucucagggcaaag

SEQ ID NO: 2233466 - RNA, 19 nt, Artificial Sequence
  Description of Artificial Sequence: Synthetic oligonucleotide
gagcaggcgcuuggugauc

SEQ ID NO: 2233467 - RNA, 19 nt, Artificial Sequence
  Description of Artificial Sequence: Synthetic oligonucleotide
cggcguaccaccucgaggu

SEQ ID NO: 2233468 - RNA, 19 nt, Artificial Sequence
  Description of Artificial Sequence: Synthetic oligonucleotide
cugcuugcagcggcgcaga

SEQ ID NO: 2233469 - RNA, 19 nt, Artificial Sequence
  Description of Artificial Sequence: Synthetic oligonucleotide
ccaccacucuaccggacca

SEQ ID NO: 2233470 - RNA, 19 nt, Artificial Sequence
  Description of Artificial Sequence: Synthetic oligonucleotide
gcacaccuucccacuggag

SEQ ID NO: 2233471 - RNA, 19 nt, Artificial Sequence
  Description of Artificial Sequence: Synthetic oligonucleotide
aucucagggcaaagcugua

SEQ ID NO: 2233472 - RNA, 19 nt, Artificial Sequence
  Description of Artificial Sequence: Synthetic oligonucleotide
gcuguucgaguggcagggc

SEQ ID NO: 2233473 - RNA, 19 nt, Artificial Sequence
  Description of Artificial Sequence: Synthetic oligonucleotide
cugucacgaaccacagcuu

SEQ ID NO: 2233474 - RNA, 19 nt, Artificial Sequence
  Description of Artificial Sequence: Synthetic oligonucleotide
gcggaugauccggcguacc

SEQ ID NO: 2233475 - RNA, 19 nt, Artificial Sequence
  Description of Artificial Sequence: Synthetic oligonucleotide
cacgaaccacagcuuugcu

SEQ ID NO: 2233476 - RNA, 19 nt, Artificial Sequence
  Description of Artificial Sequence: Synthetic oligonucleotide
ccuccugggccauguuguc

SEQ ID NO: 2233477 - RNA, 19 nt, Artificial Sequence
  Description of Artificial Sequence: Synthetic oligonucleotide
ggcguaccaccucgagguc

SEQ ID NO: 2233478 - RNA, 19 nt, Artificial Sequence
  Description of Artificial Sequence: Synthetic oligonucleotide
guccaccgugggugggauc

SEQ ID NO: 2233479 - RNA, 19 nt, Artificial Sequence
  Description of Artificial Sequence: Synthetic oligonucleotide
gcgcuuggugauccuucca

SEQ ID NO: 2233480 - RNA, 19 nt, Artificial Sequence
  Description of Artificial Sequence: Synthetic oligonucleotide
auccggcguaccaccucga

SEQ ID NO: 2233481 - RNA, 19 nt, Artificial Sequence
  Description of Artificial Sequence: Synthetic oligonucleotide
ggagaguugccaggaugcu

SEQ ID NO: 2233482 - RNA, 19 nt, Artificial Sequence
  Description of Artificial Sequence: Synthetic oligonucleotide
ggaugcuguucgaguggca

SEQ ID NO: 2233483 - RNA, 19 nt, Artificial Sequence
  Description of Artificial Sequence: Synthetic oligonucleotide
gaguugccaggaugcuguu

SEQ ID NO: 2233484 - RNA, 19 nt, Artificial Sequence
  Description of Artificial Sequence: Synthetic oligonucleotide
gggcugcacugcccuaauc

SEQ ID NO: 2233485 - RNA, 19 nt, Artificial Sequence
  Description of Artificial Sequence: Synthetic oligonucleotide
aguugggcucugggcugaa

SEQ ID NO: 2233486 - RNA, 19 nt, Artificial Sequence
  Description of Artificial Sequence: Synthetic oligonucleotide
caccuucccacuggaggcu

SEQ ID NO: 2233487 - RNA, 19 nt, Artificial Sequence
  Description of Artificial Sequence: Synthetic oligonucleotide
cggcgcagaaacucagcca

SEQ ID NO: 2233488 - RNA, 19 nt, Artificial Sequence
  Description of Artificial Sequence: Synthetic oligonucleotide
gccguccaccguggguggg

SEQ ID NO: 2233489 - RNA, 19 nt, Artificial Sequence
  Description of Artificial Sequence: Synthetic oligonucleotide
ccccaagcaugccguccac

SEQ ID NO: 2233490 - RNA, 19 nt, Artificial Sequence
  Description of Artificial Sequence: Synthetic oligonucleotide
gcccugcuugcagcggcgc

SEQ ID NO: 2233491 - RNA, 19 nt, Artificial Sequence
  Description of Artificial Sequence: Synthetic oligonucleotide
ccccgucuuguuaggaccu

SEQ ID NO: 2233492 - RNA, 19 nt, Artificial Sequence
  Description of Artificial Sequence: Synthetic oligonucleotide
ccgccaccacucuaccgga

SEQ ID NO: 2233493 - RNA, 19 nt, Artificial Sequence
  Description of Artificial Sequence: Synthetic oligonucleotide
cggcacacacugcugucca

SEQ ID NO: 2233494 - RNA, 19 nt, Artificial Sequence
  Description of Artificial Sequence: Synthetic oligonucleotide
gcgccacaguccagggcac

SEQ ID NO: 2233495 - RNA, 19 nt, Artificial Sequence
  Description of Artificial Sequence: Synthetic oligonucleotide
ggccuaucacccacuggau

SEQ ID NO: 2233496 - RNA, 19 nt, Artificial Sequence
  Description of Artificial Sequence: Synthetic oligonucleotide
gcgaggcgagaagaaggcu

SEQ ID NO: 2233497 - RNA, 19 nt, Artificial Sequence
  Description of Artificial Sequence: Synthetic oligonucleotide
cgaguggcagggcugcacu

SEQ ID NO: 2233498 - RNA, 19 nt, Artificial Sequence
  Description of Artificial Sequence: Synthetic oligonucleotide
cgaggucacggcacacacu

SEQ ID NO: 2233499 - RNA, 19 nt, Artificial Sequence
  Description of Artificial Sequence: Synthetic oligonucleotide
ccaguagaucuuggcuuuu

SEQ ID NO: 2233500 - RNA, 19 nt, Artificial Sequence
  Description of Artificial Sequence: Synthetic oligonucleotide
cacccuccugggccauguu

SEQ ID NO: 2233501 - RNA, 19 nt, Artificial Sequence
  Description of Artificial Sequence: Synthetic oligonucleotide
gggagcuguugaggucgau

SEQ ID NO: 2233502 - RNA, 19 nt, Artificial Sequence
  Description of Artificial Sequence: Synthetic oligonucleotide
cccgucuuguuaggaccuu

SEQ ID NO: 2233503 - RNA, 19 nt, Artificial Sequence
  Description of Artificial Sequence: Synthetic oligonucleotide
guaucuugaggauagaagg

SEQ ID NO: 2233504 - RNA, 19 nt, Artificial Sequence
  Description of Artificial Sequence: Synthetic oligonucleotide
agaugcuggaccuuggucc

SEQ ID NO: 2233505 - RNA, 19 nt, Artificial Sequence
  Description of Artificial Sequence: Synthetic oligonucleotide
agaagacuagggcagagcc

SEQ ID NO: 2233506 - RNA, 19 nt, Artificial Sequence
  Description of Artificial Sequence: Synthetic oligonucleotide
agaaccggcggcuauaacc

SEQ ID NO: 2233507 - RNA, 19 nt, Artificial Sequence
  Description of Artificial Sequence: Synthetic oligonucleotide
cauggugcaauaaauaaag

SEQ ID NO: 2233508 - RNA, 19 nt, Artificial Sequence
  Description of Artificial Sequence: Synthetic oligonucleotide
auucagguacuucagggcc

SEQ ID NO: 2233509 - RNA, 19 nt, Artificial Sequence
  Description of Artificial Sequence: Synthetic oligonucleotide
aguggguuggaacaugggc

SEQ ID NO: 2233510 - RNA, 19 nt, Artificial Sequence
  Description of Artificial Sequence: Synthetic oligonucleotide
aacauggugcaauaaauaa

SEQ ID NO: 2233511 - RNA, 19 nt, Artificial Sequence
  Description of Artificial Sequence: Synthetic oligonucleotide
uaugccacaccccaagugc

SEQ ID NO: 2233512 - RNA, 19 nt, Artificial Sequence
  Description of Artificial Sequence: Synthetic oligonucleotide
uucucucacauucagguac

SEQ ID NO: 2233513 - RNA, 19 nt, Artificial Sequence
  Description of Artificial Sequence: Synthetic oligonucleotide
cucacgaucuuccaggagg

SEQ ID NO: 2233514 - RNA, 19 nt, Artificial Sequence
  Description of Artificial Sequence: Synthetic oligonucleotide
caaguaguaagucaggguc

SEQ ID NO: 2233515 - RNA, 19 nt, Artificial Sequence
  Description of Artificial Sequence: Synthetic oligonucleotide
auaaccacguacgaagccc

SEQ ID NO: 2233516 - RNA, 19 nt, Artificial Sequence
  Description of Artificial Sequence: Synthetic oligonucleotide
agagccaccgcacagcagg

SEQ ID NO: 2233517 - RNA, 19 nt, Artificial Sequence
  Description of Artificial Sequence: Synthetic oligonucleotide
guuucaaguaguaagucag

SEQ ID NO: 2233518 - RNA, 19 nt, Artificial Sequence
  Description of Artificial Sequence: Synthetic oligonucleotide
uuccuuagugucauagccg

SEQ ID NO: 2233519 - RNA, 19 nt, Artificial Sequence
  Description of Artificial Sequence: Synthetic oligonucleotide
uagaaggugacuuccuuag

SEQ ID NO: 2233520 - RNA, 19 nt, Artificial Sequence
  Description of Artificial Sequence: Synthetic oligonucleotide
aaaguuucaaguaguaagu

SEQ ID NO: 2233521 - RNA, 19 nt, Artificial Sequence
  Description of Artificial Sequence: Synthetic oligonucleotide
cuuccuuagugucauagcc

SEQ ID NO: 2233522 - RNA, 19 nt, Artificial Sequence
  Description of Artificial Sequence: Synthetic oligonucleotide
agugucauagccgccaagc

SEQ ID NO: 2233523 - RNA, 19 nt, Artificial Sequence
  Description of Artificial Sequence: Synthetic oligonucleotide
uucaaguaguaagucaggg

SEQ ID NO: 2233524 - RNA, 19 nt, Artificial Sequence
  Description of Artificial Sequence: Synthetic oligonucleotide
ucaauagagaaaccucggc

SEQ ID NO: 2233525 - RNA, 19 nt, Artificial Sequence
  Description of Artificial Sequence: Synthetic oligonucleotide
gcuauaaccacguacgaag

SEQ ID NO: 2233526 - RNA, 19 nt, Artificial Sequence
  Description of Artificial Sequence: Synthetic oligonucleotide
caccacaccaacauggugc

SEQ ID NO: 2233527 - RNA, 19 nt, Artificial Sequence
  Description of Artificial Sequence: Synthetic oligonucleotide
agaggaucaaggcucuugg

SEQ ID NO: 2233528 - RNA, 19 nt, Artificial Sequence
  Description of Artificial Sequence: Synthetic oligonucleotide
aagugcagcccucacgauc

SEQ ID NO: 2233529 - RNA, 19 nt, Artificial Sequence
  Description of Artificial Sequence: Synthetic oligonucleotide
gaaggugucucccugccag

SEQ ID NO: 2233530 - RNA, 19 nt, Artificial Sequence
  Description of Artificial Sequence: Synthetic oligonucleotide
acguacgaagcccacacgg

SEQ ID NO: 2233531 - RNA, 19 nt, Artificial Sequence
  Description of Artificial Sequence: Synthetic oligonucleotide
acacuagggauccguaccc

SEQ ID NO: 2233532 - RNA, 19 nt, Artificial Sequence
  Description of Artificial Sequence: Synthetic oligonucleotide
aggauagaaggugacuucc

SEQ ID NO: 2233533 - RNA, 19 nt, Artificial Sequence
  Description of Artificial Sequence: Synthetic oligonucleotide
uccuuagugucauagccgc

SEQ ID NO: 2233534 - RNA, 19 nt, Artificial Sequence
  Description of Artificial Sequence: Synthetic oligonucleotide
ucgcuguaggcaaaguccg

SEQ ID NO: 2233535 - RNA, 19 nt, Artificial Sequence
  Description of Artificial Sequence: Synthetic oligonucleotide
aaguuucaaguaguaaguc

SEQ ID NO: 2233536 - RNA, 19 nt, Artificial Sequence
  Description of Artificial Sequence: Synthetic oligonucleotide
aaggugacuuccuuagugu

SEQ ID NO: 2233537 - RNA, 19 nt, Artificial Sequence
  Description of Artificial Sequence: Synthetic oligonucleotide
gucacggaaagaccgacgg

SEQ ID NO: 2233538 - RNA, 19 nt, Artificial Sequence
  Description of Artificial Sequence: Synthetic oligonucleotide
ucacgaucuuccaggaggg

SEQ ID NO: 2233539 - RNA, 19 nt, Artificial Sequence
  Description of Artificial Sequence: Synthetic oligonucleotide
ucuugaggauagaagguga

SEQ ID NO: 2233540 - RNA, 19 nt, Artificial Sequence
  Description of Artificial Sequence: Synthetic oligonucleotide
ggaccuugguccuugaugg

SEQ ID NO: 2233541 - RNA, 19 nt, Artificial Sequence
  Description of Artificial Sequence: Synthetic oligonucleotide
uggugcaauaaauaaaguu

SEQ ID NO: 2233542 - RNA, 19 nt, Artificial Sequence
  Description of Artificial Sequence: Synthetic oligonucleotide
uggaccuugguccuugaug

SEQ ID NO: 2233543 - RNA, 19 nt, Artificial Sequence
  Description of Artificial Sequence: Synthetic oligonucleotide
ugugggguggcuacauagg

SEQ ID NO: 2233544 - RNA, 19 nt, Artificial Sequence
  Description of Artificial Sequence: Synthetic oligonucleotide
ggauaguuagucugggugg

SEQ ID NO: 2233545 - RNA, 19 nt, Artificial Sequence
  Description of Artificial Sequence: Synthetic oligonucleotide
aagaccgacggacgcguac

SEQ ID NO: 2233546 - RNA, 19 nt, Artificial Sequence
  Description of Artificial Sequence: Synthetic oligonucleotide
ucaaguaguaagucagggu

SEQ ID NO: 2233547 - RNA, 19 nt, Artificial Sequence
  Description of Artificial Sequence: Synthetic oligonucleotide
auuccucguucucugcugc

SEQ ID NO: 2233548 - RNA, 19 nt, Artificial Sequence
  Description of Artificial Sequence: Synthetic oligonucleotide
aagcccacacggcugucgc

SEQ ID NO: 2233549 - RNA, 19 nt, Artificial Sequence
  Description of Artificial Sequence: Synthetic oligonucleotide
ggaucaaggcucuuggagg

SEQ ID NO: 2233550 - RNA, 19 nt, Artificial Sequence
  Description of Artificial Sequence: Synthetic oligonucleotide
ucggccaggcaucuugucg

SEQ ID NO: 2233551 - RNA, 19 nt, Artificial Sequence
  Description of Artificial Sequence: Synthetic oligonucleotide
cuauaaccacguacgaagc

SEQ ID NO: 2233552 - RNA, 19 nt, Artificial Sequence
  Description of Artificial Sequence: Synthetic oligonucleotide
uccggcuuccacacuaggg

SEQ ID NO: 2233553 - RNA, 19 nt, Artificial Sequence
  Description of Artificial Sequence: Synthetic oligonucleotide
aguuagucuggguggacag

SEQ ID NO: 2233554 - RNA, 19 nt, Artificial Sequence
  Description of Artificial Sequence: Synthetic oligonucleotide
uggguuggaacaugggcag

SEQ ID NO: 2233555 - RNA, 19 nt, Artificial Sequence
  Description of Artificial Sequence: Synthetic oligonucleotide
gaaaccucggcaggcaagg

SEQ ID NO: 2233556 - RNA, 19 nt, Artificial Sequence
  Description of Artificial Sequence: Synthetic oligonucleotide
ugguaugccacaccccaag

SEQ ID NO: 2233557 - RNA, 19 nt, Artificial Sequence
  Description of Artificial Sequence: Synthetic oligonucleotide
cacacuagggauccguacc

SEQ ID NO: 2233558 - RNA, 19 nt, Artificial Sequence
  Description of Artificial Sequence: Synthetic oligonucleotide
uguggcaauggccuccucu

SEQ ID NO: 2233559 - RNA, 19 nt, Artificial Sequence
  Description of Artificial Sequence: Synthetic oligonucleotide
caauagagaaaccucggca

SEQ ID NO: 2233560 - RNA, 19 nt, Artificial Sequence
  Description of Artificial Sequence: Synthetic oligonucleotide
cacugcuucucucacauuc

SEQ ID NO: 2233561 - RNA, 19 nt, Artificial Sequence
  Description of Artificial Sequence: Synthetic oligonucleotide
gggauaguuagucugggug

SEQ ID NO: 2233562 - RNA, 19 nt, Artificial Sequence
  Description of Artificial Sequence: Synthetic oligonucleotide
gucaauagagaaaccucgg

SEQ ID NO: 2233563 - RNA, 19 nt, Artificial Sequence
  Description of Artificial Sequence: Synthetic oligonucleotide
aggugacuuccuuaguguc

SEQ ID NO: 2233564 - RNA, 19 nt, Artificial Sequence
  Description of Artificial Sequence: Synthetic oligonucleotide
ucauccaguggguuggaac

SEQ ID NO: 2233565 - RNA, 19 nt, Artificial Sequence
  Description of Artificial Sequence: Synthetic oligonucleotide
aucuugaggauagaaggug

SEQ ID NO: 2233566 - RNA, 19 nt, Artificial Sequence
  Description of Artificial Sequence: Synthetic oligonucleotide
gguaucuugaggauagaag

SEQ ID NO: 2233567 - RNA, 19 nt, Artificial Sequence
  Description of Artificial Sequence: Synthetic oligonucleotide
auagccgccaagcacugcu

SEQ ID NO: 2233568 - RNA, 19 nt, Artificial Sequence
  Description of Artificial Sequence: Synthetic oligonucleotide
cuugaggauagaaggugac

SEQ ID NO: 2233569 - RNA, 19 nt, Artificial Sequence
  Description of Artificial Sequence: Synthetic oligonucleotide
uuggaacaugggcagguga

SEQ ID NO: 2233570 - RNA, 19 nt, Artificial Sequence
  Description of Artificial Sequence: Synthetic oligonucleotide
agggucaauagagaaaccu

SEQ ID NO: 2233571 - RNA, 19 nt, Artificial Sequence
  Description of Artificial Sequence: Synthetic oligonucleotide
uaaccacguacgaagccca

SEQ ID NO: 2233572 - RNA, 19 nt, Artificial Sequence
  Description of Artificial Sequence: Synthetic oligonucleotide
accaacauggugcaauaaa

SEQ ID NO: 2233573 - RNA, 19 nt, Artificial Sequence
  Description of Artificial Sequence: Synthetic oligonucleotide
ugucgcuguaggcaaaguc

SEQ ID NO: 2233574 - RNA, 19 nt, Artificial Sequence
  Description of Artificial Sequence: Synthetic oligonucleotide
cugugggguggcuacauag

SEQ ID NO: 2233575 - RNA, 19 nt, Artificial Sequence
  Description of Artificial Sequence: Synthetic oligonucleotide
agggucaccacucggccag

SEQ ID NO: 2233576 - RNA, 19 nt, Artificial Sequence
  Description of Artificial Sequence: Synthetic oligonucleotide
gacgcguacaccuggccug

SEQ ID NO: 2233577 - RNA, 19 nt, Artificial Sequence
  Description of Artificial Sequence: Synthetic oligonucleotide
uggaacaugggcaggugau

SEQ ID NO: 2233578 - RNA, 19 nt, Artificial Sequence
  Description of Artificial Sequence: Synthetic oligonucleotide
guggacagaggaucaaggc

SEQ ID NO: 2233579 - RNA, 19 nt, Artificial Sequence
  Description of Artificial Sequence: Synthetic oligonucleotide
uaguaagucagggucaaua

SEQ ID NO: 2233580 - RNA, 19 nt, Artificial Sequence
  Description of Artificial Sequence: Synthetic oligonucleotide
cacggaaagaccgacggac

SEQ ID NO: 2233581 - RNA, 19 nt, Artificial Sequence
  Description of Artificial Sequence: Synthetic oligonucleotide
ucuggucaggcaccagaag

SEQ ID NO: 2233582 - RNA, 19 nt, Artificial Sequence
  Description of Artificial Sequence: Synthetic oligonucleotide
ugggguggcuacauaggcc

SEQ ID NO: 2233583 - RNA, 19 nt, Artificial Sequence
  Description of Artificial Sequence: Synthetic oligonucleotide
ugggauuagcagcagcaau

SEQ ID NO: 2233584 - RNA, 19 nt, Artificial Sequence
  Description of Artificial Sequence: Synthetic oligonucleotide
acuagggcagagccaccgc

SEQ ID NO: 2233585 - RNA, 19 nt, Artificial Sequence
  Description of Artificial Sequence: Synthetic oligonucleotide
ucucucacauucagguacu

SEQ ID NO: 2233586 - RNA, 19 nt, Artificial Sequence
  Description of Artificial Sequence: Synthetic oligonucleotide
agggguaucuugaggauag

SEQ ID NO: 2233587 - RNA, 19 nt, Artificial Sequence
  Description of Artificial Sequence: Synthetic oligonucleotide
auagaaggugacuuccuua

SEQ ID NO: 2233588 - RNA, 19 nt, Artificial Sequence
  Description of Artificial Sequence: Synthetic oligonucleotide
uaccauuccucguucucug

SEQ ID NO: 2233589 - RNA, 19 nt, Artificial Sequence
  Description of Artificial Sequence: Synthetic oligonucleotide
gcggcuauaaccacguacg

SEQ ID NO: 2233590 - RNA, 19 nt, Artificial Sequence
  Description of Artificial Sequence: Synthetic oligonucleotide
uagggauccguacccaaaa

SEQ ID NO: 2233591 - RNA, 19 nt, Artificial Sequence
  Description of Artificial Sequence: Synthetic oligonucleotide
acgaucuuccaggaggguc

SEQ ID NO: 2233592 - RNA, 19 nt, Artificial Sequence
  Description of Artificial Sequence: Synthetic oligonucleotide
aggagggucaccacucggc

SEQ ID NO: 2233593 - RNA, 19 nt, Artificial Sequence
  Description of Artificial Sequence: Synthetic oligonucleotide
gacggacgcguacaccugg

SEQ ID NO: 2233594 - RNA, 19 nt, Artificial Sequence
  Description of Artificial Sequence: Synthetic oligonucleotide
aaguccggcuuccacacua

SEQ ID NO: 2233595 - RNA, 19 nt, Artificial Sequence
  Description of Artificial Sequence: Synthetic oligonucleotide
acaugggcaggugauaugu

SEQ ID NO: 2233596 - RNA, 19 nt, Artificial Sequence
  Description of Artificial Sequence: Synthetic oligonucleotide
ggauuagcagcagcaaugg

SEQ ID NO: 2233597 - RNA, 19 nt, Artificial Sequence
  Description of Artificial Sequence: Synthetic oligonucleotide
ucaccugcuccccucguac

SEQ ID NO: 2233598 - RNA, 19 nt, Artificial Sequence
  Description of Artificial Sequence: Synthetic oligonucleotide
guaagucagggucaauaga

SEQ ID NO: 2233599 - RNA, 19 nt, Artificial Sequence
  Description of Artificial Sequence: Synthetic oligonucleotide
uggugccuggcacagggac

SEQ ID NO: 2233600 - RNA, 19 nt, Artificial Sequence
  Description of Artificial Sequence: Synthetic oligonucleotide
gauaguuagucugggugga

SEQ ID NO: 2233601 - RNA, 19 nt, Artificial Sequence
  Description of Artificial Sequence: Synthetic oligonucleotide
ggcaccagaagacuagggc

SEQ ID NO: 2233602 - RNA, 19 nt, Artificial Sequence
  Description of Artificial Sequence: Synthetic oligonucleotide
aggcaaggaucuguguggc

SEQ ID NO: 2233603 - RNA, 19 nt, Artificial Sequence
  Description of Artificial Sequence: Synthetic oligonucleotide
ugauauguccagggcuggg

SEQ ID NO: 2233604 - RNA, 19 nt, Artificial Sequence
  Description of Artificial Sequence: Synthetic oligonucleotide
gggacagugagggaggcgg

SEQ ID NO: 2233605 - RNA, 19 nt, Artificial Sequence
  Description of Artificial Sequence: Synthetic oligonucleotide
ucuggagcagggcccaggu

SEQ ID NO: 2233606 - RNA, 19 nt, Artificial Sequence
  Description of Artificial Sequence: Synthetic oligonucleotide
uaguuagucuggguggaca

SEQ ID NO: 2233607 - RNA, 19 nt, Artificial Sequence
  Description of Artificial Sequence: Synthetic oligonucleotide
gaaccggcggcuauaacca

SEQ ID NO: 2233608 - RNA, 19 nt, Artificial Sequence
  Description of Artificial Sequence: Synthetic oligonucleotide
ggugauauguccagggcug

SEQ ID NO: 2233609 - RNA, 19 nt, Artificial Sequence
  Description of Artificial Sequence: Synthetic oligonucleotide
augggcuggcuaccauucc

SEQ ID NO: 2233610 - RNA, 19 nt, Artificial Sequence
  Description of Artificial Sequence: Synthetic oligonucleotide
aaccggcggcuauaaccac

SEQ ID NO: 2233611 - RNA, 19 nt, Artificial Sequence
  Description of Artificial Sequence: Synthetic oligonucleotide
cucccaggaaggcugcgcg

SEQ ID NO: 2233612 - RNA, 19 nt, Artificial Sequence
  Description of Artificial Sequence: Synthetic oligonucleotide
uugaggauagaaggugacu

SEQ ID NO: 2233613 - RNA, 19 nt, Artificial Sequence
  Description of Artificial Sequence: Synthetic oligonucleotide
cuuagugucauagccgcca

SEQ ID NO: 2233614 - RNA, 19 nt, Artificial Sequence
  Description of Artificial Sequence: Synthetic oligonucleotide
uggucagggguaucuugag

SEQ ID NO: 2233615 - RNA, 19 nt, Artificial Sequence
  Description of Artificial Sequence: Synthetic oligonucleotide
cauuccucguucucugcug

SEQ ID NO: 2233616 - RNA, 19 nt, Artificial Sequence
  Description of Artificial Sequence: Synthetic oligonucleotide
uuagugucauagccgccaa

SEQ ID NO: 2233617 - RNA, 19 nt, Artificial Sequence
  Description of Artificial Sequence: Synthetic oligonucleotide
gggauuagcagcagcaaug

SEQ ID NO: 2233618 - RNA, 19 nt, Artificial Sequence
  Description of Artificial Sequence: Synthetic oligonucleotide
ugucgcugccccuauggaa

SEQ ID NO: 2233619 - RNA, 19 nt, Artificial Sequence
  Description of Artificial Sequence: Synthetic oligonucleotide
aaggcucuuggaggcuccc

SEQ ID NO: 2233620 - RNA, 19 nt, Artificial Sequence
  Description of Artificial Sequence: Synthetic oligonucleotide
acauggugcaauaaauaaa

SEQ ID NO: 2233621 - RNA, 19 nt, Artificial Sequence
  Description of Artificial Sequence: Synthetic oligonucleotide
ggugcaauaaauaaaguuu

SEQ ID NO: 2233622 - RNA, 19 nt, Artificial Sequence
  Description of Artificial Sequence: Synthetic oligonucleotide
auaguuagucuggguggac

SEQ ID NO: 2233623 - RNA, 19 nt, Artificial Sequence
  Description of Artificial Sequence: Synthetic oligonucleotide
gaagcccacacggcugucg

SEQ ID NO: 2233624 - RNA, 19 nt, Artificial Sequence
  Description of Artificial Sequence: Synthetic oligonucleotide
auaggccagggcugugagg

SEQ ID NO: 2233625 - RNA, 19 nt, Artificial Sequence
  Description of Artificial Sequence: Synthetic oligonucleotide
guggcuacauaggccaggg

SEQ ID NO: 2233626 - RNA, 19 nt, Artificial Sequence
  Description of Artificial Sequence: Synthetic oligonucleotide
uccggcacggucacggaaa

SEQ ID NO: 2233627 - RNA, 19 nt, Artificial Sequence
  Description of Artificial Sequence: Synthetic oligonucleotide
auauguccagggcugggau

SEQ ID NO: 2233628 - RNA, 19 nt, Artificial Sequence
  Description of Artificial Sequence: Synthetic oligonucleotide
uagugucauagccgccaag

SEQ ID NO: 2233629 - RNA, 19 nt, Artificial Sequence
  Description of Artificial Sequence: Synthetic oligonucleotide
gcccucacgaucuuccagg

SEQ ID NO: 2233630 - RNA, 19 nt, Artificial Sequence
  Description of Artificial Sequence: Synthetic oligonucleotide
caggguuucuguggggugg

SEQ ID NO: 2233631 - RNA, 19 nt, Artificial Sequence
  Description of Artificial Sequence: Synthetic oligonucleotide
gaccuugguccuugauggg

SEQ ID NO: 2233632 - RNA, 19 nt, Artificial Sequence
  Description of Artificial Sequence: Synthetic oligonucleotide
gauauguccagggcuggga

SEQ ID NO: 2233633 - RNA, 19 nt, Artificial Sequence
  Description of Artificial Sequence: Synthetic oligonucleotide
caacauggugcaauaaaua

SEQ ID NO: 2233634 - RNA, 19 nt, Artificial Sequence
  Description of Artificial Sequence: Synthetic oligonucleotide
cucccgagagguguggagg

SEQ ID NO: 2233635 - RNA, 19 nt, Artificial Sequence
  Description of Artificial Sequence: Synthetic oligonucleotide
ugggauaguuagucugggu

SEQ ID NO: 2233636 - RNA, 19 nt, Artificial Sequence
  Description of Artificial Sequence: Synthetic oligonucleotide
uaggcaaaguccggcuucc

SEQ ID NO: 2233637 - RNA, 19 nt, Artificial Sequence
  Description of Artificial Sequence: Synthetic oligonucleotide
aguaguaagucagggucaa

SEQ ID NO: 2233638 - RNA, 19 nt, Artificial Sequence
  Description of Artificial Sequence: Synthetic oligonucleotide
cucguaccugguaugccac

SEQ ID NO: 2233639 - RNA, 19 nt, Artificial Sequence
  Description of Artificial Sequence: Synthetic oligonucleotide
cugggauaguuagucuggg

SEQ ID NO: 2233640 - RNA, 19 nt, Artificial Sequence
  Description of Artificial Sequence: Synthetic oligonucleotide
caagcacugcuucucucac

SEQ ID NO: 2233641 - RNA, 19 nt, Artificial Sequence
  Description of Artificial Sequence: Synthetic oligonucleotide
cugggcagcggacuccugc

SEQ ID NO: 2233642 - RNA, 19 nt, Artificial Sequence
  Description of Artificial Sequence: Synthetic oligonucleotide
cacucggccaggcaucuug

SEQ ID NO: 2233643 - RNA, 19 nt, Artificial Sequence
  Description of Artificial Sequence: Synthetic oligonucleotide
ucccaggaaggcugcgcgg

SEQ ID NO: 2233644 - RNA, 19 nt, Artificial Sequence
  Description of Artificial Sequence: Synthetic oligonucleotide
acggaaagaccgacggacg

SEQ ID NO: 2233645 - RNA, 19 nt, Artificial Sequence
  Description of Artificial Sequence: Synthetic oligonucleotide
gagagaugcuggaccuugg

SEQ ID NO: 2233646 - RNA, 19 nt, Artificial Sequence
  Description of Artificial Sequence: Synthetic oligonucleotide
uugucgcugccccuaugga

SEQ ID NO: 2233647 - RNA, 19 nt, Artificial Sequence
  Description of Artificial Sequence: Synthetic oligonucleotide
agcccucacgaucuuccag

SEQ ID NO: 2233648 - RNA, 19 nt, Artificial Sequence
  Description of Artificial Sequence: Synthetic oligonucleotide
ggcggcuauaaccacguac

SEQ ID NO: 2233649 - RNA, 19 nt, Artificial Sequence
  Description of Artificial Sequence: Synthetic oligonucleotide
caauggccuccucuggagc

SEQ ID NO: 2233650 - RNA, 19 nt, Artificial Sequence
  Description of Artificial Sequence: Synthetic oligonucleotide
acggcugucgcuguaggca

SEQ ID NO: 2233651 - RNA, 19 nt, Artificial Sequence
  Description of Artificial Sequence: Synthetic oligonucleotide
ggucagggguaucuugagg

SEQ ID NO: 2233652 - RNA, 19 nt, Artificial Sequence
  Description of Artificial Sequence: Synthetic oligonucleotide
gcugggauaguuagucugg

SEQ ID NO: 2233653 - RNA, 19 nt, Artificial Sequence
  Description of Artificial Sequence: Synthetic oligonucleotide
agaaaccucggcaggcaag

SEQ ID NO: 2233654 - RNA, 19 nt, Artificial Sequence
  Description of Artificial Sequence: Synthetic oligonucleotide
ggcaucuugucgcugcccc

SEQ ID NO: 2233655 - RNA, 19 nt, Artificial Sequence
  Description of Artificial Sequence: Synthetic oligonucleotide
ggaaagaccgacggacgcg

SEQ ID NO: 2233656 - RNA, 19 nt, Artificial Sequence
  Description of Artificial Sequence: Synthetic oligonucleotide
agccgccaagcacugcuuc

SEQ ID NO: 2233657 - RNA, 19 nt, Artificial Sequence
  Description of Artificial Sequence: Synthetic oligonucleotide
ucgcugccccuauggaagg

SEQ ID NO: 2233658 - RNA, 19 nt, Artificial Sequence
  Description of Artificial Sequence: Synthetic oligonucleotide
uuccacacuagggauccgu

SEQ ID NO: 2233659 - RNA, 19 nt, Artificial Sequence
  Description of Artificial Sequence: Synthetic oligonucleotide
caguggguuggaacauggg

SEQ ID NO: 2233660 - RNA, 19 nt, Artificial Sequence
  Description of Artificial Sequence: Synthetic oligonucleotide
gcccaccacaccaacaugg

SEQ ID NO: 2233661 - RNA, 19 nt, Artificial Sequence
  Description of Artificial Sequence: Synthetic oligonucleotide
ugaugggcuggcuaccauu

SEQ ID NO: 2233662 - RNA, 19 nt, Artificial Sequence
  Description of Artificial Sequence: Synthetic oligonucleotide
aaaguccggcuuccacacu

SEQ ID NO: 2233663 - RNA, 19 nt, Artificial Sequence
  Description of Artificial Sequence: Synthetic oligonucleotide
gggguggcuacauaggcca

SEQ ID NO: 2233664 - RNA, 19 nt, Artificial Sequence
  Description of Artificial Sequence: Synthetic oligonucleotide
acuagggauccguacccaa

SEQ ID NO: 2233665 - RNA, 19 nt, Artificial Sequence
  Description of Artificial Sequence: Synthetic oligonucleotide
ucggcaggcaaggaucugu

SEQ ID NO: 2233666 - RNA, 19 nt, Artificial Sequence
  Description of Artificial Sequence: Synthetic oligonucleotide
ucucacauucagguacuuc

SEQ ID NO: 2233667 - RNA, 19 nt, Artificial Sequence
  Description of Artificial Sequence: Synthetic oligonucleotide
uccucguucucugcugccc

SEQ ID NO: 2233668 - RNA, 19 nt, Artificial Sequence
  Description of Artificial Sequence: Synthetic oligonucleotide
aaccacguacgaagcccac

SEQ ID NO: 2233669 - RNA, 19 nt, Artificial Sequence
  Description of Artificial Sequence: Synthetic oligonucleotide
uccacacuagggauccgua

SEQ ID NO: 2233670 - RNA, 19 nt, Artificial Sequence
  Description of Artificial Sequence: Synthetic oligonucleotide
guaccugguaugccacacc

SEQ ID NO: 2233671 - RNA, 19 nt, Artificial Sequence
  Description of Artificial Sequence: Synthetic oligonucleotide
gcaaaguccggcuuccaca

SEQ ID NO: 2233672 - RNA, 19 nt, Artificial Sequence
  Description of Artificial Sequence: Synthetic oligonucleotide
ggcuacauaggccagggcu

SEQ ID NO: 2233673 - RNA, 19 nt, Artificial Sequence
  Description of Artificial Sequence: Synthetic oligonucleotide
cacguacgaagcccacacg

SEQ ID NO: 2233674 - RNA, 19 nt, Artificial Sequence
  Description of Artificial Sequence: Synthetic oligonucleotide
gaugcuggaccuugguccu

SEQ ID NO: 2233675 - RNA, 19 nt, Artificial Sequence
  Description of Artificial Sequence: Synthetic oligonucleotide
uccggggcuggucuccggc

SEQ ID NO: 2233676 - RNA, 19 nt, Artificial Sequence
  Description of Artificial Sequence: Synthetic oligonucleotide
ccaguggguuggaacaugg

SEQ ID NO: 2233677 - RNA, 19 nt, Artificial Sequence
  Description of Artificial Sequence: Synthetic oligonucleotide
accugguaugccacacccc

SEQ ID NO: 2233678 - RNA, 19 nt, Artificial Sequence
  Description of Artificial Sequence: Synthetic oligonucleotide
ugcccaccacaccaacaug

SEQ ID NO: 2233679 - RNA, 19 nt, Artificial Sequence
  Description of Artificial Sequence: Synthetic oligonucleotide
caggagggucaccacucgg

SEQ ID NO: 2233680 - RNA, 19 nt, Artificial Sequence
  Description of Artificial Sequence: Synthetic oligonucleotide
ugggcagcggacuccugcu

SEQ ID NO: 2233681 - RNA, 19 nt, Artificial Sequence
  Description of Artificial Sequence: Synthetic oligonucleotide
gaggaucaaggcucuugga

SEQ ID NO: 2233682 - RNA, 19 nt, Artificial Sequence
  Description of Artificial Sequence: Synthetic oligonucleotide
ucaaggcucuuggaggcuc

SEQ ID NO: 2233683 - RNA, 19 nt, Artificial Sequence
  Description of Artificial Sequence: Synthetic oligonucleotide
uccaguggguuggaacaug

SEQ ID NO: 2233684 - RNA, 19 nt, Artificial Sequence
  Description of Artificial Sequence: Synthetic oligonucleotide
cuguguggcaauggccucc

SEQ ID NO: 2233685 - RNA, 19 nt, Artificial Sequence
  Description of Artificial Sequence: Synthetic oligonucleotide
uuccucguucucugcugcc

SEQ ID NO: 2233686 - RNA, 19 nt, Artificial Sequence
  Description of Artificial Sequence: Synthetic oligonucleotide
ucuugucgcugccccuaug

SEQ ID NO: 2233687 - RNA, 19 nt, Artificial Sequence
  Description of Artificial Sequence: Synthetic oligonucleotide
gcuuccacacuagggaucc

SEQ ID NO: 2233688 - RNA, 19 nt, Artificial Sequence
  Description of Artificial Sequence: Synthetic oligonucleotide
gcaauggccuccucuggag

SEQ ID NO: 2233689 - RNA, 19 nt, Artificial Sequence
  Description of Artificial Sequence: Synthetic oligonucleotide
uccccucguaccugguaug

SEQ ID NO: 2233690 - RNA, 19 nt, Artificial Sequence
  Description of Artificial Sequence: Synthetic oligonucleotide
ccagggcugggauaguuag

SEQ ID NO: 2233691 - RNA, 19 nt, Artificial Sequence
  Description of Artificial Sequence: Synthetic oligonucleotide
accgacggacgcguacacc

SEQ ID NO: 2233692 - RNA, 19 nt, Artificial Sequence
  Description of Artificial Sequence: Synthetic oligonucleotide
gugucauagccgccaagca

SEQ ID NO: 2233693 - RNA, 19 nt, Artificial Sequence
  Description of Artificial Sequence: Synthetic oligonucleotide
auggugcaauaaauaaagu

SEQ ID NO: 2233694 - RNA, 19 nt, Artificial Sequence
  Description of Artificial Sequence: Synthetic oligonucleotide
ggcuggcuaccauuccucg

SEQ ID NO: 2233695 - RNA, 19 nt, Artificial Sequence
  Description of Artificial Sequence: Synthetic oligonucleotide
ucguaccugguaugccaca

SEQ ID NO: 2233696 - RNA, 19 nt, Artificial Sequence
  Description of Artificial Sequence: Synthetic oligonucleotide
uggcuaccauuccucguuc

SEQ ID NO: 2233697 - RNA, 19 nt, Artificial Sequence
  Description of Artificial Sequence: Synthetic oligonucleotide
accggcggcuauaaccacg

SEQ ID NO: 2233698 - RNA, 19 nt, Artificial Sequence
  Description of Artificial Sequence: Synthetic oligonucleotide
uggguggugugggauuagc

SEQ ID NO: 2233699 - RNA, 19 nt, Artificial Sequence
  Description of Artificial Sequence: Synthetic oligonucleotide
gggucaauagagaaaccuc

SEQ ID NO: 2233700 - RNA, 19 nt, Artificial Sequence
  Description of Artificial Sequence: Synthetic oligonucleotide
cugcuccccucguaccugg

SEQ ID NO: 2233701 - RNA, 19 nt, Artificial Sequence
  Description of Artificial Sequence: Synthetic oligonucleotide
ggggucgccauccucccag

SEQ ID NO: 2233702 - RNA, 19 nt, Artificial Sequence
  Description of Artificial Sequence: Synthetic oligonucleotide
acguccagggcaggucccc

SEQ ID NO: 2233703 - RNA, 19 nt, Artificial Sequence
  Description of Artificial Sequence: Synthetic oligonucleotide
uugaugggcuggcuaccau

SEQ ID NO: 2233704 - RNA, 19 nt, Artificial Sequence
  Description of Artificial Sequence: Synthetic oligonucleotide
cuagggcagagccaccgca

SEQ ID NO: 2233705 - RNA, 19 nt, Artificial Sequence
  Description of Artificial Sequence: Synthetic oligonucleotide
cacggcugucgcuguaggc

SEQ ID NO: 2233706 - RNA, 19 nt, Artificial Sequence
  Description of Artificial Sequence: Synthetic oligonucleotide
agggcagagccaccgcaca

SEQ ID NO: 2233707 - RNA, 19 nt, Artificial Sequence
  Description of Artificial Sequence: Synthetic oligonucleotide
guuggaacaugggcaggug

SEQ ID NO: 2233708 - RNA, 19 nt, Artificial Sequence
  Description of Artificial Sequence: Synthetic oligonucleotide
uggcuacauaggccagggc

SEQ ID NO: 2233709 - RNA, 19 nt, Artificial Sequence
  Description of Artificial Sequence: Synthetic oligonucleotide
gguggcuacauaggccagg

SEQ ID NO: 2233710 - RNA, 19 nt, Artificial Sequence
  Description of Artificial Sequence: Synthetic oligonucleotide
cuggguggacagaggauca

SEQ ID NO: 2233711 - RNA, 19 nt, Artificial Sequence
  Description of Artificial Sequence: Synthetic oligonucleotide
cuagggauccguacccaaa

SEQ ID NO: 2233712 - RNA, 19 nt, Artificial Sequence
  Description of Artificial Sequence: Synthetic oligonucleotide
gaaagaccgacggacgcgu

SEQ ID NO: 2233713 - RNA, 19 nt, Artificial Sequence
  Description of Artificial Sequence: Synthetic oligonucleotide
gauucuggucaggcaccag

SEQ ID NO: 2233714 - RNA, 19 nt, Artificial Sequence
  Description of Artificial Sequence: Synthetic oligonucleotide
agaccgacggacgcguaca

SEQ ID NO: 2233715 - RNA, 19 nt, Artificial Sequence
  Description of Artificial Sequence: Synthetic oligonucleotide
guccggcuuccacacuagg

SEQ ID NO: 2233716 - RNA, 19 nt, Artificial Sequence
  Description of Artificial Sequence: Synthetic oligonucleotide
gcagggcccacguccaggg

SEQ ID NO: 2233717 - RNA, 19 nt, Artificial Sequence
  Description of Artificial Sequence: Synthetic oligonucleotide
acggacgcguacaccuggc

SEQ ID NO: 2233718 - RNA, 19 nt, Artificial Sequence
  Description of Artificial Sequence: Synthetic oligonucleotide
gaggcggggugcucugggc

SEQ ID NO: 2233719 - RNA, 19 nt, Artificial Sequence
  Description of Artificial Sequence: Synthetic oligonucleotide
ccacguacgaagcccacac

SEQ ID NO: 2233720 - RNA, 19 nt, Artificial Sequence
  Description of Artificial Sequence: Synthetic oligonucleotide
gaacaugggcaggugauau

SEQ ID NO: 2233721 - RNA, 19 nt, Artificial Sequence
  Description of Artificial Sequence: Synthetic oligonucleotide
gucucccugccagaaccgg

SEQ ID NO: 2233722 - RNA, 19 nt, Artificial Sequence
  Description of Artificial Sequence: Synthetic oligonucleotide
ugccccucauccagugggu

SEQ ID NO: 2233723 - RNA, 19 nt, Artificial Sequence
  Description of Artificial Sequence: Synthetic oligonucleotide
ggucacggaaagaccgacg

SEQ ID NO: 2233724 - RNA, 19 nt, Artificial Sequence
  Description of Artificial Sequence: Synthetic oligonucleotide
caccugcuccccucguacc

SEQ ID NO: 2233725 - RNA, 19 nt, Artificial Sequence
  Description of Artificial Sequence: Synthetic oligonucleotide
agcggacuccugcuucaug

SEQ ID NO: 2233726 - RNA, 19 nt, Artificial Sequence
  Description of Artificial Sequence: Synthetic oligonucleotide
ugccccuauggaagguguc

SEQ ID NO: 2233727 - RNA, 19 nt, Artificial Sequence
  Description of Artificial Sequence: Synthetic oligonucleotide
aagagagaugcuggaccuu

SEQ ID NO: 2233728 - RNA, 19 nt, Artificial Sequence
  Description of Artificial Sequence: Synthetic oligonucleotide
ccugguaugccacacccca

SEQ ID NO: 2233729 - RNA, 19 nt, Artificial Sequence
  Description of Artificial Sequence: Synthetic oligonucleotide
ggccucguucaccugcucc

SEQ ID NO: 2233730 - RNA, 19 nt, Artificial Sequence
  Description of Artificial Sequence: Synthetic oligonucleotide
caccacucggccaggcauc

SEQ ID NO: 2233731 - RNA, 19 nt, Artificial Sequence
  Description of Artificial Sequence: Synthetic oligonucleotide
gagccaccgcacagcaggg

SEQ ID NO: 2233732 - RNA, 19 nt, Artificial Sequence
  Description of Artificial Sequence: Synthetic oligonucleotide
acgcguacaccuggccugg

SEQ ID NO: 2233733 - RNA, 19 nt, Artificial Sequence
  Description of Artificial Sequence: Synthetic oligonucleotide
aaaccucggcaggcaagga

SEQ ID NO: 2233734 - RNA, 19 nt, Artificial Sequence
  Description of Artificial Sequence: Synthetic oligonucleotide
agacuagggcagagccacc

SEQ ID NO: 2233735 - RNA, 19 nt, Artificial Sequence
  Description of Artificial Sequence: Synthetic oligonucleotide
gcaaggaucuguguggcaa

SEQ ID NO: 2233736 - RNA, 19 nt, Artificial Sequence
  Description of Artificial Sequence: Synthetic oligonucleotide
augccacaccccaagugca

SEQ ID NO: 2233737 - RNA, 19 nt, Artificial Sequence
  Description of Artificial Sequence: Synthetic oligonucleotide
accagaagacuagggcaga

SEQ ID NO: 2233738 - RNA, 19 nt, Artificial Sequence
  Description of Artificial Sequence: Synthetic oligonucleotide
ugccagaaccggcggcuau

SEQ ID NO: 2233739 - RNA, 19 nt, Artificial Sequence
  Description of Artificial Sequence: Synthetic oligonucleotide
gaccgacggacgcguacac

SEQ ID NO: 2233740 - RNA, 19 nt, Artificial Sequence
  Description of Artificial Sequence: Synthetic oligonucleotide
gcucuuggaggcucccgag

SEQ ID NO: 2233741 - RNA, 19 nt, Artificial Sequence
  Description of Artificial Sequence: Synthetic oligonucleotide
cguacgaagcccacacggc

SEQ ID NO: 2233742 - RNA, 19 nt, Artificial Sequence
  Description of Artificial Sequence: Synthetic oligonucleotide
cuugaugggcuggcuacca

SEQ ID NO: 2233743 - RNA, 19 nt, Artificial Sequence
  Description of Artificial Sequence: Synthetic oligonucleotide
accacguacgaagcccaca

SEQ ID NO: 2233744 - RNA, 19 nt, Artificial Sequence
  Description of Artificial Sequence: Synthetic oligonucleotide
uacauaggccagggcugug

SEQ ID NO: 2233745 - RNA, 19 nt, Artificial Sequence
  Description of Artificial Sequence: Synthetic oligonucleotide
cuggccuggcaccgaucgg

SEQ ID NO: 2233746 - RNA, 19 nt, Artificial Sequence
  Description of Artificial Sequence: Synthetic oligonucleotide
ggguggacagaggaucaag

SEQ ID NO: 2233747 - RNA, 19 nt, Artificial Sequence
  Description of Artificial Sequence: Synthetic oligonucleotide
ccaagcacugcuucucuca

SEQ ID NO: 2233748 - RNA, 19 nt, Artificial Sequence
  Description of Artificial Sequence: Synthetic oligonucleotide
ggcggugcaggggacagug

SEQ ID NO: 2233749 - RNA, 19 nt, Artificial Sequence
  Description of Artificial Sequence: Synthetic oligonucleotide
ccacacuagggauccguac

SEQ ID NO: 2233750 - RNA, 19 nt, Artificial Sequence
  Description of Artificial Sequence: Synthetic oligonucleotide
aguccggcuuccacacuag

SEQ ID NO: 2233751 - RNA, 19 nt, Artificial Sequence
  Description of Artificial Sequence: Synthetic oligonucleotide
gaggcucccgagaggugug

SEQ ID NO: 2233752 - RNA, 19 nt, Artificial Sequence
  Description of Artificial Sequence: Synthetic oligonucleotide
aucuugucgcugccccuau

SEQ ID NO: 2233753 - RNA, 19 nt, Artificial Sequence
  Description of Artificial Sequence: Synthetic oligonucleotide
ccacguccagggcaggucc

SEQ ID NO: 2233754 - RNA, 19 nt, Artificial Sequence
  Description of Artificial Sequence: Synthetic oligonucleotide
gagggguuggucaggggua

SEQ ID NO: 2233755 - RNA, 19 nt, Artificial Sequence
  Description of Artificial Sequence: Synthetic oligonucleotide
ggcucuuggaggcucccga

SEQ ID NO: 2233756 - RNA, 19 nt, Artificial Sequence
  Description of Artificial Sequence: Synthetic oligonucleotide
ccuuagugucauagccgcc

SEQ ID NO: 2233757 - RNA, 19 nt, Artificial Sequence
  Description of Artificial Sequence: Synthetic oligonucleotide
gcucccgagagguguggag

SEQ ID NO: 2233758 - RNA, 19 nt, Artificial Sequence
  Description of Artificial Sequence: Synthetic oligonucleotide
ccaacauggugcaauaaau

SEQ ID NO: 2233759 - RNA, 19 nt, Artificial Sequence
  Description of Artificial Sequence: Synthetic oligonucleotide
ggcuauaaccacguacgaa

SEQ ID NO: 2233760 - RNA, 19 nt, Artificial Sequence
  Description of Artificial Sequence: Synthetic oligonucleotide
cggccaggcaucuugucgc

SEQ ID NO: 2233761 - RNA, 19 nt, Artificial Sequence
  Description of Artificial Sequence: Synthetic oligonucleotide
ggcggggugcucugggcag

SEQ ID NO: 2233762 - RNA, 19 nt, Artificial Sequence
  Description of Artificial Sequence: Synthetic oligonucleotide
gucaccacucggccaggca

SEQ ID NO: 2233763 - RNA, 19 nt, Artificial Sequence
  Description of Artificial Sequence: Synthetic oligonucleotide
ccucguaccugguaugcca

SEQ ID NO: 2233764 - RNA, 19 nt, Artificial Sequence
  Description of Artificial Sequence: Synthetic oligonucleotide
cacaccaacauggugcaau

SEQ ID NO: 2233765 - RNA, 19 nt, Artificial Sequence
  Description of Artificial Sequence: Synthetic oligonucleotide
cggaaagaccgacggacgc

SEQ ID NO: 2233766 - RNA, 19 nt, Artificial Sequence
  Description of Artificial Sequence: Synthetic oligonucleotide
auccaguggguuggaacau

SEQ ID NO: 2233767 - RNA, 19 nt, Artificial Sequence
  Description of Artificial Sequence: Synthetic oligonucleotide
cuguaggcaaaguccggcu

SEQ ID NO: 2233768 - RNA, 19 nt, Artificial Sequence
  Description of Artificial Sequence: Synthetic oligonucleotide
gugggauuagcagcagcaa

SEQ ID NO: 2233769 - RNA, 19 nt, Artificial Sequence
  Description of Artificial Sequence: Synthetic oligonucleotide
cgaucuuccaggaggguca

SEQ ID NO: 2233770 - RNA, 19 nt, Artificial Sequence
  Description of Artificial Sequence: Synthetic oligonucleotide
gucaggcaccagaagacua

SEQ ID NO: 2233771 - RNA, 19 nt, Artificial Sequence
  Description of Artificial Sequence: Synthetic oligonucleotide
ggcagcggacuccugcuuc

SEQ ID NO: 2233772 - RNA, 19 nt, Artificial Sequence
  Description of Artificial Sequence: Synthetic oligonucleotide
gcugucgcuguaggcaaag

SEQ ID NO: 2233773 - RNA, 19 nt, Artificial Sequence
  Description of Artificial Sequence: Synthetic oligonucleotide
cauagccgccaagcacugc

SEQ ID NO: 2233774 - RNA, 19 nt, Artificial Sequence
  Description of Artificial Sequence: Synthetic oligonucleotide
cuggcuaccauuccucguu

SEQ ID NO: 2233775 - RNA, 19 nt, Artificial Sequence
  Description of Artificial Sequence: Synthetic oligonucleotide
accacucggccaggcaucu

SEQ ID NO: 2233776 - RNA, 19 nt, Artificial Sequence
  Description of Artificial Sequence: Synthetic oligonucleotide
ggugucucccugccagaac

SEQ ID NO: 2233777 - RNA, 19 nt, Artificial Sequence
  Description of Artificial Sequence: Synthetic oligonucleotide
cucggccaggcaucuuguc

SEQ ID NO: 2233778 - RNA, 19 nt, Artificial Sequence
  Description of Artificial Sequence: Synthetic oligonucleotide
ccaggagggucaccacucg

SEQ ID NO: 2233779 - RNA, 19 nt, Artificial Sequence
  Description of Artificial Sequence: Synthetic oligonucleotide
uagccgccaagcacugcuu

SEQ ID NO: 2233780 - RNA, 19 nt, Artificial Sequence
  Description of Artificial Sequence: Synthetic oligonucleotide
ggguaucuugaggauagaa

SEQ ID NO: 2233781 - RNA, 19 nt, Artificial Sequence
  Description of Artificial Sequence: Synthetic oligonucleotide
ucguucucugcugccccuc

SEQ ID NO: 2233782 - RNA, 19 nt, Artificial Sequence
  Description of Artificial Sequence: Synthetic oligonucleotide
agggguuggucagggguau

SEQ ID NO: 2233783 - RNA, 19 nt, Artificial Sequence
  Description of Artificial Sequence: Synthetic oligonucleotide
cagaaccggcggcuauaac

SEQ ID NO: 2233784 - RNA, 19 nt, Artificial Sequence
  Description of Artificial Sequence: Synthetic oligonucleotide
cguacaccuggccuggcac

SEQ ID NO: 2233785 - RNA, 19 nt, Artificial Sequence
  Description of Artificial Sequence: Synthetic oligonucleotide
cugcgcgggcggugcaggg

SEQ ID NO: 2233786 - RNA, 19 nt, Artificial Sequence
  Description of Artificial Sequence: Synthetic oligonucleotide
ggguuggaacaugggcagg

SEQ ID NO: 2233787 - RNA, 19 nt, Artificial Sequence
  Description of Artificial Sequence: Synthetic oligonucleotide
accccaagugcagcccuca

SEQ ID NO: 2233788 - RNA, 19 nt, Artificial Sequence
  Description of Artificial Sequence: Synthetic oligonucleotide
cugguaugccacaccccaa

SEQ ID NO: 2233789 - RNA, 19 nt, Artificial Sequence
  Description of Artificial Sequence: Synthetic oligonucleotide
ugcuccccucguaccuggu

SEQ ID NO: 2233790 - RNA, 19 nt, Artificial Sequence
  Description of Artificial Sequence: Synthetic oligonucleotide
ccagaagacuagggcagag

SEQ ID NO: 2233791 - RNA, 19 nt, Artificial Sequence
  Description of Artificial Sequence: Synthetic oligonucleotide
ggugugggauuagcagcag

SEQ ID NO: 2233792 - RNA, 19 nt, Artificial Sequence
  Description of Artificial Sequence: Synthetic oligonucleotide
ugacuuccuuagugucaua

SEQ ID NO: 2233793 - RNA, 19 nt, Artificial Sequence
  Description of Artificial Sequence: Synthetic oligonucleotide
ccaccgcacagcagggccc

SEQ ID NO: 2233794 - RNA, 19 nt, Artificial Sequence
  Description of Artificial Sequence: Synthetic oligonucleotide
ccaccacaccaacauggug

SEQ ID NO: 2233795 - RNA, 19 nt, Artificial Sequence
  Description of Artificial Sequence: Synthetic oligonucleotide
gguuggaacaugggcaggu

SEQ ID NO: 2233796 - RNA, 19 nt, Artificial Sequence
  Description of Artificial Sequence: Synthetic oligonucleotide
caucuugucgcugccccua

SEQ ID NO: 2233797 - RNA, 19 nt, Artificial Sequence
  Description of Artificial Sequence: Synthetic oligonucleotide
ggugcucugggcagcggac

SEQ ID NO: 2233798 - RNA, 19 nt, Artificial Sequence
  Description of Artificial Sequence: Synthetic oligonucleotide
gcuggucuccggcacgguc

SEQ ID NO: 2233799 - RNA, 19 nt, Artificial Sequence
  Description of Artificial Sequence: Synthetic oligonucleotide
aaagaccgacggacgcgua

SEQ ID NO: 2233800 - RNA, 19 nt, Artificial Sequence
  Description of Artificial Sequence: Synthetic oligonucleotide
gggucgccauccucccagg

SEQ ID NO: 2233801 - RNA, 19 nt, Artificial Sequence
  Description of Artificial Sequence: Synthetic oligonucleotide
gcagcggacuccugcuuca

SEQ ID NO: 2233802 - RNA, 19 nt, Artificial Sequence
  Description of Artificial Sequence: Synthetic oligonucleotide
ggacgcguacaccuggccu

SEQ ID NO: 2233803 - RNA, 19 nt, Artificial Sequence
  Description of Artificial Sequence: Synthetic oligonucleotide
cagggguaucuugaggaua

SEQ ID NO: 2233804 - RNA, 19 nt, Artificial Sequence
  Description of Artificial Sequence: Synthetic oligonucleotide
caaggaucuguguggcaau

SEQ ID NO: 2233805 - RNA, 19 nt, Artificial Sequence
  Description of Artificial Sequence: Synthetic oligonucleotide
agggccucguucaccugcu

SEQ ID NO: 2233806 - RNA, 19 nt, Artificial Sequence
  Description of Artificial Sequence: Synthetic oligonucleotide
cuacauaggccagggcugu

SEQ ID NO: 2233807 - RNA, 19 nt, Artificial Sequence
  Description of Artificial Sequence: Synthetic oligonucleotide
cguucaccugcuccccucg

SEQ ID NO: 2233808 - RNA, 19 nt, Artificial Sequence
  Description of Artificial Sequence: Synthetic oligonucleotide
ccucacgaucuuccaggag

SEQ ID NO: 2233809 - RNA, 19 nt, Artificial Sequence
  Description of Artificial Sequence: Synthetic oligonucleotide
gccaagcacugcuucucuc

SEQ ID NO: 2233810 - RNA, 19 nt, Artificial Sequence
  Description of Artificial Sequence: Synthetic oligonucleotide
cuccccucguaccugguau

SEQ ID NO: 2233811 - RNA, 19 nt, Artificial Sequence
  Description of Artificial Sequence: Synthetic oligonucleotide
ggguggugugggauuagca

SEQ ID NO: 2233812 - RNA, 19 nt, Artificial Sequence
  Description of Artificial Sequence: Synthetic oligonucleotide
ggcaaggaucuguguggca

SEQ ID NO: 2233813 - RNA, 19 nt, Artificial Sequence
  Description of Artificial Sequence: Synthetic oligonucleotide
gguaugccacaccccaagu

SEQ ID NO: 2233814 - RNA, 19 nt, Artificial Sequence
  Description of Artificial Sequence: Synthetic oligonucleotide
cugccccuauggaaggugu

SEQ ID NO: 2233815 - RNA, 19 nt, Artificial Sequence
  Description of Artificial Sequence: Synthetic oligonucleotide
ggauagaaggugacuuccu

SEQ ID NO: 2233816 - RNA, 19 nt, Artificial Sequence
  Description of Artificial Sequence: Synthetic oligonucleotide
cguaccugguaugccacac

SEQ ID NO: 2233817 - RNA, 19 nt, Artificial Sequence
  Description of Artificial Sequence: Synthetic oligonucleotide
ccgacggacgcguacaccu

SEQ ID NO: 2233818 - RNA, 19 nt, Artificial Sequence
  Description of Artificial Sequence: Synthetic oligonucleotide
cuccggcacggucacggaa

SEQ ID NO: 2233819 - RNA, 19 nt, Artificial Sequence
  Description of Artificial Sequence: Synthetic oligonucleotide
ccccucguaccugguaugc

SEQ ID NO: 2233820 - RNA, 19 nt, Artificial Sequence
  Description of Artificial Sequence: Synthetic oligonucleotide
auggugccuggcacaggga

SEQ ID NO: 2233821 - RNA, 19 nt, Artificial Sequence
  Description of Artificial Sequence: Synthetic oligonucleotide
gcccagguuagccaggguu

SEQ ID NO: 2233822 - RNA, 19 nt, Artificial Sequence
  Description of Artificial Sequence: Synthetic oligonucleotide
ccccuauggaaggugucuc

SEQ ID NO: 2233823 - RNA, 19 nt, Artificial Sequence
  Description of Artificial Sequence: Synthetic oligonucleotide
ggguggcuacauaggccag

SEQ ID NO: 2233824 - RNA, 19 nt, Artificial Sequence
  Description of Artificial Sequence: Synthetic oligonucleotide
cucguucucugcugccccu

SEQ ID NO: 2233825 - RNA, 19 nt, Artificial Sequence
  Description of Artificial Sequence: Synthetic oligonucleotide
ggucaggcaccagaagacu

SEQ ID NO: 2233826 - RNA, 19 nt, Artificial Sequence
  Description of Artificial Sequence: Synthetic oligonucleotide
gcguacaccuggccuggca

SEQ ID NO: 2233827 - RNA, 19 nt, Artificial Sequence
  Description of Artificial Sequence: Synthetic oligonucleotide
ggguuggucagggguaucu

SEQ ID NO: 2233828 - RNA, 19 nt, Artificial Sequence
  Description of Artificial Sequence: Synthetic oligonucleotide
cccucguaccugguaugcc

SEQ ID NO: 2233829 - RNA, 19 nt, Artificial Sequence
  Description of Artificial Sequence: Synthetic oligonucleotide
ggucgccauccucccagga

SEQ ID NO: 2233830 - RNA, 19 nt, Artificial Sequence
  Description of Artificial Sequence: Synthetic oligonucleotide
guucaccugcuccccucgu

SEQ ID NO: 2233831 - RNA, 19 nt, Artificial Sequence
  Description of Artificial Sequence: Synthetic oligonucleotide
gcuggcuaccauuccucgu

SEQ ID NO: 2233832 - RNA, 19 nt, Artificial Sequence
  Description of Artificial Sequence: Synthetic oligonucleotide
cgagagguguggaggccug

SEQ ID NO: 2233833 - RNA, 19 nt, Artificial Sequence
  Description of Artificial Sequence: Synthetic oligonucleotide
cccucacgaucuuccagga

SEQ ID NO: 2233834 - RNA, 19 nt, Artificial Sequence
  Description of Artificial Sequence: Synthetic oligonucleotide
ggcuaccauuccucguucu

SEQ ID NO: 2233835 - RNA, 19 nt, Artificial Sequence
  Description of Artificial Sequence: Synthetic oligonucleotide
ccugcuccccucguaccug

SEQ ID NO: 2233836 - RNA, 19 nt, Artificial Sequence
  Description of Artificial Sequence: Synthetic oligonucleotide
cccgagagguguggaggcc

SEQ ID NO: 2233837 - RNA, 19 nt, Artificial Sequence
  Description of Artificial Sequence: Synthetic oligonucleotide
ccauuccucguucucugcu

SEQ ID NO: 2233838 - RNA, 19 nt, Artificial Sequence
  Description of Artificial Sequence: Synthetic oligonucleotide
gugcucugggcagcggacu

SEQ ID NO: 2233839 - RNA, 19 nt, Artificial Sequence
  Description of Artificial Sequence: Synthetic oligonucleotide
gccgccaagcacugcuucu

SEQ ID NO: 2233840 - RNA, 19 nt, Artificial Sequence
  Description of Artificial Sequence: Synthetic oligonucleotide
cggacgcguacaccuggcc

SEQ ID NO: 2233841 - RNA, 19 nt, Artificial Sequence
  Description of Artificial Sequence: Synthetic oligonucleotide
gcaucuugucgcugccccu

SEQ ID NO: 2233842 - RNA, 19 nt, Artificial Sequence
  Description of Artificial Sequence: Synthetic oligonucleotide
cgacggacgcguacaccug

SEQ ID NO: 2233843 - RNA, 19 nt, Artificial Sequence
  Description of Artificial Sequence: Synthetic oligonucleotide
cggucacggaaagaccgac

SEQ ID NO: 2233844 - RNA, 19 nt, Artificial Sequence
  Description of Artificial Sequence: Synthetic oligonucleotide
augcuggaccuugguccuu

SEQ ID NO: 2233845 - RNA, 19 nt, Artificial Sequence
  Description of Artificial Sequence: Synthetic oligonucleotide
cuggaccuugguccuugau

SEQ ID NO: 2233846 - RNA, 19 nt, Artificial Sequence
  Description of Artificial Sequence: Synthetic oligonucleotide
ccggcggcuauaaccacgu

SEQ ID NO: 2233847 - RNA, 19 nt, Artificial Sequence
  Description of Artificial Sequence: Synthetic oligonucleotide
cggcuauaaccacguacga

SEQ ID NO: 2233848 - RNA, 19 nt, Artificial Sequence
  Description of Artificial Sequence: Synthetic oligonucleotide
gcuccccucguaccuggua

SEQ ID NO: 2233849 - RNA, 19 nt, Artificial Sequence
  Description of Artificial Sequence: Synthetic oligonucleotide
ccagaaccggcggcuauaa

SEQ ID NO: 2233850 - RNA, 19 nt, Artificial Sequence
  Description of Artificial Sequence: Synthetic oligonucleotide
gccagaaccggcggcuaua

SEQ ID NO: 2233851 - RNA, 19 nt, Artificial Sequence
  Description of Artificial Sequence: Synthetic oligonucleotide
cacgaucuuccaggagggu

SEQ ID NO: 2233852 - RNA, 19 nt, Artificial Sequence
  Description of Artificial Sequence: Synthetic oligonucleotide
gggguuggucagggguauc

SEQ ID NO: 2233853 - RNA, 19 nt, Artificial Sequence
  Description of Artificial Sequence: Synthetic oligonucleotide
ggcugucgcuguaggcaaa

SEQ ID NO: 2233854 - RNA, 19 nt, Artificial Sequence
  Description of Artificial Sequence: Synthetic oligonucleotide
cucucacauucagguacuu

SEQ ID NO: 2233855 - RNA, 19 nt, Artificial Sequence
  Description of Artificial Sequence: Synthetic oligonucleotide
cuggagcagggcccagguu

SEQ ID NO: 2233856 - RNA, 19 nt, Artificial Sequence
  Description of Artificial Sequence: Synthetic oligonucleotide
ccgagagguguggaggccu

SEQ ID NO: 2233857 - RNA, 19 nt, Artificial Sequence
  Description of Artificial Sequence: Synthetic oligonucleotide
gcggugcaggggacaguga

SEQ ID NO: 2233858 - RNA, 19 nt, Artificial Sequence
  Description of Artificial Sequence: Synthetic oligonucleotide
gcgggcggugcaggggaca

SEQ ID NO: 2233859 - RNA, 19 nt, Artificial Sequence
  Description of Artificial Sequence: Synthetic oligonucleotide
cggcuuccacacuagggau

SEQ ID NO: 2233860 - RNA, 19 nt, Artificial Sequence
  Description of Artificial Sequence: Synthetic oligonucleotide
cggacuccugcuucauggu

SEQ ID NO: 2233861 - RNA, 19 nt, Artificial Sequence
  Description of Artificial Sequence: Synthetic oligonucleotide
cagcggacuccugcuucau

SEQ ID NO: 2233862 - RNA, 19 nt, Artificial Sequence
  Description of Artificial Sequence: Synthetic oligonucleotide
cgcgggcggugcaggggac

SEQ ID NO: 2233863 - RNA, 19 nt, Artificial Sequence
  Description of Artificial Sequence: Synthetic oligonucleotide
cgccaagcacugcuucucu

SEQ ID NO: 2233864 - RNA, 19 nt, Artificial Sequence
  Description of Artificial Sequence: Synthetic oligonucleotide
cgcguacaccuggccuggc

SEQ ID NO: 2233865 - RNA, 19 nt, Artificial Sequence
  Description of Artificial Sequence: Synthetic oligonucleotide
cgaagcccacacggcuguc

SEQ ID NO: 2233866 - RNA, 19 nt, Artificial Sequence
  Description of Artificial Sequence: Synthetic oligonucleotide
gccccucauccaguggguu

SEQ ID NO: 2233867 - RNA, 19 nt, Artificial Sequence
  Description of Artificial Sequence: Synthetic oligonucleotide
cggcggcuauaaccacgua

SEQ ID NO: 2233868 - RNA, 19 nt, Artificial Sequence
  Description of Artificial Sequence: Synthetic oligonucleotide
cgcugccccuauggaaggu

SEQ ID NO: 2233869 - RNA, 19 nt, Artificial Sequence
  Description of Artificial Sequence: Synthetic oligonucleotide
aagucagauaaauuggugc

SEQ ID NO: 2233870 - RNA, 19 nt, Artificial Sequence
  Description of Artificial Sequence: Synthetic oligonucleotide
aauuggugcgaguugaugc

SEQ ID NO: 2233871 - RNA, 19 nt, Artificial Sequence
  Description of Artificial Sequence: Synthetic oligonucleotide
aaaaucugcagugaaauca

SEQ ID NO: 2233872 - RNA, 19 nt, Artificial Sequence
  Description of Artificial Sequence: Synthetic oligonucleotide
aacucauucugccccagcc

SEQ ID NO: 2233873 - RNA, 19 nt, Artificial Sequence
  Description of Artificial Sequence: Synthetic oligonucleotide
agucagauaaauuggugcg

SEQ ID NO: 2233874 - RNA, 19 nt, Artificial Sequence
  Description of Artificial Sequence: Synthetic oligonucleotide
cauaguuggcauuucagag

SEQ ID NO: 2233875 - RNA, 19 nt, Artificial Sequence
  Description of Artificial Sequence: Synthetic oligonucleotide
auuggugcgaguugaugcc

SEQ ID NO: 2233876 - RNA, 19 nt, Artificial Sequence
  Description of Artificial Sequence: Synthetic oligonucleotide
gcagaagucagauaaauug

SEQ ID NO: 2233877 - RNA, 19 nt, Artificial Sequence
  Description of Artificial Sequence: Synthetic oligonucleotide
uuugcgauccuucacccca

SEQ ID NO: 2233878 - RNA, 19 nt, Artificial Sequence
  Description of Artificial Sequence: Synthetic oligonucleotide
aguugaugccuccagcugg

SEQ ID NO: 2233879 - RNA, 19 nt, Artificial Sequence
  Description of Artificial Sequence: Synthetic oligonucleotide
caggccucgacauaguugg

SEQ ID NO: 2233880 - RNA, 19 nt, Artificial Sequence
  Description of Artificial Sequence: Synthetic oligonucleotide
gaguaguccagagaguucg

SEQ ID NO: 2233881 - RNA, 19 nt, Artificial Sequence
  Description of Artificial Sequence: Synthetic oligonucleotide
uuggcauccuccuucacag

SEQ ID NO: 2233882 - RNA, 19 nt, Artificial Sequence
  Description of Artificial Sequence: Synthetic oligonucleotide
gauaaauuggugcgaguug

SEQ ID NO: 2233883 - RNA, 19 nt, Artificial Sequence
  Description of Artificial Sequence: Synthetic oligonucleotide
gaaucaaugauagcagggc

SEQ ID NO: 2233884 - RNA, 19 nt, Artificial Sequence
  Description of Artificial Sequence: Synthetic oligonucleotide
ugguaggggagccuguugg

SEQ ID NO: 2233885 - RNA, 19 nt, Artificial Sequence
  Description of Artificial Sequence: Synthetic oligonucleotide
cuguuggagaugcugaucc

SEQ ID NO: 2233886 - RNA, 19 nt, Artificial Sequence
  Description of Artificial Sequence: Synthetic oligonucleotide
ugcuuugcgauccuucacc

SEQ ID NO: 2233887 - RNA, 19 nt, Artificial Sequence
  Description of Artificial Sequence: Synthetic oligonucleotide
ucggucuaggcccaguucc

SEQ ID NO: 2233888 - RNA, 19 nt, Artificial Sequence
  Description of Artificial Sequence: Synthetic oligonucleotide
aaacucauucugccccagc

SEQ ID NO: 2233889 - RNA, 19 nt, Artificial Sequence
  Description of Artificial Sequence: Synthetic oligonucleotide
agaaucaaugauagcaggg

SEQ ID NO: 2233890 - RNA, 19 nt, Artificial Sequence
  Description of Artificial Sequence: Synthetic oligonucleotide
cuggcuauuaagcuucugc

SEQ ID NO: 2233891 - RNA, 19 nt, Artificial Sequence
  Description of Artificial Sequence: Synthetic oligonucleotide
ugauacuggcuauuaagcu

SEQ ID NO: 2233892 - RNA, 19 nt, Artificial Sequence
  Description of Artificial Sequence: Synthetic oligonucleotide
ucagauaaauuggugcgag

SEQ ID NO: 2233893 - RNA, 19 nt, Artificial Sequence
  Description of Artificial Sequence: Synthetic oligonucleotide
ucaagugcaggccucgaca

SEQ ID NO: 2233894 - RNA, 19 nt, Artificial Sequence
  Description of Artificial Sequence: Synthetic oligonucleotide
cagaaucaaugauagcagg

SEQ ID NO: 2233895 - RNA, 19 nt, Artificial Sequence
  Description of Artificial Sequence: Synthetic oligonucleotide
auuggcuuuggcuccauug

SEQ ID NO: 2233896 - RNA, 19 nt, Artificial Sequence
  Description of Artificial Sequence: Synthetic oligonucleotide
aaggcgccugggcaaagcc

SEQ ID NO: 2233897 - RNA, 19 nt, Artificial Sequence
  Description of Artificial Sequence: Synthetic oligonucleotide
uaguuggcauuucagaguc

SEQ ID NO: 2233898 - RNA, 19 nt, Artificial Sequence
  Description of Artificial Sequence: Synthetic oligonucleotide
uggcuauuaagcuucugca

SEQ ID NO: 2233899 - RNA, 19 nt, Artificial Sequence
  Description of Artificial Sequence: Synthetic oligonucleotide
auaguuggcauuucagagu

SEQ ID NO: 2233900 - RNA, 19 nt, Artificial Sequence
  Description of Artificial Sequence: Synthetic oligonucleotide
gaaccuugcagggacagag

SEQ ID NO: 2233901 - RNA, 19 nt, Artificial Sequence
  Description of Artificial Sequence: Synthetic oligonucleotide
aagcucauuggcucggucu

SEQ ID NO: 2233902 - RNA, 19 nt, Artificial Sequence
  Description of Artificial Sequence: Synthetic oligonucleotide
uggcauuucagagucuggg

SEQ ID NO: 2233903 - RNA, 19 nt, Artificial Sequence
  Description of Artificial Sequence: Synthetic oligonucleotide
auaaauuggugcgaguuga

SEQ ID NO: 2233904 - RNA, 19 nt, Artificial Sequence
  Description of Artificial Sequence: Synthetic oligonucleotide
uggagaugcugauccaggg

SEQ ID NO: 2233905 - RNA, 19 nt, Artificial Sequence
  Description of Artificial Sequence: Synthetic oligonucleotide
gcuauuaagcuucugcagc

SEQ ID NO: 2233906 - RNA, 19 nt, Artificial Sequence
  Description of Artificial Sequence: Synthetic oligonucleotide
caaagccccaguuuuggag

SEQ ID NO: 2233907 - RNA, 19 nt, Artificial Sequence
  Description of Artificial Sequence: Synthetic oligonucleotide
agggacagaggcucggacg

SEQ ID NO: 2233908 - RNA, 19 nt, Artificial Sequence
  Description of Artificial Sequence: Synthetic oligonucleotide
acgggagaccacccgaccc

SEQ ID NO: 2233909 - RNA, 19 nt, Artificial Sequence
  Description of Artificial Sequence: Synthetic oligonucleotide
uuuuagggacacuuggcau

SEQ ID NO: 2233910 - RNA, 19 nt, Artificial Sequence
  Description of Artificial Sequence: Synthetic oligonucleotide
acugggucagaaucaauga

SEQ ID NO: 2233911 - RNA, 19 nt, Artificial Sequence
  Description of Artificial Sequence: Synthetic oligonucleotide
aucaaugauagcagggcuc

SEQ ID NO: 2233912 - RNA, 19 nt, Artificial Sequence
  Description of Artificial Sequence: Synthetic oligonucleotide
gagaggcugauccugcccc

SEQ ID NO: 2233913 - RNA, 19 nt, Artificial Sequence
  Description of Artificial Sequence: Synthetic oligonucleotide
agccucuuggcacgcacgc

SEQ ID NO: 2233914 - RNA, 19 nt, Artificial Sequence
  Description of Artificial Sequence: Synthetic oligonucleotide
aaauuggugcgaguugaug

SEQ ID NO: 2233915 - RNA, 19 nt, Artificial Sequence
  Description of Artificial Sequence: Synthetic oligonucleotide
ugccccaugauacuggcua

SEQ ID NO: 2233916 - RNA, 19 nt, Artificial Sequence
  Description of Artificial Sequence: Synthetic oligonucleotide
ugauccugccccuccagcc

SEQ ID NO: 2233917 - RNA, 19 nt, Artificial Sequence
  Description of Artificial Sequence: Synthetic oligonucleotide
agugcaggccucgacauag

SEQ ID NO: 2233918 - RNA, 19 nt, Artificial Sequence
  Description of Artificial Sequence: Synthetic oligonucleotide
cauuggaggugacugcggg

SEQ ID NO: 2233919 - RNA, 19 nt, Artificial Sequence
  Description of Artificial Sequence: Synthetic oligonucleotide
aucaagugcaggccucgac

SEQ ID NO: 2233920 - RNA, 19 nt, Artificial Sequence
  Description of Artificial Sequence: Synthetic oligonucleotide
ugcgggguagugcaggaug

SEQ ID NO: 2233921 - RNA, 19 nt, Artificial Sequence
  Description of Artificial Sequence: Synthetic oligonucleotide
uuggcauuucagagucugg

SEQ ID NO: 2233922 - RNA, 19 nt, Artificial Sequence
  Description of Artificial Sequence: Synthetic oligonucleotide
auuggaggugacugcgggg

SEQ ID NO: 2233923 - RNA, 19 nt, Artificial Sequence
  Description of Artificial Sequence: Synthetic oligonucleotide
agauaaauuggugcgaguu

SEQ ID NO: 2233924 - RNA, 19 nt, Artificial Sequence
  Description of Artificial Sequence: Synthetic oligonucleotide
ugcgaguugaugccuccag

SEQ ID NO: 2233925 - RNA, 19 nt, Artificial Sequence
  Description of Artificial Sequence: Synthetic oligonucleotide
augauagcagggcucugag

SEQ ID NO: 2233926 - RNA, 19 nt, Artificial Sequence
  Description of Artificial Sequence: Synthetic oligonucleotide
aggauggccacugcuuugc

SEQ ID NO: 2233927 - RNA, 19 nt, Artificial Sequence
  Description of Artificial Sequence: Synthetic oligonucleotide
cauacuugccagcagguga

SEQ ID NO: 2233928 - RNA, 19 nt, Artificial Sequence
  Description of Artificial Sequence: Synthetic oligonucleotide
gaguucgccuccugguugg

SEQ ID NO: 2233929 - RNA, 19 nt, Artificial Sequence
  Description of Artificial Sequence: Synthetic oligonucleotide
agagaguucgccuccuggu

SEQ ID NO: 2233930 - RNA, 19 nt, Artificial Sequence
  Description of Artificial Sequence: Synthetic oligonucleotide
uuggcaucagcagccagag

SEQ ID NO: 2233931 - RNA, 19 nt, Artificial Sequence
  Description of Artificial Sequence: Synthetic oligonucleotide
ucaaacucauucugcccca

SEQ ID NO: 2233932 - RNA, 19 nt, Artificial Sequence
  Description of Artificial Sequence: Synthetic oligonucleotide
uaccgcaccgugcagcgcc

SEQ ID NO: 2233933 - RNA, 19 nt, Artificial Sequence
  Description of Artificial Sequence: Synthetic oligonucleotide
agaagucagauaaauuggu

SEQ ID NO: 2233934 - RNA, 19 nt, Artificial Sequence
  Description of Artificial Sequence: Synthetic oligonucleotide
uucaccccaagguuggagu

SEQ ID NO: 2233935 - RNA, 19 nt, Artificial Sequence
  Description of Artificial Sequence: Synthetic oligonucleotide
uuuuggagcggcccugccu

SEQ ID NO: 2233936 - RNA, 19 nt, Artificial Sequence
  Description of Artificial Sequence: Synthetic oligonucleotide
cucauucugccccagccac

SEQ ID NO: 2233937 - RNA, 19 nt, Artificial Sequence
  Description of Artificial Sequence: Synthetic oligonucleotide
cacccuugacaucaagugc

SEQ ID NO: 2233938 - RNA, 19 nt, Artificial Sequence
  Description of Artificial Sequence: Synthetic oligonucleotide
ggcuauuaagcuucugcag

SEQ ID NO: 2233939 - RNA, 19 nt, Artificial Sequence
  Description of Artificial Sequence: Synthetic oligonucleotide
uggaguaguccagagaguu

SEQ ID NO: 2233940 - RNA, 19 nt, Artificial Sequence
  Description of Artificial Sequence: Synthetic oligonucleotide
caggaagcucauuggcucg

SEQ ID NO: 2233941 - RNA, 19 nt, Artificial Sequence
  Description of Artificial Sequence: Synthetic oligonucleotide
cagagaguucgccuccugg

SEQ ID NO: 2233942 - RNA, 19 nt, Artificial Sequence
  Description of Artificial Sequence: Synthetic oligonucleotide
acccuugacaucaagugca

SEQ ID NO: 2233943 - RNA, 19 nt, Artificial Sequence
  Description of Artificial Sequence: Synthetic oligonucleotide
aguuuuggagcggcccugc

SEQ ID NO: 2233944 - RNA, 19 nt, Artificial Sequence
  Description of Artificial Sequence: Synthetic oligonucleotide
agaccacccgaccccaagg

SEQ ID NO: 2233945 - RNA, 19 nt, Artificial Sequence
  Description of Artificial Sequence: Synthetic oligonucleotide
uuggaggugacugcggggu

SEQ ID NO: 2233946 - RNA, 19 nt, Artificial Sequence
  Description of Artificial Sequence: Synthetic oligonucleotide
uauuaagcuucugcagcug

SEQ ID NO: 2233947 - RNA, 19 nt, Artificial Sequence
  Description of Artificial Sequence: Synthetic oligonucleotide
gugacugcgggguagugca

SEQ ID NO: 2233948 - RNA, 19 nt, Artificial Sequence
  Description of Artificial Sequence: Synthetic oligonucleotide
uuggcacgcacgcagccac

SEQ ID NO: 2233949 - RNA, 19 nt, Artificial Sequence
  Description of Artificial Sequence: Synthetic oligonucleotide
gaggcucggacgaagcugc

SEQ ID NO: 2233950 - RNA, 19 nt, Artificial Sequence
  Description of Artificial Sequence: Synthetic oligonucleotide
ugauagcagggcucugagc

SEQ ID NO: 2233951 - RNA, 19 nt, Artificial Sequence
  Description of Artificial Sequence: Synthetic oligonucleotide
uaaauuggugcgaguugau

SEQ ID NO: 2233952 - RNA, 19 nt, Artificial Sequence
  Description of Artificial Sequence: Synthetic oligonucleotide
ucauuggcucggucuaggc

SEQ ID NO: 2233953 - RNA, 19 nt, Artificial Sequence
  Description of Artificial Sequence: Synthetic oligonucleotide
aggcugauccugccccucc

SEQ ID NO: 2233954 - RNA, 19 nt, Artificial Sequence
  Description of Artificial Sequence: Synthetic oligonucleotide
caguuccaccaccagagac

SEQ ID NO: 2233955 - RNA, 19 nt, Artificial Sequence
  Description of Artificial Sequence: Synthetic oligonucleotide
ggcauccuccuucacagag

SEQ ID NO: 2233956 - RNA, 19 nt, Artificial Sequence
  Description of Artificial Sequence: Synthetic oligonucleotide
ucagcucuggcccgcgcgc

SEQ ID NO: 2233957 - RNA, 19 nt, Artificial Sequence
  Description of Artificial Sequence: Synthetic oligonucleotide
agcagccagagggaaaauc

SEQ ID NO: 2233958 - RNA, 19 nt, Artificial Sequence
  Description of Artificial Sequence: Synthetic oligonucleotide
gagucugggcagaagucag

SEQ ID NO: 2233959 - RNA, 19 nt, Artificial Sequence
  Description of Artificial Sequence: Synthetic oligonucleotide
uuggaguaguccagagagu

SEQ ID NO: 2233960 - RNA, 19 nt, Artificial Sequence
  Description of Artificial Sequence: Synthetic oligonucleotide
uuugguaggggaggcggug

SEQ ID NO: 2233961 - RNA, 19 nt, Artificial Sequence
  Description of Artificial Sequence: Synthetic oligonucleotide
uguuggagaugcugaucca

SEQ ID NO: 2233962 - RNA, 19 nt, Artificial Sequence
  Description of Artificial Sequence: Synthetic oligonucleotide
cuuugcgauccuucacccc

SEQ ID NO: 2233963 - RNA, 19 nt, Artificial Sequence
  Description of Artificial Sequence: Synthetic oligonucleotide
agguuggaguaguccagag

SEQ ID NO: 2233964 - RNA, 19 nt, Artificial Sequence
  Description of Artificial Sequence: Synthetic oligonucleotide
aaccuugcagggacagagg

SEQ ID NO: 2233965 - RNA, 19 nt, Artificial Sequence
  Description of Artificial Sequence: Synthetic oligonucleotide
accacccgaccccaaggcg

SEQ ID NO: 2233966 - RNA, 19 nt, Artificial Sequence
  Description of Artificial Sequence: Synthetic oligonucleotide
agcaccugcaggaggagag

SEQ ID NO: 2233967 - RNA, 19 nt, Artificial Sequence
  Description of Artificial Sequence: Synthetic oligonucleotide
gagaccacccgaccccaag

SEQ ID NO: 2233968 - RNA, 19 nt, Artificial Sequence
  Description of Artificial Sequence: Synthetic oligonucleotide
cauucugccccagccacag

SEQ ID NO: 2233969 - RNA, 19 nt, Artificial Sequence
  Description of Artificial Sequence: Synthetic oligonucleotide
agcgccgaucagcucuggc

SEQ ID NO: 2233970 - RNA, 19 nt, Artificial Sequence
  Description of Artificial Sequence: Synthetic oligonucleotide
aguaguccagagaguucgc

SEQ ID NO: 2233971 - RNA, 19 nt, Artificial Sequence
  Description of Artificial Sequence: Synthetic oligonucleotide
agacaucagcaccuccuca

SEQ ID NO: 2233972 - RNA, 19 nt, Artificial Sequence
  Description of Artificial Sequence: Synthetic oligonucleotide
aggugcuaccacccuugac

SEQ ID NO: 2233973 - RNA, 19 nt, Artificial Sequence
  Description of Artificial Sequence: Synthetic oligonucleotide
cuauuaagcuucugcagcu

SEQ ID NO: 2233974 - RNA, 19 nt, Artificial Sequence
  Description of Artificial Sequence: Synthetic oligonucleotide
uagugcaggauggccacug

SEQ ID NO: 2233975 - RNA, 19 nt, Artificial Sequence
  Description of Artificial Sequence: Synthetic oligonucleotide
agaggugcuaccacccuug

SEQ ID NO: 2233976 - RNA, 19 nt, Artificial Sequence
  Description of Artificial Sequence: Synthetic oligonucleotide
ccacccuugacaucaagug

SEQ ID NO: 2233977 - RNA, 19 nt, Artificial Sequence
  Description of Artificial Sequence: Synthetic oligonucleotide
uucgccuccugguuggcau

SEQ ID NO: 2233978 - RNA, 19 nt, Artificial Sequence
  Description of Artificial Sequence: Synthetic oligonucleotide
ugguuggcauccuccuuca

SEQ ID NO: 2233979 - RNA, 19 nt, Artificial Sequence
  Description of Artificial Sequence: Synthetic oligonucleotide
uagcagggcucugagcacc

SEQ ID NO: 2233980 - RNA, 19 nt, Artificial Sequence
  Description of Artificial Sequence: Synthetic oligonucleotide
cacgcacgcagccaccgcc

SEQ ID NO: 2233981 - RNA, 19 nt, Artificial Sequence
  Description of Artificial Sequence: Synthetic oligonucleotide
aggaagcucauuggcucgg

SEQ ID NO: 2233982 - RNA, 19 nt, Artificial Sequence
  Description of Artificial Sequence: Synthetic oligonucleotide
gauggccacugcuuugcga

SEQ ID NO: 2233983 - RNA, 19 nt, Artificial Sequence
  Description of Artificial Sequence: Synthetic oligonucleotide
cuccaaagccccaguuuug

SEQ ID NO: 2233984 - RNA, 19 nt, Artificial Sequence
  Description of Artificial Sequence: Synthetic oligonucleotide
uaccacccuugacaucaag

SEQ ID NO: 2233985 - RNA, 19 nt, Artificial Sequence
  Description of Artificial Sequence: Synthetic oligonucleotide
cugauccugccccuccagc

SEQ ID NO: 2233986 - RNA, 19 nt, Artificial Sequence
  Description of Artificial Sequence: Synthetic oligonucleotide
cagcuaggcugccugcccg

SEQ ID NO: 2233987 - RNA, 19 nt, Artificial Sequence
  Description of Artificial Sequence: Synthetic oligonucleotide
cagugggagccccauuggc

SEQ ID NO: 2233988 - RNA, 19 nt, Artificial Sequence
  Description of Artificial Sequence: Synthetic oligonucleotide
gagggaaaaucugcaguga

SEQ ID NO: 2233989 - RNA, 19 nt, Artificial Sequence
  Description of Artificial Sequence: Synthetic oligonucleotide
aggggagccuguuggagau

SEQ ID NO: 2233990 - RNA, 19 nt, Artificial Sequence
  Description of Artificial Sequence: Synthetic oligonucleotide
gcuuugcgauccuucaccc

SEQ ID NO: 2233991 - RNA, 19 nt, Artificial Sequence
  Description of Artificial Sequence: Synthetic oligonucleotide
cagggcucugagcaccugc

SEQ ID NO: 2233992 - RNA, 19 nt, Artificial Sequence
  Description of Artificial Sequence: Synthetic oligonucleotide
gauccuucaccccaagguu

SEQ ID NO: 2233993 - RNA, 19 nt, Artificial Sequence
  Description of Artificial Sequence: Synthetic oligonucleotide
cagccucuuggcacgcacg

SEQ ID NO: 2233994 - RNA, 19 nt, Artificial Sequence
  Description of Artificial Sequence: Synthetic oligonucleotide
gaccccaaggcgccugggc

SEQ ID NO: 2233995 - RNA, 19 nt, Artificial Sequence
  Description of Artificial Sequence: Synthetic oligonucleotide
ucaccccaagguuggagua

SEQ ID NO: 2233996 - RNA, 19 nt, Artificial Sequence
  Description of Artificial Sequence: Synthetic oligonucleotide
gaagcucauuggcucgguc

SEQ ID NO: 2233997 - RNA, 19 nt, Artificial Sequence
  Description of Artificial Sequence: Synthetic oligonucleotide
auucugccccagccacagc

SEQ ID NO: 2233998 - RNA, 19 nt, Artificial Sequence
  Description of Artificial Sequence: Synthetic oligonucleotide
uggugcgaguugaugccuc

SEQ ID NO: 2233999 - RNA, 19 nt, Artificial Sequence
  Description of Artificial Sequence: Synthetic oligonucleotide
uacuggcuauuaagcuucu

SEQ ID NO: 2234000 - RNA, 19 nt, Artificial Sequence
  Description of Artificial Sequence: Synthetic oligonucleotide
ucggacgaagcugccgagc

SEQ ID NO: 2234001 - RNA, 19 nt, Artificial Sequence
  Description of Artificial Sequence: Synthetic oligonucleotide
caggauggccacugcuuug

SEQ ID NO: 2234002 - RNA, 19 nt, Artificial Sequence
  Description of Artificial Sequence: Synthetic oligonucleotide
ugcaggccucgacauaguu

SEQ ID NO: 2234003 - RNA, 19 nt, Artificial Sequence
  Description of Artificial Sequence: Synthetic oligonucleotide
ggucagaaucaaugauagc

SEQ ID NO: 2234004 - RNA, 19 nt, Artificial Sequence
  Description of Artificial Sequence: Synthetic oligonucleotide
cagguuggccuggaguggc

SEQ ID NO: 2234005 - RNA, 19 nt, Artificial Sequence
  Description of Artificial Sequence: Synthetic oligonucleotide
cacccgaccccaaggcgcc

SEQ ID NO: 2234006 - RNA, 19 nt, Artificial Sequence
  Description of Artificial Sequence: Synthetic oligonucleotide
acagccgcgccgcgccgcc

SEQ ID NO: 2234007 - RNA, 19 nt, Artificial Sequence
  Description of Artificial Sequence: Synthetic oligonucleotide
uuggugcgaguugaugccu

SEQ ID NO: 2234008 - RNA, 19 nt, Artificial Sequence
  Description of Artificial Sequence: Synthetic oligonucleotide
cacgcagccaccgccgccc

SEQ ID NO: 2234009 - RNA, 19 nt, Artificial Sequence
  Description of Artificial Sequence: Synthetic oligonucleotide
aagugcaggccucgacaua

SEQ ID NO: 2234010 - RNA, 19 nt, Artificial Sequence
  Description of Artificial Sequence: Synthetic oligonucleotide
uugcgauccuucaccccaa

SEQ ID NO: 2234011 - RNA, 19 nt, Artificial Sequence
  Description of Artificial Sequence: Synthetic oligonucleotide
guuuuggagcggcccugcc

SEQ ID NO: 2234012 - RNA, 19 nt, Artificial Sequence
  Description of Artificial Sequence: Synthetic oligonucleotide
gcgccgaucagcucuggcc

SEQ ID NO: 2234013 - RNA, 19 nt, Artificial Sequence
  Description of Artificial Sequence: Synthetic oligonucleotide
gguuggaguaguccagaga

SEQ ID NO: 2234014 - RNA, 19 nt, Artificial Sequence
  Description of Artificial Sequence: Synthetic oligonucleotide
agagggaaccuugcaggga

SEQ ID NO: 2234015 - RNA, 19 nt, Artificial Sequence
  Description of Artificial Sequence: Synthetic oligonucleotide
gugguaggggagccuguug

SEQ ID NO: 2234016 - RNA, 19 nt, Artificial Sequence
  Description of Artificial Sequence: Synthetic oligonucleotide
cacgggagaccacccgacc

SEQ ID NO: 2234017 - RNA, 19 nt, Artificial Sequence
  Description of Artificial Sequence: Synthetic oligonucleotide
ugcugauccaggggagcca

SEQ ID NO: 2234018 - RNA, 19 nt, Artificial Sequence
  Description of Artificial Sequence: Synthetic oligonucleotide
cucggacgaagcugccgag

SEQ ID NO: 2234019 - RNA, 19 nt, Artificial Sequence
  Description of Artificial Sequence: Synthetic oligonucleotide
cagggacagaggcucggac

SEQ ID NO: 2234020 - RNA, 19 nt, Artificial Sequence
  Description of Artificial Sequence: Synthetic oligonucleotide
cucggucuaggcccaguuc

SEQ ID NO: 2234021 - RNA, 19 nt, Artificial Sequence
  Description of Artificial Sequence: Synthetic oligonucleotide
caccccaagguuggaguag

SEQ ID NO: 2234022 - RNA, 19 nt, Artificial Sequence
  Description of Artificial Sequence: Synthetic oligonucleotide
caccgugcagcgccgauca

SEQ ID NO: 2234023 - RNA, 19 nt, Artificial Sequence
  Description of Artificial Sequence: Synthetic oligonucleotide
ggugcgaguugaugccucc

SEQ ID NO: 2234024 - RNA, 19 nt, Artificial Sequence
  Description of Artificial Sequence: Synthetic oligonucleotide
ucgacauaguuggcauuuc

SEQ ID NO: 2234025 - RNA, 19 nt, Artificial Sequence
  Description of Artificial Sequence: Synthetic oligonucleotide
cuuuggcuccauuggaggu

SEQ ID NO: 2234026 - RNA, 19 nt, Artificial Sequence
  Description of Artificial Sequence: Synthetic oligonucleotide
aggcggugguaggggagcc

SEQ ID NO: 2234027 - RNA, 19 nt, Artificial Sequence
  Description of Artificial Sequence: Synthetic oligonucleotide
aguucgccuccugguuggc

SEQ ID NO: 2234028 - RNA, 19 nt, Artificial Sequence
  Description of Artificial Sequence: Synthetic oligonucleotide
gcgaguugaugccuccagc

SEQ ID NO: 2234029 - RNA, 19 nt, Artificial Sequence
  Description of Artificial Sequence: Synthetic oligonucleotide
agcuguuggucuccagcua

SEQ ID NO: 2234030 - RNA, 19 nt, Artificial Sequence
  Description of Artificial Sequence: Synthetic oligonucleotide
accccaagguuggaguagu

SEQ ID NO: 2234031 - RNA, 19 nt, Artificial Sequence
  Description of Artificial Sequence: Synthetic oligonucleotide
cccaagguuggaguagucc

SEQ ID NO: 2234032 - RNA, 19 nt, Artificial Sequence
  Description of Artificial Sequence: Synthetic oligonucleotide
caguuuuggagcggcccug

SEQ ID NO: 2234033 - RNA, 19 nt, Artificial Sequence
  Description of Artificial Sequence: Synthetic oligonucleotide
uugaugccuccagcuggag

SEQ ID NO: 2234034 - RNA, 19 nt, Artificial Sequence
  Description of Artificial Sequence: Synthetic oligonucleotide
gcgauccuucaccccaagg

SEQ ID NO: 2234035 - RNA, 19 nt, Artificial Sequence
  Description of Artificial Sequence: Synthetic oligonucleotide
agggugcagguugaagggu

SEQ ID NO: 2234036 - RNA, 19 nt, Artificial Sequence
  Description of Artificial Sequence: Synthetic oligonucleotide
gcucggacgaagcugccga

SEQ ID NO: 2234037 - RNA, 19 nt, Artificial Sequence
  Description of Artificial Sequence: Synthetic oligonucleotide
uggcauccuccuucacaga

SEQ ID NO: 2234038 - RNA, 19 nt, Artificial Sequence
  Description of Artificial Sequence: Synthetic oligonucleotide
guuggucuccagcuaggcu

SEQ ID NO: 2234039 - RNA, 19 nt, Artificial Sequence
  Description of Artificial Sequence: Synthetic oligonucleotide
gggguagugcaggauggcc

SEQ ID NO: 2234040 - RNA, 19 nt, Artificial Sequence
  Description of Artificial Sequence: Synthetic oligonucleotide
gaggugcuaccacccuuga

SEQ ID NO: 2234041 - RNA, 19 nt, Artificial Sequence
  Description of Artificial Sequence: Synthetic oligonucleotide
ggguagugcaggauggcca

SEQ ID NO: 2234042 - RNA, 19 nt, Artificial Sequence
  Description of Artificial Sequence: Synthetic oligonucleotide
ugcuaccacccuugacauc

SEQ ID NO: 2234043 - RNA, 19 nt, Artificial Sequence
  Description of Artificial Sequence: Synthetic oligonucleotide
gcaggccucgacauaguug

SEQ ID NO: 2234044 - RNA, 19 nt, Artificial Sequence
  Description of Artificial Sequence: Synthetic oligonucleotide
uggaggugacugcggggua

SEQ ID NO: 2234045 - RNA, 19 nt, Artificial Sequence
  Description of Artificial Sequence: Synthetic oligonucleotide
cguaccgcaccgugcagcg

SEQ ID NO: 2234046 - RNA, 19 nt, Artificial Sequence
  Description of Artificial Sequence: Synthetic oligonucleotide
ccagugggagccccauugg

SEQ ID NO: 2234047 - RNA, 19 nt, Artificial Sequence
  Description of Artificial Sequence: Synthetic oligonucleotide
gggaaaaucugcagugaaa

SEQ ID NO: 2234048 - RNA, 19 nt, Artificial Sequence
  Description of Artificial Sequence: Synthetic oligonucleotide
gccgaucagcucuggcccg

SEQ ID NO: 2234049 - RNA, 19 nt, Artificial Sequence
  Description of Artificial Sequence: Synthetic oligonucleotide
ccacagcucaggaagcuca

SEQ ID NO: 2234050 - RNA, 19 nt, Artificial Sequence
  Description of Artificial Sequence: Synthetic oligonucleotide
gguaggggagccuguugga

SEQ ID NO: 2234051 - RNA, 19 nt, Artificial Sequence
  Description of Artificial Sequence: Synthetic oligonucleotide
ccuucacagaggugcuacc

SEQ ID NO: 2234052 - RNA, 19 nt, Artificial Sequence
  Description of Artificial Sequence: Synthetic oligonucleotide
gagaguucgccuccugguu

SEQ ID NO: 2234053 - RNA, 19 nt, Artificial Sequence
  Description of Artificial Sequence: Synthetic oligonucleotide
gccugcccgggagagaggg

SEQ ID NO: 2234054 - RNA, 19 nt, Artificial Sequence
  Description of Artificial Sequence: Synthetic oligonucleotide
caagugcaggccucgacau

SEQ ID NO: 2234055 - RNA, 19 nt, Artificial Sequence
  Description of Artificial Sequence: Synthetic oligonucleotide
cugggucagaaucaaugau

SEQ ID NO: 2234056 - RNA, 19 nt, Artificial Sequence
  Description of Artificial Sequence: Synthetic oligonucleotide
gugcuaccacccuugacau

SEQ ID NO: 2234057 - RNA, 19 nt, Artificial Sequence
  Description of Artificial Sequence: Synthetic oligonucleotide
ggcacgcacgcagccaccg

SEQ ID NO: 2234058 - RNA, 19 nt, Artificial Sequence
  Description of Artificial Sequence: Synthetic oligonucleotide
cgccgaucagcucuggccc

SEQ ID NO: 2234059 - RNA, 19 nt, Artificial Sequence
  Description of Artificial Sequence: Synthetic oligonucleotide
agccccaguuuuggagcgg

SEQ ID NO: 2234060 - RNA, 19 nt, Artificial Sequence
  Description of Artificial Sequence: Synthetic oligonucleotide
uggccacugcuuugcgauc

SEQ ID NO: 2234061 - RNA, 19 nt, Artificial Sequence
  Description of Artificial Sequence: Synthetic oligonucleotide
cuggccgcacgggagacca

SEQ ID NO: 2234062 - RNA, 19 nt, Artificial Sequence
  Description of Artificial Sequence: Synthetic oligonucleotide
aggccucgacauaguuggc

SEQ ID NO: 2234063 - RNA, 19 nt, Artificial Sequence
  Description of Artificial Sequence: Synthetic oligonucleotide
gagcaccugcaggaggaga

SEQ ID NO: 2234064 - RNA, 19 nt, Artificial Sequence
  Description of Artificial Sequence: Synthetic oligonucleotide
cuuggcacgcacgcagcca

SEQ ID NO: 2234065 - RNA, 19 nt, Artificial Sequence
  Description of Artificial Sequence: Synthetic oligonucleotide
cagauaaauuggugcgagu

SEQ ID NO: 2234066 - RNA, 19 nt, Artificial Sequence
  Description of Artificial Sequence: Synthetic oligonucleotide
cucgacauaguuggcauuu

SEQ ID NO: 2234067 - RNA, 19 nt, Artificial Sequence
  Description of Artificial Sequence: Synthetic oligonucleotide
ucgccuccugguuggcauc

SEQ ID NO: 2234068 - RNA, 19 nt, Artificial Sequence
  Description of Artificial Sequence: Synthetic oligonucleotide
ggcucggacgaagcugccg

SEQ ID NO: 2234069 - RNA, 19 nt, Artificial Sequence
  Description of Artificial Sequence: Synthetic oligonucleotide
gagccccauuggcuuuggc

SEQ ID NO: 2234070 - RNA, 19 nt, Artificial Sequence
  Description of Artificial Sequence: Synthetic oligonucleotide
aguuggcauuucagagucu

SEQ ID NO: 2234071 - RNA, 19 nt, Artificial Sequence
  Description of Artificial Sequence: Synthetic oligonucleotide
gaggcugauccugccccuc

SEQ ID NO: 2234072 - RNA, 19 nt, Artificial Sequence
  Description of Artificial Sequence: Synthetic oligonucleotide
aggcucggacgaagcugcc

SEQ ID NO: 2234073 - RNA, 19 nt, Artificial Sequence
  Description of Artificial Sequence: Synthetic oligonucleotide
gcaccugcaggaggagagg

SEQ ID NO: 2234074 - RNA, 19 nt, Artificial Sequence
  Description of Artificial Sequence: Synthetic oligonucleotide
ggccucgacauaguuggca

SEQ ID NO: 2234075 - RNA, 19 nt, Artificial Sequence
  Description of Artificial Sequence: Synthetic oligonucleotide
cugcccgggagagagggaa

SEQ ID NO: 2234076 - RNA, 19 nt, Artificial Sequence
  Description of Artificial Sequence: Synthetic oligonucleotide
gcucauuggcucggucuag

SEQ ID NO: 2234077 - RNA, 19 nt, Artificial Sequence
  Description of Artificial Sequence: Synthetic oligonucleotide
gccgccguaccgcaccgug

SEQ ID NO: 2234078 - RNA, 19 nt, Artificial Sequence
  Description of Artificial Sequence: Synthetic oligonucleotide
ggccgcacgggagaccacc

SEQ ID NO: 2234079 - RNA, 19 nt, Artificial Sequence
  Description of Artificial Sequence: Synthetic oligonucleotide
cgggagaccacccgacccc

SEQ ID NO: 2234080 - RNA, 19 nt, Artificial Sequence
  Description of Artificial Sequence: Synthetic oligonucleotide
cugcacagccgcgccgcgc

SEQ ID NO: 2234081 - RNA, 19 nt, Artificial Sequence
  Description of Artificial Sequence: Synthetic oligonucleotide
ggucuaggcccaguuccac

SEQ ID NO: 2234082 - RNA, 19 nt, Artificial Sequence
  Description of Artificial Sequence: Synthetic oligonucleotide
agggaaccuugcagggaca

SEQ ID NO: 2234083 - RNA, 19 nt, Artificial Sequence
  Description of Artificial Sequence: Synthetic oligonucleotide
gcagugaaaucaaacucau

SEQ ID NO: 2234084 - RNA, 19 nt, Artificial Sequence
  Description of Artificial Sequence: Synthetic oligonucleotide
gcggugguaggggagccug

SEQ ID NO: 2234085 - RNA, 19 nt, Artificial Sequence
  Description of Artificial Sequence: Synthetic oligonucleotide
gugcccgcccgcccgcagc

SEQ ID NO: 2234086 - RNA, 19 nt, Artificial Sequence
  Description of Artificial Sequence: Synthetic oligonucleotide
cuaggcugccugcccggga

SEQ ID NO: 2234087 - RNA, 19 nt, Artificial Sequence
  Description of Artificial Sequence: Synthetic oligonucleotide
cucauccacugggucagaa

SEQ ID NO: 2234088 - RNA, 19 nt, Artificial Sequence
  Description of Artificial Sequence: Synthetic oligonucleotide
cgauccuucaccccaaggu

SEQ ID NO: 2234089 - RNA, 19 nt, Artificial Sequence
  Description of Artificial Sequence: Synthetic oligonucleotide
gcccgggagagagggaacc

SEQ ID NO: 2234090 - RNA, 19 nt, Artificial Sequence
  Description of Artificial Sequence: Synthetic oligonucleotide
caucaagugcaggccucga

SEQ ID NO: 2234091 - RNA, 19 nt, Artificial Sequence
  Description of Artificial Sequence: Synthetic oligonucleotide
gcuaggcugccugcccggg

SEQ ID NO: 2234092 - RNA, 19 nt, Artificial Sequence
  Description of Artificial Sequence: Synthetic oligonucleotide
gugcgaguugaugccucca

SEQ ID NO: 2234093 - RNA, 19 nt, Artificial Sequence
  Description of Artificial Sequence: Synthetic oligonucleotide
gccccaguuuuggagcggc

SEQ ID NO: 2234094 - RNA, 19 nt, Artificial Sequence
  Description of Artificial Sequence: Synthetic oligonucleotide
cacagccgcgccgcgccgc

SEQ ID NO: 2234095 - RNA, 19 nt, Artificial Sequence
  Description of Artificial Sequence: Synthetic oligonucleotide
ccaugauacuggcuauuaa

SEQ ID NO: 2234096 - RNA, 19 nt, Artificial Sequence
  Description of Artificial Sequence: Synthetic oligonucleotide
ccggcuggccgcacgggag

SEQ ID NO: 2234097 - RNA, 19 nt, Artificial Sequence
  Description of Artificial Sequence: Synthetic oligonucleotide
gcucuggcccgcgcgcucg

SEQ ID NO: 2234098 - RNA, 19 nt, Artificial Sequence
  Description of Artificial Sequence: Synthetic oligonucleotide
gccugcacagccgcgccgc

SEQ ID NO: 2234099 - RNA, 19 nt, Artificial Sequence
  Description of Artificial Sequence: Synthetic oligonucleotide
guucgccuccugguuggca

SEQ ID NO: 2234100 - RNA, 19 nt, Artificial Sequence
  Description of Artificial Sequence: Synthetic oligonucleotide
cgacauaguuggcauuuca

SEQ ID NO: 2234101 - RNA, 19 nt, Artificial Sequence
  Description of Artificial Sequence: Synthetic oligonucleotide
ucuggcccgcgcgcucgug

SEQ ID NO: 2234102 - RNA, 19 nt, Artificial Sequence
  Description of Artificial Sequence: Synthetic oligonucleotide
gguuggcauccuccuucac

SEQ ID NO: 2234103 - RNA, 19 nt, Artificial Sequence
  Description of Artificial Sequence: Synthetic oligonucleotide
cagaggcucggacgaagcu

SEQ ID NO: 2234104 - RNA, 19 nt, Artificial Sequence
  Description of Artificial Sequence: Synthetic oligonucleotide
gccucgacauaguuggcau

SEQ ID NO: 2234105 - RNA, 19 nt, Artificial Sequence
  Description of Artificial Sequence: Synthetic oligonucleotide
cgaguugaugccuccagcu

SEQ ID NO: 2234106 - RNA, 19 nt, Artificial Sequence
  Description of Artificial Sequence: Synthetic oligonucleotide
ccaaagccccaguuuugga

SEQ ID NO: 2234107 - RNA, 19 nt, Artificial Sequence
  Description of Artificial Sequence: Synthetic oligonucleotide
guaccgcaccgugcagcgc

SEQ ID NO: 2234108 - RNA, 19 nt, Artificial Sequence
  Description of Artificial Sequence: Synthetic oligonucleotide
ggagccccauuggcuuugg

SEQ ID NO: 2234109 - RNA, 19 nt, Artificial Sequence
  Description of Artificial Sequence: Synthetic oligonucleotide
gcacgggagaccacccgac

SEQ ID NO: 2234110 - RNA, 19 nt, Artificial Sequence
  Description of Artificial Sequence: Synthetic oligonucleotide
cagugaaaucaaacucauu

SEQ ID NO: 2234111 - RNA, 19 nt, Artificial Sequence
  Description of Artificial Sequence: Synthetic oligonucleotide
ccagagaguucgccuccug

SEQ ID NO: 2234112 - RNA, 19 nt, Artificial Sequence
  Description of Artificial Sequence: Synthetic oligonucleotide
ggcagaagucagauaaauu

SEQ ID NO: 2234113 - RNA, 19 nt, Artificial Sequence
  Description of Artificial Sequence: Synthetic oligonucleotide
ccgcacgggagaccacccg

SEQ ID NO: 2234114 - RNA, 19 nt, Artificial Sequence
  Description of Artificial Sequence: Synthetic oligonucleotide
cacagcucaggaagcucau

SEQ ID NO: 2234115 - RNA, 19 nt, Artificial Sequence
  Description of Artificial Sequence: Synthetic oligonucleotide
ccccaguuuuggagcggcc

SEQ ID NO: 2234116 - RNA, 19 nt, Artificial Sequence
  Description of Artificial Sequence: Synthetic oligonucleotide
ccgccguaccgcaccgugc

SEQ ID NO: 2234117 - RNA, 19 nt, Artificial Sequence
  Description of Artificial Sequence: Synthetic oligonucleotide
gccguaccgcaccgugcag

SEQ ID NO: 2234118 - RNA, 19 nt, Artificial Sequence
  Description of Artificial Sequence: Synthetic oligonucleotide
ccaguuuuggagcggcccu

SEQ ID NO: 2234119 - RNA, 19 nt, Artificial Sequence
  Description of Artificial Sequence: Synthetic oligonucleotide
ccgaccccaaggcgccugg

SEQ ID NO: 2234120 - RNA, 19 nt, Artificial Sequence
  Description of Artificial Sequence: Synthetic oligonucleotide
gggagaccacccgacccca

SEQ ID NO: 2234121 - RNA, 19 nt, Artificial Sequence
  Description of Artificial Sequence: Synthetic oligonucleotide
ccugcacagccgcgccgcg

SEQ ID NO: 2234122 - RNA, 19 nt, Artificial Sequence
  Description of Artificial Sequence: Synthetic oligonucleotide
cccaugauacuggcuauua

SEQ ID NO: 2234123 - RNA, 19 nt, Artificial Sequence
  Description of Artificial Sequence: Synthetic oligonucleotide
gcccgcgcgcucgugcccg

SEQ ID NO: 2234124 - RNA, 19 nt, Artificial Sequence
  Description of Artificial Sequence: Synthetic oligonucleotide
gccgcacgggagaccaccc

SEQ ID NO: 2234125 - RNA, 19 nt, Artificial Sequence
  Description of Artificial Sequence: Synthetic oligonucleotide
ccuugcagggacagaggcu

SEQ ID NO: 2234126 - RNA, 19 nt, Artificial Sequence
  Description of Artificial Sequence: Synthetic oligonucleotide
gcaccgugcagcgccgauc

SEQ ID NO: 2234127 - RNA, 19 nt, Artificial Sequence
  Description of Artificial Sequence: Synthetic oligonucleotide
cccgccgcuggcuuucaga

SEQ ID NO: 2234128 - RNA, 19 nt, Artificial Sequence
  Description of Artificial Sequence: Synthetic oligonucleotide
ucgugcccgcccgcccgca

SEQ ID NO: 2234129 - RNA, 19 nt, Artificial Sequence
  Description of Artificial Sequence: Synthetic oligonucleotide
gcuggccgcacgggagacc

SEQ ID NO: 2234130 - RNA, 19 nt, Artificial Sequence
  Description of Artificial Sequence: Synthetic oligonucleotide
cgccguaccgcaccgugca

SEQ ID NO: 2234131 - RNA, 19 nt, Artificial Sequence
  Description of Artificial Sequence: Synthetic oligonucleotide
cgcacgggagaccacccga

SEQ ID NO: 2234132 - RNA, 19 nt, Artificial Sequence
  Description of Artificial Sequence: Synthetic oligonucleotide
ggcuggccgcacgggagac

SEQ ID NO: 2234133 - RNA, 19 nt, Artificial Sequence
  Description of Artificial Sequence: Synthetic oligonucleotide
ggcccgcgcgcucgugccc

SEQ ID NO: 2234134 - RNA, 19 nt, Artificial Sequence
  Description of Artificial Sequence: Synthetic oligonucleotide
cggucuaggcccaguucca

SEQ ID NO: 2234135 - RNA, 19 nt, Artificial Sequence
  Description of Artificial Sequence: Synthetic oligonucleotide
cgggguagugcaggauggc

SEQ ID NO: 2234136 - RNA, 19 nt, Artificial Sequence
  Description of Artificial Sequence: Synthetic oligonucleotide
cgccuccugguuggcaucc

SEQ ID NO: 2234137 - RNA, 19 nt, Artificial Sequence
  Description of Artificial Sequence: Synthetic oligonucleotide
gcgccgcgccgccguaccg

SEQ ID NO: 2234138 - RNA, 19 nt, Artificial Sequence
  Description of Artificial Sequence: Synthetic oligonucleotide
gccccaugauacuggcuau

SEQ ID NO: 2234139 - RNA, 19 nt, Artificial Sequence
  Description of Artificial Sequence: Synthetic oligonucleotide
cgaucagcucuggcccgcg

SEQ ID NO: 2234140 - RNA, 19 nt, Artificial Sequence
  Description of Artificial Sequence: Synthetic oligonucleotide
gccgcgccgccguaccgca

SEQ ID NO: 2234141 - RNA, 19 nt, Artificial Sequence
  Description of Artificial Sequence: Synthetic oligonucleotide
ggacagaggcucggacgaa

SEQ ID NO: 2234142 - RNA, 19 nt, Artificial Sequence
  Description of Artificial Sequence: Synthetic oligonucleotide
cauuggcuuuggcuccauu

SEQ ID NO: 2234143 - RNA, 19 nt, Artificial Sequence
  Description of Artificial Sequence: Synthetic oligonucleotide
ccgcagguuggccuggagu

SEQ ID NO: 2234144 - RNA, 19 nt, Artificial Sequence
  Description of Artificial Sequence: Synthetic oligonucleotide
cccgcagcuccggcgccgg

SEQ ID NO: 2234145 - RNA, 19 nt, Artificial Sequence
  Description of Artificial Sequence: Synthetic oligonucleotide
gcgcucgugcccgcccgcc

SEQ ID NO: 2234146 - RNA, 19 nt, Artificial Sequence
  Description of Artificial Sequence: Synthetic oligonucleotide
cccgaccccaaggcgccug

SEQ ID NO: 2234147 - RNA, 19 nt, Artificial Sequence
  Description of Artificial Sequence: Synthetic oligonucleotide
cgcucgugcccgcccgccc

SEQ ID NO: 2234148 - RNA, 19 nt, Artificial Sequence
  Description of Artificial Sequence: Synthetic oligonucleotide
ggagaccacccgaccccaa

SEQ ID NO: 2234149 - RNA, 19 nt, Artificial Sequence
  Description of Artificial Sequence: Synthetic oligonucleotide
ccugcccgggagagaggga

SEQ ID NO: 2234150 - RNA, 19 nt, Artificial Sequence
  Description of Artificial Sequence: Synthetic oligonucleotide
ccccagccucuuggcacgc

SEQ ID NO: 2234151 - RNA, 19 nt, Artificial Sequence
  Description of Artificial Sequence: Synthetic oligonucleotide
ccucgacauaguuggcauu

SEQ ID NO: 2234152 - RNA, 19 nt, Artificial Sequence
  Description of Artificial Sequence: Synthetic oligonucleotide
cgaccccaaggcgccuggg

SEQ ID NO: 2234153 - RNA, 19 nt, Artificial Sequence
  Description of Artificial Sequence: Synthetic oligonucleotide
cccaaggcgccugggcaaa

SEQ ID NO: 2234154 - RNA, 19 nt, Artificial Sequence
  Description of Artificial Sequence: Synthetic oligonucleotide
cugcgggguagugcaggau

SEQ ID NO: 2234155 - RNA, 19 nt, Artificial Sequence
  Description of Artificial Sequence: Synthetic oligonucleotide
ggcggugguaggggagccu

SEQ ID NO: 2234156 - RNA, 19 nt, Artificial Sequence
  Description of Artificial Sequence: Synthetic oligonucleotide
cgcgcucgugcccgcccgc

SEQ ID NO: 2234157 - RNA, 19 nt, Artificial Sequence
  Description of Artificial Sequence: Synthetic oligonucleotide
cccgcgcgcucgugcccgc

SEQ ID NO: 2234158 - RNA, 19 nt, Artificial Sequence
  Description of Artificial Sequence: Synthetic oligonucleotide
cucuggcccgcgcgcucgu

SEQ ID NO: 2234159 - RNA, 19 nt, Artificial Sequence
  Description of Artificial Sequence: Synthetic oligonucleotide
cggcuggccgcacgggaga

SEQ ID NO: 2234160 - RNA, 19 nt, Artificial Sequence
  Description of Artificial Sequence: Synthetic oligonucleotide
ggcucggucuaggcccagu

SEQ ID NO: 2234161 - RNA, 19 nt, Artificial Sequence
  Description of Artificial Sequence: Synthetic oligonucleotide
ccgcccgccgcuggcuuuc

SEQ ID NO: 2234162 - RNA, 19 nt, Artificial Sequence
  Description of Artificial Sequence: Synthetic oligonucleotide
cccgggagagagggaaccu

SEQ ID NO: 2234163 - RNA, 19 nt, Artificial Sequence
  Description of Artificial Sequence: Synthetic oligonucleotide
ccgggagagagggaaccuu

SEQ ID NO: 2234164 - RNA, 19 nt, Artificial Sequence
  Description of Artificial Sequence: Synthetic oligonucleotide
ggcccugccuccgcagguu

SEQ ID NO: 2234165 - RNA, 19 nt, Artificial Sequence
  Description of Artificial Sequence: Synthetic oligonucleotide
ccccaugauacuggcuauu

SEQ ID NO: 2234166 - RNA, 19 nt, Artificial Sequence
  Description of Artificial Sequence: Synthetic oligonucleotide
ccgcgcgcucgugcccgcc

SEQ ID NO: 2234167 - RNA, 19 nt, Artificial Sequence
  Description of Artificial Sequence: Synthetic oligonucleotide
ccgcaccgugcagcgccga

SEQ ID NO: 2234168 - RNA, 19 nt, Artificial Sequence
  Description of Artificial Sequence: Synthetic oligonucleotide
ccgcagcuccggcgccgga

SEQ ID NO: 2234169 - RNA, 19 nt, Artificial Sequence
  Description of Artificial Sequence: Synthetic oligonucleotide
cgcccgccgcuggcuuuca

SEQ ID NO: 2234170 - RNA, 19 nt, Artificial Sequence
  Description of Artificial Sequence: Synthetic oligonucleotide
aaugacaucaggcagcaug

SEQ ID NO: 2234171 - RNA, 19 nt, Artificial Sequence
  Description of Artificial Sequence: Synthetic oligonucleotide
aguguucugagcuaggccc

SEQ ID NO: 2234172 - RNA, 19 nt, Artificial Sequence
  Description of Artificial Sequence: Synthetic oligonucleotide
  modified_base (9)..(9): a, c, u, g, unknown or other
uagauuacncuucaugagg

SEQ ID NO: 2234173 - RNA, 19 nt, Artificial Sequence
  Description of Artificial Sequence: Synthetic oligonucleotide
  modified_base (10)..(10): a, c, u, g, unknown or other
uuagauuacncuucaugag

SEQ ID NO: 2234174 - RNA, 19 nt, Artificial Sequence
  Description of Artificial Sequence: Synthetic oligonucleotide
  modified_base (11)..(11): a, c, u, g, unknown or other
auuagauuacncuucauga

SEQ ID NO: 2234175 - RNA, 19 nt, Artificial Sequence
  Description of Artificial Sequence: Synthetic oligonucleotide
agagcuuucuuauucugcc

SEQ ID NO: 2234176 - RNA, 19 nt, Artificial Sequence
  Description of Artificial Sequence: Synthetic oligonucleotide
uuagggugcguucaggugg

SEQ ID NO: 2234177 - RNA, 19 nt, Artificial Sequence
  Description of Artificial Sequence: Synthetic oligonucleotide
cuuggugaagaaaacauag

SEQ ID NO: 2234178 - RNA, 19 nt, Artificial Sequence
  Description of Artificial Sequence: Synthetic oligonucleotide
  modified_base (12)..(12): a, c, u, g, unknown or other
gauuagauuacncuucaug

SEQ ID NO: 2234179 - RNA, 19 nt, Artificial Sequence
  Description of Artificial Sequence: Synthetic oligonucleotide
ugucagagcaaccugagcu

SEQ ID NO: 2234180 - RNA, 19 nt, Artificial Sequence
  Description of Artificial Sequence: Synthetic oligonucleotide
agaacagcuguucagugcg

SEQ ID NO: 2234181 - RNA, 19 nt, Artificial Sequence
  Description of Artificial Sequence: Synthetic oligonucleotide
aagaucccgugccacaugc

SEQ ID NO: 2234182 - RNA, 19 nt, Artificial Sequence
  Description of Artificial Sequence: Synthetic oligonucleotide
ucaucgaugggauacagcu

SEQ ID NO: 2234183 - RNA, 19 nt, Artificial Sequence
  Description of Artificial Sequence: Synthetic oligonucleotide
aaacuugaccuguucuggc

SEQ ID NO: 2234184 - RNA, 19 nt, Artificial Sequence
  Description of Artificial Sequence: Synthetic oligonucleotide
aagaagaugggcucgggug

SEQ ID NO: 2234185 - RNA, 19 nt, Artificial Sequence
  Description of Artificial Sequence: Synthetic oligonucleotide
uugaagaguagcaagccca

SEQ ID NO: 2234186 - RNA, 19 nt, Artificial Sequence
  Description of Artificial Sequence: Synthetic oligonucleotide
aggacaaaagaucccgugc

SEQ ID NO: 2234187 - RNA, 19 nt, Artificial Sequence
  Description of Artificial Sequence: Synthetic oligonucleotide
augggauacagcuugaaga

SEQ ID NO: 2234188 - RNA, 19 nt, Artificial Sequence
  Description of Artificial Sequence: Synthetic oligonucleotide
gcaaagucaagacugaggg

SEQ ID NO: 2234189 - RNA, 19 nt, Artificial Sequence
  Description of Artificial Sequence: Synthetic oligonucleotide
guaagugacgauuagauua

SEQ ID NO: 2234190 - RNA, 19 nt, Artificial Sequence
  Description of Artificial Sequence: Synthetic oligonucleotide
guaguaagaaagcagcagc

SEQ ID NO: 2234191 - RNA, 19 nt, Artificial Sequence
  Description of Artificial Sequence: Synthetic oligonucleotide
aaccgggacgccgagaugc

SEQ ID NO: 2234192 - RNA, 19 nt, Artificial Sequence
  Description of Artificial Sequence: Synthetic oligonucleotide
aaagucaagacugagggua

SEQ ID NO: 2234193 - RNA, 19 nt, Artificial Sequence
  Description of Artificial Sequence: Synthetic oligonucleotide
aaggaaaagaagaugggcu

SEQ ID NO: 2234194 - RNA, 19 nt, Artificial Sequence
  Description of Artificial Sequence: Synthetic oligonucleotide
  modified_base (2)..(2): a, c, u, g, unknown or other
cncuucaugagguugcugc

SEQ ID NO: 2234195 - RNA, 19 nt, Artificial Sequence
  Description of Artificial Sequence: Synthetic oligonucleotide
uagguaacauggcaggucc

SEQ ID NO: 2234196 - RNA, 19 nt, Artificial Sequence
  Description of Artificial Sequence: Synthetic oligonucleotide
  modified_base (5)..(5): a, c, u, g, unknown or other
uuacncuucaugagguugc

SEQ ID NO: 2234197 - RNA, 19 nt, Artificial Sequence
  Description of Artificial Sequence: Synthetic oligonucleotide
aucgaugggauacagcuug

SEQ ID NO: 2234198 - RNA, 19 nt, Artificial Sequence
  Description of Artificial Sequence: Synthetic oligonucleotide
aacauggcagguccuagag

SEQ ID NO: 2234199 - RNA, 19 nt, Artificial Sequence
  Description of Artificial Sequence: Synthetic oligonucleotide
gauguagguaacauggcag

SEQ ID NO: 2234200 - RNA, 19 nt, Artificial Sequence
  Description of Artificial Sequence: Synthetic oligonucleotide
cucggcaaagucaagacug

SEQ ID NO: 2234201 - RNA, 19 nt, Artificial Sequence
  Description of Artificial Sequence: Synthetic oligonucleotide
uucagugcgaggacaaaag

SEQ ID NO: 2234202 - RNA, 19 nt, Artificial Sequence
  Description of Artificial Sequence: Synthetic oligonucleotide
  modified_base (16)..(16): a, c, u, g, unknown or other
ugacgauuagauuacncuu

SEQ ID NO: 2234203 - RNA, 19 nt, Artificial Sequence
  Description of Artificial Sequence: Synthetic oligonucleotide
uaagugacgauuagauuac

SEQ ID NO: 2234204 - RNA, 19 nt, Artificial Sequence
  Description of Artificial Sequence: Synthetic oligonucleotide
ugaggguagagacacccag

SEQ ID NO: 2234205 - RNA, 19 nt, Artificial Sequence
  Description of Artificial Sequence: Synthetic oligonucleotide
acugaggguagagacaccc

SEQ ID NO: 2234206 - RNA, 19 nt, Artificial Sequence
  Description of Artificial Sequence: Synthetic oligonucleotide
caagacugaggguagagac

SEQ ID NO: 2234207 - RNA, 19 nt, Artificial Sequence
  Description of Artificial Sequence: Synthetic oligonucleotide
gaugaugggagccaugguc

SEQ ID NO: 2234208 - RNA, 19 nt, Artificial Sequence
  Description of Artificial Sequence: Synthetic oligonucleotide
uuggcauauucacaguagc

SEQ ID NO: 2234209 - RNA, 19 nt, Artificial Sequence
  Description of Artificial Sequence: Synthetic oligonucleotide
uacagcuugaagaguagca

SEQ ID NO: 2234210 - RNA, 19 nt, Artificial Sequence
  Description of Artificial Sequence: Synthetic oligonucleotide
agacugaggguagagacac

SEQ ID NO: 2234211 - RNA, 19 nt, Artificial Sequence
  Description of Artificial Sequence: Synthetic oligonucleotide
cuugacacaggaagaacag

SEQ ID NO: 2234212 - RNA, 19 nt, Artificial Sequence
  Description of Artificial Sequence: Synthetic oligonucleotide
ucucguagagccugcagag

SEQ ID NO: 2234213 - RNA, 19 nt, Artificial Sequence
  Description of Artificial Sequence: Synthetic oligonucleotide
agaaugaggaugaugggag

SEQ ID NO: 2234214 - RNA, 19 nt, Artificial Sequence
  Description of Artificial Sequence: Synthetic oligonucleotide
uccuagagaaugcuggcca

SEQ ID NO: 2234215 - RNA, 19 nt, Artificial Sequence
  Description of Artificial Sequence: Synthetic oligonucleotide
gaugggauacagcuugaag

SEQ ID NO: 2234216 - RNA, 19 nt, Artificial Sequence
  Description of Artificial Sequence: Synthetic oligonucleotide
agugcgaggacaaaagauc

SEQ ID NO: 2234217 - RNA, 19 nt, Artificial Sequence
  Description of Artificial Sequence: Synthetic oligonucleotide
guaagaaagcagcagcuac

SEQ ID NO: 2234218 - RNA, 19 nt, Artificial Sequence
  Description of Artificial Sequence: Synthetic oligonucleotide
aaacuuggugaagaaaaca

SEQ ID NO: 2234219 - RNA, 19 nt, Artificial Sequence
  Description of Artificial Sequence: Synthetic oligonucleotide
aaagaagaugggcucgggu

SEQ ID NO: 2234220 - RNA, 19 nt, Artificial Sequence
  Description of Artificial Sequence: Synthetic oligonucleotide
aagaguagcaagcccagua

SEQ ID NO: 2234221 - RNA, 19 nt, Artificial Sequence
  Description of Artificial Sequence: Synthetic oligonucleotide
  modified_base (14)..(14): a, c, u, g, unknown or other
acgauuagauuacncuuca

SEQ ID NO: 2234222 - RNA, 19 nt, Artificial Sequence
  Description of Artificial Sequence: Synthetic oligonucleotide
uguggagucugugucagag

SEQ ID NO: 2234223 - RNA, 19 nt, Artificial Sequence
  Description of Artificial Sequence: Synthetic oligonucleotide
auauucacaguagcagccc

SEQ ID NO: 2234224 - RNA, 19 nt, Artificial Sequence
  Description of Artificial Sequence: Synthetic oligonucleotide
uagcaagcccaguagaaug

SEQ ID NO: 2234225 - RNA, 19 nt, Artificial Sequence
  Description of Artificial Sequence: Synthetic oligonucleotide
uuucuuauucugccgucgc

SEQ ID NO: 2234226 - RNA, 19 nt, Artificial Sequence
  Description of Artificial Sequence: Synthetic oligonucleotide
ucaguguaaacuugaccug

SEQ ID NO: 2234227 - RNA, 19 nt, Artificial Sequence
  Description of Artificial Sequence: Synthetic oligonucleotide
aggaagaacagcuguucag

SEQ ID NO: 2234228 - RNA, 19 nt, Artificial Sequence
  Description of Artificial Sequence: Synthetic oligonucleotide
  modified_base (6)..(6): a, c, u, g, unknown or other
auuacncuucaugagguug

SEQ ID NO: 2234229 - RNA, 19 nt, Artificial Sequence
  Description of Artificial Sequence: Synthetic oligonucleotide
ucugguacucggcaaaguc

SEQ ID NO: 2234230 - RNA, 19 nt, Artificial Sequence
  Description of Artificial Sequence: Synthetic oligonucleotide
uugguuccugucuugacac

SEQ ID NO: 2234231 - RNA, 19 nt, Artificial Sequence
  Description of Artificial Sequence: Synthetic oligonucleotide
uuggccaugacccgcgggc

SEQ ID NO: 2234232 - RNA, 19 nt, Artificial Sequence
  Description of Artificial Sequence: Synthetic oligonucleotide
uaccuggugcuccaggugc

SEQ ID NO: 2234233 - RNA, 19 nt, Artificial Sequence
  Description of Artificial Sequence: Synthetic oligonucleotide
cuuugguuccuucuucacc

SEQ ID NO: 2234234 - RNA, 19 nt, Artificial Sequence
  Description of Artificial Sequence: Synthetic oligonucleotide
aacuugaccuguucuggcu

SEQ ID NO: 2234235 - RNA, 19 nt, Artificial Sequence
  Description of Artificial Sequence: Synthetic oligonucleotide
acaaaagaucccgugccac

SEQ ID NO: 2234236 - RNA, 19 nt, Artificial Sequence
  Description of Artificial Sequence: Synthetic oligonucleotide
uggcauauucacaguagca

SEQ ID NO: 2234237 - RNA, 19 nt, Artificial Sequence
  Description of Artificial Sequence: Synthetic oligonucleotide
accuguucuggcugggagc

SEQ ID NO: 2234238 - RNA, 19 nt, Artificial Sequence
  Description of Artificial Sequence: Synthetic oligonucleotide
cuggcuuggaggaugccgg

SEQ ID NO: 2234239 - RNA, 19 nt, Artificial Sequence
  Description of Artificial Sequence: Synthetic oligonucleotide
cuuugugugguggauguag

SEQ ID NO: 2234240 - RNA, 19 nt, Artificial Sequence
  Description of Artificial Sequence: Synthetic oligonucleotide
ugguacucggcaaagucaa

SEQ ID NO: 2234241 - RNA, 19 nt, Artificial Sequence
  Description of Artificial Sequence: Synthetic oligonucleotide
caaacuuggugaagaaaac

SEQ ID NO: 2234242 - RNA, 19 nt, Artificial Sequence
  Description of Artificial Sequence: Synthetic oligonucleotide
aggagggcuacagagcggc

SEQ ID NO: 2234243 - RNA, 19 nt, Artificial Sequence
  Description of Artificial Sequence: Synthetic oligonucleotide
cugagcuaggcccagucag

SEQ ID NO: 2234244 - RNA, 19 nt, Artificial Sequence
  Description of Artificial Sequence: Synthetic oligonucleotide
agguccuagagaaugcugg

SEQ ID NO: 2234245 - RNA, 19 nt, Artificial Sequence
  Description of Artificial Sequence: Synthetic oligonucleotide
aggguagagacacccagug

SEQ ID NO: 2234246 - RNA, 19 nt, Artificial Sequence
  Description of Artificial Sequence: Synthetic oligonucleotide
  modified_base (18)..(18): a, c, u, g, unknown or other
agugacgauuagauuacnc

SEQ ID NO: 2234247 - RNA, 19 nt, Artificial Sequence
  Description of Artificial Sequence: Synthetic oligonucleotide
uuaguguucugagcuaggc

SEQ ID NO: 2234248 - RNA, 19 nt, Artificial Sequence
  Description of Artificial Sequence: Synthetic oligonucleotide
ugagguugcugcuucuucu

SEQ ID NO: 2234249 - RNA, 19 nt, Artificial Sequence
  Description of Artificial Sequence: Synthetic oligonucleotide
ucagugcgaggacaaaaga

SEQ ID NO: 2234250 - RNA, 19 nt, Artificial Sequence
  Description of Artificial Sequence: Synthetic oligonucleotide
agcuuucuuauucugccgu

SEQ ID NO: 2234251 - RNA, 19 nt, Artificial Sequence
  Description of Artificial Sequence: Synthetic oligonucleotide
cagagcuuucuuauucugc

SEQ ID NO: 2234252 - RNA, 19 nt, Artificial Sequence
  Description of Artificial Sequence: Synthetic oligonucleotide
cuuucuuauucugccgucg

SEQ ID NO: 2234253 - RNA, 19 nt, Artificial Sequence
  Description of Artificial Sequence: Synthetic oligonucleotide
agcgcccucuccuuuggcc

SEQ ID NO: 2234254 - RNA, 19 nt, Artificial Sequence
  Description of Artificial Sequence: Synthetic oligonucleotide
ugacccgcgggccacgccg

SEQ ID NO: 2234255 - RNA, 19 nt, Artificial Sequence
  Description of Artificial Sequence: Synthetic oligonucleotide
  modified_base (15)..(15): a, c, u, g, unknown or other
gacgauuagauuacncuuc

SEQ ID NO: 2234256 - RNA, 19 nt, Artificial Sequence
  Description of Artificial Sequence: Synthetic oligonucleotide
aguuagggugcguucaggu

SEQ ID NO: 2234257 - RNA, 19 nt, Artificial Sequence
  Description of Artificial Sequence: Synthetic oligonucleotide
ugcuuugugugguggaugu

SEQ ID NO: 2234258 - RNA, 19 nt, Artificial Sequence
  Description of Artificial Sequence: Synthetic oligonucleotide
ggacaaaagaucccgugcc

SEQ ID NO: 2234259 - RNA, 19 nt, Artificial Sequence
  Description of Artificial Sequence: Synthetic oligonucleotide
uucaucgaugggauacagc

SEQ ID NO: 2234260 - RNA, 19 nt, Artificial Sequence
  Description of Artificial Sequence: Synthetic oligonucleotide
cagguggaagucaucaaug

SEQ ID NO: 2234261 - RNA, 19 nt, Artificial Sequence
  Description of Artificial Sequence: Synthetic oligonucleotide
cauuaguguucugagcuag

SEQ ID NO: 2234262 - RNA, 19 nt, Artificial Sequence
  Description of Artificial Sequence: Synthetic oligonucleotide
cagcuugaagaguagcaag

SEQ ID NO: 2234263 - RNA, 19 nt, Artificial Sequence
  Description of Artificial Sequence: Synthetic oligonucleotide
uuccugucuugacacagga

SEQ ID NO: 2234264 - RNA, 19 nt, Artificial Sequence
  Description of Artificial Sequence: Synthetic oligonucleotide
cuacacugacaccagcggc

SEQ ID NO: 2234265 - RNA, 19 nt, Artificial Sequence
  Description of Artificial Sequence: Synthetic oligonucleotide
ugcgaggacaaaagauccc

SEQ ID NO: 2234266 - RNA, 19 nt, Artificial Sequence
  Description of Artificial Sequence: Synthetic oligonucleotide
acuggcuuggaggaugccg

SEQ ID NO: 2234267 - RNA, 19 nt, Artificial Sequence
  Description of Artificial Sequence: Synthetic oligonucleotide
ggcuucgucucguagagcc

SEQ ID NO: 2234268 - RNA, 19 nt, Artificial Sequence
  Description of Artificial Sequence: Synthetic oligonucleotide
cacuccagaggcaaacuug

SEQ ID NO: 2234269 - RNA, 19 nt, Artificial Sequence
  Description of Artificial Sequence: Synthetic oligonucleotide
  modified_base (8)..(8): a, c, u, g, unknown or other
agauuacncuucaugaggu

SEQ ID NO: 2234270 - RNA, 19 nt, Artificial Sequence
  Description of Artificial Sequence: Synthetic oligonucleotide
uguucugccggcccgcgcu

SEQ ID NO: 2234271 - RNA, 19 nt, Artificial Sequence
  Description of Artificial Sequence: Synthetic oligonucleotide
ucuggaaccgggacgccga

SEQ ID NO: 2234272 - RNA, 19 nt, Artificial Sequence
  Description of Artificial Sequence: Synthetic oligonucleotide
gauacagcuugaagaguag

SEQ ID NO: 2234273 - RNA, 19 nt, Artificial Sequence
  Description of Artificial Sequence: Synthetic oligonucleotide
aacagcuguucagugcgag

SEQ ID NO: 2234274 - RNA, 19 nt, Artificial Sequence
  Description of Artificial Sequence: Synthetic oligonucleotide
ccagugacacuccagaggc

SEQ ID NO: 2234275 - RNA, 19 nt, Artificial Sequence
  Description of Artificial Sequence: Synthetic oligonucleotide
agguggaagucaucaauga

SEQ ID NO: 2234276 - RNA, 19 nt, Artificial Sequence
  Description of Artificial Sequence: Synthetic oligonucleotide
gacgccgagaugcugucug

SEQ ID NO: 2234277 - RNA, 19 nt, Artificial Sequence
  Description of Artificial Sequence: Synthetic oligonucleotide
gucagagcaaccugagcug

SEQ ID NO: 2234278 - RNA, 19 nt, Artificial Sequence
  Description of Artificial Sequence: Synthetic oligonucleotide
agcggcuauggccaccacg

SEQ ID NO: 2234279 - RNA, 19 nt, Artificial Sequence
  Description of Artificial Sequence: Synthetic oligonucleotide
aagucaagacugaggguag

SEQ ID NO: 2234280 - RNA, 19 nt, Artificial Sequence
  Description of Artificial Sequence: Synthetic oligonucleotide
ucugagcuaggcccaguca

SEQ ID NO: 2234281 - RNA, 19 nt, Artificial Sequence
  Description of Artificial Sequence: Synthetic oligonucleotide
uucuuauucugccgucgcu

SEQ ID NO: 2234282 - RNA, 19 nt, Artificial Sequence
  Description of Artificial Sequence: Synthetic oligonucleotide
uaacauggcagguccuaga

SEQ ID NO: 2234283 - RNA, 19 nt, Artificial Sequence
  Description of Artificial Sequence: Synthetic oligonucleotide
gacaaaagaucccgugcca

SEQ ID NO: 2234284 - RNA, 19 nt, Artificial Sequence
  Description of Artificial Sequence: Synthetic oligonucleotide
cuuauucugccgucgcuuc

SEQ ID NO: 2234285 - RNA, 19 nt, Artificial Sequence
  Description of Artificial Sequence: Synthetic oligonucleotide
cugcagagcuuucuuauuc

SEQ ID NO: 2234286 - RNA, 19 nt, Artificial Sequence
  Description of Artificial Sequence: Synthetic oligonucleotide
guuagggugcguucaggug

SEQ ID NO: 2234287 - RNA, 19 nt, Artificial Sequence
  Description of Artificial Sequence: Synthetic oligonucleotide
  modified_base (17)..(17): a, c, u, g, unknown or other
gugacgauuagauuacncu

SEQ ID NO: 2234288 - RNA, 19 nt, Artificial Sequence
  Description of Artificial Sequence: Synthetic oligonucleotide
ucggcaaagucaagacuga

SEQ ID NO: 2234289 - RNA, 19 nt, Artificial Sequence
  Description of Artificial Sequence: Synthetic oligonucleotide
cuggcuucgucucguagag

SEQ ID NO: 2234290 - RNA, 19 nt, Artificial Sequence
  Description of Artificial Sequence: Synthetic oligonucleotide
ugugguggauguagguaac

SEQ ID NO: 2234291 - RNA, 19 nt, Artificial Sequence
  Description of Artificial Sequence: Synthetic oligonucleotide
agcuguucagugcgaggac

SEQ ID NO: 2234292 - RNA, 19 nt, Artificial Sequence
  Description of Artificial Sequence: Synthetic oligonucleotide
uguucuggcugggagcacc

SEQ ID NO: 2234293 - RNA, 19 nt, Artificial Sequence
  Description of Artificial Sequence: Synthetic oligonucleotide
aagacugaggguagagaca

SEQ ID NO: 2234294 - RNA, 19 nt, Artificial Sequence
  Description of Artificial Sequence: Synthetic oligonucleotide
gugcgaggacaaaagaucc

SEQ ID NO: 2234295 - RNA, 19 nt, Artificial Sequence
  Description of Artificial Sequence: Synthetic oligonucleotide
ugagcuaggcccagucagu

SEQ ID NO: 2234296 - RNA, 19 nt, Artificial Sequence
  Description of Artificial Sequence: Synthetic oligonucleotide
ggcaaagucaagacugagg

SEQ ID NO: 2234297 - RNA, 19 nt, Artificial Sequence
  Description of Artificial Sequence: Synthetic oligonucleotide
cuugguuccugucuugaca

SEQ ID NO: 2234298 - RNA, 19 nt, Artificial Sequence
  Description of Artificial Sequence: Synthetic oligonucleotide
ucgcuucucuucaucgaug

SEQ ID NO: 2234299 - RNA, 19 nt, Artificial Sequence
  Description of Artificial Sequence: Synthetic oligonucleotide
acucggcaaagucaagacu

SEQ ID NO: 2234300 - RNA, 19 nt, Artificial Sequence
  Description of Artificial Sequence: Synthetic oligonucleotide
gaguagcaagcccaguaga

SEQ ID NO: 2234301 - RNA, 19 nt, Artificial Sequence
  Description of Artificial Sequence: Synthetic oligonucleotide
ucuuauucugccgucgcuu

SEQ ID NO: 2234302 - RNA, 19 nt, Artificial Sequence
  Description of Artificial Sequence: Synthetic oligonucleotide
uagagacacccagugacac

SEQ ID NO: 2234303 - RNA, 19 nt, Artificial Sequence
  Description of Artificial Sequence: Synthetic oligonucleotide
uucugagcuaggcccaguc

SEQ ID NO: 2234304 - RNA, 19 nt, Artificial Sequence
  Description of Artificial Sequence: Synthetic oligonucleotide
gguggauguagguaacaug

SEQ ID NO: 2234305 - RNA, 19 nt, Artificial Sequence
  Description of Artificial Sequence: Synthetic oligonucleotide
auuaguguucugagcuagg

SEQ ID NO: 2234306 - RNA, 19 nt, Artificial Sequence
  Description of Artificial Sequence: Synthetic oligonucleotide
gcacagauguccugggccg

SEQ ID NO: 2234307 - RNA, 19 nt, Artificial Sequence
  Description of Artificial Sequence: Synthetic oligonucleotide
gugugguggauguagguaa

SEQ ID NO: 2234308 - RNA, 19 nt, Artificial Sequence
  Description of Artificial Sequence: Synthetic oligonucleotide
ugugugguggauguaggua

SEQ ID NO: 2234309 - RNA, 19 nt, Artificial Sequence
  Description of Artificial Sequence: Synthetic oligonucleotide
ggauguagguaacauggca

SEQ ID NO: 2234310 - RNA, 19 nt, Artificial Sequence
  Description of Artificial Sequence: Synthetic oligonucleotide
cugguacucggcaaaguca

SEQ ID NO: 2234311 - RNA, 19 nt, Artificial Sequence
  Description of Artificial Sequence: Synthetic oligonucleotide
accuggaccggccggucac

SEQ ID NO: 2234312 - RNA, 19 nt, Artificial Sequence
  Description of Artificial Sequence: Synthetic oligonucleotide
agugacacuccagaggcaa

SEQ ID NO: 2234313 - RNA, 19 nt, Artificial Sequence
  Description of Artificial Sequence: Synthetic oligonucleotide
guaacauggcagguccuag

SEQ ID NO: 2234314 - RNA, 19 nt, Artificial Sequence
  Description of Artificial Sequence: Synthetic oligonucleotide
acagcuugaagaguagcaa

SEQ ID NO: 2234315 - RNA, 19 nt, Artificial Sequence
  Description of Artificial Sequence: Synthetic oligonucleotide
uggaggaugccggugggga

SEQ ID NO: 2234316 - RNA, 19 nt, Artificial Sequence
  Description of Artificial Sequence: Synthetic oligonucleotide
gcgaggacaaaagaucccg

SEQ ID NO: 2234317 - RNA, 19 nt, Artificial Sequence
  Description of Artificial Sequence: Synthetic oligonucleotide
ugcuggcuucgucucguag

SEQ ID NO: 2234318 - RNA, 19 nt, Artificial Sequence
  Description of Artificial Sequence: Synthetic oligonucleotide
cacgccgucuggaaccggg

SEQ ID NO: 2234319 - RNA, 19 nt, Artificial Sequence
  Description of Artificial Sequence: Synthetic oligonucleotide
acccagugacacuccagag

SEQ ID NO: 2234320 - RNA, 19 nt, Artificial Sequence
  Description of Artificial Sequence: Synthetic oligonucleotide
uagggugcguucaggugga

SEQ ID NO: 2234321 - RNA, 19 nt, Artificial Sequence
  Description of Artificial Sequence: Synthetic oligonucleotide
cuagagaaugcuggccagc

SEQ ID NO: 2234322 - RNA, 19 nt, Artificial Sequence
  Description of Artificial Sequence: Synthetic oligonucleotide
gaguuagggugcguucagg

SEQ ID NO: 2234323 - RNA, 19 nt, Artificial Sequence
  Description of Artificial Sequence: Synthetic oligonucleotide
gucaagacugaggguagag

SEQ ID NO: 2234324 - RNA, 19 nt, Artificial Sequence
  Description of Artificial Sequence: Synthetic oligonucleotide
cugugucagagcaaccuga

SEQ ID NO: 2234325 - RNA, 19 nt, Artificial Sequence
  Description of Artificial Sequence: Synthetic oligonucleotide
gccgaggggaguuagggug

SEQ ID NO: 2234326 - RNA, 19 nt, Artificial Sequence
  Description of Artificial Sequence: Synthetic oligonucleotide
aguaagaaagcagcagcua

SEQ ID NO: 2234327 - RNA, 19 nt, Artificial Sequence
  Description of Artificial Sequence: Synthetic oligonucleotide
acugacaccagcggcuaug

SEQ ID NO: 2234328 - RNA, 19 nt, Artificial Sequence
  Description of Artificial Sequence: Synthetic oligonucleotide
guagguaacauggcagguc

SEQ ID NO: 2234329 - RNA, 19 nt, Artificial Sequence
  Description of Artificial Sequence: Synthetic oligonucleotide
cuucgucucguagagccug

SEQ ID NO: 2234330 - RNA, 19 nt, Artificial Sequence
  Description of Artificial Sequence: Synthetic oligonucleotide
gugccgaggggaguuaggg

SEQ ID NO: 2234331 - RNA, 19 nt, Artificial Sequence
  Description of Artificial Sequence: Synthetic oligonucleotide
acaccagcggcuauggcca

SEQ ID NO: 2234332 - RNA, 19 nt, Artificial Sequence
  Description of Artificial Sequence: Synthetic oligonucleotide
gcuauggccaccacguaag

SEQ ID NO: 2234333 - RNA, 19 nt, Artificial Sequence
  Description of Artificial Sequence: Synthetic oligonucleotide
aguagcaagcccaguagaa

SEQ ID NO: 2234334 - RNA, 19 nt, Artificial Sequence
  Description of Artificial Sequence: Synthetic oligonucleotide
aucccgugccacaugcuac

SEQ ID NO: 2234335 - RNA, 19 nt, Artificial Sequence
  Description of Artificial Sequence: Synthetic oligonucleotide
uucgucucguagagccugc

SEQ ID NO: 2234336 - RNA, 19 nt, Artificial Sequence
  Description of Artificial Sequence: Synthetic oligonucleotide
guacucggcaaagucaaga

SEQ ID NO: 2234337 - RNA, 19 nt, Artificial Sequence
  Description of Artificial Sequence: Synthetic oligonucleotide
cagguccuagagaaugcug

SEQ ID NO: 2234338 - RNA, 19 nt, Artificial Sequence
  Description of Artificial Sequence: Synthetic oligonucleotide
cuucaucgaugggauacag

SEQ ID NO: 2234339 - RNA, 19 nt, Artificial Sequence
  Description of Artificial Sequence: Synthetic oligonucleotide
ugcguucagguggaaguca

SEQ ID NO: 2234340 - RNA, 19 nt, Artificial Sequence
  Description of Artificial Sequence: Synthetic oligonucleotide
ucgaugggauacagcuuga

SEQ ID NO: 2234341 - RNA, 19 nt, Artificial Sequence
  Description of Artificial Sequence: Synthetic oligonucleotide
acauggcagguccuagaga

SEQ ID NO: 2234342 - RNA, 19 nt, Artificial Sequence
  Description of Artificial Sequence: Synthetic oligonucleotide
cuccuuuggccaugacccg

SEQ ID NO: 2234343 - RNA, 19 nt, Artificial Sequence
  Description of Artificial Sequence: Synthetic oligonucleotide
ugguggauguagguaacau

SEQ ID NO: 2234344 - RNA, 19 nt, Artificial Sequence
  Description of Artificial Sequence: Synthetic oligonucleotide
  modified_base (4)..(4): a, c, u, g, unknown or other
uacncuucaugagguugcu

SEQ ID NO: 2234345 - RNA, 19 nt, Artificial Sequence
  Description of Artificial Sequence: Synthetic oligonucleotide
gaugccgguggggagcagc

SEQ ID NO: 2234346 - RNA, 19 nt, Artificial Sequence
  Description of Artificial Sequence: Synthetic oligonucleotide
uccaggugcuuuguguggu

SEQ ID NO: 2234347 - RNA, 19 nt, Artificial Sequence
  Description of Artificial Sequence: Synthetic oligonucleotide
cgcggaaccgcucucagcg

SEQ ID NO: 2234348 - RNA, 19 nt, Artificial Sequence
  Description of Artificial Sequence: Synthetic oligonucleotide
  modified_base (19)..(19): a, c, u, g, unknown or other
aagugacgauuagauuacn

SEQ ID NO: 2234349 - RNA, 19 nt, Artificial Sequence
  Description of Artificial Sequence: Synthetic oligonucleotide
gaucccgugccacaugcua

SEQ ID NO: 2234350 - RNA, 19 nt, Artificial Sequence
  Description of Artificial Sequence: Synthetic oligonucleotide
gcuugaagaguagcaagcc

SEQ ID NO: 2234351 - RNA, 19 nt, Artificial Sequence
  Description of Artificial Sequence: Synthetic oligonucleotide
aagaugggcucgggugccg

SEQ ID NO: 2234352 - RNA, 19 nt, Artificial Sequence
  Description of Artificial Sequence: Synthetic oligonucleotide
agcaagcccaguagaauga

SEQ ID NO: 2234353 - RNA, 19 nt, Artificial Sequence
  Description of Artificial Sequence: Synthetic oligonucleotide
ucaugagguugcugcuucu

SEQ ID NO: 2234354 - RNA, 19 nt, Artificial Sequence
  Description of Artificial Sequence: Synthetic oligonucleotide
guccuagagaaugcuggcc

SEQ ID NO: 2234355 - RNA, 19 nt, Artificial Sequence
  Description of Artificial Sequence: Synthetic oligonucleotide
gucuggaaccgggacgccg

SEQ ID NO: 2234356 - RNA, 19 nt, Artificial Sequence
  Description of Artificial Sequence: Synthetic oligonucleotide
uguguucugccggcccgcg

SEQ ID NO: 2234357 - RNA, 19 nt, Artificial Sequence
  Description of Artificial Sequence: Synthetic oligonucleotide
gucuguguucugccggccc

SEQ ID NO: 2234358 - RNA, 19 nt, Artificial Sequence
  Description of Artificial Sequence: Synthetic oligonucleotide
gugucagagcaaccugagc

SEQ ID NO: 2234359 - RNA, 19 nt, Artificial Sequence
  Description of Artificial Sequence: Synthetic oligonucleotide
cccaguagaaugaggauga

SEQ ID NO: 2234360 - RNA, 19 nt, Artificial Sequence
  Description of Artificial Sequence: Synthetic oligonucleotide
accccugugucugguacuc

SEQ ID NO: 2234361 - RNA, 19 nt, Artificial Sequence
  Description of Artificial Sequence: Synthetic oligonucleotide
uggaccggccggucacugg

SEQ ID NO: 2234362 - RNA, 19 nt, Artificial Sequence
  Description of Artificial Sequence: Synthetic oligonucleotide
ggaguuagggugcguucag

SEQ ID NO: 2234363 - RNA, 19 nt, Artificial Sequence
  Description of Artificial Sequence: Synthetic oligonucleotide
augccgguggggagcagcc

SEQ ID NO: 2234364 - RNA, 19 nt, Artificial Sequence
  Description of Artificial Sequence: Synthetic oligonucleotide
ggauacagcuugaagagua

SEQ ID NO: 2234365 - RNA, 19 nt, Artificial Sequence
  Description of Artificial Sequence: Synthetic oligonucleotide
gaugggcucgggugccgag

SEQ ID NO: 2234366 - RNA, 19 nt, Artificial Sequence
  Description of Artificial Sequence: Synthetic oligonucleotide
ugaggaugaugggagccau

SEQ ID NO: 2234367 - RNA, 19 nt, Artificial Sequence
  Description of Artificial Sequence: Synthetic oligonucleotide
agagccugcagagcuuucu

SEQ ID NO: 2234368 - RNA, 19 nt, Artificial Sequence
  Description of Artificial Sequence: Synthetic oligonucleotide
guagagacacccagugaca

SEQ ID NO: 2234369 - RNA, 19 nt, Artificial Sequence
  Description of Artificial Sequence: Synthetic oligonucleotide
gccgucuggaaccgggacg

SEQ ID NO: 2234370 - RNA, 19 nt, Artificial Sequence
  Description of Artificial Sequence: Synthetic oligonucleotide
agcccaguagaaugaggau

SEQ ID NO: 2234371 - RNA, 19 nt, Artificial Sequence
  Description of Artificial Sequence: Synthetic oligonucleotide
uccuaggcgcagccgcagc

SEQ ID NO: 2234372 - RNA, 19 nt, Artificial Sequence
  Description of Artificial Sequence: Synthetic oligonucleotide
cucagcgcccucuccuuug

SEQ ID NO: 2234373 - RNA, 19 nt, Artificial Sequence
  Description of Artificial Sequence: Synthetic oligonucleotide
  modified_base (7)..(7): a, c, u, g, unknown or other
gauuacncuucaugagguu

SEQ ID NO: 2234374 - RNA, 19 nt, Artificial Sequence
  Description of Artificial Sequence: Synthetic oligonucleotide
ggugcguucagguggaagu

SEQ ID NO: 2234375 - RNA, 19 nt, Artificial Sequence
  Description of Artificial Sequence: Synthetic oligonucleotide
accacguaagugacgauua

SEQ ID NO: 2234376 - RNA, 19 nt, Artificial Sequence
  Description of Artificial Sequence: Synthetic oligonucleotide
ugccgaggggaguuagggu

SEQ ID NO: 2234377 - RNA, 19 nt, Artificial Sequence
  Description of Artificial Sequence: Synthetic oligonucleotide
augacccgcgggccacgcc

SEQ ID NO: 2234378 - RNA, 19 nt, Artificial Sequence
  Description of Artificial Sequence: Synthetic oligonucleotide
caugcuaccuggugcucca

SEQ ID NO: 2234379 - RNA, 19 nt, Artificial Sequence
  Description of Artificial Sequence: Synthetic oligonucleotide
ugguuccugucuugacaca

SEQ ID NO: 2234380 - RNA, 19 nt, Artificial Sequence
  Description of Artificial Sequence: Synthetic oligonucleotide
cgcuucucuucaucgaugg

SEQ ID NO: 2234381 - RNA, 19 nt, Artificial Sequence
  Description of Artificial Sequence: Synthetic oligonucleotide
cacguaagugacgauuaga

SEQ ID NO: 2234382 - RNA, 19 nt, Artificial Sequence
  Description of Artificial Sequence: Synthetic oligonucleotide
ccuagagaaugcuggccag

SEQ ID NO: 2234383 - RNA, 19 nt, Artificial Sequence
  Description of Artificial Sequence: Synthetic oligonucleotide
cucguagagccugcagagc

SEQ ID NO: 2234384 - RNA, 19 nt, Artificial Sequence
  Description of Artificial Sequence: Synthetic oligonucleotide
ccgucgcuucucuucaucg

SEQ ID NO: 2234385 - RNA, 19 nt, Artificial Sequence
  Description of Artificial Sequence: Synthetic oligonucleotide
agauguccugggccgcuca

SEQ ID NO: 2234386 - RNA, 19 nt, Artificial Sequence
  Description of Artificial Sequence: Synthetic oligonucleotide
cuuuggccaugacccgcgg

SEQ ID NO: 2234387 - RNA, 19 nt, Artificial Sequence
  Description of Artificial Sequence: Synthetic oligonucleotide
guagcagcccuagggcuug

SEQ ID NO: 2234388 - RNA, 19 nt, Artificial Sequence
  Description of Artificial Sequence: Synthetic oligonucleotide
gagcuaggcccagucaguc

SEQ ID NO: 2234389 - RNA, 19 nt, Artificial Sequence
  Description of Artificial Sequence: Synthetic oligonucleotide
ggcccagucaguccuuggc

SEQ ID NO: 2234390 - RNA, 19 nt, Artificial Sequence
  Description of Artificial Sequence: Synthetic oligonucleotide
uguucagugcgaggacaaa

SEQ ID NO: 2234391 - RNA, 19 nt, Artificial Sequence
  Description of Artificial Sequence: Synthetic oligonucleotide
aaccgcucucagcgcccuc

SEQ ID NO: 2234392 - RNA, 19 nt, Artificial Sequence
  Description of Artificial Sequence: Synthetic oligonucleotide
cagugcgaggacaaaagau

SEQ ID NO: 2234393 - RNA, 19 nt, Artificial Sequence
  Description of Artificial Sequence: Synthetic oligonucleotide
  modified_base (3)..(3): a, c, u, g, unknown or other
acncuucaugagguugcug

SEQ ID NO: 2234394 - RNA, 19 nt, Artificial Sequence
  Description of Artificial Sequence: Synthetic oligonucleotide
agccugcagagcuuucuua

SEQ ID NO: 2234395 - RNA, 19 nt, Artificial Sequence
  Description of Artificial Sequence: Synthetic oligonucleotide
ugggagcaccccugugucu

SEQ ID NO: 2234396 - RNA, 19 nt, Artificial Sequence
  Description of Artificial Sequence: Synthetic oligonucleotide
aguagcagcccuagggcuu

SEQ ID NO: 2234397 - RNA, 19 nt, Artificial Sequence
  Description of Artificial Sequence: Synthetic oligonucleotide
aguguaaacuugaccuguu

SEQ ID NO: 2234398 - RNA, 19 nt, Artificial Sequence
  Description of Artificial Sequence: Synthetic oligonucleotide
uggccaugacccgcgggcc

SEQ ID NO: 2234399 - RNA, 19 nt, Artificial Sequence
  Description of Artificial Sequence: Synthetic oligonucleotide
uggcuuggaggaugccggu

SEQ ID NO: 2234400 - RNA, 19 nt, Artificial Sequence
  Description of Artificial Sequence: Synthetic oligonucleotide
ggcuauggccaccacguaa

SEQ ID NO: 2234401 - RNA, 19 nt, Artificial Sequence
  Description of Artificial Sequence: Synthetic oligonucleotide
gcuuucuuauucugccguc

SEQ ID NO: 2234402 - RNA, 19 nt, Artificial Sequence
  Description of Artificial Sequence: Synthetic oligonucleotide
cacagauguccugggccgc

SEQ ID NO: 2234403 - RNA, 19 nt, Artificial Sequence
  Description of Artificial Sequence: Synthetic oligonucleotide
agguugcugcuucuucuuu

SEQ ID NO: 2234404 - RNA, 19 nt, Artificial Sequence
  Description of Artificial Sequence: Synthetic oligonucleotide
caaagucaagacugagggu

SEQ ID NO: 2234405 - RNA, 19 nt, Artificial Sequence
  Description of Artificial Sequence: Synthetic oligonucleotide
auggaccaggguaguaaga

SEQ ID NO: 2234406 - RNA, 19 nt, Artificial Sequence
  Description of Artificial Sequence: Synthetic oligonucleotide
gucgcuucucuucaucgau

SEQ ID NO: 2234407 - RNA, 19 nt, Artificial Sequence
  Description of Artificial Sequence: Synthetic oligonucleotide
aggggaguuagggugcguu

SEQ ID NO: 2234408 - RNA, 19 nt, Artificial Sequence
  Description of Artificial Sequence: Synthetic oligonucleotide
gcaagcccaguagaaugag

SEQ ID NO: 2234409 - RNA, 19 nt, Artificial Sequence
  Description of Artificial Sequence: Synthetic oligonucleotide
ccgucuggaaccgggacgc

SEQ ID NO: 2234410 - RNA, 19 nt, Artificial Sequence
  Description of Artificial Sequence: Synthetic oligonucleotide
ccgaggggaguuagggugc

SEQ ID NO: 2234411 - RNA, 19 nt, Artificial Sequence
  Description of Artificial Sequence: Synthetic oligonucleotide
auucacaguagcagcccua

SEQ ID NO: 2234412 - RNA, 19 nt, Artificial Sequence
  Description of Artificial Sequence: Synthetic oligonucleotide
gugcguucagguggaaguc

SEQ ID NO: 2234413 - RNA, 19 nt, Artificial Sequence
  Description of Artificial Sequence: Synthetic oligonucleotide
ccguccuaggcgcagccgc

SEQ ID NO: 2234414 - RNA, 19 nt, Artificial Sequence
  Description of Artificial Sequence: Synthetic oligonucleotide
caguagcagcccuagggcu

SEQ ID NO: 2234415 - RNA, 19 nt, Artificial Sequence
  Description of Artificial Sequence: Synthetic oligonucleotide
acgccgagaugcugucugu

SEQ ID NO: 2234416 - RNA, 19 nt, Artificial Sequence
  Description of Artificial Sequence: Synthetic oligonucleotide
gccgguggggagcagcccc

SEQ ID NO: 2234417 - RNA, 19 nt, Artificial Sequence
  Description of Artificial Sequence: Synthetic oligonucleotide
gcagcccuagggcuuggcc

SEQ ID NO: 2234418 - RNA, 19 nt, Artificial Sequence
  Description of Artificial Sequence: Synthetic oligonucleotide
gcuaggcccagucaguccu

SEQ ID NO: 2234419 - RNA, 19 nt, Artificial Sequence
  Description of Artificial Sequence: Synthetic oligonucleotide
caguccuugguuccugucu

SEQ ID NO: 2234420 - RNA, 19 nt, Artificial Sequence
  Description of Artificial Sequence: Synthetic oligonucleotide
guagcaagcccaguagaau

SEQ ID NO: 2234421 - RNA, 19 nt, Artificial Sequence
  Description of Artificial Sequence: Synthetic oligonucleotide
cuggaaccgggacgccgag

SEQ ID NO: 2234422 - RNA, 19 nt, Artificial Sequence
  Description of Artificial Sequence: Synthetic oligonucleotide
ccacguaagugacgauuag

SEQ ID NO: 2234423 - RNA, 19 nt, Artificial Sequence
  Description of Artificial Sequence: Synthetic oligonucleotide
ccuaggcgcagccgcagcc

SEQ ID NO: 2234424 - RNA, 19 nt, Artificial Sequence
  Description of Artificial Sequence: Synthetic oligonucleotide
gaggguagagacacccagu

SEQ ID NO: 2234425 - RNA, 19 nt, Artificial Sequence
  Description of Artificial Sequence: Synthetic oligonucleotide
gcaccccugugucugguac

SEQ ID NO: 2234426 - RNA, 19 nt, Artificial Sequence
  Description of Artificial Sequence: Synthetic oligonucleotide
gaacagcuguucagugcga

SEQ ID NO: 2234427 - RNA, 19 nt, Artificial Sequence
  Description of Artificial Sequence: Synthetic oligonucleotide
ucgucucguagagccugca

SEQ ID NO: 2234428 - RNA, 19 nt, Artificial Sequence
  Description of Artificial Sequence: Synthetic oligonucleotide
uggcuucgucucguagagc

SEQ ID NO: 2234429 - RNA, 19 nt, Artificial Sequence
  Description of Artificial Sequence: Synthetic oligonucleotide
gcuguucagugcgaggaca

SEQ ID NO: 2234430 - RNA, 19 nt, Artificial Sequence
  Description of Artificial Sequence: Synthetic oligonucleotide
ucgggugccgaggggaguu

SEQ ID NO: 2234431 - RNA, 19 nt, Artificial Sequence
  Description of Artificial Sequence: Synthetic oligonucleotide
ggggaguuagggugcguuc

SEQ ID NO: 2234432 - RNA, 19 nt, Artificial Sequence
  Description of Artificial Sequence: Synthetic oligonucleotide
ggguagagacacccaguga

SEQ ID NO: 2234433 - RNA, 19 nt, Artificial Sequence
  Description of Artificial Sequence: Synthetic oligonucleotide
gacacuccagaggcaaacu

SEQ ID NO: 2234434 - RNA, 19 nt, Artificial Sequence
  Description of Artificial Sequence: Synthetic oligonucleotide
gguaacauggcagguccua

SEQ ID NO: 2234435 - RNA, 19 nt, Artificial Sequence
  Description of Artificial Sequence: Synthetic oligonucleotide
guccuaggcgcagccgcag

SEQ ID NO: 2234436 - RNA, 19 nt, Artificial Sequence
  Description of Artificial Sequence: Synthetic oligonucleotide
ccuugguuccugucuugac

SEQ ID NO: 2234437 - RNA, 19 nt, Artificial Sequence
  Description of Artificial Sequence: Synthetic oligonucleotide
uggaaccgggacgccgaga

SEQ ID NO: 2234438 - RNA, 19 nt, Artificial Sequence
  Description of Artificial Sequence: Synthetic oligonucleotide
cuggggcuccccguccuag

SEQ ID NO: 2234439 - RNA, 19 nt, Artificial Sequence
  Description of Artificial Sequence: Synthetic oligonucleotide
gcauggaccaggguaguaa

SEQ ID NO: 2234440 - RNA, 19 nt, Artificial Sequence
  Description of Artificial Sequence: Synthetic oligonucleotide
ggugccgaggggaguuagg

SEQ ID NO: 2234441 - RNA, 19 nt, Artificial Sequence
  Description of Artificial Sequence: Synthetic oligonucleotide
gguacucggcaaagucaag

SEQ ID NO: 2234442 - RNA, 19 nt, Artificial Sequence
  Description of Artificial Sequence: Synthetic oligonucleotide
agguaacauggcagguccu

SEQ ID NO: 2234443 - RNA, 19 nt, Artificial Sequence
  Description of Artificial Sequence: Synthetic oligonucleotide
gaagaguagcaagcccagu

SEQ ID NO: 2234444 - RNA, 19 nt, Artificial Sequence
  Description of Artificial Sequence: Synthetic oligonucleotide
ggcuuggcccugugggcag

SEQ ID NO: 2234445 - RNA, 19 nt, Artificial Sequence
  Description of Artificial Sequence: Synthetic oligonucleotide
guguucugccggcccgcgc

SEQ ID NO: 2234446 - RNA, 19 nt, Artificial Sequence
  Description of Artificial Sequence: Synthetic oligonucleotide
cagugaggagggcuacaga

SEQ ID NO: 2234447 - RNA, 19 nt, Artificial Sequence
  Description of Artificial Sequence: Synthetic oligonucleotide
acagagcggccagcccuuc

SEQ ID NO: 2234448 - RNA, 19 nt, Artificial Sequence
  Description of Artificial Sequence: Synthetic oligonucleotide
caugacccgcgggccacgc

SEQ ID NO: 2234449 - RNA, 19 nt, Artificial Sequence
  Description of Artificial Sequence: Synthetic oligonucleotide
agaugggcucgggugccga

SEQ ID NO: 2234450 - RNA, 19 nt, Artificial Sequence
  Description of Artificial Sequence: Synthetic oligonucleotide
cagugacacuccagaggca

SEQ ID NO: 2234451 - RNA, 19 nt, Artificial Sequence
  Description of Artificial Sequence: Synthetic oligonucleotide
gggugcguucagguggaag

SEQ ID NO: 2234452 - RNA, 19 nt, Artificial Sequence
  Description of Artificial Sequence: Synthetic oligonucleotide
ggaaccgcucucagcgccc

SEQ ID NO: 2234453 - RNA, 19 nt, Artificial Sequence
  Description of Artificial Sequence: Synthetic oligonucleotide
uccccguccuaggcgcagc

SEQ ID NO: 2234454 - RNA, 19 nt, Artificial Sequence
  Description of Artificial Sequence: Synthetic oligonucleotide
cggccagcccuucaguggg

SEQ ID NO: 2234455 - RNA, 19 nt, Artificial Sequence
  Description of Artificial Sequence: Synthetic oligonucleotide
ugggccgcucacccuccau

SEQ ID NO: 2234456 - RNA, 19 nt, Artificial Sequence
  Description of Artificial Sequence: Synthetic oligonucleotide
gcggcuauggccaccacgu

SEQ ID NO: 2234457 - RNA, 19 nt, Artificial Sequence
  Description of Artificial Sequence: Synthetic oligonucleotide
agcauggaccaggguagua

SEQ ID NO: 2234458 - RNA, 19 nt, Artificial Sequence
  Description of Artificial Sequence: Synthetic oligonucleotide
gcgcccucuccuuuggcca

SEQ ID NO: 2234459 - RNA, 19 nt, Artificial Sequence
  Description of Artificial Sequence: Synthetic oligonucleotide
cggaaccgcucucagcgcc

SEQ ID NO: 2234460 - RNA, 19 nt, Artificial Sequence
  Description of Artificial Sequence: Synthetic oligonucleotide
uucugccgucgcuucucuu

SEQ ID NO: 2234461 - RNA, 19 nt, Artificial Sequence
  Description of Artificial Sequence: Synthetic oligonucleotide
agcaccccugugucuggua

SEQ ID NO: 2234462 - RNA, 19 nt, Artificial Sequence
  Description of Artificial Sequence: Synthetic oligonucleotide
cuggaccggccggucacug

SEQ ID NO: 2234463 - RNA, 19 nt, Artificial Sequence
  Description of Artificial Sequence: Synthetic oligonucleotide
ucaccuggaccggccgguc

SEQ ID NO: 2234464 - RNA, 19 nt, Artificial Sequence
  Description of Artificial Sequence: Synthetic oligonucleotide
ggcuuggaggaugccggug

SEQ ID NO: 2234465 - RNA, 19 nt, Artificial Sequence
  Description of Artificial Sequence: Synthetic oligonucleotide
cagcgcccucuccuuuggc

SEQ ID NO: 2234466 - RNA, 19 nt, Artificial Sequence
  Description of Artificial Sequence: Synthetic oligonucleotide
ugccgucgcuucucuucau

SEQ ID NO: 2234467 - RNA, 19 nt, Artificial Sequence
  Description of Artificial Sequence: Synthetic oligonucleotide
gccgcggaaccgcucucag

SEQ ID NO: 2234468 - RNA, 19 nt, Artificial Sequence
  Description of Artificial Sequence: Synthetic oligonucleotide
caucgaugggauacagcuu

SEQ ID NO: 2234469 - RNA, 19 nt, Artificial Sequence
  Description of Artificial Sequence: Synthetic oligonucleotide
caccacguaagugacgauu

SEQ ID NO: 2234470 - RNA, 19 nt, Artificial Sequence
  Description of Artificial Sequence: Synthetic oligonucleotide
cuccccguccuaggcgcag

SEQ ID NO: 2234471 - RNA, 19 nt, Artificial Sequence
  Description of Artificial Sequence: Synthetic oligonucleotide
ggccaccacguaagugacg

SEQ ID NO: 2234472 - RNA, 19 nt, Artificial Sequence
  Description of Artificial Sequence: Synthetic oligonucleotide
cagugggcacagauguccu

SEQ ID NO: 2234473 - RNA, 19 nt, Artificial Sequence
  Description of Artificial Sequence: Synthetic oligonucleotide
cagauguccugggccgcuc

SEQ ID NO: 2234474 - RNA, 19 nt, Artificial Sequence
  Description of Artificial Sequence: Synthetic oligonucleotide
gccacgccgucuggaaccg

SEQ ID NO: 2234475 - RNA, 19 nt, Artificial Sequence
  Description of Artificial Sequence: Synthetic oligonucleotide
cuguggagucugugucaga

SEQ ID NO: 2234476 - RNA, 19 nt, Artificial Sequence
  Description of Artificial Sequence: Synthetic oligonucleotide
gcagccccgccgcggaacc

SEQ ID NO: 2234477 - RNA, 19 nt, Artificial Sequence
  Description of Artificial Sequence: Synthetic oligonucleotide
caccagcggcuauggccac

SEQ ID NO: 2234478 - RNA, 19 nt, Artificial Sequence
  Description of Artificial Sequence: Synthetic oligonucleotide
gcggaaccgcucucagcgc

SEQ ID NO: 2234479 - RNA, 19 nt, Artificial Sequence
  Description of Artificial Sequence: Synthetic oligonucleotide
ccacaugcuaccuggugcu

SEQ ID NO: 2234480 - RNA, 19 nt, Artificial Sequence
  Description of Artificial Sequence: Synthetic oligonucleotide
gggcuuggcccugugggca

SEQ ID NO: 2234481 - RNA, 19 nt, Artificial Sequence
  Description of Artificial Sequence: Synthetic oligonucleotide
acccgcgggccacgccguc

SEQ ID NO: 2234482 - RNA, 19 nt, Artificial Sequence
  Description of Artificial Sequence: Synthetic oligonucleotide
ccaguccuugguuccuguc

SEQ ID NO: 2234483 - RNA, 19 nt, Artificial Sequence
  Description of Artificial Sequence: Synthetic oligonucleotide
agucaguccuuggcauauu

SEQ ID NO: 2234484 - RNA, 19 nt, Artificial Sequence
  Description of Artificial Sequence: Synthetic oligonucleotide
gggacgccgagaugcuguc

SEQ ID NO: 2234485 - RNA, 19 nt, Artificial Sequence
  Description of Artificial Sequence: Synthetic oligonucleotide
cuauggccaccacguaagu

SEQ ID NO: 2234486 - RNA, 19 nt, Artificial Sequence
  Description of Artificial Sequence: Synthetic oligonucleotide
gggugccgaggggaguuag

SEQ ID NO: 2234487 - RNA, 19 nt, Artificial Sequence
  Description of Artificial Sequence: Synthetic oligonucleotide
caccuggaccggccgguca

SEQ ID NO: 2234488 - RNA, 19 nt, Artificial Sequence
  Description of Artificial Sequence: Synthetic oligonucleotide
cagucaguccuuggcauau

SEQ ID NO: 2234489 - RNA, 19 nt, Artificial Sequence
  Description of Artificial Sequence: Synthetic oligonucleotide
cgucucguagagccugcag

SEQ ID NO: 2234490 - RNA, 19 nt, Artificial Sequence
  Description of Artificial Sequence: Synthetic oligonucleotide
gagcggccagcccuucagu

SEQ ID NO: 2234491 - RNA, 19 nt, Artificial Sequence
  Description of Artificial Sequence: Synthetic oligonucleotide
gucugguacucggcaaagu

SEQ ID NO: 2234492 - RNA, 19 nt, Artificial Sequence
  Description of Artificial Sequence: Synthetic oligonucleotide
ggccaugacccgcgggcca

SEQ ID NO: 2234493 - RNA, 19 nt, Artificial Sequence
  Description of Artificial Sequence: Synthetic oligonucleotide
ccagcaucuucaguguaaa

SEQ ID NO: 2234494 - RNA, 19 nt, Artificial Sequence
  Description of Artificial Sequence: Synthetic oligonucleotide
gcucgggugccgaggggag

SEQ ID NO: 2234495 - RNA, 19 nt, Artificial Sequence
  Description of Artificial Sequence: Synthetic oligonucleotide
gggauacagcuugaagagu

SEQ ID NO: 2234496 - RNA, 19 nt, Artificial Sequence
  Description of Artificial Sequence: Synthetic oligonucleotide
ccgcggaaccgcucucagc

SEQ ID NO: 2234497 - RNA, 19 nt, Artificial Sequence
  Description of Artificial Sequence: Synthetic oligonucleotide
gaaccgcucucagcgcccu

SEQ ID NO: 2234498 - RNA, 19 nt, Artificial Sequence
  Description of Artificial Sequence: Synthetic oligonucleotide
ggugcuuugugugguggau

SEQ ID NO: 2234499 - RNA, 19 nt, Artificial Sequence
  Description of Artificial Sequence: Synthetic oligonucleotide
caccccugugucugguacu

SEQ ID NO: 2234500 - RNA, 19 nt, Artificial Sequence
  Description of Artificial Sequence: Synthetic oligonucleotide
gcccgcgcucgccuggggc

SEQ ID NO: 2234501 - RNA, 19 nt, Artificial Sequence
  Description of Artificial Sequence: Synthetic oligonucleotide
ccgugccacaugcuaccug

SEQ ID NO: 2234502 - RNA, 19 nt, Artificial Sequence
  Description of Artificial Sequence: Synthetic oligonucleotide
cucgccuggggcuccccgu

SEQ ID NO: 2234503 - RNA, 19 nt, Artificial Sequence
  Description of Artificial Sequence: Synthetic oligonucleotide
cagccccgccgcggaaccg

SEQ ID NO: 2234504 - RNA, 19 nt, Artificial Sequence
  Description of Artificial Sequence: Synthetic oligonucleotide
cgaggggaguuagggugcg

SEQ ID NO: 2234505 - RNA, 19 nt, Artificial Sequence
  Description of Artificial Sequence: Synthetic oligonucleotide
cggccggucacuggcuugg

SEQ ID NO: 2234506 - RNA, 19 nt, Artificial Sequence
  Description of Artificial Sequence: Synthetic oligonucleotide
gccgcucacccuccaucca

SEQ ID NO: 2234507 - RNA, 19 nt, Artificial Sequence
  Description of Artificial Sequence: Synthetic oligonucleotide
cccguccuaggcgcagccg

SEQ ID NO: 2234508 - RNA, 19 nt, Artificial Sequence
  Description of Artificial Sequence: Synthetic oligonucleotide
cagcggcuauggccaccac

SEQ ID NO: 2234509 - RNA, 19 nt, Artificial Sequence
  Description of Artificial Sequence: Synthetic oligonucleotide
ccagcggcuauggccacca

SEQ ID NO: 2234510 - RNA, 19 nt, Artificial Sequence
  Description of Artificial Sequence: Synthetic oligonucleotide
gagcagccccgccgcggaa

SEQ ID NO: 2234511 - RNA, 19 nt, Artificial Sequence
  Description of Artificial Sequence: Synthetic oligonucleotide
gagcaccccugugucuggu

SEQ ID NO: 2234512 - RNA, 19 nt, Artificial Sequence
  Description of Artificial Sequence: Synthetic oligonucleotide
cgccgucuggaaccgggac

SEQ ID NO: 2234513 - RNA, 19 nt, Artificial Sequence
  Description of Artificial Sequence: Synthetic oligonucleotide
ggccagcccuucagugggc

SEQ ID NO: 2234514 - RNA, 19 nt, Artificial Sequence
  Description of Artificial Sequence: Synthetic oligonucleotide
cuaggcccagucaguccuu

SEQ ID NO: 2234515 - RNA, 19 nt, Artificial Sequence
  Description of Artificial Sequence: Synthetic oligonucleotide
ccgcgggccacgccgucug

SEQ ID NO: 2234516 - RNA, 19 nt, Artificial Sequence
  Description of Artificial Sequence: Synthetic oligonucleotide
ggcccgcgcucgccugggg

SEQ ID NO: 2234517 - RNA, 19 nt, Artificial Sequence
  Description of Artificial Sequence: Synthetic oligonucleotide
gaccggccggucacuggcu

SEQ ID NO: 2234518 - RNA, 19 nt, Artificial Sequence
  Description of Artificial Sequence: Synthetic oligonucleotide
gcguucagguggaagucau

SEQ ID NO: 2234519 - RNA, 19 nt, Artificial Sequence
  Description of Artificial Sequence: Synthetic oligonucleotide
ccggcccgcgcucgccugg

SEQ ID NO: 2234520 - RNA, 19 nt, Artificial Sequence
  Description of Artificial Sequence: Synthetic oligonucleotide
cguccuaggcgcagccgca

SEQ ID NO: 2234521 - RNA, 19 nt, Artificial Sequence
  Description of Artificial Sequence: Synthetic oligonucleotide
cgccgagaugcugucugug

SEQ ID NO: 2234522 - RNA, 19 nt, Artificial Sequence
  Description of Artificial Sequence: Synthetic oligonucleotide
gcccucuccuuuggccaug

SEQ ID NO: 2234523 - RNA, 19 nt, Artificial Sequence
  Description of Artificial Sequence: Synthetic oligonucleotide
gcuuugugugguggaugua

SEQ ID NO: 2234524 - RNA, 19 nt, Artificial Sequence
  Description of Artificial Sequence: Synthetic oligonucleotide
ccgagaugcugucuguguu

SEQ ID NO: 2234525 - RNA, 19 nt, Artificial Sequence
  Description of Artificial Sequence: Synthetic oligonucleotide
ccucuccuuuggccaugac

SEQ ID NO: 2234526 - RNA, 19 nt, Artificial Sequence
  Description of Artificial Sequence: Synthetic oligonucleotide
agggugcguucagguggaa

SEQ ID NO: 2234527 - RNA, 19 nt, Artificial Sequence
  Description of Artificial Sequence: Synthetic oligonucleotide
gacccgcgggccacgccgu

SEQ ID NO: 2234528 - RNA, 19 nt, Artificial Sequence
  Description of Artificial Sequence: Synthetic oligonucleotide
cacugacaccagcggcuau

SEQ ID NO: 2234529 - RNA, 19 nt, Artificial Sequence
  Description of Artificial Sequence: Synthetic oligonucleotide
  modified_base (13)..(13): a, c, u, g, unknown or other
cgauuagauuacncuucau

SEQ ID NO: 2234530 - RNA, 19 nt, Artificial Sequence
  Description of Artificial Sequence: Synthetic oligonucleotide
ggaugccgguggggagcag

SEQ ID NO: 2234531 - RNA, 19 nt, Artificial Sequence
  Description of Artificial Sequence: Synthetic oligonucleotide
cucgggugccgaggggagu

SEQ ID NO: 2234532 - RNA, 19 nt, Artificial Sequence
  Description of Artificial Sequence: Synthetic oligonucleotide
cgaugggauacagcuugaa

SEQ ID NO: 2234533 - RNA, 19 nt, Artificial Sequence
  Description of Artificial Sequence: Synthetic oligonucleotide
gcccuagggcuuggcccug

SEQ ID NO: 2234534 - RNA, 19 nt, Artificial Sequence
  Description of Artificial Sequence: Synthetic oligonucleotide
ccacgccgucuggaaccgg

SEQ ID NO: 2234535 - RNA, 19 nt, Artificial Sequence
  Description of Artificial Sequence: Synthetic oligonucleotide
cgucuggaaccgggacgcc

SEQ ID NO: 2234536 - RNA, 19 nt, Artificial Sequence
  Description of Artificial Sequence: Synthetic oligonucleotide
caaugacaucaggcagcau

SEQ ID NO: 2234537 - RNA, 19 nt, Artificial Sequence
  Description of Artificial Sequence: Synthetic oligonucleotide
cccucuccuuuggccauga

SEQ ID NO: 2234538 - RNA, 19 nt, Artificial Sequence
  Description of Artificial Sequence: Synthetic oligonucleotide
cccgccgcggaaccgcucu

SEQ ID NO: 2234539 - RNA, 19 nt, Artificial Sequence
  Description of Artificial Sequence: Synthetic oligonucleotide
ggacgccgagaugcugucu

SEQ ID NO: 2234540 - RNA, 19 nt, Artificial Sequence
  Description of Artificial Sequence: Synthetic oligonucleotide
gcuccccguccuaggcgca

SEQ ID NO: 2234541 - RNA, 19 nt, Artificial Sequence
  Description of Artificial Sequence: Synthetic oligonucleotide
cgcucacccuccauccagu

SEQ ID NO: 2234542 - RNA, 19 nt, Artificial Sequence
  Description of Artificial Sequence: Synthetic oligonucleotide
ggccagcucuguggagucu

SEQ ID NO: 2234543 - RNA, 19 nt, Artificial Sequence
  Description of Artificial Sequence: Synthetic oligonucleotide
ccgccgcggaaccgcucuc

SEQ ID NO: 2234544 - RNA, 19 nt, Artificial Sequence
  Description of Artificial Sequence: Synthetic oligonucleotide
ccaguagaaugaggaugau

SEQ ID NO: 2234545 - RNA, 19 nt, Artificial Sequence
  Description of Artificial Sequence: Synthetic oligonucleotide
cgccgcggaaccgcucuca

SEQ ID NO: 2234546 - RNA, 19 nt, Artificial Sequence
  Description of Artificial Sequence: Synthetic oligonucleotide
cccgugccacaugcuaccu

SEQ ID NO: 2234547 - RNA, 19 nt, Artificial Sequence
  Description of Artificial Sequence: Synthetic oligonucleotide
cgcccucuccuuuggccau

SEQ ID NO: 2234548 - RNA, 19 nt, Artificial Sequence
  Description of Artificial Sequence: Synthetic oligonucleotide
cgcucgccuggggcucccc

SEQ ID NO: 2234549 - RNA, 19 nt, Artificial Sequence
  Description of Artificial Sequence: Synthetic oligonucleotide
cccuagggcuuggcccugu

SEQ ID NO: 2234550 - RNA, 19 nt, Artificial Sequence
  Description of Artificial Sequence: Synthetic oligonucleotide
cgggugccgaggggaguua

SEQ ID NO: 2234551 - RNA, 19 nt, Artificial Sequence
  Description of Artificial Sequence: Synthetic oligonucleotide
aaaaucauaauauacaccc

SEQ ID NO: 2234552 - RNA, 19 nt, Artificial Sequence
  Description of Artificial Sequence: Synthetic oligonucleotide
uuuuauuaaagcaugauac

SEQ ID NO: 2234553 - RNA, 19 nt, Artificial Sequence
  Description of Artificial Sequence: Synthetic oligonucleotide
auauuaauuuuauuaaagc

SEQ ID NO: 2234554 - RNA, 19 nt, Artificial Sequence
  Description of Artificial Sequence: Synthetic oligonucleotide
aacaagaugggagugaucc

SEQ ID NO: 2234555 - RNA, 19 nt, Artificial Sequence
  Description of Artificial Sequence: Synthetic oligonucleotide
ucaaagaugaguuaggagc

SEQ ID NO: 2234556 - RNA, 19 nt, Artificial Sequence
  Description of Artificial Sequence: Synthetic oligonucleotide
uugauggauaacaagaugg

SEQ ID NO: 2234557 - RNA, 19 nt, Artificial Sequence
  Description of Artificial Sequence: Synthetic oligonucleotide
gaauauuagacuuacugag

SEQ ID NO: 2234558 - RNA, 19 nt, Artificial Sequence
  Description of Artificial Sequence: Synthetic oligonucleotide
ucaguuauagaauaauggg

SEQ ID NO: 2234559 - RNA, 19 nt, Artificial Sequence
  Description of Artificial Sequence: Synthetic oligonucleotide
auuccuaagaucuagcagg

SEQ ID NO: 2234560 - RNA, 19 nt, Artificial Sequence
  Description of Artificial Sequence: Synthetic oligonucleotide
aaucauaauauacacccug

SEQ ID NO: 2234561 - RNA, 19 nt, Artificial Sequence
  Description of Artificial Sequence: Synthetic oligonucleotide
gauggaauuaugcaaacgc

SEQ ID NO: 2234562 - RNA, 19 nt, Artificial Sequence
  Description of Artificial Sequence: Synthetic oligonucleotide
aauaaugggcauuguggcc

SEQ ID NO: 2234563 - RNA, 19 nt, Artificial Sequence
  Description of Artificial Sequence: Synthetic oligonucleotide
aaaugaauuccuaagaucu

SEQ ID NO: 2234564 - RNA, 19 nt, Artificial Sequence
  Description of Artificial Sequence: Synthetic oligonucleotide
aaucaagcaguucauaucu

SEQ ID NO: 2234565 - RNA, 19 nt, Artificial Sequence
  Description of Artificial Sequence: Synthetic oligonucleotide
uguauuuuaucccugagau

SEQ ID NO: 2234566 - RNA, 19 nt, Artificial Sequence
  Description of Artificial Sequence: Synthetic oligonucleotide
uuugaaaaugguuuuaggu

SEQ ID NO: 2234567 - RNA, 19 nt, Artificial Sequence
  Description of Artificial Sequence: Synthetic oligonucleotide
ugacauauuaauuuuauua

SEQ ID NO: 2234568 - RNA, 19 nt, Artificial Sequence
  Description of Artificial Sequence: Synthetic oligonucleotide
uuucucaacacauuuagga

SEQ ID NO: 2234569 - RNA, 19 nt, Artificial Sequence
  Description of Artificial Sequence: Synthetic oligonucleotide
uuaggugaugugaaggucg

SEQ ID NO: 2234570 - RNA, 19 nt, Artificial Sequence
  Description of Artificial Sequence: Synthetic oligonucleotide
ugaaaaugguuuuagguca

SEQ ID NO: 2234571 - RNA, 19 nt, Artificial Sequence
  Description of Artificial Sequence: Synthetic oligonucleotide
aaaucuucaauauuugaau

SEQ ID NO: 2234572 - RNA, 19 nt, Artificial Sequence
  Description of Artificial Sequence: Synthetic oligonucleotide
aauuccuaagaucuagcag

SEQ ID NO: 2234573 - RNA, 19 nt, Artificial Sequence
  Description of Artificial Sequence: Synthetic oligonucleotide
auauuagacuuacugaguc

SEQ ID NO: 2234574 - RNA, 19 nt, Artificial Sequence
  Description of Artificial Sequence: Synthetic oligonucleotide
ugaaaaugaauuccuaaga

SEQ ID NO: 2234575 - RNA, 19 nt, Artificial Sequence
  Description of Artificial Sequence: Synthetic oligonucleotide
uugucagaucuuuugaugg

SEQ ID NO: 2234576 - RNA, 19 nt, Artificial Sequence
  Description of Artificial Sequence: Synthetic oligonucleotide
aguuuuaggagguuugggg

SEQ ID NO: 2234577 - RNA, 19 nt, Artificial Sequence
  Description of Artificial Sequence: Synthetic oligonucleotide
uucaaaucauccauaacug

SEQ ID NO: 2234578 - RNA, 19 nt, Artificial Sequence
  Description of Artificial Sequence: Synthetic oligonucleotide
uguucaauuggauaugaug

SEQ ID NO: 2234579 - RNA, 19 nt, Artificial Sequence
  Description of Artificial Sequence: Synthetic oligonucleotide
aacacauuuaggaaaauca

SEQ ID NO: 2234580 - RNA, 19 nt, Artificial Sequence
  Description of Artificial Sequence: Synthetic oligonucleotide
gaaggucggaaacauagcg

SEQ ID NO: 2234581 - RNA, 19 nt, Artificial Sequence
  Description of Artificial Sequence: Synthetic oligonucleotide
aggucggaaacauagcgcc

SEQ ID NO: 2234582 - RNA, 19 nt, Artificial Sequence
  Description of Artificial Sequence: Synthetic oligonucleotide
agaauaaugggcauugugg

SEQ ID NO: 2234583 - RNA, 19 nt, Artificial Sequence
  Description of Artificial Sequence: Synthetic oligonucleotide
uugaaaaugguuuuagguc

SEQ ID NO: 2234584 - RNA, 19 nt, Artificial Sequence
  Description of Artificial Sequence: Synthetic oligonucleotide
aacaccuguguagaggucc

SEQ ID NO: 2234585 - RNA, 19 nt, Artificial Sequence
  Description of Artificial Sequence: Synthetic oligonucleotide
agaauauuagacuuacuga

SEQ ID NO: 2234586 - RNA, 19 nt, Artificial Sequence
  Description of Artificial Sequence: Synthetic oligonucleotide
gaauaaugggcauuguggc

SEQ ID NO: 2234587 - RNA, 19 nt, Artificial Sequence
  Description of Artificial Sequence: Synthetic oligonucleotide
ugauggauaacaagauggg

SEQ ID NO: 2234588 - RNA, 19 nt, Artificial Sequence
  Description of Artificial Sequence: Synthetic oligonucleotide
aucaguuauagaauaaugg

SEQ ID NO: 2234589 - RNA, 19 nt, Artificial Sequence
  Description of Artificial Sequence: Synthetic oligonucleotide
ugcucuuugaaaaugaauu

SEQ ID NO: 2234590 - RNA, 19 nt, Artificial Sequence
  Description of Artificial Sequence: Synthetic oligonucleotide
uaugcaaacgcuucugugc

SEQ ID NO: 2234591 - RNA, 19 nt, Artificial Sequence
  Description of Artificial Sequence: Synthetic oligonucleotide
gauuuugucagaucuuuug

SEQ ID NO: 2234592 - RNA, 19 nt, Artificial Sequence
  Description of Artificial Sequence: Synthetic oligonucleotide
aaauaggucuuguuucguc

SEQ ID NO: 2234593 - RNA, 19 nt, Artificial Sequence
  Description of Artificial Sequence: Synthetic oligonucleotide
caguuauagaauaaugggc

SEQ ID NO: 2234594 - RNA, 19 nt, Artificial Sequence
  Description of Artificial Sequence: Synthetic oligonucleotide
uaaagcaugauacauucua

SEQ ID NO: 2234595 - RNA, 19 nt, Artificial Sequence
  Description of Artificial Sequence: Synthetic oligonucleotide
cuuuugauggauaacaaga

SEQ ID NO: 2234596 - RNA, 19 nt, Artificial Sequence
  Description of Artificial Sequence: Synthetic oligonucleotide
gacauauuaauuuuauuaa

SEQ ID NO: 2234597 - RNA, 19 nt, Artificial Sequence
  Description of Artificial Sequence: Synthetic oligonucleotide
uuuaacaccuguguagagg

SEQ ID NO: 2234598 - RNA, 19 nt, Artificial Sequence
  Description of Artificial Sequence: Synthetic oligonucleotide
agaucuagcagguuggucu

SEQ ID NO: 2234599 - RNA, 19 nt, Artificial Sequence
  Description of Artificial Sequence: Synthetic oligonucleotide
uuucuuugaauccgugggg

SEQ ID NO: 2234600 - RNA, 19 nt, Artificial Sequence
  Description of Artificial Sequence: Synthetic oligonucleotide
aggagcaaaaguuuuagga

SEQ ID NO: 2234601 - RNA, 19 nt, Artificial Sequence
  Description of Artificial Sequence: Synthetic oligonucleotide
caaaauaggucuuguuucg

SEQ ID NO: 2234602 - RNA, 19 nt, Artificial Sequence
  Description of Artificial Sequence: Synthetic oligonucleotide
aauaggucuuguuucguca

SEQ ID NO: 2234603 - RNA, 19 nt, Artificial Sequence
  Description of Artificial Sequence: Synthetic oligonucleotide
caucguaggaggaaaaggc

SEQ ID NO: 2234604 - RNA, 19 nt, Artificial Sequence
  Description of Artificial Sequence: Synthetic oligonucleotide
ugacacauaguauaccagc

SEQ ID NO: 2234605 - RNA, 19 nt, Artificial Sequence
  Description of Artificial Sequence: Synthetic oligonucleotide
uauuagacuuacugagucg

SEQ ID NO: 2234606 - RNA, 19 nt, Artificial Sequence
  Description of Artificial Sequence: Synthetic oligonucleotide
uagaacugaugucucaucc

SEQ ID NO: 2234607 - RNA, 19 nt, Artificial Sequence
  Description of Artificial Sequence: Synthetic oligonucleotide
aauuggauaugaugagcag

SEQ ID NO: 2234608 - RNA, 19 nt, Artificial Sequence
  Description of Artificial Sequence: Synthetic oligonucleotide
agaacugaugucucauccc

SEQ ID NO: 2234609 - RNA, 19 nt, Artificial Sequence
  Description of Artificial Sequence: Synthetic oligonucleotide
aguuauagaauaaugggca

SEQ ID NO: 2234610 - RNA, 19 nt, Artificial Sequence
  Description of Artificial Sequence: Synthetic oligonucleotide
uguaugguagggauguuca

SEQ ID NO: 2234611 - RNA, 19 nt, Artificial Sequence
  Description of Artificial Sequence: Synthetic oligonucleotide
cuaagaucuagcagguugg

SEQ ID NO: 2234612 - RNA, 19 nt, Artificial Sequence
  Description of Artificial Sequence: Synthetic oligonucleotide
augcaaacgcuucugugcc

SEQ ID NO: 2234613 - RNA, 19 nt, Artificial Sequence
  Description of Artificial Sequence: Synthetic oligonucleotide
uuugggguagaauauuggc

SEQ ID NO: 2234614 - RNA, 19 nt, Artificial Sequence
  Description of Artificial Sequence: Synthetic oligonucleotide
uuugucagaucuuuugaug

SEQ ID NO: 2234615 - RNA, 19 nt, Artificial Sequence
  Description of Artificial Sequence: Synthetic oligonucleotide
cuauguccaaauauucugg

SEQ ID NO: 2234616 - RNA, 19 nt, Artificial Sequence
  Description of Artificial Sequence: Synthetic oligonucleotide
uagaauaaugggcauugug

SEQ ID NO: 2234617 - RNA, 19 nt, Artificial Sequence
  Description of Artificial Sequence: Synthetic oligonucleotide
ugucauaggucuugguugg

SEQ ID NO: 2234618 - RNA, 19 nt, Artificial Sequence
  Description of Artificial Sequence: Synthetic oligonucleotide
uaauuuuauuaaagcauga

SEQ ID NO: 2234619 - RNA, 19 nt, Artificial Sequence
  Description of Artificial Sequence: Synthetic oligonucleotide
uucaauuggauaugaugag

SEQ ID NO: 2234620 - RNA, 19 nt, Artificial Sequence
  Description of Artificial Sequence: Synthetic oligonucleotide
ucuugguuggcaucguagg

SEQ ID NO: 2234621 - RNA, 19 nt, Artificial Sequence
  Description of Artificial Sequence: Synthetic oligonucleotide
uaggucauaaagauuuugu

SEQ ID NO: 2234622 - RNA, 19 nt, Artificial Sequence
  Description of Artificial Sequence: Synthetic oligonucleotide
uucaaagaugaguuaggag

SEQ ID NO: 2234623 - RNA, 19 nt, Artificial Sequence
  Description of Artificial Sequence: Synthetic oligonucleotide
uguagaauauuagacuuac

SEQ ID NO: 2234624 - RNA, 19 nt, Artificial Sequence
  Description of Artificial Sequence: Synthetic oligonucleotide
guucaauuggauaugauga

SEQ ID NO: 2234625 - RNA, 19 nt, Artificial Sequence
  Description of Artificial Sequence: Synthetic oligonucleotide
gaucuuuugauggauaaca

SEQ ID NO: 2234626 - RNA, 19 nt, Artificial Sequence
  Description of Artificial Sequence: Synthetic oligonucleotide
ucuuugaaaaugguuuuag

SEQ ID NO: 2234627 - RNA, 19 nt, Artificial Sequence
  Description of Artificial Sequence: Synthetic oligonucleotide
uuauuaaagcaugauacau

SEQ ID NO: 2234628 - RNA, 19 nt, Artificial Sequence
  Description of Artificial Sequence: Synthetic oligonucleotide
aaggucggaaacauagcgc

SEQ ID NO: 2234629 - RNA, 19 nt, Artificial Sequence
  Description of Artificial Sequence: Synthetic oligonucleotide
uuggauggaauuaugcaaa

SEQ ID NO: 2234630 - RNA, 19 nt, Artificial Sequence
  Description of Artificial Sequence: Synthetic oligonucleotide
uuggauaugaugagcagau

SEQ ID NO: 2234631 - RNA, 19 nt, Artificial Sequence
  Description of Artificial Sequence: Synthetic oligonucleotide
acacugauuuuccugauca

SEQ ID NO: 2234632 - RNA, 19 nt, Artificial Sequence
  Description of Artificial Sequence: Synthetic oligonucleotide
ucucaacacauuuaggaaa

SEQ ID NO: 2234633 - RNA, 19 nt, Artificial Sequence
  Description of Artificial Sequence: Synthetic oligonucleotide
uacacacugauuuuccuga

SEQ ID NO: 2234634 - RNA, 19 nt, Artificial Sequence
  Description of Artificial Sequence: Synthetic oligonucleotide
gaugucucaucccacguug

SEQ ID NO: 2234635 - RNA, 19 nt, Artificial Sequence
  Description of Artificial Sequence: Synthetic oligonucleotide
uugcuuuguagaauauuag

SEQ ID NO: 2234636 - RNA, 19 nt, Artificial Sequence
  Description of Artificial Sequence: Synthetic oligonucleotide
uauuaaagcaugauacauu

SEQ ID NO: 2234637 - RNA, 19 nt, Artificial Sequence
  Description of Artificial Sequence: Synthetic oligonucleotide
auaguauaccagcugucuc

SEQ ID NO: 2234638 - RNA, 19 nt, Artificial Sequence
  Description of Artificial Sequence: Synthetic oligonucleotide
augaguuaggagcaaaagu

SEQ ID NO: 2234639 - RNA, 19 nt, Artificial Sequence
  Description of Artificial Sequence: Synthetic oligonucleotide
uaaggguuaccucuugucu

SEQ ID NO: 2234640 - RNA, 19 nt, Artificial Sequence
  Description of Artificial Sequence: Synthetic oligonucleotide
agcaguucauaucuguaag

SEQ ID NO: 2234641 - RNA, 19 nt, Artificial Sequence
  Description of Artificial Sequence: Synthetic oligonucleotide
gucaagauucaaaucaucc

SEQ ID NO: 2234642 - RNA, 19 nt, Artificial Sequence
  Description of Artificial Sequence: Synthetic oligonucleotide
ucgagcagggcucugacac

SEQ ID NO: 2234643 - RNA, 19 nt, Artificial Sequence
  Description of Artificial Sequence: Synthetic oligonucleotide
gugaaggucggaaacauag

SEQ ID NO: 2234644 - RNA, 19 nt, Artificial Sequence
  Description of Artificial Sequence: Synthetic oligonucleotide
cuugucuucagaacuguug

SEQ ID NO: 2234645 - RNA, 19 nt, Artificial Sequence
  Description of Artificial Sequence: Synthetic oligonucleotide
acauuuaggaaaaucauaa

SEQ ID NO: 2234646 - RNA, 19 nt, Artificial Sequence
  Description of Artificial Sequence: Synthetic oligonucleotide
uguuuugcuuuguagaaua

SEQ ID NO: 2234647 - RNA, 19 nt, Artificial Sequence
  Description of Artificial Sequence: Synthetic oligonucleotide
gaucaguuauagaauaaug

SEQ ID NO: 2234648 - RNA, 19 nt, Artificial Sequence
  Description of Artificial Sequence: Synthetic oligonucleotide
aauauuagacuuacugagu

SEQ ID NO: 2234649 - RNA, 19 nt, Artificial Sequence
  Description of Artificial Sequence: Synthetic oligonucleotide
ucugucaaaucuucaauau

SEQ ID NO: 2234650 - RNA, 19 nt, Artificial Sequence
  Description of Artificial Sequence: Synthetic oligonucleotide
cuuacugagucgagcaggg

SEQ ID NO: 2234651 - RNA, 19 nt, Artificial Sequence
  Description of Artificial Sequence: Synthetic oligonucleotide
uugggguagaauauuggcu

SEQ ID NO: 2234652 - RNA, 19 nt, Artificial Sequence
  Description of Artificial Sequence: Synthetic oligonucleotide
augagcagauuucuccuac

SEQ ID NO: 2234653 - RNA, 19 nt, Artificial Sequence
  Description of Artificial Sequence: Synthetic oligonucleotide
aaguuuuaggagguuuggg

SEQ ID NO: 2234654 - RNA, 19 nt, Artificial Sequence
  Description of Artificial Sequence: Synthetic oligonucleotide
ucguaggaggaaaaggcug

SEQ ID NO: 2234655 - RNA, 19 nt, Artificial Sequence
  Description of Artificial Sequence: Synthetic oligonucleotide
gaucccauggauucaaaga

SEQ ID NO: 2234656 - RNA, 19 nt, Artificial Sequence
  Description of Artificial Sequence: Synthetic oligonucleotide
ucaauuggauaugaugagc

SEQ ID NO: 2234657 - RNA, 19 nt, Artificial Sequence
  Description of Artificial Sequence: Synthetic oligonucleotide
gcugucaagauucaaauca

SEQ ID NO: 2234658 - RNA, 19 nt, Artificial Sequence
  Description of Artificial Sequence: Synthetic oligonucleotide
gaugaguuaggagcaaaag

SEQ ID NO: 2234659 - RNA, 19 nt, Artificial Sequence
  Description of Artificial Sequence: Synthetic oligonucleotide
caguucauaucuguaaggg

SEQ ID NO: 2234660 - RNA, 19 nt, Artificial Sequence
  Description of Artificial Sequence: Synthetic oligonucleotide
ugugucauaggucuugguu

SEQ ID NO: 2234661 - RNA, 19 nt, Artificial Sequence
  Description of Artificial Sequence: Synthetic oligonucleotide
uacugagucgagcagggcu

SEQ ID NO: 2234662 - RNA, 19 nt, Artificial Sequence
  Description of Artificial Sequence: Synthetic oligonucleotide
uauguguaugguagggaug

SEQ ID NO: 2234663 - RNA, 19 nt, Artificial Sequence
  Description of Artificial Sequence: Synthetic oligonucleotide
aagcaguucauaucuguaa

SEQ ID NO: 2234664 - RNA, 19 nt, Artificial Sequence
  Description of Artificial Sequence: Synthetic oligonucleotide
ucaaaucauccauaacugu

SEQ ID NO: 2234665 - RNA, 19 nt, Artificial Sequence
  Description of Artificial Sequence: Synthetic oligonucleotide
gauaugaugagcagauuuc

SEQ ID NO: 2234666 - RNA, 19 nt, Artificial Sequence
  Description of Artificial Sequence: Synthetic oligonucleotide
uuagugucugugaucuuug

SEQ ID NO: 2234667 - RNA, 19 nt, Artificial Sequence
  Description of Artificial Sequence: Synthetic oligonucleotide
uggaauuaugcaaacgcuu

SEQ ID NO: 2234668 - RNA, 19 nt, Artificial Sequence
  Description of Artificial Sequence: Synthetic oligonucleotide
gaauuccuaagaucuagca

SEQ ID NO: 2234669 - RNA, 19 nt, Artificial Sequence
  Description of Artificial Sequence: Synthetic oligonucleotide
agauucaaaucauccauaa

SEQ ID NO: 2234670 - RNA, 19 nt, Artificial Sequence
  Description of Artificial Sequence: Synthetic oligonucleotide
acuuacugagucgagcagg

SEQ ID NO: 2234671 - RNA, 19 nt, Artificial Sequence
  Description of Artificial Sequence: Synthetic oligonucleotide
uacauucuauaguugucug

SEQ ID NO: 2234672 - RNA, 19 nt, Artificial Sequence
  Description of Artificial Sequence: Synthetic oligonucleotide
caauuggauaugaugagca

SEQ ID NO: 2234673 - RNA, 19 nt, Artificial Sequence
  Description of Artificial Sequence: Synthetic oligonucleotide
uucuauaguugucugucaa

SEQ ID NO: 2234674 - RNA, 19 nt, Artificial Sequence
  Description of Artificial Sequence: Synthetic oligonucleotide
acggcuuguauguguaugg

SEQ ID NO: 2234675 - RNA, 19 nt, Artificial Sequence
  Description of Artificial Sequence: Synthetic oligonucleotide
uuuugucagaucuuuugau

SEQ ID NO: 2234676 - RNA, 19 nt, Artificial Sequence
  Description of Artificial Sequence: Synthetic oligonucleotide
accucuugucuucagaacu

SEQ ID NO: 2234677 - RNA, 19 nt, Artificial Sequence
  Description of Artificial Sequence: Synthetic oligonucleotide
auuagacuuacugagucga

SEQ ID NO: 2234678 - RNA, 19 nt, Artificial Sequence
  Description of Artificial Sequence: Synthetic oligonucleotide
aacuguugugucauagguc

SEQ ID NO: 2234679 - RNA, 19 nt, Artificial Sequence
  Description of Artificial Sequence: Synthetic oligonucleotide
ugaugagcagauuucuccu

SEQ ID NO: 2234680 - RNA, 19 nt, Artificial Sequence
  Description of Artificial Sequence: Synthetic oligonucleotide
uaggucuugguuggcaucg

SEQ ID NO: 2234681 - RNA, 19 nt, Artificial Sequence
  Description of Artificial Sequence: Synthetic oligonucleotide
uauguccaaauauucuggu

SEQ ID NO: 2234682 - RNA, 19 nt, Artificial Sequence
  Description of Artificial Sequence: Synthetic oligonucleotide
uaggagcaaaaguuuuagg

SEQ ID NO: 2234683 - RNA, 19 nt, Artificial Sequence
  Description of Artificial Sequence: Synthetic oligonucleotide
uguuucgucauugcuuucc

SEQ ID NO: 2234684 - RNA, 19 nt, Artificial Sequence
  Description of Artificial Sequence: Synthetic oligonucleotide
uuaccucuugucuucagaa

SEQ ID NO: 2234685 - RNA, 19 nt, Artificial Sequence
  Description of Artificial Sequence: Synthetic oligonucleotide
ugugaucuuugaaaauggu

SEQ ID NO: 2234686 - RNA, 19 nt, Artificial Sequence
  Description of Artificial Sequence: Synthetic oligonucleotide
aagcaugauacauucuaua

SEQ ID NO: 2234687 - RNA, 19 nt, Artificial Sequence
  Description of Artificial Sequence: Synthetic oligonucleotide
aacauagcgccacggcuug

SEQ ID NO: 2234688 - RNA, 19 nt, Artificial Sequence
  Description of Artificial Sequence: Synthetic oligonucleotide
aagauuuugucagaucuuu

SEQ ID NO: 2234689 - RNA, 19 nt, Artificial Sequence
  Description of Artificial Sequence: Synthetic oligonucleotide
ugggguagaauauuggcuu

SEQ ID NO: 2234690 - RNA, 19 nt, Artificial Sequence
  Description of Artificial Sequence: Synthetic oligonucleotide
uuaggucauaaagauuuug

SEQ ID NO: 2234691 - RNA, 19 nt, Artificial Sequence
  Description of Artificial Sequence: Synthetic oligonucleotide
auaaugggcauuguggcca

SEQ ID NO: 2234692 - RNA, 19 nt, Artificial Sequence
  Description of Artificial Sequence: Synthetic oligonucleotide
cauucuauaguugucuguc

SEQ ID NO: 2234693 - RNA, 19 nt, Artificial Sequence
  Description of Artificial Sequence: Synthetic oligonucleotide
ucuucaauauuugaauuuu

SEQ ID NO: 2234694 - RNA, 19 nt, Artificial Sequence
  Description of Artificial Sequence: Synthetic oligonucleotide
auuaugcaaacgcuucugu

SEQ ID NO: 2234695 - RNA, 19 nt, Artificial Sequence
  Description of Artificial Sequence: Synthetic oligonucleotide
ucauaaagauuuugucaga

SEQ ID NO: 2234696 - RNA, 19 nt, Artificial Sequence
  Description of Artificial Sequence: Synthetic oligonucleotide
gaaaaggcugcugcgugcg

SEQ ID NO: 2234697 - RNA, 19 nt, Artificial Sequence
  Description of Artificial Sequence: Synthetic oligonucleotide
uuuaggagguuugggguag

SEQ ID NO: 2234698 - RNA, 19 nt, Artificial Sequence
  Description of Artificial Sequence: Synthetic oligonucleotide
ugaaggucggaaacauagc

SEQ ID NO: 2234699 - RNA, 19 nt, Artificial Sequence
  Description of Artificial Sequence: Synthetic oligonucleotide
uuagacuuacugagucgag

SEQ ID NO: 2234700 - RNA, 19 nt, Artificial Sequence
  Description of Artificial Sequence: Synthetic oligonucleotide
cuuggauggaauuaugcaa

SEQ ID NO: 2234701 - RNA, 19 nt, Artificial Sequence
  Description of Artificial Sequence: Synthetic oligonucleotide
gguagggauguucaauugg

SEQ ID NO: 2234702 - RNA, 19 nt, Artificial Sequence
  Description of Artificial Sequence: Synthetic oligonucleotide
aggguuaccucuugucuuc

SEQ ID NO: 2234703 - RNA, 19 nt, Artificial Sequence
  Description of Artificial Sequence: Synthetic oligonucleotide
agcugucaagauucaaauc

SEQ ID NO: 2234704 - RNA, 19 nt, Artificial Sequence
  Description of Artificial Sequence: Synthetic oligonucleotide
cuacacacugauuuuccug

SEQ ID NO: 2234705 - RNA, 19 nt, Artificial Sequence
  Description of Artificial Sequence: Synthetic oligonucleotide
uucauaucuguaaggguua

SEQ ID NO: 2234706 - RNA, 19 nt, Artificial Sequence
  Description of Artificial Sequence: Synthetic oligonucleotide
gcuuguauguguaugguag

SEQ ID NO: 2234707 - RNA, 19 nt, Artificial Sequence
  Description of Artificial Sequence: Synthetic oligonucleotide
aaucauccauaacuguuuu

SEQ ID NO: 2234708 - RNA, 19 nt, Artificial Sequence
  Description of Artificial Sequence: Synthetic oligonucleotide
auuggauaugaugagcaga

SEQ ID NO: 2234709 - RNA, 19 nt, Artificial Sequence
  Description of Artificial Sequence: Synthetic oligonucleotide
uguucuucuuggauggaau

SEQ ID NO: 2234710 - RNA, 19 nt, Artificial Sequence
  Description of Artificial Sequence: Synthetic oligonucleotide
ucuauaguugucugucaaa

SEQ ID NO: 2234711 - RNA, 19 nt, Artificial Sequence
  Description of Artificial Sequence: Synthetic oligonucleotide
uuuagugucugugaucuuu

SEQ ID NO: 2234712 - RNA, 19 nt, Artificial Sequence
  Description of Artificial Sequence: Synthetic oligonucleotide
agaucuuuugauggauaac

SEQ ID NO: 2234713 - RNA, 19 nt, Artificial Sequence
  Description of Artificial Sequence: Synthetic oligonucleotide
aaaucauaauauacacccu

SEQ ID NO: 2234714 - RNA, 19 nt, Artificial Sequence
  Description of Artificial Sequence: Synthetic oligonucleotide
uauaguugucugucaaauc

SEQ ID NO: 2234715 - RNA, 19 nt, Artificial Sequence
  Description of Artificial Sequence: Synthetic oligonucleotide
aagaucuagcagguugguc

SEQ ID NO: 2234716 - RNA, 19 nt, Artificial Sequence
  Description of Artificial Sequence: Synthetic oligonucleotide
uuuuaggagguuuggggua

SEQ ID NO: 2234717 - RNA, 19 nt, Artificial Sequence
  Description of Artificial Sequence: Synthetic oligonucleotide
uuguagaauauuagacuua

SEQ ID NO: 2234718 - RNA, 19 nt, Artificial Sequence
  Description of Artificial Sequence: Synthetic oligonucleotide
auguguaugguagggaugu

SEQ ID NO: 2234719 - RNA, 19 nt, Artificial Sequence
  Description of Artificial Sequence: Synthetic oligonucleotide
auggauucaaagaugaguu

SEQ ID NO: 2234720 - RNA, 19 nt, Artificial Sequence
  Description of Artificial Sequence: Synthetic oligonucleotide
ccaaaauaggucuuguuuc

SEQ ID NO: 2234721 - RNA, 19 nt, Artificial Sequence
  Description of Artificial Sequence: Synthetic oligonucleotide
uccugaucaguuauagaau

SEQ ID NO: 2234722 - RNA, 19 nt, Artificial Sequence
  Description of Artificial Sequence: Synthetic oligonucleotide
uuccuaagaucuagcaggu

SEQ ID NO: 2234723 - RNA, 19 nt, Artificial Sequence
  Description of Artificial Sequence: Synthetic oligonucleotide
auccgugggguaaucaagc

SEQ ID NO: 2234724 - RNA, 19 nt, Artificial Sequence
  Description of Artificial Sequence: Synthetic oligonucleotide
uagacuuacugagucgagc

SEQ ID NO: 2234725 - RNA, 19 nt, Artificial Sequence
  Description of Artificial Sequence: Synthetic oligonucleotide
auaugaugagcagauuucu

SEQ ID NO: 2234726 - RNA, 19 nt, Artificial Sequence
  Description of Artificial Sequence: Synthetic oligonucleotide
aaaauaggucuuguuucgu

SEQ ID NO: 2234727 - RNA, 19 nt, Artificial Sequence
  Description of Artificial Sequence: Synthetic oligonucleotide
guuugggguagaauauugg

SEQ ID NO: 2234728 - RNA, 19 nt, Artificial Sequence
  Description of Artificial Sequence: Synthetic oligonucleotide
gaccuggccaagucaaugc

SEQ ID NO: 2234729 - RNA, 19 nt, Artificial Sequence
  Description of Artificial Sequence: Synthetic oligonucleotide
acauucuauaguugucugu

SEQ ID NO: 2234730 - RNA, 19 nt, Artificial Sequence
  Description of Artificial Sequence: Synthetic oligonucleotide
agggcucugacacauagua

SEQ ID NO: 2234731 - RNA, 19 nt, Artificial Sequence
  Description of Artificial Sequence: Synthetic oligonucleotide
ccuaagaucuagcagguug

SEQ ID NO: 2234732 - RNA, 19 nt, Artificial Sequence
  Description of Artificial Sequence: Synthetic oligonucleotide
aaagcaugauacauucuau

SEQ ID NO: 2234733 - RNA, 19 nt, Artificial Sequence
  Description of Artificial Sequence: Synthetic oligonucleotide
uauacacccugaccuggcc

SEQ ID NO: 2234734 - RNA, 19 nt, Artificial Sequence
  Description of Artificial Sequence: Synthetic oligonucleotide
acugauuuuccugaucagu

SEQ ID NO: 2234735 - RNA, 19 nt, Artificial Sequence
  Description of Artificial Sequence: Synthetic oligonucleotide
gacuuacugagucgagcag

SEQ ID NO: 2234736 - RNA, 19 nt, Artificial Sequence
  Description of Artificial Sequence: Synthetic oligonucleotide
agcagauuucuccuacugu

SEQ ID NO: 2234737 - RNA, 19 nt, Artificial Sequence
  Description of Artificial Sequence: Synthetic oligonucleotide
ucggaaacauagcgccacg

SEQ ID NO: 2234738 - RNA, 19 nt, Artificial Sequence
  Description of Artificial Sequence: Synthetic oligonucleotide
aaaaggcugcugcgugcgg

SEQ ID NO: 2234739 - RNA, 19 nt, Artificial Sequence
  Description of Artificial Sequence: Synthetic oligonucleotide
gaaacauagcgccacggcu

SEQ ID NO: 2234740 - RNA, 19 nt, Artificial Sequence
  Description of Artificial Sequence: Synthetic oligonucleotide
agcgccacggcuuguaugu

SEQ ID NO: 2234741 - RNA, 19 nt, Artificial Sequence
  Description of Artificial Sequence: Synthetic oligonucleotide
uucagaacuguugugucau

SEQ ID NO: 2234742 - RNA, 19 nt, Artificial Sequence
  Description of Artificial Sequence: Synthetic oligonucleotide
auucuauaguugucuguca

SEQ ID NO: 2234743 - RNA, 19 nt, Artificial Sequence
  Description of Artificial Sequence: Synthetic oligonucleotide
uuuccugaucaguuauaga

SEQ ID NO: 2234744 - RNA, 19 nt, Artificial Sequence
  Description of Artificial Sequence: Synthetic oligonucleotide
ugucuucagaacuguugug

SEQ ID NO: 2234745 - RNA, 19 nt, Artificial Sequence
  Description of Artificial Sequence: Synthetic oligonucleotide
ugguagggauguucaauug

SEQ ID NO: 2234746 - RNA, 19 nt, Artificial Sequence
  Description of Artificial Sequence: Synthetic oligonucleotide
guaaggguuaccucuuguc

SEQ ID NO: 2234747 - RNA, 19 nt, Artificial Sequence
  Description of Artificial Sequence: Synthetic oligonucleotide
auauacacccugaccuggc

SEQ ID NO: 2234748 - RNA, 19 nt, Artificial Sequence
  Description of Artificial Sequence: Synthetic oligonucleotide
uaugguagggauguucaau

SEQ ID NO: 2234749 - RNA, 19 nt, Artificial Sequence
  Description of Artificial Sequence: Synthetic oligonucleotide
augguagggauguucaauu

SEQ ID NO: 2234750 - RNA, 19 nt, Artificial Sequence
  Description of Artificial Sequence: Synthetic oligonucleotide
gcaguucauaucuguaagg

SEQ ID NO: 2234751 - RNA, 19 nt, Artificial Sequence
  Description of Artificial Sequence: Synthetic oligonucleotide
ucagaucuuuugauggaua

SEQ ID NO: 2234752 - RNA, 19 nt, Artificial Sequence
  Description of Artificial Sequence: Synthetic oligonucleotide
uccaugucuauguccaaau

SEQ ID NO: 2234753 - RNA, 19 nt, Artificial Sequence
  Description of Artificial Sequence: Synthetic oligonucleotide
uuauagaauaaugggcauu

SEQ ID NO: 2234754 - RNA, 19 nt, Artificial Sequence
  Description of Artificial Sequence: Synthetic oligonucleotide
aaacauagcgccacggcuu

SEQ ID NO: 2234755 - RNA, 19 nt, Artificial Sequence
  Description of Artificial Sequence: Synthetic oligonucleotide
gaugugaaggucggaaaca

SEQ ID NO: 2234756 - RNA, 19 nt, Artificial Sequence
  Description of Artificial Sequence: Synthetic oligonucleotide
cuguguagagguccuuagg

SEQ ID NO: 2234757 - RNA, 19 nt, Artificial Sequence
  Description of Artificial Sequence: Synthetic oligonucleotide
aucauaauauacacccuga

SEQ ID NO: 2234758 - RNA, 19 nt, Artificial Sequence
  Description of Artificial Sequence: Synthetic oligonucleotide
ugucuacacacugauuuuc

SEQ ID NO: 2234759 - RNA, 19 nt, Artificial Sequence
  Description of Artificial Sequence: Synthetic oligonucleotide
acugagucgagcagggcuc

SEQ ID NO: 2234760 - RNA, 19 nt, Artificial Sequence
  Description of Artificial Sequence: Synthetic oligonucleotide
agucgagcagggcucugac

SEQ ID NO: 2234761 - RNA, 19 nt, Artificial Sequence
  Description of Artificial Sequence: Synthetic oligonucleotide
auggaauuaugcaaacgcu

SEQ ID NO: 2234762 - RNA, 19 nt, Artificial Sequence
  Description of Artificial Sequence: Synthetic oligonucleotide
ggagguuugggguagaaua

SEQ ID NO: 2234763 - RNA, 19 nt, Artificial Sequence
  Description of Artificial Sequence: Synthetic oligonucleotide
guuuuaggagguuuggggu

SEQ ID NO: 2234764 - RNA, 19 nt, Artificial Sequence
  Description of Artificial Sequence: Synthetic oligonucleotide
agggauguucaauuggaua

SEQ ID NO: 2234765 - RNA, 19 nt, Artificial Sequence
  Description of Artificial Sequence: Synthetic oligonucleotide
acauaguauaccagcuguc

SEQ ID NO: 2234766 - RNA, 19 nt, Artificial Sequence
  Description of Artificial Sequence: Synthetic oligonucleotide
ucucaucccacguuguauu

SEQ ID NO: 2234767 - RNA, 19 nt, Artificial Sequence
  Description of Artificial Sequence: Synthetic oligonucleotide
aacgcuucugugccaugcu

SEQ ID NO: 2234768 - RNA, 19 nt, Artificial Sequence
  Description of Artificial Sequence: Synthetic oligonucleotide
gaauccgugggguaaucaa

SEQ ID NO: 2234769 - RNA, 19 nt, Artificial Sequence
  Description of Artificial Sequence: Synthetic oligonucleotide
gauuuuccugaucaguuau

SEQ ID NO: 2234770 - RNA, 19 nt, Artificial Sequence
  Description of Artificial Sequence: Synthetic oligonucleotide
ucuagcagguuggucugag

SEQ ID NO: 2234771 - RNA, 19 nt, Artificial Sequence
  Description of Artificial Sequence: Synthetic oligonucleotide
augggagugaucccaugga

SEQ ID NO: 2234772 - RNA, 19 nt, Artificial Sequence
  Description of Artificial Sequence: Synthetic oligonucleotide
guauuuuaucccugagauc

SEQ ID NO: 2234773 - RNA, 19 nt, Artificial Sequence
  Description of Artificial Sequence: Synthetic oligonucleotide
ggaaacauagcgccacggc

SEQ ID NO: 2234774 - RNA, 19 nt, Artificial Sequence
  Description of Artificial Sequence: Synthetic oligonucleotide
guagggauguucaauugga

SEQ ID NO: 2234775 - RNA, 19 nt, Artificial Sequence
  Description of Artificial Sequence: Synthetic oligonucleotide
agugucugugaucuuugaa

SEQ ID NO: 2234776 - RNA, 19 nt, Artificial Sequence
  Description of Artificial Sequence: Synthetic oligonucleotide
ggaauuaugcaaacgcuuc

SEQ ID NO: 2234777 - RNA, 19 nt, Artificial Sequence
  Description of Artificial Sequence: Synthetic oligonucleotide
uggauucaaagaugaguua

SEQ ID NO: 2234778 - RNA, 19 nt, Artificial Sequence
  Description of Artificial Sequence: Synthetic oligonucleotide
ugggagugaucccauggau

SEQ ID NO: 2234779 - RNA, 19 nt, Artificial Sequence
  Description of Artificial Sequence: Synthetic oligonucleotide
uaccucuugucuucagaac

SEQ ID NO: 2234780 - RNA, 19 nt, Artificial Sequence
  Description of Artificial Sequence: Synthetic oligonucleotide
gucuugguuggcaucguag

SEQ ID NO: 2234781 - RNA, 19 nt, Artificial Sequence
  Description of Artificial Sequence: Synthetic oligonucleotide
gcucuuugaaaaugaauuc

SEQ ID NO: 2234782 - RNA, 19 nt, Artificial Sequence
  Description of Artificial Sequence: Synthetic oligonucleotide
ugcgugcgggcuuuaacac

SEQ ID NO: 2234783 - RNA, 19 nt, Artificial Sequence
  Description of Artificial Sequence: Synthetic oligonucleotide
aggucuuguuucgucauug

SEQ ID NO: 2234784 - RNA, 19 nt, Artificial Sequence
  Description of Artificial Sequence: Synthetic oligonucleotide
gugccaugcucuuugaaaa

SEQ ID NO: 2234785 - RNA, 19 nt, Artificial Sequence
  Description of Artificial Sequence: Synthetic oligonucleotide
augucuauguccaaauauu

SEQ ID NO: 2234786 - RNA, 19 nt, Artificial Sequence
  Description of Artificial Sequence: Synthetic oligonucleotide
uuuaucccugagaucuuuu

SEQ ID NO: 2234787 - RNA, 19 nt, Artificial Sequence
  Description of Artificial Sequence: Synthetic oligonucleotide
cacaccagcuccagaaauc

SEQ ID NO: 2234788 - RNA, 19 nt, Artificial Sequence
  Description of Artificial Sequence: Synthetic oligonucleotide
guuaccucuugucuucaga

SEQ ID NO: 2234789 - RNA, 19 nt, Artificial Sequence
  Description of Artificial Sequence: Synthetic oligonucleotide
gcaucguaggaggaaaagg

SEQ ID NO: 2234790 - RNA, 19 nt, Artificial Sequence
  Description of Artificial Sequence: Synthetic oligonucleotide
uagggauguucaauuggau

SEQ ID NO: 2234791 - RNA, 19 nt, Artificial Sequence
  Description of Artificial Sequence: Synthetic oligonucleotide
agcugucuccaguacaaau

SEQ ID NO: 2234792 - RNA, 19 nt, Artificial Sequence
  Description of Artificial Sequence: Synthetic oligonucleotide
uucucacaaaaugaugauu

SEQ ID NO: 2234793 - RNA, 19 nt, Artificial Sequence
  Description of Artificial Sequence: Synthetic oligonucleotide
uugucuacacacugauuuu

SEQ ID NO: 2234794 - RNA, 19 nt, Artificial Sequence
  Description of Artificial Sequence: Synthetic oligonucleotide
aaagaugaguuaggagcaa

SEQ ID NO: 2234795 - RNA, 19 nt, Artificial Sequence
  Description of Artificial Sequence: Synthetic oligonucleotide
aguauaccagcugucucca

SEQ ID NO: 2234796 - RNA, 19 nt, Artificial Sequence
  Description of Artificial Sequence: Synthetic oligonucleotide
cuuaggugaugugaagguc

SEQ ID NO: 2234797 - RNA, 19 nt, Artificial Sequence
  Description of Artificial Sequence: Synthetic oligonucleotide
cacugauuuuccugaucag

SEQ ID NO: 2234798 - RNA, 19 nt, Artificial Sequence
  Description of Artificial Sequence: Synthetic oligonucleotide
acgcuucugugccaugcuc

SEQ ID NO: 2234799 - RNA, 19 nt, Artificial Sequence
  Description of Artificial Sequence: Synthetic oligonucleotide
ggauggaauuaugcaaacg

SEQ ID NO: 2234800 - RNA, 19 nt, Artificial Sequence
  Description of Artificial Sequence: Synthetic oligonucleotide
auacacccugaccuggcca

SEQ ID NO: 2234801 - RNA, 19 nt, Artificial Sequence
  Description of Artificial Sequence: Synthetic oligonucleotide
guucauaucuguaaggguu

SEQ ID NO: 2234802 - RNA, 19 nt, Artificial Sequence
  Description of Artificial Sequence: Synthetic oligonucleotide
ucuuugaauccguggggua

SEQ ID NO: 2234803 - RNA, 19 nt, Artificial Sequence
  Description of Artificial Sequence: Synthetic oligonucleotide
caagaugggagugauccca

SEQ ID NO: 2234804 - RNA, 19 nt, Artificial Sequence
  Description of Artificial Sequence: Synthetic oligonucleotide
ggcucugacacauaguaua

SEQ ID NO: 2234805 - RNA, 19 nt, Artificial Sequence
  Description of Artificial Sequence: Synthetic oligonucleotide
uccgugggguaaucaagca

SEQ ID NO: 2234806 - RNA, 19 nt, Artificial Sequence
  Description of Artificial Sequence: Synthetic oligonucleotide
ccacguuguauuuuauccc

SEQ ID NO: 2234807 - RNA, 19 nt, Artificial Sequence
  Description of Artificial Sequence: Synthetic oligonucleotide
augggcauuguggccauag

SEQ ID NO: 2234808 - RNA, 19 nt, Artificial Sequence
  Description of Artificial Sequence: Synthetic oligonucleotide
cucugacacauaguauacc

SEQ ID NO: 2234809 - RNA, 19 nt, Artificial Sequence
  Description of Artificial Sequence: Synthetic oligonucleotide
ggcauuguggccauagaac

SEQ ID NO: 2234810 - RNA, 19 nt, Artificial Sequence
  Description of Artificial Sequence: Synthetic oligonucleotide
auaccagcugucuccagua

SEQ ID NO: 2234811 - RNA, 19 nt, Artificial Sequence
  Description of Artificial Sequence: Synthetic oligonucleotide
ucccacguuguauuuuauc

SEQ ID NO: 2234812 - RNA, 19 nt, Artificial Sequence
  Description of Artificial Sequence: Synthetic oligonucleotide
ugaauccgugggguaauca

SEQ ID NO: 2234813 - RNA, 19 nt, Artificial Sequence
  Description of Artificial Sequence: Synthetic oligonucleotide
uccaaauauucugguuuac

SEQ ID NO: 2234814 - RNA, 19 nt, Artificial Sequence
  Description of Artificial Sequence: Synthetic oligonucleotide
aguuaggagcaaaaguuuu

SEQ ID NO: 2234815 - RNA, 19 nt, Artificial Sequence
  Description of Artificial Sequence: Synthetic oligonucleotide
gggauguucaauuggauau

SEQ ID NO: 2234816 - RNA, 19 nt, Artificial Sequence
  Description of Artificial Sequence: Synthetic oligonucleotide
uaagaucuagcagguuggu

SEQ ID NO: 2234817 - RNA, 19 nt, Artificial Sequence
  Description of Artificial Sequence: Synthetic oligonucleotide
uuugaauccgugggguaau

SEQ ID NO: 2234818 - RNA, 19 nt, Artificial Sequence
  Description of Artificial Sequence: Synthetic oligonucleotide
guccuuaggugaugugaag

SEQ ID NO: 2234819 - RNA, 19 nt, Artificial Sequence
  Description of Artificial Sequence: Synthetic oligonucleotide
gacacauaguauaccagcu

SEQ ID NO: 2234820 - RNA, 19 nt, Artificial Sequence
  Description of Artificial Sequence: Synthetic oligonucleotide
ucuugucuucagaacuguu

SEQ ID NO: 2234821 - RNA, 19 nt, Artificial Sequence
  Description of Artificial Sequence: Synthetic oligonucleotide
caucccaaaauaggucuug

SEQ ID NO: 2234822 - RNA, 19 nt, Artificial Sequence
  Description of Artificial Sequence: Synthetic oligonucleotide
gucggaaacauagcgccac

SEQ ID NO: 2234823 - RNA, 19 nt, Artificial Sequence
  Description of Artificial Sequence: Synthetic oligonucleotide
uaacaagaugggagugauc

SEQ ID NO: 2234824 - RNA, 19 nt, Artificial Sequence
  Description of Artificial Sequence: Synthetic oligonucleotide
ucugaggcuuggacacacc

SEQ ID NO: 2234825 - RNA, 19 nt, Artificial Sequence
  Description of Artificial Sequence: Synthetic oligonucleotide
uagugucugugaucuuuga

SEQ ID NO: 2234826 - RNA, 19 nt, Artificial Sequence
  Description of Artificial Sequence: Synthetic oligonucleotide
ugucucaucccacguugua

SEQ ID NO: 2234827 - RNA, 19 nt, Artificial Sequence
  Description of Artificial Sequence: Synthetic oligonucleotide
cugcgugcgggcuuuaaca

SEQ ID NO: 2234828 - RNA, 19 nt, Artificial Sequence
  Description of Artificial Sequence: Synthetic oligonucleotide
gguuugggguagaauauug

SEQ ID NO: 2234829 - RNA, 19 nt, Artificial Sequence
  Description of Artificial Sequence: Synthetic oligonucleotide
guuucgucauugcuuucca

SEQ ID NO: 2234830 - RNA, 19 nt, Artificial Sequence
  Description of Artificial Sequence: Synthetic oligonucleotide
cuugguuggcaucguagga

SEQ ID NO: 2234831 - RNA, 19 nt, Artificial Sequence
  Description of Artificial Sequence: Synthetic oligonucleotide
guccaaauauucugguuua

SEQ ID NO: 2234832 - RNA, 19 nt, Artificial Sequence
  Description of Artificial Sequence: Synthetic oligonucleotide
guuauagaauaaugggcau

SEQ ID NO: 2234833 - RNA, 19 nt, Artificial Sequence
  Description of Artificial Sequence: Synthetic oligonucleotide
acccugaccuggccaaguc

SEQ ID NO: 2234834 - RNA, 19 nt, Artificial Sequence
  Description of Artificial Sequence: Synthetic oligonucleotide
guugacauauuaauuuuau

SEQ ID NO: 2234835 - RNA, 19 nt, Artificial Sequence
  Description of Artificial Sequence: Synthetic oligonucleotide
cacguuguauuuuaucccu

SEQ ID NO: 2234836 - RNA, 19 nt, Artificial Sequence
  Description of Artificial Sequence: Synthetic oligonucleotide
aucuuuugauggauaacaa

SEQ ID NO: 2234837 - RNA, 19 nt, Artificial Sequence
  Description of Artificial Sequence: Synthetic oligonucleotide
augugaaggucggaaacau

SEQ ID NO: 2234838 - RNA, 19 nt, Artificial Sequence
  Description of Artificial Sequence: Synthetic oligonucleotide
agugaucccauggauucaa

SEQ ID NO: 2234839 - RNA, 19 nt, Artificial Sequence
  Description of Artificial Sequence: Synthetic oligonucleotide
ggauaugaugagcagauuu

SEQ ID NO: 2234840 - RNA, 19 nt, Artificial Sequence
  Description of Artificial Sequence: Synthetic oligonucleotide
ugcaaacgcuucugugcca

SEQ ID NO: 2234841 - RNA, 19 nt, Artificial Sequence
  Description of Artificial Sequence: Synthetic oligonucleotide
auagaauaaugggcauugu

SEQ ID NO: 2234842 - RNA, 19 nt, Artificial Sequence
  Description of Artificial Sequence: Synthetic oligonucleotide
agaugggagugaucccaug

SEQ ID NO: 2234843 - RNA, 19 nt, Artificial Sequence
  Description of Artificial Sequence: Synthetic oligonucleotide
ucccaaaauaggucuuguu

SEQ ID NO: 2234844 - RNA, 19 nt, Artificial Sequence
  Description of Artificial Sequence: Synthetic oligonucleotide
uagcgccacggcuuguaug

SEQ ID NO: 2234845 - RNA, 19 nt, Artificial Sequence
  Description of Artificial Sequence: Synthetic oligonucleotide
cacggcuuguauguguaug

SEQ ID NO: 2234846 - RNA, 19 nt, Artificial Sequence
  Description of Artificial Sequence: Synthetic oligonucleotide
agaugaguuaggagcaaaa

SEQ ID NO: 2234847 - RNA, 19 nt, Artificial Sequence
  Description of Artificial Sequence: Synthetic oligonucleotide
uuuguucuucuuggaugga

SEQ ID NO: 2234848 - RNA, 19 nt, Artificial Sequence
  Description of Artificial Sequence: Synthetic oligonucleotide
uuucgucauugcuuuccau

SEQ ID NO: 2234849 - RNA, 19 nt, Artificial Sequence
  Description of Artificial Sequence: Synthetic oligonucleotide
cccauggauucaaagauga

SEQ ID NO: 2234850 - RNA, 19 nt, Artificial Sequence
  Description of Artificial Sequence: Synthetic oligonucleotide
guuaggagcaaaaguuuua

SEQ ID NO: 2234851 - RNA, 19 nt, Artificial Sequence
  Description of Artificial Sequence: Synthetic oligonucleotide
aucuuugaaaaugguuuua

SEQ ID NO: 2234852 - RNA, 19 nt, Artificial Sequence
  Description of Artificial Sequence: Synthetic oligonucleotide
uugugucauaggucuuggu

SEQ ID NO: 2234853 - RNA, 19 nt, Artificial Sequence
  Description of Artificial Sequence: Synthetic oligonucleotide
uggcaucguaggaggaaaa

SEQ ID NO: 2234854 - RNA, 19 nt, Artificial Sequence
  Description of Artificial Sequence: Synthetic oligonucleotide
augcucuuugaaaaugaau

SEQ ID NO: 2234855 - RNA, 19 nt, Artificial Sequence
  Description of Artificial Sequence: Synthetic oligonucleotide
gcuuuaacaccuguguaga

SEQ ID NO: 2234856 - RNA, 19 nt, Artificial Sequence
  Description of Artificial Sequence: Synthetic oligonucleotide
cauaguauaccagcugucu

SEQ ID NO: 2234857 - RNA, 19 nt, Artificial Sequence
  Description of Artificial Sequence: Synthetic oligonucleotide
aucccaaaauaggucuugu

SEQ ID NO: 2234858 - RNA, 19 nt, Artificial Sequence
  Description of Artificial Sequence: Synthetic oligonucleotide
cuauaguugucugucaaau

SEQ ID NO: 2234859 - RNA, 19 nt, Artificial Sequence
  Description of Artificial Sequence: Synthetic oligonucleotide
uaggucuuguuucgucauu

SEQ ID NO: 2234860 - RNA, 19 nt, Artificial Sequence
  Description of Artificial Sequence: Synthetic oligonucleotide
gagguccuuaggugaugug

SEQ ID NO: 2234861 - RNA, 19 nt, Artificial Sequence
  Description of Artificial Sequence: Synthetic oligonucleotide
gcugucuccaguacaaauc

SEQ ID NO: 2234862 - RNA, 19 nt, Artificial Sequence
  Description of Artificial Sequence: Synthetic oligonucleotide
ggugaugugaaggucggaa

SEQ ID NO: 2234863 - RNA, 19 nt, Artificial Sequence
  Description of Artificial Sequence: Synthetic oligonucleotide
uuacugagucgagcagggc

SEQ ID NO: 2234864 - RNA, 19 nt, Artificial Sequence
  Description of Artificial Sequence: Synthetic oligonucleotide
uaaugggcauuguggccau

SEQ ID NO: 2234865 - RNA, 19 nt, Artificial Sequence
  Description of Artificial Sequence: Synthetic oligonucleotide
caucccacguuguauuuua

SEQ ID NO: 2234866 - RNA, 19 nt, Artificial Sequence
  Description of Artificial Sequence: Synthetic oligonucleotide
ggcaucguaggaggaaaag

SEQ ID NO: 2234867 - RNA, 19 nt, Artificial Sequence
  Description of Artificial Sequence: Synthetic oligonucleotide
ucaucccacguuguauuuu

SEQ ID NO: 2234868 - RNA, 19 nt, Artificial Sequence
  Description of Artificial Sequence: Synthetic oligonucleotide
gaguuaggagcaaaaguuu

SEQ ID NO: 2234869 - RNA, 19 nt, Artificial Sequence
  Description of Artificial Sequence: Synthetic oligonucleotide
gccaugcucuuugaaaaug

SEQ ID NO: 2234870 - RNA, 19 nt, Artificial Sequence
  Description of Artificial Sequence: Synthetic oligonucleotide
guaugguagggauguucaa

SEQ ID NO: 2234871 - RNA, 19 nt, Artificial Sequence
  Description of Artificial Sequence: Synthetic oligonucleotide
uuguuucgucauugcuuuc

SEQ ID NO: 2234872 - RNA, 19 nt, Artificial Sequence
  Description of Artificial Sequence: Synthetic oligonucleotide
gguuaccucuugucuucag

SEQ ID NO: 2234873 - RNA, 19 nt, Artificial Sequence
  Description of Artificial Sequence: Synthetic oligonucleotide
auagcgccacggcuuguau

SEQ ID NO: 2234874 - RNA, 19 nt, Artificial Sequence
  Description of Artificial Sequence: Synthetic oligonucleotide
gagguuugggguagaauau

SEQ ID NO: 2234875 - RNA, 19 nt, Artificial Sequence
  Description of Artificial Sequence: Synthetic oligonucleotide
cauccauaacuguuuugcu

SEQ ID NO: 2234876 - RNA, 19 nt, Artificial Sequence
  Description of Artificial Sequence: Synthetic oligonucleotide
gcucugacacauaguauac

SEQ ID NO: 2234877 - RNA, 19 nt, Artificial Sequence
  Description of Artificial Sequence: Synthetic oligonucleotide
ccaugcucuuugaaaauga

SEQ ID NO: 2234878 - RNA, 19 nt, Artificial Sequence
  Description of Artificial Sequence: Synthetic oligonucleotide
uuaggagguuugggguaga

SEQ ID NO: 2234879 - RNA, 19 nt, Artificial Sequence
  Description of Artificial Sequence: Synthetic oligonucleotide
uugaauccgugggguaauc

SEQ ID NO: 2234880 - RNA, 19 nt, Artificial Sequence
  Description of Artificial Sequence: Synthetic oligonucleotide
gagugaucccauggauuca

SEQ ID NO: 2234881 - RNA, 19 nt, Artificial Sequence
  Description of Artificial Sequence: Synthetic oligonucleotide
ccauaacuguuuugcuuug

SEQ ID NO: 2234882 - RNA, 19 nt, Artificial Sequence
  Description of Artificial Sequence: Synthetic oligonucleotide
auguucaauuggauaugau

SEQ ID NO: 2234883 - RNA, 19 nt, Artificial Sequence
  Description of Artificial Sequence: Synthetic oligonucleotide
aggagguuugggguagaau

SEQ ID NO: 2234884 - RNA, 19 nt, Artificial Sequence
  Description of Artificial Sequence: Synthetic oligonucleotide
ccgugggguaaucaagcag

SEQ ID NO: 2234885 - RNA, 19 nt, Artificial Sequence
  Description of Artificial Sequence: Synthetic oligonucleotide
cauaggucuugguuggcau

SEQ ID NO: 2234886 - RNA, 19 nt, Artificial Sequence
  Description of Artificial Sequence: Synthetic oligonucleotide
cuggccaagucaaugcuuu

SEQ ID NO: 2234887 - RNA, 19 nt, Artificial Sequence
  Description of Artificial Sequence: Synthetic oligonucleotide
uaggagguuugggguagaa

SEQ ID NO: 2234888 - RNA, 19 nt, Artificial Sequence
  Description of Artificial Sequence: Synthetic oligonucleotide
augucucaucccacguugu

SEQ ID NO: 2234889 - RNA, 19 nt, Artificial Sequence
  Description of Artificial Sequence: Synthetic oligonucleotide
ggcuuguauguguauggua

SEQ ID NO: 2234890 - RNA, 19 nt, Artificial Sequence
  Description of Artificial Sequence: Synthetic oligonucleotide
gucgagcagggcucugaca

SEQ ID NO: 2234891 - RNA, 19 nt, Artificial Sequence
  Description of Artificial Sequence: Synthetic oligonucleotide
gcgugcgggcuuuaacacc

SEQ ID NO: 2234892 - RNA, 19 nt, Artificial Sequence
  Description of Artificial Sequence: Synthetic oligonucleotide
uggccaagucaaugcuuuu

SEQ ID NO: 2234893 - RNA, 19 nt, Artificial Sequence
  Description of Artificial Sequence: Synthetic oligonucleotide
gucagaucuuuugauggau

SEQ ID NO: 2234894 - RNA, 19 nt, Artificial Sequence
  Description of Artificial Sequence: Synthetic oligonucleotide
ugagucgagcagggcucug

SEQ ID NO: 2234895 - RNA, 19 nt, Artificial Sequence
  Description of Artificial Sequence: Synthetic oligonucleotide
cugaugucucaucccacgu

SEQ ID NO: 2234896 - RNA, 19 nt, Artificial Sequence
  Description of Artificial Sequence: Synthetic oligonucleotide
uccuaagaucuagcagguu

SEQ ID NO: 2234897 - RNA, 19 nt, Artificial Sequence
  Description of Artificial Sequence: Synthetic oligonucleotide
gcugcgugcgggcuuuaac

SEQ ID NO: 2234898 - RNA, 19 nt, Artificial Sequence
  Description of Artificial Sequence: Synthetic oligonucleotide
aucuagcagguuggucuga

SEQ ID NO: 2234899 - RNA, 19 nt, Artificial Sequence
  Description of Artificial Sequence: Synthetic oligonucleotide
cgugggguaaucaagcagu

SEQ ID NO: 2234900 - RNA, 19 nt, Artificial Sequence
  Description of Artificial Sequence: Synthetic oligonucleotide
acacccugaccuggccaag

SEQ ID NO: 2234901 - RNA, 19 nt, Artificial Sequence
  Description of Artificial Sequence: Synthetic oligonucleotide
cauugcuuuccaugucuau

SEQ ID NO: 2234902 - RNA, 19 nt, Artificial Sequence
  Description of Artificial Sequence: Synthetic oligonucleotide
guagagguccuuaggugau

SEQ ID NO: 2234903 - RNA, 19 nt, Artificial Sequence
  Description of Artificial Sequence: Synthetic oligonucleotide
gcgggcuuuaacaccugug

SEQ ID NO: 2234904 - RNA, 19 nt, Artificial Sequence
  Description of Artificial Sequence: Synthetic oligonucleotide
gucucaucccacguuguau

SEQ ID NO: 2234905 - RNA, 19 nt, Artificial Sequence
  Description of Artificial Sequence: Synthetic oligonucleotide
gagcagggcucugacacau

SEQ ID NO: 2234906 - RNA, 19 nt, Artificial Sequence
  Description of Artificial Sequence: Synthetic oligonucleotide
aggugaugugaaggucgga

SEQ ID NO: 2234907 - RNA, 19 nt, Artificial Sequence
  Description of Artificial Sequence: Synthetic oligonucleotide
cggaaacauagcgccacgg

SEQ ID NO: 2234908 - RNA, 19 nt, Artificial Sequence
  Description of Artificial Sequence: Synthetic oligonucleotide
cucuugucuucagaacugu

SEQ ID NO: 2234909 - RNA, 19 nt, Artificial Sequence
  Description of Artificial Sequence: Synthetic oligonucleotide
ggucggaaacauagcgcca

SEQ ID NO: 2234910 - RNA, 19 nt, Artificial Sequence
  Description of Artificial Sequence: Synthetic oligonucleotide
aaugggcauuguggccaua

SEQ ID NO: 2234911 - RNA, 19 nt, Artificial Sequence
  Description of Artificial Sequence: Synthetic oligonucleotide
ugcugcgugcgggcuuuaa

SEQ ID NO: 2234912 - RNA, 19 nt, Artificial Sequence
  Description of Artificial Sequence: Synthetic oligonucleotide
aucccacguuguauuuuau

SEQ ID NO: 2234913 - RNA, 19 nt, Artificial Sequence
  Description of Artificial Sequence: Synthetic oligonucleotide
gguuggcaucguaggagga

SEQ ID NO: 2234914 - RNA, 19 nt, Artificial Sequence
  Description of Artificial Sequence: Synthetic oligonucleotide
ggucuugguuggcaucgua

SEQ ID NO: 2234915 - RNA, 19 nt, Artificial Sequence
  Description of Artificial Sequence: Synthetic oligonucleotide
cgugcgggcuuuaacaccu

SEQ ID NO: 2234916 - RNA, 19 nt, Artificial Sequence
  Description of Artificial Sequence: Synthetic oligonucleotide
ggguaaucaagcaguucau

SEQ ID NO: 2234917 - RNA, 19 nt, Artificial Sequence
  Description of Artificial Sequence: Synthetic oligonucleotide
ggguuaccucuugucuuca

SEQ ID NO: 2234918 - RNA, 19 nt, Artificial Sequence
  Description of Artificial Sequence: Synthetic oligonucleotide
gggagugaucccauggauu

SEQ ID NO: 2234919 - RNA, 19 nt, Artificial Sequence
  Description of Artificial Sequence: Synthetic oligonucleotide
gugcgggcuuuaacaccug

SEQ ID NO: 2234920 - RNA, 19 nt, Artificial Sequence
  Description of Artificial Sequence: Synthetic oligonucleotide
cgggcuuuaacaccugugu

SEQ ID NO: 2234921 - RNA, 19 nt, Artificial Sequence
  Description of Artificial Sequence: Synthetic oligonucleotide
gcaaacgcuucugugccau

SEQ ID NO: 2234922 - RNA, 19 nt, Artificial Sequence
  Description of Artificial Sequence: Synthetic oligonucleotide
gccacggcuuguaugugua

SEQ ID NO: 2234923 - RNA, 19 nt, Artificial Sequence
  Description of Artificial Sequence: Synthetic oligonucleotide
cugagucgagcagggcucu

SEQ ID NO: 2234924 - RNA, 19 nt, Artificial Sequence
  Description of Artificial Sequence: Synthetic oligonucleotide
gcaaaaguuuuaggagguu

SEQ ID NO: 2234925 - RNA, 19 nt, Artificial Sequence
  Description of Artificial Sequence: Synthetic oligonucleotide
cacccugaccuggccaagu

SEQ ID NO: 2234926 - RNA, 19 nt, Artificial Sequence
  Description of Artificial Sequence: Synthetic oligonucleotide
ccaucccaaaauaggucuu

SEQ ID NO: 2234927 - RNA, 19 nt, Artificial Sequence
  Description of Artificial Sequence: Synthetic oligonucleotide
gcgccacggcuuguaugug

SEQ ID NO: 2234928 - RNA, 19 nt, Artificial Sequence
  Description of Artificial Sequence: Synthetic oligonucleotide
gcugcugcgugcgggcuuu

SEQ ID NO: 2234929 - RNA, 19 nt, Artificial Sequence
  Description of Artificial Sequence: Synthetic oligonucleotide
cgccacggcuuguaugugu

SEQ ID NO: 2234930 - RNA, 19 nt, Artificial Sequence
  Description of Artificial Sequence: Synthetic oligonucleotide
ccacggcuuguauguguau

SEQ ID NO: 2234931 - RNA, 19 nt, Artificial Sequence
  Description of Artificial Sequence: Synthetic oligonucleotide
cugcugcgugcgggcuuua

SEQ ID NO: 2234932 - RNA, 19 nt, Artificial Sequence
  Description of Artificial Sequence: Synthetic oligonucleotide
aaagugaacaaacaucucc

SEQ ID NO: 2234933 - RNA, 19 nt, Artificial Sequence
  Description of Artificial Sequence: Synthetic oligonucleotide
gacaauuccagccacaagg

SEQ ID NO: 2234934 - RNA, 19 nt, Artificial Sequence
  Description of Artificial Sequence: Synthetic oligonucleotide
aaaauuguggugguaauac

SEQ ID NO: 2234935 - RNA, 19 nt, Artificial Sequence
  Description of Artificial Sequence: Synthetic oligonucleotide
agagcuacagccuggaagc

SEQ ID NO: 2234936 - RNA, 19 nt, Artificial Sequence
  Description of Artificial Sequence: Synthetic oligonucleotide
ucugauaaagugaacaaac

SEQ ID NO: 2234937 - RNA, 19 nt, Artificial Sequence
  Description of Artificial Sequence: Synthetic oligonucleotide
ugaacaaacaucuccuugc

SEQ ID NO: 2234938 - RNA, 19 nt, Artificial Sequence
  Description of Artificial Sequence: Synthetic oligonucleotide
aaugaaaaucuuguggaag

SEQ ID NO: 2234939 - RNA, 19 nt, Artificial Sequence
  Description of Artificial Sequence: Synthetic oligonucleotide
aauuguggugguaauacgg

SEQ ID NO: 2234940 - RNA, 19 nt, Artificial Sequence
  Description of Artificial Sequence: Synthetic oligonucleotide
ucugagaacagacccauug

SEQ ID NO: 2234941 - RNA, 19 nt, Artificial Sequence
  Description of Artificial Sequence: Synthetic oligonucleotide
uucauuagaguccaggaaa

SEQ ID NO: 2234942 - RNA, 19 nt, Artificial Sequence
  Description of Artificial Sequence: Synthetic oligonucleotide
auguguuccauguuccucc

SEQ ID NO: 2234943 - RNA, 19 nt, Artificial Sequence
  Description of Artificial Sequence: Synthetic oligonucleotide
gacuuugacagcaaugugg

SEQ ID NO: 2234944 - RNA, 19 nt, Artificial Sequence
  Description of Artificial Sequence: Synthetic oligonucleotide
auaaagugaacaaacaucu

SEQ ID NO: 2234945 - RNA, 19 nt, Artificial Sequence
  Description of Artificial Sequence: Synthetic oligonucleotide
aaaaucuuguggaagaaga

SEQ ID NO: 2234946 - RNA, 19 nt, Artificial Sequence
  Description of Artificial Sequence: Synthetic oligonucleotide
uuugacagcaauguggccc

SEQ ID NO: 2234947 - RNA, 19 nt, Artificial Sequence
  Description of Artificial Sequence: Synthetic oligonucleotide
ugauaaagugaacaaacau

SEQ ID NO: 2234948 - RNA, 19 nt, Artificial Sequence
  Description of Artificial Sequence: Synthetic oligonucleotide
agacccauuguucuguucg

SEQ ID NO: 2234949 - RNA, 19 nt, Artificial Sequence
  Description of Artificial Sequence: Synthetic oligonucleotide
aauacgggagaccugggcu

SEQ ID NO: 2234950 - RNA, 19 nt, Artificial Sequence
  Description of Artificial Sequence: Synthetic oligonucleotide
aacauguguuccauguucc

SEQ ID NO: 2234951 - RNA, 19 nt, Artificial Sequence
  Description of Artificial Sequence: Synthetic oligonucleotide
uguuucauuagaguccagg

SEQ ID NO: 2234952 - RNA, 19 nt, Artificial Sequence
  Description of Artificial Sequence: Synthetic oligonucleotide
acuuugacagcaauguggc

SEQ ID NO: 2234953 - RNA, 19 nt, Artificial Sequence
  Description of Artificial Sequence: Synthetic oligonucleotide
aagaugcaggcgaacaugc

SEQ ID NO: 2234954 - RNA, 19 nt, Artificial Sequence
  Description of Artificial Sequence: Synthetic oligonucleotide
aagaauagggguuccuugu

SEQ ID NO: 2234955 - RNA, 19 nt, Artificial Sequence
  Description of Artificial Sequence: Synthetic oligonucleotide
acuggaaccgcucuuuuag

SEQ ID NO: 2234956 - RNA, 19 nt, Artificial Sequence
  Description of Artificial Sequence: Synthetic oligonucleotide
aagcgaguccauuuaaaug

SEQ ID NO: 2234957 - RNA, 19 nt, Artificial Sequence
  Description of Artificial Sequence: Synthetic oligonucleotide
aauagggguuccuuguucu

SEQ ID NO: 2234958 - RNA, 19 nt, Artificial Sequence
  Description of Artificial Sequence: Synthetic oligonucleotide
ucugacaucauaguacccc

SEQ ID NO: 2234959 - RNA, 19 nt, Artificial Sequence
  Description of Artificial Sequence: Synthetic oligonucleotide
ucacucacaaaauuguggu

SEQ ID NO: 2234960 - RNA, 19 nt, Artificial Sequence
  Description of Artificial Sequence: Synthetic oligonucleotide
uuugaccagcaacacauug

SEQ ID NO: 2234961 - RNA, 19 nt, Artificial Sequence
  Description of Artificial Sequence: Synthetic oligonucleotide
ucgucugacaucauaguac

SEQ ID NO: 2234962 - RNA, 19 nt, Artificial Sequence
  Description of Artificial Sequence: Synthetic oligonucleotide
uguugcuuugaccagcaac

SEQ ID NO: 2234963 - RNA, 19 nt, Artificial Sequence
  Description of Artificial Sequence: Synthetic oligonucleotide
uuguaggucaggauguucu

SEQ ID NO: 2234964 - RNA, 19 nt, Artificial Sequence
  Description of Artificial Sequence: Synthetic oligonucleotide
gaagaauagggguuccuug

SEQ ID NO: 2234965 - RNA, 19 nt, Artificial Sequence
  Description of Artificial Sequence: Synthetic oligonucleotide
caacucugagaacagaccc

SEQ ID NO: 2234966 - RNA, 19 nt, Artificial Sequence
  Description of Artificial Sequence: Synthetic oligonucleotide
ugguguugaguccagcaag

SEQ ID NO: 2234967 - RNA, 19 nt, Artificial Sequence
  Description of Artificial Sequence: Synthetic oligonucleotide
uuaaaugcugcugccaccc

SEQ ID NO: 2234968 - RNA, 19 nt, Artificial Sequence
  Description of Artificial Sequence: Synthetic oligonucleotide
caggcagagaacuggaggg

SEQ ID NO: 2234969 - RNA, 19 nt, Artificial Sequence
  Description of Artificial Sequence: Synthetic oligonucleotide
aguccagcaagauuaguug

SEQ ID NO: 2234970 - RNA, 19 nt, Artificial Sequence
  Description of Artificial Sequence: Synthetic oligonucleotide
gauuuccacauacuggaac

SEQ ID NO: 2234971 - RNA, 19 nt, Artificial Sequence
  Description of Artificial Sequence: Synthetic oligonucleotide
uugguuguucauguggacg

SEQ ID NO: 2234972 - RNA, 19 nt, Artificial Sequence
  Description of Artificial Sequence: Synthetic oligonucleotide
uccacuugaaacauguguu

SEQ ID NO: 2234973 - RNA, 19 nt, Artificial Sequence
  Description of Artificial Sequence: Synthetic oligonucleotide
aagauuaguugguccacca

SEQ ID NO: 2234974 - RNA, 19 nt, Artificial Sequence
  Description of Artificial Sequence: Synthetic oligonucleotide
uguaaugggaggagagccc

SEQ ID NO: 2234975 - RNA, 19 nt, Artificial Sequence
  Description of Artificial Sequence: Synthetic oligonucleotide
aagugaacaaacaucuccu

SEQ ID NO: 2234976 - RNA, 19 nt, Artificial Sequence
  Description of Artificial Sequence: Synthetic oligonucleotide
uguucucuguuucauuaga

SEQ ID NO: 2234977 - RNA, 19 nt, Artificial Sequence
  Description of Artificial Sequence: Synthetic oligonucleotide
ucuuaguguguccaccaug

SEQ ID NO: 2234978 - RNA, 19 nt, Artificial Sequence
  Description of Artificial Sequence: Synthetic oligonucleotide
uuaggaugguucuuagugu

SEQ ID NO: 2234979 - RNA, 19 nt, Artificial Sequence
  Description of Artificial Sequence: Synthetic oligonucleotide
gguaauacgggagaccugg

SEQ ID NO: 2234980 - RNA, 19 nt, Artificial Sequence
  Description of Artificial Sequence: Synthetic oligonucleotide
ucggaccucacucacaaaa

SEQ ID NO: 2234981 - RNA, 19 nt, Artificial Sequence
  Description of Artificial Sequence: Synthetic oligonucleotide
agucugucaaaggaguugg

SEQ ID NO: 2234982 - RNA, 19 nt, Artificial Sequence
  Description of Artificial Sequence: Synthetic oligonucleotide
ucuguuucauuagagucca

SEQ ID NO: 2234983 - RNA, 19 nt, Artificial Sequence
  Description of Artificial Sequence: Synthetic oligonucleotide
auuguucuguucgugccgc

SEQ ID NO: 2234984 - RNA, 19 nt, Artificial Sequence
  Description of Artificial Sequence: Synthetic oligonucleotide
ugcucacgaagucaaagcu

SEQ ID NO: 2234985 - RNA, 19 nt, Artificial Sequence
  Description of Artificial Sequence: Synthetic oligonucleotide
gaaaaucuuguggaagaag

SEQ ID NO: 2234986 - RNA, 19 nt, Artificial Sequence
  Description of Artificial Sequence: Synthetic oligonucleotide
ucauuagaguccaggaaaa

SEQ ID NO: 2234987 - RNA, 19 nt, Artificial Sequence
  Description of Artificial Sequence: Synthetic oligonucleotide
acuggaggguucuucgugg

SEQ ID NO: 2234988 - RNA, 19 nt, Artificial Sequence
  Description of Artificial Sequence: Synthetic oligonucleotide
ggaagcuuccacuugaaac

SEQ ID NO: 2234989 - RNA, 19 nt, Artificial Sequence
  Description of Artificial Sequence: Synthetic oligonucleotide
agugccaccaaaacugugg

SEQ ID NO: 2234990 - RNA, 19 nt, Artificial Sequence
  Description of Artificial Sequence: Synthetic oligonucleotide
uggaggaaggcgcugacaa

SEQ ID NO: 2234991 - RNA, 19 nt, Artificial Sequence
  Description of Artificial Sequence: Synthetic oligonucleotide
ugguuguucauguggacgu

SEQ ID NO: 2234992 - RNA, 19 nt, Artificial Sequence
  Description of Artificial Sequence: Synthetic oligonucleotide
uugcucacgaagucaaagc

SEQ ID NO: 2234993 - RNA, 19 nt, Artificial Sequence
  Description of Artificial Sequence: Synthetic oligonucleotide
uaaugaaaaucuuguggaa

SEQ ID NO: 2234994 - RNA, 19 nt, Artificial Sequence
  Description of Artificial Sequence: Synthetic oligonucleotide
uguuccuccguuuguaggu

SEQ ID NO: 2234995 - RNA, 19 nt, Artificial Sequence
  Description of Artificial Sequence: Synthetic oligonucleotide
gauguucucuguuucauua

SEQ ID NO: 2234996 - RNA, 19 nt, Artificial Sequence
  Description of Artificial Sequence: Synthetic oligonucleotide
cuuaguguguccaccauga

SEQ ID NO: 2234997 - RNA, 19 nt, Artificial Sequence
  Description of Artificial Sequence: Synthetic oligonucleotide
uguucauguggacguagug

SEQ ID NO: 2234998 - RNA, 19 nt, Artificial Sequence
  Description of Artificial Sequence: Synthetic oligonucleotide
uaauacgggagaccugggc

SEQ ID NO: 2234999 - RNA, 19 nt, Artificial Sequence
  Description of Artificial Sequence: Synthetic oligonucleotide
gaaccgcucuuuuaggaug

SEQ ID NO: 2235000 - RNA, 19 nt, Artificial Sequence
  Description of Artificial Sequence: Synthetic oligonucleotide
uugacagcaauguggcccc

SEQ ID NO: 2235001 - RNA, 19 nt, Artificial Sequence
  Description of Artificial Sequence: Synthetic oligonucleotide
cuguaaugggaggagagcc

SEQ ID NO: 2235002 - RNA, 19 nt, Artificial Sequence
  Description of Artificial Sequence: Synthetic oligonucleotide
ucaaggaauucugggaagc

SEQ ID NO: 2235003 - RNA, 19 nt, Artificial Sequence
  Description of Artificial Sequence: Synthetic oligonucleotide
uuccccacauucuuuauuc

SEQ ID NO: 2235004 - RNA, 19 nt, Artificial Sequence
  Description of Artificial Sequence: Synthetic oligonucleotide
acgaagucaaagcugugcu

SEQ ID NO: 2235005 - RNA, 19 nt, Artificial Sequence
  Description of Artificial Sequence: Synthetic oligonucleotide
acagagagccuccgguccc

SEQ ID NO: 2235006 - RNA, 19 nt, Artificial Sequence
  Description of Artificial Sequence: Synthetic oligonucleotide
uuuauucaggagccccugc

SEQ ID NO: 2235007 - RNA, 19 nt, Artificial Sequence
  Description of Artificial Sequence: Synthetic oligonucleotide
cauguggacguagugauug

SEQ ID NO: 2235008 - RNA, 19 nt, Artificial Sequence
  Description of Artificial Sequence: Synthetic oligonucleotide
aaaugguguugaguccagc

SEQ ID NO: 2235009 - RNA, 19 nt, Artificial Sequence
  Description of Artificial Sequence: Synthetic oligonucleotide
aggaauucugggaagcuuc

SEQ ID NO: 2235010 - RNA, 19 nt, Artificial Sequence
  Description of Artificial Sequence: Synthetic oligonucleotide
uuuccacauacuggaaccg

SEQ ID NO: 2235011 - RNA, 19 nt, Artificial Sequence
  Description of Artificial Sequence: Synthetic oligonucleotide
cacauaaugaaaaucuugu

SEQ ID NO: 2235012 - RNA, 19 nt, Artificial Sequence
  Description of Artificial Sequence: Synthetic oligonucleotide
gaagaugcaggcgaacaug

SEQ ID NO: 2235013 - RNA, 19 nt, Artificial Sequence
  Description of Artificial Sequence: Synthetic oligonucleotide
uguguugcuuugaccagca

SEQ ID NO: 2235014 - RNA, 19 nt, Artificial Sequence
  Description of Artificial Sequence: Synthetic oligonucleotide
aucuuguggaagaagagga

SEQ ID NO: 2235015 - RNA, 19 nt, Artificial Sequence
  Description of Artificial Sequence: Synthetic oligonucleotide
ucaucguuggcucgucuga

SEQ ID NO: 2235016 - RNA, 19 nt, Artificial Sequence
  Description of Artificial Sequence: Synthetic oligonucleotide
cauuguucuguucgugccg

SEQ ID NO: 2235017 - RNA, 19 nt, Artificial Sequence
  Description of Artificial Sequence: Synthetic oligonucleotide
gacguagugauugccuggg

SEQ ID NO: 2235018 - RNA, 19 nt, Artificial Sequence
  Description of Artificial Sequence: Synthetic oligonucleotide
gaccucacucacaaaauug

SEQ ID NO: 2235019 - RNA, 19 nt, Artificial Sequence
  Description of Artificial Sequence: Synthetic oligonucleotide
uggacguagugauugccug

SEQ ID NO: 2235020 - RNA, 19 nt, Artificial Sequence
  Description of Artificial Sequence: Synthetic oligonucleotide
ucccuguucagcaccacac

SEQ ID NO: 2235021 - RNA, 19 nt, Artificial Sequence
  Description of Artificial Sequence: Synthetic oligonucleotide
uguguuccauguuccuccg

SEQ ID NO: 2235022 - RNA, 19 nt, Artificial Sequence
  Description of Artificial Sequence: Synthetic oligonucleotide
aucuuugugguuccucucu

SEQ ID NO: 2235023 - RNA, 19 nt, Artificial Sequence
  Description of Artificial Sequence: Synthetic oligonucleotide
uuuuaggaugguucuuagu

SEQ ID NO: 2235024 - RNA, 19 nt, Artificial Sequence
  Description of Artificial Sequence: Synthetic oligonucleotide
aguugguccaccaucucag

SEQ ID NO: 2235025 - RNA, 19 nt, Artificial Sequence
  Description of Artificial Sequence: Synthetic oligonucleotide
aacagacccauuguucugu

SEQ ID NO: 2235026 - RNA, 19 nt, Artificial Sequence
  Description of Artificial Sequence: Synthetic oligonucleotide
gggauuuccacauacugga

SEQ ID NO: 2235027 - RNA, 19 nt, Artificial Sequence
  Description of Artificial Sequence: Synthetic oligonucleotide
ucuuuuaggaugguucuua

SEQ ID NO: 2235028 - RNA, 19 nt, Artificial Sequence
  Description of Artificial Sequence: Synthetic oligonucleotide
cacuugaaacauguguucc

SEQ ID NO: 2235029 - RNA, 19 nt, Artificial Sequence
  Description of Artificial Sequence: Synthetic oligonucleotide
ugacaauuccagccacaag

SEQ ID NO: 2235030 - RNA, 19 nt, Artificial Sequence
  Description of Artificial Sequence: Synthetic oligonucleotide
aaccgcucuuuuaggaugg

SEQ ID NO: 2235031 - RNA, 19 nt, Artificial Sequence
  Description of Artificial Sequence: Synthetic oligonucleotide
uuuuauucaggagccccug

SEQ ID NO: 2235032 - RNA, 19 nt, Artificial Sequence
  Description of Artificial Sequence: Synthetic oligonucleotide
uggaaccgcucuuuuagga

SEQ ID NO: 2235033 - RNA, 19 nt, Artificial Sequence
  Description of Artificial Sequence: Synthetic oligonucleotide
ggcgcugacaauuccagcc

SEQ ID NO: 2235034 - RNA, 19 nt, Artificial Sequence
  Description of Artificial Sequence: Synthetic oligonucleotide
auguggacguagugauugc

SEQ ID NO: 2235035 - RNA, 19 nt, Artificial Sequence
  Description of Artificial Sequence: Synthetic oligonucleotide
ugcuuugaccagcaacaca

SEQ ID NO: 2235036 - RNA, 19 nt, Artificial Sequence
  Description of Artificial Sequence: Synthetic oligonucleotide
cagcaagauuaguuggucc

SEQ ID NO: 2235037 - RNA, 19 nt, Artificial Sequence
  Description of Artificial Sequence: Synthetic oligonucleotide
ucuggcacagagagccucc

SEQ ID NO: 2235038 - RNA, 19 nt, Artificial Sequence
  Description of Artificial Sequence: Synthetic oligonucleotide
aggcgaacaugccacccac

SEQ ID NO: 2235039 - RNA, 19 nt, Artificial Sequence
  Description of Artificial Sequence: Synthetic oligonucleotide
gaauagggguuccuuguuc

SEQ ID NO: 2235040 - RNA, 19 nt, Artificial Sequence
  Description of Artificial Sequence: Synthetic oligonucleotide
gagucugucaaaggaguug

SEQ ID NO: 2235041 - RNA, 19 nt, Artificial Sequence
  Description of Artificial Sequence: Synthetic oligonucleotide
uuguggugguaauacggga

SEQ ID NO: 2235042 - RNA, 19 nt, Artificial Sequence
  Description of Artificial Sequence: Synthetic oligonucleotide
auacgggagaccugggcug

SEQ ID NO: 2235043 - RNA, 19 nt, Artificial Sequence
  Description of Artificial Sequence: Synthetic oligonucleotide
uguugaguccagcaagauu

SEQ ID NO: 2235044 - RNA, 19 nt, Artificial Sequence
  Description of Artificial Sequence: Synthetic oligonucleotide
cacgaagucaaagcugugc

SEQ ID NO: 2235045 - RNA, 19 nt, Artificial Sequence
  Description of Artificial Sequence: Synthetic oligonucleotide
uauucaggagccccugcaa

SEQ ID NO: 2235046 - RNA, 19 nt, Artificial Sequence
  Description of Artificial Sequence: Synthetic oligonucleotide
ggaaugagucugucaaagg

SEQ ID NO: 2235047 - RNA, 19 nt, Artificial Sequence
  Description of Artificial Sequence: Synthetic oligonucleotide
uuguucucaucguuggcuc

SEQ ID NO: 2235048 - RNA, 19 nt, Artificial Sequence
  Description of Artificial Sequence: Synthetic oligonucleotide
uccagccacaagguguugg

SEQ ID NO: 2235049 - RNA, 19 nt, Artificial Sequence
  Description of Artificial Sequence: Synthetic oligonucleotide
augcaggcgaacaugccac

SEQ ID NO: 2235050 - RNA, 19 nt, Artificial Sequence
  Description of Artificial Sequence: Synthetic oligonucleotide
aaugggaggagagcccaug

SEQ ID NO: 2235051 - RNA, 19 nt, Artificial Sequence
  Description of Artificial Sequence: Synthetic oligonucleotide
guucucuguuucauuagag

SEQ ID NO: 2235052 - RNA, 19 nt, Artificial Sequence
  Description of Artificial Sequence: Synthetic oligonucleotide
cacagagagccuccggucc

SEQ ID NO: 2235053 - RNA, 19 nt, Artificial Sequence
  Description of Artificial Sequence: Synthetic oligonucleotide
ugaaaaucuuguggaagaa

SEQ ID NO: 2235054 - RNA, 19 nt, Artificial Sequence
  Description of Artificial Sequence: Synthetic oligonucleotide
gauugccugggauuuccac

SEQ ID NO: 2235055 - RNA, 19 nt, Artificial Sequence
  Description of Artificial Sequence: Synthetic oligonucleotide
acaagguguugguuguuca

SEQ ID NO: 2235056 - RNA, 19 nt, Artificial Sequence
  Description of Artificial Sequence: Synthetic oligonucleotide
auagggguuccuuguucuc

SEQ ID NO: 2235057 - RNA, 19 nt, Artificial Sequence
  Description of Artificial Sequence: Synthetic oligonucleotide
aaaugcugcugccacccuu

SEQ ID NO: 2235058 - RNA, 19 nt, Artificial Sequence
  Description of Artificial Sequence: Synthetic oligonucleotide
caagauuaguugguccacc

SEQ ID NO: 2235059 - RNA, 19 nt, Artificial Sequence
  Description of Artificial Sequence: Synthetic oligonucleotide
gaguuggcauuguccagcc

SEQ ID NO: 2235060 - RNA, 19 nt, Artificial Sequence
  Description of Artificial Sequence: Synthetic oligonucleotide
guuggcucgucugacauca

SEQ ID NO: 2235061 - RNA, 19 nt, Artificial Sequence
  Description of Artificial Sequence: Synthetic oligonucleotide
cagccagccaugcaggcag

SEQ ID NO: 2235062 - RNA, 19 nt, Artificial Sequence
  Description of Artificial Sequence: Synthetic oligonucleotide
uguggacguagugauugcc

SEQ ID NO: 2235063 - RNA, 19 nt, Artificial Sequence
  Description of Artificial Sequence: Synthetic oligonucleotide
uccucucugcagcaggagu

SEQ ID NO: 2235064 - RNA, 19 nt, Artificial Sequence
  Description of Artificial Sequence: Synthetic oligonucleotide
guucuuaguguguccacca

SEQ ID NO: 2235065 - RNA, 19 nt, Artificial Sequence
  Description of Artificial Sequence: Synthetic oligonucleotide
gaagaagaggaaugagucu

SEQ ID NO: 2235066 - RNA, 19 nt, Artificial Sequence
  Description of Artificial Sequence: Synthetic oligonucleotide
guucauguggacguaguga

SEQ ID NO: 2235067 - RNA, 19 nt, Artificial Sequence
  Description of Artificial Sequence: Synthetic oligonucleotide
cuucgugggagccccagac

SEQ ID NO: 2235068 - RNA, 19 nt, Artificial Sequence
  Description of Artificial Sequence: Synthetic oligonucleotide
gccaccaaaacuguggccc

SEQ ID NO: 2235069 - RNA, 19 nt, Artificial Sequence
  Description of Artificial Sequence: Synthetic oligonucleotide
caucucagggaagaugcag

SEQ ID NO: 2235070 - RNA, 19 nt, Artificial Sequence
  Description of Artificial Sequence: Synthetic oligonucleotide
cucaucguuggcucgucug

SEQ ID NO: 2235071 - RNA, 19 nt, Artificial Sequence
  Description of Artificial Sequence: Synthetic oligonucleotide
cuggaaccgcucuuuuagg

SEQ ID NO: 2235072 - RNA, 19 nt, Artificial Sequence
  Description of Artificial Sequence: Synthetic oligonucleotide
gcaggcgucugauaaagug

SEQ ID NO: 2235073 - RNA, 19 nt, Artificial Sequence
  Description of Artificial Sequence: Synthetic oligonucleotide
ugaagaauagggguuccuu

SEQ ID NO: 2235074 - RNA, 19 nt, Artificial Sequence
  Description of Artificial Sequence: Synthetic oligonucleotide
aggcgcugacaauuccagc

SEQ ID NO: 2235075 - RNA, 19 nt, Artificial Sequence
  Description of Artificial Sequence: Synthetic oligonucleotide
augagucugucaaaggagu

SEQ ID NO: 2235076 - RNA, 19 nt, Artificial Sequence
  Description of Artificial Sequence: Synthetic oligonucleotide
cacccucaaggaauucugg

SEQ ID NO: 2235077 - RNA, 19 nt, Artificial Sequence
  Description of Artificial Sequence: Synthetic oligonucleotide
guuguucauguggacguag

SEQ ID NO: 2235078 - RNA, 19 nt, Artificial Sequence
  Description of Artificial Sequence: Synthetic oligonucleotide
uccuccguuuguaggucag

SEQ ID NO: 2235079 - RNA, 19 nt, Artificial Sequence
  Description of Artificial Sequence: Synthetic oligonucleotide
aggguucuucgugggagcc

SEQ ID NO: 2235080 - RNA, 19 nt, Artificial Sequence
  Description of Artificial Sequence: Synthetic oligonucleotide
cacucacaaaauuguggug

SEQ ID NO: 2235081 - RNA, 19 nt, Artificial Sequence
  Description of Artificial Sequence: Synthetic oligonucleotide
ucgugggagccccagacuu

SEQ ID NO: 2235082 - RNA, 19 nt, Artificial Sequence
  Description of Artificial Sequence: Synthetic oligonucleotide
auggccacauaaugaaaau

SEQ ID NO: 2235083 - RNA, 19 nt, Artificial Sequence
  Description of Artificial Sequence: Synthetic oligonucleotide
gaagcgaguccauuuaaau

SEQ ID NO: 2235084 - RNA, 19 nt, Artificial Sequence
  Description of Artificial Sequence: Synthetic oligonucleotide
cacccuucggaccucacuc

SEQ ID NO: 2235085 - RNA, 19 nt, Artificial Sequence
  Description of Artificial Sequence: Synthetic oligonucleotide
cucacgaagucaaagcugu

SEQ ID NO: 2235086 - RNA, 19 nt, Artificial Sequence
  Description of Artificial Sequence: Synthetic oligonucleotide
guugguccaccaucucagg

SEQ ID NO: 2235087 - RNA, 19 nt, Artificial Sequence
  Description of Artificial Sequence: Synthetic oligonucleotide
aaggaauucugggaagcuu

SEQ ID NO: 2235088 - RNA, 19 nt, Artificial Sequence
  Description of Artificial Sequence: Synthetic oligonucleotide
augguucuuagugugucca

SEQ ID NO: 2235089 - RNA, 19 nt, Artificial Sequence
  Description of Artificial Sequence: Synthetic oligonucleotide
agccccagacuuugacagc

SEQ ID NO: 2235090 - RNA, 19 nt, Artificial Sequence
  Description of Artificial Sequence: Synthetic oligonucleotide
agugaacaaacaucuccuu

SEQ ID NO: 2235091 - RNA, 19 nt, Artificial Sequence
  Description of Artificial Sequence: Synthetic oligonucleotide
aggaguuggcauuguccag

SEQ ID NO: 2235092 - RNA, 19 nt, Artificial Sequence
  Description of Artificial Sequence: Synthetic oligonucleotide
ugagucugucaaaggaguu

SEQ ID NO: 2235093 - RNA, 19 nt, Artificial Sequence
  Description of Artificial Sequence: Synthetic oligonucleotide
cuuugacagcaauguggcc

SEQ ID NO: 2235094 - RNA, 19 nt, Artificial Sequence
  Description of Artificial Sequence: Synthetic oligonucleotide
gguuccucucugcagcagg

SEQ ID NO: 2235095 - RNA, 19 nt, Artificial Sequence
  Description of Artificial Sequence: Synthetic oligonucleotide
cccacauucuuuauucaag

SEQ ID NO: 2235096 - RNA, 19 nt, Artificial Sequence
  Description of Artificial Sequence: Synthetic oligonucleotide
gacaucauaguaccccugu

SEQ ID NO: 2235097 - RNA, 19 nt, Artificial Sequence
  Description of Artificial Sequence: Synthetic oligonucleotide
caugaagaauagggguucc

SEQ ID NO: 2235098 - RNA, 19 nt, Artificial Sequence
  Description of Artificial Sequence: Synthetic oligonucleotide
agauuaguugguccaccau

SEQ ID NO: 2235099 - RNA, 19 nt, Artificial Sequence
  Description of Artificial Sequence: Synthetic oligonucleotide
cuggaggguucuucguggg

SEQ ID NO: 2235100 - RNA, 19 nt, Artificial Sequence
  Description of Artificial Sequence: Synthetic oligonucleotide
agaugcaggcgaacaugcc

SEQ ID NO: 2235101 - RNA, 19 nt, Artificial Sequence
  Description of Artificial Sequence: Synthetic oligonucleotide
uuuguaggucaggauguuc

SEQ ID NO: 2235102 - RNA, 19 nt, Artificial Sequence
  Description of Artificial Sequence: Synthetic oligonucleotide
ggccccaaggcacagccgg

SEQ ID NO: 2235103 - RNA, 19 nt, Artificial Sequence
  Description of Artificial Sequence: Synthetic oligonucleotide
ggcuucaacucugagaaca

SEQ ID NO: 2235104 - RNA, 19 nt, Artificial Sequence
  Description of Artificial Sequence: Synthetic oligonucleotide
caggcgucugauaaaguga

SEQ ID NO: 2235105 - RNA, 19 nt, Artificial Sequence
  Description of Artificial Sequence: Synthetic oligonucleotide
uucuuaguguguccaccau

SEQ ID NO: 2235106 - RNA, 19 nt, Artificial Sequence
  Description of Artificial Sequence: Synthetic oligonucleotide
ggacguagugauugccugg

SEQ ID NO: 2235107 - RNA, 19 nt, Artificial Sequence
  Description of Artificial Sequence: Synthetic oligonucleotide
aggaguuccccacauucuu

SEQ ID NO: 2235108 - RNA, 19 nt, Artificial Sequence
  Description of Artificial Sequence: Synthetic oligonucleotide
cuguucgugccgcuguuac

SEQ ID NO: 2235109 - RNA, 19 nt, Artificial Sequence
  Description of Artificial Sequence: Synthetic oligonucleotide
guucgugccgcuguuacuc

SEQ ID NO: 2235110 - RNA, 19 nt, Artificial Sequence
  Description of Artificial Sequence: Synthetic oligonucleotide
uagugauugccugggauuu

SEQ ID NO: 2235111 - RNA, 19 nt, Artificial Sequence
  Description of Artificial Sequence: Synthetic oligonucleotide
cuguguugcuuugaccagc

SEQ ID NO: 2235112 - RNA, 19 nt, Artificial Sequence
  Description of Artificial Sequence: Synthetic oligonucleotide
ccguuuguaggucaggaug

SEQ ID NO: 2235113 - RNA, 19 nt, Artificial Sequence
  Description of Artificial Sequence: Synthetic oligonucleotide
cugcaggcgucugauaaag

SEQ ID NO: 2235114 - RNA, 19 nt, Artificial Sequence
  Description of Artificial Sequence: Synthetic oligonucleotide
gaacaaacaucuccuugcu

SEQ ID NO: 2235115 - RNA, 19 nt, Artificial Sequence
  Description of Artificial Sequence: Synthetic oligonucleotide
acacauuggccugcaggcg

SEQ ID NO: 2235116 - RNA, 19 nt, Artificial Sequence
  Description of Artificial Sequence: Synthetic oligonucleotide
accaaaacuguggcccagg

SEQ ID NO: 2235117 - RNA, 19 nt, Artificial Sequence
  Description of Artificial Sequence: Synthetic oligonucleotide
caaaggaguuggcauuguc

SEQ ID NO: 2235118 - RNA, 19 nt, Artificial Sequence
  Description of Artificial Sequence: Synthetic oligonucleotide
ccauuguucuguucgugcc

SEQ ID NO: 2235119 - RNA, 19 nt, Artificial Sequence
  Description of Artificial Sequence: Synthetic oligonucleotide
accaugaagaauagggguu

SEQ ID NO: 2235120 - RNA, 19 nt, Artificial Sequence
  Description of Artificial Sequence: Synthetic oligonucleotide
uuaguguguccaccaugaa

SEQ ID NO: 2235121 - RNA, 19 nt, Artificial Sequence
  Description of Artificial Sequence: Synthetic oligonucleotide
gagaagcgaguccauuuaa

SEQ ID NO: 2235122 - RNA, 19 nt, Artificial Sequence
  Description of Artificial Sequence: Synthetic oligonucleotide
ugguucuuaguguguccac

SEQ ID NO: 2235123 - RNA, 19 nt, Artificial Sequence
  Description of Artificial Sequence: Synthetic oligonucleotide
acacccucaaggaauucug

SEQ ID NO: 2235124 - RNA, 19 nt, Artificial Sequence
  Description of Artificial Sequence: Synthetic oligonucleotide
gguucuuaguguguccacc

SEQ ID NO: 2235125 - RNA, 19 nt, Artificial Sequence
  Description of Artificial Sequence: Synthetic oligonucleotide
agugauugccugggauuuc

SEQ ID NO: 2235126 - RNA, 19 nt, Artificial Sequence
  Description of Artificial Sequence: Synthetic oligonucleotide
aguaccccuguguugcuuu

SEQ ID NO: 2235127 - RNA, 19 nt, Artificial Sequence
  Description of Artificial Sequence: Synthetic oligonucleotide
uucgugccgcuguuacucc

SEQ ID NO: 2235128 - RNA, 19 nt, Artificial Sequence
  Description of Artificial Sequence: Synthetic oligonucleotide
uguucgugccgcuguuacu

SEQ ID NO: 2235129 - RNA, 19 nt, Artificial Sequence
  Description of Artificial Sequence: Synthetic oligonucleotide
uuccuccguuuguagguca

SEQ ID NO: 2235130 - RNA, 19 nt, Artificial Sequence
  Description of Artificial Sequence: Synthetic oligonucleotide
auucuuuauucaaguggcu

SEQ ID NO: 2235131 - RNA, 19 nt, Artificial Sequence
  Description of Artificial Sequence: Synthetic oligonucleotide
uggaggguucuucguggga

SEQ ID NO: 2235132 - RNA, 19 nt, Artificial Sequence
  Description of Artificial Sequence: Synthetic oligonucleotide
ugcaggcgaacaugccacc

SEQ ID NO: 2235133 - RNA, 19 nt, Artificial Sequence
  Description of Artificial Sequence: Synthetic oligonucleotide
ucucaucguuggcucgucu

SEQ ID NO: 2235134 - RNA, 19 nt, Artificial Sequence
  Description of Artificial Sequence: Synthetic oligonucleotide
aucguuggcucgucugaca

SEQ ID NO: 2235135 - RNA, 19 nt, Artificial Sequence
  Description of Artificial Sequence: Synthetic oligonucleotide
uggugguaauacgggagac

SEQ ID NO: 2235136 - RNA, 19 nt, Artificial Sequence
  Description of Artificial Sequence: Synthetic oligonucleotide
gaggaaugagucugucaaa

SEQ ID NO: 2235137 - RNA, 19 nt, Artificial Sequence
  Description of Artificial Sequence: Synthetic oligonucleotide
guaauacgggagaccuggg

SEQ ID NO: 2235138 - RNA, 19 nt, Artificial Sequence
  Description of Artificial Sequence: Synthetic oligonucleotide
ugcugccacccuucggacc

SEQ ID NO: 2235139 - RNA, 19 nt, Artificial Sequence
  Description of Artificial Sequence: Synthetic oligonucleotide
cauuguccagccagccaug

SEQ ID NO: 2235140 - RNA, 19 nt, Artificial Sequence
  Description of Artificial Sequence: Synthetic oligonucleotide
caucauaguaccccugugu

SEQ ID NO: 2235141 - RNA, 19 nt, Artificial Sequence
  Description of Artificial Sequence: Synthetic oligonucleotide
ugggaagcuuccacuugaa

SEQ ID NO: 2235142 - RNA, 19 nt, Artificial Sequence
  Description of Artificial Sequence: Synthetic oligonucleotide
acauacuggaaccgcucuu

SEQ ID NO: 2235143 - RNA, 19 nt, Artificial Sequence
  Description of Artificial Sequence: Synthetic oligonucleotide
uucuucgugggagccccag

SEQ ID NO: 2235144 - RNA, 19 nt, Artificial Sequence
  Description of Artificial Sequence: Synthetic oligonucleotide
gcgucugauaaagugaaca

SEQ ID NO: 2235145 - RNA, 19 nt, Artificial Sequence
  Description of Artificial Sequence: Synthetic oligonucleotide
ggagaccugggcuguaaug

SEQ ID NO: 2235146 - RNA, 19 nt, Artificial Sequence
  Description of Artificial Sequence: Synthetic oligonucleotide
ggcuguaaugggaggagag

SEQ ID NO: 2235147 - RNA, 19 nt, Artificial Sequence
  Description of Artificial Sequence: Synthetic oligonucleotide
ggugguaauacgggagacc

SEQ ID NO: 2235148 - RNA, 19 nt, Artificial Sequence
  Description of Artificial Sequence: Synthetic oligonucleotide
cagcaccacaccuguggcc

SEQ ID NO: 2235149 - RNA, 19 nt, Artificial Sequence
  Description of Artificial Sequence: Synthetic oligonucleotide
uggcauuguccagccagcc

SEQ ID NO: 2235150 - RNA, 19 nt, Artificial Sequence
  Description of Artificial Sequence: Synthetic oligonucleotide
gguucuucgugggagcccc

SEQ ID NO: 2235151 - RNA, 19 nt, Artificial Sequence
  Description of Artificial Sequence: Synthetic oligonucleotide
cucgucugacaucauagua

SEQ ID NO: 2235152 - RNA, 19 nt, Artificial Sequence
  Description of Artificial Sequence: Synthetic oligonucleotide
ucaaaggaguuggcauugu

SEQ ID NO: 2235153 - RNA, 19 nt, Artificial Sequence
  Description of Artificial Sequence: Synthetic oligonucleotide
ucauguggacguagugauu

SEQ ID NO: 2235154 - RNA, 19 nt, Artificial Sequence
  Description of Artificial Sequence: Synthetic oligonucleotide
ugcaggcgucugauaaagu

SEQ ID NO: 2235155 - RNA, 19 nt, Artificial Sequence
  Description of Artificial Sequence: Synthetic oligonucleotide
uguguccaccaugaagaau

SEQ ID NO: 2235156 - RNA, 19 nt, Artificial Sequence
  Description of Artificial Sequence: Synthetic oligonucleotide
uggcucgucugacaucaua

SEQ ID NO: 2235157 - RNA, 19 nt, Artificial Sequence
  Description of Artificial Sequence: Synthetic oligonucleotide
gaagcaguccuggguuggc

SEQ ID NO: 2235158 - RNA, 19 nt, Artificial Sequence
  Description of Artificial Sequence: Synthetic oligonucleotide
ccacuugaaacauguguuc

SEQ ID NO: 2235159 - RNA, 19 nt, Artificial Sequence
  Description of Artificial Sequence: Synthetic oligonucleotide
agaagcgaguccauuuaaa

SEQ ID NO: 2235160 - RNA, 19 nt, Artificial Sequence
  Description of Artificial Sequence: Synthetic oligonucleotide
guagugauugccugggauu

SEQ ID NO: 2235161 - RNA, 19 nt, Artificial Sequence
  Description of Artificial Sequence: Synthetic oligonucleotide
caugccacccacagugcca

SEQ ID NO: 2235162 - RNA, 19 nt, Artificial Sequence
  Description of Artificial Sequence: Synthetic oligonucleotide
aggcgucugauaaagugaa

SEQ ID NO: 2235163 - RNA, 19 nt, Artificial Sequence
  Description of Artificial Sequence: Synthetic oligonucleotide
caggauguucucuguuuca

SEQ ID NO: 2235164 - RNA, 19 nt, Artificial Sequence
  Description of Artificial Sequence: Synthetic oligonucleotide
aagcaguccuggguuggcu

SEQ ID NO: 2235165 - RNA, 19 nt, Artificial Sequence
  Description of Artificial Sequence: Synthetic oligonucleotide
gcaauguggccccaaggca

SEQ ID NO: 2235166 - RNA, 19 nt, Artificial Sequence
  Description of Artificial Sequence: Synthetic oligonucleotide
acccuucggaccucacuca

SEQ ID NO: 2235167 - RNA, 19 nt, Artificial Sequence
  Description of Artificial Sequence: Synthetic oligonucleotide
uaaugggaggagagcccau

SEQ ID NO: 2235168 - RNA, 19 nt, Artificial Sequence
  Description of Artificial Sequence: Synthetic oligonucleotide
aggagccccugcaacaucu

SEQ ID NO: 2235169 - RNA, 19 nt, Artificial Sequence
  Description of Artificial Sequence: Synthetic oligonucleotide
caaaauuguggugguaaua

SEQ ID NO: 2235170 - RNA, 19 nt, Artificial Sequence
  Description of Artificial Sequence: Synthetic oligonucleotide
acauuggccugcaggcguc

SEQ ID NO: 2235171 - RNA, 19 nt, Artificial Sequence
  Description of Artificial Sequence: Synthetic oligonucleotide
gcuguaaugggaggagagc

SEQ ID NO: 2235172 - RNA, 19 nt, Artificial Sequence
  Description of Artificial Sequence: Synthetic oligonucleotide
caaggcacagccgggcuuc

SEQ ID NO: 2235173 - RNA, 19 nt, Artificial Sequence
  Description of Artificial Sequence: Synthetic oligonucleotide
gcucacgaagucaaagcug

SEQ ID NO: 2235174 - RNA, 19 nt, Artificial Sequence
  Description of Artificial Sequence: Synthetic oligonucleotide
auacuggaaccgcucuuuu

SEQ ID NO: 2235175 - RNA, 19 nt, Artificial Sequence
  Description of Artificial Sequence: Synthetic oligonucleotide
auaguaccccuguguugcu

SEQ ID NO: 2235176 - RNA, 19 nt, Artificial Sequence
  Description of Artificial Sequence: Synthetic oligonucleotide
cugacaucauaguaccccu

SEQ ID NO: 2235177 - RNA, 19 nt, Artificial Sequence
  Description of Artificial Sequence: Synthetic oligonucleotide
gaaacauguguuccauguu

SEQ ID NO: 2235178 - RNA, 19 nt, Artificial Sequence
  Description of Artificial Sequence: Synthetic oligonucleotide
cacagccgggcuucaacuc

SEQ ID NO: 2235179 - RNA, 19 nt, Artificial Sequence
  Description of Artificial Sequence: Synthetic oligonucleotide
ucacaaaauugugguggua

SEQ ID NO: 2235180 - RNA, 19 nt, Artificial Sequence
  Description of Artificial Sequence: Synthetic oligonucleotide
cagugccaccaaaacugug

SEQ ID NO: 2235181 - RNA, 19 nt, Artificial Sequence
  Description of Artificial Sequence: Synthetic oligonucleotide
guccaccaugaagaauagg

SEQ ID NO: 2235182 - RNA, 19 nt, Artificial Sequence
  Description of Artificial Sequence: Synthetic oligonucleotide
uucuguucgugccgcuguu

SEQ ID NO: 2235183 - RNA, 19 nt, Artificial Sequence
  Description of Artificial Sequence: Synthetic oligonucleotide
acccauuguucuguucgug

SEQ ID NO: 2235184 - RNA, 19 nt, Artificial Sequence
  Description of Artificial Sequence: Synthetic oligonucleotide
caucguuggcucgucugac

SEQ ID NO: 2235185 - RNA, 19 nt, Artificial Sequence
  Description of Artificial Sequence: Synthetic oligonucleotide
gguguugaguccagcaaga

SEQ ID NO: 2235186 - RNA, 19 nt, Artificial Sequence
  Description of Artificial Sequence: Synthetic oligonucleotide
ugguuccucucugcagcag

SEQ ID NO: 2235187 - RNA, 19 nt, Artificial Sequence
  Description of Artificial Sequence: Synthetic oligonucleotide
ucgugccgcuguuacuccu

SEQ ID NO: 2235188 - RNA, 19 nt, Artificial Sequence
  Description of Artificial Sequence: Synthetic oligonucleotide
ggagaagcgaguccauuua

SEQ ID NO: 2235189 - RNA, 19 nt, Artificial Sequence
  Description of Artificial Sequence: Synthetic oligonucleotide
uacgggagaccugggcugu

SEQ ID NO: 2235190 - RNA, 19 nt, Artificial Sequence
  Description of Artificial Sequence: Synthetic oligonucleotide
aggcagagaacuggagggu

SEQ ID NO: 2235191 - RNA, 19 nt, Artificial Sequence
  Description of Artificial Sequence: Synthetic oligonucleotide
gucugacaucauaguaccc

SEQ ID NO: 2235192 - RNA, 19 nt, Artificial Sequence
  Description of Artificial Sequence: Synthetic oligonucleotide
uuguucuguucgugccgcu

SEQ ID NO: 2235193 - RNA, 19 nt, Artificial Sequence
  Description of Artificial Sequence: Synthetic oligonucleotide
ccuguguugcuuugaccag

SEQ ID NO: 2235194 - RNA, 19 nt, Artificial Sequence
  Description of Artificial Sequence: Synthetic oligonucleotide
cuccguuuguaggucagga

SEQ ID NO: 2235195 - RNA, 19 nt, Artificial Sequence
  Description of Artificial Sequence: Synthetic oligonucleotide
guaccccuguguugcuuug

SEQ ID NO: 2235196 - RNA, 19 nt, Artificial Sequence
  Description of Artificial Sequence: Synthetic oligonucleotide
aggaugguucuuagugugu

SEQ ID NO: 2235197 - RNA, 19 nt, Artificial Sequence
  Description of Artificial Sequence: Synthetic oligonucleotide
uccggucccuguucagcac

SEQ ID NO: 2235198 - RNA, 19 nt, Artificial Sequence
  Description of Artificial Sequence: Synthetic oligonucleotide
ccaugaagaauagggguuc

SEQ ID NO: 2235199 - RNA, 19 nt, Artificial Sequence
  Description of Artificial Sequence: Synthetic oligonucleotide
cagccgggcuucaacucug

SEQ ID NO: 2235200 - RNA, 19 nt, Artificial Sequence
  Description of Artificial Sequence: Synthetic oligonucleotide
gggaagaugcaggcgaaca

SEQ ID NO: 2235201 - RNA, 19 nt, Artificial Sequence
  Description of Artificial Sequence: Synthetic oligonucleotide
ggagccccagacuuugaca

SEQ ID NO: 2235202 - RNA, 19 nt, Artificial Sequence
  Description of Artificial Sequence: Synthetic oligonucleotide
gcucuuuuaggaugguucu

SEQ ID NO: 2235203 - RNA, 19 nt, Artificial Sequence
  Description of Artificial Sequence: Synthetic oligonucleotide
gguuggcucuggaggaagg

SEQ ID NO: 2235204 - RNA, 19 nt, Artificial Sequence
  Description of Artificial Sequence: Synthetic oligonucleotide
gcaagauuaguugguccac

SEQ ID NO: 2235205 - RNA, 19 nt, Artificial Sequence
  Description of Artificial Sequence: Synthetic oligonucleotide
cuguuucauuagaguccag

SEQ ID NO: 2235206 - RNA, 19 nt, Artificial Sequence
  Description of Artificial Sequence: Synthetic oligonucleotide
cagacccauuguucuguuc

SEQ ID NO: 2235207 - RNA, 19 nt, Artificial Sequence
  Description of Artificial Sequence: Synthetic oligonucleotide
caccaaaacuguggcccag

SEQ ID NO: 2235208 - RNA, 19 nt, Artificial Sequence
  Description of Artificial Sequence: Synthetic oligonucleotide
acagacccauuguucuguu

SEQ ID NO: 2235209 - RNA, 19 nt, Artificial Sequence
  Description of Artificial Sequence: Synthetic oligonucleotide
agccuccggucccuguuca

SEQ ID NO: 2235210 - RNA, 19 nt, Artificial Sequence
  Description of Artificial Sequence: Synthetic oligonucleotide
cuugaaacauguguuccau

SEQ ID NO: 2235211 - RNA, 19 nt, Artificial Sequence
  Description of Artificial Sequence: Synthetic oligonucleotide
gacccauuguucuguucgu

SEQ ID NO: 2235212 - RNA, 19 nt, Artificial Sequence
  Description of Artificial Sequence: Synthetic oligonucleotide
ggcacagccgggcuucaac

SEQ ID NO: 2235213 - RNA, 19 nt, Artificial Sequence
  Description of Artificial Sequence: Synthetic oligonucleotide
gucugucaaaggaguuggc

SEQ ID NO: 2235214 - RNA, 19 nt, Artificial Sequence
  Description of Artificial Sequence: Synthetic oligonucleotide
gccugcaggcgucugauaa

SEQ ID NO: 2235215 - RNA, 19 nt, Artificial Sequence
  Description of Artificial Sequence: Synthetic oligonucleotide
ucuguucgugccgcuguua

SEQ ID NO: 2235216 - RNA, 19 nt, Artificial Sequence
  Description of Artificial Sequence: Synthetic oligonucleotide
cacauuggccugcaggcgu

SEQ ID NO: 2235217 - RNA, 19 nt, Artificial Sequence
  Description of Artificial Sequence: Synthetic oligonucleotide
uaccccuguguugcuuuga

SEQ ID NO: 2235218 - RNA, 19 nt, Artificial Sequence
  Description of Artificial Sequence: Synthetic oligonucleotide
ugggagccccagacuuuga

SEQ ID NO: 2235219 - RNA, 19 nt, Artificial Sequence
  Description of Artificial Sequence: Synthetic oligonucleotide
guguguccaccaugaagaa

SEQ ID NO: 2235220 - RNA, 19 nt, Artificial Sequence
  Description of Artificial Sequence: Synthetic oligonucleotide
uucucaucguuggcucguc

SEQ ID NO: 2235221 - RNA, 19 nt, Artificial Sequence
  Description of Artificial Sequence: Synthetic oligonucleotide
uucggaccucacucacaaa

SEQ ID NO: 2235222 - RNA, 19 nt, Artificial Sequence
  Description of Artificial Sequence: Synthetic oligonucleotide
ggcauuguccagccagcca

SEQ ID NO: 2235223 - RNA, 19 nt, Artificial Sequence
  Description of Artificial Sequence: Synthetic oligonucleotide
cccuguucagcaccacacc

SEQ ID NO: 2235224 - RNA, 19 nt, Artificial Sequence
  Description of Artificial Sequence: Synthetic oligonucleotide
gggagccccagacuuugac

SEQ ID NO: 2235225 - RNA, 19 nt, Artificial Sequence
  Description of Artificial Sequence: Synthetic oligonucleotide
caggaguuccccacauucu

SEQ ID NO: 2235226 - RNA, 19 nt, Artificial Sequence
  Description of Artificial Sequence: Synthetic oligonucleotide
ccagcaagauuaguugguc

SEQ ID NO: 2235227 - RNA, 19 nt, Artificial Sequence
  Description of Artificial Sequence: Synthetic oligonucleotide
cuuuauucaaguggcuauu

SEQ ID NO: 2235228 - RNA, 19 nt, Artificial Sequence
  Description of Artificial Sequence: Synthetic oligonucleotide
guggacguagugauugccu

SEQ ID NO: 2235229 - RNA, 19 nt, Artificial Sequence
  Description of Artificial Sequence: Synthetic oligonucleotide
ccacauucuuuauucaagu

SEQ ID NO: 2235230 - RNA, 19 nt, Artificial Sequence
  Description of Artificial Sequence: Synthetic oligonucleotide
gcgcugacaauuccagcca

SEQ ID NO: 2235231 - RNA, 19 nt, Artificial Sequence
  Description of Artificial Sequence: Synthetic oligonucleotide
ggaagaugcaggcgaacau

SEQ ID NO: 2235232 - RNA, 19 nt, Artificial Sequence
  Description of Artificial Sequence: Synthetic oligonucleotide
caagguguugguuguucau

SEQ ID NO: 2235233 - RNA, 19 nt, Artificial Sequence
  Description of Artificial Sequence: Synthetic oligonucleotide
gcugccacccuucggaccu

SEQ ID NO: 2235234 - RNA, 19 nt, Artificial Sequence
  Description of Artificial Sequence: Synthetic oligonucleotide
agggagaagcgaguccauu

SEQ ID NO: 2235235 - RNA, 19 nt, Artificial Sequence
  Description of Artificial Sequence: Synthetic oligonucleotide
gcuggacacccucaaggaa

SEQ ID NO: 2235236 - RNA, 19 nt, Artificial Sequence
  Description of Artificial Sequence: Synthetic oligonucleotide
ggaaccgcucuuuuaggau

SEQ ID NO: 2235237 - RNA, 19 nt, Artificial Sequence
  Description of Artificial Sequence: Synthetic oligonucleotide
cauacuggaaccgcucuuu

SEQ ID NO: 2235238 - RNA, 19 nt, Artificial Sequence
  Description of Artificial Sequence: Synthetic oligonucleotide
gcaggcgaacaugccaccc

SEQ ID NO: 2235239 - RNA, 19 nt, Artificial Sequence
  Description of Artificial Sequence: Synthetic oligonucleotide
gcagagaacuggaggguuc

SEQ ID NO: 2235240 - RNA, 19 nt, Artificial Sequence
  Description of Artificial Sequence: Synthetic oligonucleotide
uaguaccccuguguugcuu

SEQ ID NO: 2235241 - RNA, 19 nt, Artificial Sequence
  Description of Artificial Sequence: Synthetic oligonucleotide
ccggucccuguucagcacc

SEQ ID NO: 2235242 - RNA, 19 nt, Artificial Sequence
  Description of Artificial Sequence: Synthetic oligonucleotide
gcaacacauuggccugcag

SEQ ID NO: 2235243 - RNA, 19 nt, Artificial Sequence
  Description of Artificial Sequence: Synthetic oligonucleotide
ccgggcuucaacucugaga

SEQ ID NO: 2235244 - RNA, 19 nt, Artificial Sequence
  Description of Artificial Sequence: Synthetic oligonucleotide
gggagaagcgaguccauuu

SEQ ID NO: 2235245 - RNA, 19 nt, Artificial Sequence
  Description of Artificial Sequence: Synthetic oligonucleotide
uuggcucgucugacaucau

SEQ ID NO: 2235246 - RNA, 19 nt, Artificial Sequence
  Description of Artificial Sequence: Synthetic oligonucleotide
ugacagcaauguggcccca

SEQ ID NO: 2235247 - RNA, 19 nt, Artificial Sequence
  Description of Artificial Sequence: Synthetic oligonucleotide
cguuuguaggucaggaugu

SEQ ID NO: 2235248 - RNA, 19 nt, Artificial Sequence
  Description of Artificial Sequence: Synthetic oligonucleotide
ccccacauucuuuauucaa

SEQ ID NO: 2235249 - RNA, 19 nt, Artificial Sequence
  Description of Artificial Sequence: Synthetic oligonucleotide
cuggaggaaggcgcugaca

SEQ ID NO: 2235250 - RNA, 19 nt, Artificial Sequence
  Description of Artificial Sequence: Synthetic oligonucleotide
ugccacccuucggaccuca

SEQ ID NO: 2235251 - RNA, 19 nt, Artificial Sequence
  Description of Artificial Sequence: Synthetic oligonucleotide
ggaccucacucacaaaauu

SEQ ID NO: 2235252 - RNA, 19 nt, Artificial Sequence
  Description of Artificial Sequence: Synthetic oligonucleotide
cagagaacuggaggguucu

SEQ ID NO: 2235253 - RNA, 19 nt, Artificial Sequence
  Description of Artificial Sequence: Synthetic oligonucleotide
cccuucggaccucacucac

SEQ ID NO: 2235254 - RNA, 19 nt, Artificial Sequence
  Description of Artificial Sequence: Synthetic oligonucleotide
gccaugcaggcagagaacu

SEQ ID NO: 2235255 - RNA, 19 nt, Artificial Sequence
  Description of Artificial Sequence: Synthetic oligonucleotide
agagaacuggaggguucuu

SEQ ID NO: 2235256 - RNA, 19 nt, Artificial Sequence
  Description of Artificial Sequence: Synthetic oligonucleotide
ggauuuccacauacuggaa

SEQ ID NO: 2235257 - RNA, 19 nt, Artificial Sequence
  Description of Artificial Sequence: Synthetic oligonucleotide
ccuccguuuguaggucagg

SEQ ID NO: 2235258 - RNA, 19 nt, Artificial Sequence
  Description of Artificial Sequence: Synthetic oligonucleotide
ccccgaaauccauggccac

SEQ ID NO: 2235259 - RNA, 19 nt, Artificial Sequence
  Description of Artificial Sequence: Synthetic oligonucleotide
gcacagccgggcuucaacu

SEQ ID NO: 2235260 - RNA, 19 nt, Artificial Sequence
  Description of Artificial Sequence: Synthetic oligonucleotide
ccaccaaaacuguggccca

SEQ ID NO: 2235261 - RNA, 19 nt, Artificial Sequence
  Description of Artificial Sequence: Synthetic oligonucleotide
gggcuucaacucugagaac

SEQ ID NO: 2235262 - RNA, 19 nt, Artificial Sequence
  Description of Artificial Sequence: Synthetic oligonucleotide
caccacaccuguggccauc

SEQ ID NO: 2235263 - RNA, 19 nt, Artificial Sequence
  Description of Artificial Sequence: Synthetic oligonucleotide
ggcgucugauaaagugaac

SEQ ID NO: 2235264 - RNA, 19 nt, Artificial Sequence
  Description of Artificial Sequence: Synthetic oligonucleotide
guguugcuuugaccagcaa

SEQ ID NO: 2235265 - RNA, 19 nt, Artificial Sequence
  Description of Artificial Sequence: Synthetic oligonucleotide
cgcugacaauuccagccac

SEQ ID NO: 2235266 - RNA, 19 nt, Artificial Sequence
  Description of Artificial Sequence: Synthetic oligonucleotide
ccuucggaccucacucaca

SEQ ID NO: 2235267 - RNA, 19 nt, Artificial Sequence
  Description of Artificial Sequence: Synthetic oligonucleotide
gccccaaggcacagccggg

SEQ ID NO: 2235268 - RNA, 19 nt, Artificial Sequence
  Description of Artificial Sequence: Synthetic oligonucleotide
gguuguucauguggacgua

SEQ ID NO: 2235269 - RNA, 19 nt, Artificial Sequence
  Description of Artificial Sequence: Synthetic oligonucleotide
gccacauaaugaaaaucuu

SEQ ID NO: 2235270 - RNA, 19 nt, Artificial Sequence
  Description of Artificial Sequence: Synthetic oligonucleotide
agccgggcuucaacucuga

SEQ ID NO: 2235271 - RNA, 19 nt, Artificial Sequence
  Description of Artificial Sequence: Synthetic oligonucleotide
ggcgaacaugccacccaca

SEQ ID NO: 2235272 - RNA, 19 nt, Artificial Sequence
  Description of Artificial Sequence: Synthetic oligonucleotide
gagggagaagcgaguccau

SEQ ID NO: 2235273 - RNA, 19 nt, Artificial Sequence
  Description of Artificial Sequence: Synthetic oligonucleotide
cccgaaauccauggccaca

SEQ ID NO: 2235274 - RNA, 19 nt, Artificial Sequence
  Description of Artificial Sequence: Synthetic oligonucleotide
ccagccacaagguguuggu

SEQ ID NO: 2235275 - RNA, 19 nt, Artificial Sequence
  Description of Artificial Sequence: Synthetic oligonucleotide
guucuucgugggagcccca

SEQ ID NO: 2235276 - RNA, 19 nt, Artificial Sequence
  Description of Artificial Sequence: Synthetic oligonucleotide
cguuggcucgucugacauc

SEQ ID NO: 2235277 - RNA, 19 nt, Artificial Sequence
  Description of Artificial Sequence: Synthetic oligonucleotide
cguagugauugccugggau

SEQ ID NO: 2235278 - RNA, 19 nt, Artificial Sequence
  Description of Artificial Sequence: Synthetic oligonucleotide
agccagccaugcaggcaga

SEQ ID NO: 2235279 - RNA, 19 nt, Artificial Sequence
  Description of Artificial Sequence: Synthetic oligonucleotide
cagcaggaguuccccacau

SEQ ID NO: 2235280 - RNA, 19 nt, Artificial Sequence
  Description of Artificial Sequence: Synthetic oligonucleotide
ggcagagaacuggaggguu

SEQ ID NO: 2235281 - RNA, 19 nt, Artificial Sequence
  Description of Artificial Sequence: Synthetic oligonucleotide
ccgaaauccauggccacau

SEQ ID NO: 2235282 - RNA, 19 nt, Artificial Sequence
  Description of Artificial Sequence: Synthetic oligonucleotide
cagagagccuccggucccu

SEQ ID NO: 2235283 - RNA, 19 nt, Artificial Sequence
  Description of Artificial Sequence: Synthetic oligonucleotide
cugccacccuucggaccuc

SEQ ID NO: 2235284 - RNA, 19 nt, Artificial Sequence
  Description of Artificial Sequence: Synthetic oligonucleotide
cauuggccugcaggcgucu

SEQ ID NO: 2235285 - RNA, 19 nt, Artificial Sequence
  Description of Artificial Sequence: Synthetic oligonucleotide
acgggagaccugggcugua

SEQ ID NO: 2235286 - RNA, 19 nt, Artificial Sequence
  Description of Artificial Sequence: Synthetic oligonucleotide
cggucccuguucagcacca

SEQ ID NO: 2235287 - RNA, 19 nt, Artificial Sequence
  Description of Artificial Sequence: Synthetic oligonucleotide
cggaccucacucacaaaau

SEQ ID NO: 2235288 - RNA, 19 nt, Artificial Sequence
  Description of Artificial Sequence: Synthetic oligonucleotide
ccccagacuuugacagcaa

SEQ ID NO: 2235289 - RNA, 19 nt, Artificial Sequence
  Description of Artificial Sequence: Synthetic oligonucleotide
cagccacaagguguugguu

SEQ ID NO: 2235290 - RNA, 19 nt, Artificial Sequence
  Description of Artificial Sequence: Synthetic oligonucleotide
cccaaggcacagccgggcu

SEQ ID NO: 2235291 - RNA, 19 nt, Artificial Sequence
  Description of Artificial Sequence: Synthetic oligonucleotide
cgggagaccugggcuguaa

SEQ ID NO: 2235292 - RNA, 19 nt, Artificial Sequence
  Description of Artificial Sequence: Synthetic oligonucleotide
ccgcucuuuuaggaugguu

SEQ ID NO: 2235293 - RNA, 19 nt, Artificial Sequence
  Description of Artificial Sequence: Synthetic oligonucleotide
aagaaaacuaaguauuucc

SEQ ID NO: 2235294 - RNA, 19 nt, Artificial Sequence
  Description of Artificial Sequence: Synthetic oligonucleotide
aagaguauggccugagucc

SEQ ID NO: 2235295 - RNA, 19 nt, Artificial Sequence
  Description of Artificial Sequence: Synthetic oligonucleotide
gaugguucagaucugaaag

SEQ ID NO: 2235296 - RNA, 19 nt, Artificial Sequence
  Description of Artificial Sequence: Synthetic oligonucleotide
ucugaauucuucaauucgg

SEQ ID NO: 2235297 - RNA, 19 nt, Artificial Sequence
  Description of Artificial Sequence: Synthetic oligonucleotide
uauuguuucacuaccaggu

SEQ ID NO: 2235298 - RNA, 19 nt, Artificial Sequence
  Description of Artificial Sequence: Synthetic oligonucleotide
aaggcaaugauuucaguug

SEQ ID NO: 2235299 - RNA, 19 nt, Artificial Sequence
  Description of Artificial Sequence: Synthetic oligonucleotide
aaguggaauccuuauuggc

SEQ ID NO: 2235300 - RNA, 19 nt, Artificial Sequence
  Description of Artificial Sequence: Synthetic oligonucleotide
acgauagucagucaguuuc

SEQ ID NO: 2235301 - RNA, 19 nt, Artificial Sequence
  Description of Artificial Sequence: Synthetic oligonucleotide
aaacuaaguauuucccacg

SEQ ID NO: 2235302 - RNA, 19 nt, Artificial Sequence
  Description of Artificial Sequence: Synthetic oligonucleotide
ugaucuacccacaggaagg

SEQ ID NO: 2235303 - RNA, 19 nt, Artificial Sequence
  Description of Artificial Sequence: Synthetic oligonucleotide
agaaguggaauccuuauug

SEQ ID NO: 2235304 - RNA, 19 nt, Artificial Sequence
  Description of Artificial Sequence: Synthetic oligonucleotide
aaaucgaguggguagaaga

SEQ ID NO: 2235305 - RNA, 19 nt, Artificial Sequence
  Description of Artificial Sequence: Synthetic oligonucleotide
uucaguuggacauacaaaa

SEQ ID NO: 2235306 - RNA, 19 nt, Artificial Sequence
  Description of Artificial Sequence: Synthetic oligonucleotide
aaugcuugaaccaagcgca

SEQ ID NO: 2235307 - RNA, 19 nt, Artificial Sequence
  Description of Artificial Sequence: Synthetic oligonucleotide
uauuuauagaucugaauuc

SEQ ID NO: 2235308 - RNA, 19 nt, Artificial Sequence
  Description of Artificial Sequence: Synthetic oligonucleotide
aaaacggcgcgcuggagac

SEQ ID NO: 2235309 - RNA, 19 nt, Artificial Sequence
  Description of Artificial Sequence: Synthetic oligonucleotide
uuauuguuucacuaccagg

SEQ ID NO: 2235310 - RNA, 19 nt, Artificial Sequence
  Description of Artificial Sequence: Synthetic oligonucleotide
gaaugcuugaaccaagcgc

SEQ ID NO: 2235311 - RNA, 19 nt, Artificial Sequence
  Description of Artificial Sequence: Synthetic oligonucleotide
accuuuauugagaaggucc

SEQ ID NO: 2235312 - RNA, 19 nt, Artificial Sequence
  Description of Artificial Sequence: Synthetic oligonucleotide
uauuaauccaggccaagug

SEQ ID NO: 2235313 - RNA, 19 nt, Artificial Sequence
  Description of Artificial Sequence: Synthetic oligonucleotide
uagaagaagaaaacuaagu

SEQ ID NO: 2235314 - RNA, 19 nt, Artificial Sequence
  Description of Artificial Sequence: Synthetic oligonucleotide
aaagccgggacaccucucc

SEQ ID NO: 2235315 - RNA, 19 nt, Artificial Sequence
  Description of Artificial Sequence: Synthetic oligonucleotide
agggguauuaauccaggcc

SEQ ID NO: 2235316 - RNA, 19 nt, Artificial Sequence
  Description of Artificial Sequence: Synthetic oligonucleotide
aucugaaagaaguggaauc

SEQ ID NO: 2235317 - RNA, 19 nt, Artificial Sequence
  Description of Artificial Sequence: Synthetic oligonucleotide
aguauuucccacgauaguc

SEQ ID NO: 2235318 - RNA, 19 nt, Artificial Sequence
  Description of Artificial Sequence: Synthetic oligonucleotide
uauagaucugaauucuuca

SEQ ID NO: 2235319 - RNA, 19 nt, Artificial Sequence
  Description of Artificial Sequence: Synthetic oligonucleotide
auuauuguuucacuaccag

SEQ ID NO: 2235320 - RNA, 19 nt, Artificial Sequence
  Description of Artificial Sequence: Synthetic oligonucleotide
gaauucuccauuuaucaca

SEQ ID NO: 2235321 - RNA, 19 nt, Artificial Sequence
  Description of Artificial Sequence: Synthetic oligonucleotide
aguuugucgaaauacuuca

SEQ ID NO: 2235322 - RNA, 19 nt, Artificial Sequence
  Description of Artificial Sequence: Synthetic oligonucleotide
gaaguggaauccuuauugg

SEQ ID NO: 2235323 - RNA, 19 nt, Artificial Sequence
  Description of Artificial Sequence: Synthetic oligonucleotide
agaagaagaaaacuaagua

SEQ ID NO: 2235324 - RNA, 19 nt, Artificial Sequence
  Description of Artificial Sequence: Synthetic oligonucleotide
ugagaagguccaaacauca

SEQ ID NO: 2235325 - RNA, 19 nt, Artificial Sequence
  Description of Artificial Sequence: Synthetic oligonucleotide
aauucggucaccgaaggca

SEQ ID NO: 2235326 - RNA, 19 nt, Artificial Sequence
  Description of Artificial Sequence: Synthetic oligonucleotide
uaagaguauggccugaguc

SEQ ID NO: 2235327 - RNA, 19 nt, Artificial Sequence
  Description of Artificial Sequence: Synthetic oligonucleotide
uucaauucggucaccgaag

SEQ ID NO: 2235328 - RNA, 19 nt, Artificial Sequence
  Description of Artificial Sequence: Synthetic oligonucleotide
ucaauucggucaccgaagg

SEQ ID NO: 2235329 - RNA, 19 nt, Artificial Sequence
  Description of Artificial Sequence: Synthetic oligonucleotide
uuccuucccaguaaggugc

SEQ ID NO: 2235330 - RNA, 19 nt, Artificial Sequence
  Description of Artificial Sequence: Synthetic oligonucleotide
gagguauacaccauagucc

SEQ ID NO: 2235331 - RNA, 19 nt, Artificial Sequence
  Description of Artificial Sequence: Synthetic oligonucleotide
aaaucuuggcuuugcuuag

SEQ ID NO: 2235332 - RNA, 19 nt, Artificial Sequence
  Description of Artificial Sequence: Synthetic oligonucleotide
agcuuuuggguccagcgac

SEQ ID NO: 2235333 - RNA, 19 nt, Artificial Sequence
  Description of Artificial Sequence: Synthetic oligonucleotide
gaaaucuuggcuuugcuua

SEQ ID NO: 2235334 - RNA, 19 nt, Artificial Sequence
  Description of Artificial Sequence: Synthetic oligonucleotide
uuugagaucugaugguuca

SEQ ID NO: 2235335 - RNA, 19 nt, Artificial Sequence
  Description of Artificial Sequence: Synthetic oligonucleotide
uuugucgaaauacuucagu

SEQ ID NO: 2235336 - RNA, 19 nt, Artificial Sequence
  Description of Artificial Sequence: Synthetic oligonucleotide
ucauucagcguaaucugcc

SEQ ID NO: 2235337 - RNA, 19 nt, Artificial Sequence
  Description of Artificial Sequence: Synthetic oligonucleotide
aaagaaguggaauccuuau

SEQ ID NO: 2235338 - RNA, 19 nt, Artificial Sequence
  Description of Artificial Sequence: Synthetic oligonucleotide
ucaguuggacauacaaaag

SEQ ID NO: 2235339 - RNA, 19 nt, Artificial Sequence
  Description of Artificial Sequence: Synthetic oligonucleotide
uuauugagaagguccaaac

SEQ ID NO: 2235340 - RNA, 19 nt, Artificial Sequence
  Description of Artificial Sequence: Synthetic oligonucleotide
ucuucgagggguauuaauc

SEQ ID NO: 2235341 - RNA, 19 nt, Artificial Sequence
  Description of Artificial Sequence: Synthetic oligonucleotide
cuucgagggguauuaaucc

SEQ ID NO: 2235342 - RNA, 19 nt, Artificial Sequence
  Description of Artificial Sequence: Synthetic oligonucleotide
ucaccgaaggcaaugauuu

SEQ ID NO: 2235343 - RNA, 19 nt, Artificial Sequence
  Description of Artificial Sequence: Synthetic oligonucleotide
auuuauagaucugaauucu

SEQ ID NO: 2235344 - RNA, 19 nt, Artificial Sequence
  Description of Artificial Sequence: Synthetic oligonucleotide
aggcaaugauuucaguugg

SEQ ID NO: 2235345 - RNA, 19 nt, Artificial Sequence
  Description of Artificial Sequence: Synthetic oligonucleotide
uguuucacuaccagguuuc

SEQ ID NO: 2235346 - RNA, 19 nt, Artificial Sequence
  Description of Artificial Sequence: Synthetic oligonucleotide
ugagagucgacagagcaug

SEQ ID NO: 2235347 - RNA, 19 nt, Artificial Sequence
  Description of Artificial Sequence: Synthetic oligonucleotide
uaaaacggcgcgcuggaga

SEQ ID NO: 2235348 - RNA, 19 nt, Artificial Sequence
  Description of Artificial Sequence: Synthetic oligonucleotide
acugagagucgacagagca

SEQ ID NO: 2235349 - RNA, 19 nt, Artificial Sequence
  Description of Artificial Sequence: Synthetic oligonucleotide
agugaucugcggcugaaag

SEQ ID NO: 2235350 - RNA, 19 nt, Artificial Sequence
  Description of Artificial Sequence: Synthetic oligonucleotide
agcguaaucugccuuagga

SEQ ID NO: 2235351 - RNA, 19 nt, Artificial Sequence
  Description of Artificial Sequence: Synthetic oligonucleotide
aaacacgucccucagcgaa

SEQ ID NO: 2235352 - RNA, 19 nt, Artificial Sequence
  Description of Artificial Sequence: Synthetic oligonucleotide
cauuuaucacagcuguucc

SEQ ID NO: 2235353 - RNA, 19 nt, Artificial Sequence
  Description of Artificial Sequence: Synthetic oligonucleotide
uucaguauuuauagaucug

SEQ ID NO: 2235354 - RNA, 19 nt, Artificial Sequence
  Description of Artificial Sequence: Synthetic oligonucleotide
aguccuuugagaucugaug

SEQ ID NO: 2235355 - RNA, 19 nt, Artificial Sequence
  Description of Artificial Sequence: Synthetic oligonucleotide
auccuuauuggccccaguc

SEQ ID NO: 2235356 - RNA, 19 nt, Artificial Sequence
  Description of Artificial Sequence: Synthetic oligonucleotide
ugagcgagcgcgcaaacac

SEQ ID NO: 2235357 - RNA, 19 nt, Artificial Sequence
  Description of Artificial Sequence: Synthetic oligonucleotide
aaggucauucagcguaauc

SEQ ID NO: 2235358 - RNA, 19 nt, Artificial Sequence
  Description of Artificial Sequence: Synthetic oligonucleotide
aaagcgcggaguccccugc

SEQ ID NO: 2235359 - RNA, 19 nt, Artificial Sequence
  Description of Artificial Sequence: Synthetic oligonucleotide
gaguccucgagguauacac

SEQ ID NO: 2235360 - RNA, 19 nt, Artificial Sequence
  Description of Artificial Sequence: Synthetic oligonucleotide
ugaauucuccauuuaucac

SEQ ID NO: 2235361 - RNA, 19 nt, Artificial Sequence
  Description of Artificial Sequence: Synthetic oligonucleotide
gcaaacacgucccucagcg

SEQ ID NO: 2235362 - RNA, 19 nt, Artificial Sequence
  Description of Artificial Sequence: Synthetic oligonucleotide
guacuggaaugcuugaacc

SEQ ID NO: 2235363 - RNA, 19 nt, Artificial Sequence
  Description of Artificial Sequence: Synthetic oligonucleotide
agguccaaacaucaaaacu

SEQ ID NO: 2235364 - RNA, 19 nt, Artificial Sequence
  Description of Artificial Sequence: Synthetic oligonucleotide
gguccaaacaucaaaacug

SEQ ID NO: 2235365 - RNA, 19 nt, Artificial Sequence
  Description of Artificial Sequence: Synthetic oligonucleotide
ucgagggguauuaauccag

SEQ ID NO: 2235366 - RNA, 19 nt, Artificial Sequence
  Description of Artificial Sequence: Synthetic oligonucleotide
agaucugaugguucagauc

SEQ ID NO: 2235367 - RNA, 19 nt, Artificial Sequence
  Description of Artificial Sequence: Synthetic oligonucleotide
aguggcacucguuuucgcg

SEQ ID NO: 2235368 - RNA, 19 nt, Artificial Sequence
  Description of Artificial Sequence: Synthetic oligonucleotide
agaaggcuaaaacggcgcg

SEQ ID NO: 2235369 - RNA, 19 nt, Artificial Sequence
  Description of Artificial Sequence: Synthetic oligonucleotide
aguuggacauacaaaagug

SEQ ID NO: 2235370 - RNA, 19 nt, Artificial Sequence
  Description of Artificial Sequence: Synthetic oligonucleotide
gaugcagggagugaucugc

SEQ ID NO: 2235371 - RNA, 19 nt, Artificial Sequence
  Description of Artificial Sequence: Synthetic oligonucleotide
uauuucccacgauagucag

SEQ ID NO: 2235372 - RNA, 19 nt, Artificial Sequence
  Description of Artificial Sequence: Synthetic oligonucleotide
cugaucuacccacaggaag

SEQ ID NO: 2235373 - RNA, 19 nt, Artificial Sequence
  Description of Artificial Sequence: Synthetic oligonucleotide
cacagugaccuuuauugag

SEQ ID NO: 2235374 - RNA, 19 nt, Artificial Sequence
  Description of Artificial Sequence: Synthetic oligonucleotide
agaagguccaaacaucaaa

SEQ ID NO: 2235375 - RNA, 19 nt, Artificial Sequence
  Description of Artificial Sequence: Synthetic oligonucleotide
agcgaaagcgcggaguccc

SEQ ID NO: 2235376 - RNA, 19 nt, Artificial Sequence
  Description of Artificial Sequence: Synthetic oligonucleotide
uugagaagguccaaacauc

SEQ ID NO: 2235377 - RNA, 19 nt, Artificial Sequence
  Description of Artificial Sequence: Synthetic oligonucleotide
acuucaguauuuauagauc

SEQ ID NO: 2235378 - RNA, 19 nt, Artificial Sequence
  Description of Artificial Sequence: Synthetic oligonucleotide
aggaaggucauucagcgua

SEQ ID NO: 2235379 - RNA, 19 nt, Artificial Sequence
  Description of Artificial Sequence: Synthetic oligonucleotide
auagaaguggcacucguuu

SEQ ID NO: 2235380 - RNA, 19 nt, Artificial Sequence
  Description of Artificial Sequence: Synthetic oligonucleotide
uuuauugagaagguccaaa

SEQ ID NO: 2235381 - RNA, 19 nt, Artificial Sequence
  Description of Artificial Sequence: Synthetic oligonucleotide
gguaauaacacagugaccu

SEQ ID NO: 2235382 - RNA, 19 nt, Artificial Sequence
  Description of Artificial Sequence: Synthetic oligonucleotide
uuucccacgauagucaguc

SEQ ID NO: 2235383 - RNA, 19 nt, Artificial Sequence
  Description of Artificial Sequence: Synthetic oligonucleotide
agucgucgcguccagcagc

SEQ ID NO: 2235384 - RNA, 19 nt, Artificial Sequence
  Description of Artificial Sequence: Synthetic oligonucleotide
uggaaugcuugaaccaagc

SEQ ID NO: 2235385 - RNA, 19 nt, Artificial Sequence
  Description of Artificial Sequence: Synthetic oligonucleotide
aaguauuucccacgauagu

SEQ ID NO: 2235386 - RNA, 19 nt, Artificial Sequence
  Description of Artificial Sequence: Synthetic oligonucleotide
ucaguuugucgaaauacuu

SEQ ID NO: 2235387 - RNA, 19 nt, Artificial Sequence
  Description of Artificial Sequence: Synthetic oligonucleotide
uuagaaaucuuggcuuugc

SEQ ID NO: 2235388 - RNA, 19 nt, Artificial Sequence
  Description of Artificial Sequence: Synthetic oligonucleotide
uacuggaaugcuugaacca

SEQ ID NO: 2235389 - RNA, 19 nt, Artificial Sequence
  Description of Artificial Sequence: Synthetic oligonucleotide
ccaaacaucaaaacugaag

SEQ ID NO: 2235390 - RNA, 19 nt, Artificial Sequence
  Description of Artificial Sequence: Synthetic oligonucleotide
uugucgaaauacuucaguu

SEQ ID NO: 2235391 - RNA, 19 nt, Artificial Sequence
  Description of Artificial Sequence: Synthetic oligonucleotide
uccucccugucuucgaggg

SEQ ID NO: 2235392 - RNA, 19 nt, Artificial Sequence
  Description of Artificial Sequence: Synthetic oligonucleotide
aaguggcacucguuuucgc

SEQ ID NO: 2235393 - RNA, 19 nt, Artificial Sequence
  Description of Artificial Sequence: Synthetic oligonucleotide
ugaugguucagaucugaaa

SEQ ID NO: 2235394 - RNA, 19 nt, Artificial Sequence
  Description of Artificial Sequence: Synthetic oligonucleotide
cucgagguauacaccauag

SEQ ID NO: 2235395 - RNA, 19 nt, Artificial Sequence
  Description of Artificial Sequence: Synthetic oligonucleotide
caguguacuggaaugcuug

SEQ ID NO: 2235396 - RNA, 19 nt, Artificial Sequence
  Description of Artificial Sequence: Synthetic oligonucleotide
uuuggguccagcgacggga

SEQ ID NO: 2235397 - RNA, 19 nt, Artificial Sequence
  Description of Artificial Sequence: Synthetic oligonucleotide
ugagucgucgcguccagca

SEQ ID NO: 2235398 - RNA, 19 nt, Artificial Sequence
  Description of Artificial Sequence: Synthetic oligonucleotide
aguggguagaagaagaaaa

SEQ ID NO: 2235399 - RNA, 19 nt, Artificial Sequence
  Description of Artificial Sequence: Synthetic oligonucleotide
uuuauagaucugaauucuu

SEQ ID NO: 2235400 - RNA, 19 nt, Artificial Sequence
  Description of Artificial Sequence: Synthetic oligonucleotide
caguuugucgaaauacuuc

SEQ ID NO: 2235401 - RNA, 19 nt, Artificial Sequence
  Description of Artificial Sequence: Synthetic oligonucleotide
ugaaccaagcgcagugucu

SEQ ID NO: 2235402 - RNA, 19 nt, Artificial Sequence
  Description of Artificial Sequence: Synthetic oligonucleotide
ugguaauaacacagugacc

SEQ ID NO: 2235403 - RNA, 19 nt, Artificial Sequence
  Description of Artificial Sequence: Synthetic oligonucleotide
uaucacagcuguuccuucc

SEQ ID NO: 2235404 - RNA, 19 nt, Artificial Sequence
  Description of Artificial Sequence: Synthetic oligonucleotide
ugggauuauuguuucacua

SEQ ID NO: 2235405 - RNA, 19 nt, Artificial Sequence
  Description of Artificial Sequence: Synthetic oligonucleotide
cagaaggcuaaaacggcgc

SEQ ID NO: 2235406 - RNA, 19 nt, Artificial Sequence
  Description of Artificial Sequence: Synthetic oligonucleotide
ucagcgaaagcgcggaguc

SEQ ID NO: 2235407 - RNA, 19 nt, Artificial Sequence
  Description of Artificial Sequence: Synthetic oligonucleotide
aaggcuaaaacggcgcgcu

SEQ ID NO: 2235408 - RNA, 19 nt, Artificial Sequence
  Description of Artificial Sequence: Synthetic oligonucleotide
uaaggugcuggcuuagaaa

SEQ ID NO: 2235409 - RNA, 19 nt, Artificial Sequence
  Description of Artificial Sequence: Synthetic oligonucleotide
uuuucgcggguccggaacc

SEQ ID NO: 2235410 - RNA, 19 nt, Artificial Sequence
  Description of Artificial Sequence: Synthetic oligonucleotide
ugccuuaggauuccuuugu

SEQ ID NO: 2235411 - RNA, 19 nt, Artificial Sequence
  Description of Artificial Sequence: Synthetic oligonucleotide
agagcaugccaccacuuca

SEQ ID NO: 2235412 - RNA, 19 nt, Artificial Sequence
  Description of Artificial Sequence: Synthetic oligonucleotide
ugaaagccgggacaccucu

SEQ ID NO: 2235413 - RNA, 19 nt, Artificial Sequence
  Description of Artificial Sequence: Synthetic oligonucleotide
aagccgggacaccucuccc

SEQ ID NO: 2235414 - RNA, 19 nt, Artificial Sequence
  Description of Artificial Sequence: Synthetic oligonucleotide
guggcacucguuuucgcgg

SEQ ID NO: 2235415 - RNA, 19 nt, Artificial Sequence
  Description of Artificial Sequence: Synthetic oligonucleotide
agagcuucgguccgcagca

SEQ ID NO: 2235416 - RNA, 19 nt, Artificial Sequence
  Description of Artificial Sequence: Synthetic oligonucleotide
gaaguggcacucguuuucg

SEQ ID NO: 2235417 - RNA, 19 nt, Artificial Sequence
  Description of Artificial Sequence: Synthetic oligonucleotide
uuuaucacagcuguuccuu

SEQ ID NO: 2235418 - RNA, 19 nt, Artificial Sequence
  Description of Artificial Sequence: Synthetic oligonucleotide
uauggccugaguccucgag

SEQ ID NO: 2235419 - RNA, 19 nt, Artificial Sequence
  Description of Artificial Sequence: Synthetic oligonucleotide
uuguuucacuaccagguuu

SEQ ID NO: 2235420 - RNA, 19 nt, Artificial Sequence
  Description of Artificial Sequence: Synthetic oligonucleotide
augguucagaucugaaaga

SEQ ID NO: 2235421 - RNA, 19 nt, Artificial Sequence
  Description of Artificial Sequence: Synthetic oligonucleotide
uucgagggguauuaaucca

SEQ ID NO: 2235422 - RNA, 19 nt, Artificial Sequence
  Description of Artificial Sequence: Synthetic oligonucleotide
cuuugagaucugaugguuc

SEQ ID NO: 2235423 - RNA, 19 nt, Artificial Sequence
  Description of Artificial Sequence: Synthetic oligonucleotide
ucuaagaguauggccugag

SEQ ID NO: 2235424 - RNA, 19 nt, Artificial Sequence
  Description of Artificial Sequence: Synthetic oligonucleotide
acgucccucagcgaaagcg

SEQ ID NO: 2235425 - RNA, 19 nt, Artificial Sequence
  Description of Artificial Sequence: Synthetic oligonucleotide
uccuuugagaucugauggu

SEQ ID NO: 2235426 - RNA, 19 nt, Artificial Sequence
  Description of Artificial Sequence: Synthetic oligonucleotide
aggccaaguggguaaacug

SEQ ID NO: 2235427 - RNA, 19 nt, Artificial Sequence
  Description of Artificial Sequence: Synthetic oligonucleotide
uggguaaacugagagucga

SEQ ID NO: 2235428 - RNA, 19 nt, Artificial Sequence
  Description of Artificial Sequence: Synthetic oligonucleotide
aguauggccugaguccucg

SEQ ID NO: 2235429 - RNA, 19 nt, Artificial Sequence
  Description of Artificial Sequence: Synthetic oligonucleotide
uugaaccaagcgcaguguc

SEQ ID NO: 2235430 - RNA, 19 nt, Artificial Sequence
  Description of Artificial Sequence: Synthetic oligonucleotide
uuuuggguccagcgacggg

SEQ ID NO: 2235431 - RNA, 19 nt, Artificial Sequence
  Description of Artificial Sequence: Synthetic oligonucleotide
guccccugccgccagaagg

SEQ ID NO: 2235432 - RNA, 19 nt, Artificial Sequence
  Description of Artificial Sequence: Synthetic oligonucleotide
auacuucaguuuuccagcu

SEQ ID NO: 2235433 - RNA, 19 nt, Artificial Sequence
  Description of Artificial Sequence: Synthetic oligonucleotide
gggauuauuguuucacuac

SEQ ID NO: 2235434 - RNA, 19 nt, Artificial Sequence
  Description of Artificial Sequence: Synthetic oligonucleotide
ugguucagaucugaaagaa

SEQ ID NO: 2235435 - RNA, 19 nt, Artificial Sequence
  Description of Artificial Sequence: Synthetic oligonucleotide
ugagaucugaugguucaga

SEQ ID NO: 2235436 - RNA, 19 nt, Artificial Sequence
  Description of Artificial Sequence: Synthetic oligonucleotide
ucuucaauucggucaccga

SEQ ID NO: 2235437 - RNA, 19 nt, Artificial Sequence
  Description of Artificial Sequence: Synthetic oligonucleotide
uuagaugcagggagugauc

SEQ ID NO: 2235438 - RNA, 19 nt, Artificial Sequence
  Description of Artificial Sequence: Synthetic oligonucleotide
ggaaugcuugaaccaagcg

SEQ ID NO: 2235439 - RNA, 19 nt, Artificial Sequence
  Description of Artificial Sequence: Synthetic oligonucleotide
uggaucugggauuauuguu

SEQ ID NO: 2235440 - RNA, 19 nt, Artificial Sequence
  Description of Artificial Sequence: Synthetic oligonucleotide
uuauuggccccaguccucc

SEQ ID NO: 2235441 - RNA, 19 nt, Artificial Sequence
  Description of Artificial Sequence: Synthetic oligonucleotide
acacagugaccuuuauuga

SEQ ID NO: 2235442 - RNA, 19 nt, Artificial Sequence
  Description of Artificial Sequence: Synthetic oligonucleotide
uucagcguaaucugccuua

SEQ ID NO: 2235443 - RNA, 19 nt, Artificial Sequence
  Description of Artificial Sequence: Synthetic oligonucleotide
gaaaucgaguggguagaag

SEQ ID NO: 2235444 - RNA, 19 nt, Artificial Sequence
  Description of Artificial Sequence: Synthetic oligonucleotide
uccucacucuccaaacccu

SEQ ID NO: 2235445 - RNA, 19 nt, Artificial Sequence
  Description of Artificial Sequence: Synthetic oligonucleotide
uggcacucguuuucgcggg

SEQ ID NO: 2235446 - RNA, 19 nt, Artificial Sequence
  Description of Artificial Sequence: Synthetic oligonucleotide
aaucgaguggguagaagaa

SEQ ID NO: 2235447 - RNA, 19 nt, Artificial Sequence
  Description of Artificial Sequence: Synthetic oligonucleotide
aagcgcggaguccccugcc

SEQ ID NO: 2235448 - RNA, 19 nt, Artificial Sequence
  Description of Artificial Sequence: Synthetic oligonucleotide
uaauccaggccaagugggu

SEQ ID NO: 2235449 - RNA, 19 nt, Artificial Sequence
  Description of Artificial Sequence: Synthetic oligonucleotide
ucgagguauacaccauagu

SEQ ID NO: 2235450 - RNA, 19 nt, Artificial Sequence
  Description of Artificial Sequence: Synthetic oligonucleotide
agucgacagagcaugccac

SEQ ID NO: 2235451 - RNA, 19 nt, Artificial Sequence
  Description of Artificial Sequence: Synthetic oligonucleotide
uacuucaguuuuccagcug

SEQ ID NO: 2235452 - RNA, 19 nt, Artificial Sequence
  Description of Artificial Sequence: Synthetic oligonucleotide
acacuuguccaccagcaua

SEQ ID NO: 2235453 - RNA, 19 nt, Artificial Sequence
  Description of Artificial Sequence: Synthetic oligonucleotide
agaguauggccugaguccu

SEQ ID NO: 2235454 - RNA, 19 nt, Artificial Sequence
  Description of Artificial Sequence: Synthetic oligonucleotide
gaaggcuaaaacggcgcgc

SEQ ID NO: 2235455 - RNA, 19 nt, Artificial Sequence
  Description of Artificial Sequence: Synthetic oligonucleotide
uaaucugccuuaggauucc

SEQ ID NO: 2235456 - RNA, 19 nt, Artificial Sequence
  Description of Artificial Sequence: Synthetic oligonucleotide
aguccucgagguauacacc

SEQ ID NO: 2235457 - RNA, 19 nt, Artificial Sequence
  Description of Artificial Sequence: Synthetic oligonucleotide
cagagcuucgguccgcagc

SEQ ID NO: 2235458 - RNA, 19 nt, Artificial Sequence
  Description of Artificial Sequence: Synthetic oligonucleotide
uggaauccuuauuggcccc

SEQ ID NO: 2235459 - RNA, 19 nt, Artificial Sequence
  Description of Artificial Sequence: Synthetic oligonucleotide
guauuucccacgauaguca

SEQ ID NO: 2235460 - RNA, 19 nt, Artificial Sequence
  Description of Artificial Sequence: Synthetic oligonucleotide
ccagaaggcuaaaacggcg

SEQ ID NO: 2235461 - RNA, 19 nt, Artificial Sequence
  Description of Artificial Sequence: Synthetic oligonucleotide
guggguagaagaagaaaac

SEQ ID NO: 2235462 - RNA, 19 nt, Artificial Sequence
  Description of Artificial Sequence: Synthetic oligonucleotide
aauccuuauuggccccagu

SEQ ID NO: 2235463 - RNA, 19 nt, Artificial Sequence
  Description of Artificial Sequence: Synthetic oligonucleotide
acagugaccuuuauugaga

SEQ ID NO: 2235464 - RNA, 19 nt, Artificial Sequence
  Description of Artificial Sequence: Synthetic oligonucleotide
uccaugacugagcgagcgc

SEQ ID NO: 2235465 - RNA, 19 nt, Artificial Sequence
  Description of Artificial Sequence: Synthetic oligonucleotide
ucagcguaaucugccuuag

SEQ ID NO: 2235466 - RNA, 19 nt, Artificial Sequence
  Description of Artificial Sequence: Synthetic oligonucleotide
cuccaugacugagcgagcg

SEQ ID NO: 2235467 - RNA, 19 nt, Artificial Sequence
  Description of Artificial Sequence: Synthetic oligonucleotide
cugccuuaggauuccuuug

SEQ ID NO: 2235468 - RNA, 19 nt, Artificial Sequence
  Description of Artificial Sequence: Synthetic oligonucleotide
ccagcuuuuggguccagcg

SEQ ID NO: 2235469 - RNA, 19 nt, Artificial Sequence
  Description of Artificial Sequence: Synthetic oligonucleotide
gcuugaaccaagcgcagug

SEQ ID NO: 2235470 - RNA, 19 nt, Artificial Sequence
  Description of Artificial Sequence: Synthetic oligonucleotide
guuuucgcggguccggaac

SEQ ID NO: 2235471 - RNA, 19 nt, Artificial Sequence
  Description of Artificial Sequence: Synthetic oligonucleotide
uuaucacagcuguuccuuc

SEQ ID NO: 2235472 - RNA, 19 nt, Artificial Sequence
  Description of Artificial Sequence: Synthetic oligonucleotide
guuugucgaaauacuucag

SEQ ID NO: 2235473 - RNA, 19 nt, Artificial Sequence
  Description of Artificial Sequence: Synthetic oligonucleotide
ucgguccgcagcaggaaca

SEQ ID NO: 2235474 - RNA, 19 nt, Artificial Sequence
  Description of Artificial Sequence: Synthetic oligonucleotide
acugagcgagcgcgcaaac

SEQ ID NO: 2235475 - RNA, 19 nt, Artificial Sequence
  Description of Artificial Sequence: Synthetic oligonucleotide
agugucucauccacugauc

SEQ ID NO: 2235476 - RNA, 19 nt, Artificial Sequence
  Description of Artificial Sequence: Synthetic oligonucleotide
cuuuuggguccagcgacgg

SEQ ID NO: 2235477 - RNA, 19 nt, Artificial Sequence
  Description of Artificial Sequence: Synthetic oligonucleotide
aagugaaaucgagugggua

SEQ ID NO: 2235478 - RNA, 19 nt, Artificial Sequence
  Description of Artificial Sequence: Synthetic oligonucleotide
cgccagaaggcuaaaacgg

SEQ ID NO: 2235479 - RNA, 19 nt, Artificial Sequence
  Description of Artificial Sequence: Synthetic oligonucleotide
ccgccagaaggcuaaaacg

SEQ ID NO: 2235480 - RNA, 19 nt, Artificial Sequence
  Description of Artificial Sequence: Synthetic oligonucleotide
agcuucgguccgcagcagg

SEQ ID NO: 2235481 - RNA, 19 nt, Artificial Sequence
  Description of Artificial Sequence: Synthetic oligonucleotide
caugacugagcgagcgcgc

SEQ ID NO: 2235482 - RNA, 19 nt, Artificial Sequence
  Description of Artificial Sequence: Synthetic oligonucleotide
gacgggacugagucgucgc

SEQ ID NO: 2235483 - RNA, 19 nt, Artificial Sequence
  Description of Artificial Sequence: Synthetic oligonucleotide
agccgggacaccucucccg

SEQ ID NO: 2235484 - RNA, 19 nt, Artificial Sequence
  Description of Artificial Sequence: Synthetic oligonucleotide
uucgguccgcagcaggaac

SEQ ID NO: 2235485 - RNA, 19 nt, Artificial Sequence
  Description of Artificial Sequence: Synthetic oligonucleotide
ucccggguacacuugucca

SEQ ID NO: 2235486 - RNA, 19 nt, Artificial Sequence
  Description of Artificial Sequence: Synthetic oligonucleotide
gaaagcgcggaguccccug

SEQ ID NO: 2235487 - RNA, 19 nt, Artificial Sequence
  Description of Artificial Sequence: Synthetic oligonucleotide
aguccucccugucuucgag

SEQ ID NO: 2235488 - RNA, 19 nt, Artificial Sequence
  Description of Artificial Sequence: Synthetic oligonucleotide
gucgacagagcaugccacc

SEQ ID NO: 2235489 - RNA, 19 nt, Artificial Sequence
  Description of Artificial Sequence: Synthetic oligonucleotide
cgagguauacaccauaguc

SEQ ID NO: 2235490 - RNA, 19 nt, Artificial Sequence
  Description of Artificial Sequence: Synthetic oligonucleotide
ugcggcugaaagccgggac

SEQ ID NO: 2235491 - RNA, 19 nt, Artificial Sequence
  Description of Artificial Sequence: Synthetic oligonucleotide
aagcgcagugucucaucca

SEQ ID NO: 2235492 - RNA, 19 nt, Artificial Sequence
  Description of Artificial Sequence: Synthetic oligonucleotide
uagaaguggcacucguuuu

SEQ ID NO: 2235493 - RNA, 19 nt, Artificial Sequence
  Description of Artificial Sequence: Synthetic oligonucleotide
uuucacuaccagguuucca

SEQ ID NO: 2235494 - RNA, 19 nt, Artificial Sequence
  Description of Artificial Sequence: Synthetic oligonucleotide
gaccgcgccuccaugacug

SEQ ID NO: 2235495 - RNA, 19 nt, Artificial Sequence
  Description of Artificial Sequence: Synthetic oligonucleotide
ucgacagagcaugccacca

SEQ ID NO: 2235496 - RNA, 19 nt, Artificial Sequence
  Description of Artificial Sequence: Synthetic oligonucleotide
agcgacgggacugagucgu

SEQ ID NO: 2235497 - RNA, 19 nt, Artificial Sequence
  Description of Artificial Sequence: Synthetic oligonucleotide
uccuugaauucuccauuua

SEQ ID NO: 2235498 - RNA, 19 nt, Artificial Sequence
  Description of Artificial Sequence: Synthetic oligonucleotide
aaccaagcgcagugucuca

SEQ ID NO: 2235499 - RNA, 19 nt, Artificial Sequence
  Description of Artificial Sequence: Synthetic oligonucleotide
ggcuaaaacggcgcgcugg

SEQ ID NO: 2235500 - RNA, 19 nt, Artificial Sequence
  Description of Artificial Sequence: Synthetic oligonucleotide
aaacggcgcgcuggagacc

SEQ ID NO: 2235501 - RNA, 19 nt, Artificial Sequence
  Description of Artificial Sequence: Synthetic oligonucleotide
ccauuuaucacagcuguuc

SEQ ID NO: 2235502 - RNA, 19 nt, Artificial Sequence
  Description of Artificial Sequence: Synthetic oligonucleotide
ugucucauccacugaucua

SEQ ID NO: 2235503 - RNA, 19 nt, Artificial Sequence
  Description of Artificial Sequence: Synthetic oligonucleotide
auacaccauaguccuuuga

SEQ ID NO: 2235504 - RNA, 19 nt, Artificial Sequence
  Description of Artificial Sequence: Synthetic oligonucleotide
aauccaggccaagugggua

SEQ ID NO: 2235505 - RNA, 19 nt, Artificial Sequence
  Description of Artificial Sequence: Synthetic oligonucleotide
gagcgagcgcgcaaacacg

SEQ ID NO: 2235506 - RNA, 19 nt, Artificial Sequence
  Description of Artificial Sequence: Synthetic oligonucleotide
uuucgcggguccggaaccg

SEQ ID NO: 2235507 - RNA, 19 nt, Artificial Sequence
  Description of Artificial Sequence: Synthetic oligonucleotide
gaauccuuauuggccccag

SEQ ID NO: 2235508 - RNA, 19 nt, Artificial Sequence
  Description of Artificial Sequence: Synthetic oligonucleotide
aucugcggcugaaagccgg

SEQ ID NO: 2235509 - RNA, 19 nt, Artificial Sequence
  Description of Artificial Sequence: Synthetic oligonucleotide
cacucguuuucgcgggucc

SEQ ID NO: 2235510 - RNA, 19 nt, Artificial Sequence
  Description of Artificial Sequence: Synthetic oligonucleotide
auucagcguaaucugccuu

SEQ ID NO: 2235511 - RNA, 19 nt, Artificial Sequence
  Description of Artificial Sequence: Synthetic oligonucleotide
ggccucuaagaguauggcc

SEQ ID NO: 2235512 - RNA, 19 nt, Artificial Sequence
  Description of Artificial Sequence: Synthetic oligonucleotide
gagucgucgcguccagcag

SEQ ID NO: 2235513 - RNA, 19 nt, Artificial Sequence
  Description of Artificial Sequence: Synthetic oligonucleotide
auccaggccaaguggguaa

SEQ ID NO: 2235514 - RNA, 19 nt, Artificial Sequence
  Description of Artificial Sequence: Synthetic oligonucleotide
uuggguccagcgacgggac

SEQ ID NO: 2235515 - RNA, 19 nt, Artificial Sequence
  Description of Artificial Sequence: Synthetic oligonucleotide
acucguuuucgcggguccg

SEQ ID NO: 2235516 - RNA, 19 nt, Artificial Sequence
  Description of Artificial Sequence: Synthetic oligonucleotide
gaccuuuauugagaagguc

SEQ ID NO: 2235517 - RNA, 19 nt, Artificial Sequence
  Description of Artificial Sequence: Synthetic oligonucleotide
ugaaaucgaguggguagaa

SEQ ID NO: 2235518 - RNA, 19 nt, Artificial Sequence
  Description of Artificial Sequence: Synthetic oligonucleotide
cgaaauacuucaguuuucc

SEQ ID NO: 2235519 - RNA, 19 nt, Artificial Sequence
  Description of Artificial Sequence: Synthetic oligonucleotide
acugagucgucgcguccag

SEQ ID NO: 2235520 - RNA, 19 nt, Artificial Sequence
  Description of Artificial Sequence: Synthetic oligonucleotide
ccagcgacgggacugaguc

SEQ ID NO: 2235521 - RNA, 19 nt, Artificial Sequence
  Description of Artificial Sequence: Synthetic oligonucleotide
cuuugucaucaauaaugaa

SEQ ID NO: 2235522 - RNA, 19 nt, Artificial Sequence
  Description of Artificial Sequence: Synthetic oligonucleotide
gcaaugauuucaguuggac

SEQ ID NO: 2235523 - RNA, 19 nt, Artificial Sequence
  Description of Artificial Sequence: Synthetic oligonucleotide
gcuggaucugggauuauug

SEQ ID NO: 2235524 - RNA, 19 nt, Artificial Sequence
  Description of Artificial Sequence: Synthetic oligonucleotide
cucguuuucgcggguccgg

SEQ ID NO: 2235525 - RNA, 19 nt, Artificial Sequence
  Description of Artificial Sequence: Synthetic oligonucleotide
gguauuaauccaggccaag

SEQ ID NO: 2235526 - RNA, 19 nt, Artificial Sequence
  Description of Artificial Sequence: Synthetic oligonucleotide
ugaguccucgagguauaca

SEQ ID NO: 2235527 - RNA, 19 nt, Artificial Sequence
  Description of Artificial Sequence: Synthetic oligonucleotide
ccaugacugagcgagcgcg

SEQ ID NO: 2235528 - RNA, 19 nt, Artificial Sequence
  Description of Artificial Sequence: Synthetic oligonucleotide
gagcgcgcaaacacguccc

SEQ ID NO: 2235529 - RNA, 19 nt, Artificial Sequence
  Description of Artificial Sequence: Synthetic oligonucleotide
ggguagaagaagaaaacua

SEQ ID NO: 2235530 - RNA, 19 nt, Artificial Sequence
  Description of Artificial Sequence: Synthetic oligonucleotide
accucucccggguacacuu

SEQ ID NO: 2235531 - RNA, 19 nt, Artificial Sequence
  Description of Artificial Sequence: Synthetic oligonucleotide
uccagcgacgggacugagu

SEQ ID NO: 2235532 - RNA, 19 nt, Artificial Sequence
  Description of Artificial Sequence: Synthetic oligonucleotide
ccgaaggcaaugauuucag

SEQ ID NO: 2235533 - RNA, 19 nt, Artificial Sequence
  Description of Artificial Sequence: Synthetic oligonucleotide
auaguccuuugagaucuga

SEQ ID NO: 2235534 - RNA, 19 nt, Artificial Sequence
  Description of Artificial Sequence: Synthetic oligonucleotide
gccgccagaaggcuaaaac

SEQ ID NO: 2235535 - RNA, 19 nt, Artificial Sequence
  Description of Artificial Sequence: Synthetic oligonucleotide
ugcuugaaccaagcgcagu

SEQ ID NO: 2235536 - RNA, 19 nt, Artificial Sequence
  Description of Artificial Sequence: Synthetic oligonucleotide
uggaccgcgccuccaugac

SEQ ID NO: 2235537 - RNA, 19 nt, Artificial Sequence
  Description of Artificial Sequence: Synthetic oligonucleotide
cugaaagccgggacaccuc

SEQ ID NO: 2235538 - RNA, 19 nt, Artificial Sequence
  Description of Artificial Sequence: Synthetic oligonucleotide
gacugagucgucgcgucca

SEQ ID NO: 2235539 - RNA, 19 nt, Artificial Sequence
  Description of Artificial Sequence: Synthetic oligonucleotide
acacgucccucagcgaaag

SEQ ID NO: 2235540 - RNA, 19 nt, Artificial Sequence
  Description of Artificial Sequence: Synthetic oligonucleotide
agacuucuccaugcuuguc

SEQ ID NO: 2235541 - RNA, 19 nt, Artificial Sequence
  Description of Artificial Sequence: Synthetic oligonucleotide
cagugaccuuuauugagaa

SEQ ID NO: 2235542 - RNA, 19 nt, Artificial Sequence
  Description of Artificial Sequence: Synthetic oligonucleotide
gcgccuccaugacugagcg

SEQ ID NO: 2235543 - RNA, 19 nt, Artificial Sequence
  Description of Artificial Sequence: Synthetic oligonucleotide
aacacgucccucagcgaaa

SEQ ID NO: 2235544 - RNA, 19 nt, Artificial Sequence
  Description of Artificial Sequence: Synthetic oligonucleotide
uauuggccccaguccuccc

SEQ ID NO: 2235545 - RNA, 19 nt, Artificial Sequence
  Description of Artificial Sequence: Synthetic oligonucleotide
cagcguaaucugccuuagg

SEQ ID NO: 2235546 - RNA, 19 nt, Artificial Sequence
  Description of Artificial Sequence: Synthetic oligonucleotide
auucggucaccgaaggcaa

SEQ ID NO: 2235547 - RNA, 19 nt, Artificial Sequence
  Description of Artificial Sequence: Synthetic oligonucleotide
cuuagaugcagggagugau

SEQ ID NO: 2235548 - RNA, 19 nt, Artificial Sequence
  Description of Artificial Sequence: Synthetic oligonucleotide
aaucugccuuaggauuccu

SEQ ID NO: 2235549 - RNA, 19 nt, Artificial Sequence
  Description of Artificial Sequence: Synthetic oligonucleotide
aguaaggugcuggcuuaga

SEQ ID NO: 2235550 - RNA, 19 nt, Artificial Sequence
  Description of Artificial Sequence: Synthetic oligonucleotide
gccagaaggcuaaaacggc

SEQ ID NO: 2235551 - RNA, 19 nt, Artificial Sequence
  Description of Artificial Sequence: Synthetic oligonucleotide
cauaguccuuugagaucug

SEQ ID NO: 2235552 - RNA, 19 nt, Artificial Sequence
  Description of Artificial Sequence: Synthetic oligonucleotide
cuuggaccgcgccuccaug

SEQ ID NO: 2235553 - RNA, 19 nt, Artificial Sequence
  Description of Artificial Sequence: Synthetic oligonucleotide
augacugagcgagcgcgca

SEQ ID NO: 2235554 - RNA, 19 nt, Artificial Sequence
  Description of Artificial Sequence: Synthetic oligonucleotide
cuggaucugggauuauugu

SEQ ID NO: 2235555 - RNA, 19 nt, Artificial Sequence
  Description of Artificial Sequence: Synthetic oligonucleotide
cuaaaacggcgcgcuggag

SEQ ID NO: 2235556 - RNA, 19 nt, Artificial Sequence
  Description of Artificial Sequence: Synthetic oligonucleotide
ucguuuucgcggguccgga

SEQ ID NO: 2235557 - RNA, 19 nt, Artificial Sequence
  Description of Artificial Sequence: Synthetic oligonucleotide
gcuuuuggguccagcgacg

SEQ ID NO: 2235558 - RNA, 19 nt, Artificial Sequence
  Description of Artificial Sequence: Synthetic oligonucleotide
augccaccacuucaguauu

SEQ ID NO: 2235559 - RNA, 19 nt, Artificial Sequence
  Description of Artificial Sequence: Synthetic oligonucleotide
gcuaaaacggcgcgcugga

SEQ ID NO: 2235560 - RNA, 19 nt, Artificial Sequence
  Description of Artificial Sequence: Synthetic oligonucleotide
acugaucuacccacaggaa

SEQ ID NO: 2235561 - RNA, 19 nt, Artificial Sequence
  Description of Artificial Sequence: Synthetic oligonucleotide
gagaagguccaaacaucaa

SEQ ID NO: 2235562 - RNA, 19 nt, Artificial Sequence
  Description of Artificial Sequence: Synthetic oligonucleotide
ccacugaucuacccacagg

SEQ ID NO: 2235563 - RNA, 19 nt, Artificial Sequence
  Description of Artificial Sequence: Synthetic oligonucleotide
cagcgacgggacugagucg

SEQ ID NO: 2235564 - RNA, 19 nt, Artificial Sequence
  Description of Artificial Sequence: Synthetic oligonucleotide
aggcuaaaacggcgcgcug

SEQ ID NO: 2235565 - RNA, 19 nt, Artificial Sequence
  Description of Artificial Sequence: Synthetic oligonucleotide
cgagggguauuaauccagg

SEQ ID NO: 2235566 - RNA, 19 nt, Artificial Sequence
  Description of Artificial Sequence: Synthetic oligonucleotide
agggagugaucugcggcug

SEQ ID NO: 2235567 - RNA, 19 nt, Artificial Sequence
  Description of Artificial Sequence: Synthetic oligonucleotide
gccgggacaccucucccgg

SEQ ID NO: 2235568 - RNA, 19 nt, Artificial Sequence
  Description of Artificial Sequence: Synthetic oligonucleotide
uucccacgauagucaguca

SEQ ID NO: 2235569 - RNA, 19 nt, Artificial Sequence
  Description of Artificial Sequence: Synthetic oligonucleotide
caguaaggugcuggcuuag

SEQ ID NO: 2235570 - RNA, 19 nt, Artificial Sequence
  Description of Artificial Sequence: Synthetic oligonucleotide
ggccaaguggguaaacuga

SEQ ID NO: 2235571 - RNA, 19 nt, Artificial Sequence
  Description of Artificial Sequence: Synthetic oligonucleotide
cauucagcguaaucugccu

SEQ ID NO: 2235572 - RNA, 19 nt, Artificial Sequence
  Description of Artificial Sequence: Synthetic oligonucleotide
ggcggaaggaucagcacca

SEQ ID NO: 2235573 - RNA, 19 nt, Artificial Sequence
  Description of Artificial Sequence: Synthetic oligonucleotide
gcggguccggaaccgaucc

SEQ ID NO: 2235574 - RNA, 19 nt, Artificial Sequence
  Description of Artificial Sequence: Synthetic oligonucleotide
ugucuucgagggguauuaa

SEQ ID NO: 2235575 - RNA, 19 nt, Artificial Sequence
  Description of Artificial Sequence: Synthetic oligonucleotide
agcgcgcaaacacgucccu

SEQ ID NO: 2235576 - RNA, 19 nt, Artificial Sequence
  Description of Artificial Sequence: Synthetic oligonucleotide
guaauaacacagugaccuu

SEQ ID NO: 2235577 - RNA, 19 nt, Artificial Sequence
  Description of Artificial Sequence: Synthetic oligonucleotide
caaacacgucccucagcga

SEQ ID NO: 2235578 - RNA, 19 nt, Artificial Sequence
  Description of Artificial Sequence: Synthetic oligonucleotide
ccggaaccgauccucacuc

SEQ ID NO: 2235579 - RNA, 19 nt, Artificial Sequence
  Description of Artificial Sequence: Synthetic oligonucleotide
cagcgaaagcgcggagucc

SEQ ID NO: 2235580 - RNA, 19 nt, Artificial Sequence
  Description of Artificial Sequence: Synthetic oligonucleotide
gucaguguacuggaaugcu

SEQ ID NO: 2235581 - RNA, 19 nt, Artificial Sequence
  Description of Artificial Sequence: Synthetic oligonucleotide
cuaagaguauggccugagu

SEQ ID NO: 2235582 - RNA, 19 nt, Artificial Sequence
  Description of Artificial Sequence: Synthetic oligonucleotide
agcuggaucugggauuauu

SEQ ID NO: 2235583 - RNA, 19 nt, Artificial Sequence
  Description of Artificial Sequence: Synthetic oligonucleotide
gcggcugaaagccgggaca

SEQ ID NO: 2235584 - RNA, 19 nt, Artificial Sequence
  Description of Artificial Sequence: Synthetic oligonucleotide
ggaucugggauuauuguuu

SEQ ID NO: 2235585 - RNA, 19 nt, Artificial Sequence
  Description of Artificial Sequence: Synthetic oligonucleotide
ucgcggguccggaaccgau

SEQ ID NO: 2235586 - RNA, 19 nt, Artificial Sequence
  Description of Artificial Sequence: Synthetic oligonucleotide
cugucuucgagggguauua

SEQ ID NO: 2235587 - RNA, 19 nt, Artificial Sequence
  Description of Artificial Sequence: Synthetic oligonucleotide
ggacugagucgucgcgucc

SEQ ID NO: 2235588 - RNA, 19 nt, Artificial Sequence
  Description of Artificial Sequence: Synthetic oligonucleotide
gggacugagucgucgcguc

SEQ ID NO: 2235589 - RNA, 19 nt, Artificial Sequence
  Description of Artificial Sequence: Synthetic oligonucleotide
gaaagccgggacaccucuc

SEQ ID NO: 2235590 - RNA, 19 nt, Artificial Sequence
  Description of Artificial Sequence: Synthetic oligonucleotide
ggguccagcgacgggacug

SEQ ID NO: 2235591 - RNA, 19 nt, Artificial Sequence
  Description of Artificial Sequence: Synthetic oligonucleotide
aggauuccuuugucaucaa

SEQ ID NO: 2235592 - RNA, 19 nt, Artificial Sequence
  Description of Artificial Sequence: Synthetic oligonucleotide
cggcggaaggaucagcacc

SEQ ID NO: 2235593 - RNA, 19 nt, Artificial Sequence
  Description of Artificial Sequence: Synthetic oligonucleotide
gucuucgagggguauuaau

SEQ ID NO: 2235594 - RNA, 19 nt, Artificial Sequence
  Description of Artificial Sequence: Synthetic oligonucleotide
cugagagucgacagagcau

SEQ ID NO: 2235595 - RNA, 19 nt, Artificial Sequence
  Description of Artificial Sequence: Synthetic oligonucleotide
ggacaccucucccggguac

SEQ ID NO: 2235596 - RNA, 19 nt, Artificial Sequence
  Description of Artificial Sequence: Synthetic oligonucleotide
uucgcggguccggaaccga

SEQ ID NO: 2235597 - RNA, 19 nt, Artificial Sequence
  Description of Artificial Sequence: Synthetic oligonucleotide
gcgcaaacacgucccucag

SEQ ID NO: 2235598 - RNA, 19 nt, Artificial Sequence
  Description of Artificial Sequence: Synthetic oligonucleotide
cccggguacacuuguccac

SEQ ID NO: 2235599 - RNA, 19 nt, Artificial Sequence
  Description of Artificial Sequence: Synthetic oligonucleotide
acuuguccaccagcauaga

SEQ ID NO: 2235600 - RNA, 19 nt, Artificial Sequence
  Description of Artificial Sequence: Synthetic oligonucleotide
cuugaaccaagcgcagugu

SEQ ID NO: 2235601 - RNA, 19 nt, Artificial Sequence
  Description of Artificial Sequence: Synthetic oligonucleotide
ccuuauuggccccaguccu

SEQ ID NO: 2235602 - RNA, 19 nt, Artificial Sequence
  Description of Artificial Sequence: Synthetic oligonucleotide
ccggguacacuuguccacc

SEQ ID NO: 2235603 - RNA, 19 nt, Artificial Sequence
  Description of Artificial Sequence: Synthetic oligonucleotide
gucaccgaaggcaaugauu

SEQ ID NO: 2235604 - RNA, 19 nt, Artificial Sequence
  Description of Artificial Sequence: Synthetic oligonucleotide
gcguaaucugccuuaggau

SEQ ID NO: 2235605 - RNA, 19 nt, Artificial Sequence
  Description of Artificial Sequence: Synthetic oligonucleotide
gaacagcagcagcggcgga

SEQ ID NO: 2235606 - RNA, 19 nt, Artificial Sequence
  Description of Artificial Sequence: Synthetic oligonucleotide
gagcuucgguccgcagcag

SEQ ID NO: 2235607 - RNA, 19 nt, Artificial Sequence
  Description of Artificial Sequence: Synthetic oligonucleotide
cuacccacaggaaggucau

SEQ ID NO: 2235608 - RNA, 19 nt, Artificial Sequence
  Description of Artificial Sequence: Synthetic oligonucleotide
gagugaucugcggcugaaa

SEQ ID NO: 2235609 - RNA, 19 nt, Artificial Sequence
  Description of Artificial Sequence: Synthetic oligonucleotide
ggguauuaauccaggccaa

SEQ ID NO: 2235610 - RNA, 19 nt, Artificial Sequence
  Description of Artificial Sequence: Synthetic oligonucleotide
cugagcgagcgcgcaaaca

SEQ ID NO: 2235611 - RNA, 19 nt, Artificial Sequence
  Description of Artificial Sequence: Synthetic oligonucleotide
ccaaguggguaaacugaga

SEQ ID NO: 2235612 - RNA, 19 nt, Artificial Sequence
  Description of Artificial Sequence: Synthetic oligonucleotide
ggaauccuuauuggcccca

SEQ ID NO: 2235613 - RNA, 19 nt, Artificial Sequence
  Description of Artificial Sequence: Synthetic oligonucleotide
ggaaggucauucagcguaa

SEQ ID NO: 2235614 - RNA, 19 nt, Artificial Sequence
  Description of Artificial Sequence: Synthetic oligonucleotide
cucagcgaaagcgcggagu

SEQ ID NO: 2235615 - RNA, 19 nt, Artificial Sequence
  Description of Artificial Sequence: Synthetic oligonucleotide
gcuuagaugcagggaguga

SEQ ID NO: 2235616 - RNA, 19 nt, Artificial Sequence
  Description of Artificial Sequence: Synthetic oligonucleotide
guauggccugaguccucga

SEQ ID NO: 2235617 - RNA, 19 nt, Artificial Sequence
  Description of Artificial Sequence: Synthetic oligonucleotide
caguccucccugucuucga

SEQ ID NO: 2235618 - RNA, 19 nt, Artificial Sequence
  Description of Artificial Sequence: Synthetic oligonucleotide
cguaaucugccuuaggauu

SEQ ID NO: 2235619 - RNA, 19 nt, Artificial Sequence
  Description of Artificial Sequence: Synthetic oligonucleotide
cgauagucagucaguuuca

SEQ ID NO: 2235620 - RNA, 19 nt, Artificial Sequence
  Description of Artificial Sequence: Synthetic oligonucleotide
ccuccaugacugagcgagc

SEQ ID NO: 2235621 - RNA, 19 nt, Artificial Sequence
  Description of Artificial Sequence: Synthetic oligonucleotide
cgcgccuccaugacugagc

SEQ ID NO: 2235622 - RNA, 19 nt, Artificial Sequence
  Description of Artificial Sequence: Synthetic oligonucleotide
gcuucgguccgcagcagga

SEQ ID NO: 2235623 - RNA, 19 nt, Artificial Sequence
  Description of Artificial Sequence: Synthetic oligonucleotide
cgcgcaaacacgucccuca

SEQ ID NO: 2235624 - RNA, 19 nt, Artificial Sequence
  Description of Artificial Sequence: Synthetic oligonucleotide
gggagugaucugcggcuga

SEQ ID NO: 2235625 - RNA, 19 nt, Artificial Sequence
  Description of Artificial Sequence: Synthetic oligonucleotide
gcggcggaaggaucagcac

SEQ ID NO: 2235626 - RNA, 19 nt, Artificial Sequence
  Description of Artificial Sequence: Synthetic oligonucleotide
accgcgccuccaugacuga

SEQ ID NO: 2235627 - RNA, 19 nt, Artificial Sequence
  Description of Artificial Sequence: Synthetic oligonucleotide
ccugccgccagaaggcuaa

SEQ ID NO: 2235628 - RNA, 19 nt, Artificial Sequence
  Description of Artificial Sequence: Synthetic oligonucleotide
cuucgguccgcagcaggaa

SEQ ID NO: 2235629 - RNA, 19 nt, Artificial Sequence
  Description of Artificial Sequence: Synthetic oligonucleotide
cacgauagucagucaguuu

SEQ ID NO: 2235630 - RNA, 19 nt, Artificial Sequence
  Description of Artificial Sequence: Synthetic oligonucleotide
ccaguaaggugcuggcuua

SEQ ID NO: 2235631 - RNA, 19 nt, Artificial Sequence
  Description of Artificial Sequence: Synthetic oligonucleotide
cggaaggaucagcaccagc

SEQ ID NO: 2235632 - RNA, 19 nt, Artificial Sequence
  Description of Artificial Sequence: Synthetic oligonucleotide
ccucccugucuucgagggg

SEQ ID NO: 2235633 - RNA, 19 nt, Artificial Sequence
  Description of Artificial Sequence: Synthetic oligonucleotide
gucgucgcguccagcagcu

SEQ ID NO: 2235634 - RNA, 19 nt, Artificial Sequence
  Description of Artificial Sequence: Synthetic oligonucleotide
ggagugaucugcggcugaa

SEQ ID NO: 2235635 - RNA, 19 nt, Artificial Sequence
  Description of Artificial Sequence: Synthetic oligonucleotide
gguccagcgacgggacuga

SEQ ID NO: 2235636 - RNA, 19 nt, Artificial Sequence
  Description of Artificial Sequence: Synthetic oligonucleotide
guccagcgacgggacugag

SEQ ID NO: 2235637 - RNA, 19 nt, Artificial Sequence
  Description of Artificial Sequence: Synthetic oligonucleotide
ccucgagguauacaccaua

SEQ ID NO: 2235638 - RNA, 19 nt, Artificial Sequence
  Description of Artificial Sequence: Synthetic oligonucleotide
gcggaaggaucagcaccag

SEQ ID NO: 2235639 - RNA, 19 nt, Artificial Sequence
  Description of Artificial Sequence: Synthetic oligonucleotide
cgacgggacugagucgucg

SEQ ID NO: 2235640 - RNA, 19 nt, Artificial Sequence
  Description of Artificial Sequence: Synthetic oligonucleotide
ccgggacaccucucccggg

SEQ ID NO: 2235641 - RNA, 19 nt, Artificial Sequence
  Description of Artificial Sequence: Synthetic oligonucleotide
ccucagcgaaagcgcggag

SEQ ID NO: 2235642 - RNA, 19 nt, Artificial Sequence
  Description of Artificial Sequence: Synthetic oligonucleotide
cccaguaaggugcuggcuu

SEQ ID NO: 2235643 - RNA, 19 nt, Artificial Sequence
  Description of Artificial Sequence: Synthetic oligonucleotide
gcacucguuuucgcggguc

SEQ ID NO: 2235644 - RNA, 19 nt, Artificial Sequence
  Description of Artificial Sequence: Synthetic oligonucleotide
gcgaaagcgcggagucccc

SEQ ID NO: 2235645 - RNA, 19 nt, Artificial Sequence
  Description of Artificial Sequence: Synthetic oligonucleotide
ggucaccgaaggcaaugau

SEQ ID NO: 2235646 - RNA, 19 nt, Artificial Sequence
  Description of Artificial Sequence: Synthetic oligonucleotide
cccucagcgaaagcgcgga

SEQ ID NO: 2235647 - RNA, 19 nt, Artificial Sequence
  Description of Artificial Sequence: Synthetic oligonucleotide
caccagcuuuuggguccag

SEQ ID NO: 2235648 - RNA, 19 nt, Artificial Sequence
  Description of Artificial Sequence: Synthetic oligonucleotide
cgguccgcagcaggaacag

SEQ ID NO: 2235649 - RNA, 19 nt, Artificial Sequence
  Description of Artificial Sequence: Synthetic oligonucleotide
ggaccgcgccuccaugacu

SEQ ID NO: 2235650 - RNA, 19 nt, Artificial Sequence
  Description of Artificial Sequence: Synthetic oligonucleotide
ggaguccccugccgccaga

SEQ ID NO: 2235651 - RNA, 19 nt, Artificial Sequence
  Description of Artificial Sequence: Synthetic oligonucleotide
gcuuggaccgcgccuccau

SEQ ID NO: 2235652 - RNA, 19 nt, Artificial Sequence
  Description of Artificial Sequence: Synthetic oligonucleotide
gcgcgcaaacacgucccuc

SEQ ID NO: 2235653 - RNA, 19 nt, Artificial Sequence
  Description of Artificial Sequence: Synthetic oligonucleotide
cgcggguccggaaccgauc

SEQ ID NO: 2235654 - RNA, 19 nt, Artificial Sequence
  Description of Artificial Sequence: Synthetic oligonucleotide
ggccugaguccucgaggua

SEQ ID NO: 2235655 - RNA, 19 nt, Artificial Sequence
  Description of Artificial Sequence: Synthetic oligonucleotide
ccgcgccuccaugacugag

SEQ ID NO: 2235656 - RNA, 19 nt, Artificial Sequence
  Description of Artificial Sequence: Synthetic oligonucleotide
ggcacucguuuucgcgggu

SEQ ID NO: 2235657 - RNA, 19 nt, Artificial Sequence
  Description of Artificial Sequence: Synthetic oligonucleotide
cggguacacuuguccacca

SEQ ID NO: 2235658 - RNA, 19 nt, Artificial Sequence
  Description of Artificial Sequence: Synthetic oligonucleotide
ccaccacuucaguauuuau

SEQ ID NO: 2235659 - RNA, 19 nt, Artificial Sequence
  Description of Artificial Sequence: Synthetic oligonucleotide
ucgucgcguccagcagcuu

SEQ ID NO: 2235660 - RNA, 19 nt, Artificial Sequence
  Description of Artificial Sequence: Synthetic oligonucleotide
ccacgauagucagucaguu

SEQ ID NO: 2235661 - RNA, 19 nt, Artificial Sequence
  Description of Artificial Sequence: Synthetic oligonucleotide
cggaguccccugccgccag

SEQ ID NO: 2235662 - RNA, 19 nt, Artificial Sequence
  Description of Artificial Sequence: Synthetic oligonucleotide
caccucucccggguacacu

SEQ ID NO: 2235663 - RNA, 19 nt, Artificial Sequence
  Description of Artificial Sequence: Synthetic oligonucleotide
cguuuucgcggguccggaa

SEQ ID NO: 2235664 - RNA, 19 nt, Artificial Sequence
  Description of Artificial Sequence: Synthetic oligonucleotide
cggucaccgaaggcaauga

SEQ ID NO: 2235665 - RNA, 19 nt, Artificial Sequence
  Description of Artificial Sequence: Synthetic oligonucleotide
gcgacgggacugagucguc

SEQ ID NO: 2235666 - RNA, 19 nt, Artificial Sequence
  Description of Artificial Sequence: Synthetic oligonucleotide
cccugccgccagaaggcua

SEQ ID NO: 2235667 - RNA, 19 nt, Artificial Sequence
  Description of Artificial Sequence: Synthetic oligonucleotide
ccugucuucgagggguauu

SEQ ID NO: 2235668 - RNA, 19 nt, Artificial Sequence
  Description of Artificial Sequence: Synthetic oligonucleotide
cggaaccgauccucacucu

SEQ ID NO: 2235669 - RNA, 19 nt, Artificial Sequence
  Description of Artificial Sequence: Synthetic oligonucleotide
cgggacugagucgucgcgu

SEQ ID NO: 2235670 - RNA, 19 nt, Artificial Sequence
  Description of Artificial Sequence: Synthetic oligonucleotide
cgccuccaugacugagcga

SEQ ID NO: 2235671 - RNA, 19 nt, Artificial Sequence
  Description of Artificial Sequence: Synthetic oligonucleotide
ccccugccgccagaaggcu

SEQ ID NO: 2235672 - RNA, 19 nt, Artificial Sequence
  Description of Artificial Sequence: Synthetic oligonucleotide
uuugcaauagcauacaaag

SEQ ID NO: 2235673 - RNA, 19 nt, Artificial Sequence
  Description of Artificial Sequence: Synthetic oligonucleotide
aauguguccaucuucaguc

SEQ ID NO: 2235674 - RNA, 19 nt, Artificial Sequence
  Description of Artificial Sequence: Synthetic oligonucleotide
ugaagaauacccaugcugg

SEQ ID NO: 2235675 - RNA, 19 nt, Artificial Sequence
  Description of Artificial Sequence: Synthetic oligonucleotide
ucagagaauauucugaaug

SEQ ID NO: 2235676 - RNA, 19 nt, Artificial Sequence
  Description of Artificial Sequence: Synthetic oligonucleotide
ucuugaaccauaucaaagg

SEQ ID NO: 2235677 - RNA, 19 nt, Artificial Sequence
  Description of Artificial Sequence: Synthetic oligonucleotide
uuuaacuaaacuaggauau

SEQ ID NO: 2235678 - RNA, 19 nt, Artificial Sequence
  Description of Artificial Sequence: Synthetic oligonucleotide
ugaaucuacacauacuucc

SEQ ID NO: 2235679 - RNA, 19 nt, Artificial Sequence
  Description of Artificial Sequence: Synthetic oligonucleotide
uggaucuugaaccauauca

SEQ ID NO: 2235680 - RNA, 19 nt, Artificial Sequence
  Description of Artificial Sequence: Synthetic oligonucleotide
ucaaaacacguucaaaucc

SEQ ID NO: 2235681 - RNA, 19 nt, Artificial Sequence
  Description of Artificial Sequence: Synthetic oligonucleotide
uacuacuugaagaauaccc

SEQ ID NO: 2235682 - RNA, 19 nt, Artificial Sequence
  Description of Artificial Sequence: Synthetic oligonucleotide
aauaccaaaccaucagcac

SEQ ID NO: 2235683 - RNA, 19 nt, Artificial Sequence
  Description of Artificial Sequence: Synthetic oligonucleotide
ugcaauagcauacaaaguc

SEQ ID NO: 2235684 - RNA, 19 nt, Artificial Sequence
  Description of Artificial Sequence: Synthetic oligonucleotide
auaccaaaccaucagcacc

SEQ ID NO: 2235685 - RNA, 19 nt, Artificial Sequence
  Description of Artificial Sequence: Synthetic oligonucleotide
aaguccuuacuuuugucac

SEQ ID NO: 2235686 - RNA, 19 nt, Artificial Sequence
  Description of Artificial Sequence: Synthetic oligonucleotide
auucuguagcaccugaacc

SEQ ID NO: 2235687 - RNA, 19 nt, Artificial Sequence
  Description of Artificial Sequence: Synthetic oligonucleotide
aacacguucaaaucccagg

SEQ ID NO: 2235688 - RNA, 19 nt, Artificial Sequence
  Description of Artificial Sequence: Synthetic oligonucleotide
agagccacaagagacaugc

SEQ ID NO: 2235689 - RNA, 19 nt, Artificial Sequence
  Description of Artificial Sequence: Synthetic oligonucleotide
aguuucgaaacuucauucc

SEQ ID NO: 2235690 - RNA, 19 nt, Artificial Sequence
  Description of Artificial Sequence: Synthetic oligonucleotide
ucuaccuucacacugugac

SEQ ID NO: 2235691 - RNA, 19 nt, Artificial Sequence
  Description of Artificial Sequence: Synthetic oligonucleotide
ugccauuggaucuugaacc

SEQ ID NO: 2235692 - RNA, 19 nt, Artificial Sequence
  Description of Artificial Sequence: Synthetic oligonucleotide
accaucagcaccauaaugc

SEQ ID NO: 2235693 - RNA, 19 nt, Artificial Sequence
  Description of Artificial Sequence: Synthetic oligonucleotide
uaaacuaggauauccuuug

SEQ ID NO: 2235694 - RNA, 19 nt, Artificial Sequence
  Description of Artificial Sequence: Synthetic oligonucleotide
uaagccagcacauaauuca

SEQ ID NO: 2235695 - RNA, 19 nt, Artificial Sequence
  Description of Artificial Sequence: Synthetic oligonucleotide
aaaguccuuacuuuuguca

SEQ ID NO: 2235696 - RNA, 19 nt, Artificial Sequence
  Description of Artificial Sequence: Synthetic oligonucleotide
uucugaaugagcaagcgaa

SEQ ID NO: 2235697 - RNA, 19 nt, Artificial Sequence
  Description of Artificial Sequence: Synthetic oligonucleotide
uacacauacuuccauaaga

SEQ ID NO: 2235698 - RNA, 19 nt, Artificial Sequence
  Description of Artificial Sequence: Synthetic oligonucleotide
guugcuuuaauagaggcag

SEQ ID NO: 2235699 - RNA, 19 nt, Artificial Sequence
  Description of Artificial Sequence: Synthetic oligonucleotide
uguuuuacuacuugaagaa

SEQ ID NO: 2235700 - RNA, 19 nt, Artificial Sequence
  Description of Artificial Sequence: Synthetic oligonucleotide
aagagacaugcacagaucu

SEQ ID NO: 2235701 - RNA, 19 nt, Artificial Sequence
  Description of Artificial Sequence: Synthetic oligonucleotide
uuuacuacuugaagaauac

SEQ ID NO: 2235702 - RNA, 19 nt, Artificial Sequence
  Description of Artificial Sequence: Synthetic oligonucleotide
uaagagagucuccagagcu

SEQ ID NO: 2235703 - RNA, 19 nt, Artificial Sequence
  Description of Artificial Sequence: Synthetic oligonucleotide
ugaaaagugacuggcagag

SEQ ID NO: 2235704 - RNA, 19 nt, Artificial Sequence
  Description of Artificial Sequence: Synthetic oligonucleotide
aaugagcaagcgaagcucc

SEQ ID NO: 2235705 - RNA, 19 nt, Artificial Sequence
  Description of Artificial Sequence: Synthetic oligonucleotide
cuuucugcauucauggccg

SEQ ID NO: 2235706 - RNA, 19 nt, Artificial Sequence
  Description of Artificial Sequence: Synthetic oligonucleotide
uuuuacuacuugaagaaua

SEQ ID NO: 2235707 - RNA, 19 nt, Artificial Sequence
  Description of Artificial Sequence: Synthetic oligonucleotide
cugagucucuagaagaucg

SEQ ID NO: 2235708 - RNA, 19 nt, Artificial Sequence
  Description of Artificial Sequence: Synthetic oligonucleotide
auaagaaauccacauggug

SEQ ID NO: 2235709 - RNA, 19 nt, Artificial Sequence
  Description of Artificial Sequence: Synthetic oligonucleotide
caaaacacguucaaauccc

SEQ ID NO: 2235710 - RNA, 19 nt, Artificial Sequence
  Description of Artificial Sequence: Synthetic oligonucleotide
aaacuaggauauccuuugc

SEQ ID NO: 2235711 - RNA, 19 nt, Artificial Sequence
  Description of Artificial Sequence: Synthetic oligonucleotide
ugaguugcuuuaauagagg

SEQ ID NO: 2235712 - RNA, 19 nt, Artificial Sequence
  Description of Artificial Sequence: Synthetic oligonucleotide
acgaaugucagccuucauc

SEQ ID NO: 2235713 - RNA, 19 nt, Artificial Sequence
  Description of Artificial Sequence: Synthetic oligonucleotide
acacguucaaaucccaggg

SEQ ID NO: 2235714 - RNA, 19 nt, Artificial Sequence
  Description of Artificial Sequence: Synthetic oligonucleotide
cugugaguugcuuuaauag

SEQ ID NO: 2235715 - RNA, 19 nt, Artificial Sequence
  Description of Artificial Sequence: Synthetic oligonucleotide
uaacuaaacuaggauaucc

SEQ ID NO: 2235716 - RNA, 19 nt, Artificial Sequence
  Description of Artificial Sequence: Synthetic oligonucleotide
agaauauucugaaugagca

SEQ ID NO: 2235717 - RNA, 19 nt, Artificial Sequence
  Description of Artificial Sequence: Synthetic oligonucleotide
cagcacauaauucaauccg

SEQ ID NO: 2235718 - RNA, 19 nt, Artificial Sequence
  Description of Artificial Sequence: Synthetic oligonucleotide
ugugaguugcuuuaauaga

SEQ ID NO: 2235719 - RNA, 19 nt, Artificial Sequence
  Description of Artificial Sequence: Synthetic oligonucleotide
uguuaugccaccuccuggc

SEQ ID NO: 2235720 - RNA, 19 nt, Artificial Sequence
  Description of Artificial Sequence: Synthetic oligonucleotide
agccacaagagacaugcac

SEQ ID NO: 2235721 - RNA, 19 nt, Artificial Sequence
  Description of Artificial Sequence: Synthetic oligonucleotide
uaucuguuaugccaccucc

SEQ ID NO: 2235722 - RNA, 19 nt, Artificial Sequence
  Description of Artificial Sequence: Synthetic oligonucleotide
aguuuaacuaaacuaggau

SEQ ID NO: 2235723 - RNA, 19 nt, Artificial Sequence
  Description of Artificial Sequence: Synthetic oligonucleotide
aaaagucaccuccccgugg

SEQ ID NO: 2235724 - RNA, 19 nt, Artificial Sequence
  Description of Artificial Sequence: Synthetic oligonucleotide
cuugaaccauaucaaaggc

SEQ ID NO: 2235725 - RNA, 19 nt, Artificial Sequence
  Description of Artificial Sequence: Synthetic oligonucleotide
auacuuccauaagaaaucc

SEQ ID NO: 2235726 - RNA, 19 nt, Artificial Sequence
  Description of Artificial Sequence: Synthetic oligonucleotide
ugaaugagcaagcgaagcu

SEQ ID NO: 2235727 - RNA, 19 nt, Artificial Sequence
  Description of Artificial Sequence: Synthetic oligonucleotide
aaccauaucaaaggcucgg

SEQ ID NO: 2235728 - RNA, 19 nt, Artificial Sequence
  Description of Artificial Sequence: Synthetic oligonucleotide
gaacaguggaauucuguag

SEQ ID NO: 2235729 - RNA, 19 nt, Artificial Sequence
  Description of Artificial Sequence: Synthetic oligonucleotide
caaauaccaaaccaucagc

SEQ ID NO: 2235730 - RNA, 19 nt, Artificial Sequence
  Description of Artificial Sequence: Synthetic oligonucleotide
acaagagacaugcacagau

SEQ ID NO: 2235731 - RNA, 19 nt, Artificial Sequence
  Description of Artificial Sequence: Synthetic oligonucleotide
cauaauucaauccgaccag

SEQ ID NO: 2235732 - RNA, 19 nt, Artificial Sequence
  Description of Artificial Sequence: Synthetic oligonucleotide
uuugucaauguguccaucu

SEQ ID NO: 2235733 - RNA, 19 nt, Artificial Sequence
  Description of Artificial Sequence: Synthetic oligonucleotide
gaagaauacccaugcuggg

SEQ ID NO: 2235734 - RNA, 19 nt, Artificial Sequence
  Description of Artificial Sequence: Synthetic oligonucleotide
uuccauaagaaauccacau

SEQ ID NO: 2235735 - RNA, 19 nt, Artificial Sequence
  Description of Artificial Sequence: Synthetic oligonucleotide
auaauucaauccgaccagc

SEQ ID NO: 2235736 - RNA, 19 nt, Artificial Sequence
  Description of Artificial Sequence: Synthetic oligonucleotide
uauucugaaugagcaagcg

SEQ ID NO: 2235737 - RNA, 19 nt, Artificial Sequence
  Description of Artificial Sequence: Synthetic oligonucleotide
agaucuuugucaauguguc

SEQ ID NO: 2235738 - RNA, 19 nt, Artificial Sequence
  Description of Artificial Sequence: Synthetic oligonucleotide
gaguugcuuuaauagaggc

SEQ ID NO: 2235739 - RNA, 19 nt, Artificial Sequence
  Description of Artificial Sequence: Synthetic oligonucleotide
cauaaugcuuggcaagacg

SEQ ID NO: 2235740 - RNA, 19 nt, Artificial Sequence
  Description of Artificial Sequence: Synthetic oligonucleotide
guuuaacuaaacuaggaua

SEQ ID NO: 2235741 - RNA, 19 nt, Artificial Sequence
  Description of Artificial Sequence: Synthetic oligonucleotide
uuaagagagucuccagagc

SEQ ID NO: 2235742 - RNA, 19 nt, Artificial Sequence
  Description of Artificial Sequence: Synthetic oligonucleotide
aaaggcucggugaaaagug

SEQ ID NO: 2235743 - RNA, 19 nt, Artificial Sequence
  Description of Artificial Sequence: Synthetic oligonucleotide
gaguuucgaaacuucauuc

SEQ ID NO: 2235744 - RNA, 19 nt, Artificial Sequence
  Description of Artificial Sequence: Synthetic oligonucleotide
uucgaaacuucauuccuga

SEQ ID NO: 2235745 - RNA, 19 nt, Artificial Sequence
  Description of Artificial Sequence: Synthetic oligonucleotide
gucucuagaagaucgagca

SEQ ID NO: 2235746 - RNA, 19 nt, Artificial Sequence
  Description of Artificial Sequence: Synthetic oligonucleotide
ucuguuaugccaccuccug

SEQ ID NO: 2235747 - RNA, 19 nt, Artificial Sequence
  Description of Artificial Sequence: Synthetic oligonucleotide
uucaauccgaccagcaccu

SEQ ID NO: 2235748 - RNA, 19 nt, Artificial Sequence
  Description of Artificial Sequence: Synthetic oligonucleotide
aaguuuaacuaaacuagga

SEQ ID NO: 2235749 - RNA, 19 nt, Artificial Sequence
  Description of Artificial Sequence: Synthetic oligonucleotide
agagagucuccagagcugc

SEQ ID NO: 2235750 - RNA, 19 nt, Artificial Sequence
  Description of Artificial Sequence: Synthetic oligonucleotide
acuuuugucacaucuguua

SEQ ID NO: 2235751 - RNA, 19 nt, Artificial Sequence
  Description of Artificial Sequence: Synthetic oligonucleotide
cacauaauucaauccgacc

SEQ ID NO: 2235752 - RNA, 19 nt, Artificial Sequence
  Description of Artificial Sequence: Synthetic oligonucleotide
auccacauggugcucccgc

SEQ ID NO: 2235753 - RNA, 19 nt, Artificial Sequence
  Description of Artificial Sequence: Synthetic oligonucleotide
agucucuagaagaucgagc

SEQ ID NO: 2235754 - RNA, 19 nt, Artificial Sequence
  Description of Artificial Sequence: Synthetic oligonucleotide
auccuuugcaauagcauac

SEQ ID NO: 2235755 - RNA, 19 nt, Artificial Sequence
  Description of Artificial Sequence: Synthetic oligonucleotide
uccacuggucaaaacacgu

SEQ ID NO: 2235756 - RNA, 19 nt, Artificial Sequence
  Description of Artificial Sequence: Synthetic oligonucleotide
ucaaaucccaggguuaaga

SEQ ID NO: 2235757 - RNA, 19 nt, Artificial Sequence
  Description of Artificial Sequence: Synthetic oligonucleotide
ggugaaaagugacuggcag

SEQ ID NO: 2235758 - RNA, 19 nt, Artificial Sequence
  Description of Artificial Sequence: Synthetic oligonucleotide
uaggauauccuuugcaaua

SEQ ID NO: 2235759 - RNA, 19 nt, Artificial Sequence
  Description of Artificial Sequence: Synthetic oligonucleotide
gugcugaacugucacaucc

SEQ ID NO: 2235760 - RNA, 19 nt, Artificial Sequence
  Description of Artificial Sequence: Synthetic oligonucleotide
agaagaucgagcagaacag

SEQ ID NO: 2235761 - RNA, 19 nt, Artificial Sequence
  Description of Artificial Sequence: Synthetic oligonucleotide
uucacgaucugaauccaaa

SEQ ID NO: 2235762 - RNA, 19 nt, Artificial Sequence
  Description of Artificial Sequence: Synthetic oligonucleotide
uuuaauagaggcaguccuu

SEQ ID NO: 2235763 - RNA, 19 nt, Artificial Sequence
  Description of Artificial Sequence: Synthetic oligonucleotide
gaggcaguccuucuagugc

SEQ ID NO: 2235764 - RNA, 19 nt, Artificial Sequence
  Description of Artificial Sequence: Synthetic oligonucleotide
aucacuucaacuucacgau

SEQ ID NO: 2235765 - RNA, 19 nt, Artificial Sequence
  Description of Artificial Sequence: Synthetic oligonucleotide
uucauggccgacuccacug

SEQ ID NO: 2235766 - RNA, 19 nt, Artificial Sequence
  Description of Artificial Sequence: Synthetic oligonucleotide
cuucaaggauccuuugaag

SEQ ID NO: 2235767 - RNA, 19 nt, Artificial Sequence
  Description of Artificial Sequence: Synthetic oligonucleotide
agagaauauucugaaugag

SEQ ID NO: 2235768 - RNA, 19 nt, Artificial Sequence
  Description of Artificial Sequence: Synthetic oligonucleotide
gacacuuuguuuuacuacu

SEQ ID NO: 2235769 - RNA, 19 nt, Artificial Sequence
  Description of Artificial Sequence: Synthetic oligonucleotide
uuuuaucuguuaugccacc

SEQ ID NO: 2235770 - RNA, 19 nt, Artificial Sequence
  Description of Artificial Sequence: Synthetic oligonucleotide
agaacaguggaauucugua

SEQ ID NO: 2235771 - RNA, 19 nt, Artificial Sequence
  Description of Artificial Sequence: Synthetic oligonucleotide
ugugguuccuccuuccagu

SEQ ID NO: 2235772 - RNA, 19 nt, Artificial Sequence
  Description of Artificial Sequence: Synthetic oligonucleotide
ucggugaaaagugacuggc

SEQ ID NO: 2235773 - RNA, 19 nt, Artificial Sequence
  Description of Artificial Sequence: Synthetic oligonucleotide
ucucuagaagaucgagcag

SEQ ID NO: 2235774 - RNA, 19 nt, Artificial Sequence
  Description of Artificial Sequence: Synthetic oligonucleotide
caaaucccaggguuaagag

SEQ ID NO: 2235775 - RNA, 19 nt, Artificial Sequence
  Description of Artificial Sequence: Synthetic oligonucleotide
uuaauagaggcaguccuuc

SEQ ID NO: 2235776 - RNA, 19 nt, Artificial Sequence
  Description of Artificial Sequence: Synthetic oligonucleotide
uagcauacaaaguccuuac

SEQ ID NO: 2235777 - RNA, 19 nt, Artificial Sequence
  Description of Artificial Sequence: Synthetic oligonucleotide
augccccaaauaccaaacc

SEQ ID NO: 2235778 - RNA, 19 nt, Artificial Sequence
  Description of Artificial Sequence: Synthetic oligonucleotide
aagcgaagcucccauugca

SEQ ID NO: 2235779 - RNA, 19 nt, Artificial Sequence
  Description of Artificial Sequence: Synthetic oligonucleotide
uugcaauagcauacaaagu

SEQ ID NO: 2235780 - RNA, 19 nt, Artificial Sequence
  Description of Artificial Sequence: Synthetic oligonucleotide
ucgguuuccgccgagugcc

SEQ ID NO: 2235781 - RNA, 19 nt, Artificial Sequence
  Description of Artificial Sequence: Synthetic oligonucleotide
accugaaccuucaaggauc

SEQ ID NO: 2235782 - RNA, 19 nt, Artificial Sequence
  Description of Artificial Sequence: Synthetic oligonucleotide
acuacuugaagaauaccca

SEQ ID NO: 2235783 - RNA, 19 nt, Artificial Sequence
  Description of Artificial Sequence: Synthetic oligonucleotide
aagaauacccaugcugggu

SEQ ID NO: 2235784 - RNA, 19 nt, Artificial Sequence
  Description of Artificial Sequence: Synthetic oligonucleotide
gauauccuuugcaauagca

SEQ ID NO: 2235785 - RNA, 19 nt, Artificial Sequence
  Description of Artificial Sequence: Synthetic oligonucleotide
ucugugaguugcuuuaaua

SEQ ID NO: 2235786 - RNA, 19 nt, Artificial Sequence
  Description of Artificial Sequence: Synthetic oligonucleotide
uuaucuguuaugccaccuc

SEQ ID NO: 2235787 - RNA, 19 nt, Artificial Sequence
  Description of Artificial Sequence: Synthetic oligonucleotide
ggcaagacgaaugucagcc

SEQ ID NO: 2235788 - RNA, 19 nt, Artificial Sequence
  Description of Artificial Sequence: Synthetic oligonucleotide
agaucgagcagaacagugg

SEQ ID NO: 2235789 - RNA, 19 nt, Artificial Sequence
  Description of Artificial Sequence: Synthetic oligonucleotide
gaucgagcagaacagugga

SEQ ID NO: 2235790 - RNA, 19 nt, Artificial Sequence
  Description of Artificial Sequence: Synthetic oligonucleotide
cucgccuucgguuuccgcc

SEQ ID NO: 2235791 - RNA, 19 nt, Artificial Sequence
  Description of Artificial Sequence: Synthetic oligonucleotide
gaucuuugucaaugugucc

SEQ ID NO: 2235792 - RNA, 19 nt, Artificial Sequence
  Description of Artificial Sequence: Synthetic oligonucleotide
ucuguuaccuucagagaau

SEQ ID NO: 2235793 - RNA, 19 nt, Artificial Sequence
  Description of Artificial Sequence: Synthetic oligonucleotide
cagagaauauucugaauga

SEQ ID NO: 2235794 - RNA, 19 nt, Artificial Sequence
  Description of Artificial Sequence: Synthetic oligonucleotide
aagacgaaugucagccuuc

SEQ ID NO: 2235795 - RNA, 19 nt, Artificial Sequence
  Description of Artificial Sequence: Synthetic oligonucleotide
uaccuucagagaauauucu

SEQ ID NO: 2235796 - RNA, 19 nt, Artificial Sequence
  Description of Artificial Sequence: Synthetic oligonucleotide
gaacugucacauccacugg

SEQ ID NO: 2235797 - RNA, 19 nt, Artificial Sequence
  Description of Artificial Sequence: Synthetic oligonucleotide
uuugccucaucugugaguu

SEQ ID NO: 2235798 - RNA, 19 nt, Artificial Sequence
  Description of Artificial Sequence: Synthetic oligonucleotide
caugcacagaucuuuguca

SEQ ID NO: 2235799 - RNA, 19 nt, Artificial Sequence
  Description of Artificial Sequence: Synthetic oligonucleotide
ugcuuggcaagacgaaugu

SEQ ID NO: 2235800 - RNA, 19 nt, Artificial Sequence
  Description of Artificial Sequence: Synthetic oligonucleotide
aaugcuuggcaagacgaau

SEQ ID NO: 2235801 - RNA, 19 nt, Artificial Sequence
  Description of Artificial Sequence: Synthetic oligonucleotide
cucggugaaaagugacugg

SEQ ID NO: 2235802 - RNA, 19 nt, Artificial Sequence
  Description of Artificial Sequence: Synthetic oligonucleotide
gaaugagcaagcgaagcuc

SEQ ID NO: 2235803 - RNA, 19 nt, Artificial Sequence
  Description of Artificial Sequence: Synthetic oligonucleotide
uuccccgacggcauccacg

SEQ ID NO: 2235804 - RNA, 19 nt, Artificial Sequence
  Description of Artificial Sequence: Synthetic oligonucleotide
caucuucagucaaugcccc

SEQ ID NO: 2235805 - RNA, 19 nt, Artificial Sequence
  Description of Artificial Sequence: Synthetic oligonucleotide
gaaccauaucaaaggcucg

SEQ ID NO: 2235806 - RNA, 19 nt, Artificial Sequence
  Description of Artificial Sequence: Synthetic oligonucleotide
uucgguuuccgccgagugc

SEQ ID NO: 2235807 - RNA, 19 nt, Artificial Sequence
  Description of Artificial Sequence: Synthetic oligonucleotide
cugaaugagcaagcgaagc

SEQ ID NO: 2235808 - RNA, 19 nt, Artificial Sequence
  Description of Artificial Sequence: Synthetic oligonucleotide
acaauccugccuuuugccu

SEQ ID NO: 2235809 - RNA, 19 nt, Artificial Sequence
  Description of Artificial Sequence: Synthetic oligonucleotide
ucaauguguccaucuucag

SEQ ID NO: 2235810 - RNA, 19 nt, Artificial Sequence
  Description of Artificial Sequence: Synthetic oligonucleotide
ucgccuucgguuuccgccg

SEQ ID NO: 2235811 - RNA, 19 nt, Artificial Sequence
  Description of Artificial Sequence: Synthetic oligonucleotide
aaacacguucaaaucccag

SEQ ID NO: 2235812 - RNA, 19 nt, Artificial Sequence
  Description of Artificial Sequence: Synthetic oligonucleotide
aguccuucuagugcugaac

SEQ ID NO: 2235813 - RNA, 19 nt, Artificial Sequence
  Description of Artificial Sequence: Synthetic oligonucleotide
cuguuaugccaccuccugg

SEQ ID NO: 2235814 - RNA, 19 nt, Artificial Sequence
  Description of Artificial Sequence: Synthetic oligonucleotide
uuacuacuugaagaauacc

SEQ ID NO: 2235815 - RNA, 19 nt, Artificial Sequence
  Description of Artificial Sequence: Synthetic oligonucleotide
ccaaauaccaaaccaucag

SEQ ID NO: 2235816 - RNA, 19 nt, Artificial Sequence
  Description of Artificial Sequence: Synthetic oligonucleotide
uuuaucuguuaugccaccu

SEQ ID NO: 2235817 - RNA, 19 nt, Artificial Sequence
  Description of Artificial Sequence: Synthetic oligonucleotide
cuuuaauagaggcaguccu

SEQ ID NO: 2235818 - RNA, 19 nt, Artificial Sequence
  Description of Artificial Sequence: Synthetic oligonucleotide
uaaugcuuggcaagacgaa

SEQ ID NO: 2235819 - RNA, 19 nt, Artificial Sequence
  Description of Artificial Sequence: Synthetic oligonucleotide
gguuccuccuuccaguaag

SEQ ID NO: 2235820 - RNA, 19 nt, Artificial Sequence
  Description of Artificial Sequence: Synthetic oligonucleotide
agugcugaacugucacauc

SEQ ID NO: 2235821 - RNA, 19 nt, Artificial Sequence
  Description of Artificial Sequence: Synthetic oligonucleotide
uccaugucucucacagaag

SEQ ID NO: 2235822 - RNA, 19 nt, Artificial Sequence
  Description of Artificial Sequence: Synthetic oligonucleotide
cugccauuggaucuugaac

SEQ ID NO: 2235823 - RNA, 19 nt, Artificial Sequence
  Description of Artificial Sequence: Synthetic oligonucleotide
ugugacauccaugucucuc

SEQ ID NO: 2235824 - RNA, 19 nt, Artificial Sequence
  Description of Artificial Sequence: Synthetic oligonucleotide
ugucucucacagaaguuua

SEQ ID NO: 2235825 - RNA, 19 nt, Artificial Sequence
  Description of Artificial Sequence: Synthetic oligonucleotide
uggucggaucaucacaaaa

SEQ ID NO: 2235826 - RNA, 19 nt, Artificial Sequence
  Description of Artificial Sequence: Synthetic oligonucleotide
cucccauugcaacagagga

SEQ ID NO: 2235827 - RNA, 19 nt, Artificial Sequence
  Description of Artificial Sequence: Synthetic oligonucleotide
cuuccauaagaaauccaca

SEQ ID NO: 2235828 - RNA, 19 nt, Artificial Sequence
  Description of Artificial Sequence: Synthetic oligonucleotide
cuuugcaauagcauacaaa

SEQ ID NO: 2235829 - RNA, 19 nt, Artificial Sequence
  Description of Artificial Sequence: Synthetic oligonucleotide
uugcaacagaggaguuucg

SEQ ID NO: 2235830 - RNA, 19 nt, Artificial Sequence
  Description of Artificial Sequence: Synthetic oligonucleotide
ugcuuuaauagaggcaguc

SEQ ID NO: 2235831 - RNA, 19 nt, Artificial Sequence
  Description of Artificial Sequence: Synthetic oligonucleotide
ugucacauccacuggucaa

SEQ ID NO: 2235832 - RNA, 19 nt, Artificial Sequence
  Description of Artificial Sequence: Synthetic oligonucleotide
uaugccaccuccuggcauc

SEQ ID NO: 2235833 - RNA, 19 nt, Artificial Sequence
  Description of Artificial Sequence: Synthetic oligonucleotide
ucugcauucauggccgacu

SEQ ID NO: 2235834 - RNA, 19 nt, Artificial Sequence
  Description of Artificial Sequence: Synthetic oligonucleotide
uucuagugcugaacuguca

SEQ ID NO: 2235835 - RNA, 19 nt, Artificial Sequence
  Description of Artificial Sequence: Synthetic oligonucleotide
auagcauacaaaguccuua

SEQ ID NO: 2235836 - RNA, 19 nt, Artificial Sequence
  Description of Artificial Sequence: Synthetic oligonucleotide
uuaacuaaacuaggauauc

SEQ ID NO: 2235837 - RNA, 19 nt, Artificial Sequence
  Description of Artificial Sequence: Synthetic oligonucleotide
aaaacacguucaaauccca

SEQ ID NO: 2235838 - RNA, 19 nt, Artificial Sequence
  Description of Artificial Sequence: Synthetic oligonucleotide
agaggaguuucgaaacuuc

SEQ ID NO: 2235839 - RNA, 19 nt, Artificial Sequence
  Description of Artificial Sequence: Synthetic oligonucleotide
uaauagaggcaguccuucu

SEQ ID NO: 2235840 - RNA, 19 nt, Artificial Sequence
  Description of Artificial Sequence: Synthetic oligonucleotide
ucgagcagaacaguggaau

SEQ ID NO: 2235841 - RNA, 19 nt, Artificial Sequence
  Description of Artificial Sequence: Synthetic oligonucleotide
gcaauagcauacaaagucc

SEQ ID NO: 2235842 - RNA, 19 nt, Artificial Sequence
  Description of Artificial Sequence: Synthetic oligonucleotide
ucacgaucugaauccaaaa

SEQ ID NO: 2235843 - RNA, 19 nt, Artificial Sequence
  Description of Artificial Sequence: Synthetic oligonucleotide
uucauuccugagucucuag

SEQ ID NO: 2235844 - RNA, 19 nt, Artificial Sequence
  Description of Artificial Sequence: Synthetic oligonucleotide
acguucaaaucccaggguu

SEQ ID NO: 2235845 - RNA, 19 nt, Artificial Sequence
  Description of Artificial Sequence: Synthetic oligonucleotide
gaaucuacacauacuucca

SEQ ID NO: 2235846 - RNA, 19 nt, Artificial Sequence
  Description of Artificial Sequence: Synthetic oligonucleotide
uccuucuagugcugaacug

SEQ ID NO: 2235847 - RNA, 19 nt, Artificial Sequence
  Description of Artificial Sequence: Synthetic oligonucleotide
uccugagucucuagaagau

SEQ ID NO: 2235848 - RNA, 19 nt, Artificial Sequence
  Description of Artificial Sequence: Synthetic oligonucleotide
acacauacuuccauaagaa

SEQ ID NO: 2235849 - RNA, 19 nt, Artificial Sequence
  Description of Artificial Sequence: Synthetic oligonucleotide
ucuccagagcugccauugg

SEQ ID NO: 2235850 - RNA, 19 nt, Artificial Sequence
  Description of Artificial Sequence: Synthetic oligonucleotide
ucacuucaacuucacgauc

SEQ ID NO: 2235851 - RNA, 19 nt, Artificial Sequence
  Description of Artificial Sequence: Synthetic oligonucleotide
aauccgaccagcaccuccu

SEQ ID NO: 2235852 - RNA, 19 nt, Artificial Sequence
  Description of Artificial Sequence: Synthetic oligonucleotide
caauccugccuuuugccuc

SEQ ID NO: 2235853 - RNA, 19 nt, Artificial Sequence
  Description of Artificial Sequence: Synthetic oligonucleotide
aggcaguccuucuagugcu

SEQ ID NO: 2235854 - RNA, 19 nt, Artificial Sequence
  Description of Artificial Sequence: Synthetic oligonucleotide
aggguuaagagagucucca

SEQ ID NO: 2235855 - RNA, 19 nt, Artificial Sequence
  Description of Artificial Sequence: Synthetic oligonucleotide
gaaaagugacuggcagagg

SEQ ID NO: 2235856 - RNA, 19 nt, Artificial Sequence
  Description of Artificial Sequence: Synthetic oligonucleotide
caauccgaccagcaccucc

SEQ ID NO: 2235857 - RNA, 19 nt, Artificial Sequence
  Description of Artificial Sequence: Synthetic oligonucleotide
uguguccaucuucagucaa

SEQ ID NO: 2235858 - RNA, 19 nt, Artificial Sequence
  Description of Artificial Sequence: Synthetic oligonucleotide
uccccgacggcauccacgc

SEQ ID NO: 2235859 - RNA, 19 nt, Artificial Sequence
  Description of Artificial Sequence: Synthetic oligonucleotide
gguuaagagagucuccaga

SEQ ID NO: 2235860 - RNA, 19 nt, Artificial Sequence
  Description of Artificial Sequence: Synthetic oligonucleotide
uuccaguaagccagcacau

SEQ ID NO: 2235861 - RNA, 19 nt, Artificial Sequence
  Description of Artificial Sequence: Synthetic oligonucleotide
agucaccuccccguggucg

SEQ ID NO: 2235862 - RNA, 19 nt, Artificial Sequence
  Description of Artificial Sequence: Synthetic oligonucleotide
augcacagaucuuugucaa

SEQ ID NO: 2235863 - RNA, 19 nt, Artificial Sequence
  Description of Artificial Sequence: Synthetic oligonucleotide
caacagaggaguuucgaaa

SEQ ID NO: 2235864 - RNA, 19 nt, Artificial Sequence
  Description of Artificial Sequence: Synthetic oligonucleotide
acugucacauccacugguc

SEQ ID NO: 2235865 - RNA, 19 nt, Artificial Sequence
  Description of Artificial Sequence: Synthetic oligonucleotide
ugcaacagaggaguuucga

SEQ ID NO: 2235866 - RNA, 19 nt, Artificial Sequence
  Description of Artificial Sequence: Synthetic oligonucleotide
ccagcacauaauucaaucc

SEQ ID NO: 2235867 - RNA, 19 nt, Artificial Sequence
  Description of Artificial Sequence: Synthetic oligonucleotide
aguugcuuuaauagaggca

SEQ ID NO: 2235868 - RNA, 19 nt, Artificial Sequence
  Description of Artificial Sequence: Synthetic oligonucleotide
cuuuugccucaucugugag

SEQ ID NO: 2235869 - RNA, 19 nt, Artificial Sequence
  Description of Artificial Sequence: Synthetic oligonucleotide
aaggauccuuugaagauuu

SEQ ID NO: 2235870 - RNA, 19 nt, Artificial Sequence
  Description of Artificial Sequence: Synthetic oligonucleotide
agcacauaauucaauccga

SEQ ID NO: 2235871 - RNA, 19 nt, Artificial Sequence
  Description of Artificial Sequence: Synthetic oligonucleotide
gaggacggcaaagagccac

SEQ ID NO: 2235872 - RNA, 19 nt, Artificial Sequence
  Description of Artificial Sequence: Synthetic oligonucleotide
guuucgaaacuucauuccu

SEQ ID NO: 2235873 - RNA, 19 nt, Artificial Sequence
  Description of Artificial Sequence: Synthetic oligonucleotide
uugucaauguguccaucuu

SEQ ID NO: 2235874 - RNA, 19 nt, Artificial Sequence
  Description of Artificial Sequence: Synthetic oligonucleotide
ugcauucauggccgacucc

SEQ ID NO: 2235875 - RNA, 19 nt, Artificial Sequence
  Description of Artificial Sequence: Synthetic oligonucleotide
ggucaaaacacguucaaau

SEQ ID NO: 2235876 - RNA, 19 nt, Artificial Sequence
  Description of Artificial Sequence: Synthetic oligonucleotide
uacuuuugucacaucuguu

SEQ ID NO: 2235877 - RNA, 19 nt, Artificial Sequence
  Description of Artificial Sequence: Synthetic oligonucleotide
caggguuaagagagucucc

SEQ ID NO: 2235878 - RNA, 19 nt, Artificial Sequence
  Description of Artificial Sequence: Synthetic oligonucleotide
uccacugaaucuacacaua

SEQ ID NO: 2235879 - RNA, 19 nt, Artificial Sequence
  Description of Artificial Sequence: Synthetic oligonucleotide
uuaugccaccuccuggcau

SEQ ID NO: 2235880 - RNA, 19 nt, Artificial Sequence
  Description of Artificial Sequence: Synthetic oligonucleotide
uuuccgcucgcagggagcc

SEQ ID NO: 2235881 - RNA, 19 nt, Artificial Sequence
  Description of Artificial Sequence: Synthetic oligonucleotide
gacggcaaagagccacaag

SEQ ID NO: 2235882 - RNA, 19 nt, Artificial Sequence
  Description of Artificial Sequence: Synthetic oligonucleotide
ggugcucccgccuuccccg

SEQ ID NO: 2235883 - RNA, 19 nt, Artificial Sequence
  Description of Artificial Sequence: Synthetic oligonucleotide
cagaucuuugucaaugugu

SEQ ID NO: 2235884 - RNA, 19 nt, Artificial Sequence
  Description of Artificial Sequence: Synthetic oligonucleotide
acuggucaaaacacguuca

SEQ ID NO: 2235885 - RNA, 19 nt, Artificial Sequence
  Description of Artificial Sequence: Synthetic oligonucleotide
uucuaccuucacacuguga

SEQ ID NO: 2235886 - RNA, 19 nt, Artificial Sequence
  Description of Artificial Sequence: Synthetic oligonucleotide
gaggaguuucgaaacuuca

SEQ ID NO: 2235887 - RNA, 19 nt, Artificial Sequence
  Description of Artificial Sequence: Synthetic oligonucleotide
aauccacauggugcucccg

SEQ ID NO: 2235888 - RNA, 19 nt, Artificial Sequence
  Description of Artificial Sequence: Synthetic oligonucleotide
acuucuaccuucacacugu

SEQ ID NO: 2235889 - RNA, 19 nt, Artificial Sequence
  Description of Artificial Sequence: Synthetic oligonucleotide
agccuucaucacuucaacu

SEQ ID NO: 2235890 - RNA, 19 nt, Artificial Sequence
  Description of Artificial Sequence: Synthetic oligonucleotide
aagucaccuccccgugguc

SEQ ID NO: 2235891 - RNA, 19 nt, Artificial Sequence
  Description of Artificial Sequence: Synthetic oligonucleotide
cauuccugagucucuagaa

SEQ ID NO: 2235892 - RNA, 19 nt, Artificial Sequence
  Description of Artificial Sequence: Synthetic oligonucleotide
augcuuggcaagacgaaug

SEQ ID NO: 2235893 - RNA, 19 nt, Artificial Sequence
  Description of Artificial Sequence: Synthetic oligonucleotide
ugagcaagcgaagcuccca

SEQ ID NO: 2235894 - RNA, 19 nt, Artificial Sequence
  Description of Artificial Sequence: Synthetic oligonucleotide
uucaaaucccaggguuaag

SEQ ID NO: 2235895 - RNA, 19 nt, Artificial Sequence
  Description of Artificial Sequence: Synthetic oligonucleotide
uguuaccuucagagaauau

SEQ ID NO: 2235896 - RNA, 19 nt, Artificial Sequence
  Description of Artificial Sequence: Synthetic oligonucleotide
caauagcauacaaaguccu

SEQ ID NO: 2235897 - RNA, 19 nt, Artificial Sequence
  Description of Artificial Sequence: Synthetic oligonucleotide
guaagccagcacauaauuc

SEQ ID NO: 2235898 - RNA, 19 nt, Artificial Sequence
  Description of Artificial Sequence: Synthetic oligonucleotide
gucaccuccccguggucgg

SEQ ID NO: 2235899 - RNA, 19 nt, Artificial Sequence
  Description of Artificial Sequence: Synthetic oligonucleotide
cuucgguuuccgccgagug

SEQ ID NO: 2235900 - RNA, 19 nt, Artificial Sequence
  Description of Artificial Sequence: Synthetic oligonucleotide
uggucaaaacacguucaaa

SEQ ID NO: 2235901 - RNA, 19 nt, Artificial Sequence
  Description of Artificial Sequence: Synthetic oligonucleotide
cuaaacuaggauauccuuu

SEQ ID NO: 2235902 - RNA, 19 nt, Artificial Sequence
  Description of Artificial Sequence: Synthetic oligonucleotide
cacuucaacuucacgaucu

SEQ ID NO: 2235903 - RNA, 19 nt, Artificial Sequence
  Description of Artificial Sequence: Synthetic oligonucleotide
gcuuuaauagaggcagucc

SEQ ID NO: 2235904 - RNA, 19 nt, Artificial Sequence
  Description of Artificial Sequence: Synthetic oligonucleotide
uggugcucccgccuucccc

SEQ ID NO: 2235905 - RNA, 19 nt, Artificial Sequence
  Description of Artificial Sequence: Synthetic oligonucleotide
gccagcacauaauucaauc

SEQ ID NO: 2235906 - RNA, 19 nt, Artificial Sequence
  Description of Artificial Sequence: Synthetic oligonucleotide
aaggcucggugaaaaguga

SEQ ID NO: 2235907 - RNA, 19 nt, Artificial Sequence
  Description of Artificial Sequence: Synthetic oligonucleotide
cauaagaaauccacauggu

SEQ ID NO: 2235908 - RNA, 19 nt, Artificial Sequence
  Description of Artificial Sequence: Synthetic oligonucleotide
caucuguuaccuucagaga

SEQ ID NO: 2235909 - RNA, 19 nt, Artificial Sequence
  Description of Artificial Sequence: Synthetic oligonucleotide
cauuggaucuugaaccaua

SEQ ID NO: 2235910 - RNA, 19 nt, Artificial Sequence
  Description of Artificial Sequence: Synthetic oligonucleotide
ccacugaaucuacacauac

SEQ ID NO: 2235911 - RNA, 19 nt, Artificial Sequence
  Description of Artificial Sequence: Synthetic oligonucleotide
ggagccccuuucuucaugc

SEQ ID NO: 2235912 - RNA, 19 nt, Artificial Sequence
  Description of Artificial Sequence: Synthetic oligonucleotide
agacaugcacagaucuuug

SEQ ID NO: 2235913 - RNA, 19 nt, Artificial Sequence
  Description of Artificial Sequence: Synthetic oligonucleotide
ccugaaccuucaaggaucc

SEQ ID NO: 2235914 - RNA, 19 nt, Artificial Sequence
  Description of Artificial Sequence: Synthetic oligonucleotide
aucugugaguugcuuuaau

SEQ ID NO: 2235915 - RNA, 19 nt, Artificial Sequence
  Description of Artificial Sequence: Synthetic oligonucleotide
gcucggugaaaagugacug

SEQ ID NO: 2235916 - RNA, 19 nt, Artificial Sequence
  Description of Artificial Sequence: Synthetic oligonucleotide
guuaccuucagagaauauu

SEQ ID NO: 2235917 - RNA, 19 nt, Artificial Sequence
  Description of Artificial Sequence: Synthetic oligonucleotide
caaugccccaaauaccaaa

SEQ ID NO: 2235918 - RNA, 19 nt, Artificial Sequence
  Description of Artificial Sequence: Synthetic oligonucleotide
ggaucuugaaccauaucaa

SEQ ID NO: 2235919 - RNA, 19 nt, Artificial Sequence
  Description of Artificial Sequence: Synthetic oligonucleotide
cuaccuucacacugugaca

SEQ ID NO: 2235920 - RNA, 19 nt, Artificial Sequence
  Description of Artificial Sequence: Synthetic oligonucleotide
agacgaaugucagccuuca

SEQ ID NO: 2235921 - RNA, 19 nt, Artificial Sequence
  Description of Artificial Sequence: Synthetic oligonucleotide
aaacuggaaucuggacacu

SEQ ID NO: 2235922 - RNA, 19 nt, Artificial Sequence
  Description of Artificial Sequence: Synthetic oligonucleotide
uuuccgccgagugcccgcg

SEQ ID NO: 2235923 - RNA, 19 nt, Artificial Sequence
  Description of Artificial Sequence: Synthetic oligonucleotide
guucaaaucccaggguuaa

SEQ ID NO: 2235924 - RNA, 19 nt, Artificial Sequence
  Description of Artificial Sequence: Synthetic oligonucleotide
uuucugcauucauggccga

SEQ ID NO: 2235925 - RNA, 19 nt, Artificial Sequence
  Description of Artificial Sequence: Synthetic oligonucleotide
ggauauccuuugcaauagc

SEQ ID NO: 2235926 - RNA, 19 nt, Artificial Sequence
  Description of Artificial Sequence: Synthetic oligonucleotide
gagacaugcacagaucuuu

SEQ ID NO: 2235927 - RNA, 19 nt, Artificial Sequence
  Description of Artificial Sequence: Synthetic oligonucleotide
gaauucuguagcaccugaa

SEQ ID NO: 2235928 - RNA, 19 nt, Artificial Sequence
  Description of Artificial Sequence: Synthetic oligonucleotide
ccuucacacugugacaucc

SEQ ID NO: 2235929 - RNA, 19 nt, Artificial Sequence
  Description of Artificial Sequence: Synthetic oligonucleotide
gccgguuuccgcucgcagg

SEQ ID NO: 2235930 - RNA, 19 nt, Artificial Sequence
  Description of Artificial Sequence: Synthetic oligonucleotide
cuaggauauccuuugcaau

SEQ ID NO: 2235931 - RNA, 19 nt, Artificial Sequence
  Description of Artificial Sequence: Synthetic oligonucleotide
aggcgcguucccgacgccc

SEQ ID NO: 2235932 - RNA, 19 nt, Artificial Sequence
  Description of Artificial Sequence: Synthetic oligonucleotide
ggguuaagagagucuccag

SEQ ID NO: 2235933 - RNA, 19 nt, Artificial Sequence
  Description of Artificial Sequence: Synthetic oligonucleotide
aggaguuucgaaacuucau

SEQ ID NO: 2235934 - RNA, 19 nt, Artificial Sequence
  Description of Artificial Sequence: Synthetic oligonucleotide
acuucacgaucugaaucca

SEQ ID NO: 2235935 - RNA, 19 nt, Artificial Sequence
  Description of Artificial Sequence: Synthetic oligonucleotide
guuuccgccgagugcccgc

SEQ ID NO: 2235936 - RNA, 19 nt, Artificial Sequence
  Description of Artificial Sequence: Synthetic oligonucleotide
ccgguuuccgcucgcaggg

SEQ ID NO: 2235937 - RNA, 19 nt, Artificial Sequence
  Description of Artificial Sequence: Synthetic oligonucleotide
guccuucuagugcugaacu

SEQ ID NO: 2235938 - RNA, 19 nt, Artificial Sequence
  Description of Artificial Sequence: Synthetic oligonucleotide
gacaugcacagaucuuugu

SEQ ID NO: 2235939 - RNA, 19 nt, Artificial Sequence
  Description of Artificial Sequence: Synthetic oligonucleotide
gcucccauugcaacagagg

SEQ ID NO: 2235940 - RNA, 19 nt, Artificial Sequence
  Description of Artificial Sequence: Synthetic oligonucleotide
ccacaauccugccuuuugc

SEQ ID NO: 2235941 - RNA, 19 nt, Artificial Sequence
  Description of Artificial Sequence: Synthetic oligonucleotide
gguuuccgcucgcagggag

SEQ ID NO: 2235942 - RNA, 19 nt, Artificial Sequence
  Description of Artificial Sequence: Synthetic oligonucleotide
cccgacggcauccacgccg

SEQ ID NO: 2235943 - RNA, 19 nt, Artificial Sequence
  Description of Artificial Sequence: Synthetic oligonucleotide
guuaugccaccuccuggca

SEQ ID NO: 2235944 - RNA, 19 nt, Artificial Sequence
  Description of Artificial Sequence: Synthetic oligonucleotide
ucacauccacuggucaaaa

SEQ ID NO: 2235945 - RNA, 19 nt, Artificial Sequence
  Description of Artificial Sequence: Synthetic oligonucleotide
gccacaagagacaugcaca

SEQ ID NO: 2235946 - RNA, 19 nt, Artificial Sequence
  Description of Artificial Sequence: Synthetic oligonucleotide
aucuguuaugccaccuccu

SEQ ID NO: 2235947 - RNA, 19 nt, Artificial Sequence
  Description of Artificial Sequence: Synthetic oligonucleotide
cuucacacugugacaucca

SEQ ID NO: 2235948 - RNA, 19 nt, Artificial Sequence
  Description of Artificial Sequence: Synthetic oligonucleotide
caauguguccaucuucagu

SEQ ID NO: 2235949 - RNA, 19 nt, Artificial Sequence
  Description of Artificial Sequence: Synthetic oligonucleotide
cccaaauaccaaaccauca

SEQ ID NO: 2235950 - RNA, 19 nt, Artificial Sequence
  Description of Artificial Sequence: Synthetic oligonucleotide
uucaugcuucccgccuucc

SEQ ID NO: 2235951 - RNA, 19 nt, Artificial Sequence
  Description of Artificial Sequence: Synthetic oligonucleotide
ggaggcgcguucccgacgc

SEQ ID NO: 2235952 - RNA, 19 nt, Artificial Sequence
  Description of Artificial Sequence: Synthetic oligonucleotide
cauggugcucccgccuucc

SEQ ID NO: 2235953 - RNA, 19 nt, Artificial Sequence
  Description of Artificial Sequence: Synthetic oligonucleotide
cucgcagggagccccuuuc

SEQ ID NO: 2235954 - RNA, 19 nt, Artificial Sequence
  Description of Artificial Sequence: Synthetic oligonucleotide
ucgcagggagccccuuucu

SEQ ID NO: 2235955 - RNA, 19 nt, Artificial Sequence
  Description of Artificial Sequence: Synthetic oligonucleotide
cuggucaaaacacguucaa

SEQ ID NO: 2235956 - RNA, 19 nt, Artificial Sequence
  Description of Artificial Sequence: Synthetic oligonucleotide
ccaggguuaagagagucuc

SEQ ID NO: 2235957 - RNA, 19 nt, Artificial Sequence
  Description of Artificial Sequence: Synthetic oligonucleotide
gaagaucgagcagaacagu

SEQ ID NO: 2235958 - RNA, 19 nt, Artificial Sequence
  Description of Artificial Sequence: Synthetic oligonucleotide
uccaguaagccagcacaua

SEQ ID NO: 2235959 - RNA, 19 nt, Artificial Sequence
  Description of Artificial Sequence: Synthetic oligonucleotide
uucugcauucauggccgac

SEQ ID NO: 2235960 - RNA, 19 nt, Artificial Sequence
  Description of Artificial Sequence: Synthetic oligonucleotide
gcaccugaaccuucaagga

SEQ ID NO: 2235961 - RNA, 19 nt, Artificial Sequence
  Description of Artificial Sequence: Synthetic oligonucleotide
gcaacagaggaguuucgaa

SEQ ID NO: 2235962 - RNA, 19 nt, Artificial Sequence
  Description of Artificial Sequence: Synthetic oligonucleotide
ccuucaaggauccuuugaa

SEQ ID NO: 2235963 - RNA, 19 nt, Artificial Sequence
  Description of Artificial Sequence: Synthetic oligonucleotide
auccgaccagcaccuccuc

SEQ ID NO: 2235964 - RNA, 19 nt, Artificial Sequence
  Description of Artificial Sequence: Synthetic oligonucleotide
guuuccgcucgcagggagc

SEQ ID NO: 2235965 - RNA, 19 nt, Artificial Sequence
  Description of Artificial Sequence: Synthetic oligonucleotide
ugcuucccgccuuccuccc

SEQ ID NO: 2235966 - RNA, 19 nt, Artificial Sequence
  Description of Artificial Sequence: Synthetic oligonucleotide
cagagcugccauuggaucu

SEQ ID NO: 2235967 - RNA, 19 nt, Artificial Sequence
  Description of Artificial Sequence: Synthetic oligonucleotide
cuccagagcugccauugga

SEQ ID NO: 2235968 - RNA, 19 nt, Artificial Sequence
  Description of Artificial Sequence: Synthetic oligonucleotide
cacugaaucuacacauacu

SEQ ID NO: 2235969 - RNA, 19 nt, Artificial Sequence
  Description of Artificial Sequence: Synthetic oligonucleotide
ggaguuucgaaacuucauu

SEQ ID NO: 2235970 - RNA, 19 nt, Artificial Sequence
  Description of Artificial Sequence: Synthetic oligonucleotide
cuugaagaauacccaugcu

SEQ ID NO: 2235971 - RNA, 19 nt, Artificial Sequence
  Description of Artificial Sequence: Synthetic oligonucleotide
cauccacgccgguuuccgc

SEQ ID NO: 2235972 - RNA, 19 nt, Artificial Sequence
  Description of Artificial Sequence: Synthetic oligonucleotide
gcgaagcucccauugcaac

SEQ ID NO: 2235973 - RNA, 19 nt, Artificial Sequence
  Description of Artificial Sequence: Synthetic oligonucleotide
uccacgccgguuuccgcuc

SEQ ID NO: 2235974 - RNA, 19 nt, Artificial Sequence
  Description of Artificial Sequence: Synthetic oligonucleotide
agagacaugcacagaucuu

SEQ ID NO: 2235975 - RNA, 19 nt, Artificial Sequence
  Description of Artificial Sequence: Synthetic oligonucleotide
uacccaugcuggguguggu

SEQ ID NO: 2235976 - RNA, 19 nt, Artificial Sequence
  Description of Artificial Sequence: Synthetic oligonucleotide
cuucacgaucugaauccaa

SEQ ID NO: 2235977 - RNA, 19 nt, Artificial Sequence
  Description of Artificial Sequence: Synthetic oligonucleotide
uugccucaucugugaguug

SEQ ID NO: 2235978 - RNA, 19 nt, Artificial Sequence
  Description of Artificial Sequence: Synthetic oligonucleotide
ccagagcugccauuggauc

SEQ ID NO: 2235979 - RNA, 19 nt, Artificial Sequence
  Description of Artificial Sequence: Synthetic oligonucleotide
acuggaaucuggacacuuu

SEQ ID NO: 2235980 - RNA, 19 nt, Artificial Sequence
  Description of Artificial Sequence: Synthetic oligonucleotide
uccuuacuuuugucacauc

SEQ ID NO: 2235981 - RNA, 19 nt, Artificial Sequence
  Description of Artificial Sequence: Synthetic oligonucleotide
agcaagcgaagcucccauu

SEQ ID NO: 2235982 - RNA, 19 nt, Artificial Sequence
  Description of Artificial Sequence: Synthetic oligonucleotide
accuccccguggucggauc

SEQ ID NO: 2235983 - RNA, 19 nt, Artificial Sequence
  Description of Artificial Sequence: Synthetic oligonucleotide
gcauccacgccgguuuccg

SEQ ID NO: 2235984 - RNA, 19 nt, Artificial Sequence
  Description of Artificial Sequence: Synthetic oligonucleotide
agcgaagcucccauugcaa

SEQ ID NO: 2235985 - RNA, 19 nt, Artificial Sequence
  Description of Artificial Sequence: Synthetic oligonucleotide
gacgcccgcgccccgcagc

SEQ ID NO: 2235986 - RNA, 19 nt, Artificial Sequence
  Description of Artificial Sequence: Synthetic oligonucleotide
ucccucgcucgccuucggu

SEQ ID NO: 2235987 - RNA, 19 nt, Artificial Sequence
  Description of Artificial Sequence: Synthetic oligonucleotide
gggugugguuccuccuucc

SEQ ID NO: 2235988 - RNA, 19 nt, Artificial Sequence
  Description of Artificial Sequence: Synthetic oligonucleotide
cuguuaccuucagagaaua

SEQ ID NO: 2235989 - RNA, 19 nt, Artificial Sequence
  Description of Artificial Sequence: Synthetic oligonucleotide
gagcaagcgaagcucccau

SEQ ID NO: 2235990 - RNA, 19 nt, Artificial Sequence
  Description of Artificial Sequence: Synthetic oligonucleotide
gccuuuugccucaucugug

SEQ ID NO: 2235991 - RNA, 19 nt, Artificial Sequence
  Description of Artificial Sequence: Synthetic oligonucleotide
agucuccagagcugccauu

SEQ ID NO: 2235992 - RNA, 19 nt, Artificial Sequence
  Description of Artificial Sequence: Synthetic oligonucleotide
aggacggcaaagagccaca

SEQ ID NO: 2235993 - RNA, 19 nt, Artificial Sequence
  Description of Artificial Sequence: Synthetic oligonucleotide
ggugugguuccuccuucca

SEQ ID NO: 2235994 - RNA, 19 nt, Artificial Sequence
  Description of Artificial Sequence: Synthetic oligonucleotide
ccaugucucucacagaagu

SEQ ID NO: 2235995 - RNA, 19 nt, Artificial Sequence
  Description of Artificial Sequence: Synthetic oligonucleotide
aucgagcagaacaguggaa

SEQ ID NO: 2235996 - RNA, 19 nt, Artificial Sequence
  Description of Artificial Sequence: Synthetic oligonucleotide
caguaagccagcacauaau

SEQ ID NO: 2235997 - RNA, 19 nt, Artificial Sequence
  Description of Artificial Sequence: Synthetic oligonucleotide
agccagcacauaauucaau

SEQ ID NO: 2235998 - RNA, 19 nt, Artificial Sequence
  Description of Artificial Sequence: Synthetic oligonucleotide
gguuuccgccgagugcccg

SEQ ID NO: 2235999 - RNA, 19 nt, Artificial Sequence
  Description of Artificial Sequence: Synthetic oligonucleotide
ccgacggcauccacgccgg

SEQ ID NO: 2236000 - RNA, 19 nt, Artificial Sequence
  Description of Artificial Sequence: Synthetic oligonucleotide
cagcaccauaaugcuuggc

SEQ ID NO: 2236001 - RNA, 19 nt, Artificial Sequence
  Description of Artificial Sequence: Synthetic oligonucleotide
gcucccgccuuccccgacg

SEQ ID NO: 2236002 - RNA, 19 nt, Artificial Sequence
  Description of Artificial Sequence: Synthetic oligonucleotide
ccgacuccacugaaucuac

SEQ ID NO: 2236003 - RNA, 19 nt, Artificial Sequence
  Description of Artificial Sequence: Synthetic oligonucleotide
ccauaaugcuuggcaagac

SEQ ID NO: 2236004 - RNA, 19 nt, Artificial Sequence
  Description of Artificial Sequence: Synthetic oligonucleotide
ggcgcguucccgacgcccg

SEQ ID NO: 2236005 - RNA, 19 nt, Artificial Sequence
  Description of Artificial Sequence: Synthetic oligonucleotide
gcagaacaguggaauucug

SEQ ID NO: 2236006 - RNA, 19 nt, Artificial Sequence
  Description of Artificial Sequence: Synthetic oligonucleotide
caccugaaccuucaaggau

SEQ ID NO: 2236007 - RNA, 19 nt, Artificial Sequence
  Description of Artificial Sequence: Synthetic oligonucleotide
gggaggcgcguucccgacg

SEQ ID NO: 2236008 - RNA, 19 nt, Artificial Sequence
  Description of Artificial Sequence: Synthetic oligonucleotide
cacguucaaaucccagggu

SEQ ID NO: 2236009 - RNA, 19 nt, Artificial Sequence
  Description of Artificial Sequence: Synthetic oligonucleotide
cuuccccgacggcauccac

SEQ ID NO: 2236010 - RNA, 19 nt, Artificial Sequence
  Description of Artificial Sequence: Synthetic oligonucleotide
ucccgccuuccucccucgc

SEQ ID NO: 2236011 - RNA, 19 nt, Artificial Sequence
  Description of Artificial Sequence: Synthetic oligonucleotide
caaggauccuuugaagauu

SEQ ID NO: 2236012 - RNA, 19 nt, Artificial Sequence
  Description of Artificial Sequence: Synthetic oligonucleotide
guggucggaucaucacaaa

SEQ ID NO: 2236013 - RNA, 19 nt, Artificial Sequence
  Description of Artificial Sequence: Synthetic oligonucleotide
cguggucggaucaucacaa

SEQ ID NO: 2236014 - RNA, 19 nt, Artificial Sequence
  Description of Artificial Sequence: Synthetic oligonucleotide
gacuggcagaggacggcaa

SEQ ID NO: 2236015 - RNA, 19 nt, Artificial Sequence
  Description of Artificial Sequence: Synthetic oligonucleotide
gccgacuccacugaaucua

SEQ ID NO: 2236016 - RNA, 19 nt, Artificial Sequence
  Description of Artificial Sequence: Synthetic oligonucleotide
cacgccgguuuccgcucgc

SEQ ID NO: 2236017 - RNA, 19 nt, Artificial Sequence
  Description of Artificial Sequence: Synthetic oligonucleotide
cauggccgacuccacugaa

SEQ ID NO: 2236018 - RNA, 19 nt, Artificial Sequence
  Description of Artificial Sequence: Synthetic oligonucleotide
cauugcaacagaggaguuu

SEQ ID NO: 2236019 - RNA, 19 nt, Artificial Sequence
  Description of Artificial Sequence: Synthetic oligonucleotide
gaggcgcguucccgacgcc

SEQ ID NO: 2236020 - RNA, 19 nt, Artificial Sequence
  Description of Artificial Sequence: Synthetic oligonucleotide
uccugccuuuugccucauc

SEQ ID NO: 2236021 - RNA, 19 nt, Artificial Sequence
  Description of Artificial Sequence: Synthetic oligonucleotide
uccccguggucggaucauc

SEQ ID NO: 2236022 - RNA, 19 nt, Artificial Sequence
  Description of Artificial Sequence: Synthetic oligonucleotide
ucccgccuuccccgacggc

SEQ ID NO: 2236023 - RNA, 19 nt, Artificial Sequence
  Description of Artificial Sequence: Synthetic oligonucleotide
accaaaccaucagcaccau

SEQ ID NO: 2236024 - RNA, 19 nt, Artificial Sequence
  Description of Artificial Sequence: Synthetic oligonucleotide
gagccacaagagacaugca

SEQ ID NO: 2236025 - RNA, 19 nt, Artificial Sequence
  Description of Artificial Sequence: Synthetic oligonucleotide
ucaccuccccguggucgga

SEQ ID NO: 2236026 - RNA, 19 nt, Artificial Sequence
  Description of Artificial Sequence: Synthetic oligonucleotide
ccuuugcaauagcauacaa

SEQ ID NO: 2236027 - RNA, 19 nt, Artificial Sequence
  Description of Artificial Sequence: Synthetic oligonucleotide
ggcugcgcgagcggcgggg

SEQ ID NO: 2236028 - RNA, 19 nt, Artificial Sequence
  Description of Artificial Sequence: Synthetic oligonucleotide
gacgaaugucagccuucau

SEQ ID NO: 2236029 - RNA, 19 nt, Artificial Sequence
  Description of Artificial Sequence: Synthetic oligonucleotide
gcaagacgaaugucagccu

SEQ ID NO: 2236030 - RNA, 19 nt, Artificial Sequence
  Description of Artificial Sequence: Synthetic oligonucleotide
ggcaguccuucuagugcug

SEQ ID NO: 2236031 - RNA, 19 nt, Artificial Sequence
  Description of Artificial Sequence: Synthetic oligonucleotide
ggggaggcgcguucccgac

SEQ ID NO: 2236032 - RNA, 19 nt, Artificial Sequence
  Description of Artificial Sequence: Synthetic oligonucleotide
guguccaucuucagucaau

SEQ ID NO: 2236033 - RNA, 19 nt, Artificial Sequence
  Description of Artificial Sequence: Synthetic oligonucleotide
ggcucggugaaaagugacu

SEQ ID NO: 2236034 - RNA, 19 nt, Artificial Sequence
  Description of Artificial Sequence: Synthetic oligonucleotide
gcucgccuucgguuuccgc

SEQ ID NO: 2236035 - RNA, 19 nt, Artificial Sequence
  Description of Artificial Sequence: Synthetic oligonucleotide
ccucccucgcucgccuucg

SEQ ID NO: 2236036 - RNA, 19 nt, Artificial Sequence
  Description of Artificial Sequence: Synthetic oligonucleotide
acgccgguuuccgcucgca

SEQ ID NO: 2236037 - RNA, 19 nt, Artificial Sequence
  Description of Artificial Sequence: Synthetic oligonucleotide
ccacgccgguuuccgcucg

SEQ ID NO: 2236038 - RNA, 19 nt, Artificial Sequence
  Description of Artificial Sequence: Synthetic oligonucleotide
cgccuuccucccucgcucg

SEQ ID NO: 2236039 - RNA, 19 nt, Artificial Sequence
  Description of Artificial Sequence: Synthetic oligonucleotide
gcguucccgacgcccgcgc

SEQ ID NO: 2236040 - RNA, 19 nt, Artificial Sequence
  Description of Artificial Sequence: Synthetic oligonucleotide
cacauggugcucccgccuu

SEQ ID NO: 2236041 - RNA, 19 nt, Artificial Sequence
  Description of Artificial Sequence: Synthetic oligonucleotide
ggccgacuccacugaaucu

SEQ ID NO: 2236042 - RNA, 19 nt, Artificial Sequence
  Description of Artificial Sequence: Synthetic oligonucleotide
cugugacauccaugucucu

SEQ ID NO: 2236043 - RNA, 19 nt, Artificial Sequence
  Description of Artificial Sequence: Synthetic oligonucleotide
ggacggcaaagagccacaa

SEQ ID NO: 2236044 - RNA, 19 nt, Artificial Sequence
  Description of Artificial Sequence: Synthetic oligonucleotide
caugcugggugugguuccu

SEQ ID NO: 2236045 - RNA, 19 nt, Artificial Sequence
  Description of Artificial Sequence: Synthetic oligonucleotide
ccgagugcccgcggcugcg

SEQ ID NO: 2236046 - RNA, 19 nt, Artificial Sequence
  Description of Artificial Sequence: Synthetic oligonucleotide
gcgcguucccgacgcccgc

SEQ ID NO: 2236047 - RNA, 19 nt, Artificial Sequence
  Description of Artificial Sequence: Synthetic oligonucleotide
ccuccccguggucggauca

SEQ ID NO: 2236048 - RNA, 19 nt, Artificial Sequence
  Description of Artificial Sequence: Synthetic oligonucleotide
ccaaaccaucagcaccaua

SEQ ID NO: 2236049 - RNA, 19 nt, Artificial Sequence
  Description of Artificial Sequence: Synthetic oligonucleotide
cgccgguuuccgcucgcag

SEQ ID NO: 2236050 - RNA, 19 nt, Artificial Sequence
  Description of Artificial Sequence: Synthetic oligonucleotide
ccacuggucaaaacacguu

SEQ ID NO: 2236051 - RNA, 19 nt, Artificial Sequence
  Description of Artificial Sequence: Synthetic oligonucleotide
cguucccgacgcccgcgcc

SEQ ID NO: 2236052 - RNA, 19 nt, Artificial Sequence
  Description of Artificial Sequence: Synthetic oligonucleotide
cgguuuccgccgagugccc

SEQ ID NO: 2236053 - RNA, 19 nt, Artificial Sequence
  Description of Artificial Sequence: Synthetic oligonucleotide
cgacuccacugaaucuaca

SEQ ID NO: 2236054 - RNA, 19 nt, Artificial Sequence
  Description of Artificial Sequence: Synthetic oligonucleotide
ccacauggugcucccgccu

SEQ ID NO: 2236055 - RNA, 19 nt, Artificial Sequence
  Description of Artificial Sequence: Synthetic oligonucleotide
cgcguucccgacgcccgcg

SEQ ID NO: 2236056 - RNA, 19 nt, Artificial Sequence
  Description of Artificial Sequence: Synthetic oligonucleotide
ccccgacggcauccacgcc

SEQ ID NO: 2236057 - RNA, 19 nt, Artificial Sequence
  Description of Artificial Sequence: Synthetic oligonucleotide
cccucgcucgccuucgguu

SEQ ID NO: 2236058 - RNA, 19 nt, Artificial Sequence
  Description of Artificial Sequence: Synthetic oligonucleotide
cgccgagugcccgcggcug

SEQ ID NO: 2236059 - RNA, 19 nt, Artificial Sequence
  Description of Artificial Sequence: Synthetic oligonucleotide
cgagugcccgcggcugcgc

SEQ ID NO: 2236060 - RNA, 19 nt, Artificial Sequence
  Description of Artificial Sequence: Synthetic oligonucleotide
cggcauccacgccgguuuc

SEQ ID NO: 2236061 - RNA, 19 nt, Artificial Sequence
  Description of Artificial Sequence: Synthetic oligonucleotide
cgcucgccuucgguuuccg

SEQ ID NO: 2236062 - RNA, 19 nt, Artificial Sequence
  Description of Artificial Sequence: Synthetic oligonucleotide
gcucgcagggagccccuuu

SEQ ID NO: 2236063 - RNA, 19 nt, Artificial Sequence
  Description of Artificial Sequence: Synthetic oligonucleotide
caccuccccguggucggau

SEQ ID NO: 2236064 - RNA, 19 nt, Artificial Sequence
  Description of Artificial Sequence: Synthetic oligonucleotide
ccgacgcccgcgccccgca

SEQ ID NO: 2236065 - RNA, 19 nt, Artificial Sequence
  Description of Artificial Sequence: Synthetic oligonucleotide
cgacgcccgcgccccgcag

SEQ ID NO: 2236066 - RNA, 19 nt, Artificial Sequence
  Description of Artificial Sequence: Synthetic oligonucleotide
cgccuucgguuuccgccga

SEQ ID NO: 2236067 - RNA, 19 nt, Artificial Sequence
  Description of Artificial Sequence: Synthetic oligonucleotide
cgguuuccgcucgcaggga

SEQ ID NO: 2236068 - RNA, 19 nt, Artificial Sequence
  Description of Artificial Sequence: Synthetic oligonucleotide
ccgcucgcagggagccccu

SEQ ID NO: 2236069 - RNA, 19 nt, Artificial Sequence
  Description of Artificial Sequence: Synthetic oligonucleotide
cgcucgcagggagccccuu

SEQ ID NO: 2236070 - RNA, 19 nt, Artificial Sequence
  Description of Artificial Sequence: Synthetic oligonucleotide
aaaaguagcacacuuucag

SEQ ID NO: 2236071 - RNA, 19 nt, Artificial Sequence
  Description of Artificial Sequence: Synthetic oligonucleotide
gaucuuuuccuucuagggc

SEQ ID NO: 2236072 - RNA, 19 nt, Artificial Sequence
  Description of Artificial Sequence: Synthetic oligonucleotide
aaguagcacacuuucagaa

SEQ ID NO: 2236073 - RNA, 19 nt, Artificial Sequence
  Description of Artificial Sequence: Synthetic oligonucleotide
aaaguagcacacuuucaga

SEQ ID NO: 2236074 - RNA, 19 nt, Artificial Sequence
  Description of Artificial Sequence: Synthetic oligonucleotide
agucacuggccuuuuggcc

SEQ ID NO: 2236075 - RNA, 19 nt, Artificial Sequence
  Description of Artificial Sequence: Synthetic oligonucleotide
uggaucuuuuccuucuagg

SEQ ID NO: 2236076 - RNA, 19 nt, Artificial Sequence
  Description of Artificial Sequence: Synthetic oligonucleotide
ugacuuuggaucuuuuccu

SEQ ID NO: 2236077 - RNA, 19 nt, Artificial Sequence
  Description of Artificial Sequence: Synthetic oligonucleotide
guagucacuggccuuuugg

SEQ ID NO: 2236078 - RNA, 19 nt, Artificial Sequence
  Description of Artificial Sequence: Synthetic oligonucleotide
ggaucuuuuccuucuaggg

SEQ ID NO: 2236079 - RNA, 19 nt, Artificial Sequence
  Description of Artificial Sequence: Synthetic oligonucleotide
acuuuggaucuuuuccuuc

SEQ ID NO: 2236080 - RNA, 19 nt, Artificial Sequence
  Description of Artificial Sequence: Synthetic oligonucleotide
uuggaucuuuuccuucuag

SEQ ID NO: 2236081 - RNA, 19 nt, Artificial Sequence
  Description of Artificial Sequence: Synthetic oligonucleotide
uagucacuggccuuuuggc

SEQ ID NO: 2236082 - RNA, 19 nt, Artificial Sequence
  Description of Artificial Sequence: Synthetic oligonucleotide
uggccuuuuggccuccgag

SEQ ID NO: 2236083 - RNA, 19 nt, Artificial Sequence
  Description of Artificial Sequence: Synthetic oligonucleotide
guagcacacuuucagaaaa

SEQ ID NO: 2236084 - RNA, 19 nt, Artificial Sequence
  Description of Artificial Sequence: Synthetic oligonucleotide
aguagcacacuuucagaaa

SEQ ID NO: 2236085 - RNA, 19 nt, Artificial Sequence
  Description of Artificial Sequence: Synthetic oligonucleotide
cuuuuggccuccgagugac

SEQ ID NO: 2236086 - RNA, 19 nt, Artificial Sequence
  Description of Artificial Sequence: Synthetic oligonucleotide
uuuggaucuuuuccuucua

SEQ ID NO: 2236087 - RNA, 19 nt, Artificial Sequence
  Description of Artificial Sequence: Synthetic oligonucleotide
gucacuggccuuuuggccu

SEQ ID NO: 2236088 - RNA, 19 nt, Artificial Sequence
  Description of Artificial Sequence: Synthetic oligonucleotide
cuuuggaucuuuuccuucu

SEQ ID NO: 2236089 - RNA, 19 nt, Artificial Sequence
  Description of Artificial Sequence: Synthetic oligonucleotide
gccuuuuggccuccgagug

SEQ ID NO: 2236090 - RNA, 19 nt, Artificial Sequence
  Description of Artificial Sequence: Synthetic oligonucleotide
ucacuggccuuuuggccuc

SEQ ID NO: 2236091 - RNA, 19 nt, Artificial Sequence
  Description of Artificial Sequence: Synthetic oligonucleotide
acuggccuuuuggccuccg

SEQ ID NO: 2236092 - RNA, 19 nt, Artificial Sequence
  Description of Artificial Sequence: Synthetic oligonucleotide
ggccuuuuggccuccgagu

SEQ ID NO: 2236093 - RNA, 19 nt, Artificial Sequence
  Description of Artificial Sequence: Synthetic oligonucleotide
ccuuuuggccuccgaguga

SEQ ID NO: 2236094 - RNA, 19 nt, Artificial Sequence
  Description of Artificial Sequence: Synthetic oligonucleotide
cuggccuuuuggccuccga

SEQ ID NO: 2236095 - RNA, 19 nt, Artificial Sequence
  Description of Artificial Sequence: Synthetic oligonucleotide
cacuggccuuuuggccucc

SEQ ID NO: 2236096 - RNA, 19 nt, Artificial Sequence
  Description of Artificial Sequence: Synthetic oligonucleotide
aguaauaucaaacugucac

SEQ ID NO: 2236097 - RNA, 19 nt, Artificial Sequence
  Description of Artificial Sequence: Synthetic oligonucleotide
aaauggguauuuaugaucc

SEQ ID NO: 2236098 - RNA, 19 nt, Artificial Sequence
  Description of Artificial Sequence: Synthetic oligonucleotide
aaccaaaaggucuaacagc

SEQ ID NO: 2236099 - RNA, 19 nt, Artificial Sequence
  Description of Artificial Sequence: Synthetic oligonucleotide
uuaacuacaucacagcaag

SEQ ID NO: 2236100 - RNA, 19 nt, Artificial Sequence
  Description of Artificial Sequence: Synthetic oligonucleotide
aaucauauaaagcugugga

SEQ ID NO: 2236101 - RNA, 19 nt, Artificial Sequence
  Description of Artificial Sequence: Synthetic oligonucleotide
uaagcguguacauacaugg

SEQ ID NO: 2236102 - RNA, 19 nt, Artificial Sequence
  Description of Artificial Sequence: Synthetic oligonucleotide
uguaaaacagaagagauga

SEQ ID NO: 2236103 - RNA, 19 nt, Artificial Sequence
  Description of Artificial Sequence: Synthetic oligonucleotide
aaagucguuuguuggagcc

SEQ ID NO: 2236104 - RNA, 19 nt, Artificial Sequence
  Description of Artificial Sequence: Synthetic oligonucleotide
auaaccauaugaaacaccc

SEQ ID NO: 2236105 - RNA, 19 nt, Artificial Sequence
  Description of Artificial Sequence: Synthetic oligonucleotide
ugcaagauguuuuagagga

SEQ ID NO: 2236106 - RNA, 19 nt, Artificial Sequence
  Description of Artificial Sequence: Synthetic oligonucleotide
uuuuagaggaauguuauag

SEQ ID NO: 2236107 - RNA, 19 nt, Artificial Sequence
  Description of Artificial Sequence: Synthetic oligonucleotide
uauagccaaaguuagaucu

SEQ ID NO: 2236108 - RNA, 19 nt, Artificial Sequence
  Description of Artificial Sequence: Synthetic oligonucleotide
ugaaaauugguaaaugggu

SEQ ID NO: 2236109 - RNA, 19 nt, Artificial Sequence
  Description of Artificial Sequence: Synthetic oligonucleotide
uguauaagcguguacauac

SEQ ID NO: 2236110 - RNA, 19 nt, Artificial Sequence
  Description of Artificial Sequence: Synthetic oligonucleotide
ucauguacuauauaaauua

SEQ ID NO: 2236111 - RNA, 19 nt, Artificial Sequence
  Description of Artificial Sequence: Synthetic oligonucleotide
uuuucuaccccaaacacaa

SEQ ID NO: 2236112 - RNA, 19 nt, Artificial Sequence
  Description of Artificial Sequence: Synthetic oligonucleotide
uuagaggaauguuauagcc

SEQ ID NO: 2236113 - RNA, 19 nt, Artificial Sequence
  Description of Artificial Sequence: Synthetic oligonucleotide
uuuaguuaguucaccaacc

SEQ ID NO: 2236114 - RNA, 19 nt, Artificial Sequence
  Description of Artificial Sequence: Synthetic oligonucleotide
aaccuaauguuuauaagac

SEQ ID NO: 2236115 - RNA, 19 nt, Artificial Sequence
  Description of Artificial Sequence: Synthetic oligonucleotide
uagaucuaaaguuggaugc

SEQ ID NO: 2236116 - RNA, 19 nt, Artificial Sequence
  Description of Artificial Sequence: Synthetic oligonucleotide
uguagaguguauaagcgug

SEQ ID NO: 2236117 - RNA, 19 nt, Artificial Sequence
  Description of Artificial Sequence: Synthetic oligonucleotide
ucugcaagauguuuuagag

SEQ ID NO: 2236118 - RNA, 19 nt, Artificial Sequence
  Description of Artificial Sequence: Synthetic oligonucleotide
ucauauaaagcuguggacc

SEQ ID NO: 2236119 - RNA, 19 nt, Artificial Sequence
  Description of Artificial Sequence: Synthetic oligonucleotide
uuagaucuaaaguuggaug

SEQ ID NO: 2236120 - RNA, 19 nt, Artificial Sequence
  Description of Artificial Sequence: Synthetic oligonucleotide
aaaagucguuuguuggagc

SEQ ID NO: 2236121 - RNA, 19 nt, Artificial Sequence
  Description of Artificial Sequence: Synthetic oligonucleotide
aaaguuagaucuaaaguug

SEQ ID NO: 2236122 - RNA, 19 nt, Artificial Sequence
  Description of Artificial Sequence: Synthetic oligonucleotide
cuaacaugaaacugcaacc

SEQ ID NO: 2236123 - RNA, 19 nt, Artificial Sequence
  Description of Artificial Sequence: Synthetic oligonucleotide
cauucguacuguaagaccc

SEQ ID NO: 2236124 - RNA, 19 nt, Artificial Sequence
  Description of Artificial Sequence: Synthetic oligonucleotide
aauaaccauaugaaacacc

SEQ ID NO: 2236125 - RNA, 19 nt, Artificial Sequence
  Description of Artificial Sequence: Synthetic oligonucleotide
agaacguagaggcugacag

SEQ ID NO: 2236126 - RNA, 19 nt, Artificial Sequence
  Description of Artificial Sequence: Synthetic oligonucleotide
aauguuauagccaaaguua

SEQ ID NO: 2236127 - RNA, 19 nt, Artificial Sequence
  Description of Artificial Sequence: Synthetic oligonucleotide
uucguaaaguuuagaaagg

SEQ ID NO: 2236128 - RNA, 19 nt, Artificial Sequence
  Description of Artificial Sequence: Synthetic oligonucleotide
uauuuaugauccaugguac

SEQ ID NO: 2236129 - RNA, 19 nt, Artificial Sequence
  Description of Artificial Sequence: Synthetic oligonucleotide
uuacaucugaucccaauag

SEQ ID NO: 2236130 - RNA, 19 nt, Artificial Sequence
  Description of Artificial Sequence: Synthetic oligonucleotide
gaaccuaauguuuauaaga

SEQ ID NO: 2236131 - RNA, 19 nt, Artificial Sequence
  Description of Artificial Sequence: Synthetic oligonucleotide
caugguacuaguaauauca

SEQ ID NO: 2236132 - RNA, 19 nt, Artificial Sequence
  Description of Artificial Sequence: Synthetic oligonucleotide
ucaucuucuuccuucaaag

SEQ ID NO: 2236133 - RNA, 19 nt, Artificial Sequence
  Description of Artificial Sequence: Synthetic oligonucleotide
aaaauugguaaauggguau

SEQ ID NO: 2236134 - RNA, 19 nt, Artificial Sequence
  Description of Artificial Sequence: Synthetic oligonucleotide
uguacuacuguuuuccaca

SEQ ID NO: 2236135 - RNA, 19 nt, Artificial Sequence
  Description of Artificial Sequence: Synthetic oligonucleotide
aucauauaaagcuguggac

SEQ ID NO: 2236136 - RNA, 19 nt, Artificial Sequence
  Description of Artificial Sequence: Synthetic oligonucleotide
uuuagaaaggacuaauuuu

SEQ ID NO: 2236137 - RNA, 19 nt, Artificial Sequence
  Description of Artificial Sequence: Synthetic oligonucleotide
caggagagaacguagaggc

SEQ ID NO: 2236138 - RNA, 19 nt, Artificial Sequence
  Description of Artificial Sequence: Synthetic oligonucleotide
uacuguaagacccuaacau

SEQ ID NO: 2236139 - RNA, 19 nt, Artificial Sequence
  Description of Artificial Sequence: Synthetic oligonucleotide
uaaaacagaagagaugaug

SEQ ID NO: 2236140 - RNA, 19 nt, Artificial Sequence
  Description of Artificial Sequence: Synthetic oligonucleotide
augaaaauugguaaauggg

SEQ ID NO: 2236141 - RNA, 19 nt, Artificial Sequence
  Description of Artificial Sequence: Synthetic oligonucleotide
uuuagaggaauguuauagc

SEQ ID NO: 2236142 - RNA, 19 nt, Artificial Sequence
  Description of Artificial Sequence: Synthetic oligonucleotide
aguucaaaagcuuuauccu

SEQ ID NO: 2236143 - RNA, 19 nt, Artificial Sequence
  Description of Artificial Sequence: Synthetic oligonucleotide
ugguaaauggguauuuaug

SEQ ID NO: 2236144 - RNA, 19 nt, Artificial Sequence
  Description of Artificial Sequence: Synthetic oligonucleotide
uaagacccuaacaugaaac

SEQ ID NO: 2236145 - RNA, 19 nt, Artificial Sequence
  Description of Artificial Sequence: Synthetic oligonucleotide
cuaacagcacuguagagug

SEQ ID NO: 2236146 - RNA, 19 nt, Artificial Sequence
  Description of Artificial Sequence: Synthetic oligonucleotide
uuaguuaguucaccaaccc

SEQ ID NO: 2236147 - RNA, 19 nt, Artificial Sequence
  Description of Artificial Sequence: Synthetic oligonucleotide
uuuaacuacaucacagcaa

SEQ ID NO: 2236148 - RNA, 19 nt, Artificial Sequence
  Description of Artificial Sequence: Synthetic oligonucleotide
ucuuuaacuacaucacagc

SEQ ID NO: 2236149 - RNA, 19 nt, Artificial Sequence
  Description of Artificial Sequence: Synthetic oligonucleotide
ugaaacacccgacggauca

SEQ ID NO: 2236150 - RNA, 19 nt, Artificial Sequence
  Description of Artificial Sequence: Synthetic oligonucleotide
caugucguccuuuaguuag

SEQ ID NO: 2236151 - RNA, 19 nt, Artificial Sequence
  Description of Artificial Sequence: Synthetic oligonucleotide
agcuguacuacuguuuucc

SEQ ID NO: 2236152 - RNA, 19 nt, Artificial Sequence
  Description of Artificial Sequence: Synthetic oligonucleotide
uugaaagacucuuccauca

SEQ ID NO: 2236153 - RNA, 19 nt, Artificial Sequence
  Description of Artificial Sequence: Synthetic oligonucleotide
ugaaccuaauguuuauaag

SEQ ID NO: 2236154 - RNA, 19 nt, Artificial Sequence
  Description of Artificial Sequence: Synthetic oligonucleotide
uacucaacuugaaagacuc

SEQ ID NO: 2236155 - RNA, 19 nt, Artificial Sequence
  Description of Artificial Sequence: Synthetic oligonucleotide
gaaagacucuuccaucagg

SEQ ID NO: 2236156 - RNA, 19 nt, Artificial Sequence
  Description of Artificial Sequence: Synthetic oligonucleotide
ugcaacuucuuuaacuaca

SEQ ID NO: 2236157 - RNA, 19 nt, Artificial Sequence
  Description of Artificial Sequence: Synthetic oligonucleotide
ugucuuuuggaacaauuuc

SEQ ID NO: 2236158 - RNA, 19 nt, Artificial Sequence
  Description of Artificial Sequence: Synthetic oligonucleotide
cacuguagaguguauaagc

SEQ ID NO: 2236159 - RNA, 19 nt, Artificial Sequence
  Description of Artificial Sequence: Synthetic oligonucleotide
guauuuaugauccauggua

SEQ ID NO: 2236160 - RNA, 19 nt, Artificial Sequence
  Description of Artificial Sequence: Synthetic oligonucleotide
aaguuagaucuaaaguugg

SEQ ID NO: 2236161 - RNA, 19 nt, Artificial Sequence
  Description of Artificial Sequence: Synthetic oligonucleotide
aauggcacagccccaauaa

SEQ ID NO: 2236162 - RNA, 19 nt, Artificial Sequence
  Description of Artificial Sequence: Synthetic oligonucleotide
uauccuuaacuucaucaug

SEQ ID NO: 2236163 - RNA, 19 nt, Artificial Sequence
  Description of Artificial Sequence: Synthetic oligonucleotide
aucacagcaagucauuucu

SEQ ID NO: 2236164 - RNA, 19 nt, Artificial Sequence
  Description of Artificial Sequence: Synthetic oligonucleotide
acuaguaauaucaaacugu

SEQ ID NO: 2236165 - RNA, 19 nt, Artificial Sequence
  Description of Artificial Sequence: Synthetic oligonucleotide
aacaugucgaucaacauua

SEQ ID NO: 2236166 - RNA, 19 nt, Artificial Sequence
  Description of Artificial Sequence: Synthetic oligonucleotide
uuucaugucguccuuuagu

SEQ ID NO: 2236167 - RNA, 19 nt, Artificial Sequence
  Description of Artificial Sequence: Synthetic oligonucleotide
aguuaguucaccaacccag

SEQ ID NO: 2236168 - RNA, 19 nt, Artificial Sequence
  Description of Artificial Sequence: Synthetic oligonucleotide
cuuuaguuaguucaccaac

SEQ ID NO: 2236169 - RNA, 19 nt, Artificial Sequence
  Description of Artificial Sequence: Synthetic oligonucleotide
uucuucguaaaguuuagaa

SEQ ID NO: 2236170 - RNA, 19 nt, Artificial Sequence
  Description of Artificial Sequence: Synthetic oligonucleotide
ucuucguaaaguuuagaaa

SEQ ID NO: 2236171 - RNA, 19 nt, Artificial Sequence
  Description of Artificial Sequence: Synthetic oligonucleotide
cuugcuaugucugcuaagg

SEQ ID NO: 2236172 - RNA, 19 nt, Artificial Sequence
  Description of Artificial Sequence: Synthetic oligonucleotide
aagacccuaacaugaaacu

SEQ ID NO: 2236173 - RNA, 19 nt, Artificial Sequence
  Description of Artificial Sequence: Synthetic oligonucleotide
ugccauuccaacaugucga

SEQ ID NO: 2236174 - RNA, 19 nt, Artificial Sequence
  Description of Artificial Sequence: Synthetic oligonucleotide
agucauuucuuucaucuga

SEQ ID NO: 2236175 - RNA, 19 nt, Artificial Sequence
  Description of Artificial Sequence: Synthetic oligonucleotide
uugaaccuaauguuuauaa

SEQ ID NO: 2236176 - RNA, 19 nt, Artificial Sequence
  Description of Artificial Sequence: Synthetic oligonucleotide
uccuucaaagauuccuugg

SEQ ID NO: 2236177 - RNA, 19 nt, Artificial Sequence
  Description of Artificial Sequence: Synthetic oligonucleotide
gaagagaugaugaaaaugu

SEQ ID NO: 2236178 - RNA, 19 nt, Artificial Sequence
  Description of Artificial Sequence: Synthetic oligonucleotide
accaucuuuacaucugauc

SEQ ID NO: 2236179 - RNA, 19 nt, Artificial Sequence
  Description of Artificial Sequence: Synthetic oligonucleotide
uuuacaucugaucccaaua

SEQ ID NO: 2236180 - RNA, 19 nt, Artificial Sequence
  Description of Artificial Sequence: Synthetic oligonucleotide
acuguaagacccuaacaug

SEQ ID NO: 2236181 - RNA, 19 nt, Artificial Sequence
  Description of Artificial Sequence: Synthetic oligonucleotide
ggaucaaucauauaaagcu

SEQ ID NO: 2236182 - RNA, 19 nt, Artificial Sequence
  Description of Artificial Sequence: Synthetic oligonucleotide
acagcaagucauuucuuuc

SEQ ID NO: 2236183 - RNA, 19 nt, Artificial Sequence
  Description of Artificial Sequence: Synthetic oligonucleotide
ucaaucauauaaagcugug

SEQ ID NO: 2236184 - RNA, 19 nt, Artificial Sequence
  Description of Artificial Sequence: Synthetic oligonucleotide
aucauucguacuguaagac

SEQ ID NO: 2236185 - RNA, 19 nt, Artificial Sequence
  Description of Artificial Sequence: Synthetic oligonucleotide
acuguagaguguauaagcg

SEQ ID NO: 2236186 - RNA, 19 nt, Artificial Sequence
  Description of Artificial Sequence: Synthetic oligonucleotide
aaaaggucuaacagcacug

SEQ ID NO: 2236187 - RNA, 19 nt, Artificial Sequence
  Description of Artificial Sequence: Synthetic oligonucleotide
ucauucguacuguaagacc

SEQ ID NO: 2236188 - RNA, 19 nt, Artificial Sequence
  Description of Artificial Sequence: Synthetic oligonucleotide
aacguagaggcugacaggu

SEQ ID NO: 2236189 - RNA, 19 nt, Artificial Sequence
  Description of Artificial Sequence: Synthetic oligonucleotide
gguacuaguaauaucaaac

SEQ ID NO: 2236190 - RNA, 19 nt, Artificial Sequence
  Description of Artificial Sequence: Synthetic oligonucleotide
cuuaacuucaucauguacu

SEQ ID NO: 2236191 - RNA, 19 nt, Artificial Sequence
  Description of Artificial Sequence: Synthetic oligonucleotide
uaacaugaaacugcaacca

SEQ ID NO: 2236192 - RNA, 19 nt, Artificial Sequence
  Description of Artificial Sequence: Synthetic oligonucleotide
acggaucaaucauauaaag

SEQ ID NO: 2236193 - RNA, 19 nt, Artificial Sequence
  Description of Artificial Sequence: Synthetic oligonucleotide
uaaccauaugaaacacccg

SEQ ID NO: 2236194 - RNA, 19 nt, Artificial Sequence
  Description of Artificial Sequence: Synthetic oligonucleotide
gaucaaucauauaaagcug

SEQ ID NO: 2236195 - RNA, 19 nt, Artificial Sequence
  Description of Artificial Sequence: Synthetic oligonucleotide
uuaacuucaucauguacua

SEQ ID NO: 2236196 - RNA, 19 nt, Artificial Sequence
  Description of Artificial Sequence: Synthetic oligonucleotide
uacaucugaucccaauagc

SEQ ID NO: 2236197 - RNA, 19 nt, Artificial Sequence
  Description of Artificial Sequence: Synthetic oligonucleotide
uggguauuuaugauccaug

SEQ ID NO: 2236198 - RNA, 19 nt, Artificial Sequence
  Description of Artificial Sequence: Synthetic oligonucleotide
uaaggaacgagcgucugcc

SEQ ID NO: 2236199 - RNA, 19 nt, Artificial Sequence
  Description of Artificial Sequence: Synthetic oligonucleotide
ucauacccggucccaaugg

SEQ ID NO: 2236200 - RNA, 19 nt, Artificial Sequence
  Description of Artificial Sequence: Synthetic oligonucleotide
caucuuuacaucugauccc

SEQ ID NO: 2236201 - RNA, 19 nt, Artificial Sequence
  Description of Artificial Sequence: Synthetic oligonucleotide
cuaugucugcuaaggaacg

SEQ ID NO: 2236202 - RNA, 19 nt, Artificial Sequence
  Description of Artificial Sequence: Synthetic oligonucleotide
uggcacagccccaauaacc

SEQ ID NO: 2236203 - RNA, 19 nt, Artificial Sequence
  Description of Artificial Sequence: Synthetic oligonucleotide
acuacaucacagcaaguca

SEQ ID NO: 2236204 - RNA, 19 nt, Artificial Sequence
  Description of Artificial Sequence: Synthetic oligonucleotide
uuugccaauggcacagccc

SEQ ID NO: 2236205 - RNA, 19 nt, Artificial Sequence
  Description of Artificial Sequence: Synthetic oligonucleotide
aaagacucuuccaucagga

SEQ ID NO: 2236206 - RNA, 19 nt, Artificial Sequence
  Description of Artificial Sequence: Synthetic oligonucleotide
aacugcaaccaaaaggucu

SEQ ID NO: 2236207 - RNA, 19 nt, Artificial Sequence
  Description of Artificial Sequence: Synthetic oligonucleotide
ugaaagacucuuccaucag

SEQ ID NO: 2236208 - RNA, 19 nt, Artificial Sequence
  Description of Artificial Sequence: Synthetic oligonucleotide
aucccaauagcuguacuac

SEQ ID NO: 2236209 - RNA, 19 nt, Artificial Sequence
  Description of Artificial Sequence: Synthetic oligonucleotide
uggcauauuucucugcuuc

SEQ ID NO: 2236210 - RNA, 19 nt, Artificial Sequence
  Description of Artificial Sequence: Synthetic oligonucleotide
uucaaagauuccuuggcau

SEQ ID NO: 2236211 - RNA, 19 nt, Artificial Sequence
  Description of Artificial Sequence: Synthetic oligonucleotide
ucuaaaguuggaugcuucu

SEQ ID NO: 2236212 - RNA, 19 nt, Artificial Sequence
  Description of Artificial Sequence: Synthetic oligonucleotide
ucaacuugaaagacucuuc

SEQ ID NO: 2236213 - RNA, 19 nt, Artificial Sequence
  Description of Artificial Sequence: Synthetic oligonucleotide
aucuucuuccuucaaagau

SEQ ID NO: 2236214 - RNA, 19 nt, Artificial Sequence
  Description of Artificial Sequence: Synthetic oligonucleotide
agaguguauaagcguguac

SEQ ID NO: 2236215 - RNA, 19 nt, Artificial Sequence
  Description of Artificial Sequence: Synthetic oligonucleotide
auaugaaacacccgacgga

SEQ ID NO: 2236216 - RNA, 19 nt, Artificial Sequence
  Description of Artificial Sequence: Synthetic oligonucleotide
aagucauuucuuucaucug

SEQ ID NO: 2236217 - RNA, 19 nt, Artificial Sequence
  Description of Artificial Sequence: Synthetic oligonucleotide
cccaauaaccauaugaaac

SEQ ID NO: 2236218 - RNA, 19 nt, Artificial Sequence
  Description of Artificial Sequence: Synthetic oligonucleotide
cauagcauacucaacuuga

SEQ ID NO: 2236219 - RNA, 19 nt, Artificial Sequence
  Description of Artificial Sequence: Synthetic oligonucleotide
aaguuggaugcuucuucuc

SEQ ID NO: 2236220 - RNA, 19 nt, Artificial Sequence
  Description of Artificial Sequence: Synthetic oligonucleotide
acaacaccaucuuuacauc

SEQ ID NO: 2236221 - RNA, 19 nt, Artificial Sequence
  Description of Artificial Sequence: Synthetic oligonucleotide
uaguucaccaacccagcug

SEQ ID NO: 2236222 - RNA, 19 nt, Artificial Sequence
  Description of Artificial Sequence: Synthetic oligonucleotide
gaguguauaagcguguaca

SEQ ID NO: 2236223 - RNA, 19 nt, Artificial Sequence
  Description of Artificial Sequence: Synthetic oligonucleotide
ggguauuuaugauccaugg

SEQ ID NO: 2236224 - RNA, 19 nt, Artificial Sequence
  Description of Artificial Sequence: Synthetic oligonucleotide
cugagcucuaguucaaaag

SEQ ID NO: 2236225 - RNA, 19 nt, Artificial Sequence
  Description of Artificial Sequence: Synthetic oligonucleotide
guaauaucaaacugucaca

SEQ ID NO: 2236226 - RNA, 19 nt, Artificial Sequence
  Description of Artificial Sequence: Synthetic oligonucleotide
aagacucuuccaucaggag

SEQ ID NO: 2236227 - RNA, 19 nt, Artificial Sequence
  Description of Artificial Sequence: Synthetic oligonucleotide
cagaaauguaaaacagaag

SEQ ID NO: 2236228 - RNA, 19 nt, Artificial Sequence
  Description of Artificial Sequence: Synthetic oligonucleotide
uguuauagccaaaguuaga

SEQ ID NO: 2236229 - RNA, 19 nt, Artificial Sequence
  Description of Artificial Sequence: Synthetic oligonucleotide
uuacagacggguguaagcu

SEQ ID NO: 2236230 - RNA, 19 nt, Artificial Sequence
  Description of Artificial Sequence: Synthetic oligonucleotide
auguuauagccaaaguuag

SEQ ID NO: 2236231 - RNA, 19 nt, Artificial Sequence
  Description of Artificial Sequence: Synthetic oligonucleotide
caaucauauaaagcugugg

SEQ ID NO: 2236232 - RNA, 19 nt, Artificial Sequence
  Description of Artificial Sequence: Synthetic oligonucleotide
cuuuaacuacaucacagca

SEQ ID NO: 2236233 - RNA, 19 nt, Artificial Sequence
  Description of Artificial Sequence: Synthetic oligonucleotide
ucccuuaugucuuuuggaa

SEQ ID NO: 2236234 - RNA, 19 nt, Artificial Sequence
  Description of Artificial Sequence: Synthetic oligonucleotide
cauggugccaacuccggag

SEQ ID NO: 2236235 - RNA, 19 nt, Artificial Sequence
  Description of Artificial Sequence: Synthetic oligonucleotide
ucugcuaaggaacgagcgu

SEQ ID NO: 2236236 - RNA, 19 nt, Artificial Sequence
  Description of Artificial Sequence: Synthetic oligonucleotide
augucgaucaacauuaaaa

SEQ ID NO: 2236237 - RNA, 19 nt, Artificial Sequence
  Description of Artificial Sequence: Synthetic oligonucleotide
aucaggagagaacguagag

SEQ ID NO: 2236238 - RNA, 19 nt, Artificial Sequence
  Description of Artificial Sequence: Synthetic oligonucleotide
cauauaaagcuguggacca

SEQ ID NO: 2236239 - RNA, 19 nt, Artificial Sequence
  Description of Artificial Sequence: Synthetic oligonucleotide
ugucugcuaaggaacgagc

SEQ ID NO: 2236240 - RNA, 19 nt, Artificial Sequence
  Description of Artificial Sequence: Synthetic oligonucleotide
uucaugucguccuuuaguu

SEQ ID NO: 2236241 - RNA, 19 nt, Artificial Sequence
  Description of Artificial Sequence: Synthetic oligonucleotide
uaguuaguucaccaaccca

SEQ ID NO: 2236242 - RNA, 19 nt, Artificial Sequence
  Description of Artificial Sequence: Synthetic oligonucleotide
aaguuuagaaaggacuaau

SEQ ID NO: 2236243 - RNA, 19 nt, Artificial Sequence
  Description of Artificial Sequence: Synthetic oligonucleotide
acagacggguguaagcugc

SEQ ID NO: 2236244 - RNA, 19 nt, Artificial Sequence
  Description of Artificial Sequence: Synthetic oligonucleotide
aucaaucauauaaagcugu

SEQ ID NO: 2236245 - RNA, 19 nt, Artificial Sequence
  Description of Artificial Sequence: Synthetic oligonucleotide
uaugaaacacccgacggau

SEQ ID NO: 2236246 - RNA, 19 nt, Artificial Sequence
  Description of Artificial Sequence: Synthetic oligonucleotide
auuuaugauccaugguacu

SEQ ID NO: 2236247 - RNA, 19 nt, Artificial Sequence
  Description of Artificial Sequence: Synthetic oligonucleotide
auagcuguacuacuguuuu

SEQ ID NO: 2236248 - RNA, 19 nt, Artificial Sequence
  Description of Artificial Sequence: Synthetic oligonucleotide
uaguaauaucaaacuguca

SEQ ID NO: 2236249 - RNA, 19 nt, Artificial Sequence
  Description of Artificial Sequence: Synthetic oligonucleotide
agcuuuauccuuaacuuca

SEQ ID NO: 2236250 - RNA, 19 nt, Artificial Sequence
  Description of Artificial Sequence: Synthetic oligonucleotide
gguguaagcugccauguag

SEQ ID NO: 2236251 - RNA, 19 nt, Artificial Sequence
  Description of Artificial Sequence: Synthetic oligonucleotide
cauacucaacuugaaagac

SEQ ID NO: 2236252 - RNA, 19 nt, Artificial Sequence
  Description of Artificial Sequence: Synthetic oligonucleotide
ucguaaaguuuagaaagga

SEQ ID NO: 2236253 - RNA, 19 nt, Artificial Sequence
  Description of Artificial Sequence: Synthetic oligonucleotide
uguaagacccuaacaugaa

SEQ ID NO: 2236254 - RNA, 19 nt, Artificial Sequence
  Description of Artificial Sequence: Synthetic oligonucleotide
guuuguuggagccuucuuc

SEQ ID NO: 2236255 - RNA, 19 nt, Artificial Sequence
  Description of Artificial Sequence: Synthetic oligonucleotide
uguacauacauggccacuc

SEQ ID NO: 2236256 - RNA, 19 nt, Artificial Sequence
  Description of Artificial Sequence: Synthetic oligonucleotide
gaugaugaaaauguuacau

SEQ ID NO: 2236257 - RNA, 19 nt, Artificial Sequence
  Description of Artificial Sequence: Synthetic oligonucleotide
uuauagccaaaguuagauc

SEQ ID NO: 2236258 - RNA, 19 nt, Artificial Sequence
  Description of Artificial Sequence: Synthetic oligonucleotide
gccaaaguuagaucuaaag

SEQ ID NO: 2236259 - RNA, 19 nt, Artificial Sequence
  Description of Artificial Sequence: Synthetic oligonucleotide
agaccugcgacugccauuc

SEQ ID NO: 2236260 - RNA, 19 nt, Artificial Sequence
  Description of Artificial Sequence: Synthetic oligonucleotide
aagauguuuuagaggaaug

SEQ ID NO: 2236261 - RNA, 19 nt, Artificial Sequence
  Description of Artificial Sequence: Synthetic oligonucleotide
uuaguucaccaacccagcu

SEQ ID NO: 2236262 - RNA, 19 nt, Artificial Sequence
  Description of Artificial Sequence: Synthetic oligonucleotide
gaaaauugguaaaugggua

SEQ ID NO: 2236263 - RNA, 19 nt, Artificial Sequence
  Description of Artificial Sequence: Synthetic oligonucleotide
agauguuuuagaggaaugu

SEQ ID NO: 2236264 - RNA, 19 nt, Artificial Sequence
  Description of Artificial Sequence: Synthetic oligonucleotide
cuucauagcauacucaacu

SEQ ID NO: 2236265 - RNA, 19 nt, Artificial Sequence
  Description of Artificial Sequence: Synthetic oligonucleotide
uauuucugucuuugcagcu

SEQ ID NO: 2236266 - RNA, 19 nt, Artificial Sequence
  Description of Artificial Sequence: Synthetic oligonucleotide
aggucuaacagcacuguag

SEQ ID NO: 2236267 - RNA, 19 nt, Artificial Sequence
  Description of Artificial Sequence: Synthetic oligonucleotide
aguguauaagcguguacau

SEQ ID NO: 2236268 - RNA, 19 nt, Artificial Sequence
  Description of Artificial Sequence: Synthetic oligonucleotide
auccuuaacuucaucaugu

SEQ ID NO: 2236269 - RNA, 19 nt, Artificial Sequence
  Description of Artificial Sequence: Synthetic oligonucleotide
agcacuguagaguguauaa

SEQ ID NO: 2236270 - RNA, 19 nt, Artificial Sequence
  Description of Artificial Sequence: Synthetic oligonucleotide
uacccggucccaauggagc

SEQ ID NO: 2236271 - RNA, 19 nt, Artificial Sequence
  Description of Artificial Sequence: Synthetic oligonucleotide
ucuaguucaaaagcuuuau

SEQ ID NO: 2236272 - RNA, 19 nt, Artificial Sequence
  Description of Artificial Sequence: Synthetic oligonucleotide
aauggguauuuaugaucca

SEQ ID NO: 2236273 - RNA, 19 nt, Artificial Sequence
  Description of Artificial Sequence: Synthetic oligonucleotide
aaaggucuaacagcacugu

SEQ ID NO: 2236274 - RNA, 19 nt, Artificial Sequence
  Description of Artificial Sequence: Synthetic oligonucleotide
aaauugguaaauggguauu

SEQ ID NO: 2236275 - RNA, 19 nt, Artificial Sequence
  Description of Artificial Sequence: Synthetic oligonucleotide
auguuacauauuaucauca

SEQ ID NO: 2236276 - RNA, 19 nt, Artificial Sequence
  Description of Artificial Sequence: Synthetic oligonucleotide
gucugcuaaggaacgagcg

SEQ ID NO: 2236277 - RNA, 19 nt, Artificial Sequence
  Description of Artificial Sequence: Synthetic oligonucleotide
aaacugcaaccaaaagguc

SEQ ID NO: 2236278 - RNA, 19 nt, Artificial Sequence
  Description of Artificial Sequence: Synthetic oligonucleotide
aacugucacagaaauguaa

SEQ ID NO: 2236279 - RNA, 19 nt, Artificial Sequence
  Description of Artificial Sequence: Synthetic oligonucleotide
caugaaacugcaaccaaaa

SEQ ID NO: 2236280 - RNA, 19 nt, Artificial Sequence
  Description of Artificial Sequence: Synthetic oligonucleotide
ucuugcuaugucugcuaag

SEQ ID NO: 2236281 - RNA, 19 nt, Artificial Sequence
  Description of Artificial Sequence: Synthetic oligonucleotide
aauagcuguacuacuguuu

SEQ ID NO: 2236282 - RNA, 19 nt, Artificial Sequence
  Description of Artificial Sequence: Synthetic oligonucleotide
aauugguaaauggguauuu

SEQ ID NO: 2236283 - RNA, 19 nt, Artificial Sequence
  Description of Artificial Sequence: Synthetic oligonucleotide
guacuacuguuuuccacag

SEQ ID NO: 2236284 - RNA, 19 nt, Artificial Sequence
  Description of Artificial Sequence: Synthetic oligonucleotide
caauaaccauaugaaacac

SEQ ID NO: 2236285 - RNA, 19 nt, Artificial Sequence
  Description of Artificial Sequence: Synthetic oligonucleotide
gaggcugacaggucauacc

SEQ ID NO: 2236286 - RNA, 19 nt, Artificial Sequence
  Description of Artificial Sequence: Synthetic oligonucleotide
uguggaccaucauucguac

SEQ ID NO: 2236287 - RNA, 19 nt, Artificial Sequence
  Description of Artificial Sequence: Synthetic oligonucleotide
aggaacgagcgucugccag

SEQ ID NO: 2236288 - RNA, 19 nt, Artificial Sequence
  Description of Artificial Sequence: Synthetic oligonucleotide
cuaaggaacgagcgucugc

SEQ ID NO: 2236289 - RNA, 19 nt, Artificial Sequence
  Description of Artificial Sequence: Synthetic oligonucleotide
auauuaucaucaucugauu

SEQ ID NO: 2236290 - RNA, 19 nt, Artificial Sequence
  Description of Artificial Sequence: Synthetic oligonucleotide
ugcuaaggaacgagcgucu

SEQ ID NO: 2236291 - RNA, 19 nt, Artificial Sequence
  Description of Artificial Sequence: Synthetic oligonucleotide
gaauugaaccuaauguuua

SEQ ID NO: 2236292 - RNA, 19 nt, Artificial Sequence
  Description of Artificial Sequence: Synthetic oligonucleotide
gcugacaggucauacccgg

SEQ ID NO: 2236293 - RNA, 19 nt, Artificial Sequence
  Description of Artificial Sequence: Synthetic oligonucleotide
cuguacuacuguuuuccac

SEQ ID NO: 2236294 - RNA, 19 nt, Artificial Sequence
  Description of Artificial Sequence: Synthetic oligonucleotide
ccaauaaccauaugaaaca

SEQ ID NO: 2236295 - RNA, 19 nt, Artificial Sequence
  Description of Artificial Sequence: Synthetic oligonucleotide
cacucugucugcaagaugu

SEQ ID NO: 2236296 - RNA, 19 nt, Artificial Sequence
  Description of Artificial Sequence: Synthetic oligonucleotide
agacccuaacaugaaacug

SEQ ID NO: 2236297 - RNA, 19 nt, Artificial Sequence
  Description of Artificial Sequence: Synthetic oligonucleotide
agcuguggaccaucauucg

SEQ ID NO: 2236298 - RNA, 19 nt, Artificial Sequence
  Description of Artificial Sequence: Synthetic oligonucleotide
ccauaugaaacacccgacg

SEQ ID NO: 2236299 - RNA, 19 nt, Artificial Sequence
  Description of Artificial Sequence: Synthetic oligonucleotide
agaggcugacaggucauac

SEQ ID NO: 2236300 - RNA, 19 nt, Artificial Sequence
  Description of Artificial Sequence: Synthetic oligonucleotide
gaucccaauagcuguacua

SEQ ID NO: 2236301 - RNA, 19 nt, Artificial Sequence
  Description of Artificial Sequence: Synthetic oligonucleotide
uugcuaugucugcuaagga

SEQ ID NO: 2236302 - RNA, 19 nt, Artificial Sequence
  Description of Artificial Sequence: Synthetic oligonucleotide
auacauggccacucugucu

SEQ ID NO: 2236303 - RNA, 19 nt, Artificial Sequence
  Description of Artificial Sequence: Synthetic oligonucleotide
acaccaucuuuacaucuga

SEQ ID NO: 2236304 - RNA, 19 nt, Artificial Sequence
  Description of Artificial Sequence: Synthetic oligonucleotide
auaagcguguacauacaug

SEQ ID NO: 2236305 - RNA, 19 nt, Artificial Sequence
  Description of Artificial Sequence: Synthetic oligonucleotide
uccaugguacuaguaauau

SEQ ID NO: 2236306 - RNA, 19 nt, Artificial Sequence
  Description of Artificial Sequence: Synthetic oligonucleotide
cauacauggccacucuguc

SEQ ID NO: 2236307 - RNA, 19 nt, Artificial Sequence
  Description of Artificial Sequence: Synthetic oligonucleotide
ucuuucaucugaagcuuuu

SEQ ID NO: 2236308 - RNA, 19 nt, Artificial Sequence
  Description of Artificial Sequence: Synthetic oligonucleotide
uacagacggguguaagcug

SEQ ID NO: 2236309 - RNA, 19 nt, Artificial Sequence
  Description of Artificial Sequence: Synthetic oligonucleotide
ggagagaacguagaggcug

SEQ ID NO: 2236310 - RNA, 19 nt, Artificial Sequence
  Description of Artificial Sequence: Synthetic oligonucleotide
agcgucugccagcagaccu

SEQ ID NO: 2236311 - RNA, 19 nt, Artificial Sequence
  Description of Artificial Sequence: Synthetic oligonucleotide
guuauagccaaaguuagau

SEQ ID NO: 2236312 - RNA, 19 nt, Artificial Sequence
  Description of Artificial Sequence: Synthetic oligonucleotide
ucugaucccaauagcugua

SEQ ID NO: 2236313 - RNA, 19 nt, Artificial Sequence
  Description of Artificial Sequence: Synthetic oligonucleotide
agagaugaugaaaauguua

SEQ ID NO: 2236314 - RNA, 19 nt, Artificial Sequence
  Description of Artificial Sequence: Synthetic oligonucleotide
acugucacagaaauguaaa

SEQ ID NO: 2236315 - RNA, 19 nt, Artificial Sequence
  Description of Artificial Sequence: Synthetic oligonucleotide
gcaaccaaaaggucuaaca

SEQ ID NO: 2236316 - RNA, 19 nt, Artificial Sequence
  Description of Artificial Sequence: Synthetic oligonucleotide
ccuucaaagauuccuuggc

SEQ ID NO: 2236317 - RNA, 19 nt, Artificial Sequence
  Description of Artificial Sequence: Synthetic oligonucleotide
acacccgacggaucaauca

SEQ ID NO: 2236318 - RNA, 19 nt, Artificial Sequence
  Description of Artificial Sequence: Synthetic oligonucleotide
agaucuaaaguuggaugcu

SEQ ID NO: 2236319 - RNA, 19 nt, Artificial Sequence
  Description of Artificial Sequence: Synthetic oligonucleotide
caucauucguacuguaaga

SEQ ID NO: 2236320 - RNA, 19 nt, Artificial Sequence
  Description of Artificial Sequence: Synthetic oligonucleotide
guacuguaagacccuaaca

SEQ ID NO: 2236321 - RNA, 19 nt, Artificial Sequence
  Description of Artificial Sequence: Synthetic oligonucleotide
acauacauggccacucugu

SEQ ID NO: 2236322 - RNA, 19 nt, Artificial Sequence
  Description of Artificial Sequence: Synthetic oligonucleotide
guuaguucaccaacccagc

SEQ ID NO: 2236323 - RNA, 19 nt, Artificial Sequence
  Description of Artificial Sequence: Synthetic oligonucleotide
ucccaauagcuguacuacu

SEQ ID NO: 2236324 - RNA, 19 nt, Artificial Sequence
  Description of Artificial Sequence: Synthetic oligonucleotide
ucauggugccaacuccgga

SEQ ID NO: 2236325 - RNA, 19 nt, Artificial Sequence
  Description of Artificial Sequence: Synthetic oligonucleotide
agcaagucauuucuuucau

SEQ ID NO: 2236326 - RNA, 19 nt, Artificial Sequence
  Description of Artificial Sequence: Synthetic oligonucleotide
gcuaugucugcuaaggaac

SEQ ID NO: 2236327 - RNA, 19 nt, Artificial Sequence
  Description of Artificial Sequence: Synthetic oligonucleotide
ggucuaacagcacuguaga

SEQ ID NO: 2236328 - RNA, 19 nt, Artificial Sequence
  Description of Artificial Sequence: Synthetic oligonucleotide
cugcuaaggaacgagcguc

SEQ ID NO: 2236329 - RNA, 19 nt, Artificial Sequence
  Description of Artificial Sequence: Synthetic oligonucleotide
aaggucuaacagcacugua

SEQ ID NO: 2236330 - RNA, 19 nt, Artificial Sequence
  Description of Artificial Sequence: Synthetic oligonucleotide
uacuacuguuuuccacagc

SEQ ID NO: 2236331 - RNA, 19 nt, Artificial Sequence
  Description of Artificial Sequence: Synthetic oligonucleotide
acgagcgucugccagcaga

SEQ ID NO: 2236332 - RNA, 19 nt, Artificial Sequence
  Description of Artificial Sequence: Synthetic oligonucleotide
gacggaucaaucauauaaa

SEQ ID NO: 2236333 - RNA, 19 nt, Artificial Sequence
  Description of Artificial Sequence: Synthetic oligonucleotide
ugaucccaauagcuguacu

SEQ ID NO: 2236334 - RNA, 19 nt, Artificial Sequence
  Description of Artificial Sequence: Synthetic oligonucleotide
ugucugcaagauguuuuag

SEQ ID NO: 2236335 - RNA, 19 nt, Artificial Sequence
  Description of Artificial Sequence: Synthetic oligonucleotide
auacucaacuugaaagacu

SEQ ID NO: 2236336 - RNA, 19 nt, Artificial Sequence
  Description of Artificial Sequence: Synthetic oligonucleotide
uggagccuucuucguaaag

SEQ ID NO: 2236337 - RNA, 19 nt, Artificial Sequence
  Description of Artificial Sequence: Synthetic oligonucleotide
caaaaggucuaacagcacu

SEQ ID NO: 2236338 - RNA, 19 nt, Artificial Sequence
  Description of Artificial Sequence: Synthetic oligonucleotide
aacacccgacggaucaauc

SEQ ID NO: 2236339 - RNA, 19 nt, Artificial Sequence
  Description of Artificial Sequence: Synthetic oligonucleotide
uaugucugcuaaggaacga

SEQ ID NO: 2236340 - RNA, 19 nt, Artificial Sequence
  Description of Artificial Sequence: Synthetic oligonucleotide
aagagaugaugaaaauguu

SEQ ID NO: 2236341 - RNA, 19 nt, Artificial Sequence
  Description of Artificial Sequence: Synthetic oligonucleotide
aacccagcugagcucuagu

SEQ ID NO: 2236342 - RNA, 19 nt, Artificial Sequence
  Description of Artificial Sequence: Synthetic oligonucleotide
ucccaauggagcucauggu

SEQ ID NO: 2236343 - RNA, 19 nt, Artificial Sequence
  Description of Artificial Sequence: Synthetic oligonucleotide
ccuuaugucuuuuggaaca

SEQ ID NO: 2236344 - RNA, 19 nt, Artificial Sequence
  Description of Artificial Sequence: Synthetic oligonucleotide
aguuagaucuaaaguugga

SEQ ID NO: 2236345 - RNA, 19 nt, Artificial Sequence
  Description of Artificial Sequence: Synthetic oligonucleotide
aaggaacgagcgucugcca

SEQ ID NO: 2236346 - RNA, 19 nt, Artificial Sequence
  Description of Artificial Sequence: Synthetic oligonucleotide
uagccaaaguuagaucuaa

SEQ ID NO: 2236347 - RNA, 19 nt, Artificial Sequence
  Description of Artificial Sequence: Synthetic oligonucleotide
auggguauuuaugauccau

SEQ ID NO: 2236348 - RNA, 19 nt, Artificial Sequence
  Description of Artificial Sequence: Synthetic oligonucleotide
auguacuauauaaauuauu

SEQ ID NO: 2236349 - RNA, 19 nt, Artificial Sequence
  Description of Artificial Sequence: Synthetic oligonucleotide
acacaacaccaucuuuaca

SEQ ID NO: 2236350 - RNA, 19 nt, Artificial Sequence
  Description of Artificial Sequence: Synthetic oligonucleotide
cggaucaaucauauaaagc

SEQ ID NO: 2236351 - RNA, 19 nt, Artificial Sequence
  Description of Artificial Sequence: Synthetic oligonucleotide
acugcaaccaaaaggucua

SEQ ID NO: 2236352 - RNA, 19 nt, Artificial Sequence
  Description of Artificial Sequence: Synthetic oligonucleotide
uccuuaacuucaucaugua

SEQ ID NO: 2236353 - RNA, 19 nt, Artificial Sequence
  Description of Artificial Sequence: Synthetic oligonucleotide
caucaggagagaacguaga

SEQ ID NO: 2236354 - RNA, 19 nt, Artificial Sequence
  Description of Artificial Sequence: Synthetic oligonucleotide
guaagacccuaacaugaaa

SEQ ID NO: 2236355 - RNA, 19 nt, Artificial Sequence
  Description of Artificial Sequence: Synthetic oligonucleotide
cucccuuaugucuuuugga

SEQ ID NO: 2236356 - RNA, 19 nt, Artificial Sequence
  Description of Artificial Sequence: Synthetic oligonucleotide
accaacccagcugagcucu

SEQ ID NO: 2236357 - RNA, 19 nt, Artificial Sequence
  Description of Artificial Sequence: Synthetic oligonucleotide
cguaaaguuuagaaaggac

SEQ ID NO: 2236358 - RNA, 19 nt, Artificial Sequence
  Description of Artificial Sequence: Synthetic oligonucleotide
ucguacuguaagacccuaa

SEQ ID NO: 2236359 - RNA, 19 nt, Artificial Sequence
  Description of Artificial Sequence: Synthetic oligonucleotide
auugguaaauggguauuua

SEQ ID NO: 2236360 - RNA, 19 nt, Artificial Sequence
  Description of Artificial Sequence: Synthetic oligonucleotide
uuucuaccccaaacacaac

SEQ ID NO: 2236361 - RNA, 19 nt, Artificial Sequence
  Description of Artificial Sequence: Synthetic oligonucleotide
ucuuuacaucugaucccaa

SEQ ID NO: 2236362 - RNA, 19 nt, Artificial Sequence
  Description of Artificial Sequence: Synthetic oligonucleotide
uuguuggagccuucuucgu

SEQ ID NO: 2236363 - RNA, 19 nt, Artificial Sequence
  Description of Artificial Sequence: Synthetic oligonucleotide
cuuucaucugaagcuuuuc

SEQ ID NO: 2236364 - RNA, 19 nt, Artificial Sequence
  Description of Artificial Sequence: Synthetic oligonucleotide
gauguuuuagaggaauguu

SEQ ID NO: 2236365 - RNA, 19 nt, Artificial Sequence
  Description of Artificial Sequence: Synthetic oligonucleotide
uggugccaacuccggaggc

SEQ ID NO: 2236366 - RNA, 19 nt, Artificial Sequence
  Description of Artificial Sequence: Synthetic oligonucleotide
ugcaaccaaaaggucuaac

SEQ ID NO: 2236367 - RNA, 19 nt, Artificial Sequence
  Description of Artificial Sequence: Synthetic oligonucleotide
cacagccuucauagcauac

SEQ ID NO: 2236368 - RNA, 19 nt, Artificial Sequence
  Description of Artificial Sequence: Synthetic oligonucleotide
aaacacccgacggaucaau

SEQ ID NO: 2236369 - RNA, 19 nt, Artificial Sequence
  Description of Artificial Sequence: Synthetic oligonucleotide
cuguggaccaucauucgua

SEQ ID NO: 2236370 - RNA, 19 nt, Artificial Sequence
  Description of Artificial Sequence: Synthetic oligonucleotide
uagaguguauaagcgugua

SEQ ID NO: 2236371 - RNA, 19 nt, Artificial Sequence
  Description of Artificial Sequence: Synthetic oligonucleotide
guuagaucuaaaguuggau

SEQ ID NO: 2236372 - RNA, 19 nt, Artificial Sequence
  Description of Artificial Sequence: Synthetic oligonucleotide
ccuuaacuucaucauguac

SEQ ID NO: 2236373 - RNA, 19 nt, Artificial Sequence
  Description of Artificial Sequence: Synthetic oligonucleotide
aaacugucacagaaaugua

SEQ ID NO: 2236374 - RNA, 19 nt, Artificial Sequence
  Description of Artificial Sequence: Synthetic oligonucleotide
cuacaucacagcaagucau

SEQ ID NO: 2236375 - RNA, 19 nt, Artificial Sequence
  Description of Artificial Sequence: Synthetic oligonucleotide
uuggcauauuucucugcuu

SEQ ID NO: 2236376 - RNA, 19 nt, Artificial Sequence
  Description of Artificial Sequence: Synthetic oligonucleotide
augaaacacccgacggauc

SEQ ID NO: 2236377 - RNA, 19 nt, Artificial Sequence
  Description of Artificial Sequence: Synthetic oligonucleotide
ucacagcaagucauuucuu

SEQ ID NO: 2236378 - RNA, 19 nt, Artificial Sequence
  Description of Artificial Sequence: Synthetic oligonucleotide
gagagaacguagaggcuga

SEQ ID NO: 2236379 - RNA, 19 nt, Artificial Sequence
  Description of Artificial Sequence: Synthetic oligonucleotide
caacuucuuuaacuacauc

SEQ ID NO: 2236380 - RNA, 19 nt, Artificial Sequence
  Description of Artificial Sequence: Synthetic oligonucleotide
cauguacuauauaaauuau

SEQ ID NO: 2236381 - RNA, 19 nt, Artificial Sequence
  Description of Artificial Sequence: Synthetic oligonucleotide
ccaaaguuagaucuaaagu

SEQ ID NO: 2236382 - RNA, 19 nt, Artificial Sequence
  Description of Artificial Sequence: Synthetic oligonucleotide
auacccggucccaauggag

SEQ ID NO: 2236383 - RNA, 19 nt, Artificial Sequence
  Description of Artificial Sequence: Synthetic oligonucleotide
gggaauugaaccuaauguu

SEQ ID NO: 2236384 - RNA, 19 nt, Artificial Sequence
  Description of Artificial Sequence: Synthetic oligonucleotide
gagcucuaguucaaaagcu

SEQ ID NO: 2236385 - RNA, 19 nt, Artificial Sequence
  Description of Artificial Sequence: Synthetic oligonucleotide
agagaacguagaggcugac

SEQ ID NO: 2236386 - RNA, 19 nt, Artificial Sequence
  Description of Artificial Sequence: Synthetic oligonucleotide
gccuucauagcauacucaa

SEQ ID NO: 2236387 - RNA, 19 nt, Artificial Sequence
  Description of Artificial Sequence: Synthetic oligonucleotide
ucguuuguuggagccuucu

SEQ ID NO: 2236388 - RNA, 19 nt, Artificial Sequence
  Description of Artificial Sequence: Synthetic oligonucleotide
auagcauacucaacuugaa

SEQ ID NO: 2236389 - RNA, 19 nt, Artificial Sequence
  Description of Artificial Sequence: Synthetic oligonucleotide
cuguagaguguauaagcgu

SEQ ID NO: 2236390 - RNA, 19 nt, Artificial Sequence
  Description of Artificial Sequence: Synthetic oligonucleotide
ccuucuucguaaaguuuag

SEQ ID NO: 2236391 - RNA, 19 nt, Artificial Sequence
  Description of Artificial Sequence: Synthetic oligonucleotide
auucguacuguaagacccu

SEQ ID NO: 2236392 - RNA, 19 nt, Artificial Sequence
  Description of Artificial Sequence: Synthetic oligonucleotide
uagcuguacuacuguuuuc

SEQ ID NO: 2236393 - RNA, 19 nt, Artificial Sequence
  Description of Artificial Sequence: Synthetic oligonucleotide
cgacggaucaaucauauaa

SEQ ID NO: 2236394 - RNA, 19 nt, Artificial Sequence
  Description of Artificial Sequence: Synthetic oligonucleotide
guauaagcguguacauaca

SEQ ID NO: 2236395 - RNA, 19 nt, Artificial Sequence
  Description of Artificial Sequence: Synthetic oligonucleotide
cccuuaugucuuuuggaac

SEQ ID NO: 2236396 - RNA, 19 nt, Artificial Sequence
  Description of Artificial Sequence: Synthetic oligonucleotide
agcucuaguucaaaagcuu

SEQ ID NO: 2236397 - RNA, 19 nt, Artificial Sequence
  Description of Artificial Sequence: Synthetic oligonucleotide
cagacggguguaagcugcc

SEQ ID NO: 2236398 - RNA, 19 nt, Artificial Sequence
  Description of Artificial Sequence: Synthetic oligonucleotide
auauaaagcuguggaccau

SEQ ID NO: 2236399 - RNA, 19 nt, Artificial Sequence
  Description of Artificial Sequence: Synthetic oligonucleotide
cguacuguaagacccuaac

SEQ ID NO: 2236400 - RNA, 19 nt, Artificial Sequence
  Description of Artificial Sequence: Synthetic oligonucleotide
gaacgagcgucugccagca

SEQ ID NO: 2236401 - RNA, 19 nt, Artificial Sequence
  Description of Artificial Sequence: Synthetic oligonucleotide
agucguuuguuggagccuu

SEQ ID NO: 2236402 - RNA, 19 nt, Artificial Sequence
  Description of Artificial Sequence: Synthetic oligonucleotide
gguauuuaugauccauggu

SEQ ID NO: 2236403 - RNA, 19 nt, Artificial Sequence
  Description of Artificial Sequence: Synthetic oligonucleotide
caugucgaucaacauuaaa

SEQ ID NO: 2236404 - RNA, 19 nt, Artificial Sequence
  Description of Artificial Sequence: Synthetic oligonucleotide
uaacuucaucauguacuau

SEQ ID NO: 2236405 - RNA, 19 nt, Artificial Sequence
  Description of Artificial Sequence: Synthetic oligonucleotide
auagccaaaguuagaucua

SEQ ID NO: 2236406 - RNA, 19 nt, Artificial Sequence
  Description of Artificial Sequence: Synthetic oligonucleotide
accaucauucguacuguaa

SEQ ID NO: 2236407 - RNA, 19 nt, Artificial Sequence
  Description of Artificial Sequence: Synthetic oligonucleotide
gagccuucuucguaaaguu

SEQ ID NO: 2236408 - RNA, 19 nt, Artificial Sequence
  Description of Artificial Sequence: Synthetic oligonucleotide
acccagcugagcucuaguu

SEQ ID NO: 2236409 - RNA, 19 nt, Artificial Sequence
  Description of Artificial Sequence: Synthetic oligonucleotide
caacaugucgaucaacauu

SEQ ID NO: 2236410 - RNA, 19 nt, Artificial Sequence
  Description of Artificial Sequence: Synthetic oligonucleotide
agccuucauagcauacuca

SEQ ID NO: 2236411 - RNA, 19 nt, Artificial Sequence
  Description of Artificial Sequence: Synthetic oligonucleotide
cuuuacaucugaucccaau

SEQ ID NO: 2236412 - RNA, 19 nt, Artificial Sequence
  Description of Artificial Sequence: Synthetic oligonucleotide
aacgagcgucugccagcag

SEQ ID NO: 2236413 - RNA, 19 nt, Artificial Sequence
  Description of Artificial Sequence: Synthetic oligonucleotide
cugcgacugccauuccaac

SEQ ID NO: 2236414 - RNA, 19 nt, Artificial Sequence
  Description of Artificial Sequence: Synthetic oligonucleotide
gucguccuuuaguuaguuc

SEQ ID NO: 2236415 - RNA, 19 nt, Artificial Sequence
  Description of Artificial Sequence: Synthetic oligonucleotide
cauacccggucccaaugga

SEQ ID NO: 2236416 - RNA, 19 nt, Artificial Sequence
  Description of Artificial Sequence: Synthetic oligonucleotide
ggaauguuauagccaaagu

SEQ ID NO: 2236417 - RNA, 19 nt, Artificial Sequence
  Description of Artificial Sequence: Synthetic oligonucleotide
ggaauugaaccuaauguuu

SEQ ID NO: 2236418 - RNA, 19 nt, Artificial Sequence
  Description of Artificial Sequence: Synthetic oligonucleotide
guguauaagcguguacaua

SEQ ID NO: 2236419 - RNA, 19 nt, Artificial Sequence
  Description of Artificial Sequence: Synthetic oligonucleotide
cucuugcuaugucugcuaa

SEQ ID NO: 2236420 - RNA, 19 nt, Artificial Sequence
  Description of Artificial Sequence: Synthetic oligonucleotide
cucaacuugaaagacucuu

SEQ ID NO: 2236421 - RNA, 19 nt, Artificial Sequence
  Description of Artificial Sequence: Synthetic oligonucleotide
uggagcucauggugccaac

SEQ ID NO: 2236422 - RNA, 19 nt, Artificial Sequence
  Description of Artificial Sequence: Synthetic oligonucleotide
ugucguccuuuaguuaguu

SEQ ID NO: 2236423 - RNA, 19 nt, Artificial Sequence
  Description of Artificial Sequence: Synthetic oligonucleotide
gccccaauaaccauaugaa

SEQ ID NO: 2236424 - RNA, 19 nt, Artificial Sequence
  Description of Artificial Sequence: Synthetic oligonucleotide
gcaagucauuucuuucauc

SEQ ID NO: 2236425 - RNA, 19 nt, Artificial Sequence
  Description of Artificial Sequence: Synthetic oligonucleotide
ggcugacaggucauacccg

SEQ ID NO: 2236426 - RNA, 19 nt, Artificial Sequence
  Description of Artificial Sequence: Synthetic oligonucleotide
caccaacccagcugagcuc

SEQ ID NO: 2236427 - RNA, 19 nt, Artificial Sequence
  Description of Artificial Sequence: Synthetic oligonucleotide
acucaacuugaaagacucu

SEQ ID NO: 2236428 - RNA, 19 nt, Artificial Sequence
  Description of Artificial Sequence: Synthetic oligonucleotide
acguagaggcugacagguc

SEQ ID NO: 2236429 - RNA, 19 nt, Artificial Sequence
  Description of Artificial Sequence: Synthetic oligonucleotide
guagaguguauaagcgugu

SEQ ID NO: 2236430 - RNA, 19 nt, Artificial Sequence
  Description of Artificial Sequence: Synthetic oligonucleotide
guuggaugcuucuucucuu

SEQ ID NO: 2236431 - RNA, 19 nt, Artificial Sequence
  Description of Artificial Sequence: Synthetic oligonucleotide
gccuucuucguaaaguuua

SEQ ID NO: 2236432 - RNA, 19 nt, Artificial Sequence
  Description of Artificial Sequence: Synthetic oligonucleotide
caacccagcugagcucuag

SEQ ID NO: 2236433 - RNA, 19 nt, Artificial Sequence
  Description of Artificial Sequence: Synthetic oligonucleotide
cacagcaagucauuucuuu

SEQ ID NO: 2236434 - RNA, 19 nt, Artificial Sequence
  Description of Artificial Sequence: Synthetic oligonucleotide
ccuuuaguuaguucaccaa

SEQ ID NO: 2236435 - RNA, 19 nt, Artificial Sequence
  Description of Artificial Sequence: Synthetic oligonucleotide
gcuguacuacuguuuucca

SEQ ID NO: 2236436 - RNA, 19 nt, Artificial Sequence
  Description of Artificial Sequence: Synthetic oligonucleotide
cccagcugagcucuaguuc

SEQ ID NO: 2236437 - RNA, 19 nt, Artificial Sequence
  Description of Artificial Sequence: Synthetic oligonucleotide
gacggguguaagcugccau

SEQ ID NO: 2236438 - RNA, 19 nt, Artificial Sequence
  Description of Artificial Sequence: Synthetic oligonucleotide
ggagccuucuucguaaagu

SEQ ID NO: 2236439 - RNA, 19 nt, Artificial Sequence
  Description of Artificial Sequence: Synthetic oligonucleotide
gaaacacccgacggaucaa

SEQ ID NO: 2236440 - RNA, 19 nt, Artificial Sequence
  Description of Artificial Sequence: Synthetic oligonucleotide
augucguccuuuaguuagu

SEQ ID NO: 2236441 - RNA, 19 nt, Artificial Sequence
  Description of Artificial Sequence: Synthetic oligonucleotide
cguagaggcugacagguca

SEQ ID NO: 2236442 - RNA, 19 nt, Artificial Sequence
  Description of Artificial Sequence: Synthetic oligonucleotide
cuccggaggccgcgcagag

SEQ ID NO: 2236443 - RNA, 19 nt, Artificial Sequence
  Description of Artificial Sequence: Synthetic oligonucleotide
augauccaugguacuagua

SEQ ID NO: 2236444 - RNA, 19 nt, Artificial Sequence
  Description of Artificial Sequence: Synthetic oligonucleotide
gaggaauguuauagccaaa

SEQ ID NO: 2236445 - RNA, 19 nt, Artificial Sequence
  Description of Artificial Sequence: Synthetic oligonucleotide
ccccaaacacaacaccauc

SEQ ID NO: 2236446 - RNA, 19 nt, Artificial Sequence
  Description of Artificial Sequence: Synthetic oligonucleotide
gcuaaggaacgagcgucug

SEQ ID NO: 2236447 - RNA, 19 nt, Artificial Sequence
  Description of Artificial Sequence: Synthetic oligonucleotide
cguguacauacauggccac

SEQ ID NO: 2236448 - RNA, 19 nt, Artificial Sequence
  Description of Artificial Sequence: Synthetic oligonucleotide
gagcgucugccagcagacc

SEQ ID NO: 2236449 - RNA, 19 nt, Artificial Sequence
  Description of Artificial Sequence: Synthetic oligonucleotide
agccuucuucguaaaguuu

SEQ ID NO: 2236450 - RNA, 19 nt, Artificial Sequence
  Description of Artificial Sequence: Synthetic oligonucleotide
agacggguguaagcugcca

SEQ ID NO: 2236451 - RNA, 19 nt, Artificial Sequence
  Description of Artificial Sequence: Synthetic oligonucleotide
guaaaacagaagagaugau

SEQ ID NO: 2236452 - RNA, 19 nt, Artificial Sequence
  Description of Artificial Sequence: Synthetic oligonucleotide
ccccaauaaccauaugaaa

SEQ ID NO: 2236453 - RNA, 19 nt, Artificial Sequence
  Description of Artificial Sequence: Synthetic oligonucleotide
gaggccgcgcagagcuucc

SEQ ID NO: 2236454 - RNA, 19 nt, Artificial Sequence
  Description of Artificial Sequence: Synthetic oligonucleotide
uccggaggccgcgcagagc

SEQ ID NO: 2236455 - RNA, 19 nt, Artificial Sequence
  Description of Artificial Sequence: Synthetic oligonucleotide
cgagcgucugccagcagac

SEQ ID NO: 2236456 - RNA, 19 nt, Artificial Sequence
  Description of Artificial Sequence: Synthetic oligonucleotide
gaccugcgacugccauucc

SEQ ID NO: 2236457 - RNA, 19 nt, Artificial Sequence
  Description of Artificial Sequence: Synthetic oligonucleotide
gccaacuccggaggccgcg

SEQ ID NO: 2236458 - RNA, 19 nt, Artificial Sequence
  Description of Artificial Sequence: Synthetic oligonucleotide
ggucccaauggagcucaug

SEQ ID NO: 2236459 - RNA, 19 nt, Artificial Sequence
  Description of Artificial Sequence: Synthetic oligonucleotide
ccaauagcuguacuacugu

SEQ ID NO: 2236460 - RNA, 19 nt, Artificial Sequence
  Description of Artificial Sequence: Synthetic oligonucleotide
guguacauacauggccacu

SEQ ID NO: 2236461 - RNA, 19 nt, Artificial Sequence
  Description of Artificial Sequence: Synthetic oligonucleotide
caggucauacccgguccca

SEQ ID NO: 2236462 - RNA, 19 nt, Artificial Sequence
  Description of Artificial Sequence: Synthetic oligonucleotide
gcaacuucuuuaacuacau

SEQ ID NO: 2236463 - RNA, 19 nt, Artificial Sequence
  Description of Artificial Sequence: Synthetic oligonucleotide
gcgucugccagcagaccug

SEQ ID NO: 2236464 - RNA, 19 nt, Artificial Sequence
  Description of Artificial Sequence: Synthetic oligonucleotide
ccacucugucugcaagaug

SEQ ID NO: 2236465 - RNA, 19 nt, Artificial Sequence
  Description of Artificial Sequence: Synthetic oligonucleotide
acccgacggaucaaucaua

SEQ ID NO: 2236466 - RNA, 19 nt, Artificial Sequence
  Description of Artificial Sequence: Synthetic oligonucleotide
guggaccaucauucguacu

SEQ ID NO: 2236467 - RNA, 19 nt, Artificial Sequence
  Description of Artificial Sequence: Synthetic oligonucleotide
cugacaggucauacccggu

SEQ ID NO: 2236468 - RNA, 19 nt, Artificial Sequence
  Description of Artificial Sequence: Synthetic oligonucleotide
guagaggcugacaggucau

SEQ ID NO: 2236469 - RNA, 19 nt, Artificial Sequence
  Description of Artificial Sequence: Synthetic oligonucleotide
cagccccaauaaccauaug

SEQ ID NO: 2236470 - RNA, 19 nt, Artificial Sequence
  Description of Artificial Sequence: Synthetic oligonucleotide
caccaucuuuacaucugau

SEQ ID NO: 2236471 - RNA, 19 nt, Artificial Sequence
  Description of Artificial Sequence: Synthetic oligonucleotide
gcaagauguuuuagaggaa

SEQ ID NO: 2236472 - RNA, 19 nt, Artificial Sequence
  Description of Artificial Sequence: Synthetic oligonucleotide
ggaccaucauucguacugu

SEQ ID NO: 2236473 - RNA, 19 nt, Artificial Sequence
  Description of Artificial Sequence: Synthetic oligonucleotide
gccauuccaacaugucgau

SEQ ID NO: 2236474 - RNA, 19 nt, Artificial Sequence
  Description of Artificial Sequence: Synthetic oligonucleotide
ggguguaagcugccaugua

SEQ ID NO: 2236475 - RNA, 19 nt, Artificial Sequence
  Description of Artificial Sequence: Synthetic oligonucleotide
ccggaggccgcgcagagcu

SEQ ID NO: 2236476 - RNA, 19 nt, Artificial Sequence
  Description of Artificial Sequence: Synthetic oligonucleotide
ccaacuccggaggccgcgc

SEQ ID NO: 2236477 - RNA, 19 nt, Artificial Sequence
  Description of Artificial Sequence: Synthetic oligonucleotide
cccgacggaucaaucauau

SEQ ID NO: 2236478 - RNA, 19 nt, Artificial Sequence
  Description of Artificial Sequence: Synthetic oligonucleotide
cagaccugcgacugccauu

SEQ ID NO: 2236479 - RNA, 19 nt, Artificial Sequence
  Description of Artificial Sequence: Synthetic oligonucleotide
gcagaccugcgacugccau

SEQ ID NO: 2236480 - RNA, 19 nt, Artificial Sequence
  Description of Artificial Sequence: Synthetic oligonucleotide
aggccgcgcagagcuucca

SEQ ID NO: 2236481 - RNA, 19 nt, Artificial Sequence
  Description of Artificial Sequence: Synthetic oligonucleotide
gccacucugucugcaagau

SEQ ID NO: 2236482 - RNA, 19 nt, Artificial Sequence
  Description of Artificial Sequence: Synthetic oligonucleotide
ccgacggaucaaucauaua

SEQ ID NO: 2236483 - RNA, 19 nt, Artificial Sequence
  Description of Artificial Sequence: Synthetic oligonucleotide
cggguguaagcugccaugu

SEQ ID NO: 2236484 - RNA, 19 nt, Artificial Sequence
  Description of Artificial Sequence: Synthetic oligonucleotide
cguuuguuggagccuucuu

SEQ ID NO: 2236485 - RNA, 19 nt, Artificial Sequence
  Description of Artificial Sequence: Synthetic oligonucleotide
ccaacccagcugagcucua

SEQ ID NO: 2236486 - RNA, 19 nt, Artificial Sequence
  Description of Artificial Sequence: Synthetic oligonucleotide
cggaggccgcgcagagcuu

SEQ ID NO: 2236487 - RNA, 19 nt, Artificial Sequence
  Description of Artificial Sequence: Synthetic oligonucleotide
aaggaaucagaacagaggc

SEQ ID NO: 2236488 - RNA, 19 nt, Artificial Sequence
  Description of Artificial Sequence: Synthetic oligonucleotide
aaauaaagcauaaacaagg

SEQ ID NO: 2236489 - RNA, 19 nt, Artificial Sequence
  Description of Artificial Sequence: Synthetic oligonucleotide
aagcacaccagacuuaccc

SEQ ID NO: 2236490 - RNA, 19 nt, Artificial Sequence
  Description of Artificial Sequence: Synthetic oligonucleotide
uaaagcauaaacaaggaaa

SEQ ID NO: 2236491 - RNA, 19 nt, Artificial Sequence
  Description of Artificial Sequence: Synthetic oligonucleotide
uacaagauuaacaauuucc

SEQ ID NO: 2236492 - RNA, 19 nt, Artificial Sequence
  Description of Artificial Sequence: Synthetic oligonucleotide
agauuaacaauuuccacac

SEQ ID NO: 2236493 - RNA, 19 nt, Artificial Sequence
  Description of Artificial Sequence: Synthetic oligonucleotide
auaguugcugcacaaaagc

SEQ ID NO: 2236494 - RNA, 19 nt, Artificial Sequence
  Description of Artificial Sequence: Synthetic oligonucleotide
agaaacguuucccugaggc

SEQ ID NO: 2236495 - RNA, 19 nt, Artificial Sequence
  Description of Artificial Sequence: Synthetic oligonucleotide
aauauauguaauaaaagga

SEQ ID NO: 2236496 - RNA, 19 nt, Artificial Sequence
  Description of Artificial Sequence: Synthetic oligonucleotide
aagagagcuacugaguucc

SEQ ID NO: 2236497 - RNA, 19 nt, Artificial Sequence
  Description of Artificial Sequence: Synthetic oligonucleotide
uuauacaagauuaacaauu

SEQ ID NO: 2236498 - RNA, 19 nt, Artificial Sequence
  Description of Artificial Sequence: Synthetic oligonucleotide
aaguccauaugaaauagcc

SEQ ID NO: 2236499 - RNA, 19 nt, Artificial Sequence
  Description of Artificial Sequence: Synthetic oligonucleotide
aaaaggauaaggaauccac

SEQ ID NO: 2236500 - RNA, 19 nt, Artificial Sequence
  Description of Artificial Sequence: Synthetic oligonucleotide
aacaauuuccacaccaccc

SEQ ID NO: 2236501 - RNA, 19 nt, Artificial Sequence
  Description of Artificial Sequence: Synthetic oligonucleotide
auaugaaauagccacuggg

SEQ ID NO: 2236502 - RNA, 19 nt, Artificial Sequence
  Description of Artificial Sequence: Synthetic oligonucleotide
auaaggaauccacauggcc

SEQ ID NO: 2236503 - RNA, 19 nt, Artificial Sequence
  Description of Artificial Sequence: Synthetic oligonucleotide
aagaaaucucauaaacucc

SEQ ID NO: 2236504 - RNA, 19 nt, Artificial Sequence
  Description of Artificial Sequence: Synthetic oligonucleotide
uacaggauaggcaagggcc

SEQ ID NO: 2236505 - RNA, 19 nt, Artificial Sequence
  Description of Artificial Sequence: Synthetic oligonucleotide
acaauuuccacaccacccc

SEQ ID NO: 2236506 - RNA, 19 nt, Artificial Sequence
  Description of Artificial Sequence: Synthetic oligonucleotide
cuaacaccaacauaguugc

SEQ ID NO: 2236507 - RNA, 19 nt, Artificial Sequence
  Description of Artificial Sequence: Synthetic oligonucleotide
aaacuggaaauccaaguug

SEQ ID NO: 2236508 - RNA, 19 nt, Artificial Sequence
  Description of Artificial Sequence: Synthetic oligonucleotide
gguucuuccauacaaaagg

SEQ ID NO: 2236509 - RNA, 19 nt, Artificial Sequence
  Description of Artificial Sequence: Synthetic oligonucleotide
aacuggaaauccaaguugc

SEQ ID NO: 2236510 - RNA, 19 nt, Artificial Sequence
  Description of Artificial Sequence: Synthetic oligonucleotide
agaaaucucauaaacuccc

SEQ ID NO: 2236511 - RNA, 19 nt, Artificial Sequence
  Description of Artificial Sequence: Synthetic oligonucleotide
aaaggaaucagaacagagg

SEQ ID NO: 2236512 - RNA, 19 nt, Artificial Sequence
  Description of Artificial Sequence: Synthetic oligonucleotide
acugacaaaagucuugcuc

SEQ ID NO: 2236513 - RNA, 19 nt, Artificial Sequence
  Description of Artificial Sequence: Synthetic oligonucleotide
aaugugguagccuagugau

SEQ ID NO: 2236514 - RNA, 19 nt, Artificial Sequence
  Description of Artificial Sequence: Synthetic oligonucleotide
aaacaauuuauuguuguug

SEQ ID NO: 2236515 - RNA, 19 nt, Artificial Sequence
  Description of Artificial Sequence: Synthetic oligonucleotide
aaaagcacaccagacuuac

SEQ ID NO: 2236516 - RNA, 19 nt, Artificial Sequence
  Description of Artificial Sequence: Synthetic oligonucleotide
ggauaaggaauccacaugg

SEQ ID NO: 2236517 - RNA, 19 nt, Artificial Sequence
  Description of Artificial Sequence: Synthetic oligonucleotide
cuugcucccaguaaggagg

SEQ ID NO: 2236518 - RNA, 19 nt, Artificial Sequence
  Description of Artificial Sequence: Synthetic oligonucleotide
uaugaaauagccacugggu

SEQ ID NO: 2236519 - RNA, 19 nt, Artificial Sequence
  Description of Artificial Sequence: Synthetic oligonucleotide
ugugguagccuagugaugg

SEQ ID NO: 2236520 - RNA, 19 nt, Artificial Sequence
  Description of Artificial Sequence: Synthetic oligonucleotide
uuucccugaggcaagaggc

SEQ ID NO: 2236521 - RNA, 19 nt, Artificial Sequence
  Description of Artificial Sequence: Synthetic oligonucleotide
auguaauaaaaggauaagg

SEQ ID NO: 2236522 - RNA, 19 nt, Artificial Sequence
  Description of Artificial Sequence: Synthetic oligonucleotide
aagucuugcucccaguaag

SEQ ID NO: 2236523 - RNA, 19 nt, Artificial Sequence
  Description of Artificial Sequence: Synthetic oligonucleotide
aaagaacugacaaaagucu

SEQ ID NO: 2236524 - RNA, 19 nt, Artificial Sequence
  Description of Artificial Sequence: Synthetic oligonucleotide
aaagaaacguuucccugag

SEQ ID NO: 2236525 - RNA, 19 nt, Artificial Sequence
  Description of Artificial Sequence: Synthetic oligonucleotide
uagauuuacaggauaggca

SEQ ID NO: 2236526 - RNA, 19 nt, Artificial Sequence
  Description of Artificial Sequence: Synthetic oligonucleotide
acaauugguucuuccauac

SEQ ID NO: 2236527 - RNA, 19 nt, Artificial Sequence
  Description of Artificial Sequence: Synthetic oligonucleotide
acacccaccaaagaaaccc

SEQ ID NO: 2236528 - RNA, 19 nt, Artificial Sequence
  Description of Artificial Sequence: Synthetic oligonucleotide
aagaggcaucgcuagauuc

SEQ ID NO: 2236529 - RNA, 19 nt, Artificial Sequence
  Description of Artificial Sequence: Synthetic oligonucleotide
uauauguaauaaaaggaua

SEQ ID NO: 2236530 - RNA, 19 nt, Artificial Sequence
  Description of Artificial Sequence: Synthetic oligonucleotide
guccauaugaaauagccac

SEQ ID NO: 2236531 - RNA, 19 nt, Artificial Sequence
  Description of Artificial Sequence: Synthetic oligonucleotide
gaagggagcaccaaagggg

SEQ ID NO: 2236532 - RNA, 19 nt, Artificial Sequence
  Description of Artificial Sequence: Synthetic oligonucleotide
uuagagcucagcuauacaa

SEQ ID NO: 2236533 - RNA, 19 nt, Artificial Sequence
  Description of Artificial Sequence: Synthetic oligonucleotide
cauaaacuccccaucaaag

SEQ ID NO: 2236534 - RNA, 19 nt, Artificial Sequence
  Description of Artificial Sequence: Synthetic oligonucleotide
ugguagauuuacaggauag

SEQ ID NO: 2236535 - RNA, 19 nt, Artificial Sequence
  Description of Artificial Sequence: Synthetic oligonucleotide
uuguuugacgggcagagga

SEQ ID NO: 2236536 - RNA, 19 nt, Artificial Sequence
  Description of Artificial Sequence: Synthetic oligonucleotide
uauuguuguugcuuuauac

SEQ ID NO: 2236537 - RNA, 19 nt, Artificial Sequence
  Description of Artificial Sequence: Synthetic oligonucleotide
uaagaaacggccacgccug

SEQ ID NO: 2236538 - RNA, 19 nt, Artificial Sequence
  Description of Artificial Sequence: Synthetic oligonucleotide
ucucauaaacuccccauca

SEQ ID NO: 2236539 - RNA, 19 nt, Artificial Sequence
  Description of Artificial Sequence: Synthetic oligonucleotide
agagcuacugaguuccaac

SEQ ID NO: 2236540 - RNA, 19 nt, Artificial Sequence
  Description of Artificial Sequence: Synthetic oligonucleotide
uguuguugcuuuauacaag

SEQ ID NO: 2236541 - RNA, 19 nt, Artificial Sequence
  Description of Artificial Sequence: Synthetic oligonucleotide
guaauaaaaggauaaggaa

SEQ ID NO: 2236542 - RNA, 19 nt, Artificial Sequence
  Description of Artificial Sequence: Synthetic oligonucleotide
ucucacaccuaagaaacgg

SEQ ID NO: 2236543 - RNA, 19 nt, Artificial Sequence
  Description of Artificial Sequence: Synthetic oligonucleotide
aaucucauaaacuccccau

SEQ ID NO: 2236544 - RNA, 19 nt, Artificial Sequence
  Description of Artificial Sequence: Synthetic oligonucleotide
guaaacaaacuggaaaucc

SEQ ID NO: 2236545 - RNA, 19 nt, Artificial Sequence
  Description of Artificial Sequence: Synthetic oligonucleotide
aaaagccccucucacaccu

SEQ ID NO: 2236546 - RNA, 19 nt, Artificial Sequence
  Description of Artificial Sequence: Synthetic oligonucleotide
uaaacuccccaucaaagaa

SEQ ID NO: 2236547 - RNA, 19 nt, Artificial Sequence
  Description of Artificial Sequence: Synthetic oligonucleotide
uauacaagauuaacaauuu

SEQ ID NO: 2236548 - RNA, 19 nt, Artificial Sequence
  Description of Artificial Sequence: Synthetic oligonucleotide
aaaucucauaaacucccca

SEQ ID NO: 2236549 - RNA, 19 nt, Artificial Sequence
  Description of Artificial Sequence: Synthetic oligonucleotide
uuugcuggcggccucagcu

SEQ ID NO: 2236550 - RNA, 19 nt, Artificial Sequence
  Description of Artificial Sequence: Synthetic oligonucleotide
agauuccuaaagaugaggg

SEQ ID NO: 2236551 - RNA, 19 nt, Artificial Sequence
  Description of Artificial Sequence: Synthetic oligonucleotide
uuguuguugcuuuauacaa

SEQ ID NO: 2236552 - RNA, 19 nt, Artificial Sequence
  Description of Artificial Sequence: Synthetic oligonucleotide
auuuacaggauaggcaagg

SEQ ID NO: 2236553 - RNA, 19 nt, Artificial Sequence
  Description of Artificial Sequence: Synthetic oligonucleotide
gauuccuaaagaugagggc

SEQ ID NO: 2236554 - RNA, 19 nt, Artificial Sequence
  Description of Artificial Sequence: Synthetic oligonucleotide
auacaagauuaacaauuuc

SEQ ID NO: 2236555 - RNA, 19 nt, Artificial Sequence
  Description of Artificial Sequence: Synthetic oligonucleotide
auuccuaaagaugagggca

SEQ ID NO: 2236556 - RNA, 19 nt, Artificial Sequence
  Description of Artificial Sequence: Synthetic oligonucleotide
uggaaauccaaguugcaaa

SEQ ID NO: 2236557 - RNA, 19 nt, Artificial Sequence
  Description of Artificial Sequence: Synthetic oligonucleotide
aacccuugaggcaggaacc

SEQ ID NO: 2236558 - RNA, 19 nt, Artificial Sequence
  Description of Artificial Sequence: Synthetic oligonucleotide
ucacaccuaagaaacggcc

SEQ ID NO: 2236559 - RNA, 19 nt, Artificial Sequence
  Description of Artificial Sequence: Synthetic oligonucleotide
aacuccccaucaaagaaac

SEQ ID NO: 2236560 - RNA, 19 nt, Artificial Sequence
  Description of Artificial Sequence: Synthetic oligonucleotide
guagauuuacaggauaggc

SEQ ID NO: 2236561 - RNA, 19 nt, Artificial Sequence
  Description of Artificial Sequence: Synthetic oligonucleotide
auaaacuccccaucaaaga

SEQ ID NO: 2236562 - RNA, 19 nt, Artificial Sequence
  Description of Artificial Sequence: Synthetic oligonucleotide
uagauuccuaaagaugagg

SEQ ID NO: 2236563 - RNA, 19 nt, Artificial Sequence
  Description of Artificial Sequence: Synthetic oligonucleotide
aucucauaaacuccccauc

SEQ ID NO: 2236564 - RNA, 19 nt, Artificial Sequence
  Description of Artificial Sequence: Synthetic oligonucleotide
cauuaccacaaauaaagca

SEQ ID NO: 2236565 - RNA, 19 nt, Artificial Sequence
  Description of Artificial Sequence: Synthetic oligonucleotide
aaauguugucuggcuaggc

SEQ ID NO: 2236566 - RNA, 19 nt, Artificial Sequence
  Description of Artificial Sequence: Synthetic oligonucleotide
aaacccuugcaucccacug

SEQ ID NO: 2236567 - RNA, 19 nt, Artificial Sequence
  Description of Artificial Sequence: Synthetic oligonucleotide
uaccuccacaggaagagag

SEQ ID NO: 2236568 - RNA, 19 nt, Artificial Sequence
  Description of Artificial Sequence: Synthetic oligonucleotide
auauguaauaaaaggauaa

SEQ ID NO: 2236569 - RNA, 19 nt, Artificial Sequence
  Description of Artificial Sequence: Synthetic oligonucleotide
acaagauuaacaauuucca

SEQ ID NO: 2236570 - RNA, 19 nt, Artificial Sequence
  Description of Artificial Sequence: Synthetic oligonucleotide
cauaguugcugcacaaaag

SEQ ID NO: 2236571 - RNA, 19 nt, Artificial Sequence
  Description of Artificial Sequence: Synthetic oligonucleotide
uuacacccaccaaagaaac

SEQ ID NO: 2236572 - RNA, 19 nt, Artificial Sequence
  Description of Artificial Sequence: Synthetic oligonucleotide
uccacauggcccaauguga

SEQ ID NO: 2236573 - RNA, 19 nt, Artificial Sequence
  Description of Artificial Sequence: Synthetic oligonucleotide
aucgcuagauuccuaaaga

SEQ ID NO: 2236574 - RNA, 19 nt, Artificial Sequence
  Description of Artificial Sequence: Synthetic oligonucleotide
acaaaagucuugcucccag

SEQ ID NO: 2236575 - RNA, 19 nt, Artificial Sequence
  Description of Artificial Sequence: Synthetic oligonucleotide
uguuugacgggcagaggag

SEQ ID NO: 2236576 - RNA, 19 nt, Artificial Sequence
  Description of Artificial Sequence: Synthetic oligonucleotide
aacaauugguucuuccaua

SEQ ID NO: 2236577 - RNA, 19 nt, Artificial Sequence
  Description of Artificial Sequence: Synthetic oligonucleotide
agaggcaucgcuagauucc

SEQ ID NO: 2236578 - RNA, 19 nt, Artificial Sequence
  Description of Artificial Sequence: Synthetic oligonucleotide
uuaccacaaauaaagcaua

SEQ ID NO: 2236579 - RNA, 19 nt, Artificial Sequence
  Description of Artificial Sequence: Synthetic oligonucleotide
aaacguuucccugaggcaa

SEQ ID NO: 2236580 - RNA, 19 nt, Artificial Sequence
  Description of Artificial Sequence: Synthetic oligonucleotide
uuuacaggauaggcaaggg

SEQ ID NO: 2236581 - RNA, 19 nt, Artificial Sequence
  Description of Artificial Sequence: Synthetic oligonucleotide
auaaagcauaaacaaggaa

SEQ ID NO: 2236582 - RNA, 19 nt, Artificial Sequence
  Description of Artificial Sequence: Synthetic oligonucleotide
aguaaggaggaaagguggc

SEQ ID NO: 2236583 - RNA, 19 nt, Artificial Sequence
  Description of Artificial Sequence: Synthetic oligonucleotide
accaaagaaacccuugcau

SEQ ID NO: 2236584 - RNA, 19 nt, Artificial Sequence
  Description of Artificial Sequence: Synthetic oligonucleotide
aggauaaggaauccacaug

SEQ ID NO: 2236585 - RNA, 19 nt, Artificial Sequence
  Description of Artificial Sequence: Synthetic oligonucleotide
aaaggauaaggaauccaca

SEQ ID NO: 2236586 - RNA, 19 nt, Artificial Sequence
  Description of Artificial Sequence: Synthetic oligonucleotide
cauaugaaauagccacugg

SEQ ID NO: 2236587 - RNA, 19 nt, Artificial Sequence
  Description of Artificial Sequence: Synthetic oligonucleotide
uccauaugaaauagccacu

SEQ ID NO: 2236588 - RNA, 19 nt, Artificial Sequence
  Description of Artificial Sequence: Synthetic oligonucleotide
ugacaaaagucuugcuccc

SEQ ID NO: 2236589 - RNA, 19 nt, Artificial Sequence
  Description of Artificial Sequence: Synthetic oligonucleotide
accagacuuacccugggug

SEQ ID NO: 2236590 - RNA, 19 nt, Artificial Sequence
  Description of Artificial Sequence: Synthetic oligonucleotide
caucgcuagauuccuaaag

SEQ ID NO: 2236591 - RNA, 19 nt, Artificial Sequence
  Description of Artificial Sequence: Synthetic oligonucleotide
gagcuacugaguuccaacc

SEQ ID NO: 2236592 - RNA, 19 nt, Artificial Sequence
  Description of Artificial Sequence: Synthetic oligonucleotide
ucacucuuucauuaccaca

SEQ ID NO: 2236593 - RNA, 19 nt, Artificial Sequence
  Description of Artificial Sequence: Synthetic oligonucleotide
ugcuuuauacaagauuaac

SEQ ID NO: 2236594 - RNA, 19 nt, Artificial Sequence
  Description of Artificial Sequence: Synthetic oligonucleotide
uuugacgggcagaggagcc

SEQ ID NO: 2236595 - RNA, 19 nt, Artificial Sequence
  Description of Artificial Sequence: Synthetic oligonucleotide
ccaaugugaaaacaauugg

SEQ ID NO: 2236596 - RNA, 19 nt, Artificial Sequence
  Description of Artificial Sequence: Synthetic oligonucleotide
accaacauaguugcugcac

SEQ ID NO: 2236597 - RNA, 19 nt, Artificial Sequence
  Description of Artificial Sequence: Synthetic oligonucleotide
aggaaccaaaagcacacca

SEQ ID NO: 2236598 - RNA, 19 nt, Artificial Sequence
  Description of Artificial Sequence: Synthetic oligonucleotide
uguaaacaaacuggaaauc

SEQ ID NO: 2236599 - RNA, 19 nt, Artificial Sequence
  Description of Artificial Sequence: Synthetic oligonucleotide
aaaccucaaaacaauuuau

SEQ ID NO: 2236600 - RNA, 19 nt, Artificial Sequence
  Description of Artificial Sequence: Synthetic oligonucleotide
cuagauuccuaaagaugag

SEQ ID NO: 2236601 - RNA, 19 nt, Artificial Sequence
  Description of Artificial Sequence: Synthetic oligonucleotide
ccuugcaucccacugagcg

SEQ ID NO: 2236602 - RNA, 19 nt, Artificial Sequence
  Description of Artificial Sequence: Synthetic oligonucleotide
uugcuacuaccuaagacua

SEQ ID NO: 2236603 - RNA, 19 nt, Artificial Sequence
  Description of Artificial Sequence: Synthetic oligonucleotide
uguucuagcugcacacgca

SEQ ID NO: 2236604 - RNA, 19 nt, Artificial Sequence
  Description of Artificial Sequence: Synthetic oligonucleotide
ucaaugugguagccuagug

SEQ ID NO: 2236605 - RNA, 19 nt, Artificial Sequence
  Description of Artificial Sequence: Synthetic oligonucleotide
caacccuugaggcaggaac

SEQ ID NO: 2236606 - RNA, 19 nt, Artificial Sequence
  Description of Artificial Sequence: Synthetic oligonucleotide
auucagagggcugaucauc

SEQ ID NO: 2236607 - RNA, 19 nt, Artificial Sequence
  Description of Artificial Sequence: Synthetic oligonucleotide
aagaaacguuucccugagg

SEQ ID NO: 2236608 - RNA, 19 nt, Artificial Sequence
  Description of Artificial Sequence: Synthetic oligonucleotide
acaggauaggcaagggccc

SEQ ID NO: 2236609 - RNA, 19 nt, Artificial Sequence
  Description of Artificial Sequence: Synthetic oligonucleotide
ucagaacagaggccggacc

SEQ ID NO: 2236610 - RNA, 19 nt, Artificial Sequence
  Description of Artificial Sequence: Synthetic oligonucleotide
guagccuagugauggaagc

SEQ ID NO: 2236611 - RNA, 19 nt, Artificial Sequence
  Description of Artificial Sequence: Synthetic oligonucleotide
uccacaggaagagagcuac

SEQ ID NO: 2236612 - RNA, 19 nt, Artificial Sequence
  Description of Artificial Sequence: Synthetic oligonucleotide
uguuuaagucacucacucu

SEQ ID NO: 2236613 - RNA, 19 nt, Artificial Sequence
  Description of Artificial Sequence: Synthetic oligonucleotide
uagagcucagcuauacaaa

SEQ ID NO: 2236614 - RNA, 19 nt, Artificial Sequence
  Description of Artificial Sequence: Synthetic oligonucleotide
aacccuugcaucccacuga

SEQ ID NO: 2236615 - RNA, 19 nt, Artificial Sequence
  Description of Artificial Sequence: Synthetic oligonucleotide
guugcugcacaaaagcccc

SEQ ID NO: 2236616 - RNA, 19 nt, Artificial Sequence
  Description of Artificial Sequence: Synthetic oligonucleotide
gcuagauuccuaaagauga

SEQ ID NO: 2236617 - RNA, 19 nt, Artificial Sequence
  Description of Artificial Sequence: Synthetic oligonucleotide
cuuacacccaccaaagaaa

SEQ ID NO: 2236618 - RNA, 19 nt, Artificial Sequence
  Description of Artificial Sequence: Synthetic oligonucleotide
aggaaucagaacagaggcc

SEQ ID NO: 2236619 - RNA, 19 nt, Artificial Sequence
  Description of Artificial Sequence: Synthetic oligonucleotide
uuuauuguuguugcuuuau

SEQ ID NO: 2236620 - RNA, 19 nt, Artificial Sequence
  Description of Artificial Sequence: Synthetic oligonucleotide
cccaaugugaaaacaauug

SEQ ID NO: 2236621 - RNA, 19 nt, Artificial Sequence
  Description of Artificial Sequence: Synthetic oligonucleotide
cacugggucaaugugguag

SEQ ID NO: 2236622 - RNA, 19 nt, Artificial Sequence
  Description of Artificial Sequence: Synthetic oligonucleotide
gauuaacaauuuccacacc

SEQ ID NO: 2236623 - RNA, 19 nt, Artificial Sequence
  Description of Artificial Sequence: Synthetic oligonucleotide
cugguuaagugcucagagc

SEQ ID NO: 2236624 - RNA, 19 nt, Artificial Sequence
  Description of Artificial Sequence: Synthetic oligonucleotide
uccuguucuagcugcacac

SEQ ID NO: 2236625 - RNA, 19 nt, Artificial Sequence
  Description of Artificial Sequence: Synthetic oligonucleotide
ugugguagauuuacaggau

SEQ ID NO: 2236626 - RNA, 19 nt, Artificial Sequence
  Description of Artificial Sequence: Synthetic oligonucleotide
agaacugacaaaagucuug

SEQ ID NO: 2236627 - RNA, 19 nt, Artificial Sequence
  Description of Artificial Sequence: Synthetic oligonucleotide
gauaaggaauccacauggc

SEQ ID NO: 2236628 - RNA, 19 nt, Artificial Sequence
  Description of Artificial Sequence: Synthetic oligonucleotide
cucacaccuaagaaacggc

SEQ ID NO: 2236629 - RNA, 19 nt, Artificial Sequence
  Description of Artificial Sequence: Synthetic oligonucleotide
agagcucagcuauacaaau

SEQ ID NO: 2236630 - RNA, 19 nt, Artificial Sequence
  Description of Artificial Sequence: Synthetic oligonucleotide
caaguccauaugaaauagc

SEQ ID NO: 2236631 - RNA, 19 nt, Artificial Sequence
  Description of Artificial Sequence: Synthetic oligonucleotide
uuuaagucacucacucuuu

SEQ ID NO: 2236632 - RNA, 19 nt, Artificial Sequence
  Description of Artificial Sequence: Synthetic oligonucleotide
uuauuguuguugcuuuaua

SEQ ID NO: 2236633 - RNA, 19 nt, Artificial Sequence
  Description of Artificial Sequence: Synthetic oligonucleotide
uugcuuuauacaagauuaa

SEQ ID NO: 2236634 - RNA, 19 nt, Artificial Sequence
  Description of Artificial Sequence: Synthetic oligonucleotide
uuccuaaagaugagggcau

SEQ ID NO: 2236635 - RNA, 19 nt, Artificial Sequence
  Description of Artificial Sequence: Synthetic oligonucleotide
aguuccaacccuugaggca

SEQ ID NO: 2236636 - RNA, 19 nt, Artificial Sequence
  Description of Artificial Sequence: Synthetic oligonucleotide
gaagagagcuacugaguuc

SEQ ID NO: 2236637 - RNA, 19 nt, Artificial Sequence
  Description of Artificial Sequence: Synthetic oligonucleotide
auaggcaagggcccucaag

SEQ ID NO: 2236638 - RNA, 19 nt, Artificial Sequence
  Description of Artificial Sequence: Synthetic oligonucleotide
cuugcaucccacugagcgc

SEQ ID NO: 2236639 - RNA, 19 nt, Artificial Sequence
  Description of Artificial Sequence: Synthetic oligonucleotide
cuguucuagcugcacacgc

SEQ ID NO: 2236640 - RNA, 19 nt, Artificial Sequence
  Description of Artificial Sequence: Synthetic oligonucleotide
gaaacguuucccugaggca

SEQ ID NO: 2236641 - RNA, 19 nt, Artificial Sequence
  Description of Artificial Sequence: Synthetic oligonucleotide
aagaaacggccacgccugg

SEQ ID NO: 2236642 - RNA, 19 nt, Artificial Sequence
  Description of Artificial Sequence: Synthetic oligonucleotide
caaaacaauuuauuguugu

SEQ ID NO: 2236643 - RNA, 19 nt, Artificial Sequence
  Description of Artificial Sequence: Synthetic oligonucleotide
aagggagcaccaaaggggu

SEQ ID NO: 2236644 - RNA, 19 nt, Artificial Sequence
  Description of Artificial Sequence: Synthetic oligonucleotide
aaagcacaccagacuuacc

SEQ ID NO: 2236645 - RNA, 19 nt, Artificial Sequence
  Description of Artificial Sequence: Synthetic oligonucleotide
guuuaagucacucacucuu

SEQ ID NO: 2236646 - RNA, 19 nt, Artificial Sequence
  Description of Artificial Sequence: Synthetic oligonucleotide
ucgcuagauuccuaaagau

SEQ ID NO: 2236647 - RNA, 19 nt, Artificial Sequence
  Description of Artificial Sequence: Synthetic oligonucleotide
cacaccagacuuacccugg

SEQ ID NO: 2236648 - RNA, 19 nt, Artificial Sequence
  Description of Artificial Sequence: Synthetic oligonucleotide
aaucagaacagaggccgga

SEQ ID NO: 2236649 - RNA, 19 nt, Artificial Sequence
  Description of Artificial Sequence: Synthetic oligonucleotide
gagccuuacacccaccaaa

SEQ ID NO: 2236650 - RNA, 19 nt, Artificial Sequence
  Description of Artificial Sequence: Synthetic oligonucleotide
aauagccacugggucaaug

SEQ ID NO: 2236651 - RNA, 19 nt, Artificial Sequence
  Description of Artificial Sequence: Synthetic oligonucleotide
uagcugcacacgcaguggc

SEQ ID NO: 2236652 - RNA, 19 nt, Artificial Sequence
  Description of Artificial Sequence: Synthetic oligonucleotide
cacucacucuuucauuacc

SEQ ID NO: 2236653 - RNA, 19 nt, Artificial Sequence
  Description of Artificial Sequence: Synthetic oligonucleotide
aaccucaaaacaauuuauu

SEQ ID NO: 2236654 - RNA, 19 nt, Artificial Sequence
  Description of Artificial Sequence: Synthetic oligonucleotide
ccaaauguugucuggcuag

SEQ ID NO: 2236655 - RNA, 19 nt, Artificial Sequence
  Description of Artificial Sequence: Synthetic oligonucleotide
gaaucagaacagaggccgg

SEQ ID NO: 2236656 - RNA, 19 nt, Artificial Sequence
  Description of Artificial Sequence: Synthetic oligonucleotide
aucagaacagaggccggac

SEQ ID NO: 2236657 - RNA, 19 nt, Artificial Sequence
  Description of Artificial Sequence: Synthetic oligonucleotide
agccuagugauggaagcuc

SEQ ID NO: 2236658 - RNA, 19 nt, Artificial Sequence
  Description of Artificial Sequence: Synthetic oligonucleotide
uugcaucccacugagcgcu

SEQ ID NO: 2236659 - RNA, 19 nt, Artificial Sequence
  Description of Artificial Sequence: Synthetic oligonucleotide
uacugaguuccaacccuug

SEQ ID NO: 2236660 - RNA, 19 nt, Artificial Sequence
  Description of Artificial Sequence: Synthetic oligonucleotide
caaauguugucuggcuagg

SEQ ID NO: 2236661 - RNA, 19 nt, Artificial Sequence
  Description of Artificial Sequence: Synthetic oligonucleotide
acuauucuguaaacaaacu

SEQ ID NO: 2236662 - RNA, 19 nt, Artificial Sequence
  Description of Artificial Sequence: Synthetic oligonucleotide
agaggccggaccaaagaac

SEQ ID NO: 2236663 - RNA, 19 nt, Artificial Sequence
  Description of Artificial Sequence: Synthetic oligonucleotide
gaaauagccacugggucaa

SEQ ID NO: 2236664 - RNA, 19 nt, Artificial Sequence
  Description of Artificial Sequence: Synthetic oligonucleotide
agccagacccacugugugg

SEQ ID NO: 2236665 - RNA, 19 nt, Artificial Sequence
  Description of Artificial Sequence: Synthetic oligonucleotide
acccuugcaucccacugag

SEQ ID NO: 2236666 - RNA, 19 nt, Artificial Sequence
  Description of Artificial Sequence: Synthetic oligonucleotide
aaacuccccaucaaagaaa

SEQ ID NO: 2236667 - RNA, 19 nt, Artificial Sequence
  Description of Artificial Sequence: Synthetic oligonucleotide
cuggccauggcuguuuaag

SEQ ID NO: 2236668 - RNA, 19 nt, Artificial Sequence
  Description of Artificial Sequence: Synthetic oligonucleotide
cacugugugguagauuuac

SEQ ID NO: 2236669 - RNA, 19 nt, Artificial Sequence
  Description of Artificial Sequence: Synthetic oligonucleotide
ccaaagaaacccuugcauc

SEQ ID NO: 2236670 - RNA, 19 nt, Artificial Sequence
  Description of Artificial Sequence: Synthetic oligonucleotide
caaugugguagccuaguga

SEQ ID NO: 2236671 - RNA, 19 nt, Artificial Sequence
  Description of Artificial Sequence: Synthetic oligonucleotide
cucaaguccauaugaaaua

SEQ ID NO: 2236672 - RNA, 19 nt, Artificial Sequence
  Description of Artificial Sequence: Synthetic oligonucleotide
cacaggaagagagcuacug

SEQ ID NO: 2236673 - RNA, 19 nt, Artificial Sequence
  Description of Artificial Sequence: Synthetic oligonucleotide
ggaaccaaaagcacaccag

SEQ ID NO: 2236674 - RNA, 19 nt, Artificial Sequence
  Description of Artificial Sequence: Synthetic oligonucleotide
ggaaaagaaaucucauaaa

SEQ ID NO: 2236675 - RNA, 19 nt, Artificial Sequence
  Description of Artificial Sequence: Synthetic oligonucleotide
agcacaccagacuuacccu

SEQ ID NO: 2236676 - RNA, 19 nt, Artificial Sequence
  Description of Artificial Sequence: Synthetic oligonucleotide
aggcaagggcccucaaguc

SEQ ID NO: 2236677 - RNA, 19 nt, Artificial Sequence
  Description of Artificial Sequence: Synthetic oligonucleotide
cuacuaccuaagacuauuc

SEQ ID NO: 2236678 - RNA, 19 nt, Artificial Sequence
  Description of Artificial Sequence: Synthetic oligonucleotide
ucggcuuagagcucagcua

SEQ ID NO: 2236679 - RNA, 19 nt, Artificial Sequence
  Description of Artificial Sequence: Synthetic oligonucleotide
aacguuucccugaggcaag

SEQ ID NO: 2236680 - RNA, 19 nt, Artificial Sequence
  Description of Artificial Sequence: Synthetic oligonucleotide
cagucagccagacccacug

SEQ ID NO: 2236681 - RNA, 19 nt, Artificial Sequence
  Description of Artificial Sequence: Synthetic oligonucleotide
acaccagacuuacccuggg

SEQ ID NO: 2236682 - RNA, 19 nt, Artificial Sequence
  Description of Artificial Sequence: Synthetic oligonucleotide
agucuugcucccaguaagg

SEQ ID NO: 2236683 - RNA, 19 nt, Artificial Sequence
  Description of Artificial Sequence: Synthetic oligonucleotide
aagugcucagagccuuaca

SEQ ID NO: 2236684 - RNA, 19 nt, Artificial Sequence
  Description of Artificial Sequence: Synthetic oligonucleotide
cagacuuacccuggguggg

SEQ ID NO: 2236685 - RNA, 19 nt, Artificial Sequence
  Description of Artificial Sequence: Synthetic oligonucleotide
auccuguucuagcugcaca

SEQ ID NO: 2236686 - RNA, 19 nt, Artificial Sequence
  Description of Artificial Sequence: Synthetic oligonucleotide
aacagaggccggaccaaag

SEQ ID NO: 2236687 - RNA, 19 nt, Artificial Sequence
  Description of Artificial Sequence: Synthetic oligonucleotide
agacuuacccugggugggc

SEQ ID NO: 2236688 - RNA, 19 nt, Artificial Sequence
  Description of Artificial Sequence: Synthetic oligonucleotide
guuugacgggcagaggagc

SEQ ID NO: 2236689 - RNA, 19 nt, Artificial Sequence
  Description of Artificial Sequence: Synthetic oligonucleotide
cacaccuaagaaacggcca

SEQ ID NO: 2236690 - RNA, 19 nt, Artificial Sequence
  Description of Artificial Sequence: Synthetic oligonucleotide
uggccauggcuguuuaagu

SEQ ID NO: 2236691 - RNA, 19 nt, Artificial Sequence
  Description of Artificial Sequence: Synthetic oligonucleotide
agacuauucuguaaacaaa

SEQ ID NO: 2236692 - RNA, 19 nt, Artificial Sequence
  Description of Artificial Sequence: Synthetic oligonucleotide
uugcucccaguaaggagga

SEQ ID NO: 2236693 - RNA, 19 nt, Artificial Sequence
  Description of Artificial Sequence: Synthetic oligonucleotide
gcuaccuccacaggaagag

SEQ ID NO: 2236694 - RNA, 19 nt, Artificial Sequence
  Description of Artificial Sequence: Synthetic oligonucleotide
uggagaguucccacugcuc

SEQ ID NO: 2236695 - RNA, 19 nt, Artificial Sequence
  Description of Artificial Sequence: Synthetic oligonucleotide
gggagcaccaaaggggugg

SEQ ID NO: 2236696 - RNA, 19 nt, Artificial Sequence
  Description of Artificial Sequence: Synthetic oligonucleotide
cuugaggcaggaaccaaaa

SEQ ID NO: 2236697 - RNA, 19 nt, Artificial Sequence
  Description of Artificial Sequence: Synthetic oligonucleotide
uuccaacccuugaggcagg

SEQ ID NO: 2236698 - RNA, 19 nt, Artificial Sequence
  Description of Artificial Sequence: Synthetic oligonucleotide
agggcugaucaucuuccca

SEQ ID NO: 2236699 - RNA, 19 nt, Artificial Sequence
  Description of Artificial Sequence: Synthetic oligonucleotide
uagccuagugauggaagcu

SEQ ID NO: 2236700 - RNA, 19 nt, Artificial Sequence
  Description of Artificial Sequence: Synthetic oligonucleotide
aagccccucucacaccuaa

SEQ ID NO: 2236701 - RNA, 19 nt, Artificial Sequence
  Description of Artificial Sequence: Synthetic oligonucleotide
gagggcugaucaucuuccc

SEQ ID NO: 2236702 - RNA, 19 nt, Artificial Sequence
  Description of Artificial Sequence: Synthetic oligonucleotide
caaaaggaaucagaacaga

SEQ ID NO: 2236703 - RNA, 19 nt, Artificial Sequence
  Description of Artificial Sequence: Synthetic oligonucleotide
aacggccacgccugguuaa

SEQ ID NO: 2236704 - RNA, 19 nt, Artificial Sequence
  Description of Artificial Sequence: Synthetic oligonucleotide
gguagccuagugauggaag

SEQ ID NO: 2236705 - RNA, 19 nt, Artificial Sequence
  Description of Artificial Sequence: Synthetic oligonucleotide
ccauacaaaaggaaucaga

SEQ ID NO: 2236706 - RNA, 19 nt, Artificial Sequence
  Description of Artificial Sequence: Synthetic oligonucleotide
gcaggaaccaaaagcacac

SEQ ID NO: 2236707 - RNA, 19 nt, Artificial Sequence
  Description of Artificial Sequence: Synthetic oligonucleotide
aaacggccacgccugguua

SEQ ID NO: 2236708 - RNA, 19 nt, Artificial Sequence
  Description of Artificial Sequence: Synthetic oligonucleotide
ugcuacuaccuaagacuau

SEQ ID NO: 2236709 - RNA, 19 nt, Artificial Sequence
  Description of Artificial Sequence: Synthetic oligonucleotide
ccauaugaaauagccacug

SEQ ID NO: 2236710 - RNA, 19 nt, Artificial Sequence
  Description of Artificial Sequence: Synthetic oligonucleotide
agggcccucaaguccauau

SEQ ID NO: 2236711 - RNA, 19 nt, Artificial Sequence
  Description of Artificial Sequence: Synthetic oligonucleotide
uggggcccguuguuugacg

SEQ ID NO: 2236712 - RNA, 19 nt, Artificial Sequence
  Description of Artificial Sequence: Synthetic oligonucleotide
agacccacugugugguaga

SEQ ID NO: 2236713 - RNA, 19 nt, Artificial Sequence
  Description of Artificial Sequence: Synthetic oligonucleotide
uaacaccaacauaguugcu

SEQ ID NO: 2236714 - RNA, 19 nt, Artificial Sequence
  Description of Artificial Sequence: Synthetic oligonucleotide
gugguagauuuacaggaua

SEQ ID NO: 2236715 - RNA, 19 nt, Artificial Sequence
  Description of Artificial Sequence: Synthetic oligonucleotide
cuuagagcucagcuauaca

SEQ ID NO: 2236716 - RNA, 19 nt, Artificial Sequence
  Description of Artificial Sequence: Synthetic oligonucleotide
cuccccaucaaagaaacgu

SEQ ID NO: 2236717 - RNA, 19 nt, Artificial Sequence
  Description of Artificial Sequence: Synthetic oligonucleotide
ugggucaaugugguagccu

SEQ ID NO: 2236718 - RNA, 19 nt, Artificial Sequence
  Description of Artificial Sequence: Synthetic oligonucleotide
cugcacaaaagccccucuc

SEQ ID NO: 2236719 - RNA, 19 nt, Artificial Sequence
  Description of Artificial Sequence: Synthetic oligonucleotide
gagcucagcuauacaaauc

SEQ ID NO: 2236720 - RNA, 19 nt, Artificial Sequence
  Description of Artificial Sequence: Synthetic oligonucleotide
cagccagacccacugugug

SEQ ID NO: 2236721 - RNA, 19 nt, Artificial Sequence
  Description of Artificial Sequence: Synthetic oligonucleotide
ugacgggcagaggagccug

SEQ ID NO: 2236722 - RNA, 19 nt, Artificial Sequence
  Description of Artificial Sequence: Synthetic oligonucleotide
cuaggcagucagccagacc

SEQ ID NO: 2236723 - RNA, 19 nt, Artificial Sequence
  Description of Artificial Sequence: Synthetic oligonucleotide
gacaaaagucuugcuccca

SEQ ID NO: 2236724 - RNA, 19 nt, Artificial Sequence
  Description of Artificial Sequence: Synthetic oligonucleotide
ugguagccuagugauggaa

SEQ ID NO: 2236725 - RNA, 19 nt, Artificial Sequence
  Description of Artificial Sequence: Synthetic oligonucleotide
ccuuacacccaccaaagaa

SEQ ID NO: 2236726 - RNA, 19 nt, Artificial Sequence
  Description of Artificial Sequence: Synthetic oligonucleotide
cgcuagauuccuaaagaug

SEQ ID NO: 2236727 - RNA, 19 nt, Artificial Sequence
  Description of Artificial Sequence: Synthetic oligonucleotide
gaggcaagaggcaucgcua

SEQ ID NO: 2236728 - RNA, 19 nt, Artificial Sequence
  Description of Artificial Sequence: Synthetic oligonucleotide
acuggaaauccaaguugca

SEQ ID NO: 2236729 - RNA, 19 nt, Artificial Sequence
  Description of Artificial Sequence: Synthetic oligonucleotide
ggggcccguuguuugacgg

SEQ ID NO: 2236730 - RNA, 19 nt, Artificial Sequence
  Description of Artificial Sequence: Synthetic oligonucleotide
ccuaaagaugagggcaucc

SEQ ID NO: 2236731 - RNA, 19 nt, Artificial Sequence
  Description of Artificial Sequence: Synthetic oligonucleotide
ggcaggaaccaaaagcaca

SEQ ID NO: 2236732 - RNA, 19 nt, Artificial Sequence
  Description of Artificial Sequence: Synthetic oligonucleotide
gggcugaucaucuucccaa

SEQ ID NO: 2236733 - RNA, 19 nt, Artificial Sequence
  Description of Artificial Sequence: Synthetic oligonucleotide
gaaacccuugcaucccacu

SEQ ID NO: 2236734 - RNA, 19 nt, Artificial Sequence
  Description of Artificial Sequence: Synthetic oligonucleotide
uccuaaagaugagggcauc

SEQ ID NO: 2236735 - RNA, 19 nt, Artificial Sequence
  Description of Artificial Sequence: Synthetic oligonucleotide
ccaaagaacugacaaaagu

SEQ ID NO: 2236736 - RNA, 19 nt, Artificial Sequence
  Description of Artificial Sequence: Synthetic oligonucleotide
gcuuagagcucagcuauac

SEQ ID NO: 2236737 - RNA, 19 nt, Artificial Sequence
  Description of Artificial Sequence: Synthetic oligonucleotide
ggcaucgcuagauuccuaa

SEQ ID NO: 2236738 - RNA, 19 nt, Artificial Sequence
  Description of Artificial Sequence: Synthetic oligonucleotide
agucagccagacccacugu

SEQ ID NO: 2236739 - RNA, 19 nt, Artificial Sequence
  Description of Artificial Sequence: Synthetic oligonucleotide
cuaaagaugagggcauccu

SEQ ID NO: 2236740 - RNA, 19 nt, Artificial Sequence
  Description of Artificial Sequence: Synthetic oligonucleotide
ggaagagagcuacugaguu

SEQ ID NO: 2236741 - RNA, 19 nt, Artificial Sequence
  Description of Artificial Sequence: Synthetic oligonucleotide
cucggcuuagagcucagcu

SEQ ID NO: 2236742 - RNA, 19 nt, Artificial Sequence
  Description of Artificial Sequence: Synthetic oligonucleotide
gggucaaugugguagccua

SEQ ID NO: 2236743 - RNA, 19 nt, Artificial Sequence
  Description of Artificial Sequence: Synthetic oligonucleotide
ccucagcucggcuuagagc

SEQ ID NO: 2236744 - RNA, 19 nt, Artificial Sequence
  Description of Artificial Sequence: Synthetic oligonucleotide
acacgcaguggcacauggg

SEQ ID NO: 2236745 - RNA, 19 nt, Artificial Sequence
  Description of Artificial Sequence: Synthetic oligonucleotide
uuacccugggugggcauuc

SEQ ID NO: 2236746 - RNA, 19 nt, Artificial Sequence
  Description of Artificial Sequence: Synthetic oligonucleotide
cugggucaaugugguagcc

SEQ ID NO: 2236747 - RNA, 19 nt, Artificial Sequence
  Description of Artificial Sequence: Synthetic oligonucleotide
acuccccaucaaagaaacg

SEQ ID NO: 2236748 - RNA, 19 nt, Artificial Sequence
  Description of Artificial Sequence: Synthetic oligonucleotide
cauccuguucuagcugcac

SEQ ID NO: 2236749 - RNA, 19 nt, Artificial Sequence
  Description of Artificial Sequence: Synthetic oligonucleotide
ucccacugagcgcucucua

SEQ ID NO: 2236750 - RNA, 19 nt, Artificial Sequence
  Description of Artificial Sequence: Synthetic oligonucleotide
acccugggugggcauucag

SEQ ID NO: 2236751 - RNA, 19 nt, Artificial Sequence
  Description of Artificial Sequence: Synthetic oligonucleotide
acccuugaggcaggaacca

SEQ ID NO: 2236752 - RNA, 19 nt, Artificial Sequence
  Description of Artificial Sequence: Synthetic oligonucleotide
cguuguuugacgggcagag

SEQ ID NO: 2236753 - RNA, 19 nt, Artificial Sequence
  Description of Artificial Sequence: Synthetic oligonucleotide
gaaacggccacgccugguu

SEQ ID NO: 2236754 - RNA, 19 nt, Artificial Sequence
  Description of Artificial Sequence: Synthetic oligonucleotide
ggccacgccugguuaagug

SEQ ID NO: 2236755 - RNA, 19 nt, Artificial Sequence
  Description of Artificial Sequence: Synthetic oligonucleotide
ggucaaugugguagccuag

SEQ ID NO: 2236756 - RNA, 19 nt, Artificial Sequence
  Description of Artificial Sequence: Synthetic oligonucleotide
augugguagccuagugaug

SEQ ID NO: 2236757 - RNA, 19 nt, Artificial Sequence
  Description of Artificial Sequence: Synthetic oligonucleotide
gccucagcucggcuuagag

SEQ ID NO: 2236758 - RNA, 19 nt, Artificial Sequence
  Description of Artificial Sequence: Synthetic oligonucleotide
guuaagugcucagagccuu

SEQ ID NO: 2236759 - RNA, 19 nt, Artificial Sequence
  Description of Artificial Sequence: Synthetic oligonucleotide
gacgggcagaggagccugg

SEQ ID NO: 2236760 - RNA, 19 nt, Artificial Sequence
  Description of Artificial Sequence: Synthetic oligonucleotide
guugucuggcuaggcaguc

SEQ ID NO: 2236761 - RNA, 19 nt, Artificial Sequence
  Description of Artificial Sequence: Synthetic oligonucleotide
gagagcuacugaguuccaa

SEQ ID NO: 2236762 - RNA, 19 nt, Artificial Sequence
  Description of Artificial Sequence: Synthetic oligonucleotide
ggagcaccaaagggguggg

SEQ ID NO: 2236763 - RNA, 19 nt, Artificial Sequence
  Description of Artificial Sequence: Synthetic oligonucleotide
agaaacggccacgccuggu

SEQ ID NO: 2236764 - RNA, 19 nt, Artificial Sequence
  Description of Artificial Sequence: Synthetic oligonucleotide
guagccgggccgcaguucu

SEQ ID NO: 2236765 - RNA, 19 nt, Artificial Sequence
  Description of Artificial Sequence: Synthetic oligonucleotide
gacuuacccugggugggca

SEQ ID NO: 2236766 - RNA, 19 nt, Artificial Sequence
  Description of Artificial Sequence: Synthetic oligonucleotide
cuagugauggaagcucugu

SEQ ID NO: 2236767 - RNA, 19 nt, Artificial Sequence
  Description of Artificial Sequence: Synthetic oligonucleotide
gaggcaucgcuagauuccu

SEQ ID NO: 2236768 - RNA, 19 nt, Artificial Sequence
  Description of Artificial Sequence: Synthetic oligonucleotide
ggcacauggggagaaggga

SEQ ID NO: 2236769 - RNA, 19 nt, Artificial Sequence
  Description of Artificial Sequence: Synthetic oligonucleotide
aguucccacugcucagcuu

SEQ ID NO: 2236770 - RNA, 19 nt, Artificial Sequence
  Description of Artificial Sequence: Synthetic oligonucleotide
cggaccaaagaacugacaa

SEQ ID NO: 2236771 - RNA, 19 nt, Artificial Sequence
  Description of Artificial Sequence: Synthetic oligonucleotide
acgcaguggcacaugggga

SEQ ID NO: 2236772 - RNA, 19 nt, Artificial Sequence
  Description of Artificial Sequence: Synthetic oligonucleotide
caaaagucuugcucccagu

SEQ ID NO: 2236773 - RNA, 19 nt, Artificial Sequence
  Description of Artificial Sequence: Synthetic oligonucleotide
uguagccgggccgcaguuc

SEQ ID NO: 2236774 - RNA, 19 nt, Artificial Sequence
  Description of Artificial Sequence: Synthetic oligonucleotide
gggcccguuguuugacggg

SEQ ID NO: 2236775 - RNA, 19 nt, Artificial Sequence
  Description of Artificial Sequence: Synthetic oligonucleotide
gaucaucuucccaaauguu

SEQ ID NO: 2236776 - RNA, 19 nt, Artificial Sequence
  Description of Artificial Sequence: Synthetic oligonucleotide
acgccugguuaagugcuca

SEQ ID NO: 2236777 - RNA, 19 nt, Artificial Sequence
  Description of Artificial Sequence: Synthetic oligonucleotide
gucaaugugguagccuagu

SEQ ID NO: 2236778 - RNA, 19 nt, Artificial Sequence
  Description of Artificial Sequence: Synthetic oligonucleotide
cacgccugguuaagugcuc

SEQ ID NO: 2236779 - RNA, 19 nt, Artificial Sequence
  Description of Artificial Sequence: Synthetic oligonucleotide
gggcauccuguucuagcug

SEQ ID NO: 2236780 - RNA, 19 nt, Artificial Sequence
  Description of Artificial Sequence: Synthetic oligonucleotide
ggcccguuguuugacgggc

SEQ ID NO: 2236781 - RNA, 19 nt, Artificial Sequence
  Description of Artificial Sequence: Synthetic oligonucleotide
caccaacauaguugcugca

SEQ ID NO: 2236782 - RNA, 19 nt, Artificial Sequence
  Description of Artificial Sequence: Synthetic oligonucleotide
ccuggagaguucccacugc

SEQ ID NO: 2236783 - RNA, 19 nt, Artificial Sequence
  Description of Artificial Sequence: Synthetic oligonucleotide
cccucucacaccuaagaaa

SEQ ID NO: 2236784 - RNA, 19 nt, Artificial Sequence
  Description of Artificial Sequence: Synthetic oligonucleotide
uccaacccuugaggcagga

SEQ ID NO: 2236785 - RNA, 19 nt, Artificial Sequence
  Description of Artificial Sequence: Synthetic oligonucleotide
ggccggaccaaagaacuga

SEQ ID NO: 2236786 - RNA, 19 nt, Artificial Sequence
  Description of Artificial Sequence: Synthetic oligonucleotide
acggccacgccugguuaag

SEQ ID NO: 2236787 - RNA, 19 nt, Artificial Sequence
  Description of Artificial Sequence: Synthetic oligonucleotide
gggcccucaaguccauaug

SEQ ID NO: 2236788 - RNA, 19 nt, Artificial Sequence
  Description of Artificial Sequence: Synthetic oligonucleotide
cacauggcccaaugugaaa

SEQ ID NO: 2236789 - RNA, 19 nt, Artificial Sequence
  Description of Artificial Sequence: Synthetic oligonucleotide
cugcacacgcaguggcaca

SEQ ID NO: 2236790 - RNA, 19 nt, Artificial Sequence
  Description of Artificial Sequence: Synthetic oligonucleotide
ugcaucccacugagcgcuc

SEQ ID NO: 2236791 - RNA, 19 nt, Artificial Sequence
  Description of Artificial Sequence: Synthetic oligonucleotide
aaauagccacugggucaau

SEQ ID NO: 2236792 - RNA, 19 nt, Artificial Sequence
  Description of Artificial Sequence: Synthetic oligonucleotide
cauucagagggcugaucau

SEQ ID NO: 2236793 - RNA, 19 nt, Artificial Sequence
  Description of Artificial Sequence: Synthetic oligonucleotide
gccgcaguucucccuggcc

SEQ ID NO: 2236794 - RNA, 19 nt, Artificial Sequence
  Description of Artificial Sequence: Synthetic oligonucleotide
cccguuguuugacgggcag

SEQ ID NO: 2236795 - RNA, 19 nt, Artificial Sequence
  Description of Artificial Sequence: Synthetic oligonucleotide
aggccggaccaaagaacug

SEQ ID NO: 2236796 - RNA, 19 nt, Artificial Sequence
  Description of Artificial Sequence: Synthetic oligonucleotide
cuacugaguuccaacccuu

SEQ ID NO: 2236797 - RNA, 19 nt, Artificial Sequence
  Description of Artificial Sequence: Synthetic oligonucleotide
ggcugaucaucuucccaaa

SEQ ID NO: 2236798 - RNA, 19 nt, Artificial Sequence
  Description of Artificial Sequence: Synthetic oligonucleotide
acguuucccugaggcaaga

SEQ ID NO: 2236799 - RNA, 19 nt, Artificial Sequence
  Description of Artificial Sequence: Synthetic oligonucleotide
cuaccuccacaggaagaga

SEQ ID NO: 2236800 - RNA, 19 nt, Artificial Sequence
  Description of Artificial Sequence: Synthetic oligonucleotide
gcuacuaccuaagacuauu

SEQ ID NO: 2236801 - RNA, 19 nt, Artificial Sequence
  Description of Artificial Sequence: Synthetic oligonucleotide
gcuguuuaagucacucacu

SEQ ID NO: 2236802 - RNA, 19 nt, Artificial Sequence
  Description of Artificial Sequence: Synthetic oligonucleotide
agggagcaccaaaggggug

SEQ ID NO: 2236803 - RNA, 19 nt, Artificial Sequence
  Description of Artificial Sequence: Synthetic oligonucleotide
uacccugggugggcauuca

SEQ ID NO: 2236804 - RNA, 19 nt, Artificial Sequence
  Description of Artificial Sequence: Synthetic oligonucleotide
agagagcuacugaguucca

SEQ ID NO: 2236805 - RNA, 19 nt, Artificial Sequence
  Description of Artificial Sequence: Synthetic oligonucleotide
ccacauggcccaaugugaa

SEQ ID NO: 2236806 - RNA, 19 nt, Artificial Sequence
  Description of Artificial Sequence: Synthetic oligonucleotide
cugaggcaagaggcaucgc

SEQ ID NO: 2236807 - RNA, 19 nt, Artificial Sequence
  Description of Artificial Sequence: Synthetic oligonucleotide
agccccucucacaccuaag

SEQ ID NO: 2236808 - RNA, 19 nt, Artificial Sequence
  Description of Artificial Sequence: Synthetic oligonucleotide
gguuaagugcucagagccu

SEQ ID NO: 2236809 - RNA, 19 nt, Artificial Sequence
  Description of Artificial Sequence: Synthetic oligonucleotide
gcaucgcuagauuccuaaa

SEQ ID NO: 2236810 - RNA, 19 nt, Artificial Sequence
  Description of Artificial Sequence: Synthetic oligonucleotide
cccaguaaggaggaaaggu

SEQ ID NO: 2236811 - RNA, 19 nt, Artificial Sequence
  Description of Artificial Sequence: Synthetic oligonucleotide
aaagccccucucacaccua

SEQ ID NO: 2236812 - RNA, 19 nt, Artificial Sequence
  Description of Artificial Sequence: Synthetic oligonucleotide
gccuuacacccaccaaaga

SEQ ID NO: 2236813 - RNA, 19 nt, Artificial Sequence
  Description of Artificial Sequence: Synthetic oligonucleotide
gccggaccaaagaacugac

SEQ ID NO: 2236814 - RNA, 19 nt, Artificial Sequence
  Description of Artificial Sequence: Synthetic oligonucleotide
ccgcaguucucccuggcca

SEQ ID NO: 2236815 - RNA, 19 nt, Artificial Sequence
  Description of Artificial Sequence: Synthetic oligonucleotide
uagccgggccgcaguucuc

SEQ ID NO: 2236816 - RNA, 19 nt, Artificial Sequence
  Description of Artificial Sequence: Synthetic oligonucleotide
ggcagucagccagacccac

SEQ ID NO: 2236817 - RNA, 19 nt, Artificial Sequence
  Description of Artificial Sequence: Synthetic oligonucleotide
caagaggcaucgcuagauu

SEQ ID NO: 2236818 - RNA, 19 nt, Artificial Sequence
  Description of Artificial Sequence: Synthetic oligonucleotide
uggcggccucagcucggcu

SEQ ID NO: 2236819 - RNA, 19 nt, Artificial Sequence
  Description of Artificial Sequence: Synthetic oligonucleotide
gcuaggcagucagccagac

SEQ ID NO: 2236820 - RNA, 19 nt, Artificial Sequence
  Description of Artificial Sequence: Synthetic oligonucleotide
cauggcuguuuaagucacu

SEQ ID NO: 2236821 - RNA, 19 nt, Artificial Sequence
  Description of Artificial Sequence: Synthetic oligonucleotide
gggccgcaguucucccugg

SEQ ID NO: 2236822 - RNA, 19 nt, Artificial Sequence
  Description of Artificial Sequence: Synthetic oligonucleotide
gccugguuaagugcucaga

SEQ ID NO: 2236823 - RNA, 19 nt, Artificial Sequence
  Description of Artificial Sequence: Synthetic oligonucleotide
agcucggcuuagagcucag

SEQ ID NO: 2236824 - RNA, 19 nt, Artificial Sequence
  Description of Artificial Sequence: Synthetic oligonucleotide
gcuggggcccguuguuuga

SEQ ID NO: 2236825 - RNA, 19 nt, Artificial Sequence
  Description of Artificial Sequence: Synthetic oligonucleotide
cccugggugggcauucaga

SEQ ID NO: 2236826 - RNA, 19 nt, Artificial Sequence
  Description of Artificial Sequence: Synthetic oligonucleotide
ugcucccaguaaggaggaa

SEQ ID NO: 2236827 - RNA, 19 nt, Artificial Sequence
  Description of Artificial Sequence: Synthetic oligonucleotide
acccacugugugguagauu

SEQ ID NO: 2236828 - RNA, 19 nt, Artificial Sequence
  Description of Artificial Sequence: Synthetic oligonucleotide
caccagacuuacccugggu

SEQ ID NO: 2236829 - RNA, 19 nt, Artificial Sequence
  Description of Artificial Sequence: Synthetic oligonucleotide
gcccucaaguccauaugaa

SEQ ID NO: 2236830 - RNA, 19 nt, Artificial Sequence
  Description of Artificial Sequence: Synthetic oligonucleotide
gcuggcggccucagcucgg

SEQ ID NO: 2236831 - RNA, 19 nt, Artificial Sequence
  Description of Artificial Sequence: Synthetic oligonucleotide
cccuugcaucccacugagc

SEQ ID NO: 2236832 - RNA, 19 nt, Artificial Sequence
  Description of Artificial Sequence: Synthetic oligonucleotide
caggauaggcaagggcccu

SEQ ID NO: 2236833 - RNA, 19 nt, Artificial Sequence
  Description of Artificial Sequence: Synthetic oligonucleotide
ccccucucacaccuaagaa

SEQ ID NO: 2236834 - RNA, 19 nt, Artificial Sequence
  Description of Artificial Sequence: Synthetic oligonucleotide
ccggaccaaagaacugaca

SEQ ID NO: 2236835 - RNA, 19 nt, Artificial Sequence
  Description of Artificial Sequence: Synthetic oligonucleotide
gccuagugauggaagcucu

SEQ ID NO: 2236836 - RNA, 19 nt, Artificial Sequence
  Description of Artificial Sequence: Synthetic oligonucleotide
gcggccucagcucggcuua

SEQ ID NO: 2236837 - RNA, 19 nt, Artificial Sequence
  Description of Artificial Sequence: Synthetic oligonucleotide
cgggccgcaguucucccug

SEQ ID NO: 2236838 - RNA, 19 nt, Artificial Sequence
  Description of Artificial Sequence: Synthetic oligonucleotide
cggcuuagagcucagcuau

SEQ ID NO: 2236839 - RNA, 19 nt, Artificial Sequence
  Description of Artificial Sequence: Synthetic oligonucleotide
gcacacgcaguggcacaug

SEQ ID NO: 2236840 - RNA, 19 nt, Artificial Sequence
  Description of Artificial Sequence: Synthetic oligonucleotide
gccgggccgcaguucuccc

SEQ ID NO: 2236841 - RNA, 19 nt, Artificial Sequence
  Description of Artificial Sequence: Synthetic oligonucleotide
aggcaucgcuagauuccua

SEQ ID NO: 2236842 - RNA, 19 nt, Artificial Sequence
  Description of Artificial Sequence: Synthetic oligonucleotide
cuuacccugggugggcauu

SEQ ID NO: 2236843 - RNA, 19 nt, Artificial Sequence
  Description of Artificial Sequence: Synthetic oligonucleotide
ggugcuggggcccguuguu

SEQ ID NO: 2236844 - RNA, 19 nt, Artificial Sequence
  Description of Artificial Sequence: Synthetic oligonucleotide
ggcuuagagcucagcuaua

SEQ ID NO: 2236845 - RNA, 19 nt, Artificial Sequence
  Description of Artificial Sequence: Synthetic oligonucleotide
ccguuguuugacgggcaga

SEQ ID NO: 2236846 - RNA, 19 nt, Artificial Sequence
  Description of Artificial Sequence: Synthetic oligonucleotide
cuguagccgggccgcaguu

SEQ ID NO: 2236847 - RNA, 19 nt, Artificial Sequence
  Description of Artificial Sequence: Synthetic oligonucleotide
ccacugugugguagauuua

SEQ ID NO: 2236848 - RNA, 19 nt, Artificial Sequence
  Description of Artificial Sequence: Synthetic oligonucleotide
caagggcccucaaguccau

SEQ ID NO: 2236849 - RNA, 19 nt, Artificial Sequence
  Description of Artificial Sequence: Synthetic oligonucleotide
cugcuguagccgggccgca

SEQ ID NO: 2236850 - RNA, 19 nt, Artificial Sequence
  Description of Artificial Sequence: Synthetic oligonucleotide
ccuggccauggcuguuuaa

SEQ ID NO: 2236851 - RNA, 19 nt, Artificial Sequence
  Description of Artificial Sequence: Synthetic oligonucleotide
gcagucagccagacccacu

SEQ ID NO: 2236852 - RNA, 19 nt, Artificial Sequence
  Description of Artificial Sequence: Synthetic oligonucleotide
cccuugaggcaggaaccaa

SEQ ID NO: 2236853 - RNA, 19 nt, Artificial Sequence
  Description of Artificial Sequence: Synthetic oligonucleotide
gcaucccacugagcgcucu

SEQ ID NO: 2236854 - RNA, 19 nt, Artificial Sequence
  Description of Artificial Sequence: Synthetic oligonucleotide
ccaacccuugaggcaggaa

SEQ ID NO: 2236855 - RNA, 19 nt, Artificial Sequence
  Description of Artificial Sequence: Synthetic oligonucleotide
ccagacccacuguguggua

SEQ ID NO: 2236856 - RNA, 19 nt, Artificial Sequence
  Description of Artificial Sequence: Synthetic oligonucleotide
ccgggccgcaguucucccu

SEQ ID NO: 2236857 - RNA, 19 nt, Artificial Sequence
  Description of Artificial Sequence: Synthetic oligonucleotide
cggccacgccugguuaagu

SEQ ID NO: 2236858 - RNA, 19 nt, Artificial Sequence
  Description of Artificial Sequence: Synthetic oligonucleotide
aaacagacaacacacuucc

SEQ ID NO: 2236859 - RNA, 19 nt, Artificial Sequence
  Description of Artificial Sequence: Synthetic oligonucleotide
agcaagauuuuacagagac

SEQ ID NO: 2236860 - RNA, 19 nt, Artificial Sequence
  Description of Artificial Sequence: Synthetic oligonucleotide
uagaaaauaaagcauucgc

SEQ ID NO: 2236861 - RNA, 19 nt, Artificial Sequence
  Description of Artificial Sequence: Synthetic oligonucleotide
ugaacucauaauuuggccg

SEQ ID NO: 2236862 - RNA, 19 nt, Artificial Sequence
  Description of Artificial Sequence: Synthetic oligonucleotide
aaggaacucgguucgagcc

SEQ ID NO: 2236863 - RNA, 19 nt, Artificial Sequence
  Description of Artificial Sequence: Synthetic oligonucleotide
aaagcauucgcauaauaca

SEQ ID NO: 2236864 - RNA, 19 nt, Artificial Sequence
  Description of Artificial Sequence: Synthetic oligonucleotide
uuuagugucgguuuuacga

SEQ ID NO: 2236865 - RNA, 19 nt, Artificial Sequence
  Description of Artificial Sequence: Synthetic oligonucleotide
augauuuguagucagggac

SEQ ID NO: 2236866 - RNA, 19 nt, Artificial Sequence
  Description of Artificial Sequence: Synthetic oligonucleotide
uauauuacagaauuagagu

SEQ ID NO: 2236867 - RNA, 19 nt, Artificial Sequence
  Description of Artificial Sequence: Synthetic oligonucleotide
uuacuagcaacauagaaaa

SEQ ID NO: 2236868 - RNA, 19 nt, Artificial Sequence
  Description of Artificial Sequence: Synthetic oligonucleotide
acuagcaacauagaaaagg

SEQ ID NO: 2236869 - RNA, 19 nt, Artificial Sequence
  Description of Artificial Sequence: Synthetic oligonucleotide
auauauuacagaauuagag

SEQ ID NO: 2236870 - RNA, 19 nt, Artificial Sequence
  Description of Artificial Sequence: Synthetic oligonucleotide
aacauagaaaaggggaggc

SEQ ID NO: 2236871 - RNA, 19 nt, Artificial Sequence
  Description of Artificial Sequence: Synthetic oligonucleotide
ucgcauaauacaaugaacu

SEQ ID NO: 2236872 - RNA, 19 nt, Artificial Sequence
  Description of Artificial Sequence: Synthetic oligonucleotide
cuagcaacauagaaaaggg

SEQ ID NO: 2236873 - RNA, 19 nt, Artificial Sequence
  Description of Artificial Sequence: Synthetic oligonucleotide
uauuuagaaaauaaagcau

SEQ ID NO: 2236874 - RNA, 19 nt, Artificial Sequence
  Description of Artificial Sequence: Synthetic oligonucleotide
cuuucggugaggcagagcg

SEQ ID NO: 2236875 - RNA, 19 nt, Artificial Sequence
  Description of Artificial Sequence: Synthetic oligonucleotide
uuuuacaguguugagaagc

SEQ ID NO: 2236876 - RNA, 19 nt, Artificial Sequence
  Description of Artificial Sequence: Synthetic oligonucleotide
gaacucauaauuuggccgg

SEQ ID NO: 2236877 - RNA, 19 nt, Artificial Sequence
  Description of Artificial Sequence: Synthetic oligonucleotide
aaacagcaagauuuuacag

SEQ ID NO: 2236878 - RNA, 19 nt, Artificial Sequence
  Description of Artificial Sequence: Synthetic oligonucleotide
gguaguauuucuuuuacag

SEQ ID NO: 2236879 - RNA, 19 nt, Artificial Sequence
  Description of Artificial Sequence: Synthetic oligonucleotide
gauaauguccuucccauac

SEQ ID NO: 2236880 - RNA, 19 nt, Artificial Sequence
  Description of Artificial Sequence: Synthetic oligonucleotide
gaccuuacuagcaacauag

SEQ ID NO: 2236881 - RNA, 19 nt, Artificial Sequence
  Description of Artificial Sequence: Synthetic oligonucleotide
acaaugaacucauaauuug

SEQ ID NO: 2236882 - RNA, 19 nt, Artificial Sequence
  Description of Artificial Sequence: Synthetic oligonucleotide
aguccacaaagacagugcc

SEQ ID NO: 2236883 - RNA, 19 nt, Artificial Sequence
  Description of Artificial Sequence: Synthetic oligonucleotide
cagaaagccaugaagcagg

SEQ ID NO: 2236884 - RNA, 19 nt, Artificial Sequence
  Description of Artificial Sequence: Synthetic oligonucleotide
uuuacaguguugagaagcc

SEQ ID NO: 2236885 - RNA, 19 nt, Artificial Sequence
  Description of Artificial Sequence: Synthetic oligonucleotide
uccuugauauauuacagaa

SEQ ID NO: 2236886 - RNA, 19 nt, Artificial Sequence
  Description of Artificial Sequence: Synthetic oligonucleotide
guugaaggaacucgguucg

SEQ ID NO: 2236887 - RNA, 19 nt, Artificial Sequence
  Description of Artificial Sequence: Synthetic oligonucleotide
uuagugucgguuuuacgag

SEQ ID NO: 2236888 - RNA, 19 nt, Artificial Sequence
  Description of Artificial Sequence: Synthetic oligonucleotide
auuucuuuuacaguguuga

SEQ ID NO: 2236889 - RNA, 19 nt, Artificial Sequence
  Description of Artificial Sequence: Synthetic oligonucleotide
uguugagaagcccaaauuu

SEQ ID NO: 2236890 - RNA, 19 nt, Artificial Sequence
  Description of Artificial Sequence: Synthetic oligonucleotide
gaaaaggggaggcacauuc

SEQ ID NO: 2236891 - RNA, 19 nt, Artificial Sequence
  Description of Artificial Sequence: Synthetic oligonucleotide
aacacacuuccccauaggu

SEQ ID NO: 2236892 - RNA, 19 nt, Artificial Sequence
  Description of Artificial Sequence: Synthetic oligonucleotide
cuuacuagcaacauagaaa

SEQ ID NO: 2236893 - RNA, 19 nt, Artificial Sequence
  Description of Artificial Sequence: Synthetic oligonucleotide
ggcgcaagaaguuuguucg

SEQ ID NO: 2236894 - RNA, 19 nt, Artificial Sequence
  Description of Artificial Sequence: Synthetic oligonucleotide
ugcgcgaucucuaugcgcc

SEQ ID NO: 2236895 - RNA, 19 nt, Artificial Sequence
  Description of Artificial Sequence: Synthetic oligonucleotide
uucgcauaauacaaugaac

SEQ ID NO: 2236896 - RNA, 19 nt, Artificial Sequence
  Description of Artificial Sequence: Synthetic oligonucleotide
uagcaacauagaaaagggg

SEQ ID NO: 2236897 - RNA, 19 nt, Artificial Sequence
  Description of Artificial Sequence: Synthetic oligonucleotide
gguuuuacgagauuccuug

SEQ ID NO: 2236898 - RNA, 19 nt, Artificial Sequence
  Description of Artificial Sequence: Synthetic oligonucleotide
ugaagcaggccgauaaugu

SEQ ID NO: 2236899 - RNA, 19 nt, Artificial Sequence
  Description of Artificial Sequence: Synthetic oligonucleotide
agaaaauaaagcauucgca

SEQ ID NO: 2236900 - RNA, 19 nt, Artificial Sequence
  Description of Artificial Sequence: Synthetic oligonucleotide
auucgcauaauacaaugaa

SEQ ID NO: 2236901 - RNA, 19 nt, Artificial Sequence
  Description of Artificial Sequence: Synthetic oligonucleotide
gacagugccauagagggug

SEQ ID NO: 2236902 - RNA, 19 nt, Artificial Sequence
  Description of Artificial Sequence: Synthetic oligonucleotide
uacagugucugcaccgagg

SEQ ID NO: 2236903 - RNA, 19 nt, Artificial Sequence
  Description of Artificial Sequence: Synthetic oligonucleotide
ugagcuucgcauccagggg

SEQ ID NO: 2236904 - RNA, 19 nt, Artificial Sequence
  Description of Artificial Sequence: Synthetic oligonucleotide
uuacgagauuccuugauau

SEQ ID NO: 2236905 - RNA, 19 nt, Artificial Sequence
  Description of Artificial Sequence: Synthetic oligonucleotide
aaaaggggaggcacauucc

SEQ ID NO: 2236906 - RNA, 19 nt, Artificial Sequence
  Description of Artificial Sequence: Synthetic oligonucleotide
uuuuagugucgguuuuacg

SEQ ID NO: 2236907 - RNA, 19 nt, Artificial Sequence
  Description of Artificial Sequence: Synthetic oligonucleotide
auagaggguguacaaaaca

SEQ ID NO: 2236908 - RNA, 19 nt, Artificial Sequence
  Description of Artificial Sequence: Synthetic oligonucleotide
ugcaccgaggcggagaacg

SEQ ID NO: 2236909 - RNA, 19 nt, Artificial Sequence
  Description of Artificial Sequence: Synthetic oligonucleotide
aaaccgaacuugcggcugg

SEQ ID NO: 2236910 - RNA, 19 nt, Artificial Sequence
  Description of Artificial Sequence: Synthetic oligonucleotide
aggccgauaauguccuucc

SEQ ID NO: 2236911 - RNA, 19 nt, Artificial Sequence
  Description of Artificial Sequence: Synthetic oligonucleotide
ucaaagggcgcgcagugca

SEQ ID NO: 2236912 - RNA, 19 nt, Artificial Sequence
  Description of Artificial Sequence: Synthetic oligonucleotide
gauauauuacagaauuaga

SEQ ID NO: 2236913 - RNA, 19 nt, Artificial Sequence
  Description of Artificial Sequence: Synthetic oligonucleotide
uuuacgagauuccuugaua

SEQ ID NO: 2236914 - RNA, 19 nt, Artificial Sequence
  Description of Artificial Sequence: Synthetic oligonucleotide
aagaaguuuguucgggaaa

SEQ ID NO: 2236915 - RNA, 19 nt, Artificial Sequence
  Description of Artificial Sequence: Synthetic oligonucleotide
ggguguacaaaacagcaag

SEQ ID NO: 2236916 - RNA, 19 nt, Artificial Sequence
  Description of Artificial Sequence: Synthetic oligonucleotide
agaggguguacaaaacagc

SEQ ID NO: 2236917 - RNA, 19 nt, Artificial Sequence
  Description of Artificial Sequence: Synthetic oligonucleotide
aagcaaaggcgcaagaagu

SEQ ID NO: 2236918 - RNA, 19 nt, Artificial Sequence
  Description of Artificial Sequence: Synthetic oligonucleotide
ucagggacguuuuaguguc

SEQ ID NO: 2236919 - RNA, 19 nt, Artificial Sequence
  Description of Artificial Sequence: Synthetic oligonucleotide
uccagaaagccaugaagca

SEQ ID NO: 2236920 - RNA, 19 nt, Artificial Sequence
  Description of Artificial Sequence: Synthetic oligonucleotide
aucucuaugcgccgccgcc

SEQ ID NO: 2236921 - RNA, 19 nt, Artificial Sequence
  Description of Artificial Sequence: Synthetic oligonucleotide
caaagacagugccauagag

SEQ ID NO: 2236922 - RNA, 19 nt, Artificial Sequence
  Description of Artificial Sequence: Synthetic oligonucleotide
uuuuacgagauuccuugau

SEQ ID NO: 2236923 - RNA, 19 nt, Artificial Sequence
  Description of Artificial Sequence: Synthetic oligonucleotide
uuucuuuuacaguguugag

SEQ ID NO: 2236924 - RNA, 19 nt, Artificial Sequence
  Description of Artificial Sequence: Synthetic oligonucleotide
caacauagaaaaggggagg

SEQ ID NO: 2236925 - RNA, 19 nt, Artificial Sequence
  Description of Artificial Sequence: Synthetic oligonucleotide
caagauuuuacagagaccu

SEQ ID NO: 2236926 - RNA, 19 nt, Artificial Sequence
  Description of Artificial Sequence: Synthetic oligonucleotide
cuugauauauuacagaauu

SEQ ID NO: 2236927 - RNA, 19 nt, Artificial Sequence
  Description of Artificial Sequence: Synthetic oligonucleotide
aggcgcaagaaguuuguuc

SEQ ID NO: 2236928 - RNA, 19 nt, Artificial Sequence
  Description of Artificial Sequence: Synthetic oligonucleotide
cugucuuucggugaggcag

SEQ ID NO: 2236929 - RNA, 19 nt, Artificial Sequence
  Description of Artificial Sequence: Synthetic oligonucleotide
cacaaagacagugccauag

SEQ ID NO: 2236930 - RNA, 19 nt, Artificial Sequence
  Description of Artificial Sequence: Synthetic oligonucleotide
uugauauauuacagaauua

SEQ ID NO: 2236931 - RNA, 19 nt, Artificial Sequence
  Description of Artificial Sequence: Synthetic oligonucleotide
gaugauuuguagucaggga

SEQ ID NO: 2236932 - RNA, 19 nt, Artificial Sequence
  Description of Artificial Sequence: Synthetic oligonucleotide
acaacacacuuccccauag

SEQ ID NO: 2236933 - RNA, 19 nt, Artificial Sequence
  Description of Artificial Sequence: Synthetic oligonucleotide
ucgggaaaggcuccuggag

SEQ ID NO: 2236934 - RNA, 19 nt, Artificial Sequence
  Description of Artificial Sequence: Synthetic oligonucleotide
ugcggcuggauauuuagaa

SEQ ID NO: 2236935 - RNA, 19 nt, Artificial Sequence
  Description of Artificial Sequence: Synthetic oligonucleotide
ugcuccauagcccgggcgc

SEQ ID NO: 2236936 - RNA, 19 nt, Artificial Sequence
  Description of Artificial Sequence: Synthetic oligonucleotide
auagguaguauuucuuuua

SEQ ID NO: 2236937 - RNA, 19 nt, Artificial Sequence
  Description of Artificial Sequence: Synthetic oligonucleotide
aagcauucgcauaauacaa

SEQ ID NO: 2236938 - RNA, 19 nt, Artificial Sequence
  Description of Artificial Sequence: Synthetic oligonucleotide
ugacacccuggccagaugu

SEQ ID NO: 2236939 - RNA, 19 nt, Artificial Sequence
  Description of Artificial Sequence: Synthetic oligonucleotide
ugucccucacucuucuucc

SEQ ID NO: 2236940 - RNA, 19 nt, Artificial Sequence
  Description of Artificial Sequence: Synthetic oligonucleotide
agucagggacguuuuagug

SEQ ID NO: 2236941 - RNA, 19 nt, Artificial Sequence
  Description of Artificial Sequence: Synthetic oligonucleotide
cauaauacaaugaacucau

SEQ ID NO: 2236942 - RNA, 19 nt, Artificial Sequence
  Description of Artificial Sequence: Synthetic oligonucleotide
caaaggcgcaagaaguuug

SEQ ID NO: 2236943 - RNA, 19 nt, Artificial Sequence
  Description of Artificial Sequence: Synthetic oligonucleotide
aucugucuuucggugaggc

SEQ ID NO: 2236944 - RNA, 19 nt, Artificial Sequence
  Description of Artificial Sequence: Synthetic oligonucleotide
gcgaaaaccgaacuugcgg

SEQ ID NO: 2236945 - RNA, 19 nt, Artificial Sequence
  Description of Artificial Sequence: Synthetic oligonucleotide
aaaaccgaacuugcggcug

SEQ ID NO: 2236946 - RNA, 19 nt, Artificial Sequence
  Description of Artificial Sequence: Synthetic oligonucleotide
ugucgguuuuacgagauuc

SEQ ID NO: 2236947 - RNA, 19 nt, Artificial Sequence
  Description of Artificial Sequence: Synthetic oligonucleotide
cauagaggguguacaaaac

SEQ ID NO: 2236948 - RNA, 19 nt, Artificial Sequence
  Description of Artificial Sequence: Synthetic oligonucleotide
cagugcauguugaaggaac

SEQ ID NO: 2236949 - RNA, 19 nt, Artificial Sequence
  Description of Artificial Sequence: Synthetic oligonucleotide
uagccggccgcguagacgc

SEQ ID NO: 2236950 - RNA, 19 nt, Artificial Sequence
  Description of Artificial Sequence: Synthetic oligonucleotide
cuuucggucagucccugag

SEQ ID NO: 2236951 - RNA, 19 nt, Artificial Sequence
  Description of Artificial Sequence: Synthetic oligonucleotide
agaacggggcgcccggacc

SEQ ID NO: 2236952 - RNA, 19 nt, Artificial Sequence
  Description of Artificial Sequence: Synthetic oligonucleotide
guuuguucgggaaaggcuc

SEQ ID NO: 2236953 - RNA, 19 nt, Artificial Sequence
  Description of Artificial Sequence: Synthetic oligonucleotide
agauuccuugauauauuac

SEQ ID NO: 2236954 - RNA, 19 nt, Artificial Sequence
  Description of Artificial Sequence: Synthetic oligonucleotide
agucccugagcuucgcauc

SEQ ID NO: 2236955 - RNA, 19 nt, Artificial Sequence
  Description of Artificial Sequence: Synthetic oligonucleotide
aacagacaacacacuuccc

SEQ ID NO: 2236956 - RNA, 19 nt, Artificial Sequence
  Description of Artificial Sequence: Synthetic oligonucleotide
uuggccggaugauuuguag

SEQ ID NO: 2236957 - RNA, 19 nt, Artificial Sequence
  Description of Artificial Sequence: Synthetic oligonucleotide
acgagauuccuugauauau

SEQ ID NO: 2236958 - RNA, 19 nt, Artificial Sequence
  Description of Artificial Sequence: Synthetic oligonucleotide
gauccggaaguuacucucg

SEQ ID NO: 2236959 - RNA, 19 nt, Artificial Sequence
  Description of Artificial Sequence: Synthetic oligonucleotide
agguucugcucaaagggcg

SEQ ID NO: 2236960 - RNA, 19 nt, Artificial Sequence
  Description of Artificial Sequence: Synthetic oligonucleotide
gggaaaggcuccuggagcg

SEQ ID NO: 2236961 - RNA, 19 nt, Artificial Sequence
  Description of Artificial Sequence: Synthetic oligonucleotide
gagaagcccaaauuucauc

SEQ ID NO: 2236962 - RNA, 19 nt, Artificial Sequence
  Description of Artificial Sequence: Synthetic oligonucleotide
guucgggaaaggcuccugg

SEQ ID NO: 2236963 - RNA, 19 nt, Artificial Sequence
  Description of Artificial Sequence: Synthetic oligonucleotide
auaauguccuucccauacu

SEQ ID NO: 2236964 - RNA, 19 nt, Artificial Sequence
  Description of Artificial Sequence: Synthetic oligonucleotide
auuuuacagagaccuuacu

SEQ ID NO: 2236965 - RNA, 19 nt, Artificial Sequence
  Description of Artificial Sequence: Synthetic oligonucleotide
uuccccauagguaguauuu

SEQ ID NO: 2236966 - RNA, 19 nt, Artificial Sequence
  Description of Artificial Sequence: Synthetic oligonucleotide
gaagcaggccgauaauguc

SEQ ID NO: 2236967 - RNA, 19 nt, Artificial Sequence
  Description of Artificial Sequence: Synthetic oligonucleotide
cucauaauuuggccggaug

SEQ ID NO: 2236968 - RNA, 19 nt, Artificial Sequence
  Description of Artificial Sequence: Synthetic oligonucleotide
ugucuuucggugaggcaga

SEQ ID NO: 2236969 - RNA, 19 nt, Artificial Sequence
  Description of Artificial Sequence: Synthetic oligonucleotide
cucgguucgagcccguagc

SEQ ID NO: 2236970 - RNA, 19 nt, Artificial Sequence
  Description of Artificial Sequence: Synthetic oligonucleotide
gguucgagcccguagccgg

SEQ ID NO: 2236971 - RNA, 19 nt, Artificial Sequence
  Description of Artificial Sequence: Synthetic oligonucleotide
gcauucgcauaauacaaug

SEQ ID NO: 2236972 - RNA, 19 nt, Artificial Sequence
  Description of Artificial Sequence: Synthetic oligonucleotide
cucucggccgccaagucug

SEQ ID NO: 2236973 - RNA, 19 nt, Artificial Sequence
  Description of Artificial Sequence: Synthetic oligonucleotide
ggagcgaaaaccgaacuug

SEQ ID NO: 2236974 - RNA, 19 nt, Artificial Sequence
  Description of Artificial Sequence: Synthetic oligonucleotide
gcgcagugcauguugaagg

SEQ ID NO: 2236975 - RNA, 19 nt, Artificial Sequence
  Description of Artificial Sequence: Synthetic oligonucleotide
uccuggagcgaaaaccgaa

SEQ ID NO: 2236976 - RNA, 19 nt, Artificial Sequence
  Description of Artificial Sequence: Synthetic oligonucleotide
agguaguauuucuuuuaca

SEQ ID NO: 2236977 - RNA, 19 nt, Artificial Sequence
  Description of Artificial Sequence: Synthetic oligonucleotide
gggguuggaagcaaaggcg

SEQ ID NO: 2236978 - RNA, 19 nt, Artificial Sequence
  Description of Artificial Sequence: Synthetic oligonucleotide
cuuuuacaguguugagaag

SEQ ID NO: 2236979 - RNA, 19 nt, Artificial Sequence
  Description of Artificial Sequence: Synthetic oligonucleotide
uagugucgguuuuacgaga

SEQ ID NO: 2236980 - RNA, 19 nt, Artificial Sequence
  Description of Artificial Sequence: Synthetic oligonucleotide
ucugcaccgaggcggagaa

SEQ ID NO: 2236981 - RNA, 19 nt, Artificial Sequence
  Description of Artificial Sequence: Synthetic oligonucleotide
cuggccagauguuuuguuc

SEQ ID NO: 2236982 - RNA, 19 nt, Artificial Sequence
  Description of Artificial Sequence: Synthetic oligonucleotide
guuacucucggccgccaag

SEQ ID NO: 2236983 - RNA, 19 nt, Artificial Sequence
  Description of Artificial Sequence: Synthetic oligonucleotide
ucgguuuuacgagauuccu

SEQ ID NO: 2236984 - RNA, 19 nt, Artificial Sequence
  Description of Artificial Sequence: Synthetic oligonucleotide
gagcgaaaaccgaacuugc

SEQ ID NO: 2236985 - RNA, 19 nt, Artificial Sequence
  Description of Artificial Sequence: Synthetic oligonucleotide
ucucuaugcgccgccgccg

SEQ ID NO: 2236986 - RNA, 19 nt, Artificial Sequence
  Description of Artificial Sequence: Synthetic oligonucleotide
aaaggcgcaagaaguuugu

SEQ ID NO: 2236987 - RNA, 19 nt, Artificial Sequence
  Description of Artificial Sequence: Synthetic oligonucleotide
caagucugagucccucugc

SEQ ID NO: 2236988 - RNA, 19 nt, Artificial Sequence
  Description of Artificial Sequence: Synthetic oligonucleotide
uggagcgaaaaccgaacuu

SEQ ID NO: 2236989 - RNA, 19 nt, Artificial Sequence
  Description of Artificial Sequence: Synthetic oligonucleotide
guaguauuucuuuuacagu

SEQ ID NO: 2236990 - RNA, 19 nt, Artificial Sequence
  Description of Artificial Sequence: Synthetic oligonucleotide
uuguccuggccagugacac

SEQ ID NO: 2236991 - RNA, 19 nt, Artificial Sequence
  Description of Artificial Sequence: Synthetic oligonucleotide
ucgguucgagcccguagcc

SEQ ID NO: 2236992 - RNA, 19 nt, Artificial Sequence
  Description of Artificial Sequence: Synthetic oligonucleotide
guuuuagugucgguuuuac

SEQ ID NO: 2236993 - RNA, 19 nt, Artificial Sequence
  Description of Artificial Sequence: Synthetic oligonucleotide
caacacacuuccccauagg

SEQ ID NO: 2236994 - RNA, 19 nt, Artificial Sequence
  Description of Artificial Sequence: Synthetic oligonucleotide
agcgaaaaccgaacuugcg

SEQ ID NO: 2236995 - RNA, 19 nt, Artificial Sequence
  Description of Artificial Sequence: Synthetic oligonucleotide
ggaaguuacucucggccgc

SEQ ID NO: 2236996 - RNA, 19 nt, Artificial Sequence
  Description of Artificial Sequence: Synthetic oligonucleotide
auagaaaaggggaggcaca

SEQ ID NO: 2236997 - RNA, 19 nt, Artificial Sequence
  Description of Artificial Sequence: Synthetic oligonucleotide
gaucucuaugcgccgccgc

SEQ ID NO: 2236998 - RNA, 19 nt, Artificial Sequence
  Description of Artificial Sequence: Synthetic oligonucleotide
cgaaaaccgaacuugcggc

SEQ ID NO: 2236999 - RNA, 19 nt, Artificial Sequence
  Description of Artificial Sequence: Synthetic oligonucleotide
gcauguugaaggaacucgg

SEQ ID NO: 2237000 - RNA, 19 nt, Artificial Sequence
  Description of Artificial Sequence: Synthetic oligonucleotide
acucgguucgagcccguag

SEQ ID NO: 2237001 - RNA, 19 nt, Artificial Sequence
  Description of Artificial Sequence: Synthetic oligonucleotide
agggacguuuuagugucgg

SEQ ID NO: 2237002 - RNA, 19 nt, Artificial Sequence
  Description of Artificial Sequence: Synthetic oligonucleotide
gaaguuacucucggccgcc

SEQ ID NO: 2237003 - RNA, 19 nt, Artificial Sequence
  Description of Artificial Sequence: Synthetic oligonucleotide
gucgguuuuacgagauucc

SEQ ID NO: 2237004 - RNA, 19 nt, Artificial Sequence
  Description of Artificial Sequence: Synthetic oligonucleotide
cccgcuuucggucaguccc

SEQ ID NO: 2237005 - RNA, 19 nt, Artificial Sequence
  Description of Artificial Sequence: Synthetic oligonucleotide
agagaccuuacuagcaaca

SEQ ID NO: 2237006 - RNA, 19 nt, Artificial Sequence
  Description of Artificial Sequence: Synthetic oligonucleotide
ucugucuuucggugaggca

SEQ ID NO: 2237007 - RNA, 19 nt, Artificial Sequence
  Description of Artificial Sequence: Synthetic oligonucleotide
uggccggaugauuuguagu

SEQ ID NO: 2237008 - RNA, 19 nt, Artificial Sequence
  Description of Artificial Sequence: Synthetic oligonucleotide
uuacucucggccgccaagu

SEQ ID NO: 2237009 - RNA, 19 nt, Artificial Sequence
  Description of Artificial Sequence: Synthetic oligonucleotide
caagaaguuuguucgggaa

SEQ ID NO: 2237010 - RNA, 19 nt, Artificial Sequence
  Description of Artificial Sequence: Synthetic oligonucleotide
gcuccuggagcgaaaaccg

SEQ ID NO: 2237011 - RNA, 19 nt, Artificial Sequence
  Description of Artificial Sequence: Synthetic oligonucleotide
ccggaaguuacucucggcc

SEQ ID NO: 2237012 - RNA, 19 nt, Artificial Sequence
  Description of Artificial Sequence: Synthetic oligonucleotide
uccggaaguuacucucggc

SEQ ID NO: 2237013 - RNA, 19 nt, Artificial Sequence
  Description of Artificial Sequence: Synthetic oligonucleotide
aaagggcgcgcagugcaug

SEQ ID NO: 2237014 - RNA, 19 nt, Artificial Sequence
  Description of Artificial Sequence: Synthetic oligonucleotide
uacgagauuccuugauaua

SEQ ID NO: 2237015 - RNA, 19 nt, Artificial Sequence
  Description of Artificial Sequence: Synthetic oligonucleotide
auaauuuggccggaugauu

SEQ ID NO: 2237016 - RNA, 19 nt, Artificial Sequence
  Description of Artificial Sequence: Synthetic oligonucleotide
aagggcgcgcagugcaugu

SEQ ID NO: 2237017 - RNA, 19 nt, Artificial Sequence
  Description of Artificial Sequence: Synthetic oligonucleotide
gucgcccggacacaccccg

SEQ ID NO: 2237018 - RNA, 19 nt, Artificial Sequence
  Description of Artificial Sequence: Synthetic oligonucleotide
acacaccccggagagguuc

SEQ ID NO: 2237019 - RNA, 19 nt, Artificial Sequence
  Description of Artificial Sequence: Synthetic oligonucleotide
aacucauaauuuggccgga

SEQ ID NO: 2237020 - RNA, 19 nt, Artificial Sequence
  Description of Artificial Sequence: Synthetic oligonucleotide
gaaaaccgaacuugcggcu

SEQ ID NO: 2237021 - RNA, 19 nt, Artificial Sequence
  Description of Artificial Sequence: Synthetic oligonucleotide
guuuuacgagauuccuuga

SEQ ID NO: 2237022 - RNA, 19 nt, Artificial Sequence
  Description of Artificial Sequence: Synthetic oligonucleotide
agugcauguugaaggaacu

SEQ ID NO: 2237023 - RNA, 19 nt, Artificial Sequence
  Description of Artificial Sequence: Synthetic oligonucleotide
agaccuuacuagcaacaua

SEQ ID NO: 2237024 - RNA, 19 nt, Artificial Sequence
  Description of Artificial Sequence: Synthetic oligonucleotide
uguagucagggacguuuua

SEQ ID NO: 2237025 - RNA, 19 nt, Artificial Sequence
  Description of Artificial Sequence: Synthetic oligonucleotide
agcccaaauuucauccauc

SEQ ID NO: 2237026 - RNA, 19 nt, Artificial Sequence
  Description of Artificial Sequence: Synthetic oligonucleotide
ggcuccuggagcgaaaacc

SEQ ID NO: 2237027 - RNA, 19 nt, Artificial Sequence
  Description of Artificial Sequence: Synthetic oligonucleotide
gacguuuuagugucgguuu

SEQ ID NO: 2237028 - RNA, 19 nt, Artificial Sequence
  Description of Artificial Sequence: Synthetic oligonucleotide
aagccaugaagcaggccga

SEQ ID NO: 2237029 - RNA, 19 nt, Artificial Sequence
  Description of Artificial Sequence: Synthetic oligonucleotide
uccauagcccgggcgcugg

SEQ ID NO: 2237030 - RNA, 19 nt, Artificial Sequence
  Description of Artificial Sequence: Synthetic oligonucleotide
guacagugucugcaccgag

SEQ ID NO: 2237031 - RNA, 19 nt, Artificial Sequence
  Description of Artificial Sequence: Synthetic oligonucleotide
gucagggacguuuuagugu

SEQ ID NO: 2237032 - RNA, 19 nt, Artificial Sequence
  Description of Artificial Sequence: Synthetic oligonucleotide
auuuggccggaugauuugu

SEQ ID NO: 2237033 - RNA, 19 nt, Artificial Sequence
  Description of Artificial Sequence: Synthetic oligonucleotide
ggguuggaagcaaaggcgc

SEQ ID NO: 2237034 - RNA, 19 nt, Artificial Sequence
  Description of Artificial Sequence: Synthetic oligonucleotide
ggccggaugauuuguaguc

SEQ ID NO: 2237035 - RNA, 19 nt, Artificial Sequence
  Description of Artificial Sequence: Synthetic oligonucleotide
cacauuccagaaagccaug

SEQ ID NO: 2237036 - RNA, 19 nt, Artificial Sequence
  Description of Artificial Sequence: Synthetic oligonucleotide
aggcuccuggagcgaaaac

SEQ ID NO: 2237037 - RNA, 19 nt, Artificial Sequence
  Description of Artificial Sequence: Synthetic oligonucleotide
gagcuucgcauccaggggu

SEQ ID NO: 2237038 - RNA, 19 nt, Artificial Sequence
  Description of Artificial Sequence: Synthetic oligonucleotide
gcgugcgcgaucucuaugc

SEQ ID NO: 2237039 - RNA, 19 nt, Artificial Sequence
  Description of Artificial Sequence: Synthetic oligonucleotide
uccccauagguaguauuuc

SEQ ID NO: 2237040 - RNA, 19 nt, Artificial Sequence
  Description of Artificial Sequence: Synthetic oligonucleotide
gacaacacacuuccccaua

SEQ ID NO: 2237041 - RNA, 19 nt, Artificial Sequence
  Description of Artificial Sequence: Synthetic oligonucleotide
guagccggccgcguagacg

SEQ ID NO: 2237042 - RNA, 19 nt, Artificial Sequence
  Description of Artificial Sequence: Synthetic oligonucleotide
ucggccgccaagucugagu

SEQ ID NO: 2237043 - RNA, 19 nt, Artificial Sequence
  Description of Artificial Sequence: Synthetic oligonucleotide
uaugcgccgccgccgaguc

SEQ ID NO: 2237044 - RNA, 19 nt, Artificial Sequence
  Description of Artificial Sequence: Synthetic oligonucleotide
ccagaaagccaugaagcag

SEQ ID NO: 2237045 - RNA, 19 nt, Artificial Sequence
  Description of Artificial Sequence: Synthetic oligonucleotide
ucuggcggccccgcuuucg

SEQ ID NO: 2237046 - RNA, 19 nt, Artificial Sequence
  Description of Artificial Sequence: Synthetic oligonucleotide
ucgagcccguagccggccg

SEQ ID NO: 2237047 - RNA, 19 nt, Artificial Sequence
  Description of Artificial Sequence: Synthetic oligonucleotide
gcgccagccgccuuggcgg

SEQ ID NO: 2237048 - RNA, 19 nt, Artificial Sequence
  Description of Artificial Sequence: Synthetic oligonucleotide
gugcgcgaucucuaugcgc

SEQ ID NO: 2237049 - RNA, 19 nt, Artificial Sequence
  Description of Artificial Sequence: Synthetic oligonucleotide
agcauucgcauaauacaau

SEQ ID NO: 2237050 - RNA, 19 nt, Artificial Sequence
  Description of Artificial Sequence: Synthetic oligonucleotide
aaggcuccuggagcgaaaa

SEQ ID NO: 2237051 - RNA, 19 nt, Artificial Sequence
  Description of Artificial Sequence: Synthetic oligonucleotide
cugcuccauagcccgggcg

SEQ ID NO: 2237052 - RNA, 19 nt, Artificial Sequence
  Description of Artificial Sequence: Synthetic oligonucleotide
agcaggccgauaauguccu

SEQ ID NO: 2237053 - RNA, 19 nt, Artificial Sequence
  Description of Artificial Sequence: Synthetic oligonucleotide
cggaaguuacucucggccg

SEQ ID NO: 2237054 - RNA, 19 nt, Artificial Sequence
  Description of Artificial Sequence: Synthetic oligonucleotide
gccgauaauguccuuccca

SEQ ID NO: 2237055 - RNA, 19 nt, Artificial Sequence
  Description of Artificial Sequence: Synthetic oligonucleotide
aggcggagaacggggcgcc

SEQ ID NO: 2237056 - RNA, 19 nt, Artificial Sequence
  Description of Artificial Sequence: Synthetic oligonucleotide
agugucgguuuuacgagau

SEQ ID NO: 2237057 - RNA, 19 nt, Artificial Sequence
  Description of Artificial Sequence: Synthetic oligonucleotide
ccggaugauuuguagucag

SEQ ID NO: 2237058 - RNA, 19 nt, Artificial Sequence
  Description of Artificial Sequence: Synthetic oligonucleotide
gaaccacaguccacaaaga

SEQ ID NO: 2237059 - RNA, 19 nt, Artificial Sequence
  Description of Artificial Sequence: Synthetic oligonucleotide
cucaaagggcgcgcagugc

SEQ ID NO: 2237060 - RNA, 19 nt, Artificial Sequence
  Description of Artificial Sequence: Synthetic oligonucleotide
cgcauaauacaaugaacuc

SEQ ID NO: 2237061 - RNA, 19 nt, Artificial Sequence
  Description of Artificial Sequence: Synthetic oligonucleotide
gcaagaaguuuguucggga

SEQ ID NO: 2237062 - RNA, 19 nt, Artificial Sequence
  Description of Artificial Sequence: Synthetic oligonucleotide
cagugucugcaccgaggcg

SEQ ID NO: 2237063 - RNA, 19 nt, Artificial Sequence
  Description of Artificial Sequence: Synthetic oligonucleotide
gguguacaaaacagcaaga

SEQ ID NO: 2237064 - RNA, 19 nt, Artificial Sequence
  Description of Artificial Sequence: Synthetic oligonucleotide
cauagguaguauuucuuuu

SEQ ID NO: 2237065 - RNA, 19 nt, Artificial Sequence
  Description of Artificial Sequence: Synthetic oligonucleotide
gagaacggggcgcccggac

SEQ ID NO: 2237066 - RNA, 19 nt, Artificial Sequence
  Description of Artificial Sequence: Synthetic oligonucleotide
caggccgauaauguccuuc

SEQ ID NO: 2237067 - RNA, 19 nt, Artificial Sequence
  Description of Artificial Sequence: Synthetic oligonucleotide
ccuggagcgaaaaccgaac

SEQ ID NO: 2237068 - RNA, 19 nt, Artificial Sequence
  Description of Artificial Sequence: Synthetic oligonucleotide
uugaaggaacucgguucga

SEQ ID NO: 2237069 - RNA, 19 nt, Artificial Sequence
  Description of Artificial Sequence: Synthetic oligonucleotide
cagggacguuuuagugucg

SEQ ID NO: 2237070 - RNA, 19 nt, Artificial Sequence
  Description of Artificial Sequence: Synthetic oligonucleotide
agugacacccuggccagau

SEQ ID NO: 2237071 - RNA, 19 nt, Artificial Sequence
  Description of Artificial Sequence: Synthetic oligonucleotide
ucuuucggugaggcagagc

SEQ ID NO: 2237072 - RNA, 19 nt, Artificial Sequence
  Description of Artificial Sequence: Synthetic oligonucleotide
agcaaaggcgcaagaaguu

SEQ ID NO: 2237073 - RNA, 19 nt, Artificial Sequence
  Description of Artificial Sequence: Synthetic oligonucleotide
acacacuuccccauaggua

SEQ ID NO: 2237074 - RNA, 19 nt, Artificial Sequence
  Description of Artificial Sequence: Synthetic oligonucleotide
ccuuacuagcaacauagaa

SEQ ID NO: 2237075 - RNA, 19 nt, Artificial Sequence
  Description of Artificial Sequence: Synthetic oligonucleotide
gcgcaagaaguuuguucgg

SEQ ID NO: 2237076 - RNA, 19 nt, Artificial Sequence
  Description of Artificial Sequence: Synthetic oligonucleotide
aggguguacaaaacagcaa

SEQ ID NO: 2237077 - RNA, 19 nt, Artificial Sequence
  Description of Artificial Sequence: Synthetic oligonucleotide
uacucucggccgccaaguc

SEQ ID NO: 2237078 - RNA, 19 nt, Artificial Sequence
  Description of Artificial Sequence: Synthetic oligonucleotide
aaguuacucucggccgcca

SEQ ID NO: 2237079 - RNA, 19 nt, Artificial Sequence
  Description of Artificial Sequence: Synthetic oligonucleotide
uuggcgccagccgccuugg

SEQ ID NO: 2237080 - RNA, 19 nt, Artificial Sequence
  Description of Artificial Sequence: Synthetic oligonucleotide
uuguucgggaaaggcuccu

SEQ ID NO: 2237081 - RNA, 19 nt, Artificial Sequence
  Description of Artificial Sequence: Synthetic oligonucleotide
cuucagccuuguccuggcc

SEQ ID NO: 2237082 - RNA, 19 nt, Artificial Sequence
  Description of Artificial Sequence: Synthetic oligonucleotide
gccgccaagucugaguccc

SEQ ID NO: 2237083 - RNA, 19 nt, Artificial Sequence
  Description of Artificial Sequence: Synthetic oligonucleotide
caccgaggcggagaacggg

SEQ ID NO: 2237084 - RNA, 19 nt, Artificial Sequence
  Description of Artificial Sequence: Synthetic oligonucleotide
gguucugcucaaagggcgc

SEQ ID NO: 2237085 - RNA, 19 nt, Artificial Sequence
  Description of Artificial Sequence: Synthetic oligonucleotide
guguugagaagcccaaauu

SEQ ID NO: 2237086 - RNA, 19 nt, Artificial Sequence
  Description of Artificial Sequence: Synthetic oligonucleotide
cugcucaaagggcgcgcag

SEQ ID NO: 2237087 - RNA, 19 nt, Artificial Sequence
  Description of Artificial Sequence: Synthetic oligonucleotide
cauagcccgggcgcugggg

SEQ ID NO: 2237088 - RNA, 19 nt, Artificial Sequence
  Description of Artificial Sequence: Synthetic oligonucleotide
ccggaccugcuccauagcc

SEQ ID NO: 2237089 - RNA, 19 nt, Artificial Sequence
  Description of Artificial Sequence: Synthetic oligonucleotide
cauaauuuggccggaugau

SEQ ID NO: 2237090 - RNA, 19 nt, Artificial Sequence
  Description of Artificial Sequence: Synthetic oligonucleotide
ccggacacaccccggagag

SEQ ID NO: 2237091 - RNA, 19 nt, Artificial Sequence
  Description of Artificial Sequence: Synthetic oligonucleotide
gccgcguagacgcccggcg

SEQ ID NO: 2237092 - RNA, 19 nt, Artificial Sequence
  Description of Artificial Sequence: Synthetic oligonucleotide
uucgagcccguagccggcc

SEQ ID NO: 2237093 - RNA, 19 nt, Artificial Sequence
  Description of Artificial Sequence: Synthetic oligonucleotide
aaaggcuccuggagcgaaa

SEQ ID NO: 2237094 - RNA, 19 nt, Artificial Sequence
  Description of Artificial Sequence: Synthetic oligonucleotide
aaggcgcaagaaguuuguu

SEQ ID NO: 2237095 - RNA, 19 nt, Artificial Sequence
  Description of Artificial Sequence: Synthetic oligonucleotide
gcccggaccugcuccauag

SEQ ID NO: 2237096 - RNA, 19 nt, Artificial Sequence
  Description of Artificial Sequence: Synthetic oligonucleotide
aaccgaacuugcggcugga

SEQ ID NO: 2237097 - RNA, 19 nt, Artificial Sequence
  Description of Artificial Sequence: Synthetic oligonucleotide
ggcggggucgcccggacac

SEQ ID NO: 2237098 - RNA, 19 nt, Artificial Sequence
  Description of Artificial Sequence: Synthetic oligonucleotide
gcccaaauuucauccaucu

SEQ ID NO: 2237099 - RNA, 19 nt, Artificial Sequence
  Description of Artificial Sequence: Synthetic oligonucleotide
auaauacaaugaacucaua

SEQ ID NO: 2237100 - RNA, 19 nt, Artificial Sequence
  Description of Artificial Sequence: Synthetic oligonucleotide
gagaccuuacuagcaacau

SEQ ID NO: 2237101 - RNA, 19 nt, Artificial Sequence
  Description of Artificial Sequence: Synthetic oligonucleotide
cuccuggagcgaaaaccga

SEQ ID NO: 2237102 - RNA, 19 nt, Artificial Sequence
  Description of Artificial Sequence: Synthetic oligonucleotide
cggaugauuuguagucagg

SEQ ID NO: 2237103 - RNA, 19 nt, Artificial Sequence
  Description of Artificial Sequence: Synthetic oligonucleotide
ucucggccgccaagucuga

SEQ ID NO: 2237104 - RNA, 19 nt, Artificial Sequence
  Description of Artificial Sequence: Synthetic oligonucleotide
gucuuucggugaggcagag

SEQ ID NO: 2237105 - RNA, 19 nt, Artificial Sequence
  Description of Artificial Sequence: Synthetic oligonucleotide
gcacauuccagaaagccau

SEQ ID NO: 2237106 - RNA, 19 nt, Artificial Sequence
  Description of Artificial Sequence: Synthetic oligonucleotide
gguacagugucugcaccga

SEQ ID NO: 2237107 - RNA, 19 nt, Artificial Sequence
  Description of Artificial Sequence: Synthetic oligonucleotide
cuggagcgaaaaccgaacu

SEQ ID NO: 2237108 - RNA, 19 nt, Artificial Sequence
  Description of Artificial Sequence: Synthetic oligonucleotide
uuggcggggucgcccggac

SEQ ID NO: 2237109 - RNA, 19 nt, Artificial Sequence
  Description of Artificial Sequence: Synthetic oligonucleotide
ucggucagucccugagcuu

SEQ ID NO: 2237110 - RNA, 19 nt, Artificial Sequence
  Description of Artificial Sequence: Synthetic oligonucleotide
gugacacccuggccagaug

SEQ ID NO: 2237111 - RNA, 19 nt, Artificial Sequence
  Description of Artificial Sequence: Synthetic oligonucleotide
cggcuggauauuuagaaaa

SEQ ID NO: 2237112 - RNA, 19 nt, Artificial Sequence
  Description of Artificial Sequence: Synthetic oligonucleotide
ggccgauaauguccuuccc

SEQ ID NO: 2237113 - RNA, 19 nt, Artificial Sequence
  Description of Artificial Sequence: Synthetic oligonucleotide
guucgagcccguagccggc

SEQ ID NO: 2237114 - RNA, 19 nt, Artificial Sequence
  Description of Artificial Sequence: Synthetic oligonucleotide
gguuggaagcaaaggcgca

SEQ ID NO: 2237115 - RNA, 19 nt, Artificial Sequence
  Description of Artificial Sequence: Synthetic oligonucleotide
cucuaugcgccgccgccga

SEQ ID NO: 2237116 - RNA, 19 nt, Artificial Sequence
  Description of Artificial Sequence: Synthetic oligonucleotide
gcgaucucuaugcgccgcc

SEQ ID NO: 2237117 - RNA, 19 nt, Artificial Sequence
  Description of Artificial Sequence: Synthetic oligonucleotide
gggcgcgcagugcauguug

SEQ ID NO: 2237118 - RNA, 19 nt, Artificial Sequence
  Description of Artificial Sequence: Synthetic oligonucleotide
gcggcuggauauuuagaaa

SEQ ID NO: 2237119 - RNA, 19 nt, Artificial Sequence
  Description of Artificial Sequence: Synthetic oligonucleotide
acacuuccccauagguagu

SEQ ID NO: 2237120 - RNA, 19 nt, Artificial Sequence
  Description of Artificial Sequence: Synthetic oligonucleotide
ggacacaccccggagaggu

SEQ ID NO: 2237121 - RNA, 19 nt, Artificial Sequence
  Description of Artificial Sequence: Synthetic oligonucleotide
caccccggagagguucugc

SEQ ID NO: 2237122 - RNA, 19 nt, Artificial Sequence
  Description of Artificial Sequence: Synthetic oligonucleotide
cccggagagguucugcuca

SEQ ID NO: 2237123 - RNA, 19 nt, Artificial Sequence
  Description of Artificial Sequence: Synthetic oligonucleotide
auuuguagucagggacguu

SEQ ID NO: 2237124 - RNA, 19 nt, Artificial Sequence
  Description of Artificial Sequence: Synthetic oligonucleotide
uggcggggucgcccggaca

SEQ ID NO: 2237125 - RNA, 19 nt, Artificial Sequence
  Description of Artificial Sequence: Synthetic oligonucleotide
uccuuggcgccagccgccu

SEQ ID NO: 2237126 - RNA, 19 nt, Artificial Sequence
  Description of Artificial Sequence: Synthetic oligonucleotide
aacucgguucgagcccgua

SEQ ID NO: 2237127 - RNA, 19 nt, Artificial Sequence
  Description of Artificial Sequence: Synthetic oligonucleotide
gcgcgaucucuaugcgccg

SEQ ID NO: 2237128 - RNA, 19 nt, Artificial Sequence
  Description of Artificial Sequence: Synthetic oligonucleotide
guagacgcccggcgcgcuc

SEQ ID NO: 2237129 - RNA, 19 nt, Artificial Sequence
  Description of Artificial Sequence: Synthetic oligonucleotide
agccaugaagcaggccgau

SEQ ID NO: 2237130 - RNA, 19 nt, Artificial Sequence
  Description of Artificial Sequence: Synthetic oligonucleotide
cuccauagcccgggcgcug

SEQ ID NO: 2237131 - RNA, 19 nt, Artificial Sequence
  Description of Artificial Sequence: Synthetic oligonucleotide
acuugcggcuggauauuua

SEQ ID NO: 2237132 - RNA, 19 nt, Artificial Sequence
  Description of Artificial Sequence: Synthetic oligonucleotide
gccggaugauuuguaguca

SEQ ID NO: 2237133 - RNA, 19 nt, Artificial Sequence
  Description of Artificial Sequence: Synthetic oligonucleotide
ccgauaauguccuucccau

SEQ ID NO: 2237134 - RNA, 19 nt, Artificial Sequence
  Description of Artificial Sequence: Synthetic oligonucleotide
cgcguagacgcccggcgcg

SEQ ID NO: 2237135 - RNA, 19 nt, Artificial Sequence
  Description of Artificial Sequence: Synthetic oligonucleotide
gguagauccggaaguuacu

SEQ ID NO: 2237136 - RNA, 19 nt, Artificial Sequence
  Description of Artificial Sequence: Synthetic oligonucleotide
uggcggccccgcuuucggu

SEQ ID NO: 2237137 - RNA, 19 nt, Artificial Sequence
  Description of Artificial Sequence: Synthetic oligonucleotide
agcuucgcauccaggggua

SEQ ID NO: 2237138 - RNA, 19 nt, Artificial Sequence
  Description of Artificial Sequence: Synthetic oligonucleotide
gcaccgaggcggagaacgg

SEQ ID NO: 2237139 - RNA, 19 nt, Artificial Sequence
  Description of Artificial Sequence: Synthetic oligonucleotide
cgugcgcgaucucuaugcg

SEQ ID NO: 2237140 - RNA, 19 nt, Artificial Sequence
  Description of Artificial Sequence: Synthetic oligonucleotide
ggcggccccgcuuucgguc

SEQ ID NO: 2237141 - RNA, 19 nt, Artificial Sequence
  Description of Artificial Sequence: Synthetic oligonucleotide
ggacguuuuagugucgguu

SEQ ID NO: 2237142 - RNA, 19 nt, Artificial Sequence
  Description of Artificial Sequence: Synthetic oligonucleotide
ggccgccaagucugagucc

SEQ ID NO: 2237143 - RNA, 19 nt, Artificial Sequence
  Description of Artificial Sequence: Synthetic oligonucleotide
cggucagucccugagcuuc

SEQ ID NO: 2237144 - RNA, 19 nt, Artificial Sequence
  Description of Artificial Sequence: Synthetic oligonucleotide
cccguagccggccgcguag

SEQ ID NO: 2237145 - RNA, 19 nt, Artificial Sequence
  Description of Artificial Sequence: Synthetic oligonucleotide
cccgccgggguacaguguc

SEQ ID NO: 2237146 - RNA, 19 nt, Artificial Sequence
  Description of Artificial Sequence: Synthetic oligonucleotide
cucggccgccaagucugag

SEQ ID NO: 2237147 - RNA, 19 nt, Artificial Sequence
  Description of Artificial Sequence: Synthetic oligonucleotide
agcgcgugcgcgaucucua

SEQ ID NO: 2237148 - RNA, 19 nt, Artificial Sequence
  Description of Artificial Sequence: Synthetic oligonucleotide
gcccggacacaccccggag

SEQ ID NO: 2237149 - RNA, 19 nt, Artificial Sequence
  Description of Artificial Sequence: Synthetic oligonucleotide
gccgggguacagugucugc

SEQ ID NO: 2237150 - RNA, 19 nt, Artificial Sequence
  Description of Artificial Sequence: Synthetic oligonucleotide
cacuuccccauagguagua

SEQ ID NO: 2237151 - RNA, 19 nt, Artificial Sequence
  Description of Artificial Sequence: Synthetic oligonucleotide
uggcgccagccgccuuggc

SEQ ID NO: 2237152 - RNA, 19 nt, Artificial Sequence
  Description of Artificial Sequence: Synthetic oligonucleotide
ccgcguagacgcccggcgc

SEQ ID NO: 2237153 - RNA, 19 nt, Artificial Sequence
  Description of Artificial Sequence: Synthetic oligonucleotide
acaccccggagagguucug

SEQ ID NO: 2237154 - RNA, 19 nt, Artificial Sequence
  Description of Artificial Sequence: Synthetic oligonucleotide
cggccgccaagucugaguc

SEQ ID NO: 2237155 - RNA, 19 nt, Artificial Sequence
  Description of Artificial Sequence: Synthetic oligonucleotide
cuuggcggggucgcccgga

SEQ ID NO: 2237156 - RNA, 19 nt, Artificial Sequence
  Description of Artificial Sequence: Synthetic oligonucleotide
cgaucucuaugcgccgccg

SEQ ID NO: 2237157 - RNA, 19 nt, Artificial Sequence
  Description of Artificial Sequence: Synthetic oligonucleotide
ccggccgcguagacgcccg

SEQ ID NO: 2237158 - RNA, 19 nt, Artificial Sequence
  Description of Artificial Sequence: Synthetic oligonucleotide
ccccgcuuucggucagucc

SEQ ID NO: 2237159 - RNA, 19 nt, Artificial Sequence
  Description of Artificial Sequence: Synthetic oligonucleotide
caaagggcgcgcagugcau

SEQ ID NO: 2237160 - RNA, 19 nt, Artificial Sequence
  Description of Artificial Sequence: Synthetic oligonucleotide
ggcgcgcagugcauguuga

SEQ ID NO: 2237161 - RNA, 19 nt, Artificial Sequence
  Description of Artificial Sequence: Synthetic oligonucleotide
gcaaaggcgcaagaaguuu

SEQ ID NO: 2237162 - RNA, 19 nt, Artificial Sequence
  Description of Artificial Sequence: Synthetic oligonucleotide
cgguucgagcccguagccg

SEQ ID NO: 2237163 - RNA, 19 nt, Artificial Sequence
  Description of Artificial Sequence: Synthetic oligonucleotide
cacccuggccagauguuuu

SEQ ID NO: 2237164 - RNA, 19 nt, Artificial Sequence
  Description of Artificial Sequence: Synthetic oligonucleotide
gggguagauccggaaguua

SEQ ID NO: 2237165 - RNA, 19 nt, Artificial Sequence
  Description of Artificial Sequence: Synthetic oligonucleotide
cuaugcgccgccgccgagu

SEQ ID NO: 2237166 - RNA, 19 nt, Artificial Sequence
  Description of Artificial Sequence: Synthetic oligonucleotide
cccggacacaccccggaga

SEQ ID NO: 2237167 - RNA, 19 nt, Artificial Sequence
  Description of Artificial Sequence: Synthetic oligonucleotide
gcguagacgcccggcgcgc

SEQ ID NO: 2237168 - RNA, 19 nt, Artificial Sequence
  Description of Artificial Sequence: Synthetic oligonucleotide
ccgggguacagugucugca

SEQ ID NO: 2237169 - RNA, 19 nt, Artificial Sequence
  Description of Artificial Sequence: Synthetic oligonucleotide
gacacccuggccagauguu

SEQ ID NO: 2237170 - RNA, 19 nt, Artificial Sequence
  Description of Artificial Sequence: Synthetic oligonucleotide
cccauagguaguauuucuu

SEQ ID NO: 2237171 - RNA, 19 nt, Artificial Sequence
  Description of Artificial Sequence: Synthetic oligonucleotide
gccgccuuggcggggucgc

SEQ ID NO: 2237172 - RNA, 19 nt, Artificial Sequence
  Description of Artificial Sequence: Synthetic oligonucleotide
gggacguuuuagugucggu

SEQ ID NO: 2237173 - RNA, 19 nt, Artificial Sequence
  Description of Artificial Sequence: Synthetic oligonucleotide
cccggaccugcuccauagc

SEQ ID NO: 2237174 - RNA, 19 nt, Artificial Sequence
  Description of Artificial Sequence: Synthetic oligonucleotide
gcggccccgcuuucgguca

SEQ ID NO: 2237175 - RNA, 19 nt, Artificial Sequence
  Description of Artificial Sequence: Synthetic oligonucleotide
gugucgguuuuacgagauu

SEQ ID NO: 2237176 - RNA, 19 nt, Artificial Sequence
  Description of Artificial Sequence: Synthetic oligonucleotide
ggcgcccggaccugcucca

SEQ ID NO: 2237177 - RNA, 19 nt, Artificial Sequence
  Description of Artificial Sequence: Synthetic oligonucleotide
gucuggcggccccgcuuuc

SEQ ID NO: 2237178 - RNA, 19 nt, Artificial Sequence
  Description of Artificial Sequence: Synthetic oligonucleotide
ggccgcguagacgcccggc

SEQ ID NO: 2237179 - RNA, 19 nt, Artificial Sequence
  Description of Artificial Sequence: Synthetic oligonucleotide
cgauaauguccuucccaua

SEQ ID NO: 2237180 - RNA, 19 nt, Artificial Sequence
  Description of Artificial Sequence: Synthetic oligonucleotide
ggagaacggggcgcccgga

SEQ ID NO: 2237181 - RNA, 19 nt, Artificial Sequence
  Description of Artificial Sequence: Synthetic oligonucleotide
cgcgugcgcgaucucuaug

SEQ ID NO: 2237182 - RNA, 19 nt, Artificial Sequence
  Description of Artificial Sequence: Synthetic oligonucleotide
cgagauuccuugauauauu

SEQ ID NO: 2237183 - RNA, 19 nt, Artificial Sequence
  Description of Artificial Sequence: Synthetic oligonucleotide
cgagcccguagccggccgc

SEQ ID NO: 2237184 - RNA, 19 nt, Artificial Sequence
  Description of Artificial Sequence: Synthetic oligonucleotide
cagugacacccuggccaga

SEQ ID NO: 2237185 - RNA, 19 nt, Artificial Sequence
  Description of Artificial Sequence: Synthetic oligonucleotide
ggcggagaacggggcgccc

SEQ ID NO: 2237186 - RNA, 19 nt, Artificial Sequence
  Description of Artificial Sequence: Synthetic oligonucleotide
ccacaaagacagugccaua

SEQ ID NO: 2237187 - RNA, 19 nt, Artificial Sequence
  Description of Artificial Sequence: Synthetic oligonucleotide
gaacucgguucgagcccgu

SEQ ID NO: 2237188 - RNA, 19 nt, Artificial Sequence
  Description of Artificial Sequence: Synthetic oligonucleotide
ccggagagguucugcucaa

SEQ ID NO: 2237189 - RNA, 19 nt, Artificial Sequence
  Description of Artificial Sequence: Synthetic oligonucleotide
cgccagccgccuuggcggg

SEQ ID NO: 2237190 - RNA, 19 nt, Artificial Sequence
  Description of Artificial Sequence: Synthetic oligonucleotide
cggacacaccccggagagg

SEQ ID NO: 2237191 - RNA, 19 nt, Artificial Sequence
  Description of Artificial Sequence: Synthetic oligonucleotide
gccgccgccgagucaggua

SEQ ID NO: 2237192 - RNA, 19 nt, Artificial Sequence
  Description of Artificial Sequence: Synthetic oligonucleotide
cgcgcucuggcccgccaug

SEQ ID NO: 2237193 - RNA, 19 nt, Artificial Sequence
  Description of Artificial Sequence: Synthetic oligonucleotide
cgccaagucugagucccuc

SEQ ID NO: 2237194 - RNA, 19 nt, Artificial Sequence
  Description of Artificial Sequence: Synthetic oligonucleotide
gcuccauagcccgggcgcu

SEQ ID NO: 2237195 - RNA, 19 nt, Artificial Sequence
  Description of Artificial Sequence: Synthetic oligonucleotide
cgccgggguacagugucug

SEQ ID NO: 2237196 - RNA, 19 nt, Artificial Sequence
  Description of Artificial Sequence: Synthetic oligonucleotide
gacacaccccggagagguu

SEQ ID NO: 2237197 - RNA, 19 nt, Artificial Sequence
  Description of Artificial Sequence: Synthetic oligonucleotide
ccuggccagauguuuuguu

SEQ ID NO: 2237198 - RNA, 19 nt, Artificial Sequence
  Description of Artificial Sequence: Synthetic oligonucleotide
gccccgcuuucggucaguc

SEQ ID NO: 2237199 - RNA, 19 nt, Artificial Sequence
  Description of Artificial Sequence: Synthetic oligonucleotide
ccgcuuucggucagucccu

SEQ ID NO: 2237200 - RNA, 19 nt, Artificial Sequence
  Description of Artificial Sequence: Synthetic oligonucleotide
cggggucgcccggacacac

SEQ ID NO: 2237201 - RNA, 19 nt, Artificial Sequence
  Description of Artificial Sequence: Synthetic oligonucleotide
gcccguagccggccgcgua

SEQ ID NO: 2237202 - RNA, 19 nt, Artificial Sequence
  Description of Artificial Sequence: Synthetic oligonucleotide
cgcccggacacaccccgga

SEQ ID NO: 2237203 - RNA, 19 nt, Artificial Sequence
  Description of Artificial Sequence: Synthetic oligonucleotide
gcgcgugcgcgaucucuau

SEQ ID NO: 2237204 - RNA, 19 nt, Artificial Sequence
  Description of Artificial Sequence: Synthetic oligonucleotide
gcggggucgcccggacaca

SEQ ID NO: 2237205 - RNA, 19 nt, Artificial Sequence
  Description of Artificial Sequence: Synthetic oligonucleotide
cccuggccagauguuuugu

SEQ ID NO: 2237206 - RNA, 19 nt, Artificial Sequence
  Description of Artificial Sequence: Synthetic oligonucleotide
cggccgcguagacgcccgg

SEQ ID NO: 2237207 - RNA, 19 nt, Artificial Sequence
  Description of Artificial Sequence: Synthetic oligonucleotide
gcaggccgauaauguccuu

SEQ ID NO: 2237208 - RNA, 19 nt, Artificial Sequence
  Description of Artificial Sequence: Synthetic oligonucleotide
ccgccgggguacagugucu

SEQ ID NO: 2237209 - RNA, 19 nt, Artificial Sequence
  Description of Artificial Sequence: Synthetic oligonucleotide
cggagagguucugcucaaa

SEQ ID NO: 2237210 - RNA, 19 nt, Artificial Sequence
  Description of Artificial Sequence: Synthetic oligonucleotide
ccgccaagucugagucccu

SEQ ID NO: 2237211 - RNA, 19 nt, Artificial Sequence
  Description of Artificial Sequence: Synthetic oligonucleotide
ccccgccgggguacagugu

SEQ ID NO: 2237212 - RNA, 19 nt, Artificial Sequence
  Description of Artificial Sequence: Synthetic oligonucleotide
cgcccggaccugcuccaua

SEQ ID NO: 2237213 - RNA, 19 nt, Artificial Sequence
  Description of Artificial Sequence: Synthetic oligonucleotide
cguagacgcccggcgcgcu

SEQ ID NO: 2237214 - RNA, 19 nt, Artificial Sequence
  Description of Artificial Sequence: Synthetic oligonucleotide
gcgcccggaccugcuccau

SEQ ID NO: 2237215 - RNA, 19 nt, Artificial Sequence
  Description of Artificial Sequence: Synthetic oligonucleotide
ccuuggcgccagccgccuu

SEQ ID NO: 2237216 - RNA, 19 nt, Artificial Sequence
  Description of Artificial Sequence: Synthetic oligonucleotide
cgccgccgccgagucaggu

SEQ ID NO: 2237217 - RNA, 19 nt, Artificial Sequence
  Description of Artificial Sequence: Synthetic oligonucleotide
aaugguacaaaguccuagc

SEQ ID NO: 2237218 - RNA, 19 nt, Artificial Sequence
  Description of Artificial Sequence: Synthetic oligonucleotide
guaaguuuuauuuaagaag

SEQ ID NO: 2237219 - RNA, 19 nt, Artificial Sequence
  Description of Artificial Sequence: Synthetic oligonucleotide
uuaagaagcucaaauagcu

SEQ ID NO: 2237220 - RNA, 19 nt, Artificial Sequence
  Description of Artificial Sequence: Synthetic oligonucleotide
aggcaaaucguccaaaucg

SEQ ID NO: 2237221 - RNA, 19 nt, Artificial Sequence
  Description of Artificial Sequence: Synthetic oligonucleotide
aacggauacaagcagccgg

SEQ ID NO: 2237222 - RNA, 19 nt, Artificial Sequence
  Description of Artificial Sequence: Synthetic oligonucleotide
acaaaguccuagcacaacc

SEQ ID NO: 2237223 - RNA, 19 nt, Artificial Sequence
  Description of Artificial Sequence: Synthetic oligonucleotide
gauacaagcagccggcugg

SEQ ID NO: 2237224 - RNA, 19 nt, Artificial Sequence
  Description of Artificial Sequence: Synthetic oligonucleotide
acaguagagacggugagcc

SEQ ID NO: 2237225 - RNA, 19 nt, Artificial Sequence
  Description of Artificial Sequence: Synthetic oligonucleotide
aagucuaucugcuucggcu

SEQ ID NO: 2237226 - RNA, 19 nt, Artificial Sequence
  Description of Artificial Sequence: Synthetic oligonucleotide
cuuguuggaagucuguccg

SEQ ID NO: 2237227 - RNA, 19 nt, Artificial Sequence
  Description of Artificial Sequence: Synthetic oligonucleotide
guaaucgugagccggauag

SEQ ID NO: 2237228 - RNA, 19 nt, Artificial Sequence
  Description of Artificial Sequence: Synthetic oligonucleotide
uuccucgauaugcacaucg

SEQ ID NO: 2237229 - RNA, 19 nt, Artificial Sequence
  Description of Artificial Sequence: Synthetic oligonucleotide
aaagucuaucugcuucggc

SEQ ID NO: 2237230 - RNA, 19 nt, Artificial Sequence
  Description of Artificial Sequence: Synthetic oligonucleotide
ucuuuucgugcacagaaug

SEQ ID NO: 2237231 - RNA, 19 nt, Artificial Sequence
  Description of Artificial Sequence: Synthetic oligonucleotide
aguaaguuuuauuuaagaa

SEQ ID NO: 2237232 - RNA, 19 nt, Artificial Sequence
  Description of Artificial Sequence: Synthetic oligonucleotide
gagucuccaaggcaaaucg

SEQ ID NO: 2237233 - RNA, 19 nt, Artificial Sequence
  Description of Artificial Sequence: Synthetic oligonucleotide
uagugcaacggauacaagc

SEQ ID NO: 2237234 - RNA, 19 nt, Artificial Sequence
  Description of Artificial Sequence: Synthetic oligonucleotide
ggauagaugagacaguugc

SEQ ID NO: 2237235 - RNA, 19 nt, Artificial Sequence
  Description of Artificial Sequence: Synthetic oligonucleotide
uuuaaccagaugagcaucc

SEQ ID NO: 2237236 - RNA, 19 nt, Artificial Sequence
  Description of Artificial Sequence: Synthetic oligonucleotide
gauguggucagcauggcag

SEQ ID NO: 2237237 - RNA, 19 nt, Artificial Sequence
  Description of Artificial Sequence: Synthetic oligonucleotide
aguuuuauuuaagaagcuc

SEQ ID NO: 2237238 - RNA, 19 nt, Artificial Sequence
  Description of Artificial Sequence: Synthetic oligonucleotide
cucgauaugcacaucggcc

SEQ ID NO: 2237239 - RNA, 19 nt, Artificial Sequence
  Description of Artificial Sequence: Synthetic oligonucleotide
agugugaagaucuuuucgu

SEQ ID NO: 2237240 - RNA, 19 nt, Artificial Sequence
  Description of Artificial Sequence: Synthetic oligonucleotide
ugugaagaucuuuucgugc

SEQ ID NO: 2237241 - RNA, 19 nt, Artificial Sequence
  Description of Artificial Sequence: Synthetic oligonucleotide
ugcacagaaugguacaaag

SEQ ID NO: 2237242 - RNA, 19 nt, Artificial Sequence
  Description of Artificial Sequence: Synthetic oligonucleotide
ucgugagccggauagauga

SEQ ID NO: 2237243 - RNA, 19 nt, Artificial Sequence
  Description of Artificial Sequence: Synthetic oligonucleotide
aaaguaaguuuuauuuaag

SEQ ID NO: 2237244 - RNA, 19 nt, Artificial Sequence
  Description of Artificial Sequence: Synthetic oligonucleotide
uucggcuugggcaaguuca

SEQ ID NO: 2237245 - RNA, 19 nt, Artificial Sequence
  Description of Artificial Sequence: Synthetic oligonucleotide
aagaucuuuucgugcacag

SEQ ID NO: 2237246 - RNA, 19 nt, Artificial Sequence
  Description of Artificial Sequence: Synthetic oligonucleotide
agcacaaccuuguuggaag

SEQ ID NO: 2237247 - RNA, 19 nt, Artificial Sequence
  Description of Artificial Sequence: Synthetic oligonucleotide
aacucuuuaaccagaugag

SEQ ID NO: 2237248 - RNA, 19 nt, Artificial Sequence
  Description of Artificial Sequence: Synthetic oligonucleotide
cuuuucgugcacagaaugg

SEQ ID NO: 2237249 - RNA, 19 nt, Artificial Sequence
  Description of Artificial Sequence: Synthetic oligonucleotide
uccagaacagggucgauca

SEQ ID NO: 2237250 - RNA, 19 nt, Artificial Sequence
  Description of Artificial Sequence: Synthetic oligonucleotide
aguagagacggugagcccg

SEQ ID NO: 2237251 - RNA, 19 nt, Artificial Sequence
  Description of Artificial Sequence: Synthetic oligonucleotide
uccaguaaaggccaugcuc

SEQ ID NO: 2237252 - RNA, 19 nt, Artificial Sequence
  Description of Artificial Sequence: Synthetic oligonucleotide
acucuuuaaccagaugagc

SEQ ID NO: 2237253 - RNA, 19 nt, Artificial Sequence
  Description of Artificial Sequence: Synthetic oligonucleotide
uaagaagcucaaauagcug

SEQ ID NO: 2237254 - RNA, 19 nt, Artificial Sequence
  Description of Artificial Sequence: Synthetic oligonucleotide
accggaggaccccugagcc

SEQ ID NO: 2237255 - RNA, 19 nt, Artificial Sequence
  Description of Artificial Sequence: Synthetic oligonucleotide
uaaccagaugagcaucccg

SEQ ID NO: 2237256 - RNA, 19 nt, Artificial Sequence
  Description of Artificial Sequence: Synthetic oligonucleotide
agaugagacaguugccagg

SEQ ID NO: 2237257 - RNA, 19 nt, Artificial Sequence
  Description of Artificial Sequence: Synthetic oligonucleotide
ugcaacggauacaagcagc

SEQ ID NO: 2237258 - RNA, 19 nt, Artificial Sequence
  Description of Artificial Sequence: Synthetic oligonucleotide
gaaugguacaaaguccuag

SEQ ID NO: 2237259 - RNA, 19 nt, Artificial Sequence
  Description of Artificial Sequence: Synthetic oligonucleotide
ucgauaugcacaucggccu

SEQ ID NO: 2237260 - RNA, 19 nt, Artificial Sequence
  Description of Artificial Sequence: Synthetic oligonucleotide
cauagagcagcuucagccc

SEQ ID NO: 2237261 - RNA, 19 nt, Artificial Sequence
  Description of Artificial Sequence: Synthetic oligonucleotide
acacccucggaucagcagg

SEQ ID NO: 2237262 - RNA, 19 nt, Artificial Sequence
  Description of Artificial Sequence: Synthetic oligonucleotide
gcauagagcagcuucagcc

SEQ ID NO: 2237263 - RNA, 19 nt, Artificial Sequence
  Description of Artificial Sequence: Synthetic oligonucleotide
augaacuccucacagcuga

SEQ ID NO: 2237264 - RNA, 19 nt, Artificial Sequence
  Description of Artificial Sequence: Synthetic oligonucleotide
uggcaguggguauucacgg

SEQ ID NO: 2237265 - RNA, 19 nt, Artificial Sequence
  Description of Artificial Sequence: Synthetic oligonucleotide
ugguacaaaguccuagcac

SEQ ID NO: 2237266 - RNA, 19 nt, Artificial Sequence
  Description of Artificial Sequence: Synthetic oligonucleotide
uagaugagacaguugccag

SEQ ID NO: 2237267 - RNA, 19 nt, Artificial Sequence
  Description of Artificial Sequence: Synthetic oligonucleotide
ucuuuaaccagaugagcau

SEQ ID NO: 2237268 - RNA, 19 nt, Artificial Sequence
  Description of Artificial Sequence: Synthetic oligonucleotide
gguacaaaguccuagcaca

SEQ ID NO: 2237269 - RNA, 19 nt, Artificial Sequence
  Description of Artificial Sequence: Synthetic oligonucleotide
ucggauggaaucaccuucc

SEQ ID NO: 2237270 - RNA, 19 nt, Artificial Sequence
  Description of Artificial Sequence: Synthetic oligonucleotide
agccggauagaugagacag

SEQ ID NO: 2237271 - RNA, 19 nt, Artificial Sequence
  Description of Artificial Sequence: Synthetic oligonucleotide
aucagaagagccucucgag

SEQ ID NO: 2237272 - RNA, 19 nt, Artificial Sequence
  Description of Artificial Sequence: Synthetic oligonucleotide
aaaucggauggaaucaccu

SEQ ID NO: 2237273 - RNA, 19 nt, Artificial Sequence
  Description of Artificial Sequence: Synthetic oligonucleotide
uuuucgugcacagaauggu

SEQ ID NO: 2237274 - RNA, 19 nt, Artificial Sequence
  Description of Artificial Sequence: Synthetic oligonucleotide
uugaugaacuccucacagc

SEQ ID NO: 2237275 - RNA, 19 nt, Artificial Sequence
  Description of Artificial Sequence: Synthetic oligonucleotide
gaucagaagagccucucga

SEQ ID NO: 2237276 - RNA, 19 nt, Artificial Sequence
  Description of Artificial Sequence: Synthetic oligonucleotide
uccuagcacaaccuuguug

SEQ ID NO: 2237277 - RNA, 19 nt, Artificial Sequence
  Description of Artificial Sequence: Synthetic oligonucleotide
cagaugagcaucccguugc

SEQ ID NO: 2237278 - RNA, 19 nt, Artificial Sequence
  Description of Artificial Sequence: Synthetic oligonucleotide
cucaaauagcuggugagag

SEQ ID NO: 2237279 - RNA, 19 nt, Artificial Sequence
  Description of Artificial Sequence: Synthetic oligonucleotide
uccucgauaugcacaucgg

SEQ ID NO: 2237280 - RNA, 19 nt, Artificial Sequence
  Description of Artificial Sequence: Synthetic oligonucleotide
ugagccggauagaugagac

SEQ ID NO: 2237281 - RNA, 19 nt, Artificial Sequence
  Description of Artificial Sequence: Synthetic oligonucleotide
gcugggaccagucaggaag

SEQ ID NO: 2237282 - RNA, 19 nt, Artificial Sequence
  Description of Artificial Sequence: Synthetic oligonucleotide
ugagcaucccguugcgccg

SEQ ID NO: 2237283 - RNA, 19 nt, Artificial Sequence
  Description of Artificial Sequence: Synthetic oligonucleotide
uccaaaucggauggaauca

SEQ ID NO: 2237284 - RNA, 19 nt, Artificial Sequence
  Description of Artificial Sequence: Synthetic oligonucleotide
cagaagagccucucgagac

SEQ ID NO: 2237285 - RNA, 19 nt, Artificial Sequence
  Description of Artificial Sequence: Synthetic oligonucleotide
caggacaaaggugacacag

SEQ ID NO: 2237286 - RNA, 19 nt, Artificial Sequence
  Description of Artificial Sequence: Synthetic oligonucleotide
ucugcuucggcuugggcaa

SEQ ID NO: 2237287 - RNA, 19 nt, Artificial Sequence
  Description of Artificial Sequence: Synthetic oligonucleotide
agaugaccgauuggcagcc

SEQ ID NO: 2237288 - RNA, 19 nt, Artificial Sequence
  Description of Artificial Sequence: Synthetic oligonucleotide
cuuccuccacaguagagac

SEQ ID NO: 2237289 - RNA, 19 nt, Artificial Sequence
  Description of Artificial Sequence: Synthetic oligonucleotide
agccccaacucuuuaacca

SEQ ID NO: 2237290 - RNA, 19 nt, Artificial Sequence
  Description of Artificial Sequence: Synthetic oligonucleotide
aaccagaugagcaucccgu

SEQ ID NO: 2237291 - RNA, 19 nt, Artificial Sequence
  Description of Artificial Sequence: Synthetic oligonucleotide
aaaguccuagcacaaccuu

SEQ ID NO: 2237292 - RNA, 19 nt, Artificial Sequence
  Description of Artificial Sequence: Synthetic oligonucleotide
agugcaacggauacaagca

SEQ ID NO: 2237293 - RNA, 19 nt, Artificial Sequence
  Description of Artificial Sequence: Synthetic oligonucleotide
uuggaagucuguccgucca

SEQ ID NO: 2237294 - RNA, 19 nt, Artificial Sequence
  Description of Artificial Sequence: Synthetic oligonucleotide
agggucgaucagaagagcc

SEQ ID NO: 2237295 - RNA, 19 nt, Artificial Sequence
  Description of Artificial Sequence: Synthetic oligonucleotide
cuugggcaaguucagguug

SEQ ID NO: 2237296 - RNA, 19 nt, Artificial Sequence
  Description of Artificial Sequence: Synthetic oligonucleotide
ggagaugaccgauuggcag

SEQ ID NO: 2237297 - RNA, 19 nt, Artificial Sequence
  Description of Artificial Sequence: Synthetic oligonucleotide
gugaagaucuuuucgugca

SEQ ID NO: 2237298 - RNA, 19 nt, Artificial Sequence
  Description of Artificial Sequence: Synthetic oligonucleotide
acggauacaagcagccggc

SEQ ID NO: 2237299 - RNA, 19 nt, Artificial Sequence
  Description of Artificial Sequence: Synthetic oligonucleotide
cacagcgcauguuugcggg

SEQ ID NO: 2237300 - RNA, 19 nt, Artificial Sequence
  Description of Artificial Sequence: Synthetic oligonucleotide
ugaccgauuggcagccggg

SEQ ID NO: 2237301 - RNA, 19 nt, Artificial Sequence
  Description of Artificial Sequence: Synthetic oligonucleotide
ggacaaaggugacacagcc

SEQ ID NO: 2237302 - RNA, 19 nt, Artificial Sequence
  Description of Artificial Sequence: Synthetic oligonucleotide
caaaucggauggaaucacc

SEQ ID NO: 2237303 - RNA, 19 nt, Artificial Sequence
  Description of Artificial Sequence: Synthetic oligonucleotide
gugugaagaucuuuucgug

SEQ ID NO: 2237304 - RNA, 19 nt, Artificial Sequence
  Description of Artificial Sequence: Synthetic oligonucleotide
aaucggauggaaucaccuu

SEQ ID NO: 2237305 - RNA, 19 nt, Artificial Sequence
  Description of Artificial Sequence: Synthetic oligonucleotide
augguacaaaguccuagca

SEQ ID NO: 2237306 - RNA, 19 nt, Artificial Sequence
  Description of Artificial Sequence: Synthetic oligonucleotide
ugaagaucuuuucgugcac

SEQ ID NO: 2237307 - RNA, 19 nt, Artificial Sequence
  Description of Artificial Sequence: Synthetic oligonucleotide
auggcaguggguauucacg

SEQ ID NO: 2237308 - RNA, 19 nt, Artificial Sequence
  Description of Artificial Sequence: Synthetic oligonucleotide
gauaugcacaucggccugg

SEQ ID NO: 2237309 - RNA, 19 nt, Artificial Sequence
  Description of Artificial Sequence: Synthetic oligonucleotide
augaccgauuggcagccgg

SEQ ID NO: 2237310 - RNA, 19 nt, Artificial Sequence
  Description of Artificial Sequence: Synthetic oligonucleotide
ugcgccgucuccagaacag

SEQ ID NO: 2237311 - RNA, 19 nt, Artificial Sequence
  Description of Artificial Sequence: Synthetic oligonucleotide
gagccguggguucagaguc

SEQ ID NO: 2237312 - RNA, 19 nt, Artificial Sequence
  Description of Artificial Sequence: Synthetic oligonucleotide
ugauguggucagcauggca

SEQ ID NO: 2237313 - RNA, 19 nt, Artificial Sequence
  Description of Artificial Sequence: Synthetic oligonucleotide
cagggcaucuccaguaaag

SEQ ID NO: 2237314 - RNA, 19 nt, Artificial Sequence
  Description of Artificial Sequence: Synthetic oligonucleotide
uuugcgggaacagcaaagu

SEQ ID NO: 2237315 - RNA, 19 nt, Artificial Sequence
  Description of Artificial Sequence: Synthetic oligonucleotide
uuccuccacaguagagacg

SEQ ID NO: 2237316 - RNA, 19 nt, Artificial Sequence
  Description of Artificial Sequence: Synthetic oligonucleotide
aaucgugagccggauagau

SEQ ID NO: 2237317 - RNA, 19 nt, Artificial Sequence
  Description of Artificial Sequence: Synthetic oligonucleotide
ggcaucuccaguaaaggcc

SEQ ID NO: 2237318 - RNA, 19 nt, Artificial Sequence
  Description of Artificial Sequence: Synthetic oligonucleotide
ggcaaaucguccaaaucgg

SEQ ID NO: 2237319 - RNA, 19 nt, Artificial Sequence
  Description of Artificial Sequence: Synthetic oligonucleotide
agggcaucuccaguaaagg

SEQ ID NO: 2237320 - RNA, 19 nt, Artificial Sequence
  Description of Artificial Sequence: Synthetic oligonucleotide
ucgcacugagcccagcaac

SEQ ID NO: 2237321 - RNA, 19 nt, Artificial Sequence
  Description of Artificial Sequence: Synthetic oligonucleotide
ggguauucacggcauagag

SEQ ID NO: 2237322 - RNA, 19 nt, Artificial Sequence
  Description of Artificial Sequence: Synthetic oligonucleotide
uguuugcgggaacagcaaa

SEQ ID NO: 2237323 - RNA, 19 nt, Artificial Sequence
  Description of Artificial Sequence: Synthetic oligonucleotide
uuucgugcacagaauggua

SEQ ID NO: 2237324 - RNA, 19 nt, Artificial Sequence
  Description of Artificial Sequence: Synthetic oligonucleotide
aaauagcuggugagaguag

SEQ ID NO: 2237325 - RNA, 19 nt, Artificial Sequence
  Description of Artificial Sequence: Synthetic oligonucleotide
cugggaccagucaggaagg

SEQ ID NO: 2237326 - RNA, 19 nt, Artificial Sequence
  Description of Artificial Sequence: Synthetic oligonucleotide
acagggucgaucagaagag

SEQ ID NO: 2237327 - RNA, 19 nt, Artificial Sequence
  Description of Artificial Sequence: Synthetic oligonucleotide
ugcacaucggccugggcuc

SEQ ID NO: 2237328 - RNA, 19 nt, Artificial Sequence
  Description of Artificial Sequence: Synthetic oligonucleotide
ugagccguggguucagagu

SEQ ID NO: 2237329 - RNA, 19 nt, Artificial Sequence
  Description of Artificial Sequence: Synthetic oligonucleotide
uauucacggcauagagcag

SEQ ID NO: 2237330 - RNA, 19 nt, Artificial Sequence
  Description of Artificial Sequence: Synthetic oligonucleotide
guuugcgggaacagcaaag

SEQ ID NO: 2237331 - RNA, 19 nt, Artificial Sequence
  Description of Artificial Sequence: Synthetic oligonucleotide
ucgugcacagaaugguaca

SEQ ID NO: 2237332 - RNA, 19 nt, Artificial Sequence
  Description of Artificial Sequence: Synthetic oligonucleotide
ggugacacagccuggggug

SEQ ID NO: 2237333 - RNA, 19 nt, Artificial Sequence
  Description of Artificial Sequence: Synthetic oligonucleotide
uuaaccagaugagcauccc

SEQ ID NO: 2237334 - RNA, 19 nt, Artificial Sequence
  Description of Artificial Sequence: Synthetic oligonucleotide
ugagccggugaugugguca

SEQ ID NO: 2237335 - RNA, 19 nt, Artificial Sequence
  Description of Artificial Sequence: Synthetic oligonucleotide
cauggcaguggguauucac

SEQ ID NO: 2237336 - RNA, 19 nt, Artificial Sequence
  Description of Artificial Sequence: Synthetic oligonucleotide
cagaaugguacaaaguccu

SEQ ID NO: 2237337 - RNA, 19 nt, Artificial Sequence
  Description of Artificial Sequence: Synthetic oligonucleotide
aacaucugccgcaggagga

SEQ ID NO: 2237338 - RNA, 19 nt, Artificial Sequence
  Description of Artificial Sequence: Synthetic oligonucleotide
gaagcucaaauagcuggug

SEQ ID NO: 2237339 - RNA, 19 nt, Artificial Sequence
  Description of Artificial Sequence: Synthetic oligonucleotide
auagcuggugagaguaggg

SEQ ID NO: 2237340 - RNA, 19 nt, Artificial Sequence
  Description of Artificial Sequence: Synthetic oligonucleotide
caaauagcuggugagagua

SEQ ID NO: 2237341 - RNA, 19 nt, Artificial Sequence
  Description of Artificial Sequence: Synthetic oligonucleotide
guuggaagucuguccgucc

SEQ ID NO: 2237342 - RNA, 19 nt, Artificial Sequence
  Description of Artificial Sequence: Synthetic oligonucleotide
cugggcuccgcugaggcgg

SEQ ID NO: 2237343 - RNA, 19 nt, Artificial Sequence
  Description of Artificial Sequence: Synthetic oligonucleotide
uucacggcauagagcagcu

SEQ ID NO: 2237344 - RNA, 19 nt, Artificial Sequence
  Description of Artificial Sequence: Synthetic oligonucleotide
gugcaacggauacaagcag

SEQ ID NO: 2237345 - RNA, 19 nt, Artificial Sequence
  Description of Artificial Sequence: Synthetic oligonucleotide
ugagcccgugguaaucgug

SEQ ID NO: 2237346 - RNA, 19 nt, Artificial Sequence
  Description of Artificial Sequence: Synthetic oligonucleotide
auggaaucaccuuccucga

SEQ ID NO: 2237347 - RNA, 19 nt, Artificial Sequence
  Description of Artificial Sequence: Synthetic oligonucleotide
aaucaccuuccucgauaug

SEQ ID NO: 2237348 - RNA, 19 nt, Artificial Sequence
  Description of Artificial Sequence: Synthetic oligonucleotide
aguccuagcacaaccuugu

SEQ ID NO: 2237349 - RNA, 19 nt, Artificial Sequence
  Description of Artificial Sequence: Synthetic oligonucleotide
agagacggugagcccgugg

SEQ ID NO: 2237350 - RNA, 19 nt, Artificial Sequence
  Description of Artificial Sequence: Synthetic oligonucleotide
gagccggugauguggucag

SEQ ID NO: 2237351 - RNA, 19 nt, Artificial Sequence
  Description of Artificial Sequence: Synthetic oligonucleotide
cagaguccgcucuuccucc

SEQ ID NO: 2237352 - RNA, 19 nt, Artificial Sequence
  Description of Artificial Sequence: Synthetic oligonucleotide
guggguauucacggcauag

SEQ ID NO: 2237353 - RNA, 19 nt, Artificial Sequence
  Description of Artificial Sequence: Synthetic oligonucleotide
caccuagugcaacggauac

SEQ ID NO: 2237354 - RNA, 19 nt, Artificial Sequence
  Description of Artificial Sequence: Synthetic oligonucleotide
uggcgucuggaccccacag

SEQ ID NO: 2237355 - RNA, 19 nt, Artificial Sequence
  Description of Artificial Sequence: Synthetic oligonucleotide
aagagccucucgagacucc

SEQ ID NO: 2237356 - RNA, 19 nt, Artificial Sequence
  Description of Artificial Sequence: Synthetic oligonucleotide
gcgucuggaccccacagcg

SEQ ID NO: 2237357 - RNA, 19 nt, Artificial Sequence
  Description of Artificial Sequence: Synthetic oligonucleotide
aagguggcgucuggacccc

SEQ ID NO: 2237358 - RNA, 19 nt, Artificial Sequence
  Description of Artificial Sequence: Synthetic oligonucleotide
uguuggaagucuguccguc

SEQ ID NO: 2237359 - RNA, 19 nt, Artificial Sequence
  Description of Artificial Sequence: Synthetic oligonucleotide
caaagucuaucugcuucgg

SEQ ID NO: 2237360 - RNA, 19 nt, Artificial Sequence
  Description of Artificial Sequence: Synthetic oligonucleotide
gaccggaggaccccugagc

SEQ ID NO: 2237361 - RNA, 19 nt, Artificial Sequence
  Description of Artificial Sequence: Synthetic oligonucleotide
agaagcucaaauagcuggu

SEQ ID NO: 2237362 - RNA, 19 nt, Artificial Sequence
  Description of Artificial Sequence: Synthetic oligonucleotide
ugccgcaggaggaccgggg

SEQ ID NO: 2237363 - RNA, 19 nt, Artificial Sequence
  Description of Artificial Sequence: Synthetic oligonucleotide
uggguauucacggcauaga

SEQ ID NO: 2237364 - RNA, 19 nt, Artificial Sequence
  Description of Artificial Sequence: Synthetic oligonucleotide
cacccucggaucagcaggg

SEQ ID NO: 2237365 - RNA, 19 nt, Artificial Sequence
  Description of Artificial Sequence: Synthetic oligonucleotide
caccccaccuagugcaacg

SEQ ID NO: 2237366 - RNA, 19 nt, Artificial Sequence
  Description of Artificial Sequence: Synthetic oligonucleotide
uugcgggaacagcaaaguc

SEQ ID NO: 2237367 - RNA, 19 nt, Artificial Sequence
  Description of Artificial Sequence: Synthetic oligonucleotide
gaccgauuggcagccgggg

SEQ ID NO: 2237368 - RNA, 19 nt, Artificial Sequence
  Description of Artificial Sequence: Synthetic oligonucleotide
auacaagcagccggcuggg

SEQ ID NO: 2237369 - RNA, 19 nt, Artificial Sequence
  Description of Artificial Sequence: Synthetic oligonucleotide
gucuccaaggcaaaucguc

SEQ ID NO: 2237370 - RNA, 19 nt, Artificial Sequence
  Description of Artificial Sequence: Synthetic oligonucleotide
gucuggaccccacagcgca

SEQ ID NO: 2237371 - RNA, 19 nt, Artificial Sequence
  Description of Artificial Sequence: Synthetic oligonucleotide
cccgugguaaucgugagcc

SEQ ID NO: 2237372 - RNA, 19 nt, Artificial Sequence
  Description of Artificial Sequence: Synthetic oligonucleotide
agcgcauguuugcgggaac

SEQ ID NO: 2237373 - RNA, 19 nt, Artificial Sequence
  Description of Artificial Sequence: Synthetic oligonucleotide
cacaguagagacggugagc

SEQ ID NO: 2237374 - RNA, 19 nt, Artificial Sequence
  Description of Artificial Sequence: Synthetic oligonucleotide
uggcccgagucuccaaggc

SEQ ID NO: 2237375 - RNA, 19 nt, Artificial Sequence
  Description of Artificial Sequence: Synthetic oligonucleotide
cagccccaacucuuuaacc

SEQ ID NO: 2237376 - RNA, 19 nt, Artificial Sequence
  Description of Artificial Sequence: Synthetic oligonucleotide
uccguccacacccucggau

SEQ ID NO: 2237377 - RNA, 19 nt, Artificial Sequence
  Description of Artificial Sequence: Synthetic oligonucleotide
uuguuggaagucuguccgu

SEQ ID NO: 2237378 - RNA, 19 nt, Artificial Sequence
  Description of Artificial Sequence: Synthetic oligonucleotide
uugcgccgucuccagaaca

SEQ ID NO: 2237379 - RNA, 19 nt, Artificial Sequence
  Description of Artificial Sequence: Synthetic oligonucleotide
guaaaggccaugcucuggu

SEQ ID NO: 2237380 - RNA, 19 nt, Artificial Sequence
  Description of Artificial Sequence: Synthetic oligonucleotide
caacggauacaagcagccg

SEQ ID NO: 2237381 - RNA, 19 nt, Artificial Sequence
  Description of Artificial Sequence: Synthetic oligonucleotide
cuggcccgagucuccaagg

SEQ ID NO: 2237382 - RNA, 19 nt, Artificial Sequence
  Description of Artificial Sequence: Synthetic oligonucleotide
cuccacaguagagacggug

SEQ ID NO: 2237383 - RNA, 19 nt, Artificial Sequence
  Description of Artificial Sequence: Synthetic oligonucleotide
uguccaugaccuugaugaa

SEQ ID NO: 2237384 - RNA, 19 nt, Artificial Sequence
  Description of Artificial Sequence: Synthetic oligonucleotide
uggggugccgccccucccc

SEQ ID NO: 2237385 - RNA, 19 nt, Artificial Sequence
  Description of Artificial Sequence: Synthetic oligonucleotide
gcaacggauacaagcagcc

SEQ ID NO: 2237386 - RNA, 19 nt, Artificial Sequence
  Description of Artificial Sequence: Synthetic oligonucleotide
cuagugcaacggauacaag

SEQ ID NO: 2237387 - RNA, 19 nt, Artificial Sequence
  Description of Artificial Sequence: Synthetic oligonucleotide
cuccaaggcaaaucgucca

SEQ ID NO: 2237388 - RNA, 19 nt, Artificial Sequence
  Description of Artificial Sequence: Synthetic oligonucleotide
gaaucaccuuccucgauau

SEQ ID NO: 2237389 - RNA, 19 nt, Artificial Sequence
  Description of Artificial Sequence: Synthetic oligonucleotide
uagcacaaccuuguuggaa

SEQ ID NO: 2237390 - RNA, 19 nt, Artificial Sequence
  Description of Artificial Sequence: Synthetic oligonucleotide
ggugagcccgugguaaucg

SEQ ID NO: 2237391 - RNA, 19 nt, Artificial Sequence
  Description of Artificial Sequence: Synthetic oligonucleotide
ucguccaaaucggauggaa

SEQ ID NO: 2237392 - RNA, 19 nt, Artificial Sequence
  Description of Artificial Sequence: Synthetic oligonucleotide
uaaucgugagccggauaga

SEQ ID NO: 2237393 - RNA, 19 nt, Artificial Sequence
  Description of Artificial Sequence: Synthetic oligonucleotide
gggaguagggaccggagga

SEQ ID NO: 2237394 - RNA, 19 nt, Artificial Sequence
  Description of Artificial Sequence: Synthetic oligonucleotide
ucgagacuccgggucaccc

SEQ ID NO: 2237395 - RNA, 19 nt, Artificial Sequence
  Description of Artificial Sequence: Synthetic oligonucleotide
gugagccguggguucagag

SEQ ID NO: 2237396 - RNA, 19 nt, Artificial Sequence
  Description of Artificial Sequence: Synthetic oligonucleotide
gucagcauggcagugggua

SEQ ID NO: 2237397 - RNA, 19 nt, Artificial Sequence
  Description of Artificial Sequence: Synthetic oligonucleotide
ggauacaagcagccggcug

SEQ ID NO: 2237398 - RNA, 19 nt, Artificial Sequence
  Description of Artificial Sequence: Synthetic oligonucleotide
uggaaucaccuuccucgau

SEQ ID NO: 2237399 - RNA, 19 nt, Artificial Sequence
  Description of Artificial Sequence: Synthetic oligonucleotide
guccgcucuuccuccacag

SEQ ID NO: 2237400 - RNA, 19 nt, Artificial Sequence
  Description of Artificial Sequence: Synthetic oligonucleotide
cagccggggaguagggacc

SEQ ID NO: 2237401 - RNA, 19 nt, Artificial Sequence
  Description of Artificial Sequence: Synthetic oligonucleotide
agcccgugguaaucgugag

SEQ ID NO: 2237402 - RNA, 19 nt, Artificial Sequence
  Description of Artificial Sequence: Synthetic oligonucleotide
gagggugagccguggguuc

SEQ ID NO: 2237403 - RNA, 19 nt, Artificial Sequence
  Description of Artificial Sequence: Synthetic oligonucleotide
caaaguccuagcacaaccu

SEQ ID NO: 2237404 - RNA, 19 nt, Artificial Sequence
  Description of Artificial Sequence: Synthetic oligonucleotide
agagaggcucuggggugcc

SEQ ID NO: 2237405 - RNA, 19 nt, Artificial Sequence
  Description of Artificial Sequence: Synthetic oligonucleotide
ucugccgcaggaggaccgg

SEQ ID NO: 2237406 - RNA, 19 nt, Artificial Sequence
  Description of Artificial Sequence: Synthetic oligonucleotide
ucgaucagaagagccucuc

SEQ ID NO: 2237407 - RNA, 19 nt, Artificial Sequence
  Description of Artificial Sequence: Synthetic oligonucleotide
gggcucaaacaucugccgc

SEQ ID NO: 2237408 - RNA, 19 nt, Artificial Sequence
  Description of Artificial Sequence: Synthetic oligonucleotide
cuaucugcuucggcuuggg

SEQ ID NO: 2237409 - RNA, 19 nt, Artificial Sequence
  Description of Artificial Sequence: Synthetic oligonucleotide
gagcccgugguaaucguga

SEQ ID NO: 2237410 - RNA, 19 nt, Artificial Sequence
  Description of Artificial Sequence: Synthetic oligonucleotide
gccccaacucuuuaaccag

SEQ ID NO: 2237411 - RNA, 19 nt, Artificial Sequence
  Description of Artificial Sequence: Synthetic oligonucleotide
ccucgauaugcacaucggc

SEQ ID NO: 2237412 - RNA, 19 nt, Artificial Sequence
  Description of Artificial Sequence: Synthetic oligonucleotide
ggaaucaccuuccucgaua

SEQ ID NO: 2237413 - RNA, 19 nt, Artificial Sequence
  Description of Artificial Sequence: Synthetic oligonucleotide
gcaguggguauucacggca

SEQ ID NO: 2237414 - RNA, 19 nt, Artificial Sequence
  Description of Artificial Sequence: Synthetic oligonucleotide
gacggugagcccgugguaa

SEQ ID NO: 2237415 - RNA, 19 nt, Artificial Sequence
  Description of Artificial Sequence: Synthetic oligonucleotide
aguccgcucuuccuccaca

SEQ ID NO: 2237416 - RNA, 19 nt, Artificial Sequence
  Description of Artificial Sequence: Synthetic oligonucleotide
cagaacagggucgaucaga

SEQ ID NO: 2237417 - RNA, 19 nt, Artificial Sequence
  Description of Artificial Sequence: Synthetic oligonucleotide
cuccagaacagggucgauc

SEQ ID NO: 2237418 - RNA, 19 nt, Artificial Sequence
  Description of Artificial Sequence: Synthetic oligonucleotide
accgauuggcagccgggga

SEQ ID NO: 2237419 - RNA, 19 nt, Artificial Sequence
  Description of Artificial Sequence: Synthetic oligonucleotide
guagguguaggugcagcuc

SEQ ID NO: 2237420 - RNA, 19 nt, Artificial Sequence
  Description of Artificial Sequence: Synthetic oligonucleotide
accagaugagcaucccguu

SEQ ID NO: 2237421 - RNA, 19 nt, Artificial Sequence
  Description of Artificial Sequence: Synthetic oligonucleotide
ggcauagagcagcuucagc

SEQ ID NO: 2237422 - RNA, 19 nt, Artificial Sequence
  Description of Artificial Sequence: Synthetic oligonucleotide
ggcgggagaugaccgauug

SEQ ID NO: 2237423 - RNA, 19 nt, Artificial Sequence
  Description of Artificial Sequence: Synthetic oligonucleotide
ugggcuccgcugaggcggg

SEQ ID NO: 2237424 - RNA, 19 nt, Artificial Sequence
  Description of Artificial Sequence: Synthetic oligonucleotide
agcagggcaucuccaguaa

SEQ ID NO: 2237425 - RNA, 19 nt, Artificial Sequence
  Description of Artificial Sequence: Synthetic oligonucleotide
accagucaggaagguggcg

SEQ ID NO: 2237426 - RNA, 19 nt, Artificial Sequence
  Description of Artificial Sequence: Synthetic oligonucleotide
aucugccgcaggaggaccg

SEQ ID NO: 2237427 - RNA, 19 nt, Artificial Sequence
  Description of Artificial Sequence: Synthetic oligonucleotide
caccuuccucgauaugcac

SEQ ID NO: 2237428 - RNA, 19 nt, Artificial Sequence
  Description of Artificial Sequence: Synthetic oligonucleotide
gagccggauagaugagaca

SEQ ID NO: 2237429 - RNA, 19 nt, Artificial Sequence
  Description of Artificial Sequence: Synthetic oligonucleotide
aagcagccggcugggacca

SEQ ID NO: 2237430 - RNA, 19 nt, Artificial Sequence
  Description of Artificial Sequence: Synthetic oligonucleotide
agccguggguucagagucc

SEQ ID NO: 2237431 - RNA, 19 nt, Artificial Sequence
  Description of Artificial Sequence: Synthetic oligonucleotide
gggaacagcaaagucuauc

SEQ ID NO: 2237432 - RNA, 19 nt, Artificial Sequence
  Description of Artificial Sequence: Synthetic oligonucleotide
gaugaccgauuggcagccg

SEQ ID NO: 2237433 - RNA, 19 nt, Artificial Sequence
  Description of Artificial Sequence: Synthetic oligonucleotide
agggccgcgcucgccaucg

SEQ ID NO: 2237434 - RNA, 19 nt, Artificial Sequence
  Description of Artificial Sequence: Synthetic oligonucleotide
aucgugagccggauagaug

SEQ ID NO: 2237435 - RNA, 19 nt, Artificial Sequence
  Description of Artificial Sequence: Synthetic oligonucleotide
accccaccuagugcaacgg

SEQ ID NO: 2237436 - RNA, 19 nt, Artificial Sequence
  Description of Artificial Sequence: Synthetic oligonucleotide
ucccguugcgccgucucca

SEQ ID NO: 2237437 - RNA, 19 nt, Artificial Sequence
  Description of Artificial Sequence: Synthetic oligonucleotide
gcagccggggaguagggac

SEQ ID NO: 2237438 - RNA, 19 nt, Artificial Sequence
  Description of Artificial Sequence: Synthetic oligonucleotide
acagcgcauguuugcggga

SEQ ID NO: 2237439 - RNA, 19 nt, Artificial Sequence
  Description of Artificial Sequence: Synthetic oligonucleotide
cgugguaaucgugagccgg

SEQ ID NO: 2237440 - RNA, 19 nt, Artificial Sequence
  Description of Artificial Sequence: Synthetic oligonucleotide
aguggguauucacggcaua

SEQ ID NO: 2237441 - RNA, 19 nt, Artificial Sequence
  Description of Artificial Sequence: Synthetic oligonucleotide
uggaccccacagcgcaugu

SEQ ID NO: 2237442 - RNA, 19 nt, Artificial Sequence
  Description of Artificial Sequence: Synthetic oligonucleotide
ggcaguggguauucacggc

SEQ ID NO: 2237443 - RNA, 19 nt, Artificial Sequence
  Description of Artificial Sequence: Synthetic oligonucleotide
gcugaggcgggagaugacc

SEQ ID NO: 2237444 - RNA, 19 nt, Artificial Sequence
  Description of Artificial Sequence: Synthetic oligonucleotide
ggucgaucagaagagccuc

SEQ ID NO: 2237445 - RNA, 19 nt, Artificial Sequence
  Description of Artificial Sequence: Synthetic oligonucleotide
cucucgagacuccggguca

SEQ ID NO: 2237446 - RNA, 19 nt, Artificial Sequence
  Description of Artificial Sequence: Synthetic oligonucleotide
agucaggaagguggcgucu

SEQ ID NO: 2237447 - RNA, 19 nt, Artificial Sequence
  Description of Artificial Sequence: Synthetic oligonucleotide
ccuagugcaacggauacaa

SEQ ID NO: 2237448 - RNA, 19 nt, Artificial Sequence
  Description of Artificial Sequence: Synthetic oligonucleotide
agguuguccaugaccuuga

SEQ ID NO: 2237449 - RNA, 19 nt, Artificial Sequence
  Description of Artificial Sequence: Synthetic oligonucleotide
agucuccaaggcaaaucgu

SEQ ID NO: 2237450 - RNA, 19 nt, Artificial Sequence
  Description of Artificial Sequence: Synthetic oligonucleotide
cagggucgaucagaagagc

SEQ ID NO: 2237451 - RNA, 19 nt, Artificial Sequence
  Description of Artificial Sequence: Synthetic oligonucleotide
ucucgagacuccgggucac

SEQ ID NO: 2237452 - RNA, 19 nt, Artificial Sequence
  Description of Artificial Sequence: Synthetic oligonucleotide
aguugccaggaagugugaa

SEQ ID NO: 2237453 - RNA, 19 nt, Artificial Sequence
  Description of Artificial Sequence: Synthetic oligonucleotide
ccgauuggcagccggggag

SEQ ID NO: 2237454 - RNA, 19 nt, Artificial Sequence
  Description of Artificial Sequence: Synthetic oligonucleotide
cacugagcccagcaaccuc

SEQ ID NO: 2237455 - RNA, 19 nt, Artificial Sequence
  Description of Artificial Sequence: Synthetic oligonucleotide
ugacacagccuggggugug

SEQ ID NO: 2237456 - RNA, 19 nt, Artificial Sequence
  Description of Artificial Sequence: Synthetic oligonucleotide
guagggaccggaggacccc

SEQ ID NO: 2237457 - RNA, 19 nt, Artificial Sequence
  Description of Artificial Sequence: Synthetic oligonucleotide
caucugccgcaggaggacc

SEQ ID NO: 2237458 - RNA, 19 nt, Artificial Sequence
  Description of Artificial Sequence: Synthetic oligonucleotide
gugguaaucgugagccgga

SEQ ID NO: 2237459 - RNA, 19 nt, Artificial Sequence
  Description of Artificial Sequence: Synthetic oligonucleotide
ucuggaccccacagcgcau

SEQ ID NO: 2237460 - RNA, 19 nt, Artificial Sequence
  Description of Artificial Sequence: Synthetic oligonucleotide
gcuggcccgagucuccaag

SEQ ID NO: 2237461 - RNA, 19 nt, Artificial Sequence
  Description of Artificial Sequence: Synthetic oligonucleotide
acaucggccugggcuccgc

SEQ ID NO: 2237462 - RNA, 19 nt, Artificial Sequence
  Description of Artificial Sequence: Synthetic oligonucleotide
guugcgccgucuccagaac

SEQ ID NO: 2237463 - RNA, 19 nt, Artificial Sequence
  Description of Artificial Sequence: Synthetic oligonucleotide
gcucaaauagcuggugaga

SEQ ID NO: 2237464 - RNA, 19 nt, Artificial Sequence
  Description of Artificial Sequence: Synthetic oligonucleotide
ugggugagcugugcuggcu

SEQ ID NO: 2237465 - RNA, 19 nt, Artificial Sequence
  Description of Artificial Sequence: Synthetic oligonucleotide
acggccacccugagggccg

SEQ ID NO: 2237466 - RNA, 19 nt, Artificial Sequence
  Description of Artificial Sequence: Synthetic oligonucleotide
ccacagcgcauguuugcgg

SEQ ID NO: 2237467 - RNA, 19 nt, Artificial Sequence
  Description of Artificial Sequence: Synthetic oligonucleotide
gugauguggucagcauggc

SEQ ID NO: 2237468 - RNA, 19 nt, Artificial Sequence
  Description of Artificial Sequence: Synthetic oligonucleotide
ugguaaucgugagccggau

SEQ ID NO: 2237469 - RNA, 19 nt, Artificial Sequence
  Description of Artificial Sequence: Synthetic oligonucleotide
auguuugcgggaacagcaa

SEQ ID NO: 2237470 - RNA, 19 nt, Artificial Sequence
  Description of Artificial Sequence: Synthetic oligonucleotide
cucggaucagcagggcauc

SEQ ID NO: 2237471 - RNA, 19 nt, Artificial Sequence
  Description of Artificial Sequence: Synthetic oligonucleotide
cgcacugagcccagcaacc

SEQ ID NO: 2237472 - RNA, 19 nt, Artificial Sequence
  Description of Artificial Sequence: Synthetic oligonucleotide
ccaaaucggauggaaucac

SEQ ID NO: 2237473 - RNA, 19 nt, Artificial Sequence
  Description of Artificial Sequence: Synthetic oligonucleotide
cagcagggcaucuccagua

SEQ ID NO: 2237474 - RNA, 19 nt, Artificial Sequence
  Description of Artificial Sequence: Synthetic oligonucleotide
ccggcugggaccagucagg

SEQ ID NO: 2237475 - RNA, 19 nt, Artificial Sequence
  Description of Artificial Sequence: Synthetic oligonucleotide
cgaucagaagagccucucg

SEQ ID NO: 2237476 - RNA, 19 nt, Artificial Sequence
  Description of Artificial Sequence: Synthetic oligonucleotide
acggugagcccgugguaau

SEQ ID NO: 2237477 - RNA, 19 nt, Artificial Sequence
  Description of Artificial Sequence: Synthetic oligonucleotide
gcgggagaugaccgauugg

SEQ ID NO: 2237478 - RNA, 19 nt, Artificial Sequence
  Description of Artificial Sequence: Synthetic oligonucleotide
cuggaccccacagcgcaug

SEQ ID NO: 2237479 - RNA, 19 nt, Artificial Sequence
  Description of Artificial Sequence: Synthetic oligonucleotide
cccacagcgcauguuugcg

SEQ ID NO: 2237480 - RNA, 19 nt, Artificial Sequence
  Description of Artificial Sequence: Synthetic oligonucleotide
ccaacucuuuaaccagaug

SEQ ID NO: 2237481 - RNA, 19 nt, Artificial Sequence
  Description of Artificial Sequence: Synthetic oligonucleotide
ggaccggaggaccccugag

SEQ ID NO: 2237482 - RNA, 19 nt, Artificial Sequence
  Description of Artificial Sequence: Synthetic oligonucleotide
agggugagccguggguuca

SEQ ID NO: 2237483 - RNA, 19 nt, Artificial Sequence
  Description of Artificial Sequence: Synthetic oligonucleotide
uagggaccggaggaccccu

SEQ ID NO: 2237484 - RNA, 19 nt, Artificial Sequence
  Description of Artificial Sequence: Synthetic oligonucleotide
aucguccaaaucggaugga

SEQ ID NO: 2237485 - RNA, 19 nt, Artificial Sequence
  Description of Artificial Sequence: Synthetic oligonucleotide
cgggucacccagcagguag

SEQ ID NO: 2237486 - RNA, 19 nt, Artificial Sequence
  Description of Artificial Sequence: Synthetic oligonucleotide
agacggugagcccguggua

SEQ ID NO: 2237487 - RNA, 19 nt, Artificial Sequence
  Description of Artificial Sequence: Synthetic oligonucleotide
ccgucuccagaacaggguc

SEQ ID NO: 2237488 - RNA, 19 nt, Artificial Sequence
  Description of Artificial Sequence: Synthetic oligonucleotide
gaccccugagccggugaug

SEQ ID NO: 2237489 - RNA, 19 nt, Artificial Sequence
  Description of Artificial Sequence: Synthetic oligonucleotide
gugcacagaaugguacaaa

SEQ ID NO: 2237490 - RNA, 19 nt, Artificial Sequence
  Description of Artificial Sequence: Synthetic oligonucleotide
agccggugauguggucagc

SEQ ID NO: 2237491 - RNA, 19 nt, Artificial Sequence
  Description of Artificial Sequence: Synthetic oligonucleotide
ugggcaaguucagguuguc

SEQ ID NO: 2237492 - RNA, 19 nt, Artificial Sequence
  Description of Artificial Sequence: Synthetic oligonucleotide
gccguggguucagaguccg

SEQ ID NO: 2237493 - RNA, 19 nt, Artificial Sequence
  Description of Artificial Sequence: Synthetic oligonucleotide
guccacacccucggaucag

SEQ ID NO: 2237494 - RNA, 19 nt, Artificial Sequence
  Description of Artificial Sequence: Synthetic oligonucleotide
gggugagcugugcuggcuc

SEQ ID NO: 2237495 - RNA, 19 nt, Artificial Sequence
  Description of Artificial Sequence: Synthetic oligonucleotide
cucgagacuccgggucacc

SEQ ID NO: 2237496 - RNA, 19 nt, Artificial Sequence
  Description of Artificial Sequence: Synthetic oligonucleotide
ccccacagcgcauguuugc

SEQ ID NO: 2237497 - RNA, 19 nt, Artificial Sequence
  Description of Artificial Sequence: Synthetic oligonucleotide
gggcaaguucagguugucc

SEQ ID NO: 2237498 - RNA, 19 nt, Artificial Sequence
  Description of Artificial Sequence: Synthetic oligonucleotide
gcaaaucguccaaaucgga

SEQ ID NO: 2237499 - RNA, 19 nt, Artificial Sequence
  Description of Artificial Sequence: Synthetic oligonucleotide
gggaccagucaggaaggug

SEQ ID NO: 2237500 - RNA, 19 nt, Artificial Sequence
  Description of Artificial Sequence: Synthetic oligonucleotide
cgccgucuccagaacaggg

SEQ ID NO: 2237501 - RNA, 19 nt, Artificial Sequence
  Description of Artificial Sequence: Synthetic oligonucleotide
ugagggccgcgcucgccau

SEQ ID NO: 2237502 - RNA, 19 nt, Artificial Sequence
  Description of Artificial Sequence: Synthetic oligonucleotide
ccguccacacccucggauc

SEQ ID NO: 2237503 - RNA, 19 nt, Artificial Sequence
  Description of Artificial Sequence: Synthetic oligonucleotide
guggcgucuggaccccaca

SEQ ID NO: 2237504 - RNA, 19 nt, Artificial Sequence
  Description of Artificial Sequence: Synthetic oligonucleotide
gcccgugguaaucgugagc

SEQ ID NO: 2237505 - RNA, 19 nt, Artificial Sequence
  Description of Artificial Sequence: Synthetic oligonucleotide
caguugccaggaaguguga

SEQ ID NO: 2237506 - RNA, 19 nt, Artificial Sequence
  Description of Artificial Sequence: Synthetic oligonucleotide
uagagacggugagcccgug

SEQ ID NO: 2237507 - RNA, 19 nt, Artificial Sequence
  Description of Artificial Sequence: Synthetic oligonucleotide
ggccgcgcucgccaucgcg

SEQ ID NO: 2237508 - RNA, 19 nt, Artificial Sequence
  Description of Artificial Sequence: Synthetic oligonucleotide
gguaaucgugagccggaua

SEQ ID NO: 2237509 - RNA, 19 nt, Artificial Sequence
  Description of Artificial Sequence: Synthetic oligonucleotide
ccggaggaccccugagccg

SEQ ID NO: 2237510 - RNA, 19 nt, Artificial Sequence
  Description of Artificial Sequence: Synthetic oligonucleotide
ccgugguaaucgugagccg

SEQ ID NO: 2237511 - RNA, 19 nt, Artificial Sequence
  Description of Artificial Sequence: Synthetic oligonucleotide
gcucgcacugagcccagca

SEQ ID NO: 2237512 - RNA, 19 nt, Artificial Sequence
  Description of Artificial Sequence: Synthetic oligonucleotide
cugccgcaggaggaccggg

SEQ ID NO: 2237513 - RNA, 19 nt, Artificial Sequence
  Description of Artificial Sequence: Synthetic oligonucleotide
cggauagaugagacaguug

SEQ ID NO: 2237514 - RNA, 19 nt, Artificial Sequence
  Description of Artificial Sequence: Synthetic oligonucleotide
cacaucggccugggcuccg

SEQ ID NO: 2237515 - RNA, 19 nt, Artificial Sequence
  Description of Artificial Sequence: Synthetic oligonucleotide
ggugccgccccuccccuca

SEQ ID NO: 2237516 - RNA, 19 nt, Artificial Sequence
  Description of Artificial Sequence: Synthetic oligonucleotide
cugagccggugaugugguc

SEQ ID NO: 2237517 - RNA, 19 nt, Artificial Sequence
  Description of Artificial Sequence: Synthetic oligonucleotide
gugcuggcucagccgucgc

SEQ ID NO: 2237518 - RNA, 19 nt, Artificial Sequence
  Description of Artificial Sequence: Synthetic oligonucleotide
gcacagaaugguacaaagu

SEQ ID NO: 2237519 - RNA, 19 nt, Artificial Sequence
  Description of Artificial Sequence: Synthetic oligonucleotide
guagagacggugagcccgu

SEQ ID NO: 2237520 - RNA, 19 nt, Artificial Sequence
  Description of Artificial Sequence: Synthetic oligonucleotide
gauuggcagccggggagua

SEQ ID NO: 2237521 - RNA, 19 nt, Artificial Sequence
  Description of Artificial Sequence: Synthetic oligonucleotide
gggucgaucagaagagccu

SEQ ID NO: 2237522 - RNA, 19 nt, Artificial Sequence
  Description of Artificial Sequence: Synthetic oligonucleotide
cucaccccaccuagugcaa

SEQ ID NO: 2237523 - RNA, 19 nt, Artificial Sequence
  Description of Artificial Sequence: Synthetic oligonucleotide
gccggugauguggucagca

SEQ ID NO: 2237524 - RNA, 19 nt, Artificial Sequence
  Description of Artificial Sequence: Synthetic oligonucleotide
gcccgagucuccaaggcaa

SEQ ID NO: 2237525 - RNA, 19 nt, Artificial Sequence
  Description of Artificial Sequence: Synthetic oligonucleotide
ccuuccucgauaugcacau

SEQ ID NO: 2237526 - RNA, 19 nt, Artificial Sequence
  Description of Artificial Sequence: Synthetic oligonucleotide
caguggguauucacggcau

SEQ ID NO: 2237527 - RNA, 19 nt, Artificial Sequence
  Description of Artificial Sequence: Synthetic oligonucleotide
gucgaucagaagagccucu

SEQ ID NO: 2237528 - RNA, 19 nt, Artificial Sequence
  Description of Artificial Sequence: Synthetic oligonucleotide
ccaccuagugcaacggaua

SEQ ID NO: 2237529 - RNA, 19 nt, Artificial Sequence
  Description of Artificial Sequence: Synthetic oligonucleotide
cagcgcauguuugcgggaa

SEQ ID NO: 2237530 - RNA, 19 nt, Artificial Sequence
  Description of Artificial Sequence: Synthetic oligonucleotide
ggaccggggcccuggguga

SEQ ID NO: 2237531 - RNA, 19 nt, Artificial Sequence
  Description of Artificial Sequence: Synthetic oligonucleotide
ccccaacucuuuaaccaga

SEQ ID NO: 2237532 - RNA, 19 nt, Artificial Sequence
  Description of Artificial Sequence: Synthetic oligonucleotide
gcgccgucuccagaacagg

SEQ ID NO: 2237533 - RNA, 19 nt, Artificial Sequence
  Description of Artificial Sequence: Synthetic oligonucleotide
cucagccgucgcacggcca

SEQ ID NO: 2237534 - RNA, 19 nt, Artificial Sequence
  Description of Artificial Sequence: Synthetic oligonucleotide
gcgcauguuugcgggaaca

SEQ ID NO: 2237535 - RNA, 19 nt, Artificial Sequence
  Description of Artificial Sequence: Synthetic oligonucleotide
gcagggcaucuccaguaaa

SEQ ID NO: 2237536 - RNA, 19 nt, Artificial Sequence
  Description of Artificial Sequence: Synthetic oligonucleotide
gugagcccgugguaaucgu

SEQ ID NO: 2237537 - RNA, 19 nt, Artificial Sequence
  Description of Artificial Sequence: Synthetic oligonucleotide
gggaccggaggaccccuga

SEQ ID NO: 2237538 - RNA, 19 nt, Artificial Sequence
  Description of Artificial Sequence: Synthetic oligonucleotide
gcacaaccuuguuggaagu

SEQ ID NO: 2237539 - RNA, 19 nt, Artificial Sequence
  Description of Artificial Sequence: Synthetic oligonucleotide
ggcuccgcugaggcgggag

SEQ ID NO: 2237540 - RNA, 19 nt, Artificial Sequence
  Description of Artificial Sequence: Synthetic oligonucleotide
gagcaucccguugcgccgu

SEQ ID NO: 2237541 - RNA, 19 nt, Artificial Sequence
  Description of Artificial Sequence: Synthetic oligonucleotide
agggaccggaggaccccug

SEQ ID NO: 2237542 - RNA, 19 nt, Artificial Sequence
  Description of Artificial Sequence: Synthetic oligonucleotide
gcuccgcugaggcgggaga

SEQ ID NO: 2237543 - RNA, 19 nt, Artificial Sequence
  Description of Artificial Sequence: Synthetic oligonucleotide
gguggcgucuggaccccac

SEQ ID NO: 2237544 - RNA, 19 nt, Artificial Sequence
  Description of Artificial Sequence: Synthetic oligonucleotide
ccagucaggaagguggcgu

SEQ ID NO: 2237545 - RNA, 19 nt, Artificial Sequence
  Description of Artificial Sequence: Synthetic oligonucleotide
gaggaccggggcccugggu

SEQ ID NO: 2237546 - RNA, 19 nt, Artificial Sequence
  Description of Artificial Sequence: Synthetic oligonucleotide
cguccacacccucggauca

SEQ ID NO: 2237547 - RNA, 19 nt, Artificial Sequence
  Description of Artificial Sequence: Synthetic oligonucleotide
aggcgggagaugaccgauu

SEQ ID NO: 2237548 - RNA, 19 nt, Artificial Sequence
  Description of Artificial Sequence: Synthetic oligonucleotide
ccgucgcacggccacccug

SEQ ID NO: 2237549 - RNA, 19 nt, Artificial Sequence
  Description of Artificial Sequence: Synthetic oligonucleotide
cccaccuagugcaacggau

SEQ ID NO: 2237550 - RNA, 19 nt, Artificial Sequence
  Description of Artificial Sequence: Synthetic oligonucleotide
aggccaugcucuggucauu

SEQ ID NO: 2237551 - RNA, 19 nt, Artificial Sequence
  Description of Artificial Sequence: Synthetic oligonucleotide
ggcugggaccagucaggaa

SEQ ID NO: 2237552 - RNA, 19 nt, Artificial Sequence
  Description of Artificial Sequence: Synthetic oligonucleotide
guccuagcacaaccuuguu

SEQ ID NO: 2237553 - RNA, 19 nt, Artificial Sequence
  Description of Artificial Sequence: Synthetic oligonucleotide
cgucgcacggccacccuga

SEQ ID NO: 2237554 - RNA, 19 nt, Artificial Sequence
  Description of Artificial Sequence: Synthetic oligonucleotide
ccguggguucagaguccgc

SEQ ID NO: 2237555 - RNA, 19 nt, Artificial Sequence
  Description of Artificial Sequence: Synthetic oligonucleotide
ggugagccguggguucaga

SEQ ID NO: 2237556 - RNA, 19 nt, Artificial Sequence
  Description of Artificial Sequence: Synthetic oligonucleotide
ccggauagaugagacaguu

SEQ ID NO: 2237557 - RNA, 19 nt, Artificial Sequence
  Description of Artificial Sequence: Synthetic oligonucleotide
gcacugagcccagcaaccu

SEQ ID NO: 2237558 - RNA, 19 nt, Artificial Sequence
  Description of Artificial Sequence: Synthetic oligonucleotide
ggaccccugagccggugau

SEQ ID NO: 2237559 - RNA, 19 nt, Artificial Sequence
  Description of Artificial Sequence: Synthetic oligonucleotide
ggcagccggggaguaggga

SEQ ID NO: 2237560 - RNA, 19 nt, Artificial Sequence
  Description of Artificial Sequence: Synthetic oligonucleotide
cagcauggcaguggguauu

SEQ ID NO: 2237561 - RNA, 19 nt, Artificial Sequence
  Description of Artificial Sequence: Synthetic oligonucleotide
gccucucgagacuccgggu

SEQ ID NO: 2237562 - RNA, 19 nt, Artificial Sequence
  Description of Artificial Sequence: Synthetic oligonucleotide
ccccaccuagugcaacgga

SEQ ID NO: 2237563 - RNA, 19 nt, Artificial Sequence
  Description of Artificial Sequence: Synthetic oligonucleotide
gccggauagaugagacagu

SEQ ID NO: 2237564 - RNA, 19 nt, Artificial Sequence
  Description of Artificial Sequence: Synthetic oligonucleotide
ccgccccuccccucacccc

SEQ ID NO: 2237565 - RNA, 19 nt, Artificial Sequence
  Description of Artificial Sequence: Synthetic oligonucleotide
cuccgcugaggcgggagau

SEQ ID NO: 2237566 - RNA, 19 nt, Artificial Sequence
  Description of Artificial Sequence: Synthetic oligonucleotide
ggcucgcacugagcccagc

SEQ ID NO: 2237567 - RNA, 19 nt, Artificial Sequence
  Description of Artificial Sequence: Synthetic oligonucleotide
cgcugaggcgggagaugac

SEQ ID NO: 2237568 - RNA, 19 nt, Artificial Sequence
  Description of Artificial Sequence: Synthetic oligonucleotide
ccggggaguagggaccgga

SEQ ID NO: 2237569 - RNA, 19 nt, Artificial Sequence
  Description of Artificial Sequence: Synthetic oligonucleotide
gccggggaguagggaccgg

SEQ ID NO: 2237570 - RNA, 19 nt, Artificial Sequence
  Description of Artificial Sequence: Synthetic oligonucleotide
caucggccugggcuccgcu

SEQ ID NO: 2237571 - RNA, 19 nt, Artificial Sequence
  Description of Artificial Sequence: Synthetic oligonucleotide
cggugagcccgugguaauc

SEQ ID NO: 2237572 - RNA, 19 nt, Artificial Sequence
  Description of Artificial Sequence: Synthetic oligonucleotide
gggugccgccccuccccuc

SEQ ID NO: 2237573 - RNA, 19 nt, Artificial Sequence
  Description of Artificial Sequence: Synthetic oligonucleotide
ggggugccgccccuccccu

SEQ ID NO: 2237574 - RNA, 19 nt, Artificial Sequence
  Description of Artificial Sequence: Synthetic oligonucleotide
gugcagcucuugggcucaa

SEQ ID NO: 2237575 - RNA, 19 nt, Artificial Sequence
  Description of Artificial Sequence: Synthetic oligonucleotide
ccguugcgccgucuccaga

SEQ ID NO: 2237576 - RNA, 19 nt, Artificial Sequence
  Description of Artificial Sequence: Synthetic oligonucleotide
cggcucgcacugagcccag

SEQ ID NO: 2237577 - RNA, 19 nt, Artificial Sequence
  Description of Artificial Sequence: Synthetic oligonucleotide
cggcugggaccagucagga

SEQ ID NO: 2237578 - RNA, 19 nt, Artificial Sequence
  Description of Artificial Sequence: Synthetic oligonucleotide
cgauuggcagccggggagu

SEQ ID NO: 2237579 - RNA, 19 nt, Artificial Sequence
  Description of Artificial Sequence: Synthetic oligonucleotide
gcucuggggugccgccccu

SEQ ID NO: 2237580 - RNA, 19 nt, Artificial Sequence
  Description of Artificial Sequence: Synthetic oligonucleotide
gcuucggcuugggcaaguu

SEQ ID NO: 2237581 - RNA, 19 nt, Artificial Sequence
  Description of Artificial Sequence: Synthetic oligonucleotide
ccgagucuccaaggcaaau

SEQ ID NO: 2237582 - RNA, 19 nt, Artificial Sequence
  Description of Artificial Sequence: Synthetic oligonucleotide
ccuccacaguagagacggu

SEQ ID NO: 2237583 - RNA, 19 nt, Artificial Sequence
  Description of Artificial Sequence: Synthetic oligonucleotide
cggauacaagcagccggcu

SEQ ID NO: 2237584 - RNA, 19 nt, Artificial Sequence
  Description of Artificial Sequence: Synthetic oligonucleotide
cggccacccugagggccgc

SEQ ID NO: 2237585 - RNA, 19 nt, Artificial Sequence
  Description of Artificial Sequence: Synthetic oligonucleotide
gggcuccgcugaggcggga

SEQ ID NO: 2237586 - RNA, 19 nt, Artificial Sequence
  Description of Artificial Sequence: Synthetic oligonucleotide
ccggggcccugggugagcu

SEQ ID NO: 2237587 - RNA, 19 nt, Artificial Sequence
  Description of Artificial Sequence: Synthetic oligonucleotide
ccgggucacccagcaggua

SEQ ID NO: 2237588 - RNA, 19 nt, Artificial Sequence
  Description of Artificial Sequence: Synthetic oligonucleotide
ccccgccggcucgcacuga

SEQ ID NO: 2237589 - RNA, 19 nt, Artificial Sequence
  Description of Artificial Sequence: Synthetic oligonucleotide
ucuacuggaacaggaaggg

SEQ ID NO: 2237590 - RNA, 19 nt, Artificial Sequence
  Description of Artificial Sequence: Synthetic oligonucleotide
aggaucauagggaacauca

SEQ ID NO: 2237591 - RNA, 19 nt, Artificial Sequence
  Description of Artificial Sequence: Synthetic oligonucleotide
gucuacuggaacaggaagg

SEQ ID NO: 2237592 - RNA, 19 nt, Artificial Sequence
  Description of Artificial Sequence: Synthetic oligonucleotide
aggaugaagauguccccuc

SEQ ID NO: 2237593 - RNA, 19 nt, Artificial Sequence
  Description of Artificial Sequence: Synthetic oligonucleotide
ggcagcucaagguagcacg

SEQ ID NO: 2237594 - RNA, 19 nt, Artificial Sequence
  Description of Artificial Sequence: Synthetic oligonucleotide
ugaagauguccccuccugu

SEQ ID NO: 2237595 - RNA, 19 nt, Artificial Sequence
  Description of Artificial Sequence: Synthetic oligonucleotide
caugaugaggacaguggac

SEQ ID NO: 2237596 - RNA, 19 nt, Artificial Sequence
  Description of Artificial Sequence: Synthetic oligonucleotide
gaagauguccccuccuguc

SEQ ID NO: 2237597 - RNA, 19 nt, Artificial Sequence
  Description of Artificial Sequence: Synthetic oligonucleotide
augaagauguccccuccug

SEQ ID NO: 2237598 - RNA, 19 nt, Artificial Sequence
  Description of Artificial Sequence: Synthetic oligonucleotide
caagguagcacggagguga

SEQ ID NO: 2237599 - RNA, 19 nt, Artificial Sequence
  Description of Artificial Sequence: Synthetic oligonucleotide
gguagcacggaggugacag

SEQ ID NO: 2237600 - RNA, 19 nt, Artificial Sequence
  Description of Artificial Sequence: Synthetic oligonucleotide
augaggacaguggacugag

SEQ ID NO: 2237601 - RNA, 19 nt, Artificial Sequence
  Description of Artificial Sequence: Synthetic oligonucleotide
ugaggacaguggacugagg

SEQ ID NO: 2237602 - RNA, 19 nt, Artificial Sequence
  Description of Artificial Sequence: Synthetic oligonucleotide
ucccaucuccacauggcau

SEQ ID NO: 2237603 - RNA, 19 nt, Artificial Sequence
  Description of Artificial Sequence: Synthetic oligonucleotide
aagguagcacggaggugac

SEQ ID NO: 2237604 - RNA, 19 nt, Artificial Sequence
  Description of Artificial Sequence: Synthetic oligonucleotide
uagcacggaggugacagga

SEQ ID NO: 2237605 - RNA, 19 nt, Artificial Sequence
  Description of Artificial Sequence: Synthetic oligonucleotide
gaugaggacaguggacuga

SEQ ID NO: 2237606 - RNA, 19 nt, Artificial Sequence
  Description of Artificial Sequence: Synthetic oligonucleotide
ucuccacauggcaugugua

SEQ ID NO: 2237607 - RNA, 19 nt, Artificial Sequence
  Description of Artificial Sequence: Synthetic oligonucleotide
guagcacggaggugacagg

SEQ ID NO: 2237608 - RNA, 19 nt, Artificial Sequence
  Description of Artificial Sequence: Synthetic oligonucleotide
aggaggcucccaucuccac

SEQ ID NO: 2237609 - RNA, 19 nt, Artificial Sequence
  Description of Artificial Sequence: Synthetic oligonucleotide
ggaugaagauguccccucc

SEQ ID NO: 2237610 - RNA, 19 nt, Artificial Sequence
  Description of Artificial Sequence: Synthetic oligonucleotide
ggcucccaucuccacaugg

SEQ ID NO: 2237611 - RNA, 19 nt, Artificial Sequence
  Description of Artificial Sequence: Synthetic oligonucleotide
ucaagguagcacggaggug

SEQ ID NO: 2237612 - RNA, 19 nt, Artificial Sequence
  Description of Artificial Sequence: Synthetic oligonucleotide
gaugaagauguccccuccu

SEQ ID NO: 2237613 - RNA, 19 nt, Artificial Sequence
  Description of Artificial Sequence: Synthetic oligonucleotide
cucaagguagcacggaggu

SEQ ID NO: 2237614 - RNA, 19 nt, Artificial Sequence
  Description of Artificial Sequence: Synthetic oligonucleotide
uccacauggcauguguauu

SEQ ID NO: 2237615 - RNA, 19 nt, Artificial Sequence
  Description of Artificial Sequence: Synthetic oligonucleotide
uaggaucauagggaacauc

SEQ ID NO: 2237616 - RNA, 19 nt, Artificial Sequence
  Description of Artificial Sequence: Synthetic oligonucleotide
cacggaggugacaggauga

SEQ ID NO: 2237617 - RNA, 19 nt, Artificial Sequence
  Description of Artificial Sequence: Synthetic oligonucleotide
ggaucauagggaacaucag

SEQ ID NO: 2237618 - RNA, 19 nt, Artificial Sequence
  Description of Artificial Sequence: Synthetic oligonucleotide
gcucaagguagcacggagg

SEQ ID NO: 2237619 - RNA, 19 nt, Artificial Sequence
  Description of Artificial Sequence: Synthetic oligonucleotide
cugucuacuggaacaggaa

SEQ ID NO: 2237620 - RNA, 19 nt, Artificial Sequence
  Description of Artificial Sequence: Synthetic oligonucleotide
cccaucuccacauggcaug

SEQ ID NO: 2237621 - RNA, 19 nt, Artificial Sequence
  Description of Artificial Sequence: Synthetic oligonucleotide
cucccaucuccacauggca

SEQ ID NO: 2237622 - RNA, 19 nt, Artificial Sequence
  Description of Artificial Sequence: Synthetic oligonucleotide
gaggcucccaucuccacau

SEQ ID NO: 2237623 - RNA, 19 nt, Artificial Sequence
  Description of Artificial Sequence: Synthetic oligonucleotide
gcagcucaagguagcacgg

SEQ ID NO: 2237624 - RNA, 19 nt, Artificial Sequence
  Description of Artificial Sequence: Synthetic oligonucleotide
ugcugggcucccaauucuu

SEQ ID NO: 2237625 - RNA, 19 nt, Artificial Sequence
  Description of Artificial Sequence: Synthetic oligonucleotide
gcacggaggugacaggaug

SEQ ID NO: 2237626 - RNA, 19 nt, Artificial Sequence
  Description of Artificial Sequence: Synthetic oligonucleotide
ccugucuacuggaacagga

SEQ ID NO: 2237627 - RNA, 19 nt, Artificial Sequence
  Description of Artificial Sequence: Synthetic oligonucleotide
uggcagcucaagguagcac

SEQ ID NO: 2237628 - RNA, 19 nt, Artificial Sequence
  Description of Artificial Sequence: Synthetic oligonucleotide
ggaggcucccaucuccaca

SEQ ID NO: 2237629 - RNA, 19 nt, Artificial Sequence
  Description of Artificial Sequence: Synthetic oligonucleotide
gcucccaucuccacauggc

SEQ ID NO: 2237630 - RNA, 19 nt, Artificial Sequence
  Description of Artificial Sequence: Synthetic oligonucleotide
cuccacauggcauguguau

SEQ ID NO: 2237631 - RNA, 19 nt, Artificial Sequence
  Description of Artificial Sequence: Synthetic oligonucleotide
acggaggugacaggaugaa

SEQ ID NO: 2237632 - RNA, 19 nt, Artificial Sequence
  Description of Artificial Sequence: Synthetic oligonucleotide
caggaugaagauguccccu

SEQ ID NO: 2237633 - RNA, 19 nt, Artificial Sequence
  Description of Artificial Sequence: Synthetic oligonucleotide
caucuccacauggcaugug

SEQ ID NO: 2237634 - RNA, 19 nt, Artificial Sequence
  Description of Artificial Sequence: Synthetic oligonucleotide
aggcucccaucuccacaug

SEQ ID NO: 2237635 - RNA, 19 nt, Artificial Sequence
  Description of Artificial Sequence: Synthetic oligonucleotide
agcacggaggugacaggau

SEQ ID NO: 2237636 - RNA, 19 nt, Artificial Sequence
  Description of Artificial Sequence: Synthetic oligonucleotide
agguagcacggaggugaca

SEQ ID NO: 2237637 - RNA, 19 nt, Artificial Sequence
  Description of Artificial Sequence: Synthetic oligonucleotide
cagcucaagguagcacgga

SEQ ID NO: 2237638 - RNA, 19 nt, Artificial Sequence
  Description of Artificial Sequence: Synthetic oligonucleotide
cuacuggaacaggaagggu

SEQ ID NO: 2237639 - RNA, 19 nt, Artificial Sequence
  Description of Artificial Sequence: Synthetic oligonucleotide
ggcucccaauucuucacau

SEQ ID NO: 2237640 - RNA, 19 nt, Artificial Sequence
  Description of Artificial Sequence: Synthetic oligonucleotide
ccaucuccacauggcaugu

SEQ ID NO: 2237641 - RNA, 19 nt, Artificial Sequence
  Description of Artificial Sequence: Synthetic oligonucleotide
uuuaucauaauacaguuug

SEQ ID NO: 2237642 - RNA, 19 nt, Artificial Sequence
  Description of Artificial Sequence: Synthetic oligonucleotide
auuuaauguucucagaucc

SEQ ID NO: 2237643 - RNA, 19 nt, Artificial Sequence
  Description of Artificial Sequence: Synthetic oligonucleotide
aaaucuuugggcuggagac

SEQ ID NO: 2237644 - RNA, 19 nt, Artificial Sequence
  Description of Artificial Sequence: Synthetic oligonucleotide
uuugacucuagguagaugg

SEQ ID NO: 2237645 - RNA, 19 nt, Artificial Sequence
  Description of Artificial Sequence: Synthetic oligonucleotide
aaguuaagaauuuucgccg

SEQ ID NO: 2237646 - RNA, 19 nt, Artificial Sequence
  Description of Artificial Sequence: Synthetic oligonucleotide
uaaguuaagaauuuucgcc

SEQ ID NO: 2237647 - RNA, 19 nt, Artificial Sequence
  Description of Artificial Sequence: Synthetic oligonucleotide
uaacaaauaguuuagcuga

SEQ ID NO: 2237648 - RNA, 19 nt, Artificial Sequence
  Description of Artificial Sequence: Synthetic oligonucleotide
gaaagaacgguacagagac

SEQ ID NO: 2237649 - RNA, 19 nt, Artificial Sequence
  Description of Artificial Sequence: Synthetic oligonucleotide
agaaucuccggucagcucc

SEQ ID NO: 2237650 - RNA, 19 nt, Artificial Sequence
  Description of Artificial Sequence: Synthetic oligonucleotide
uucuccuuaauauaguucc

SEQ ID NO: 2237651 - RNA, 19 nt, Artificial Sequence
  Description of Artificial Sequence: Synthetic oligonucleotide
aauuuccuggucaugaugg

SEQ ID NO: 2237652 - RNA, 19 nt, Artificial Sequence
  Description of Artificial Sequence: Synthetic oligonucleotide
aagaacgguacagagacgg

SEQ ID NO: 2237653 - RNA, 19 nt, Artificial Sequence
  Description of Artificial Sequence: Synthetic oligonucleotide
aauauaguuccuuuccacu

SEQ ID NO: 2237654 - RNA, 19 nt, Artificial Sequence
  Description of Artificial Sequence: Synthetic oligonucleotide
ugauauuccugcaagguac

SEQ ID NO: 2237655 - RNA, 19 nt, Artificial Sequence
  Description of Artificial Sequence: Synthetic oligonucleotide
aguuuagcugagcaggagc

SEQ ID NO: 2237656 - RNA, 19 nt, Artificial Sequence
  Description of Artificial Sequence: Synthetic oligonucleotide
uuaagcuuauuuaauguuc

SEQ ID NO: 2237657 - RNA, 19 nt, Artificial Sequence
  Description of Artificial Sequence: Synthetic oligonucleotide
uccguuaacaaauaguuua

SEQ ID NO: 2237658 - RNA, 19 nt, Artificial Sequence
  Description of Artificial Sequence: Synthetic oligonucleotide
uuaauauaguuccuuucca

SEQ ID NO: 2237659 - RNA, 19 nt, Artificial Sequence
  Description of Artificial Sequence: Synthetic oligonucleotide
ucauaauacaguuugccau

SEQ ID NO: 2237660 - RNA, 19 nt, Artificial Sequence
  Description of Artificial Sequence: Synthetic oligonucleotide
aggccaaguagcuaguccc

SEQ ID NO: 2237661 - RNA, 19 nt, Artificial Sequence
  Description of Artificial Sequence: Synthetic oligonucleotide
uguugauccagcuucuuca

SEQ ID NO: 2237662 - RNA, 19 nt, Artificial Sequence
  Description of Artificial Sequence: Synthetic oligonucleotide
uaagcuuauuuaauguucu

SEQ ID NO: 2237663 - RNA, 19 nt, Artificial Sequence
  Description of Artificial Sequence: Synthetic oligonucleotide
ucuccggucagcuccaucg

SEQ ID NO: 2237664 - RNA, 19 nt, Artificial Sequence
  Description of Artificial Sequence: Synthetic oligonucleotide
guaaguuaagaauuuucgc

SEQ ID NO: 2237665 - RNA, 19 nt, Artificial Sequence
  Description of Artificial Sequence: Synthetic oligonucleotide
uaagaauuuucgccggcgg

SEQ ID NO: 2237666 - RNA, 19 nt, Artificial Sequence
  Description of Artificial Sequence: Synthetic oligonucleotide
uuugccaucuucuauccga

SEQ ID NO: 2237667 - RNA, 19 nt, Artificial Sequence
  Description of Artificial Sequence: Synthetic oligonucleotide
gacaggaucauuuggucgc

SEQ ID NO: 2237668 - RNA, 19 nt, Artificial Sequence
  Description of Artificial Sequence: Synthetic oligonucleotide
aguuaagaauuuucgccgg

SEQ ID NO: 2237669 - RNA, 19 nt, Artificial Sequence
  Description of Artificial Sequence: Synthetic oligonucleotide
gguaaguuaagaauuuucg

SEQ ID NO: 2237670 - RNA, 19 nt, Artificial Sequence
  Description of Artificial Sequence: Synthetic oligonucleotide
acuuaagcuuauuuaaugu

SEQ ID NO: 2237671 - RNA, 19 nt, Artificial Sequence
  Description of Artificial Sequence: Synthetic oligonucleotide
uggugacugagucuggagg

SEQ ID NO: 2237672 - RNA, 19 nt, Artificial Sequence
  Description of Artificial Sequence: Synthetic oligonucleotide
uugacgauuccacagugcu

SEQ ID NO: 2237673 - RNA, 19 nt, Artificial Sequence
  Description of Artificial Sequence: Synthetic oligonucleotide
acuuccauagaaucuccgg

SEQ ID NO: 2237674 - RNA, 19 nt, Artificial Sequence
  Description of Artificial Sequence: Synthetic oligonucleotide
uaauauaguuccuuuccac

SEQ ID NO: 2237675 - RNA, 19 nt, Artificial Sequence
  Description of Artificial Sequence: Synthetic oligonucleotide
uuaagaauuuucgccggcg

SEQ ID NO: 2237676 - RNA, 19 nt, Artificial Sequence
  Description of Artificial Sequence: Synthetic oligonucleotide
uauaguuccuuuccacuug

SEQ ID NO: 2237677 - RNA, 19 nt, Artificial Sequence
  Description of Artificial Sequence: Synthetic oligonucleotide
uccaugaucugcucguccg

SEQ ID NO: 2237678 - RNA, 19 nt, Artificial Sequence
  Description of Artificial Sequence: Synthetic oligonucleotide
aagaguucugcauuccgga

SEQ ID NO: 2237679 - RNA, 19 nt, Artificial Sequence
  Description of Artificial Sequence: Synthetic oligonucleotide
ugccaguuuguccugauac

SEQ ID NO: 2237680 - RNA, 19 nt, Artificial Sequence
  Description of Artificial Sequence: Synthetic oligonucleotide
ucuuaguacugucacuugu

SEQ ID NO: 2237681 - RNA, 19 nt, Artificial Sequence
  Description of Artificial Sequence: Synthetic oligonucleotide
agauccucaucuuaguacu

SEQ ID NO: 2237682 - RNA, 19 nt, Artificial Sequence
  Description of Artificial Sequence: Synthetic oligonucleotide
uagauccucaucuuaguac

SEQ ID NO: 2237683 - RNA, 19 nt, Artificial Sequence
  Description of Artificial Sequence: Synthetic oligonucleotide
aucuuuuaucauaauacag

SEQ ID NO: 2237684 - RNA, 19 nt, Artificial Sequence
  Description of Artificial Sequence: Synthetic oligonucleotide
caagguaccuuccuguagc

SEQ ID NO: 2237685 - RNA, 19 nt, Artificial Sequence
  Description of Artificial Sequence: Synthetic oligonucleotide
agcuucaaaucuuugggcu

SEQ ID NO: 2237686 - RNA, 19 nt, Artificial Sequence
  Description of Artificial Sequence: Synthetic oligonucleotide
uuuaauguucucagauccu

SEQ ID NO: 2237687 - RNA, 19 nt, Artificial Sequence
  Description of Artificial Sequence: Synthetic oligonucleotide
caugauggguuucacuucc

SEQ ID NO: 2237688 - RNA, 19 nt, Artificial Sequence
  Description of Artificial Sequence: Synthetic oligonucleotide
ucaagcucggcgaucaggu

SEQ ID NO: 2237689 - RNA, 19 nt, Artificial Sequence
  Description of Artificial Sequence: Synthetic oligonucleotide
uuaguacugucacuugucu

SEQ ID NO: 2237690 - RNA, 19 nt, Artificial Sequence
  Description of Artificial Sequence: Synthetic oligonucleotide
guacuguugauccagcuuc

SEQ ID NO: 2237691 - RNA, 19 nt, Artificial Sequence
  Description of Artificial Sequence: Synthetic oligonucleotide
ucacgaagagcccacgcug

SEQ ID NO: 2237692 - RNA, 19 nt, Artificial Sequence
  Description of Artificial Sequence: Synthetic oligonucleotide
uccauagaaucuccgguca

SEQ ID NO: 2237693 - RNA, 19 nt, Artificial Sequence
  Description of Artificial Sequence: Synthetic oligonucleotide
acaaauaguuuagcugagc

SEQ ID NO: 2237694 - RNA, 19 nt, Artificial Sequence
  Description of Artificial Sequence: Synthetic oligonucleotide
uucuauccgagcuucaaau

SEQ ID NO: 2237695 - RNA, 19 nt, Artificial Sequence
  Description of Artificial Sequence: Synthetic oligonucleotide
aagaauuuucgccggcgga

SEQ ID NO: 2237696 - RNA, 19 nt, Artificial Sequence
  Description of Artificial Sequence: Synthetic oligonucleotide
gacgucagugccuugacga

SEQ ID NO: 2237697 - RNA, 19 nt, Artificial Sequence
  Description of Artificial Sequence: Synthetic oligonucleotide
ugcucguccguuaacaaau

SEQ ID NO: 2237698 - RNA, 19 nt, Artificial Sequence
  Description of Artificial Sequence: Synthetic oligonucleotide
gugacuuaagcuuauuuaa

SEQ ID NO: 2237699 - RNA, 19 nt, Artificial Sequence
  Description of Artificial Sequence: Synthetic oligonucleotide
guuaacaaauaguuuagcu

SEQ ID NO: 2237700 - RNA, 19 nt, Artificial Sequence
  Description of Artificial Sequence: Synthetic oligonucleotide
ucguccguuaacaaauagu

SEQ ID NO: 2237701 - RNA, 19 nt, Artificial Sequence
  Description of Artificial Sequence: Synthetic oligonucleotide
gagcuucaaaucuuugggc

SEQ ID NO: 2237702 - RNA, 19 nt, Artificial Sequence
  Description of Artificial Sequence: Synthetic oligonucleotide
ugacuuaagcuuauuuaau

SEQ ID NO: 2237703 - RNA, 19 nt, Artificial Sequence
  Description of Artificial Sequence: Synthetic oligonucleotide
ugccuugacgauuccacag

SEQ ID NO: 2237704 - RNA, 19 nt, Artificial Sequence
  Description of Artificial Sequence: Synthetic oligonucleotide
gguacagagacggaagugg

SEQ ID NO: 2237705 - RNA, 19 nt, Artificial Sequence
  Description of Artificial Sequence: Synthetic oligonucleotide
aacaaauaguuuagcugag

SEQ ID NO: 2237706 - RNA, 19 nt, Artificial Sequence
  Description of Artificial Sequence: Synthetic oligonucleotide
cuuaguacugucacuuguc

SEQ ID NO: 2237707 - RNA, 19 nt, Artificial Sequence
  Description of Artificial Sequence: Synthetic oligonucleotide
uuaauguucucagauccuc

SEQ ID NO: 2237708 - RNA, 19 nt, Artificial Sequence
  Description of Artificial Sequence: Synthetic oligonucleotide
ggugacugagucuggaggg

SEQ ID NO: 2237709 - RNA, 19 nt, Artificial Sequence
  Description of Artificial Sequence: Synthetic oligonucleotide
uuguccuuugacucuaggu

SEQ ID NO: 2237710 - RNA, 19 nt, Artificial Sequence
  Description of Artificial Sequence: Synthetic oligonucleotide
uucugguuguccuuugacu

SEQ ID NO: 2237711 - RNA, 19 nt, Artificial Sequence
  Description of Artificial Sequence: Synthetic oligonucleotide
uuccauagaaucuccgguc

SEQ ID NO: 2237712 - RNA, 19 nt, Artificial Sequence
  Description of Artificial Sequence: Synthetic oligonucleotide
aaacuccuucacugccgcc

SEQ ID NO: 2237713 - RNA, 19 nt, Artificial Sequence
  Description of Artificial Sequence: Synthetic oligonucleotide
aauuuucgccggcggauca

SEQ ID NO: 2237714 - RNA, 19 nt, Artificial Sequence
  Description of Artificial Sequence: Synthetic oligonucleotide
accaucuuuuaucauaaua

SEQ ID NO: 2237715 - RNA, 19 nt, Artificial Sequence
  Description of Artificial Sequence: Synthetic oligonucleotide
ucccgguaaguuaagaauu

SEQ ID NO: 2237716 - RNA, 19 nt, Artificial Sequence
  Description of Artificial Sequence: Synthetic oligonucleotide
auacaucugcuccuucauc

SEQ ID NO: 2237717 - RNA, 19 nt, Artificial Sequence
  Description of Artificial Sequence: Synthetic oligonucleotide
guuuagcugagcaggagcc

SEQ ID NO: 2237718 - RNA, 19 nt, Artificial Sequence
  Description of Artificial Sequence: Synthetic oligonucleotide
uguacuguugauccagcuu

SEQ ID NO: 2237719 - RNA, 19 nt, Artificial Sequence
  Description of Artificial Sequence: Synthetic oligonucleotide
uacagagacggaaguggcc

SEQ ID NO: 2237720 - RNA, 19 nt, Artificial Sequence
  Description of Artificial Sequence: Synthetic oligonucleotide
caguuugccaucuucuauc

SEQ ID NO: 2237721 - RNA, 19 nt, Artificial Sequence
  Description of Artificial Sequence: Synthetic oligonucleotide
uugccaucuucuauccgag

SEQ ID NO: 2237722 - RNA, 19 nt, Artificial Sequence
  Description of Artificial Sequence: Synthetic oligonucleotide
auuuccuggucaugauggg

SEQ ID NO: 2237723 - RNA, 19 nt, Artificial Sequence
  Description of Artificial Sequence: Synthetic oligonucleotide
uucuugucuucaaacuccu

SEQ ID NO: 2237724 - RNA, 19 nt, Artificial Sequence
  Description of Artificial Sequence: Synthetic oligonucleotide
uuuagcugagcaggagccg

SEQ ID NO: 2237725 - RNA, 19 nt, Artificial Sequence
  Description of Artificial Sequence: Synthetic oligonucleotide
aguagcuagucccgguaag

SEQ ID NO: 2237726 - RNA, 19 nt, Artificial Sequence
  Description of Artificial Sequence: Synthetic oligonucleotide
gucgcuucaaagaugccag

SEQ ID NO: 2237727 - RNA, 19 nt, Artificial Sequence
  Description of Artificial Sequence: Synthetic oligonucleotide
cacagugcucuccaugucc

SEQ ID NO: 2237728 - RNA, 19 nt, Artificial Sequence
  Description of Artificial Sequence: Synthetic oligonucleotide
guuaagaauuuucgccggc

SEQ ID NO: 2237729 - RNA, 19 nt, Artificial Sequence
  Description of Artificial Sequence: Synthetic oligonucleotide
ugacgucagugccuugacg

SEQ ID NO: 2237730 - RNA, 19 nt, Artificial Sequence
  Description of Artificial Sequence: Synthetic oligonucleotide
cuugacgauuccacagugc

SEQ ID NO: 2237731 - RNA, 19 nt, Artificial Sequence
  Description of Artificial Sequence: Synthetic oligonucleotide
ucuucuccuuaauauaguu

SEQ ID NO: 2237732 - RNA, 19 nt, Artificial Sequence
  Description of Artificial Sequence: Synthetic oligonucleotide
ucggcgaucagguucuccu

SEQ ID NO: 2237733 - RNA, 19 nt, Artificial Sequence
  Description of Artificial Sequence: Synthetic oligonucleotide
ggacaggaucauuuggucg

SEQ ID NO: 2237734 - RNA, 19 nt, Artificial Sequence
  Description of Artificial Sequence: Synthetic oligonucleotide
ucuguacuguugauccagc

SEQ ID NO: 2237735 - RNA, 19 nt, Artificial Sequence
  Description of Artificial Sequence: Synthetic oligonucleotide
aucuuugggcuggagacuc

SEQ ID NO: 2237736 - RNA, 19 nt, Artificial Sequence
  Description of Artificial Sequence: Synthetic oligonucleotide
acagugcucuccauguccc

SEQ ID NO: 2237737 - RNA, 19 nt, Artificial Sequence
  Description of Artificial Sequence: Synthetic oligonucleotide
aucacgaagagcccacgcu

SEQ ID NO: 2237738 - RNA, 19 nt, Artificial Sequence
  Description of Artificial Sequence: Synthetic oligonucleotide
uuggucgccucuuuaauuu

SEQ ID NO: 2237739 - RNA, 19 nt, Artificial Sequence
  Description of Artificial Sequence: Synthetic oligonucleotide
gauauuccugcaagguacc

SEQ ID NO: 2237740 - RNA, 19 nt, Artificial Sequence
  Description of Artificial Sequence: Synthetic oligonucleotide
aggaucauuuggucgccuc

SEQ ID NO: 2237741 - RNA, 19 nt, Artificial Sequence
  Description of Artificial Sequence: Synthetic oligonucleotide
ucuauccgagcuucaaauc

SEQ ID NO: 2237742 - RNA, 19 nt, Artificial Sequence
  Description of Artificial Sequence: Synthetic oligonucleotide
uuaauuuccuggucaugau

SEQ ID NO: 2237743 - RNA, 19 nt, Artificial Sequence
  Description of Artificial Sequence: Synthetic oligonucleotide
caucgugagcuucucauuc

SEQ ID NO: 2237744 - RNA, 19 nt, Artificial Sequence
  Description of Artificial Sequence: Synthetic oligonucleotide
gaucacgaagagcccacgc

SEQ ID NO: 2237745 - RNA, 19 nt, Artificial Sequence
  Description of Artificial Sequence: Synthetic oligonucleotide
uuccacuuguucaguuucc

SEQ ID NO: 2237746 - RNA, 19 nt, Artificial Sequence
  Description of Artificial Sequence: Synthetic oligonucleotide
aaguagcuagucccgguaa

SEQ ID NO: 2237747 - RNA, 19 nt, Artificial Sequence
  Description of Artificial Sequence: Synthetic oligonucleotide
ugugacgucagugccuuga

SEQ ID NO: 2237748 - RNA, 19 nt, Artificial Sequence
  Description of Artificial Sequence: Synthetic oligonucleotide
auggcuuggcucuuguggu

SEQ ID NO: 2237749 - RNA, 19 nt, Artificial Sequence
  Description of Artificial Sequence: Synthetic oligonucleotide
auaguuccuuuccacuugu

SEQ ID NO: 2237750 - RNA, 19 nt, Artificial Sequence
  Description of Artificial Sequence: Synthetic oligonucleotide
uccucaucgugcuucgcca

SEQ ID NO: 2237751 - RNA, 19 nt, Artificial Sequence
  Description of Artificial Sequence: Synthetic oligonucleotide
uggaggaagaguucugcau

SEQ ID NO: 2237752 - RNA, 19 nt, Artificial Sequence
  Description of Artificial Sequence: Synthetic oligonucleotide
cuggaauggggacaggauc

SEQ ID NO: 2237753 - RNA, 19 nt, Artificial Sequence
  Description of Artificial Sequence: Synthetic oligonucleotide
agguagauccucaucuuag

SEQ ID NO: 2237754 - RNA, 19 nt, Artificial Sequence
  Description of Artificial Sequence: Synthetic oligonucleotide
augucccaggccaaguagc

SEQ ID NO: 2237755 - RNA, 19 nt, Artificial Sequence
  Description of Artificial Sequence: Synthetic oligonucleotide
ggaagaguucugcauuccg

SEQ ID NO: 2237756 - RNA, 19 nt, Artificial Sequence
  Description of Artificial Sequence: Synthetic oligonucleotide
caccuucuugucuucaaac

SEQ ID NO: 2237757 - RNA, 19 nt, Artificial Sequence
  Description of Artificial Sequence: Synthetic oligonucleotide
aaagaacgguacagagacg

SEQ ID NO: 2237758 - RNA, 19 nt, Artificial Sequence
  Description of Artificial Sequence: Synthetic oligonucleotide
cucuguacuguugauccag

SEQ ID NO: 2237759 - RNA, 19 nt, Artificial Sequence
  Description of Artificial Sequence: Synthetic oligonucleotide
acucuagguagauggcuug

SEQ ID NO: 2237760 - RNA, 19 nt, Artificial Sequence
  Description of Artificial Sequence: Synthetic oligonucleotide
caugucccaggccaaguag

SEQ ID NO: 2237761 - RNA, 19 nt, Artificial Sequence
  Description of Artificial Sequence: Synthetic oligonucleotide
ugucacuugucuuccucac

SEQ ID NO: 2237762 - RNA, 19 nt, Artificial Sequence
  Description of Artificial Sequence: Synthetic oligonucleotide
aagguaccuuccuguagcu

SEQ ID NO: 2237763 - RNA, 19 nt, Artificial Sequence
  Description of Artificial Sequence: Synthetic oligonucleotide
aaucuuugggcuggagacu

SEQ ID NO: 2237764 - RNA, 19 nt, Artificial Sequence
  Description of Artificial Sequence: Synthetic oligonucleotide
auagaaucuccggucagcu

SEQ ID NO: 2237765 - RNA, 19 nt, Artificial Sequence
  Description of Artificial Sequence: Synthetic oligonucleotide
aaguggccggccaugugac

SEQ ID NO: 2237766 - RNA, 19 nt, Artificial Sequence
  Description of Artificial Sequence: Synthetic oligonucleotide
uuuggucgccucuuuaauu

SEQ ID NO: 2237767 - RNA, 19 nt, Artificial Sequence
  Description of Artificial Sequence: Synthetic oligonucleotide
ucgugcuucgccaggucug

SEQ ID NO: 2237768 - RNA, 19 nt, Artificial Sequence
  Description of Artificial Sequence: Synthetic oligonucleotide
gacgauuccacagugcucu

SEQ ID NO: 2237769 - RNA, 19 nt, Artificial Sequence
  Description of Artificial Sequence: Synthetic oligonucleotide
agguguggcaggcaagugu

SEQ ID NO: 2237770 - RNA, 19 nt, Artificial Sequence
  Description of Artificial Sequence: Synthetic oligonucleotide
ugacucuagguagauggcu

SEQ ID NO: 2237771 - RNA, 19 nt, Artificial Sequence
  Description of Artificial Sequence: Synthetic oligonucleotide
ggugacuuaagcuuauuua

SEQ ID NO: 2237772 - RNA, 19 nt, Artificial Sequence
  Description of Artificial Sequence: Synthetic oligonucleotide
ucuagguagauggcuuggc

SEQ ID NO: 2237773 - RNA, 19 nt, Artificial Sequence
  Description of Artificial Sequence: Synthetic oligonucleotide
uugugguaccaucuuuuau

SEQ ID NO: 2237774 - RNA, 19 nt, Artificial Sequence
  Description of Artificial Sequence: Synthetic oligonucleotide
ugaucugcucguccguuaa

SEQ ID NO: 2237775 - RNA, 19 nt, Artificial Sequence
  Description of Artificial Sequence: Synthetic oligonucleotide
cacgaagagcccacgcugc

SEQ ID NO: 2237776 - RNA, 19 nt, Artificial Sequence
  Description of Artificial Sequence: Synthetic oligonucleotide
ucgccggcggaucacgaag

SEQ ID NO: 2237777 - RNA, 19 nt, Artificial Sequence
  Description of Artificial Sequence: Synthetic oligonucleotide
agucccgguaaguuaagaa

SEQ ID NO: 2237778 - RNA, 19 nt, Artificial Sequence
  Description of Artificial Sequence: Synthetic oligonucleotide
uccggauucucucucugua

SEQ ID NO: 2237779 - RNA, 19 nt, Artificial Sequence
  Description of Artificial Sequence: Synthetic oligonucleotide
uuuucgccggcggaucacg

SEQ ID NO: 2237780 - RNA, 19 nt, Artificial Sequence
  Description of Artificial Sequence: Synthetic oligonucleotide
uacaguuugccaucuucua

SEQ ID NO: 2237781 - RNA, 19 nt, Artificial Sequence
  Description of Artificial Sequence: Synthetic oligonucleotide
cgagcuucaaaucuuuggg

SEQ ID NO: 2237782 - RNA, 19 nt, Artificial Sequence
  Description of Artificial Sequence: Synthetic oligonucleotide
uggguuucacuuccauaga

SEQ ID NO: 2237783 - RNA, 19 nt, Artificial Sequence
  Description of Artificial Sequence: Synthetic oligonucleotide
acaggaucauuuggucgcc

SEQ ID NO: 2237784 - RNA, 19 nt, Artificial Sequence
  Description of Artificial Sequence: Synthetic oligonucleotide
uacuguugauccagcuucu

SEQ ID NO: 2237785 - RNA, 19 nt, Artificial Sequence
  Description of Artificial Sequence: Synthetic oligonucleotide
auuuggucgccucuuuaau

SEQ ID NO: 2237786 - RNA, 19 nt, Artificial Sequence
  Description of Artificial Sequence: Synthetic oligonucleotide
agcaggagccgguuuucuc

SEQ ID NO: 2237787 - RNA, 19 nt, Artificial Sequence
  Description of Artificial Sequence: Synthetic oligonucleotide
uuugggcuggagacucugc

SEQ ID NO: 2237788 - RNA, 19 nt, Artificial Sequence
  Description of Artificial Sequence: Synthetic oligonucleotide
gccgaggcaggaaagaacg

SEQ ID NO: 2237789 - RNA, 19 nt, Artificial Sequence
  Description of Artificial Sequence: Synthetic oligonucleotide
agaucucauuggcucccac

SEQ ID NO: 2237790 - RNA, 19 nt, Artificial Sequence
  Description of Artificial Sequence: Synthetic oligonucleotide
gcugucgcuucaaagaugc

SEQ ID NO: 2237791 - RNA, 19 nt, Artificial Sequence
  Description of Artificial Sequence: Synthetic oligonucleotide
ugacugagucuggagggag

SEQ ID NO: 2237792 - RNA, 19 nt, Artificial Sequence
  Description of Artificial Sequence: Synthetic oligonucleotide
ucucauuggcucccacaga

SEQ ID NO: 2237793 - RNA, 19 nt, Artificial Sequence
  Description of Artificial Sequence: Synthetic oligonucleotide
auuccggauucucucucug

SEQ ID NO: 2237794 - RNA, 19 nt, Artificial Sequence
  Description of Artificial Sequence: Synthetic oligonucleotide
agaauuuucgccggcggau

SEQ ID NO: 2237795 - RNA, 19 nt, Artificial Sequence
  Description of Artificial Sequence: Synthetic oligonucleotide
ugauggguuucacuuccau

SEQ ID NO: 2237796 - RNA, 19 nt, Artificial Sequence
  Description of Artificial Sequence: Synthetic oligonucleotide
cucaagcucggcgaucagg

SEQ ID NO: 2237797 - RNA, 19 nt, Artificial Sequence
  Description of Artificial Sequence: Synthetic oligonucleotide
ccgagcuucaaaucuuugg

SEQ ID NO: 2237798 - RNA, 19 nt, Artificial Sequence
  Description of Artificial Sequence: Synthetic oligonucleotide
cucguccguuaacaaauag

SEQ ID NO: 2237799 - RNA, 19 nt, Artificial Sequence
  Description of Artificial Sequence: Synthetic oligonucleotide
aucgugcuucgccaggucu

SEQ ID NO: 2237800 - RNA, 19 nt, Artificial Sequence
  Description of Artificial Sequence: Synthetic oligonucleotide
uccucaucuuaguacuguc

SEQ ID NO: 2237801 - RNA, 19 nt, Artificial Sequence
  Description of Artificial Sequence: Synthetic oligonucleotide
acgguacagagacggaagu

SEQ ID NO: 2237802 - RNA, 19 nt, Artificial Sequence
  Description of Artificial Sequence: Synthetic oligonucleotide
gcagcugucgcuucaaaga

SEQ ID NO: 2237803 - RNA, 19 nt, Artificial Sequence
  Description of Artificial Sequence: Synthetic oligonucleotide
ccguuaacaaauaguuuag

SEQ ID NO: 2237804 - RNA, 19 nt, Artificial Sequence
  Description of Artificial Sequence: Synthetic oligonucleotide
ucuucuauccgagcuucaa

SEQ ID NO: 2237805 - RNA, 19 nt, Artificial Sequence
  Description of Artificial Sequence: Synthetic oligonucleotide
ugcuucgccaggucugucu

SEQ ID NO: 2237806 - RNA, 19 nt, Artificial Sequence
  Description of Artificial Sequence: Synthetic oligonucleotide
guacagagacggaaguggc

SEQ ID NO: 2237807 - RNA, 19 nt, Artificial Sequence
  Description of Artificial Sequence: Synthetic oligonucleotide
ugacgauuccacagugcuc

SEQ ID NO: 2237808 - RNA, 19 nt, Artificial Sequence
  Description of Artificial Sequence: Synthetic oligonucleotide
cuguugauccagcuucuuc

SEQ ID NO: 2237809 - RNA, 19 nt, Artificial Sequence
  Description of Artificial Sequence: Synthetic oligonucleotide
cuauccgagcuucaaaucu

SEQ ID NO: 2237810 - RNA, 19 nt, Artificial Sequence
  Description of Artificial Sequence: Synthetic oligonucleotide
ucugcucguccguuaacaa

SEQ ID NO: 2237811 - RNA, 19 nt, Artificial Sequence
  Description of Artificial Sequence: Synthetic oligonucleotide
cggcggaucacgaagagcc

SEQ ID NO: 2237812 - RNA, 19 nt, Artificial Sequence
  Description of Artificial Sequence: Synthetic oligonucleotide
gcuucaaaucuuugggcug

SEQ ID NO: 2237813 - RNA, 19 nt, Artificial Sequence
  Description of Artificial Sequence: Synthetic oligonucleotide
ucuggugacugagucugga

SEQ ID NO: 2237814 - RNA, 19 nt, Artificial Sequence
  Description of Artificial Sequence: Synthetic oligonucleotide
ccuuaauauaguuccuuuc

SEQ ID NO: 2237815 - RNA, 19 nt, Artificial Sequence
  Description of Artificial Sequence: Synthetic oligonucleotide
cucuagguagauggcuugg

SEQ ID NO: 2237816 - RNA, 19 nt, Artificial Sequence
  Description of Artificial Sequence: Synthetic oligonucleotide
guaccaucuuuuaucauaa

SEQ ID NO: 2237817 - RNA, 19 nt, Artificial Sequence
  Description of Artificial Sequence: Synthetic oligonucleotide
uccggucagcuccaucgug

SEQ ID NO: 2237818 - RNA, 19 nt, Artificial Sequence
  Description of Artificial Sequence: Synthetic oligonucleotide
ucaaaucuuugggcuggag

SEQ ID NO: 2237819 - RNA, 19 nt, Artificial Sequence
  Description of Artificial Sequence: Synthetic oligonucleotide
cauuuggucgccucuuuaa

SEQ ID NO: 2237820 - RNA, 19 nt, Artificial Sequence
  Description of Artificial Sequence: Synthetic oligonucleotide
aucugcucguccguuaaca

SEQ ID NO: 2237821 - RNA, 19 nt, Artificial Sequence
  Description of Artificial Sequence: Synthetic oligonucleotide
agaguucugcauuccggau

SEQ ID NO: 2237822 - RNA, 19 nt, Artificial Sequence
  Description of Artificial Sequence: Synthetic oligonucleotide
auuuucgccggcggaucac

SEQ ID NO: 2237823 - RNA, 19 nt, Artificial Sequence
  Description of Artificial Sequence: Synthetic oligonucleotide
guucaggagaggaugggga

SEQ ID NO: 2237824 - RNA, 19 nt, Artificial Sequence
  Description of Artificial Sequence: Synthetic oligonucleotide
guacugucacuugucuucc

SEQ ID NO: 2237825 - RNA, 19 nt, Artificial Sequence
  Description of Artificial Sequence: Synthetic oligonucleotide
gaacgguacagagacggaa

SEQ ID NO: 2237826 - RNA, 19 nt, Artificial Sequence
  Description of Artificial Sequence: Synthetic oligonucleotide
uuccggauucucucucugu

SEQ ID NO: 2237827 - RNA, 19 nt, Artificial Sequence
  Description of Artificial Sequence: Synthetic oligonucleotide
gcucccacagagcugauga

SEQ ID NO: 2237828 - RNA, 19 nt, Artificial Sequence
  Description of Artificial Sequence: Synthetic oligonucleotide
cuuccauagaaucuccggu

SEQ ID NO: 2237829 - RNA, 19 nt, Artificial Sequence
  Description of Artificial Sequence: Synthetic oligonucleotide
gaauuuucgccggcggauc

SEQ ID NO: 2237830 - RNA, 19 nt, Artificial Sequence
  Description of Artificial Sequence: Synthetic oligonucleotide
uugggugacuuaagcuuau

SEQ ID NO: 2237831 - RNA, 19 nt, Artificial Sequence
  Description of Artificial Sequence: Synthetic oligonucleotide
ucacugccgccuuucuucu

SEQ ID NO: 2237832 - RNA, 19 nt, Artificial Sequence
  Description of Artificial Sequence: Synthetic oligonucleotide
agcuagucccgguaaguua

SEQ ID NO: 2237833 - RNA, 19 nt, Artificial Sequence
  Description of Artificial Sequence: Synthetic oligonucleotide
uucucagauccuccaugau

SEQ ID NO: 2237834 - RNA, 19 nt, Artificial Sequence
  Description of Artificial Sequence: Synthetic oligonucleotide
cugucacuugucuuccuca

SEQ ID NO: 2237835 - RNA, 19 nt, Artificial Sequence
  Description of Artificial Sequence: Synthetic oligonucleotide
gccaugugacgucagugcc

SEQ ID NO: 2237836 - RNA, 19 nt, Artificial Sequence
  Description of Artificial Sequence: Synthetic oligonucleotide
cuugucuggaauggggaca

SEQ ID NO: 2237837 - RNA, 19 nt, Artificial Sequence
  Description of Artificial Sequence: Synthetic oligonucleotide
cuagucccgguaaguuaag

SEQ ID NO: 2237838 - RNA, 19 nt, Artificial Sequence
  Description of Artificial Sequence: Synthetic oligonucleotide
ggaaagaacgguacagaga

SEQ ID NO: 2237839 - RNA, 19 nt, Artificial Sequence
  Description of Artificial Sequence: Synthetic oligonucleotide
guucaguuuccagcuggag

SEQ ID NO: 2237840 - RNA, 19 nt, Artificial Sequence
  Description of Artificial Sequence: Synthetic oligonucleotide
uggcucuugugguaccauc

SEQ ID NO: 2237841 - RNA, 19 nt, Artificial Sequence
  Description of Artificial Sequence: Synthetic oligonucleotide
gaucugcucguccguuaac

SEQ ID NO: 2237842 - RNA, 19 nt, Artificial Sequence
  Description of Artificial Sequence: Synthetic oligonucleotide
agggagccgaggcaggaaa

SEQ ID NO: 2237843 - RNA, 19 nt, Artificial Sequence
  Description of Artificial Sequence: Synthetic oligonucleotide
uuucgccggcggaucacga

SEQ ID NO: 2237844 - RNA, 19 nt, Artificial Sequence
  Description of Artificial Sequence: Synthetic oligonucleotide
cuggaggaagaguucugca

SEQ ID NO: 2237845 - RNA, 19 nt, Artificial Sequence
  Description of Artificial Sequence: Synthetic oligonucleotide
aguggccggccaugugacg

SEQ ID NO: 2237846 - RNA, 19 nt, Artificial Sequence
  Description of Artificial Sequence: Synthetic oligonucleotide
aucuccggucagcuccauc

SEQ ID NO: 2237847 - RNA, 19 nt, Artificial Sequence
  Description of Artificial Sequence: Synthetic oligonucleotide
gucccgguaaguuaagaau

SEQ ID NO: 2237848 - RNA, 19 nt, Artificial Sequence
  Description of Artificial Sequence: Synthetic oligonucleotide
uggucgccucuuuaauuuc

SEQ ID NO: 2237849 - RNA, 19 nt, Artificial Sequence
  Description of Artificial Sequence: Synthetic oligonucleotide
acgaagagcccacgcugca

SEQ ID NO: 2237850 - RNA, 19 nt, Artificial Sequence
  Description of Artificial Sequence: Synthetic oligonucleotide
cuucuauccgagcuucaaa

SEQ ID NO: 2237851 - RNA, 19 nt, Artificial Sequence
  Description of Artificial Sequence: Synthetic oligonucleotide
uucaaaucuuugggcugga

SEQ ID NO: 2237852 - RNA, 19 nt, Artificial Sequence
  Description of Artificial Sequence: Synthetic oligonucleotide
acgauuccacagugcucuc

SEQ ID NO: 2237853 - RNA, 19 nt, Artificial Sequence
  Description of Artificial Sequence: Synthetic oligonucleotide
acguagucuuccucaucgu

SEQ ID NO: 2237854 - RNA, 19 nt, Artificial Sequence
  Description of Artificial Sequence: Synthetic oligonucleotide
cuugugguaccaucuuuua

SEQ ID NO: 2237855 - RNA, 19 nt, Artificial Sequence
  Description of Artificial Sequence: Synthetic oligonucleotide
uuucuccucuugucuggaa

SEQ ID NO: 2237856 - RNA, 19 nt, Artificial Sequence
  Description of Artificial Sequence: Synthetic oligonucleotide
ucgcuucaaagaugccagu

SEQ ID NO: 2237857 - RNA, 19 nt, Artificial Sequence
  Description of Artificial Sequence: Synthetic oligonucleotide
agccgguuuucuccucuug

SEQ ID NO: 2237858 - RNA, 19 nt, Artificial Sequence
  Description of Artificial Sequence: Synthetic oligonucleotide
auauuccugcaagguaccu

SEQ ID NO: 2237859 - RNA, 19 nt, Artificial Sequence
  Description of Artificial Sequence: Synthetic oligonucleotide
ggagacucugcaggugugg

SEQ ID NO: 2237860 - RNA, 19 nt, Artificial Sequence
  Description of Artificial Sequence: Synthetic oligonucleotide
uagucccgguaaguuaaga

SEQ ID NO: 2237861 - RNA, 19 nt, Artificial Sequence
  Description of Artificial Sequence: Synthetic oligonucleotide
cgguaaguuaagaauuuuc

SEQ ID NO: 2237862 - RNA, 19 nt, Artificial Sequence
  Description of Artificial Sequence: Synthetic oligonucleotide
uagcuagucccgguaaguu

SEQ ID NO: 2237863 - RNA, 19 nt, Artificial Sequence
  Description of Artificial Sequence: Synthetic oligonucleotide
augaucugcucguccguua

SEQ ID NO: 2237864 - RNA, 19 nt, Artificial Sequence
  Description of Artificial Sequence: Synthetic oligonucleotide
caucuuaguacugucacuu

SEQ ID NO: 2237865 - RNA, 19 nt, Artificial Sequence
  Description of Artificial Sequence: Synthetic oligonucleotide
uccuggucaugauggguuu

SEQ ID NO: 2237866 - RNA, 19 nt, Artificial Sequence
  Description of Artificial Sequence: Synthetic oligonucleotide
gugacgucagugccuugac

SEQ ID NO: 2237867 - RNA, 19 nt, Artificial Sequence
  Description of Artificial Sequence: Synthetic oligonucleotide
ugguaccaucuuuuaucau

SEQ ID NO: 2237868 - RNA, 19 nt, Artificial Sequence
  Description of Artificial Sequence: Synthetic oligonucleotide
acgucagugccuugacgau

SEQ ID NO: 2237869 - RNA, 19 nt, Artificial Sequence
  Description of Artificial Sequence: Synthetic oligonucleotide
ugagcaggagccgguuuuc

SEQ ID NO: 2237870 - RNA, 19 nt, Artificial Sequence
  Description of Artificial Sequence: Synthetic oligonucleotide
auuggcucccacagagcug

SEQ ID NO: 2237871 - RNA, 19 nt, Artificial Sequence
  Description of Artificial Sequence: Synthetic oligonucleotide
gugccuugacgauuccaca

SEQ ID NO: 2237872 - RNA, 19 nt, Artificial Sequence
  Description of Artificial Sequence: Synthetic oligonucleotide
uccuuuccacuuguucagu

SEQ ID NO: 2237873 - RNA, 19 nt, Artificial Sequence
  Description of Artificial Sequence: Synthetic oligonucleotide
cccagaucucauuggcucc

SEQ ID NO: 2237874 - RNA, 19 nt, Artificial Sequence
  Description of Artificial Sequence: Synthetic oligonucleotide
ggguuucacuuccauagaa

SEQ ID NO: 2237875 - RNA, 19 nt, Artificial Sequence
  Description of Artificial Sequence: Synthetic oligonucleotide
ggccaaguagcuagucccg

SEQ ID NO: 2237876 - RNA, 19 nt, Artificial Sequence
  Description of Artificial Sequence: Synthetic oligonucleotide
agcugucgcuucaaagaug

SEQ ID NO: 2237877 - RNA, 19 nt, Artificial Sequence
  Description of Artificial Sequence: Synthetic oligonucleotide
caaguagcuagucccggua

SEQ ID NO: 2237878 - RNA, 19 nt, Artificial Sequence
  Description of Artificial Sequence: Synthetic oligonucleotide
aggagccgguuuucuccuc

SEQ ID NO: 2237879 - RNA, 19 nt, Artificial Sequence
  Description of Artificial Sequence: Synthetic oligonucleotide
ccuugacgauuccacagug

SEQ ID NO: 2237880 - RNA, 19 nt, Artificial Sequence
  Description of Artificial Sequence: Synthetic oligonucleotide
gaaucuccggucagcucca

SEQ ID NO: 2237881 - RNA, 19 nt, Artificial Sequence
  Description of Artificial Sequence: Synthetic oligonucleotide
uccucacccagaucucauu

SEQ ID NO: 2237882 - RNA, 19 nt, Artificial Sequence
  Description of Artificial Sequence: Synthetic oligonucleotide
uucgccggcggaucacgaa

SEQ ID NO: 2237883 - RNA, 19 nt, Artificial Sequence
  Description of Artificial Sequence: Synthetic oligonucleotide
gaggauggggaagcugguc

SEQ ID NO: 2237884 - RNA, 19 nt, Artificial Sequence
  Description of Artificial Sequence: Synthetic oligonucleotide
ugucuggaauggggacagg

SEQ ID NO: 2237885 - RNA, 19 nt, Artificial Sequence
  Description of Artificial Sequence: Synthetic oligonucleotide
gcuagucccgguaaguuaa

SEQ ID NO: 2237886 - RNA, 19 nt, Artificial Sequence
  Description of Artificial Sequence: Synthetic oligonucleotide
cugucgcuucaaagaugcc

SEQ ID NO: 2237887 - RNA, 19 nt, Artificial Sequence
  Description of Artificial Sequence: Synthetic oligonucleotide
cuggucaugauggguuuca

SEQ ID NO: 2237888 - RNA, 19 nt, Artificial Sequence
  Description of Artificial Sequence: Synthetic oligonucleotide
gccucuuuaauuuccuggu

SEQ ID NO: 2237889 - RNA, 19 nt, Artificial Sequence
  Description of Artificial Sequence: Synthetic oligonucleotide
gagucuggagggagccgag

SEQ ID NO: 2237890 - RNA, 19 nt, Artificial Sequence
  Description of Artificial Sequence: Synthetic oligonucleotide
ggcgaucagguucuccuuc

SEQ ID NO: 2237891 - RNA, 19 nt, Artificial Sequence
  Description of Artificial Sequence: Synthetic oligonucleotide
gccaaguagcuagucccgg

SEQ ID NO: 2237892 - RNA, 19 nt, Artificial Sequence
  Description of Artificial Sequence: Synthetic oligonucleotide
ggauggggaagcuggucuc

SEQ ID NO: 2237893 - RNA, 19 nt, Artificial Sequence
  Description of Artificial Sequence: Synthetic oligonucleotide
agaugccaguuuguccuga

SEQ ID NO: 2237894 - RNA, 19 nt, Artificial Sequence
  Description of Artificial Sequence: Synthetic oligonucleotide
agaacgguacagagacgga

SEQ ID NO: 2237895 - RNA, 19 nt, Artificial Sequence
  Description of Artificial Sequence: Synthetic oligonucleotide
gguagauccucaucuuagu

SEQ ID NO: 2237896 - RNA, 19 nt, Artificial Sequence
  Description of Artificial Sequence: Synthetic oligonucleotide
gacucuagguagauggcuu

SEQ ID NO: 2237897 - RNA, 19 nt, Artificial Sequence
  Description of Artificial Sequence: Synthetic oligonucleotide
ggaucacgaagagcccacg

SEQ ID NO: 2237898 - RNA, 19 nt, Artificial Sequence
  Description of Artificial Sequence: Synthetic oligonucleotide
cuccaugucccaggccaag

SEQ ID NO: 2237899 - RNA, 19 nt, Artificial Sequence
  Description of Artificial Sequence: Synthetic oligonucleotide
ggucucuugggugacuuaa

SEQ ID NO: 2237900 - RNA, 19 nt, Artificial Sequence
  Description of Artificial Sequence: Synthetic oligonucleotide
ccucaucuuaguacuguca

SEQ ID NO: 2237901 - RNA, 19 nt, Artificial Sequence
  Description of Artificial Sequence: Synthetic oligonucleotide
ccagaucucauuggcuccc

SEQ ID NO: 2237902 - RNA, 19 nt, Artificial Sequence
  Description of Artificial Sequence: Synthetic oligonucleotide
ccggauucucucucuguac

SEQ ID NO: 2237903 - RNA, 19 nt, Artificial Sequence
  Description of Artificial Sequence: Synthetic oligonucleotide
cguagucuuccucaucgug

SEQ ID NO: 2237904 - RNA, 19 nt, Artificial Sequence
  Description of Artificial Sequence: Synthetic oligonucleotide
agagcccacgcugcagcug

SEQ ID NO: 2237905 - RNA, 19 nt, Artificial Sequence
  Description of Artificial Sequence: Synthetic oligonucleotide
ccgguuuucuccucuuguc

SEQ ID NO: 2237906 - RNA, 19 nt, Artificial Sequence
  Description of Artificial Sequence: Synthetic oligonucleotide
cccagguagauccucaucu

SEQ ID NO: 2237907 - RNA, 19 nt, Artificial Sequence
  Description of Artificial Sequence: Synthetic oligonucleotide
guagcuagucccgguaagu

SEQ ID NO: 2237908 - RNA, 19 nt, Artificial Sequence
  Description of Artificial Sequence: Synthetic oligonucleotide
cucggcgaucagguucucc

SEQ ID NO: 2237909 - RNA, 19 nt, Artificial Sequence
  Description of Artificial Sequence: Synthetic oligonucleotide
gaucauuuggucgccucuu

SEQ ID NO: 2237910 - RNA, 19 nt, Artificial Sequence
  Description of Artificial Sequence: Synthetic oligonucleotide
uggucucuugggugacuua

SEQ ID NO: 2237911 - RNA, 19 nt, Artificial Sequence
  Description of Artificial Sequence: Synthetic oligonucleotide
gcauuccggauucucucuc

SEQ ID NO: 2237912 - RNA, 19 nt, Artificial Sequence
  Description of Artificial Sequence: Synthetic oligonucleotide
ggaucauuuggucgccucu

SEQ ID NO: 2237913 - RNA, 19 nt, Artificial Sequence
  Description of Artificial Sequence: Synthetic oligonucleotide
ccgaggcaggaaagaacgg

SEQ ID NO: 2237914 - RNA, 19 nt, Artificial Sequence
  Description of Artificial Sequence: Synthetic oligonucleotide
cuguacuguugauccagcu

SEQ ID NO: 2237915 - RNA, 19 nt, Artificial Sequence
  Description of Artificial Sequence: Synthetic oligonucleotide
gcgaucagguucuccuuca

SEQ ID NO: 2237916 - RNA, 19 nt, Artificial Sequence
  Description of Artificial Sequence: Synthetic oligonucleotide
gaugccaguuuguccugau

SEQ ID NO: 2237917 - RNA, 19 nt, Artificial Sequence
  Description of Artificial Sequence: Synthetic oligonucleotide
ccucaucgugcuucgccag

SEQ ID NO: 2237918 - RNA, 19 nt, Artificial Sequence
  Description of Artificial Sequence: Synthetic oligonucleotide
uggccggccaugugacguc

SEQ ID NO: 2237919 - RNA, 19 nt, Artificial Sequence
  Description of Artificial Sequence: Synthetic oligonucleotide
gcuucgccaggucugucuc

SEQ ID NO: 2237920 - RNA, 19 nt, Artificial Sequence
  Description of Artificial Sequence: Synthetic oligonucleotide
auccgagcuucaaaucuuu

SEQ ID NO: 2237921 - RNA, 19 nt, Artificial Sequence
  Description of Artificial Sequence: Synthetic oligonucleotide
ggaaguggccggccaugug

SEQ ID NO: 2237922 - RNA, 19 nt, Artificial Sequence
  Description of Artificial Sequence: Synthetic oligonucleotide
cauuccggauucucucucu

SEQ ID NO: 2237923 - RNA, 19 nt, Artificial Sequence
  Description of Artificial Sequence: Synthetic oligonucleotide
cuuccucaucgugcuucgc

SEQ ID NO: 2237924 - RNA, 19 nt, Artificial Sequence
  Description of Artificial Sequence: Synthetic oligonucleotide
gcuucaaagaugccaguuu

SEQ ID NO: 2237925 - RNA, 19 nt, Artificial Sequence
  Description of Artificial Sequence: Synthetic oligonucleotide
cagcugucgcuucaaagau

SEQ ID NO: 2237926 - RNA, 19 nt, Artificial Sequence
  Description of Artificial Sequence: Synthetic oligonucleotide
cguccguuaacaaauaguu

SEQ ID NO: 2237927 - RNA, 19 nt, Artificial Sequence
  Description of Artificial Sequence: Synthetic oligonucleotide
cagguguggcaggcaagug

SEQ ID NO: 2237928 - RNA, 19 nt, Artificial Sequence
  Description of Artificial Sequence: Synthetic oligonucleotide
cuccaucgugagcuucuca

SEQ ID NO: 2237929 - RNA, 19 nt, Artificial Sequence
  Description of Artificial Sequence: Synthetic oligonucleotide
gguuucacuuccauagaau

SEQ ID NO: 2237930 - RNA, 19 nt, Artificial Sequence
  Description of Artificial Sequence: Synthetic oligonucleotide
cuggcccagguagauccuc

SEQ ID NO: 2237931 - RNA, 19 nt, Artificial Sequence
  Description of Artificial Sequence: Synthetic oligonucleotide
ugggugacuuaagcuuauu

SEQ ID NO: 2237932 - RNA, 19 nt, Artificial Sequence
  Description of Artificial Sequence: Synthetic oligonucleotide
ccggucagcuccaucguga

SEQ ID NO: 2237933 - RNA, 19 nt, Artificial Sequence
  Description of Artificial Sequence: Synthetic oligonucleotide
gccggcggaucacgaagag

SEQ ID NO: 2237934 - RNA, 19 nt, Artificial Sequence
  Description of Artificial Sequence: Synthetic oligonucleotide
aaucuccggucagcuccau

SEQ ID NO: 2237935 - RNA, 19 nt, Artificial Sequence
  Description of Artificial Sequence: Synthetic oligonucleotide
gcggaucacgaagagccca

SEQ ID NO: 2237936 - RNA, 19 nt, Artificial Sequence
  Description of Artificial Sequence: Synthetic oligonucleotide
gggugacuuaagcuuauuu

SEQ ID NO: 2237937 - RNA, 19 nt, Artificial Sequence
  Description of Artificial Sequence: Synthetic oligonucleotide
guggccggccaugugacgu

SEQ ID NO: 2237938 - RNA, 19 nt, Artificial Sequence
  Description of Artificial Sequence: Synthetic oligonucleotide
ggcucuugugguaccaucu

SEQ ID NO: 2237939 - RNA, 19 nt, Artificial Sequence
  Description of Artificial Sequence: Synthetic oligonucleotide
guccguuaacaaauaguuu

SEQ ID NO: 2237940 - RNA, 19 nt, Artificial Sequence
  Description of Artificial Sequence: Synthetic oligonucleotide
cggaucacgaagagcccac

SEQ ID NO: 2237941 - RNA, 19 nt, Artificial Sequence
  Description of Artificial Sequence: Synthetic oligonucleotide
gccuugacgauuccacagu

SEQ ID NO: 2237942 - RNA, 19 nt, Artificial Sequence
  Description of Artificial Sequence: Synthetic oligonucleotide
caggagccgguuuucuccu

SEQ ID NO: 2237943 - RNA, 19 nt, Artificial Sequence
  Description of Artificial Sequence: Synthetic oligonucleotide
ggcggaucacgaagagccc

SEQ ID NO: 2237944 - RNA, 19 nt, Artificial Sequence
  Description of Artificial Sequence: Synthetic oligonucleotide
gccgguuuucuccucuugu

SEQ ID NO: 2237945 - RNA, 19 nt, Artificial Sequence
  Description of Artificial Sequence: Synthetic oligonucleotide
cacugccgccuuucuucuc

SEQ ID NO: 2237946 - RNA, 19 nt, Artificial Sequence
  Description of Artificial Sequence: Synthetic oligonucleotide
gguguggcaggcaaguguu

SEQ ID NO: 2237947 - RNA, 19 nt, Artificial Sequence
  Description of Artificial Sequence: Synthetic oligonucleotide
ggagccgguuuucuccucu

SEQ ID NO: 2237948 - RNA, 19 nt, Artificial Sequence
  Description of Artificial Sequence: Synthetic oligonucleotide
cgaucagguucuccuucag

SEQ ID NO: 2237949 - RNA, 19 nt, Artificial Sequence
  Description of Artificial Sequence: Synthetic oligonucleotide
gccgccuuucuucuccuua

SEQ ID NO: 2237950 - RNA, 19 nt, Artificial Sequence
  Description of Artificial Sequence: Synthetic oligonucleotide
gcagguguggcaggcaagu

SEQ ID NO: 2237951 - RNA, 19 nt, Artificial Sequence
  Description of Artificial Sequence: Synthetic oligonucleotide
ccggcggaucacgaagagc

SEQ ID NO: 2237952 - RNA, 19 nt, Artificial Sequence
  Description of Artificial Sequence: Synthetic oligonucleotide
ccacagugcucuccauguc

SEQ ID NO: 2237953 - RNA, 19 nt, Artificial Sequence
  Description of Artificial Sequence: Synthetic oligonucleotide
gaauggggacaggaucauu

SEQ ID NO: 2237954 - RNA, 19 nt, Artificial Sequence
  Description of Artificial Sequence: Synthetic oligonucleotide
ccaccuucuugucuucaaa

SEQ ID NO: 2237955 - RNA, 19 nt, Artificial Sequence
  Description of Artificial Sequence: Synthetic oligonucleotide
ccaugugacgucagugccu

SEQ ID NO: 2237956 - RNA, 19 nt, Artificial Sequence
  Description of Artificial Sequence: Synthetic oligonucleotide
ccgccuuucuucuccuuaa

SEQ ID NO: 2237957 - RNA, 19 nt, Artificial Sequence
  Description of Artificial Sequence: Synthetic oligonucleotide
gucccaggccaaguagcua

SEQ ID NO: 2237958 - RNA, 19 nt, Artificial Sequence
  Description of Artificial Sequence: Synthetic oligonucleotide
ccaaguagcuagucccggu

SEQ ID NO: 2237959 - RNA, 19 nt, Artificial Sequence
  Description of Artificial Sequence: Synthetic oligonucleotide
gagccgguuuucuccucuu

SEQ ID NO: 2237960 - RNA, 19 nt, Artificial Sequence
  Description of Artificial Sequence: Synthetic oligonucleotide
cuccggucagcuccaucgu

SEQ ID NO: 2237961 - RNA, 19 nt, Artificial Sequence
  Description of Artificial Sequence: Synthetic oligonucleotide
cggccaugugacgucagug

SEQ ID NO: 2237962 - RNA, 19 nt, Artificial Sequence
  Description of Artificial Sequence: Synthetic oligonucleotide
ccaggccaaguagcuaguc

SEQ ID NO: 2237963 - RNA, 19 nt, Artificial Sequence
  Description of Artificial Sequence: Synthetic oligonucleotide
cccgguaaguuaagaauuu

SEQ ID NO: 2237964 - RNA, 19 nt, Artificial Sequence
  Description of Artificial Sequence: Synthetic oligonucleotide
gcucuugugguaccaucuu

SEQ ID NO: 2237965 - RNA, 19 nt, Artificial Sequence
  Description of Artificial Sequence: Synthetic oligonucleotide
cuggucucuugggugacuu

SEQ ID NO: 2237966 - RNA, 19 nt, Artificial Sequence
  Description of Artificial Sequence: Synthetic oligonucleotide
gcuccaucgugagcuucuc

SEQ ID NO: 2237967 - RNA, 19 nt, Artificial Sequence
  Description of Artificial Sequence: Synthetic oligonucleotide
caggaucauuuggucgccu

SEQ ID NO: 2237968 - RNA, 19 nt, Artificial Sequence
  Description of Artificial Sequence: Synthetic oligonucleotide
gcucguccguuaacaaaua

SEQ ID NO: 2237969 - RNA, 19 nt, Artificial Sequence
  Description of Artificial Sequence: Synthetic oligonucleotide
ccagguagauccucaucuu

SEQ ID NO: 2237970 - RNA, 19 nt, Artificial Sequence
  Description of Artificial Sequence: Synthetic oligonucleotide
guucugcauuccggauucu

SEQ ID NO: 2237971 - RNA, 19 nt, Artificial Sequence
  Description of Artificial Sequence: Synthetic oligonucleotide
ccaugaucugcucguccgu

SEQ ID NO: 2237972 - RNA, 19 nt, Artificial Sequence
  Description of Artificial Sequence: Synthetic oligonucleotide
ggccggccaugugacguca

SEQ ID NO: 2237973 - RNA, 19 nt, Artificial Sequence
  Description of Artificial Sequence: Synthetic oligonucleotide
cgccggcggaucacgaaga

SEQ ID NO: 2237974 - RNA, 19 nt, Artificial Sequence
  Description of Artificial Sequence: Synthetic oligonucleotide
ccgguaaguuaagaauuuu

SEQ ID NO: 2237975 - RNA, 19 nt, Artificial Sequence
  Description of Artificial Sequence: Synthetic oligonucleotide
ccggccaugugacgucagu

SEQ ID NO: 2237976 - RNA, 19 nt, Artificial Sequence
  Description of Artificial Sequence: Synthetic oligonucleotide
cgugcuucgccaggucugu

SEQ ID NO: 2237977 - RNA, 19 nt, Artificial Sequence
  Description of Artificial Sequence: Synthetic oligonucleotide
gcucggcgaucagguucuc

SEQ ID NO: 2237978 - RNA, 19 nt, Artificial Sequence
  Description of Artificial Sequence: Synthetic oligonucleotide
cgucagugccuugacgauu

SEQ ID NO: 2237979 - RNA, 19 nt, Artificial Sequence
  Description of Artificial Sequence: Synthetic oligonucleotide
cggcgaucagguucuccuu

SEQ ID NO: 2237980 - RNA, 19 nt, Artificial Sequence
  Description of Artificial Sequence: Synthetic oligonucleotide
uauaauggcaauaaacagg

SEQ ID NO: 2237981 - RNA, 19 nt, Artificial Sequence
  Description of Artificial Sequence: Synthetic oligonucleotide
ucuauaauggcaauaaaca

SEQ ID NO: 2237982 - RNA, 19 nt, Artificial Sequence
  Description of Artificial Sequence: Synthetic oligonucleotide
uuacuuucaaguaacacag

SEQ ID NO: 2237983 - RNA, 19 nt, Artificial Sequence
  Description of Artificial Sequence: Synthetic oligonucleotide
uuuaauuugucucucggag

SEQ ID NO: 2237984 - RNA, 19 nt, Artificial Sequence
  Description of Artificial Sequence: Synthetic oligonucleotide
auuucaauccuucuucggc

SEQ ID NO: 2237985 - RNA, 19 nt, Artificial Sequence
  Description of Artificial Sequence: Synthetic oligonucleotide
acuuugagcgcccacaggc

SEQ ID NO: 2237986 - RNA, 19 nt, Artificial Sequence
  Description of Artificial Sequence: Synthetic oligonucleotide
aauaaguuaaaacaaucua

SEQ ID NO: 2237987 - RNA, 19 nt, Artificial Sequence
  Description of Artificial Sequence: Synthetic oligonucleotide
agcagaucuacuuauacag

SEQ ID NO: 2237988 - RNA, 19 nt, Artificial Sequence
  Description of Artificial Sequence: Synthetic oligonucleotide
uaauuugucucucggagag

SEQ ID NO: 2237989 - RNA, 19 nt, Artificial Sequence
  Description of Artificial Sequence: Synthetic oligonucleotide
uuaguuacuuucaaguaac

SEQ ID NO: 2237990 - RNA, 19 nt, Artificial Sequence
  Description of Artificial Sequence: Synthetic oligonucleotide
auuuuaauuugucucucgg

SEQ ID NO: 2237991 - RNA, 19 nt, Artificial Sequence
  Description of Artificial Sequence: Synthetic oligonucleotide
acuaaugugcagcuugcgc

SEQ ID NO: 2237992 - RNA, 19 nt, Artificial Sequence
  Description of Artificial Sequence: Synthetic oligonucleotide
cuauaauggcaauaaacag

SEQ ID NO: 2237993 - RNA, 19 nt, Artificial Sequence
  Description of Artificial Sequence: Synthetic oligonucleotide
cucuauaauggcaauaaac

SEQ ID NO: 2237994 - RNA, 19 nt, Artificial Sequence
  Description of Artificial Sequence: Synthetic oligonucleotide
aaagagaugaacagaagca

SEQ ID NO: 2237995 - RNA, 19 nt, Artificial Sequence
  Description of Artificial Sequence: Synthetic oligonucleotide
cugcucaguacuuugagcg

SEQ ID NO: 2237996 - RNA, 19 nt, Artificial Sequence
  Description of Artificial Sequence: Synthetic oligonucleotide
guuacuuucaaguaacaca

SEQ ID NO: 2237997 - RNA, 19 nt, Artificial Sequence
  Description of Artificial Sequence: Synthetic oligonucleotide
aauuagggcaaggagaaca

SEQ ID NO: 2237998 - RNA, 19 nt, Artificial Sequence
  Description of Artificial Sequence: Synthetic oligonucleotide
uagggcaaggagaacaggg

SEQ ID NO: 2237999 - RNA, 19 nt, Artificial Sequence
  Description of Artificial Sequence: Synthetic oligonucleotide
uauguugucgugacuaaug

SEQ ID NO: 2238000 - RNA, 19 nt, Artificial Sequence
  Description of Artificial Sequence: Synthetic oligonucleotide
agaggcaaagagcaugcgc

SEQ ID NO: 2238001 - RNA, 19 nt, Artificial Sequence
  Description of Artificial Sequence: Synthetic oligonucleotide
aggacaaagagaugaacag

SEQ ID NO: 2238002 - RNA, 19 nt, Artificial Sequence
  Description of Artificial Sequence: Synthetic oligonucleotide
uguuuuaguuacuuucaag

SEQ ID NO: 2238003 - RNA, 19 nt, Artificial Sequence
  Description of Artificial Sequence: Synthetic oligonucleotide
aagagaugaacagaagcag

SEQ ID NO: 2238004 - RNA, 19 nt, Artificial Sequence
  Description of Artificial Sequence: Synthetic oligonucleotide
ucuucggcgggucagguag

SEQ ID NO: 2238005 - RNA, 19 nt, Artificial Sequence
  Description of Artificial Sequence: Synthetic oligonucleotide
auuugucucucggagaggc

SEQ ID NO: 2238006 - RNA, 19 nt, Artificial Sequence
  Description of Artificial Sequence: Synthetic oligonucleotide
acuuucaaguaacacagcu

SEQ ID NO: 2238007 - RNA, 19 nt, Artificial Sequence
  Description of Artificial Sequence: Synthetic oligonucleotide
aaagccauucaggacaaag

SEQ ID NO: 2238008 - RNA, 19 nt, Artificial Sequence
  Description of Artificial Sequence: Synthetic oligonucleotide
cagaucuacuuauacaggc

SEQ ID NO: 2238009 - RNA, 19 nt, Artificial Sequence
  Description of Artificial Sequence: Synthetic oligonucleotide
guugucgugacuaaugugc

SEQ ID NO: 2238010 - RNA, 19 nt, Artificial Sequence
  Description of Artificial Sequence: Synthetic oligonucleotide
acuuauacaggcucuauaa

SEQ ID NO: 2238011 - RNA, 19 nt, Artificial Sequence
  Description of Artificial Sequence: Synthetic oligonucleotide
uuuuaauuugucucucgga

SEQ ID NO: 2238012 - RNA, 19 nt, Artificial Sequence
  Description of Artificial Sequence: Synthetic oligonucleotide
uuaguacugacacuacgga

SEQ ID NO: 2238013 - RNA, 19 nt, Artificial Sequence
  Description of Artificial Sequence: Synthetic oligonucleotide
auucaggacaaagagauga

SEQ ID NO: 2238014 - RNA, 19 nt, Artificial Sequence
  Description of Artificial Sequence: Synthetic oligonucleotide
agccauucaggacaaagag

SEQ ID NO: 2238015 - RNA, 19 nt, Artificial Sequence
  Description of Artificial Sequence: Synthetic oligonucleotide
ucauauaaauaaguuaaaa

SEQ ID NO: 2238016 - RNA, 19 nt, Artificial Sequence
  Description of Artificial Sequence: Synthetic oligonucleotide
aacacagcuugcuucauau

SEQ ID NO: 2238017 - RNA, 19 nt, Artificial Sequence
  Description of Artificial Sequence: Synthetic oligonucleotide
auaaguuaaaacaaucuau

SEQ ID NO: 2238018 - RNA, 19 nt, Artificial Sequence
  Description of Artificial Sequence: Synthetic oligonucleotide
gucaccuuaguacugacac

SEQ ID NO: 2238019 - RNA, 19 nt, Artificial Sequence
  Description of Artificial Sequence: Synthetic oligonucleotide
aacacugcucaguacuuug

SEQ ID NO: 2238020 - RNA, 19 nt, Artificial Sequence
  Description of Artificial Sequence: Synthetic oligonucleotide
aagcagaucuacuuauaca

SEQ ID NO: 2238021 - RNA, 19 nt, Artificial Sequence
  Description of Artificial Sequence: Synthetic oligonucleotide
uucaagacaaagccauuca

SEQ ID NO: 2238022 - RNA, 19 nt, Artificial Sequence
  Description of Artificial Sequence: Synthetic oligonucleotide
uuaauuugucucucggaga

SEQ ID NO: 2238023 - RNA, 19 nt, Artificial Sequence
  Description of Artificial Sequence: Synthetic oligonucleotide
uuuuaguuacuuucaagua

SEQ ID NO: 2238024 - RNA, 19 nt, Artificial Sequence
  Description of Artificial Sequence: Synthetic oligonucleotide
gaagcagaucuacuuauac

SEQ ID NO: 2238025 - RNA, 19 nt, Artificial Sequence
  Description of Artificial Sequence: Synthetic oligonucleotide
aaaguggccggaaaacccg

SEQ ID NO: 2238026 - RNA, 19 nt, Artificial Sequence
  Description of Artificial Sequence: Synthetic oligonucleotide
uugcuucauauaaauaagu

SEQ ID NO: 2238027 - RNA, 19 nt, Artificial Sequence
  Description of Artificial Sequence: Synthetic oligonucleotide
acugacacuacggagagcu

SEQ ID NO: 2238028 - RNA, 19 nt, Artificial Sequence
  Description of Artificial Sequence: Synthetic oligonucleotide
gugacuaaugugcagcuug

SEQ ID NO: 2238029 - RNA, 19 nt, Artificial Sequence
  Description of Artificial Sequence: Synthetic oligonucleotide
caaaguggccggaaaaccc

SEQ ID NO: 2238030 - RNA, 19 nt, Artificial Sequence
  Description of Artificial Sequence: Synthetic oligonucleotide
agacaaagccauucaggac

SEQ ID NO: 2238031 - RNA, 19 nt, Artificial Sequence
  Description of Artificial Sequence: Synthetic oligonucleotide
uucaauccuucuucggcgg

SEQ ID NO: 2238032 - RNA, 19 nt, Artificial Sequence
  Description of Artificial Sequence: Synthetic oligonucleotide
agaucuggggcugagcugg

SEQ ID NO: 2238033 - RNA, 19 nt, Artificial Sequence
  Description of Artificial Sequence: Synthetic oligonucleotide
gaucuacuuauacaggcuc

SEQ ID NO: 2238034 - RNA, 19 nt, Artificial Sequence
  Description of Artificial Sequence: Synthetic oligonucleotide
ugcuucauauaaauaaguu

SEQ ID NO: 2238035 - RNA, 19 nt, Artificial Sequence
  Description of Artificial Sequence: Synthetic oligonucleotide
aaaagaugaauuagggcaa

SEQ ID NO: 2238036 - RNA, 19 nt, Artificial Sequence
  Description of Artificial Sequence: Synthetic oligonucleotide
uaguacugacacuacggag

SEQ ID NO: 2238037 - RNA, 19 nt, Artificial Sequence
  Description of Artificial Sequence: Synthetic oligonucleotide
augaauuagggcaaggaga

SEQ ID NO: 2238038 - RNA, 19 nt, Artificial Sequence
  Description of Artificial Sequence: Synthetic oligonucleotide
gagagcuccgcuaacacug

SEQ ID NO: 2238039 - RNA, 19 nt, Artificial Sequence
  Description of Artificial Sequence: Synthetic oligonucleotide
ucaaguaacacagcuugcu

SEQ ID NO: 2238040 - RNA, 19 nt, Artificial Sequence
  Description of Artificial Sequence: Synthetic oligonucleotide
aaagaugaauuagggcaag

SEQ ID NO: 2238041 - RNA, 19 nt, Artificial Sequence
  Description of Artificial Sequence: Synthetic oligonucleotide
aguacugacacuacggaga

SEQ ID NO: 2238042 - RNA, 19 nt, Artificial Sequence
  Description of Artificial Sequence: Synthetic oligonucleotide
aagucaccuuaguacugac

SEQ ID NO: 2238043 - RNA, 19 nt, Artificial Sequence
  Description of Artificial Sequence: Synthetic oligonucleotide
aggagaacagggcuucuuc

SEQ ID NO: 2238044 - RNA, 19 nt, Artificial Sequence
  Description of Artificial Sequence: Synthetic oligonucleotide
agauuuuaauuugucucuc

SEQ ID NO: 2238045 - RNA, 19 nt, Artificial Sequence
  Description of Artificial Sequence: Synthetic oligonucleotide
ugcgcuauuucaauccuuc

SEQ ID NO: 2238046 - RNA, 19 nt, Artificial Sequence
  Description of Artificial Sequence: Synthetic oligonucleotide
ugacuaaugugcagcuugc

SEQ ID NO: 2238047 - RNA, 19 nt, Artificial Sequence
  Description of Artificial Sequence: Synthetic oligonucleotide
uucaaguaacacagcuugc

SEQ ID NO: 2238048 - RNA, 19 nt, Artificial Sequence
  Description of Artificial Sequence: Synthetic oligonucleotide
aaagucaccuuaguacuga

SEQ ID NO: 2238049 - RNA, 19 nt, Artificial Sequence
  Description of Artificial Sequence: Synthetic oligonucleotide
uacaggcucuauaauggca

SEQ ID NO: 2238050 - RNA, 19 nt, Artificial Sequence
  Description of Artificial Sequence: Synthetic oligonucleotide
aagaugaauuagggcaagg

SEQ ID NO: 2238051 - RNA, 19 nt, Artificial Sequence
  Description of Artificial Sequence: Synthetic oligonucleotide
uccgcugcagccauacuca

SEQ ID NO: 2238052 - RNA, 19 nt, Artificial Sequence
  Description of Artificial Sequence: Synthetic oligonucleotide
ugacacuacggagagcucc

SEQ ID NO: 2238053 - RNA, 19 nt, Artificial Sequence
  Description of Artificial Sequence: Synthetic oligonucleotide
cucucggagaggcaaagag

SEQ ID NO: 2238054 - RNA, 19 nt, Artificial Sequence
  Description of Artificial Sequence: Synthetic oligonucleotide
agcaugcgcuauuucaauc

SEQ ID NO: 2238055 - RNA, 19 nt, Artificial Sequence
  Description of Artificial Sequence: Synthetic oligonucleotide
uuguuuuaguuacuuucaa

SEQ ID NO: 2238056 - RNA, 19 nt, Artificial Sequence
  Description of Artificial Sequence: Synthetic oligonucleotide
uguugucgugacuaaugug

SEQ ID NO: 2238057 - RNA, 19 nt, Artificial Sequence
  Description of Artificial Sequence: Synthetic oligonucleotide
ucaauccuucuucggcggg

SEQ ID NO: 2238058 - RNA, 19 nt, Artificial Sequence
  Description of Artificial Sequence: Synthetic oligonucleotide
uugucgugacuaaugugca

SEQ ID NO: 2238059 - RNA, 19 nt, Artificial Sequence
  Description of Artificial Sequence: Synthetic oligonucleotide
aggcucaugauuaaaagau

SEQ ID NO: 2238060 - RNA, 19 nt, Artificial Sequence
  Description of Artificial Sequence: Synthetic oligonucleotide
gagaacagggcuucuucac

SEQ ID NO: 2238061 - RNA, 19 nt, Artificial Sequence
  Description of Artificial Sequence: Synthetic oligonucleotide
ucgccagagccaaaguggc

SEQ ID NO: 2238062 - RNA, 19 nt, Artificial Sequence
  Description of Artificial Sequence: Synthetic oligonucleotide
agaugaacagaagcagauc

SEQ ID NO: 2238063 - RNA, 19 nt, Artificial Sequence
  Description of Artificial Sequence: Synthetic oligonucleotide
gagugcguggacguggccg

SEQ ID NO: 2238064 - RNA, 19 nt, Artificial Sequence
  Description of Artificial Sequence: Synthetic oligonucleotide
gacacuacggagagcuccg

SEQ ID NO: 2238065 - RNA, 19 nt, Artificial Sequence
  Description of Artificial Sequence: Synthetic oligonucleotide
aagccauucaggacaaaga

SEQ ID NO: 2238066 - RNA, 19 nt, Artificial Sequence
  Description of Artificial Sequence: Synthetic oligonucleotide
agaugaauuagggcaagga

SEQ ID NO: 2238067 - RNA, 19 nt, Artificial Sequence
  Description of Artificial Sequence: Synthetic oligonucleotide
agaacagggcuucuucaca

SEQ ID NO: 2238068 - RNA, 19 nt, Artificial Sequence
  Description of Artificial Sequence: Synthetic oligonucleotide
aacaggcucaugauuaaaa

SEQ ID NO: 2238069 - RNA, 19 nt, Artificial Sequence
  Description of Artificial Sequence: Synthetic oligonucleotide
gucgugacuaaugugcagc

SEQ ID NO: 2238070 - RNA, 19 nt, Artificial Sequence
  Description of Artificial Sequence: Synthetic oligonucleotide
uucaggacaaagagaugaa

SEQ ID NO: 2238071 - RNA, 19 nt, Artificial Sequence
  Description of Artificial Sequence: Synthetic oligonucleotide
acagaagcagaucuacuua

SEQ ID NO: 2238072 - RNA, 19 nt, Artificial Sequence
  Description of Artificial Sequence: Synthetic oligonucleotide
uacuuucaaguaacacagc

SEQ ID NO: 2238073 - RNA, 19 nt, Artificial Sequence
  Description of Artificial Sequence: Synthetic oligonucleotide
gcagcuugcgcauccaggg

SEQ ID NO: 2238074 - RNA, 19 nt, Artificial Sequence
  Description of Artificial Sequence: Synthetic oligonucleotide
uaaacaggcucaugauuaa

SEQ ID NO: 2238075 - RNA, 19 nt, Artificial Sequence
  Description of Artificial Sequence: Synthetic oligonucleotide
ugucgugacuaaugugcag

SEQ ID NO: 2238076 - RNA, 19 nt, Artificial Sequence
  Description of Artificial Sequence: Synthetic oligonucleotide
ugcucaguacuuugagcgc

SEQ ID NO: 2238077 - RNA, 19 nt, Artificial Sequence
  Description of Artificial Sequence: Synthetic oligonucleotide
agcgcccacaggcucaggg

SEQ ID NO: 2238078 - RNA, 19 nt, Artificial Sequence
  Description of Artificial Sequence: Synthetic oligonucleotide
uggccggaaaacccgaaaa

SEQ ID NO: 2238079 - RNA, 19 nt, Artificial Sequence
  Description of Artificial Sequence: Synthetic oligonucleotide
gcaugcgcuauuucaaucc

SEQ ID NO: 2238080 - RNA, 19 nt, Artificial Sequence
  Description of Artificial Sequence: Synthetic oligonucleotide
gcuucauauaaauaaguua

SEQ ID NO: 2238081 - RNA, 19 nt, Artificial Sequence
  Description of Artificial Sequence: Synthetic oligonucleotide
uccgcuaacacugcucagu

SEQ ID NO: 2238082 - RNA, 19 nt, Artificial Sequence
  Description of Artificial Sequence: Synthetic oligonucleotide
gacuaaugugcagcuugcg

SEQ ID NO: 2238083 - RNA, 19 nt, Artificial Sequence
  Description of Artificial Sequence: Synthetic oligonucleotide
ucgugacuaaugugcagcu

SEQ ID NO: 2238084 - RNA, 19 nt, Artificial Sequence
  Description of Artificial Sequence: Synthetic oligonucleotide
agcuugcgcauccaggggu

SEQ ID NO: 2238085 - RNA, 19 nt, Artificial Sequence
  Description of Artificial Sequence: Synthetic oligonucleotide
cucaguacuuugagcgccc

SEQ ID NO: 2238086 - RNA, 19 nt, Artificial Sequence
  Description of Artificial Sequence: Synthetic oligonucleotide
gaggcaaagagcaugcgcu

SEQ ID NO: 2238087 - RNA, 19 nt, Artificial Sequence
  Description of Artificial Sequence: Synthetic oligonucleotide
cagggcagcggaucgggcg

SEQ ID NO: 2238088 - RNA, 19 nt, Artificial Sequence
  Description of Artificial Sequence: Synthetic oligonucleotide
accuauguugucgugacua

SEQ ID NO: 2238089 - RNA, 19 nt, Artificial Sequence
  Description of Artificial Sequence: Synthetic oligonucleotide
uagaucuggggcugagcug

SEQ ID NO: 2238090 - RNA, 19 nt, Artificial Sequence
  Description of Artificial Sequence: Synthetic oligonucleotide
ucuacuuauacaggcucua

SEQ ID NO: 2238091 - RNA, 19 nt, Artificial Sequence
  Description of Artificial Sequence: Synthetic oligonucleotide
ucaccuuaguacugacacu

SEQ ID NO: 2238092 - RNA, 19 nt, Artificial Sequence
  Description of Artificial Sequence: Synthetic oligonucleotide
cuguaccugggcucggcgg

SEQ ID NO: 2238093 - RNA, 19 nt, Artificial Sequence
  Description of Artificial Sequence: Synthetic oligonucleotide
uccucgguugcggacgccg

SEQ ID NO: 2238094 - RNA, 19 nt, Artificial Sequence
  Description of Artificial Sequence: Synthetic oligonucleotide
agaucuacuuauacaggcu

SEQ ID NO: 2238095 - RNA, 19 nt, Artificial Sequence
  Description of Artificial Sequence: Synthetic oligonucleotide
uugagcgcccacaggcuca

SEQ ID NO: 2238096 - RNA, 19 nt, Artificial Sequence
  Description of Artificial Sequence: Synthetic oligonucleotide
gaugugggugcugccggcg

SEQ ID NO: 2238097 - RNA, 19 nt, Artificial Sequence
  Description of Artificial Sequence: Synthetic oligonucleotide
acuacggagagcuccgcua

SEQ ID NO: 2238098 - RNA, 19 nt, Artificial Sequence
  Description of Artificial Sequence: Synthetic oligonucleotide
uuugucucucggagaggca

SEQ ID NO: 2238099 - RNA, 19 nt, Artificial Sequence
  Description of Artificial Sequence: Synthetic oligonucleotide
gcucaugauuaaaagauga

SEQ ID NO: 2238100 - RNA, 19 nt, Artificial Sequence
  Description of Artificial Sequence: Synthetic oligonucleotide
uaauggcaauaaacaggcu

SEQ ID NO: 2238101 - RNA, 19 nt, Artificial Sequence
  Description of Artificial Sequence: Synthetic oligonucleotide
cauucaggacaaagagaug

SEQ ID NO: 2238102 - RNA, 19 nt, Artificial Sequence
  Description of Artificial Sequence: Synthetic oligonucleotide
uaacacagcuugcuucaua

SEQ ID NO: 2238103 - RNA, 19 nt, Artificial Sequence
  Description of Artificial Sequence: Synthetic oligonucleotide
acaggcucuauaauggcaa

SEQ ID NO: 2238104 - RNA, 19 nt, Artificial Sequence
  Description of Artificial Sequence: Synthetic oligonucleotide
cuggcuguaccugggcucg

SEQ ID NO: 2238105 - RNA, 19 nt, Artificial Sequence
  Description of Artificial Sequence: Synthetic oligonucleotide
ucgggcggaggcgagugcg

SEQ ID NO: 2238106 - RNA, 19 nt, Artificial Sequence
  Description of Artificial Sequence: Synthetic oligonucleotide
aucuacuuauacaggcucu

SEQ ID NO: 2238107 - RNA, 19 nt, Artificial Sequence
  Description of Artificial Sequence: Synthetic oligonucleotide
aaacaggcucaugauuaaa

SEQ ID NO: 2238108 - RNA, 19 nt, Artificial Sequence
  Description of Artificial Sequence: Synthetic oligonucleotide
agcgcguguaggccguccg

SEQ ID NO: 2238109 - RNA, 19 nt, Artificial Sequence
  Description of Artificial Sequence: Synthetic oligonucleotide
uuucccgccgugguggcug

SEQ ID NO: 2238110 - RNA, 19 nt, Artificial Sequence
  Description of Artificial Sequence: Synthetic oligonucleotide
agccaaaguggccggaaaa

SEQ ID NO: 2238111 - RNA, 19 nt, Artificial Sequence
  Description of Artificial Sequence: Synthetic oligonucleotide
aggggcggaaggccccucc

SEQ ID NO: 2238112 - RNA, 19 nt, Artificial Sequence
  Description of Artificial Sequence: Synthetic oligonucleotide
agagcaugcgcuauuucaa

SEQ ID NO: 2238113 - RNA, 19 nt, Artificial Sequence
  Description of Artificial Sequence: Synthetic oligonucleotide
gagaggcaaagagcaugcg

SEQ ID NO: 2238114 - RNA, 19 nt, Artificial Sequence
  Description of Artificial Sequence: Synthetic oligonucleotide
gagaugaacagaagcagau

SEQ ID NO: 2238115 - RNA, 19 nt, Artificial Sequence
  Description of Artificial Sequence: Synthetic oligonucleotide
uggcugucgcugccgggcg

SEQ ID NO: 2238116 - RNA, 19 nt, Artificial Sequence
  Description of Artificial Sequence: Synthetic oligonucleotide
accuuaguacugacacuac

SEQ ID NO: 2238117 - RNA, 19 nt, Artificial Sequence
  Description of Artificial Sequence: Synthetic oligonucleotide
ugucucucggagaggcaaa

SEQ ID NO: 2238118 - RNA, 19 nt, Artificial Sequence
  Description of Artificial Sequence: Synthetic oligonucleotide
cagcggaucgggcggaggc

SEQ ID NO: 2238119 - RNA, 19 nt, Artificial Sequence
  Description of Artificial Sequence: Synthetic oligonucleotide
cugggcgcucgccugcucg

SEQ ID NO: 2238120 - RNA, 19 nt, Artificial Sequence
  Description of Artificial Sequence: Synthetic oligonucleotide
uucggcgggucagguagcg

SEQ ID NO: 2238121 - RNA, 19 nt, Artificial Sequence
  Description of Artificial Sequence: Synthetic oligonucleotide
guguaggccguccgggccc

SEQ ID NO: 2238122 - RNA, 19 nt, Artificial Sequence
  Description of Artificial Sequence: Synthetic oligonucleotide
gugcugccggcguuggccg

SEQ ID NO: 2238123 - RNA, 19 nt, Artificial Sequence
  Description of Artificial Sequence: Synthetic oligonucleotide
ggggccaccgccgagcagg

SEQ ID NO: 2238124 - RNA, 19 nt, Artificial Sequence
  Description of Artificial Sequence: Synthetic oligonucleotide
cucaggggcggaaggcccc

SEQ ID NO: 2238125 - RNA, 19 nt, Artificial Sequence
  Description of Artificial Sequence: Synthetic oligonucleotide
ggagaacagggcuucuuca

SEQ ID NO: 2238126 - RNA, 19 nt, Artificial Sequence
  Description of Artificial Sequence: Synthetic oligonucleotide
aucgggcggaggcgagugc

SEQ ID NO: 2238127 - RNA, 19 nt, Artificial Sequence
  Description of Artificial Sequence: Synthetic oligonucleotide
ggcucuauaauggcaauaa

SEQ ID NO: 2238128 - RNA, 19 nt, Artificial Sequence
  Description of Artificial Sequence: Synthetic oligonucleotide
cucggcucgcucugggcgc

SEQ ID NO: 2238129 - RNA, 19 nt, Artificial Sequence
  Description of Artificial Sequence: Synthetic oligonucleotide
cagcuugcgcauccagggg

SEQ ID NO: 2238130 - RNA, 19 nt, Artificial Sequence
  Description of Artificial Sequence: Synthetic oligonucleotide
aaggagaacagggcuucuu

SEQ ID NO: 2238131 - RNA, 19 nt, Artificial Sequence
  Description of Artificial Sequence: Synthetic oligonucleotide
ggcucaugauuaaaagaug

SEQ ID NO: 2238132 - RNA, 19 nt, Artificial Sequence
  Description of Artificial Sequence: Synthetic oligonucleotide
gcucgccagagccaaagug

SEQ ID NO: 2238133 - RNA, 19 nt, Artificial Sequence
  Description of Artificial Sequence: Synthetic oligonucleotide
gaucgggcggaggcgagug

SEQ ID NO: 2238134 - RNA, 19 nt, Artificial Sequence
  Description of Artificial Sequence: Synthetic oligonucleotide
ccaaaguggccggaaaacc

SEQ ID NO: 2238135 - RNA, 19 nt, Artificial Sequence
  Description of Artificial Sequence: Synthetic oligonucleotide
gcucaguacuuugagcgcc

SEQ ID NO: 2238136 - RNA, 19 nt, Artificial Sequence
  Description of Artificial Sequence: Synthetic oligonucleotide
uacggagagcuccgcuaac

SEQ ID NO: 2238137 - RNA, 19 nt, Artificial Sequence
  Description of Artificial Sequence: Synthetic oligonucleotide
acacuacggagagcuccgc

SEQ ID NO: 2238138 - RNA, 19 nt, Artificial Sequence
  Description of Artificial Sequence: Synthetic oligonucleotide
gucgcugccgggcgagggg

SEQ ID NO: 2238139 - RNA, 19 nt, Artificial Sequence
  Description of Artificial Sequence: Synthetic oligonucleotide
uaacacugcucaguacuuu

SEQ ID NO: 2238140 - RNA, 19 nt, Artificial Sequence
  Description of Artificial Sequence: Synthetic oligonucleotide
aaguggccggaaaacccga

SEQ ID NO: 2238141 - RNA, 19 nt, Artificial Sequence
  Description of Artificial Sequence: Synthetic oligonucleotide
ucucucggagaggcaaaga

SEQ ID NO: 2238142 - RNA, 19 nt, Artificial Sequence
  Description of Artificial Sequence: Synthetic oligonucleotide
ucaguacuuugagcgccca

SEQ ID NO: 2238143 - RNA, 19 nt, Artificial Sequence
  Description of Artificial Sequence: Synthetic oligonucleotide
ucggagaggcaaagagcau

SEQ ID NO: 2238144 - RNA, 19 nt, Artificial Sequence
  Description of Artificial Sequence: Synthetic oligonucleotide
cuuauacaggcucuauaau

SEQ ID NO: 2238145 - RNA, 19 nt, Artificial Sequence
  Description of Artificial Sequence: Synthetic oligonucleotide
aggcaaagagcaugcgcua

SEQ ID NO: 2238146 - RNA, 19 nt, Artificial Sequence
  Description of Artificial Sequence: Synthetic oligonucleotide
acggagagcuccgcuaaca

SEQ ID NO: 2238147 - RNA, 19 nt, Artificial Sequence
  Description of Artificial Sequence: Synthetic oligonucleotide
gcuccgcuaacacugcuca

SEQ ID NO: 2238148 - RNA, 19 nt, Artificial Sequence
  Description of Artificial Sequence: Synthetic oligonucleotide
augaacagaagcagaucua

SEQ ID NO: 2238149 - RNA, 19 nt, Artificial Sequence
  Description of Artificial Sequence: Synthetic oligonucleotide
cagaagcagaucuacuuau

SEQ ID NO: 2238150 - RNA, 19 nt, Artificial Sequence
  Description of Artificial Sequence: Synthetic oligonucleotide
agcggaucgggcggaggcg

SEQ ID NO: 2238151 - RNA, 19 nt, Artificial Sequence
  Description of Artificial Sequence: Synthetic oligonucleotide
ccaccuauguugucgugac

SEQ ID NO: 2238152 - RNA, 19 nt, Artificial Sequence
  Description of Artificial Sequence: Synthetic oligonucleotide
uggcaauaaacaggcucau

SEQ ID NO: 2238153 - RNA, 19 nt, Artificial Sequence
  Description of Artificial Sequence: Synthetic oligonucleotide
ugagcgcccacaggcucag

SEQ ID NO: 2238154 - RNA, 19 nt, Artificial Sequence
  Description of Artificial Sequence: Synthetic oligonucleotide
ggcgagugcguggacgugg

SEQ ID NO: 2238155 - RNA, 19 nt, Artificial Sequence
  Description of Artificial Sequence: Synthetic oligonucleotide
cuacggagagcuccgcuaa

SEQ ID NO: 2238156 - RNA, 19 nt, Artificial Sequence
  Description of Artificial Sequence: Synthetic oligonucleotide
acuggccccggccgcguag

SEQ ID NO: 2238157 - RNA, 19 nt, Artificial Sequence
  Description of Artificial Sequence: Synthetic oligonucleotide
gaggcgagugcguggacgu

SEQ ID NO: 2238158 - RNA, 19 nt, Artificial Sequence
  Description of Artificial Sequence: Synthetic oligonucleotide
guugcggacgccgugccaa

SEQ ID NO: 2238159 - RNA, 19 nt, Artificial Sequence
  Description of Artificial Sequence: Synthetic oligonucleotide
ggggcguccuccucgguug

SEQ ID NO: 2238160 - RNA, 19 nt, Artificial Sequence
  Description of Artificial Sequence: Synthetic oligonucleotide
ugggcgcucgccugcucgc

SEQ ID NO: 2238161 - RNA, 19 nt, Artificial Sequence
  Description of Artificial Sequence: Synthetic oligonucleotide
guggccggcuggcuguacc

SEQ ID NO: 2238162 - RNA, 19 nt, Artificial Sequence
  Description of Artificial Sequence: Synthetic oligonucleotide
cuccgcuaacacugcucag

SEQ ID NO: 2238163 - RNA, 19 nt, Artificial Sequence
  Description of Artificial Sequence: Synthetic oligonucleotide
gagccaaaguggccggaaa

SEQ ID NO: 2238164 - RNA, 19 nt, Artificial Sequence
  Description of Artificial Sequence: Synthetic oligonucleotide
caguacuuugagcgcccac

SEQ ID NO: 2238165 - RNA, 19 nt, Artificial Sequence
  Description of Artificial Sequence: Synthetic oligonucleotide
uucuucggcgggucaggua

SEQ ID NO: 2238166 - RNA, 19 nt, Artificial Sequence
  Description of Artificial Sequence: Synthetic oligonucleotide
agagccaaaguggccggaa

SEQ ID NO: 2238167 - RNA, 19 nt, Artificial Sequence
  Description of Artificial Sequence: Synthetic oligonucleotide
uacugacacuacggagagc

SEQ ID NO: 2238168 - RNA, 19 nt, Artificial Sequence
  Description of Artificial Sequence: Synthetic oligonucleotide
cucgguugcggacgccgug

SEQ ID NO: 2238169 - RNA, 19 nt, Artificial Sequence
  Description of Artificial Sequence: Synthetic oligonucleotide
gagcaugcgcuauuucaau

SEQ ID NO: 2238170 - RNA, 19 nt, Artificial Sequence
  Description of Artificial Sequence: Synthetic oligonucleotide
aggggcguccuccucgguu

SEQ ID NO: 2238171 - RNA, 19 nt, Artificial Sequence
  Description of Artificial Sequence: Synthetic oligonucleotide
cagggguagaucuggggcu

SEQ ID NO: 2238172 - RNA, 19 nt, Artificial Sequence
  Description of Artificial Sequence: Synthetic oligonucleotide
caugcgcuauuucaauccu

SEQ ID NO: 2238173 - RNA, 19 nt, Artificial Sequence
  Description of Artificial Sequence: Synthetic oligonucleotide
gccauucaggacaaagaga

SEQ ID NO: 2238174 - RNA, 19 nt, Artificial Sequence
  Description of Artificial Sequence: Synthetic oligonucleotide
gaggcgccgcuggaguugc

SEQ ID NO: 2238175 - RNA, 19 nt, Artificial Sequence
  Description of Artificial Sequence: Synthetic oligonucleotide
gccggcuggcuguaccugg

SEQ ID NO: 2238176 - RNA, 19 nt, Artificial Sequence
  Description of Artificial Sequence: Synthetic oligonucleotide
cuuugagcgcccacaggcu

SEQ ID NO: 2238177 - RNA, 19 nt, Artificial Sequence
  Description of Artificial Sequence: Synthetic oligonucleotide
gaaggccccuccgcugcag

SEQ ID NO: 2238178 - RNA, 19 nt, Artificial Sequence
  Description of Artificial Sequence: Synthetic oligonucleotide
aggcucuauaauggcaaua

SEQ ID NO: 2238179 - RNA, 19 nt, Artificial Sequence
  Description of Artificial Sequence: Synthetic oligonucleotide
ccggcguuggccgaggcgc

SEQ ID NO: 2238180 - RNA, 19 nt, Artificial Sequence
  Description of Artificial Sequence: Synthetic oligonucleotide
cucgcucugggcgcucgcc

SEQ ID NO: 2238181 - RNA, 19 nt, Artificial Sequence
  Description of Artificial Sequence: Synthetic oligonucleotide
guggccggaaaacccgaaa

SEQ ID NO: 2238182 - RNA, 19 nt, Artificial Sequence
  Description of Artificial Sequence: Synthetic oligonucleotide
cuaacacugcucaguacuu

SEQ ID NO: 2238183 - RNA, 19 nt, Artificial Sequence
  Description of Artificial Sequence: Synthetic oligonucleotide
gccccggccgcguagcugc

SEQ ID NO: 2238184 - RNA, 19 nt, Artificial Sequence
  Description of Artificial Sequence: Synthetic oligonucleotide
gcucuauaauggcaauaaa

SEQ ID NO: 2238185 - RNA, 19 nt, Artificial Sequence
  Description of Artificial Sequence: Synthetic oligonucleotide
uugcggacgccgugccaac

SEQ ID NO: 2238186 - RNA, 19 nt, Artificial Sequence
  Description of Artificial Sequence: Synthetic oligonucleotide
ugcggacgccgugccaacc

SEQ ID NO: 2238187 - RNA, 19 nt, Artificial Sequence
  Description of Artificial Sequence: Synthetic oligonucleotide
uguaggccguccgggcccu

SEQ ID NO: 2238188 - RNA, 19 nt, Artificial Sequence
  Description of Artificial Sequence: Synthetic oligonucleotide
uagcgcguguaggccgucc

SEQ ID NO: 2238189 - RNA, 19 nt, Artificial Sequence
  Description of Artificial Sequence: Synthetic oligonucleotide
gggcaaggagaacagggcu

SEQ ID NO: 2238190 - RNA, 19 nt, Artificial Sequence
  Description of Artificial Sequence: Synthetic oligonucleotide
cgagcagggcagcggaucg

SEQ ID NO: 2238191 - RNA, 19 nt, Artificial Sequence
  Description of Artificial Sequence: Synthetic oligonucleotide
ggggcggaaggccccuccg

SEQ ID NO: 2238192 - RNA, 19 nt, Artificial Sequence
  Description of Artificial Sequence: Synthetic oligonucleotide
gccaccuauguugucguga

SEQ ID NO: 2238193 - RNA, 19 nt, Artificial Sequence
  Description of Artificial Sequence: Synthetic oligonucleotide
uuuucccgccgugguggcu

SEQ ID NO: 2238194 - RNA, 19 nt, Artificial Sequence
  Description of Artificial Sequence: Synthetic oligonucleotide
ugcguggacguggccggcu

SEQ ID NO: 2238195 - RNA, 19 nt, Artificial Sequence
  Description of Artificial Sequence: Synthetic oligonucleotide
cggagaggcaaagagcaug

SEQ ID NO: 2238196 - RNA, 19 nt, Artificial Sequence
  Description of Artificial Sequence: Synthetic oligonucleotide
cugcgggcgcgcucgccag

SEQ ID NO: 2238197 - RNA, 19 nt, Artificial Sequence
  Description of Artificial Sequence: Synthetic oligonucleotide
gcggacgccgugccaaccc

SEQ ID NO: 2238198 - RNA, 19 nt, Artificial Sequence
  Description of Artificial Sequence: Synthetic oligonucleotide
ccugcucgcugcuggcagg

SEQ ID NO: 2238199 - RNA, 19 nt, Artificial Sequence
  Description of Artificial Sequence: Synthetic oligonucleotide
ggagagcuccgcuaacacu

SEQ ID NO: 2238200 - RNA, 19 nt, Artificial Sequence
  Description of Artificial Sequence: Synthetic oligonucleotide
gcguguaggccguccgggc

SEQ ID NO: 2238201 - RNA, 19 nt, Artificial Sequence
  Description of Artificial Sequence: Synthetic oligonucleotide
ugccggcguuggccgaggc

SEQ ID NO: 2238202 - RNA, 19 nt, Artificial Sequence
  Description of Artificial Sequence: Synthetic oligonucleotide
gcugcuggcaggggcgucc

SEQ ID NO: 2238203 - RNA, 19 nt, Artificial Sequence
  Description of Artificial Sequence: Synthetic oligonucleotide
gcgcguguaggccguccgg

SEQ ID NO: 2238204 - RNA, 19 nt, Artificial Sequence
  Description of Artificial Sequence: Synthetic oligonucleotide
cguguaggccguccgggcc

SEQ ID NO: 2238205 - RNA, 19 nt, Artificial Sequence
  Description of Artificial Sequence: Synthetic oligonucleotide
gccggcguuggccgaggcg

SEQ ID NO: 2238206 - RNA, 19 nt, Artificial Sequence
  Description of Artificial Sequence: Synthetic oligonucleotide
ccguccgggcccuuuugcc

SEQ ID NO: 2238207 - RNA, 19 nt, Artificial Sequence
  Description of Artificial Sequence: Synthetic oligonucleotide
uccgggcccuuuugccuuc

SEQ ID NO: 2238208 - RNA, 19 nt, Artificial Sequence
  Description of Artificial Sequence: Synthetic oligonucleotide
augcgcuauuucaauccuu

SEQ ID NO: 2238209 - RNA, 19 nt, Artificial Sequence
  Description of Artificial Sequence: Synthetic oligonucleotide
gcccacaggcucaggggcg

SEQ ID NO: 2238210 - RNA, 19 nt, Artificial Sequence
  Description of Artificial Sequence: Synthetic oligonucleotide
ccuauguugucgugacuaa

SEQ ID NO: 2238211 - RNA, 19 nt, Artificial Sequence
  Description of Artificial Sequence: Synthetic oligonucleotide
gcucugggcgcucgccugc

SEQ ID NO: 2238212 - RNA, 19 nt, Artificial Sequence
  Description of Artificial Sequence: Synthetic oligonucleotide
gggcucggcucgcucuggg

SEQ ID NO: 2238213 - RNA, 19 nt, Artificial Sequence
  Description of Artificial Sequence: Synthetic oligonucleotide
cuauguugucgugacuaau

SEQ ID NO: 2238214 - RNA, 19 nt, Artificial Sequence
  Description of Artificial Sequence: Synthetic oligonucleotide
caaagagcaugcgcuauuu

SEQ ID NO: 2238215 - RNA, 19 nt, Artificial Sequence
  Description of Artificial Sequence: Synthetic oligonucleotide
gccguccgggcccuuuugc

SEQ ID NO: 2238216 - RNA, 19 nt, Artificial Sequence
  Description of Artificial Sequence: Synthetic oligonucleotide
cuggccccggccgcguagc

SEQ ID NO: 2238217 - RNA, 19 nt, Artificial Sequence
  Description of Artificial Sequence: Synthetic oligonucleotide
gccgcuggaguugcccagg

SEQ ID NO: 2238218 - RNA, 19 nt, Artificial Sequence
  Description of Artificial Sequence: Synthetic oligonucleotide
aguggccggaaaacccgaa

SEQ ID NO: 2238219 - RNA, 19 nt, Artificial Sequence
  Description of Artificial Sequence: Synthetic oligonucleotide
uucccgccgugguggcugu

SEQ ID NO: 2238220 - RNA, 19 nt, Artificial Sequence
  Description of Artificial Sequence: Synthetic oligonucleotide
gcgcucgccagagccaaag

SEQ ID NO: 2238221 - RNA, 19 nt, Artificial Sequence
  Description of Artificial Sequence: Synthetic oligonucleotide
gcugucgcugccgggcgag

SEQ ID NO: 2238222 - RNA, 19 nt, Artificial Sequence
  Description of Artificial Sequence: Synthetic oligonucleotide
uagcugcgggcgcgcucgc

SEQ ID NO: 2238223 - RNA, 19 nt, Artificial Sequence
  Description of Artificial Sequence: Synthetic oligonucleotide
gcugcgggcgcgcucgcca

SEQ ID NO: 2238224 - RNA, 19 nt, Artificial Sequence
  Description of Artificial Sequence: Synthetic oligonucleotide
ggcgccgcuggaguugccc

SEQ ID NO: 2238225 - RNA, 19 nt, Artificial Sequence
  Description of Artificial Sequence: Synthetic oligonucleotide
ccaccgccgagcagggcag

SEQ ID NO: 2238226 - RNA, 19 nt, Artificial Sequence
  Description of Artificial Sequence: Synthetic oligonucleotide
cggagagcuccgcuaacac

SEQ ID NO: 2238227 - RNA, 19 nt, Artificial Sequence
  Description of Artificial Sequence: Synthetic oligonucleotide
ccggccgcguagcugcggg

SEQ ID NO: 2238228 - RNA, 19 nt, Artificial Sequence
  Description of Artificial Sequence: Synthetic oligonucleotide
cacuacggagagcuccgcu

SEQ ID NO: 2238229 - RNA, 19 nt, Artificial Sequence
  Description of Artificial Sequence: Synthetic oligonucleotide
aggcgagugcguggacgug

SEQ ID NO: 2238230 - RNA, 19 nt, Artificial Sequence
  Description of Artificial Sequence: Synthetic oligonucleotide
ggcugagcuggcggcgccg

SEQ ID NO: 2238231 - RNA, 19 nt, Artificial Sequence
  Description of Artificial Sequence: Synthetic oligonucleotide
gagcuggcggcgccgggcu

SEQ ID NO: 2238232 - RNA, 19 nt, Artificial Sequence
  Description of Artificial Sequence: Synthetic oligonucleotide
ggccaccuauguugucgug

SEQ ID NO: 2238233 - RNA, 19 nt, Artificial Sequence
  Description of Artificial Sequence: Synthetic oligonucleotide
caauccuucuucggcgggu

SEQ ID NO: 2238234 - RNA, 19 nt, Artificial Sequence
  Description of Artificial Sequence: Synthetic oligonucleotide
cugucgcugccgggcgagg

SEQ ID NO: 2238235 - RNA, 19 nt, Artificial Sequence
  Description of Artificial Sequence: Synthetic oligonucleotide
gcgagugcguggacguggc

SEQ ID NO: 2238236 - RNA, 19 nt, Artificial Sequence
  Description of Artificial Sequence: Synthetic oligonucleotide
ggcguuggccgaggcgccg

SEQ ID NO: 2238237 - RNA, 19 nt, Artificial Sequence
  Description of Artificial Sequence: Synthetic oligonucleotide
caggcucuauaauggcaau

SEQ ID NO: 2238238 - RNA, 19 nt, Artificial Sequence
  Description of Artificial Sequence: Synthetic oligonucleotide
gcguggacguggccggcug

SEQ ID NO: 2238239 - RNA, 19 nt, Artificial Sequence
  Description of Artificial Sequence: Synthetic oligonucleotide
cgcguguaggccguccggg

SEQ ID NO: 2238240 - RNA, 19 nt, Artificial Sequence
  Description of Artificial Sequence: Synthetic oligonucleotide
cgcuaacacugcucaguac

SEQ ID NO: 2238241 - RNA, 19 nt, Artificial Sequence
  Description of Artificial Sequence: Synthetic oligonucleotide
ggcgcucgccugcucgcug

SEQ ID NO: 2238242 - RNA, 19 nt, Artificial Sequence
  Description of Artificial Sequence: Synthetic oligonucleotide
cugccggcguuggccgagg

SEQ ID NO: 2238243 - RNA, 19 nt, Artificial Sequence
  Description of Artificial Sequence: Synthetic oligonucleotide
gcagcggaucgggcggagg

SEQ ID NO: 2238244 - RNA, 19 nt, Artificial Sequence
  Description of Artificial Sequence: Synthetic oligonucleotide
aggccguccgggcccuuuu

SEQ ID NO: 2238245 - RNA, 19 nt, Artificial Sequence
  Description of Artificial Sequence: Synthetic oligonucleotide
ccgcuggaguugcccaggg

SEQ ID NO: 2238246 - RNA, 19 nt, Artificial Sequence
  Description of Artificial Sequence: Synthetic oligonucleotide
gccgcguagcugcgggcgc

SEQ ID NO: 2238247 - RNA, 19 nt, Artificial Sequence
  Description of Artificial Sequence: Synthetic oligonucleotide
ggcucgcucugggcgcucg

SEQ ID NO: 2238248 - RNA, 19 nt, Artificial Sequence
  Description of Artificial Sequence: Synthetic oligonucleotide
gguugcggacgccgugcca

SEQ ID NO: 2238249 - RNA, 19 nt, Artificial Sequence
  Description of Artificial Sequence: Synthetic oligonucleotide
gggcugagcuggcggcgcc

SEQ ID NO: 2238250 - RNA, 19 nt, Artificial Sequence
  Description of Artificial Sequence: Synthetic oligonucleotide
cccgccgugguggcugucg

SEQ ID NO: 2238251 - RNA, 19 nt, Artificial Sequence
  Description of Artificial Sequence: Synthetic oligonucleotide
gggcguccuccucgguugc

SEQ ID NO: 2238252 - RNA, 19 nt, Artificial Sequence
  Description of Artificial Sequence: Synthetic oligonucleotide
gcugccggcguuggccgag

SEQ ID NO: 2238253 - RNA, 19 nt, Artificial Sequence
  Description of Artificial Sequence: Synthetic oligonucleotide
ggcguccuccucgguugcg

SEQ ID NO: 2238254 - RNA, 19 nt, Artificial Sequence
  Description of Artificial Sequence: Synthetic oligonucleotide
guaacacagcuugcuucau

SEQ ID NO: 2238255 - RNA, 19 nt, Artificial Sequence
  Description of Artificial Sequence: Synthetic oligonucleotide
ggccguccgggcccuuuug

SEQ ID NO: 2238256 - RNA, 19 nt, Artificial Sequence
  Description of Artificial Sequence: Synthetic oligonucleotide
gcgcuauuucaauccuucu

SEQ ID NO: 2238257 - RNA, 19 nt, Artificial Sequence
  Description of Artificial Sequence: Synthetic oligonucleotide
guccgggcccuuuugccuu

SEQ ID NO: 2238258 - RNA, 19 nt, Artificial Sequence
  Description of Artificial Sequence: Synthetic oligonucleotide
uaggccguccgggcccuuu

SEQ ID NO: 2238259 - RNA, 19 nt, Artificial Sequence
  Description of Artificial Sequence: Synthetic oligonucleotide
cuucugggccaccuauguu

SEQ ID NO: 2238260 - RNA, 19 nt, Artificial Sequence
  Description of Artificial Sequence: Synthetic oligonucleotide
ccgagcagggcagcggauc

SEQ ID NO: 2238261 - RNA, 19 nt, Artificial Sequence
  Description of Artificial Sequence: Synthetic oligonucleotide
gcggaggcgagugcgugga

SEQ ID NO: 2238262 - RNA, 19 nt, Artificial Sequence
  Description of Artificial Sequence: Synthetic oligonucleotide
cuggcggcgccgggcucgg

SEQ ID NO: 2238263 - RNA, 19 nt, Artificial Sequence
  Description of Artificial Sequence: Synthetic oligonucleotide
ccgcuaacacugcucagua

SEQ ID NO: 2238264 - RNA, 19 nt, Artificial Sequence
  Description of Artificial Sequence: Synthetic oligonucleotide
ugggcucggcgggcgccgc

SEQ ID NO: 2238265 - RNA, 19 nt, Artificial Sequence
  Description of Artificial Sequence: Synthetic oligonucleotide
ggaaggccccuccgcugca

SEQ ID NO: 2238266 - RNA, 19 nt, Artificial Sequence
  Description of Artificial Sequence: Synthetic oligonucleotide
cagccauacucaugcuuuu

SEQ ID NO: 2238267 - RNA, 19 nt, Artificial Sequence
  Description of Artificial Sequence: Synthetic oligonucleotide
cguggacguggccggcugg

SEQ ID NO: 2238268 - RNA, 19 nt, Artificial Sequence
  Description of Artificial Sequence: Synthetic oligonucleotide
cuucuucggcgggucaggu

SEQ ID NO: 2238269 - RNA, 19 nt, Artificial Sequence
  Description of Artificial Sequence: Synthetic oligonucleotide
ggccggcuggcuguaccug

SEQ ID NO: 2238270 - RNA, 19 nt, Artificial Sequence
  Description of Artificial Sequence: Synthetic oligonucleotide
caccgccgagcagggcagc

SEQ ID NO: 2238271 - RNA, 19 nt, Artificial Sequence
  Description of Artificial Sequence: Synthetic oligonucleotide
gggccaccgccgagcaggg

SEQ ID NO: 2238272 - RNA, 19 nt, Artificial Sequence
  Description of Artificial Sequence: Synthetic oligonucleotide
cggacgccgugccaacccc

SEQ ID NO: 2238273 - RNA, 19 nt, Artificial Sequence
  Description of Artificial Sequence: Synthetic oligonucleotide
ccgcguagcugcgggcgcg

SEQ ID NO: 2238274 - RNA, 19 nt, Artificial Sequence
  Description of Artificial Sequence: Synthetic oligonucleotide
cacaggcucaggggcggaa

SEQ ID NO: 2238275 - RNA, 19 nt, Artificial Sequence
  Description of Artificial Sequence: Synthetic oligonucleotide
cugcagccauacucaugcu

SEQ ID NO: 2238276 - RNA, 19 nt, Artificial Sequence
  Description of Artificial Sequence: Synthetic oligonucleotide
cgcuauuucaauccuucuu

SEQ ID NO: 2238277 - RNA, 19 nt, Artificial Sequence
  Description of Artificial Sequence: Synthetic oligonucleotide
ccugggcucggcgggcgcc

SEQ ID NO: 2238278 - RNA, 19 nt, Artificial Sequence
  Description of Artificial Sequence: Synthetic oligonucleotide
ccgggcucggcucgcucug

SEQ ID NO: 2238279 - RNA, 19 nt, Artificial Sequence
  Description of Artificial Sequence: Synthetic oligonucleotide
cgccgcuggaguugcccag

SEQ ID NO: 2238280 - RNA, 19 nt, Artificial Sequence
  Description of Artificial Sequence: Synthetic oligonucleotide
ggcgcgcucgccagagcca

SEQ ID NO: 2238281 - RNA, 19 nt, Artificial Sequence
  Description of Artificial Sequence: Synthetic oligonucleotide
cgguugcggacgccgugcc

SEQ ID NO: 2238282 - RNA, 19 nt, Artificial Sequence
  Description of Artificial Sequence: Synthetic oligonucleotide
ccgcacuggccccggccgc

SEQ ID NO: 2238283 - RNA, 19 nt, Artificial Sequence
  Description of Artificial Sequence: Synthetic oligonucleotide
cgagugcguggacguggcc

SEQ ID NO: 2238284 - RNA, 19 nt, Artificial Sequence
  Description of Artificial Sequence: Synthetic oligonucleotide
cggaucgggcggaggcgag

SEQ ID NO: 2238285 - RNA, 19 nt, Artificial Sequence
  Description of Artificial Sequence: Synthetic oligonucleotide
caggggcggaaggccccuc

SEQ ID NO: 2238286 - RNA, 19 nt, Artificial Sequence
  Description of Artificial Sequence: Synthetic oligonucleotide
gcucgccugcucgcugcug

SEQ ID NO: 2238287 - RNA, 19 nt, Artificial Sequence
  Description of Artificial Sequence: Synthetic oligonucleotide
gcgcgcucgccagagccaa

SEQ ID NO: 2238288 - RNA, 19 nt, Artificial Sequence
  Description of Artificial Sequence: Synthetic oligonucleotide
ggcgggcgccgcacuggcc

SEQ ID NO: 2238289 - RNA, 19 nt, Artificial Sequence
  Description of Artificial Sequence: Synthetic oligonucleotide
ggaucgggcggaggcgagu

SEQ ID NO: 2238290 - RNA, 19 nt, Artificial Sequence
  Description of Artificial Sequence: Synthetic oligonucleotide
gggcagcggaucgggcgga

SEQ ID NO: 2238291 - RNA, 19 nt, Artificial Sequence
  Description of Artificial Sequence: Synthetic oligonucleotide
ucccgccgugguggcuguc

SEQ ID NO: 2238292 - RNA, 19 nt, Artificial Sequence
  Description of Artificial Sequence: Synthetic oligonucleotide
ccccggccgcguagcugcg

SEQ ID NO: 2238293 - RNA, 19 nt, Artificial Sequence
  Description of Artificial Sequence: Synthetic oligonucleotide
cgggcgccgcacuggcccc

SEQ ID NO: 2238294 - RNA, 19 nt, Artificial Sequence
  Description of Artificial Sequence: Synthetic oligonucleotide
cggcgggcgccgcacuggc

SEQ ID NO: 2238295 - RNA, 19 nt, Artificial Sequence
  Description of Artificial Sequence: Synthetic oligonucleotide
cccggccgcguagcugcgg

SEQ ID NO: 2238296 - RNA, 19 nt, Artificial Sequence
  Description of Artificial Sequence: Synthetic oligonucleotide
cggccgcguagcugcgggc

SEQ ID NO: 2238297 - RNA, 19 nt, Artificial Sequence
  Description of Artificial Sequence: Synthetic oligonucleotide
ccucgguugcggacgccgu

SEQ ID NO: 2238298 - RNA, 19 nt, Artificial Sequence
  Description of Artificial Sequence: Synthetic oligonucleotide
cgggcucggcucgcucugg

SEQ ID NO: 2238299 - RNA, 19 nt, Artificial Sequence
  Description of Artificial Sequence: Synthetic oligonucleotide
gccccuccgcugcagccau

SEQ ID NO: 2238300 - RNA, 19 nt, Artificial Sequence
  Description of Artificial Sequence: Synthetic oligonucleotide
caggggcguccuccucggu

SEQ ID NO: 2238301 - RNA, 19 nt, Artificial Sequence
  Description of Artificial Sequence: Synthetic oligonucleotide
gcucggcgggcgccgcacu

SEQ ID NO: 2238302 - RNA, 19 nt, Artificial Sequence
  Description of Artificial Sequence: Synthetic oligonucleotide
ccacaggcucaggggcgga

SEQ ID NO: 2238303 - RNA, 19 nt, Artificial Sequence
  Description of Artificial Sequence: Synthetic oligonucleotide
gggcgcucgccugcucgcu

SEQ ID NO: 2238304 - RNA, 19 nt, Artificial Sequence
  Description of Artificial Sequence: Synthetic oligonucleotide
cgugacuaaugugcagcuu

SEQ ID NO: 2238305 - RNA, 19 nt, Artificial Sequence
  Description of Artificial Sequence: Synthetic oligonucleotide
cgccgggcucggcucgcuc

SEQ ID NO: 2238306 - RNA, 19 nt, Artificial Sequence
  Description of Artificial Sequence: Synthetic oligonucleotide
gccgagcagggcagcggau

SEQ ID NO: 2238307 - RNA, 19 nt, Artificial Sequence
  Description of Artificial Sequence: Synthetic oligonucleotide
cgcucgccagagccaaagu

SEQ ID NO: 2238308 - RNA, 19 nt, Artificial Sequence
  Description of Artificial Sequence: Synthetic oligonucleotide
ccuccgcugcagccauacu

SEQ ID NO: 2238309 - RNA, 19 nt, Artificial Sequence
  Description of Artificial Sequence: Synthetic oligonucleotide
gcguagcugcgggcgcgcu

SEQ ID NO: 2238310 - RNA, 19 nt, Artificial Sequence
  Description of Artificial Sequence: Synthetic oligonucleotide
cgggcggaggcgagugcgu

SEQ ID NO: 2238311 - RNA, 19 nt, Artificial Sequence
  Description of Artificial Sequence: Synthetic oligonucleotide
cguuggccgaggcgccgcu

SEQ ID NO: 2238312 - RNA, 19 nt, Artificial Sequence
  Description of Artificial Sequence: Synthetic oligonucleotide
cgcgcucgccagagccaaa

SEQ ID NO: 2238313 - RNA, 19 nt, Artificial Sequence
  Description of Artificial Sequence: Synthetic oligonucleotide
guaggccguccgggcccuu

SEQ ID NO: 2238314 - RNA, 19 nt, Artificial Sequence
  Description of Artificial Sequence: Synthetic oligonucleotide
ucauccuugagaaagacug

SEQ ID NO: 2238315 - RNA, 19 nt, Artificial Sequence
  Description of Artificial Sequence: Synthetic oligonucleotide
augagcauaugccaaaugc

SEQ ID NO: 2238316 - RNA, 19 nt, Artificial Sequence
  Description of Artificial Sequence: Synthetic oligonucleotide
aaaacagucauccuugaga

SEQ ID NO: 2238317 - RNA, 19 nt, Artificial Sequence
  Description of Artificial Sequence: Synthetic oligonucleotide
gaaagcauacaguaggacg

SEQ ID NO: 2238318 - RNA, 19 nt, Artificial Sequence
  Description of Artificial Sequence: Synthetic oligonucleotide
uucauugaugcacagcugg

SEQ ID NO: 2238319 - RNA, 19 nt, Artificial Sequence
  Description of Artificial Sequence: Synthetic oligonucleotide
aauguagaaguaguugucc

SEQ ID NO: 2238320 - RNA, 19 nt, Artificial Sequence
  Description of Artificial Sequence: Synthetic oligonucleotide
aaagcauacaguaggacgg

SEQ ID NO: 2238321 - RNA, 19 nt, Artificial Sequence
  Description of Artificial Sequence: Synthetic oligonucleotide
aauaaggcugccugggcac

SEQ ID NO: 2238322 - RNA, 19 nt, Artificial Sequence
  Description of Artificial Sequence: Synthetic oligonucleotide
aagacugugucuuuaagaa

SEQ ID NO: 2238323 - RNA, 19 nt, Artificial Sequence
  Description of Artificial Sequence: Synthetic oligonucleotide
uucauaaccccuaggagcc

SEQ ID NO: 2238324 - RNA, 19 nt, Artificial Sequence
  Description of Artificial Sequence: Synthetic oligonucleotide
uaguccaugaugcagaaaa

SEQ ID NO: 2238325 - RNA, 19 nt, Artificial Sequence
  Description of Artificial Sequence: Synthetic oligonucleotide
acugacauuaaggagcccc

SEQ ID NO: 2238326 - RNA, 19 nt, Artificial Sequence
  Description of Artificial Sequence: Synthetic oligonucleotide
guucauaaccccuaggagc

SEQ ID NO: 2238327 - RNA, 19 nt, Artificial Sequence
  Description of Artificial Sequence: Synthetic oligonucleotide
cacgaaagcauacaguagg

SEQ ID NO: 2238328 - RNA, 19 nt, Artificial Sequence
  Description of Artificial Sequence: Synthetic oligonucleotide
aaacagucauccuugagaa

SEQ ID NO: 2238329 - RNA, 19 nt, Artificial Sequence
  Description of Artificial Sequence: Synthetic oligonucleotide
auguagaaguaguuguccc

SEQ ID NO: 2238330 - RNA, 19 nt, Artificial Sequence
  Description of Artificial Sequence: Synthetic oligonucleotide
uguagaaguaguugucccg

SEQ ID NO: 2238331 - RNA, 19 nt, Artificial Sequence
  Description of Artificial Sequence: Synthetic oligonucleotide
acaucguaguccaugaugc

SEQ ID NO: 2238332 - RNA, 19 nt, Artificial Sequence
  Description of Artificial Sequence: Synthetic oligonucleotide
ucuuccuguucauugaugc

SEQ ID NO: 2238333 - RNA, 19 nt, Artificial Sequence
  Description of Artificial Sequence: Synthetic oligonucleotide
aaugacagugacccaaacu

SEQ ID NO: 2238334 - RNA, 19 nt, Artificial Sequence
  Description of Artificial Sequence: Synthetic oligonucleotide
cuaggcaggguucauaacc

SEQ ID NO: 2238335 - RNA, 19 nt, Artificial Sequence
  Description of Artificial Sequence: Synthetic oligonucleotide
cacacugccagcaaugagc

SEQ ID NO: 2238336 - RNA, 19 nt, Artificial Sequence
  Description of Artificial Sequence: Synthetic oligonucleotide
accccuaggagccuggccc

SEQ ID NO: 2238337 - RNA, 19 nt, Artificial Sequence
  Description of Artificial Sequence: Synthetic oligonucleotide
augcuaugaauguagaagu

SEQ ID NO: 2238338 - RNA, 19 nt, Artificial Sequence
  Description of Artificial Sequence: Synthetic oligonucleotide
ugagcauaugccaaaugcu

SEQ ID NO: 2238339 - RNA, 19 nt, Artificial Sequence
  Description of Artificial Sequence: Synthetic oligonucleotide
ugaagcacaucguagucca

SEQ ID NO: 2238340 - RNA, 19 nt, Artificial Sequence
  Description of Artificial Sequence: Synthetic oligonucleotide
gacgcugcgaaccaggcug

SEQ ID NO: 2238341 - RNA, 19 nt, Artificial Sequence
  Description of Artificial Sequence: Synthetic oligonucleotide
acacacaaggacuccauag

SEQ ID NO: 2238342 - RNA, 19 nt, Artificial Sequence
  Description of Artificial Sequence: Synthetic oligonucleotide
ucacacacacacaaggacu

SEQ ID NO: 2238343 - RNA, 19 nt, Artificial Sequence
  Description of Artificial Sequence: Synthetic oligonucleotide
cacucacacacacacaagg

SEQ ID NO: 2238344 - RNA, 19 nt, Artificial Sequence
  Description of Artificial Sequence: Synthetic oligonucleotide
agggcgaagagacuggguc

SEQ ID NO: 2238345 - RNA, 19 nt, Artificial Sequence
  Description of Artificial Sequence: Synthetic oligonucleotide
ucucaggaaauucucugug

SEQ ID NO: 2238346 - RNA, 19 nt, Artificial Sequence
  Description of Artificial Sequence: Synthetic oligonucleotide
cacacacucacacacacac

SEQ ID NO: 2238347 - RNA, 19 nt, Artificial Sequence
  Description of Artificial Sequence: Synthetic oligonucleotide
gaaauucucugugucuugg

SEQ ID NO: 2238348 - RNA, 19 nt, Artificial Sequence
  Description of Artificial Sequence: Synthetic oligonucleotide
gucuuuaagaaacacaacu

SEQ ID NO: 2238349 - RNA, 19 nt, Artificial Sequence
  Description of Artificial Sequence: Synthetic oligonucleotide
aguaggacggcacugccug

SEQ ID NO: 2238350 - RNA, 19 nt, Artificial Sequence
  Description of Artificial Sequence: Synthetic oligonucleotide
gacauuaaggagccccagg

SEQ ID NO: 2238351 - RNA, 19 nt, Artificial Sequence
  Description of Artificial Sequence: Synthetic oligonucleotide
acauuaaggagccccagga

SEQ ID NO: 2238352 - RNA, 19 nt, Artificial Sequence
  Description of Artificial Sequence: Synthetic oligonucleotide
ucaggaaauucucuguguc

SEQ ID NO: 2238353 - RNA, 19 nt, Artificial Sequence
  Description of Artificial Sequence: Synthetic oligonucleotide
guggccaagaucccaaggg

SEQ ID NO: 2238354 - RNA, 19 nt, Artificial Sequence
  Description of Artificial Sequence: Synthetic oligonucleotide
cucacacacacacacacac

SEQ ID NO: 2238355 - RNA, 19 nt, Artificial Sequence
  Description of Artificial Sequence: Synthetic oligonucleotide
cacacacacacucacacac

SEQ ID NO: 2238356 - RNA, 19 nt, Artificial Sequence
  Description of Artificial Sequence: Synthetic oligonucleotide
uccuagaagggcuccacag

SEQ ID NO: 2238357 - RNA, 19 nt, Artificial Sequence
  Description of Artificial Sequence: Synthetic oligonucleotide
ugucccuuguuccuagaag

SEQ ID NO: 2238358 - RNA, 19 nt, Artificial Sequence
  Description of Artificial Sequence: Synthetic oligonucleotide
accacgaaagcauacagua

SEQ ID NO: 2238359 - RNA, 19 nt, Artificial Sequence
  Description of Artificial Sequence: Synthetic oligonucleotide
acuccauaggcucucagga

SEQ ID NO: 2238360 - RNA, 19 nt, Artificial Sequence
  Description of Artificial Sequence: Synthetic oligonucleotide
gaagagacuggguccaagc

SEQ ID NO: 2238361 - RNA, 19 nt, Artificial Sequence
  Description of Artificial Sequence: Synthetic oligonucleotide
cacacaaggacuccauagg

SEQ ID NO: 2238362 - RNA, 19 nt, Artificial Sequence
  Description of Artificial Sequence: Synthetic oligonucleotide
uaggcaggguucauaaccc

SEQ ID NO: 2238363 - RNA, 19 nt, Artificial Sequence
  Description of Artificial Sequence: Synthetic oligonucleotide
cacacacacacacacacac

SEQ ID NO: 2238364 - RNA, 19 nt, Artificial Sequence
  Description of Artificial Sequence: Synthetic oligonucleotide
uugaucacaggcugcaaac

SEQ ID NO: 2238365 - RNA, 19 nt, Artificial Sequence
  Description of Artificial Sequence: Synthetic oligonucleotide
uuaaggagccccaggaaau

SEQ ID NO: 2238366 - RNA, 19 nt, Artificial Sequence
  Description of Artificial Sequence: Synthetic oligonucleotide
aagcauacaguaggacggc

SEQ ID NO: 2238367 - RNA, 19 nt, Artificial Sequence
  Description of Artificial Sequence: Synthetic oligonucleotide
cucucucacacacacacac

SEQ ID NO: 2238368 - RNA, 19 nt, Artificial Sequence
  Description of Artificial Sequence: Synthetic oligonucleotide
gaaaacagucauccuugag

SEQ ID NO: 2238369 - RNA, 19 nt, Artificial Sequence
  Description of Artificial Sequence: Synthetic oligonucleotide
uccauaggcucucaggaaa

SEQ ID NO: 2238370 - RNA, 19 nt, Artificial Sequence
  Description of Artificial Sequence: Synthetic oligonucleotide
aagagacuggguccaagca

SEQ ID NO: 2238371 - RNA, 19 nt, Artificial Sequence
  Description of Artificial Sequence: Synthetic oligonucleotide
uguggccaagaucccaagg

SEQ ID NO: 2238372 - RNA, 19 nt, Artificial Sequence
  Description of Artificial Sequence: Synthetic oligonucleotide
agcagcauagccccuagca

SEQ ID NO: 2238373 - RNA, 19 nt, Artificial Sequence
  Description of Artificial Sequence: Synthetic oligonucleotide
uaggcucucaggaaauucu

SEQ ID NO: 2238374 - RNA, 19 nt, Artificial Sequence
  Description of Artificial Sequence: Synthetic oligonucleotide
acccaaacugacauuaagg

SEQ ID NO: 2238375 - RNA, 19 nt, Artificial Sequence
  Description of Artificial Sequence: Synthetic oligonucleotide
acugccugcaauaaggcug

SEQ ID NO: 2238376 - RNA, 19 nt, Artificial Sequence
  Description of Artificial Sequence: Synthetic oligonucleotide
cucucacacacacacacac

SEQ ID NO: 2238377 - RNA, 19 nt, Artificial Sequence
  Description of Artificial Sequence: Synthetic oligonucleotide
acaguaggacggcacugcc

SEQ ID NO: 2238378 - RNA, 19 nt, Artificial Sequence
  Description of Artificial Sequence: Synthetic oligonucleotide
gaacugaagcacaucguag

SEQ ID NO: 2238379 - RNA, 19 nt, Artificial Sequence
  Description of Artificial Sequence: Synthetic oligonucleotide
agcugguaaccgcagcccc

SEQ ID NO: 2238380 - RNA, 19 nt, Artificial Sequence
  Description of Artificial Sequence: Synthetic oligonucleotide
ugcacagcugguaaccgca

SEQ ID NO: 2238381 - RNA, 19 nt, Artificial Sequence
  Description of Artificial Sequence: Synthetic oligonucleotide
cacacacacacacucacac

SEQ ID NO: 2238382 - RNA, 19 nt, Artificial Sequence
  Description of Artificial Sequence: Synthetic oligonucleotide
cacacacacacacacacuc

SEQ ID NO: 2238383 - RNA, 19 nt, Artificial Sequence
  Description of Artificial Sequence: Synthetic oligonucleotide
cucacacacacacaaggac

SEQ ID NO: 2238384 - RNA, 19 nt, Artificial Sequence
  Description of Artificial Sequence: Synthetic oligonucleotide
cacaucguaguccaugaug

SEQ ID NO: 2238385 - RNA, 19 nt, Artificial Sequence
  Description of Artificial Sequence: Synthetic oligonucleotide
caugaugcagaaaaccaca

SEQ ID NO: 2238386 - RNA, 19 nt, Artificial Sequence
  Description of Artificial Sequence: Synthetic oligonucleotide
ugaucacaggcugcaaacg

SEQ ID NO: 2238387 - RNA, 19 nt, Artificial Sequence
  Description of Artificial Sequence: Synthetic oligonucleotide
aagcagguuccagaguccg

SEQ ID NO: 2238388 - RNA, 19 nt, Artificial Sequence
  Description of Artificial Sequence: Synthetic oligonucleotide
augcacagcugguaaccgc

SEQ ID NO: 2238389 - RNA, 19 nt, Artificial Sequence
  Description of Artificial Sequence: Synthetic oligonucleotide
ugaugcacagcugguaacc

SEQ ID NO: 2238390 - RNA, 19 nt, Artificial Sequence
  Description of Artificial Sequence: Synthetic oligonucleotide
uggccaagaucccaagggc

SEQ ID NO: 2238391 - RNA, 19 nt, Artificial Sequence
  Description of Artificial Sequence: Synthetic oligonucleotide
aauacaacaccugcuugau

SEQ ID NO: 2238392 - RNA, 19 nt, Artificial Sequence
  Description of Artificial Sequence: Synthetic oligonucleotide
uccuguucauugaugcaca

SEQ ID NO: 2238393 - RNA, 19 nt, Artificial Sequence
  Description of Artificial Sequence: Synthetic oligonucleotide
cucucucucucucacacac

SEQ ID NO: 2238394 - RNA, 19 nt, Artificial Sequence
  Description of Artificial Sequence: Synthetic oligonucleotide
caggaggaacccuaggcag

SEQ ID NO: 2238395 - RNA, 19 nt, Artificial Sequence
  Description of Artificial Sequence: Synthetic oligonucleotide
aacgagccauggcaaugac

SEQ ID NO: 2238396 - RNA, 19 nt, Artificial Sequence
  Description of Artificial Sequence: Synthetic oligonucleotide
aguagccccuccugggccc

SEQ ID NO: 2238397 - RNA, 19 nt, Artificial Sequence
  Description of Artificial Sequence: Synthetic oligonucleotide
ugggaaggccuccuagucc

SEQ ID NO: 2238398 - RNA, 19 nt, Artificial Sequence
  Description of Artificial Sequence: Synthetic oligonucleotide
agguuccagaguccgugcc

SEQ ID NO: 2238399 - RNA, 19 nt, Artificial Sequence
  Description of Artificial Sequence: Synthetic oligonucleotide
agucccugaaaacagucau

SEQ ID NO: 2238400 - RNA, 19 nt, Artificial Sequence
  Description of Artificial Sequence: Synthetic oligonucleotide
cauggcaaugacagugacc

SEQ ID NO: 2238401 - RNA, 19 nt, Artificial Sequence
  Description of Artificial Sequence: Synthetic oligonucleotide
ugcaaacgagccauggcaa

SEQ ID NO: 2238402 - RNA, 19 nt, Artificial Sequence
  Description of Artificial Sequence: Synthetic oligonucleotide
uaccacgaaagcauacagu

SEQ ID NO: 2238403 - RNA, 19 nt, Artificial Sequence
  Description of Artificial Sequence: Synthetic oligonucleotide
uugguggguaacagguugc

SEQ ID NO: 2238404 - RNA, 19 nt, Artificial Sequence
  Description of Artificial Sequence: Synthetic oligonucleotide
auaggcucucaggaaauuc

SEQ ID NO: 2238405 - RNA, 19 nt, Artificial Sequence
  Description of Artificial Sequence: Synthetic oligonucleotide
ucauugaugcacagcuggu

SEQ ID NO: 2238406 - RNA, 19 nt, Artificial Sequence
  Description of Artificial Sequence: Synthetic oligonucleotide
gguucauaaccccuaggag

SEQ ID NO: 2238407 - RNA, 19 nt, Artificial Sequence
  Description of Artificial Sequence: Synthetic oligonucleotide
cacacacacacaaggacuc

SEQ ID NO: 2238408 - RNA, 19 nt, Artificial Sequence
  Description of Artificial Sequence: Synthetic oligonucleotide
aaacgagccauggcaauga

SEQ ID NO: 2238409 - RNA, 19 nt, Artificial Sequence
  Description of Artificial Sequence: Synthetic oligonucleotide
cuagucccugaaaacaguc

SEQ ID NO: 2238410 - RNA, 19 nt, Artificial Sequence
  Description of Artificial Sequence: Synthetic oligonucleotide
guaaccgcagccccgggcc

SEQ ID NO: 2238411 - RNA, 19 nt, Artificial Sequence
  Description of Artificial Sequence: Synthetic oligonucleotide
guccaugaugcagaaaacc

SEQ ID NO: 2238412 - RNA, 19 nt, Artificial Sequence
  Description of Artificial Sequence: Synthetic oligonucleotide
ggcacugccugcaauaagg

SEQ ID NO: 2238413 - RNA, 19 nt, Artificial Sequence
  Description of Artificial Sequence: Synthetic oligonucleotide
cucucucucucucucacac

SEQ ID NO: 2238414 - RNA, 19 nt, Artificial Sequence
  Description of Artificial Sequence: Synthetic oligonucleotide
agcacaucguaguccauga

SEQ ID NO: 2238415 - RNA, 19 nt, Artificial Sequence
  Description of Artificial Sequence: Synthetic oligonucleotide
cacacacacacacacucac

SEQ ID NO: 2238416 - RNA, 19 nt, Artificial Sequence
  Description of Artificial Sequence: Synthetic oligonucleotide
gcuaugaauguagaaguag

SEQ ID NO: 2238417 - RNA, 19 nt, Artificial Sequence
  Description of Artificial Sequence: Synthetic oligonucleotide
uccgugccggucaagcugc

SEQ ID NO: 2238418 - RNA, 19 nt, Artificial Sequence
  Description of Artificial Sequence: Synthetic oligonucleotide
auguugguggguaacaggu

SEQ ID NO: 2238419 - RNA, 19 nt, Artificial Sequence
  Description of Artificial Sequence: Synthetic oligonucleotide
cacacacacucacacacac

SEQ ID NO: 2238420 - RNA, 19 nt, Artificial Sequence
  Description of Artificial Sequence: Synthetic oligonucleotide
ugugucuugggaaggccuc

SEQ ID NO: 2238421 - RNA, 19 nt, Artificial Sequence
  Description of Artificial Sequence: Synthetic oligonucleotide
aggcaggguucauaacccc

SEQ ID NO: 2238422 - RNA, 19 nt, Artificial Sequence
  Description of Artificial Sequence: Synthetic oligonucleotide
uacaguaggacggcacugc

SEQ ID NO: 2238423 - RNA, 19 nt, Artificial Sequence
  Description of Artificial Sequence: Synthetic oligonucleotide
ucucacacacacacacaca

SEQ ID NO: 2238424 - RNA, 19 nt, Artificial Sequence
  Description of Artificial Sequence: Synthetic oligonucleotide
uagccccuagcaaauacaa

SEQ ID NO: 2238425 - RNA, 19 nt, Artificial Sequence
  Description of Artificial Sequence: Synthetic oligonucleotide
ugcuaugaauguagaagua

SEQ ID NO: 2238426 - RNA, 19 nt, Artificial Sequence
  Description of Artificial Sequence: Synthetic oligonucleotide
cugaagcacaucguagucc

SEQ ID NO: 2238427 - RNA, 19 nt, Artificial Sequence
  Description of Artificial Sequence: Synthetic oligonucleotide
ucacacacacacacacaca

SEQ ID NO: 2238428 - RNA, 19 nt, Artificial Sequence
  Description of Artificial Sequence: Synthetic oligonucleotide
ccaaacugacauuaaggag

SEQ ID NO: 2238429 - RNA, 19 nt, Artificial Sequence
  Description of Artificial Sequence: Synthetic oligonucleotide
agcaaauacaacaccugcu

SEQ ID NO: 2238430 - RNA, 19 nt, Artificial Sequence
  Description of Artificial Sequence: Synthetic oligonucleotide
auacaacaccugcuugauc

SEQ ID NO: 2238431 - RNA, 19 nt, Artificial Sequence
  Description of Artificial Sequence: Synthetic oligonucleotide
cuaugaauguagaaguagu

SEQ ID NO: 2238432 - RNA, 19 nt, Artificial Sequence
  Description of Artificial Sequence: Synthetic oligonucleotide
auccuugagaaagacugug

SEQ ID NO: 2238433 - RNA, 19 nt, Artificial Sequence
  Description of Artificial Sequence: Synthetic oligonucleotide
cacacucacacacacacaa

SEQ ID NO: 2238434 - RNA, 19 nt, Artificial Sequence
  Description of Artificial Sequence: Synthetic oligonucleotide
ucucucacacacacacaca

SEQ ID NO: 2238435 - RNA, 19 nt, Artificial Sequence
  Description of Artificial Sequence: Synthetic oligonucleotide
acuugucccuuguuccuag

SEQ ID NO: 2238436 - RNA, 19 nt, Artificial Sequence
  Description of Artificial Sequence: Synthetic oligonucleotide
gccccuagcaaauacaaca

SEQ ID NO: 2238437 - RNA, 19 nt, Artificial Sequence
  Description of Artificial Sequence: Synthetic oligonucleotide
cacaggcugcaaacgagcc

SEQ ID NO: 2238438 - RNA, 19 nt, Artificial Sequence
  Description of Artificial Sequence: Synthetic oligonucleotide
aggguucauaaccccuagg

SEQ ID NO: 2238439 - RNA, 19 nt, Artificial Sequence
  Description of Artificial Sequence: Synthetic oligonucleotide
gcugccugggcacagguag

SEQ ID NO: 2238440 - RNA, 19 nt, Artificial Sequence
  Description of Artificial Sequence: Synthetic oligonucleotide
cagucuuggcacgaggcgg

SEQ ID NO: 2238441 - RNA, 19 nt, Artificial Sequence
  Description of Artificial Sequence: Synthetic oligonucleotide
aacagguugccggcgccgg

SEQ ID NO: 2238442 - RNA, 19 nt, Artificial Sequence
  Description of Artificial Sequence: Synthetic oligonucleotide
cuuggcacgaggcggcagc

SEQ ID NO: 2238443 - RNA, 19 nt, Artificial Sequence
  Description of Artificial Sequence: Synthetic oligonucleotide
ugcuugaucacaggcugca

SEQ ID NO: 2238444 - RNA, 19 nt, Artificial Sequence
  Description of Artificial Sequence: Synthetic oligonucleotide
ccugcaauaaggcugccug

SEQ ID NO: 2238445 - RNA, 19 nt, Artificial Sequence
  Description of Artificial Sequence: Synthetic oligonucleotide
ggguucauaaccccuagga

SEQ ID NO: 2238446 - RNA, 19 nt, Artificial Sequence
  Description of Artificial Sequence: Synthetic oligonucleotide
gguagaagagccagcggcg

SEQ ID NO: 2238447 - RNA, 19 nt, Artificial Sequence
  Description of Artificial Sequence: Synthetic oligonucleotide
ucucucuccucucucucuc

SEQ ID NO: 2238448 - RNA, 19 nt, Artificial Sequence
  Description of Artificial Sequence: Synthetic oligonucleotide
aguccaugaugcagaaaac

SEQ ID NO: 2238449 - RNA, 19 nt, Artificial Sequence
  Description of Artificial Sequence: Synthetic oligonucleotide
ugacauuaaggagccccag

SEQ ID NO: 2238450 - RNA, 19 nt, Artificial Sequence
  Description of Artificial Sequence: Synthetic oligonucleotide
gugccggucaagcugcaag

SEQ ID NO: 2238451 - RNA, 19 nt, Artificial Sequence
  Description of Artificial Sequence: Synthetic oligonucleotide
cuggguccaagcagguucc

SEQ ID NO: 2238452 - RNA, 19 nt, Artificial Sequence
  Description of Artificial Sequence: Synthetic oligonucleotide
uuccuagaagggcuccaca

SEQ ID NO: 2238453 - RNA, 19 nt, Artificial Sequence
  Description of Artificial Sequence: Synthetic oligonucleotide
ucucucucucucucucucc

SEQ ID NO: 2238454 - RNA, 19 nt, Artificial Sequence
  Description of Artificial Sequence: Synthetic oligonucleotide
ucguaccacgaaagcauac

SEQ ID NO: 2238455 - RNA, 19 nt, Artificial Sequence
  Description of Artificial Sequence: Synthetic oligonucleotide
ucuccucucucucucucuc

SEQ ID NO: 2238456 - RNA, 19 nt, Artificial Sequence
  Description of Artificial Sequence: Synthetic oligonucleotide
caauaaggcugccugggca

SEQ ID NO: 2238457 - RNA, 19 nt, Artificial Sequence
  Description of Artificial Sequence: Synthetic oligonucleotide
uaacagguugccggcgccg

SEQ ID NO: 2238458 - RNA, 19 nt, Artificial Sequence
  Description of Artificial Sequence: Synthetic oligonucleotide
ucucucucacacacacaca

SEQ ID NO: 2238459 - RNA, 19 nt, Artificial Sequence
  Description of Artificial Sequence: Synthetic oligonucleotide
gucagucuuggcacgaggc

SEQ ID NO: 2238460 - RNA, 19 nt, Artificial Sequence
  Description of Artificial Sequence: Synthetic oligonucleotide
cacaaugccuggcuggguc

SEQ ID NO: 2238461 - RNA, 19 nt, Artificial Sequence
  Description of Artificial Sequence: Synthetic oligonucleotide
gggcccgagcuccagaugg

SEQ ID NO: 2238462 - RNA, 19 nt, Artificial Sequence
  Description of Artificial Sequence: Synthetic oligonucleotide
uugucccuuguuccuagaa

SEQ ID NO: 2238463 - RNA, 19 nt, Artificial Sequence
  Description of Artificial Sequence: Synthetic oligonucleotide
ccaagcagguuccagaguc

SEQ ID NO: 2238464 - RNA, 19 nt, Artificial Sequence
  Description of Artificial Sequence: Synthetic oligonucleotide
uccucucucucucucucuc

SEQ ID NO: 2238465 - RNA, 19 nt, Artificial Sequence
  Description of Artificial Sequence: Synthetic oligonucleotide
acacacacacacucacaca

SEQ ID NO: 2238466 - RNA, 19 nt, Artificial Sequence
  Description of Artificial Sequence: Synthetic oligonucleotide
ccaugaugcagaaaaccac

SEQ ID NO: 2238467 - RNA, 19 nt, Artificial Sequence
  Description of Artificial Sequence: Synthetic oligonucleotide
cgaggcggcagcaagaagc

SEQ ID NO: 2238468 - RNA, 19 nt, Artificial Sequence
  Description of Artificial Sequence: Synthetic oligonucleotide
gaugggacccggcggucag

SEQ ID NO: 2238469 - RNA, 19 nt, Artificial Sequence
  Description of Artificial Sequence: Synthetic oligonucleotide
agcaaugagcauaugccaa

SEQ ID NO: 2238470 - RNA, 19 nt, Artificial Sequence
  Description of Artificial Sequence: Synthetic oligonucleotide
ucucucucucucucucuca

SEQ ID NO: 2238471 - RNA, 19 nt, Artificial Sequence
  Description of Artificial Sequence: Synthetic oligonucleotide
ucucucucuccucucucuc

SEQ ID NO: 2238472 - RNA, 19 nt, Artificial Sequence
  Description of Artificial Sequence: Synthetic oligonucleotide
acaaugccuggcuggguca

SEQ ID NO: 2238473 - RNA, 19 nt, Artificial Sequence
  Description of Artificial Sequence: Synthetic oligonucleotide
caaacgagccauggcaaug

SEQ ID NO: 2238474 - RNA, 19 nt, Artificial Sequence
  Description of Artificial Sequence: Synthetic oligonucleotide
auacaguaggacggcacug

SEQ ID NO: 2238475 - RNA, 19 nt, Artificial Sequence
  Description of Artificial Sequence: Synthetic oligonucleotide
guaacagguugccggcgcc

SEQ ID NO: 2238476 - RNA, 19 nt, Artificial Sequence
  Description of Artificial Sequence: Synthetic oligonucleotide
cucucucucucucucucac

SEQ ID NO: 2238477 - RNA, 19 nt, Artificial Sequence
  Description of Artificial Sequence: Synthetic oligonucleotide
cuaggagccuggcccaaag

SEQ ID NO: 2238478 - RNA, 19 nt, Artificial Sequence
  Description of Artificial Sequence: Synthetic oligonucleotide
guccgugccggucaagcug

SEQ ID NO: 2238479 - RNA, 19 nt, Artificial Sequence
  Description of Artificial Sequence: Synthetic oligonucleotide
cuguucauugaugcacagc

SEQ ID NO: 2238480 - RNA, 19 nt, Artificial Sequence
  Description of Artificial Sequence: Synthetic oligonucleotide
cugacauuaaggagcccca

SEQ ID NO: 2238481 - RNA, 19 nt, Artificial Sequence
  Description of Artificial Sequence: Synthetic oligonucleotide
gaggcggcagcaagaagcc

SEQ ID NO: 2238482 - RNA, 19 nt, Artificial Sequence
  Description of Artificial Sequence: Synthetic oligonucleotide
ucucucucucucacacaca

SEQ ID NO: 2238483 - RNA, 19 nt, Artificial Sequence
  Description of Artificial Sequence: Synthetic oligonucleotide
agccccucucagcuggcac

SEQ ID NO: 2238484 - RNA, 19 nt, Artificial Sequence
  Description of Artificial Sequence: Synthetic oligonucleotide
gaguccgugccggucaagc

SEQ ID NO: 2238485 - RNA, 19 nt, Artificial Sequence
  Description of Artificial Sequence: Synthetic oligonucleotide
cagcauagccccuagcaaa

SEQ ID NO: 2238486 - RNA, 19 nt, Artificial Sequence
  Description of Artificial Sequence: Synthetic oligonucleotide
ucucucucucucucucucu

SEQ ID NO: 2238487 - RNA, 19 nt, Artificial Sequence
  Description of Artificial Sequence: Synthetic oligonucleotide
acucacacacacacaagga

SEQ ID NO: 2238488 - RNA, 19 nt, Artificial Sequence
  Description of Artificial Sequence: Synthetic oligonucleotide
ucucucucucuccucucuc

SEQ ID NO: 2238489 - RNA, 19 nt, Artificial Sequence
  Description of Artificial Sequence: Synthetic oligonucleotide
gguaacagguugccggcgc

SEQ ID NO: 2238490 - RNA, 19 nt, Artificial Sequence
  Description of Artificial Sequence: Synthetic oligonucleotide
ggaaauucucugugucuug

SEQ ID NO: 2238491 - RNA, 19 nt, Artificial Sequence
  Description of Artificial Sequence: Synthetic oligonucleotide
ucucuccucucucucucuc

SEQ ID NO: 2238492 - RNA, 19 nt, Artificial Sequence
  Description of Artificial Sequence: Synthetic oligonucleotide
ugcgaaccaggcuguggcc

SEQ ID NO: 2238493 - RNA, 19 nt, Artificial Sequence
  Description of Artificial Sequence: Synthetic oligonucleotide
uguugguggguaacagguu

SEQ ID NO: 2238494 - RNA, 19 nt, Artificial Sequence
  Description of Artificial Sequence: Synthetic oligonucleotide
ccuugagaaagacuguguc

SEQ ID NO: 2238495 - RNA, 19 nt, Artificial Sequence
  Description of Artificial Sequence: Synthetic oligonucleotide
ucucucucucucucucaca

SEQ ID NO: 2238496 - RNA, 19 nt, Artificial Sequence
  Description of Artificial Sequence: Synthetic oligonucleotide
ucucucucucucucacaca

SEQ ID NO: 2238497 - RNA, 19 nt, Artificial Sequence
  Description of Artificial Sequence: Synthetic oligonucleotide
uguuccuagaagggcucca

SEQ ID NO: 2238498 - RNA, 19 nt, Artificial Sequence
  Description of Artificial Sequence: Synthetic oligonucleotide
ggccaagaucccaagggcg

SEQ ID NO: 2238499 - RNA, 19 nt, Artificial Sequence
  Description of Artificial Sequence: Synthetic oligonucleotide
cugguaaccgcagccccgg

SEQ ID NO: 2238500 - RNA, 19 nt, Artificial Sequence
  Description of Artificial Sequence: Synthetic oligonucleotide
caggguucauaaccccuag

SEQ ID NO: 2238501 - RNA, 19 nt, Artificial Sequence
  Description of Artificial Sequence: Synthetic oligonucleotide
gugacccaaacugacauua

SEQ ID NO: 2238502 - RNA, 19 nt, Artificial Sequence
  Description of Artificial Sequence: Synthetic oligonucleotide
uuguuccuagaagggcucc

SEQ ID NO: 2238503 - RNA, 19 nt, Artificial Sequence
  Description of Artificial Sequence: Synthetic oligonucleotide
acgaaagcauacaguagga

SEQ ID NO: 2238504 - RNA, 19 nt, Artificial Sequence
  Description of Artificial Sequence: Synthetic oligonucleotide
aggcucucaggaaauucuc

SEQ ID NO: 2238505 - RNA, 19 nt, Artificial Sequence
  Description of Artificial Sequence: Synthetic oligonucleotide
caagggcgaagagacuggg

SEQ ID NO: 2238506 - RNA, 19 nt, Artificial Sequence
  Description of Artificial Sequence: Synthetic oligonucleotide
cucucucucucucucucuc

SEQ ID NO: 2238507 - RNA, 19 nt, Artificial Sequence
  Description of Artificial Sequence: Synthetic oligonucleotide
ggucagucuuggcacgagg

SEQ ID NO: 2238508 - RNA, 19 nt, Artificial Sequence
  Description of Artificial Sequence: Synthetic oligonucleotide
aggagccccaggaaaucac

SEQ ID NO: 2238509 - RNA, 19 nt, Artificial Sequence
  Description of Artificial Sequence: Synthetic oligonucleotide
caguagccccuccugggcc

SEQ ID NO: 2238510 - RNA, 19 nt, Artificial Sequence
  Description of Artificial Sequence: Synthetic oligonucleotide
agaagagccagcggcgcca

SEQ ID NO: 2238511 - RNA, 19 nt, Artificial Sequence
  Description of Artificial Sequence: Synthetic oligonucleotide
cucugugucuugggaaggc

SEQ ID NO: 2238512 - RNA, 19 nt, Artificial Sequence
  Description of Artificial Sequence: Synthetic oligonucleotide
ccuagaagggcuccacagc

SEQ ID NO: 2238513 - RNA, 19 nt, Artificial Sequence
  Description of Artificial Sequence: Synthetic oligonucleotide
cuuccuguucauugaugca

SEQ ID NO: 2238514 - RNA, 19 nt, Artificial Sequence
  Description of Artificial Sequence: Synthetic oligonucleotide
cauaaccccuaggagccug

SEQ ID NO: 2238515 - RNA, 19 nt, Artificial Sequence
  Description of Artificial Sequence: Synthetic oligonucleotide
agccccuagcaaauacaac

SEQ ID NO: 2238516 - RNA, 19 nt, Artificial Sequence
  Description of Artificial Sequence: Synthetic oligonucleotide
auaaccccuaggagccugg

SEQ ID NO: 2238517 - RNA, 19 nt, Artificial Sequence
  Description of Artificial Sequence: Synthetic oligonucleotide
gggcgaagagacugggucc

SEQ ID NO: 2238518 - RNA, 19 nt, Artificial Sequence
  Description of Artificial Sequence: Synthetic oligonucleotide
aguccgugccggucaagcu

SEQ ID NO: 2238519 - RNA, 19 nt, Artificial Sequence
  Description of Artificial Sequence: Synthetic oligonucleotide
agugacccaaacugacauu

SEQ ID NO: 2238520 - RNA, 19 nt, Artificial Sequence
  Description of Artificial Sequence: Synthetic oligonucleotide
acagugacccaaacugaca

SEQ ID NO: 2238521 - RNA, 19 nt, Artificial Sequence
  Description of Artificial Sequence: Synthetic oligonucleotide
cauuaaggagccccaggaa

SEQ ID NO: 2238522 - RNA, 19 nt, Artificial Sequence
  Description of Artificial Sequence: Synthetic oligonucleotide
uaaccgcagccccgggccc

SEQ ID NO: 2238523 - RNA, 19 nt, Artificial Sequence
  Description of Artificial Sequence: Synthetic oligonucleotide
agcuccagaugggacccgg

SEQ ID NO: 2238524 - RNA, 19 nt, Artificial Sequence
  Description of Artificial Sequence: Synthetic oligonucleotide
augaugcagaaaaccacaa

SEQ ID NO: 2238525 - RNA, 19 nt, Artificial Sequence
  Description of Artificial Sequence: Synthetic oligonucleotide
agguugccggcgccggacg

SEQ ID NO: 2238526 - RNA, 19 nt, Artificial Sequence
  Description of Artificial Sequence: Synthetic oligonucleotide
caagaucccaagggcgaag

SEQ ID NO: 2238527 - RNA, 19 nt, Artificial Sequence
  Description of Artificial Sequence: Synthetic oligonucleotide
ccacgaaagcauacaguag

SEQ ID NO: 2238528 - RNA, 19 nt, Artificial Sequence
  Description of Artificial Sequence: Synthetic oligonucleotide
ggcacgaggcggcagcaag

SEQ ID NO: 2238529 - RNA, 19 nt, Artificial Sequence
  Description of Artificial Sequence: Synthetic oligonucleotide
gaacccuaggcaggguuca

SEQ ID NO: 2238530 - RNA, 19 nt, Artificial Sequence
  Description of Artificial Sequence: Synthetic oligonucleotide
ccccuagcaaauacaacac

SEQ ID NO: 2238531 - RNA, 19 nt, Artificial Sequence
  Description of Artificial Sequence: Synthetic oligonucleotide
acacucacacacacacaag

SEQ ID NO: 2238532 - RNA, 19 nt, Artificial Sequence
  Description of Artificial Sequence: Synthetic oligonucleotide
cagcugguaaccgcagccc

SEQ ID NO: 2238533 - RNA, 19 nt, Artificial Sequence
  Description of Artificial Sequence: Synthetic oligonucleotide
gcaauaaggcugccugggc

SEQ ID NO: 2238534 - RNA, 19 nt, Artificial Sequence
  Description of Artificial Sequence: Synthetic oligonucleotide
ccgagcuccagaugggacc

SEQ ID NO: 2238535 - RNA, 19 nt, Artificial Sequence
  Description of Artificial Sequence: Synthetic oligonucleotide
cuguggccaagaucccaag

SEQ ID NO: 2238536 - RNA, 19 nt, Artificial Sequence
  Description of Artificial Sequence: Synthetic oligonucleotide
ggcaaugacagugacccaa

SEQ ID NO: 2238537 - RNA, 19 nt, Artificial Sequence
  Description of Artificial Sequence: Synthetic oligonucleotide
cacaaggacuccauaggcu

SEQ ID NO: 2238538 - RNA, 19 nt, Artificial Sequence
  Description of Artificial Sequence: Synthetic oligonucleotide
ugucuugggaaggccuccu

SEQ ID NO: 2238539 - RNA, 19 nt, Artificial Sequence
  Description of Artificial Sequence: Synthetic oligonucleotide
cccuagcaaauacaacacc

SEQ ID NO: 2238540 - RNA, 19 nt, Artificial Sequence
  Description of Artificial Sequence: Synthetic oligonucleotide
uaguugucccgggucguac

SEQ ID NO: 2238541 - RNA, 19 nt, Artificial Sequence
  Description of Artificial Sequence: Synthetic oligonucleotide
guuccuagaagggcuccac

SEQ ID NO: 2238542 - RNA, 19 nt, Artificial Sequence
  Description of Artificial Sequence: Synthetic oligonucleotide
ucucucucucucucuccuc

SEQ ID NO: 2238543 - RNA, 19 nt, Artificial Sequence
  Description of Artificial Sequence: Synthetic oligonucleotide
ccaagggcgaagagacugg

SEQ ID NO: 2238544 - RNA, 19 nt, Artificial Sequence
  Description of Artificial Sequence: Synthetic oligonucleotide
ucucucucucucuccucuc

SEQ ID NO: 2238545 - RNA, 19 nt, Artificial Sequence
  Description of Artificial Sequence: Synthetic oligonucleotide
acacacacacacacacuca

SEQ ID NO: 2238546 - RNA, 19 nt, Artificial Sequence
  Description of Artificial Sequence: Synthetic oligonucleotide
gguggguaacagguugccg

SEQ ID NO: 2238547 - RNA, 19 nt, Artificial Sequence
  Description of Artificial Sequence: Synthetic oligonucleotide
aagcccacacugccagcaa

SEQ ID NO: 2238548 - RNA, 19 nt, Artificial Sequence
  Description of Artificial Sequence: Synthetic oligonucleotide
guugucccgggucguacca

SEQ ID NO: 2238549 - RNA, 19 nt, Artificial Sequence
  Description of Artificial Sequence: Synthetic oligonucleotide
cucaggaaauucucugugu

SEQ ID NO: 2238550 - RNA, 19 nt, Artificial Sequence
  Description of Artificial Sequence: Synthetic oligonucleotide
gguaaccgcagccccgggc

SEQ ID NO: 2238551 - RNA, 19 nt, Artificial Sequence
  Description of Artificial Sequence: Synthetic oligonucleotide
ucuuggcacgaggcggcag

SEQ ID NO: 2238552 - RNA, 19 nt, Artificial Sequence
  Description of Artificial Sequence: Synthetic oligonucleotide
gcaaugagcauaugccaaa

SEQ ID NO: 2238553 - RNA, 19 nt, Artificial Sequence
  Description of Artificial Sequence: Synthetic oligonucleotide
caggaaauucucugugucu

SEQ ID NO: 2238554 - RNA, 19 nt, Artificial Sequence
  Description of Artificial Sequence: Synthetic oligonucleotide
agcauacaguaggacggca

SEQ ID NO: 2238555 - RNA, 19 nt, Artificial Sequence
  Description of Artificial Sequence: Synthetic oligonucleotide
caucguaguccaugaugca

SEQ ID NO: 2238556 - RNA, 19 nt, Artificial Sequence
  Description of Artificial Sequence: Synthetic oligonucleotide
aagggcgaagagacugggu

SEQ ID NO: 2238557 - RNA, 19 nt, Artificial Sequence
  Description of Artificial Sequence: Synthetic oligonucleotide
cccaagggcgaagagacug

SEQ ID NO: 2238558 - RNA, 19 nt, Artificial Sequence
  Description of Artificial Sequence: Synthetic oligonucleotide
gugucuugggaaggccucc

SEQ ID NO: 2238559 - RNA, 19 nt, Artificial Sequence
  Description of Artificial Sequence: Synthetic oligonucleotide
ccuccuagucccugaaaac

SEQ ID NO: 2238560 - RNA, 19 nt, Artificial Sequence
  Description of Artificial Sequence: Synthetic oligonucleotide
acgaggcggcagcaagaag

SEQ ID NO: 2238561 - RNA, 19 nt, Artificial Sequence
  Description of Artificial Sequence: Synthetic oligonucleotide
ggcggucagucuuggcacg

SEQ ID NO: 2238562 - RNA, 19 nt, Artificial Sequence
  Description of Artificial Sequence: Synthetic oligonucleotide
acacacacacacacucaca

SEQ ID NO: 2238563 - RNA, 19 nt, Artificial Sequence
  Description of Artificial Sequence: Synthetic oligonucleotide
acacacacacacacacaca

SEQ ID NO: 2238564 - RNA, 19 nt, Artificial Sequence
  Description of Artificial Sequence: Synthetic oligonucleotide
acacacacacacacacacu

SEQ ID NO: 2238565 - RNA, 19 nt, Artificial Sequence
  Description of Artificial Sequence: Synthetic oligonucleotide
gccuccuagucccugaaaa

SEQ ID NO: 2238566 - RNA, 19 nt, Artificial Sequence
  Description of Artificial Sequence: Synthetic oligonucleotide
aaugccuggcugggucaca

SEQ ID NO: 2238567 - RNA, 19 nt, Artificial Sequence
  Description of Artificial Sequence: Synthetic oligonucleotide
acacacacacucacacaca

SEQ ID NO: 2238568 - RNA, 19 nt, Artificial Sequence
  Description of Artificial Sequence: Synthetic oligonucleotide
auaaggcugccugggcaca

SEQ ID NO: 2238569 - RNA, 19 nt, Artificial Sequence
  Description of Artificial Sequence: Synthetic oligonucleotide
guaggacggcacugccugc

SEQ ID NO: 2238570 - RNA, 19 nt, Artificial Sequence
  Description of Artificial Sequence: Synthetic oligonucleotide
gcugguaaccgcagccccg

SEQ ID NO: 2238571 - RNA, 19 nt, Artificial Sequence
  Description of Artificial Sequence: Synthetic oligonucleotide
cuccauaggcucucaggaa

SEQ ID NO: 2238572 - RNA, 19 nt, Artificial Sequence
  Description of Artificial Sequence: Synthetic oligonucleotide
ucauaaccccuaggagccu

SEQ ID NO: 2238573 - RNA, 19 nt, Artificial Sequence
  Description of Artificial Sequence: Synthetic oligonucleotide
cagugacccaaacugacau

SEQ ID NO: 2238574 - RNA, 19 nt, Artificial Sequence
  Description of Artificial Sequence: Synthetic oligonucleotide
uaaccccuaggagccuggc

SEQ ID NO: 2238575 - RNA, 19 nt, Artificial Sequence
  Description of Artificial Sequence: Synthetic oligonucleotide
agccagcggcgccauguug

SEQ ID NO: 2238576 - RNA, 19 nt, Artificial Sequence
  Description of Artificial Sequence: Synthetic oligonucleotide
ccgggucguaccacgaaag

SEQ ID NO: 2238577 - RNA, 19 nt, Artificial Sequence
  Description of Artificial Sequence: Synthetic oligonucleotide
ccuguucauugaugcacag

SEQ ID NO: 2238578 - RNA, 19 nt, Artificial Sequence
  Description of Artificial Sequence: Synthetic oligonucleotide
ucccgggucguaccacgaa

SEQ ID NO: 2238579 - RNA, 19 nt, Artificial Sequence
  Description of Artificial Sequence: Synthetic oligonucleotide
cagaacugaagcacaucgu

SEQ ID NO: 2238580 - RNA, 19 nt, Artificial Sequence
  Description of Artificial Sequence: Synthetic oligonucleotide
gggucguaccacgaaagca

SEQ ID NO: 2238581 - RNA, 19 nt, Artificial Sequence
  Description of Artificial Sequence: Synthetic oligonucleotide
cauugaugcacagcuggua

SEQ ID NO: 2238582 - RNA, 19 nt, Artificial Sequence
  Description of Artificial Sequence: Synthetic oligonucleotide
uuggcacgaggcggcagca

SEQ ID NO: 2238583 - RNA, 19 nt, Artificial Sequence
  Description of Artificial Sequence: Synthetic oligonucleotide
ccggucaagcugcaaggcc

SEQ ID NO: 2238584 - RNA, 19 nt, Artificial Sequence
  Description of Artificial Sequence: Synthetic oligonucleotide
gcagcauagccccuagcaa

SEQ ID NO: 2238585 - RNA, 19 nt, Artificial Sequence
  Description of Artificial Sequence: Synthetic oligonucleotide
uggcugggucacaggcaug

SEQ ID NO: 2238586 - RNA, 19 nt, Artificial Sequence
  Description of Artificial Sequence: Synthetic oligonucleotide
acacacacucacacacaca

SEQ ID NO: 2238587 - RNA, 19 nt, Artificial Sequence
  Description of Artificial Sequence: Synthetic oligonucleotide
acgagccauggcaaugaca

SEQ ID NO: 2238588 - RNA, 19 nt, Artificial Sequence
  Description of Artificial Sequence: Synthetic oligonucleotide
cauccuugagaaagacugu

SEQ ID NO: 2238589 - RNA, 19 nt, Artificial Sequence
  Description of Artificial Sequence: Synthetic oligonucleotide
acacacucacacacacaca

SEQ ID NO: 2238590 - RNA, 19 nt, Artificial Sequence
  Description of Artificial Sequence: Synthetic oligonucleotide
aggcuguggccaagauccc

SEQ ID NO: 2238591 - RNA, 19 nt, Artificial Sequence
  Description of Artificial Sequence: Synthetic oligonucleotide
uuccagaguccgugccggu

SEQ ID NO: 2238592 - RNA, 19 nt, Artificial Sequence
  Description of Artificial Sequence: Synthetic oligonucleotide
cucucucucucucuccucu

SEQ ID NO: 2238593 - RNA, 19 nt, Artificial Sequence
  Description of Artificial Sequence: Synthetic oligonucleotide
ggacuccauaggcucucag

SEQ ID NO: 2238594 - RNA, 19 nt, Artificial Sequence
  Description of Artificial Sequence: Synthetic oligonucleotide
ggucguaccacgaaagcau

SEQ ID NO: 2238595 - RNA, 19 nt, Artificial Sequence
  Description of Artificial Sequence: Synthetic oligonucleotide
ccggacgcugcgaaccagg

SEQ ID NO: 2238596 - RNA, 19 nt, Artificial Sequence
  Description of Artificial Sequence: Synthetic oligonucleotide
ggguaacagguugccggcg

SEQ ID NO: 2238597 - RNA, 19 nt, Artificial Sequence
  Description of Artificial Sequence: Synthetic oligonucleotide
ccuuguuccuagaagggcu

SEQ ID NO: 2238598 - RNA, 19 nt, Artificial Sequence
  Description of Artificial Sequence: Synthetic oligonucleotide
acagguugccggcgccgga

SEQ ID NO: 2238599 - RNA, 19 nt, Artificial Sequence
  Description of Artificial Sequence: Synthetic oligonucleotide
ggaacccuaggcaggguuc

SEQ ID NO: 2238600 - RNA, 19 nt, Artificial Sequence
  Description of Artificial Sequence: Synthetic oligonucleotide
caaggacuccauaggcucu

SEQ ID NO: 2238601 - RNA, 19 nt, Artificial Sequence
  Description of Artificial Sequence: Synthetic oligonucleotide
ggcgaagagacugggucca

SEQ ID NO: 2238602 - RNA, 19 nt, Artificial Sequence
  Description of Artificial Sequence: Synthetic oligonucleotide
cagguugccggcgccggac

SEQ ID NO: 2238603 - RNA, 19 nt, Artificial Sequence
  Description of Artificial Sequence: Synthetic oligonucleotide
acggcacugccugcaauaa

SEQ ID NO: 2238604 - RNA, 19 nt, Artificial Sequence
  Description of Artificial Sequence: Synthetic oligonucleotide
uugucccgggucguaccac

SEQ ID NO: 2238605 - RNA, 19 nt, Artificial Sequence
  Description of Artificial Sequence: Synthetic oligonucleotide
cuugucccuuguuccuaga

SEQ ID NO: 2238606 - RNA, 19 nt, Artificial Sequence
  Description of Artificial Sequence: Synthetic oligonucleotide
cucucucucucucucuccu

SEQ ID NO: 2238607 - RNA, 19 nt, Artificial Sequence
  Description of Artificial Sequence: Synthetic oligonucleotide
uugccggcgccggacgcug

SEQ ID NO: 2238608 - RNA, 19 nt, Artificial Sequence
  Description of Artificial Sequence: Synthetic oligonucleotide
cacacacaaggacuccaua

SEQ ID NO: 2238609 - RNA, 19 nt, Artificial Sequence
  Description of Artificial Sequence: Synthetic oligonucleotide
cucucucucuccucucucu

SEQ ID NO: 2238610 - RNA, 19 nt, Artificial Sequence
  Description of Artificial Sequence: Synthetic oligonucleotide
cuggcccaaagccccucuc

SEQ ID NO: 2238611 - RNA, 19 nt, Artificial Sequence
  Description of Artificial Sequence: Synthetic oligonucleotide
ccacacugccagcaaugag

SEQ ID NO: 2238612 - RNA, 19 nt, Artificial Sequence
  Description of Artificial Sequence: Synthetic oligonucleotide
aggacggcacugccugcaa

SEQ ID NO: 2238613 - RNA, 19 nt, Artificial Sequence
  Description of Artificial Sequence: Synthetic oligonucleotide
cacugccugcaauaaggcu

SEQ ID NO: 2238614 - RNA, 19 nt, Artificial Sequence
  Description of Artificial Sequence: Synthetic oligonucleotide
aggccuccuagucccugaa

SEQ ID NO: 2238615 - RNA, 19 nt, Artificial Sequence
  Description of Artificial Sequence: Synthetic oligonucleotide
cgaaagcauacaguaggac

SEQ ID NO: 2238616 - RNA, 19 nt, Artificial Sequence
  Description of Artificial Sequence: Synthetic oligonucleotide
ccuaggcaggguucauaac

SEQ ID NO: 2238617 - RNA, 19 nt, Artificial Sequence
  Description of Artificial Sequence: Synthetic oligonucleotide
cggucaagcugcaaggcca

SEQ ID NO: 2238618 - RNA, 19 nt, Artificial Sequence
  Description of Artificial Sequence: Synthetic oligonucleotide
gucguaccacgaaagcaua

SEQ ID NO: 2238619 - RNA, 19 nt, Artificial Sequence
  Description of Artificial Sequence: Synthetic oligonucleotide
cucucucuccucucucucu

SEQ ID NO: 2238620 - RNA, 19 nt, Artificial Sequence
  Description of Artificial Sequence: Synthetic oligonucleotide
ccggcggucagucuuggca

SEQ ID NO: 2238621 - RNA, 19 nt, Artificial Sequence
  Description of Artificial Sequence: Synthetic oligonucleotide
ugggcccacaaggcccagc

SEQ ID NO: 2238622 - RNA, 19 nt, Artificial Sequence
  Description of Artificial Sequence: Synthetic oligonucleotide
agcagguuccagaguccgu

SEQ ID NO: 2238623 - RNA, 19 nt, Artificial Sequence
  Description of Artificial Sequence: Synthetic oligonucleotide
agaguccgugccggucaag

SEQ ID NO: 2238624 - RNA, 19 nt, Artificial Sequence
  Description of Artificial Sequence: Synthetic oligonucleotide
cccuaggcaggguucauaa

SEQ ID NO: 2238625 - RNA, 19 nt, Artificial Sequence
  Description of Artificial Sequence: Synthetic oligonucleotide
gguugccggcgccggacgc

SEQ ID NO: 2238626 - RNA, 19 nt, Artificial Sequence
  Description of Artificial Sequence: Synthetic oligonucleotide
caguaggacggcacugccu

SEQ ID NO: 2238627 - RNA, 19 nt, Artificial Sequence
  Description of Artificial Sequence: Synthetic oligonucleotide
cucucucucucuccucucu

SEQ ID NO: 2238628 - RNA, 19 nt, Artificial Sequence
  Description of Artificial Sequence: Synthetic oligonucleotide
gccggucaagcugcaaggc

SEQ ID NO: 2238629 - RNA, 19 nt, Artificial Sequence
  Description of Artificial Sequence: Synthetic oligonucleotide
cgagcuccagaugggaccc

SEQ ID NO: 2238630 - RNA, 19 nt, Artificial Sequence
  Description of Artificial Sequence: Synthetic oligonucleotide
cccgagcuccagaugggac

SEQ ID NO: 2238631 - RNA, 19 nt, Artificial Sequence
  Description of Artificial Sequence: Synthetic oligonucleotide
cacgaggcggcagcaagaa

SEQ ID NO: 2238632 - RNA, 19 nt, Artificial Sequence
  Description of Artificial Sequence: Synthetic oligonucleotide
gcuguggccaagaucccaa

SEQ ID NO: 2238633 - RNA, 19 nt, Artificial Sequence
  Description of Artificial Sequence: Synthetic oligonucleotide
gcgccggacgcugcgaacc

SEQ ID NO: 2238634 - RNA, 19 nt, Artificial Sequence
  Description of Artificial Sequence: Synthetic oligonucleotide
cucuccucucucucucucu

SEQ ID NO: 2238635 - RNA, 19 nt, Artificial Sequence
  Description of Artificial Sequence: Synthetic oligonucleotide
gccccucucagcuggcaca

SEQ ID NO: 2238636 - RNA, 19 nt, Artificial Sequence
  Description of Artificial Sequence: Synthetic oligonucleotide
guaguccaugaugcagaaa

SEQ ID NO: 2238637 - RNA, 19 nt, Artificial Sequence
  Description of Artificial Sequence: Synthetic oligonucleotide
cggcggucagucuuggcac

SEQ ID NO: 2238638 - RNA, 19 nt, Artificial Sequence
  Description of Artificial Sequence: Synthetic oligonucleotide
acccggcggucagucuugg

SEQ ID NO: 2238639 - RNA, 19 nt, Artificial Sequence
  Description of Artificial Sequence: Synthetic oligonucleotide
cgggucguaccacgaaagc

SEQ ID NO: 2238640 - RNA, 19 nt, Artificial Sequence
  Description of Artificial Sequence: Synthetic oligonucleotide
guaguugucccgggucgua

SEQ ID NO: 2238641 - RNA, 19 nt, Artificial Sequence
  Description of Artificial Sequence: Synthetic oligonucleotide
acccuaggcaggguucaua

SEQ ID NO: 2238642 - RNA, 19 nt, Artificial Sequence
  Description of Artificial Sequence: Synthetic oligonucleotide
ggcccgagcuccagauggg

SEQ ID NO: 2238643 - RNA, 19 nt, Artificial Sequence
  Description of Artificial Sequence: Synthetic oligonucleotide
gcggcgccauguugguggg

SEQ ID NO: 2238644 - RNA, 19 nt, Artificial Sequence
  Description of Artificial Sequence: Synthetic oligonucleotide
cguaccacgaaagcauaca

SEQ ID NO: 2238645 - RNA, 19 nt, Artificial Sequence
  Description of Artificial Sequence: Synthetic oligonucleotide
acgcugcgaaccaggcugu

SEQ ID NO: 2238646 - RNA, 19 nt, Artificial Sequence
  Description of Artificial Sequence: Synthetic oligonucleotide
gcaggguucauaaccccua

SEQ ID NO: 2238647 - RNA, 19 nt, Artificial Sequence
  Description of Artificial Sequence: Synthetic oligonucleotide
uggcacgaggcggcagcaa

SEQ ID NO: 2238648 - RNA, 19 nt, Artificial Sequence
  Description of Artificial Sequence: Synthetic oligonucleotide
gcaaacgagccauggcaau

SEQ ID NO: 2238649 - RNA, 19 nt, Artificial Sequence
  Description of Artificial Sequence: Synthetic oligonucleotide
ggcgccauguuggugggua

SEQ ID NO: 2238650 - RNA, 19 nt, Artificial Sequence
  Description of Artificial Sequence: Synthetic oligonucleotide
ggcucucaggaaauucucu

SEQ ID NO: 2238651 - RNA, 19 nt, Artificial Sequence
  Description of Artificial Sequence: Synthetic oligonucleotide
cucucuccucucucucucu

SEQ ID NO: 2238652 - RNA, 19 nt, Artificial Sequence
  Description of Artificial Sequence: Synthetic oligonucleotide
ggcaggguucauaaccccu

SEQ ID NO: 2238653 - RNA, 19 nt, Artificial Sequence
  Description of Artificial Sequence: Synthetic oligonucleotide
cgaagagacuggguccaag

SEQ ID NO: 2238654 - RNA, 19 nt, Artificial Sequence
  Description of Artificial Sequence: Synthetic oligonucleotide
cggacgcugcgaaccaggc

SEQ ID NO: 2238655 - RNA, 19 nt, Artificial Sequence
  Description of Artificial Sequence: Synthetic oligonucleotide
cuccucucucucucucucu

SEQ ID NO: 2238656 - RNA, 19 nt, Artificial Sequence
  Description of Artificial Sequence: Synthetic oligonucleotide
ccuagucccugaaaacagu

SEQ ID NO: 2238657 - RNA, 19 nt, Artificial Sequence
  Description of Artificial Sequence: Synthetic oligonucleotide
cagaguccgugccggucaa

SEQ ID NO: 2238658 - RNA, 19 nt, Artificial Sequence
  Description of Artificial Sequence: Synthetic oligonucleotide
gcggcagcaagaagcccac

SEQ ID NO: 2238659 - RNA, 19 nt, Artificial Sequence
  Description of Artificial Sequence: Synthetic oligonucleotide
gucuuggcacgaggcggca

SEQ ID NO: 2238660 - RNA, 19 nt, Artificial Sequence
  Description of Artificial Sequence: Synthetic oligonucleotide
gccugggcacagguagaag

SEQ ID NO: 2238661 - RNA, 19 nt, Artificial Sequence
  Description of Artificial Sequence: Synthetic oligonucleotide
ccagaugggacccggcggu

SEQ ID NO: 2238662 - RNA, 19 nt, Artificial Sequence
  Description of Artificial Sequence: Synthetic oligonucleotide
gucccgggucguaccacga

SEQ ID NO: 2238663 - RNA, 19 nt, Artificial Sequence
  Description of Artificial Sequence: Synthetic oligonucleotide
gcacgaggcggcagcaaga

SEQ ID NO: 2238664 - RNA, 19 nt, Artificial Sequence
  Description of Artificial Sequence: Synthetic oligonucleotide
ggcgccggacgcugcgaac

SEQ ID NO: 2238665 - RNA, 19 nt, Artificial Sequence
  Description of Artificial Sequence: Synthetic oligonucleotide
ggacccggcggucagucuu

SEQ ID NO: 2238666 - RNA, 19 nt, Artificial Sequence
  Description of Artificial Sequence: Synthetic oligonucleotide
gaagcacaucguaguccau

SEQ ID NO: 2238667 - RNA, 19 nt, Artificial Sequence
  Description of Artificial Sequence: Synthetic oligonucleotide
cagcggcgccauguuggug

SEQ ID NO: 2238668 - RNA, 19 nt, Artificial Sequence
  Description of Artificial Sequence: Synthetic oligonucleotide
gaagagccagcggcgccau

SEQ ID NO: 2238669 - RNA, 19 nt, Artificial Sequence
  Description of Artificial Sequence: Synthetic oligonucleotide
cauaggcucucaggaaauu

SEQ ID NO: 2238670 - RNA, 19 nt, Artificial Sequence
  Description of Artificial Sequence: Synthetic oligonucleotide
ccauaggcucucaggaaau

SEQ ID NO: 2238671 - RNA, 19 nt, Artificial Sequence
  Description of Artificial Sequence: Synthetic oligonucleotide
guugccggcgccggacgcu

SEQ ID NO: 2238672 - RNA, 19 nt, Artificial Sequence
  Description of Artificial Sequence: Synthetic oligonucleotide
cggcacugccugcaauaag

SEQ ID NO: 2238673 - RNA, 19 nt, Artificial Sequence
  Description of Artificial Sequence: Synthetic oligonucleotide
ccacagccccaggaggaac

SEQ ID NO: 2238674 - RNA, 19 nt, Artificial Sequence
  Description of Artificial Sequence: Synthetic oligonucleotide
ggccuccuagucccugaaa

SEQ ID NO: 2238675 - RNA, 19 nt, Artificial Sequence
  Description of Artificial Sequence: Synthetic oligonucleotide
cccgggucguaccacgaaa

SEQ ID NO: 2238676 - RNA, 19 nt, Artificial Sequence
  Description of Artificial Sequence: Synthetic oligonucleotide
gccggacgcugcgaaccag

SEQ ID NO: 2238677 - RNA, 19 nt, Artificial Sequence
  Description of Artificial Sequence: Synthetic oligonucleotide
gaggaacccuaggcagggu

SEQ ID NO: 2238678 - RNA, 19 nt, Artificial Sequence
  Description of Artificial Sequence: Synthetic oligonucleotide
ccucucagcuggcacagau

SEQ ID NO: 2238679 - RNA, 19 nt, Artificial Sequence
  Description of Artificial Sequence: Synthetic oligonucleotide
gcggucagucuuggcacga

SEQ ID NO: 2238680 - RNA, 19 nt, Artificial Sequence
  Description of Artificial Sequence: Synthetic oligonucleotide
ggucaagcugcaaggccau

SEQ ID NO: 2238681 - RNA, 19 nt, Artificial Sequence
  Description of Artificial Sequence: Synthetic oligonucleotide
cgccauguugguggguaac

SEQ ID NO: 2238682 - RNA, 19 nt, Artificial Sequence
  Description of Artificial Sequence: Synthetic oligonucleotide
gcccgagcuccagauggga

SEQ ID NO: 2238683 - RNA, 19 nt, Artificial Sequence
  Description of Artificial Sequence: Synthetic oligonucleotide
gcgccauguugguggguaa

SEQ ID NO: 2238684 - RNA, 19 nt, Artificial Sequence
  Description of Artificial Sequence: Synthetic oligonucleotide
gccugcaauaaggcugccu

SEQ ID NO: 2238685 - RNA, 19 nt, Artificial Sequence
  Description of Artificial Sequence: Synthetic oligonucleotide
cccggcggucagucuuggc

SEQ ID NO: 2238686 - RNA, 19 nt, Artificial Sequence
  Description of Artificial Sequence: Synthetic oligonucleotide
ccucucucucucucucucu

SEQ ID NO: 2238687 - RNA, 19 nt, Artificial Sequence
  Description of Artificial Sequence: Synthetic oligonucleotide
ggacggcacugccugcaau

SEQ ID NO: 2238688 - RNA, 19 nt, Artificial Sequence
  Description of Artificial Sequence: Synthetic oligonucleotide
cggucagucuuggcacgag

SEQ ID NO: 2238689 - RNA, 19 nt, Artificial Sequence
  Description of Artificial Sequence: Synthetic oligonucleotide
cacugccagcaaugagcau

SEQ ID NO: 2238690 - RNA, 19 nt, Artificial Sequence
  Description of Artificial Sequence: Synthetic oligonucleotide
gcgaagagacuggguccaa

SEQ ID NO: 2238691 - RNA, 19 nt, Artificial Sequence
  Description of Artificial Sequence: Synthetic oligonucleotide
ggcugccugggcacaggua

SEQ ID NO: 2238692 - RNA, 19 nt, Artificial Sequence
  Description of Artificial Sequence: Synthetic oligonucleotide
cgggcccgagcuccagaug

SEQ ID NO: 2238693 - RNA, 19 nt, Artificial Sequence
  Description of Artificial Sequence: Synthetic oligonucleotide
ccagcggcgccauguuggu

SEQ ID NO: 2238694 - RNA, 19 nt, Artificial Sequence
  Description of Artificial Sequence: Synthetic oligonucleotide
ccuaggagccuggcccaaa

SEQ ID NO: 2238695 - RNA, 19 nt, Artificial Sequence
  Description of Artificial Sequence: Synthetic oligonucleotide
gggacccggcggucagucu

SEQ ID NO: 2238696 - RNA, 19 nt, Artificial Sequence
  Description of Artificial Sequence: Synthetic oligonucleotide
ccuggcccaaagccccucu

SEQ ID NO: 2238697 - RNA, 19 nt, Artificial Sequence
  Description of Artificial Sequence: Synthetic oligonucleotide
ggacagcagcauagccccu

SEQ ID NO: 2238698 - RNA, 19 nt, Artificial Sequence
  Description of Artificial Sequence: Synthetic oligonucleotide
cgccggacgcugcgaacca

SEQ ID NO: 2238699 - RNA, 19 nt, Artificial Sequence
  Description of Artificial Sequence: Synthetic oligonucleotide
gcugggucacaggcaugau

SEQ ID NO: 2238700 - RNA, 19 nt, Artificial Sequence
  Description of Artificial Sequence: Synthetic oligonucleotide
ccgugccggucaagcugca

SEQ ID NO: 2238701 - RNA, 19 nt, Artificial Sequence
  Description of Artificial Sequence: Synthetic oligonucleotide
ccacaaugccuggcugggu

SEQ ID NO: 2238702 - RNA, 19 nt, Artificial Sequence
  Description of Artificial Sequence: Synthetic oligonucleotide
cccuaggagccuggcccaa

SEQ ID NO: 2238703 - RNA, 19 nt, Artificial Sequence
  Description of Artificial Sequence: Synthetic oligonucleotide
cgugccggucaagcugcaa

SEQ ID NO: 2238704 - RNA, 19 nt, Artificial Sequence
  Description of Artificial Sequence: Synthetic oligonucleotide
cggcgccauguuggugggu

SEQ ID NO: 2238705 - RNA, 19 nt, Artificial Sequence
  Description of Artificial Sequence: Synthetic oligonucleotide
aauguugagagcuuggcuc

SEQ ID NO: 2238706 - RNA, 19 nt, Artificial Sequence
  Description of Artificial Sequence: Synthetic oligonucleotide
aaauccgaauuacauaggc

SEQ ID NO: 2238707 - RNA, 19 nt, Artificial Sequence
  Description of Artificial Sequence: Synthetic oligonucleotide
ucaaauccgaauuacauag

SEQ ID NO: 2238708 - RNA, 19 nt, Artificial Sequence
  Description of Artificial Sequence: Synthetic oligonucleotide
ucaacaaugaaccauuagc

SEQ ID NO: 2238709 - RNA, 19 nt, Artificial Sequence
  Description of Artificial Sequence: Synthetic oligonucleotide
acaaugaaccauuagcugc

SEQ ID NO: 2238710 - RNA, 19 nt, Artificial Sequence
  Description of Artificial Sequence: Synthetic oligonucleotide
aacucaucuagauugacag

SEQ ID NO: 2238711 - RNA, 19 nt, Artificial Sequence
  Description of Artificial Sequence: Synthetic oligonucleotide
aacacuucguucuuuuggc

SEQ ID NO: 2238712 - RNA, 19 nt, Artificial Sequence
  Description of Artificial Sequence: Synthetic oligonucleotide
aaacacuucguucuuuugg

SEQ ID NO: 2238713 - RNA, 19 nt, Artificial Sequence
  Description of Artificial Sequence: Synthetic oligonucleotide
uaaaguuggauuuaguaac

SEQ ID NO: 2238714 - RNA, 19 nt, Artificial Sequence
  Description of Artificial Sequence: Synthetic oligonucleotide
aaaauucuucugucaagcc

SEQ ID NO: 2238715 - RNA, 19 nt, Artificial Sequence
  Description of Artificial Sequence: Synthetic oligonucleotide
cucaaacucaucuagauug

SEQ ID NO: 2238716 - RNA, 19 nt, Artificial Sequence
  Description of Artificial Sequence: Synthetic oligonucleotide
aaugacaccucaucaacuc

SEQ ID NO: 2238717 - RNA, 19 nt, Artificial Sequence
  Description of Artificial Sequence: Synthetic oligonucleotide
caauguacaucucagaacc

SEQ ID NO: 2238718 - RNA, 19 nt, Artificial Sequence
  Description of Artificial Sequence: Synthetic oligonucleotide
uaggaaucgaaccuggagg

SEQ ID NO: 2238719 - RNA, 19 nt, Artificial Sequence
  Description of Artificial Sequence: Synthetic oligonucleotide
uuccucagaauaaaguugg

SEQ ID NO: 2238720 - RNA, 19 nt, Artificial Sequence
  Description of Artificial Sequence: Synthetic oligonucleotide
gauccaaagacacaagaag

SEQ ID NO: 2238721 - RNA, 19 nt, Artificial Sequence
  Description of Artificial Sequence: Synthetic oligonucleotide
uuuaguaacuuccugucca

SEQ ID NO: 2238722 - RNA, 19 nt, Artificial Sequence
  Description of Artificial Sequence: Synthetic oligonucleotide
aauacagacagccucucga

SEQ ID NO: 2238723 - RNA, 19 nt, Artificial Sequence
  Description of Artificial Sequence: Synthetic oligonucleotide
agagcuauggaaugacacc

SEQ ID NO: 2238724 - RNA, 19 nt, Artificial Sequence
  Description of Artificial Sequence: Synthetic oligonucleotide
aacaaugaaccauuagcug

SEQ ID NO: 2238725 - RNA, 19 nt, Artificial Sequence
  Description of Artificial Sequence: Synthetic oligonucleotide
aggaaucgaaccuggaggc

SEQ ID NO: 2238726 - RNA, 19 nt, Artificial Sequence
  Description of Artificial Sequence: Synthetic oligonucleotide
aucaacucgaauuccuggc

SEQ ID NO: 2238727 - RNA, 19 nt, Artificial Sequence
  Description of Artificial Sequence: Synthetic oligonucleotide
uuuggggagcuucaaaucc

SEQ ID NO: 2238728 - RNA, 19 nt, Artificial Sequence
  Description of Artificial Sequence: Synthetic oligonucleotide
uguacaguaaguuccucag

SEQ ID NO: 2238729 - RNA, 19 nt, Artificial Sequence
  Description of Artificial Sequence: Synthetic oligonucleotide
auaaaguuggauuuaguaa

SEQ ID NO: 2238730 - RNA, 19 nt, Artificial Sequence
  Description of Artificial Sequence: Synthetic oligonucleotide
ucucagaaccacuaggaag

SEQ ID NO: 2238731 - RNA, 19 nt, Artificial Sequence
  Description of Artificial Sequence: Synthetic oligonucleotide
uuaggaaucgaaccuggag

SEQ ID NO: 2238732 - RNA, 19 nt, Artificial Sequence
  Description of Artificial Sequence: Synthetic oligonucleotide
uccgaugagacucaaacuc

SEQ ID NO: 2238733 - RNA, 19 nt, Artificial Sequence
  Description of Artificial Sequence: Synthetic oligonucleotide
cugcaaucaauacagacag

SEQ ID NO: 2238734 - RNA, 19 nt, Artificial Sequence
  Description of Artificial Sequence: Synthetic oligonucleotide
aaggccugagaguugagag

SEQ ID NO: 2238735 - RNA, 19 nt, Artificial Sequence
  Description of Artificial Sequence: Synthetic oligonucleotide
gauccgaugagacucaaac

SEQ ID NO: 2238736 - RNA, 19 nt, Artificial Sequence
  Description of Artificial Sequence: Synthetic oligonucleotide
aauuacauaggcguugcug

SEQ ID NO: 2238737 - RNA, 19 nt, Artificial Sequence
  Description of Artificial Sequence: Synthetic oligonucleotide
cuucagguaaaucuggagc

SEQ ID NO: 2238738 - RNA, 19 nt, Artificial Sequence
  Description of Artificial Sequence: Synthetic oligonucleotide
uagauugacagagcuaugg

SEQ ID NO: 2238739 - RNA, 19 nt, Artificial Sequence
  Description of Artificial Sequence: Synthetic oligonucleotide
aggaaggaagcucuugagc

SEQ ID NO: 2238740 - RNA, 19 nt, Artificial Sequence
  Description of Artificial Sequence: Synthetic oligonucleotide
gaauuccuggcccauaacc

SEQ ID NO: 2238741 - RNA, 19 nt, Artificial Sequence
  Description of Artificial Sequence: Synthetic oligonucleotide
auccgaauuacauaggcgu

SEQ ID NO: 2238742 - RNA, 19 nt, Artificial Sequence
  Description of Artificial Sequence: Synthetic oligonucleotide
ugaacagaggaagagccgg

SEQ ID NO: 2238743 - RNA, 19 nt, Artificial Sequence
  Description of Artificial Sequence: Synthetic oligonucleotide
cuuaacuucagguaaaucu

SEQ ID NO: 2238744 - RNA, 19 nt, Artificial Sequence
  Description of Artificial Sequence: Synthetic oligonucleotide
accucaucaacucgaauuc

SEQ ID NO: 2238745 - RNA, 19 nt, Artificial Sequence
  Description of Artificial Sequence: Synthetic oligonucleotide
ugaaccauuagcugcaauc

SEQ ID NO: 2238746 - RNA, 19 nt, Artificial Sequence
  Description of Artificial Sequence: Synthetic oligonucleotide
gauuuaguaacuuccuguc

SEQ ID NO: 2238747 - RNA, 19 nt, Artificial Sequence
  Description of Artificial Sequence: Synthetic oligonucleotide
aguuggauuuaguaacuuc

SEQ ID NO: 2238748 - RNA, 19 nt, Artificial Sequence
  Description of Artificial Sequence: Synthetic oligonucleotide
ucugucaagccaauguaca

SEQ ID NO: 2238749 - RNA, 19 nt, Artificial Sequence
  Description of Artificial Sequence: Synthetic oligonucleotide
cucaucuagauugacagag

SEQ ID NO: 2238750 - RNA, 19 nt, Artificial Sequence
  Description of Artificial Sequence: Synthetic oligonucleotide
ugcagacgaauguugagag

SEQ ID NO: 2238751 - RNA, 19 nt, Artificial Sequence
  Description of Artificial Sequence: Synthetic oligonucleotide
aauccgaauuacauaggcg

SEQ ID NO: 2238752 - RNA, 19 nt, Artificial Sequence
  Description of Artificial Sequence: Synthetic oligonucleotide
acaaaauucuucugucaag

SEQ ID NO: 2238753 - RNA, 19 nt, Artificial Sequence
  Description of Artificial Sequence: Synthetic oligonucleotide
aauggggagggcccauggc

SEQ ID NO: 2238754 - RNA, 19 nt, Artificial Sequence
  Description of Artificial Sequence: Synthetic oligonucleotide
gaaggaagcucuugagccg

SEQ ID NO: 2238755 - RNA, 19 nt, Artificial Sequence
  Description of Artificial Sequence: Synthetic oligonucleotide
ugaaggacagccuuaggaa

SEQ ID NO: 2238756 - RNA, 19 nt, Artificial Sequence
  Description of Artificial Sequence: Synthetic oligonucleotide
ucagcucucccugaggugg

SEQ ID NO: 2238757 - RNA, 19 nt, Artificial Sequence
  Description of Artificial Sequence: Synthetic oligonucleotide
uuggggagcuucaaauccg

SEQ ID NO: 2238758 - RNA, 19 nt, Artificial Sequence
  Description of Artificial Sequence: Synthetic oligonucleotide
auacagacagccucucgac

SEQ ID NO: 2238759 - RNA, 19 nt, Artificial Sequence
  Description of Artificial Sequence: Synthetic oligonucleotide
ccaccuucaacaaugaacc

SEQ ID NO: 2238760 - RNA, 19 nt, Artificial Sequence
  Description of Artificial Sequence: Synthetic oligonucleotide
ucaacucgaauuccuggcc

SEQ ID NO: 2238761 - RNA, 19 nt, Artificial Sequence
  Description of Artificial Sequence: Synthetic oligonucleotide
caucaacucgaauuccugg

SEQ ID NO: 2238762 - RNA, 19 nt, Artificial Sequence
  Description of Artificial Sequence: Synthetic oligonucleotide
uugacagagcuauggaaug

SEQ ID NO: 2238763 - RNA, 19 nt, Artificial Sequence
  Description of Artificial Sequence: Synthetic oligonucleotide
acauaggcguugcuguggc

SEQ ID NO: 2238764 - RNA, 19 nt, Artificial Sequence
  Description of Artificial Sequence: Synthetic oligonucleotide
uuaguaacuuccuguccag

SEQ ID NO: 2238765 - RNA, 19 nt, Artificial Sequence
  Description of Artificial Sequence: Synthetic oligonucleotide
uucugucaagccaauguac

SEQ ID NO: 2238766 - RNA, 19 nt, Artificial Sequence
  Description of Artificial Sequence: Synthetic oligonucleotide
cauccaucuggaaaaggcc

SEQ ID NO: 2238767 - RNA, 19 nt, Artificial Sequence
  Description of Artificial Sequence: Synthetic oligonucleotide
ucaucaacucgaauuccug

SEQ ID NO: 2238768 - RNA, 19 nt, Artificial Sequence
  Description of Artificial Sequence: Synthetic oligonucleotide
aaccucucaguucugacuu

SEQ ID NO: 2238769 - RNA, 19 nt, Artificial Sequence
  Description of Artificial Sequence: Synthetic oligonucleotide
uguacaucucagaaccacu

SEQ ID NO: 2238770 - RNA, 19 nt, Artificial Sequence
  Description of Artificial Sequence: Synthetic oligonucleotide
ugucgcacccacuugugag

SEQ ID NO: 2238771 - RNA, 19 nt, Artificial Sequence
  Description of Artificial Sequence: Synthetic oligonucleotide
gcaaucaauacagacagcc

SEQ ID NO: 2238772 - RNA, 19 nt, Artificial Sequence
  Description of Artificial Sequence: Synthetic oligonucleotide
cagccuuaggaaucgaacc

SEQ ID NO: 2238773 - RNA, 19 nt, Artificial Sequence
  Description of Artificial Sequence: Synthetic oligonucleotide
uccugagacaggcugauua

SEQ ID NO: 2238774 - RNA, 19 nt, Artificial Sequence
  Description of Artificial Sequence: Synthetic oligonucleotide
auauccuuguuuggggagc

SEQ ID NO: 2238775 - RNA, 19 nt, Artificial Sequence
  Description of Artificial Sequence: Synthetic oligonucleotide
auuccuggcccauaaccuc

SEQ ID NO: 2238776 - RNA, 19 nt, Artificial Sequence
  Description of Artificial Sequence: Synthetic oligonucleotide
aauuccuggcccauaaccu

SEQ ID NO: 2238777 - RNA, 19 nt, Artificial Sequence
  Description of Artificial Sequence: Synthetic oligonucleotide
cagagcuauggaaugacac

SEQ ID NO: 2238778 - RNA, 19 nt, Artificial Sequence
  Description of Artificial Sequence: Synthetic oligonucleotide
ugacaccucaucaacucga

SEQ ID NO: 2238779 - RNA, 19 nt, Artificial Sequence
  Description of Artificial Sequence: Synthetic oligonucleotide
uuggacauccaccuucaac

SEQ ID NO: 2238780 - RNA, 19 nt, Artificial Sequence
  Description of Artificial Sequence: Synthetic oligonucleotide
acaccuuaacuucagguaa

SEQ ID NO: 2238781 - RNA, 19 nt, Artificial Sequence
  Description of Artificial Sequence: Synthetic oligonucleotide
ucaucuagauugacagagc

SEQ ID NO: 2238782 - RNA, 19 nt, Artificial Sequence
  Description of Artificial Sequence: Synthetic oligonucleotide
agcuucaaauccgaauuac

SEQ ID NO: 2238783 - RNA, 19 nt, Artificial Sequence
  Description of Artificial Sequence: Synthetic oligonucleotide
aggccugagaguugagagc

SEQ ID NO: 2238784 - RNA, 19 nt, Artificial Sequence
  Description of Artificial Sequence: Synthetic oligonucleotide
caauuccugagacaggcug

SEQ ID NO: 2238785 - RNA, 19 nt, Artificial Sequence
  Description of Artificial Sequence: Synthetic oligonucleotide
ucagaugucgcacccacuu

SEQ ID NO: 2238786 - RNA, 19 nt, Artificial Sequence
  Description of Artificial Sequence: Synthetic oligonucleotide
ucagguaaaucuggagccg

SEQ ID NO: 2238787 - RNA, 19 nt, Artificial Sequence
  Description of Artificial Sequence: Synthetic oligonucleotide
augacaccucaucaacucg

SEQ ID NO: 2238788 - RNA, 19 nt, Artificial Sequence
  Description of Artificial Sequence: Synthetic oligonucleotide
gauugacagagcuauggaa

SEQ ID NO: 2238789 - RNA, 19 nt, Artificial Sequence
  Description of Artificial Sequence: Synthetic oligonucleotide
aaaguuggauuuaguaacu

SEQ ID NO: 2238790 - RNA, 19 nt, Artificial Sequence
  Description of Artificial Sequence: Synthetic oligonucleotide
acagccuuaggaaucgaac

SEQ ID NO: 2238791 - RNA, 19 nt, Artificial Sequence
  Description of Artificial Sequence: Synthetic oligonucleotide
gaguucaaaggagaggcug

SEQ ID NO: 2238792 - RNA, 19 nt, Artificial Sequence
  Description of Artificial Sequence: Synthetic oligonucleotide
caaauccgaauuacauagg

SEQ ID NO: 2238793 - RNA, 19 nt, Artificial Sequence
  Description of Artificial Sequence: Synthetic oligonucleotide
agagccuccuuguacccgg

SEQ ID NO: 2238794 - RNA, 19 nt, Artificial Sequence
  Description of Artificial Sequence: Synthetic oligonucleotide
aaacucaucuagauugaca

SEQ ID NO: 2238795 - RNA, 19 nt, Artificial Sequence
  Description of Artificial Sequence: Synthetic oligonucleotide
cuguucaacugccugcugc

SEQ ID NO: 2238796 - RNA, 19 nt, Artificial Sequence
  Description of Artificial Sequence: Synthetic oligonucleotide
aguucaaaggagaggcugg

SEQ ID NO: 2238797 - RNA, 19 nt, Artificial Sequence
  Description of Artificial Sequence: Synthetic oligonucleotide
uccaucuggaaaaggccug

SEQ ID NO: 2238798 - RNA, 19 nt, Artificial Sequence
  Description of Artificial Sequence: Synthetic oligonucleotide
uucaacugccugcugcuga

SEQ ID NO: 2238799 - RNA, 19 nt, Artificial Sequence
  Description of Artificial Sequence: Synthetic oligonucleotide
cauauccuuguuuggggag

SEQ ID NO: 2238800 - RNA, 19 nt, Artificial Sequence
  Description of Artificial Sequence: Synthetic oligonucleotide
auccaaagacacaagaaga

SEQ ID NO: 2238801 - RNA, 19 nt, Artificial Sequence
  Description of Artificial Sequence: Synthetic oligonucleotide
gaaccauuagcugcaauca

SEQ ID NO: 2238802 - RNA, 19 nt, Artificial Sequence
  Description of Artificial Sequence: Synthetic oligonucleotide
gcugauuaccccucgaggc

SEQ ID NO: 2238803 - RNA, 19 nt, Artificial Sequence
  Description of Artificial Sequence: Synthetic oligonucleotide
aacucgaauuccuggccca

SEQ ID NO: 2238804 - RNA, 19 nt, Artificial Sequence
  Description of Artificial Sequence: Synthetic oligonucleotide
auaggcguugcuguggcuc

SEQ ID NO: 2238805 - RNA, 19 nt, Artificial Sequence
  Description of Artificial Sequence: Synthetic oligonucleotide
agccuuaggaaucgaaccu

SEQ ID NO: 2238806 - RNA, 19 nt, Artificial Sequence
  Description of Artificial Sequence: Synthetic oligonucleotide
gagagcugguaucucauca

SEQ ID NO: 2238807 - RNA, 19 nt, Artificial Sequence
  Description of Artificial Sequence: Synthetic oligonucleotide
gggaguucaaaggagaggc

SEQ ID NO: 2238808 - RNA, 19 nt, Artificial Sequence
  Description of Artificial Sequence: Synthetic oligonucleotide
agauugacagagcuaugga

SEQ ID NO: 2238809 - RNA, 19 nt, Artificial Sequence
  Description of Artificial Sequence: Synthetic oligonucleotide
cugacuuucccacacaaaa

SEQ ID NO: 2238810 - RNA, 19 nt, Artificial Sequence
  Description of Artificial Sequence: Synthetic oligonucleotide
agggacauccaucuggaaa

SEQ ID NO: 2238811 - RNA, 19 nt, Artificial Sequence
  Description of Artificial Sequence: Synthetic oligonucleotide
ucuugagccguaucucccc

SEQ ID NO: 2238812 - RNA, 19 nt, Artificial Sequence
  Description of Artificial Sequence: Synthetic oligonucleotide
cauuagcugcaaucaauac

SEQ ID NO: 2238813 - RNA, 19 nt, Artificial Sequence
  Description of Artificial Sequence: Synthetic oligonucleotide
gagacaggcugauuacccc

SEQ ID NO: 2238814 - RNA, 19 nt, Artificial Sequence
  Description of Artificial Sequence: Synthetic oligonucleotide
uuacauaggcguugcugug

SEQ ID NO: 2238815 - RNA, 19 nt, Artificial Sequence
  Description of Artificial Sequence: Synthetic oligonucleotide
uaccccucgaggcagggga

SEQ ID NO: 2238816 - RNA, 19 nt, Artificial Sequence
  Description of Artificial Sequence: Synthetic oligonucleotide
uuguacccggggcaggucc

SEQ ID NO: 2238817 - RNA, 19 nt, Artificial Sequence
  Description of Artificial Sequence: Synthetic oligonucleotide
ucgaauuccuggcccauaa

SEQ ID NO: 2238818 - RNA, 19 nt, Artificial Sequence
  Description of Artificial Sequence: Synthetic oligonucleotide
ugagacucaaacucaucua

SEQ ID NO: 2238819 - RNA, 19 nt, Artificial Sequence
  Description of Artificial Sequence: Synthetic oligonucleotide
aaccauuagcugcaaucaa

SEQ ID NO: 2238820 - RNA, 19 nt, Artificial Sequence
  Description of Artificial Sequence: Synthetic oligonucleotide
ugagccguaucuccccuug

SEQ ID NO: 2238821 - RNA, 19 nt, Artificial Sequence
  Description of Artificial Sequence: Synthetic oligonucleotide
caaugaaccauuagcugca

SEQ ID NO: 2238822 - RNA, 19 nt, Artificial Sequence
  Description of Artificial Sequence: Synthetic oligonucleotide
caacucgaauuccuggccc

SEQ ID NO: 2238823 - RNA, 19 nt, Artificial Sequence
  Description of Artificial Sequence: Synthetic oligonucleotide
caggucacaccuuaacuuc

SEQ ID NO: 2238824 - RNA, 19 nt, Artificial Sequence
  Description of Artificial Sequence: Synthetic oligonucleotide
aaggugcagacgaauguug

SEQ ID NO: 2238825 - RNA, 19 nt, Artificial Sequence
  Description of Artificial Sequence: Synthetic oligonucleotide
ggaaugacaccucaucaac

SEQ ID NO: 2238826 - RNA, 19 nt, Artificial Sequence
  Description of Artificial Sequence: Synthetic oligonucleotide
ugucaagccaauguacauc

SEQ ID NO: 2238827 - RNA, 19 nt, Artificial Sequence
  Description of Artificial Sequence: Synthetic oligonucleotide
gaaccacuaggaaggaagc

SEQ ID NO: 2238828 - RNA, 19 nt, Artificial Sequence
  Description of Artificial Sequence: Synthetic oligonucleotide
aucaauacagacagccucu

SEQ ID NO: 2238829 - RNA, 19 nt, Artificial Sequence
  Description of Artificial Sequence: Synthetic oligonucleotide
cuccccuuggacauccacc

SEQ ID NO: 2238830 - RNA, 19 nt, Artificial Sequence
  Description of Artificial Sequence: Synthetic oligonucleotide
aaggaagcucuugagccgu

SEQ ID NO: 2238831 - RNA, 19 nt, Artificial Sequence
  Description of Artificial Sequence: Synthetic oligonucleotide
aguaaguuccucagaauaa

SEQ ID NO: 2238832 - RNA, 19 nt, Artificial Sequence
  Description of Artificial Sequence: Synthetic oligonucleotide
aggcugauuaccccucgag

SEQ ID NO: 2238833 - RNA, 19 nt, Artificial Sequence
  Description of Artificial Sequence: Synthetic oligonucleotide
caauacagacagccucucg

SEQ ID NO: 2238834 - RNA, 19 nt, Artificial Sequence
  Description of Artificial Sequence: Synthetic oligonucleotide
ucaucggagagcugguauc

SEQ ID NO: 2238835 - RNA, 19 nt, Artificial Sequence
  Description of Artificial Sequence: Synthetic oligonucleotide
ucggagagcugguaucuca

SEQ ID NO: 2238836 - RNA, 19 nt, Artificial Sequence
  Description of Artificial Sequence: Synthetic oligonucleotide
gacgaauguugagagcuug

SEQ ID NO: 2238837 - RNA, 19 nt, Artificial Sequence
  Description of Artificial Sequence: Synthetic oligonucleotide
gagggaguucaaaggagag

SEQ ID NO: 2238838 - RNA, 19 nt, Artificial Sequence
  Description of Artificial Sequence: Synthetic oligonucleotide
cucuuccuguucaacugcc

SEQ ID NO: 2238839 - RNA, 19 nt, Artificial Sequence
  Description of Artificial Sequence: Synthetic oligonucleotide
aggguuggcacuaccacag

SEQ ID NO: 2238840 - RNA, 19 nt, Artificial Sequence
  Description of Artificial Sequence: Synthetic oligonucleotide
auccgaugagacucaaacu

SEQ ID NO: 2238841 - RNA, 19 nt, Artificial Sequence
  Description of Artificial Sequence: Synthetic oligonucleotide
cucucgaccacaucuaaaa

SEQ ID NO: 2238842 - RNA, 19 nt, Artificial Sequence
  Description of Artificial Sequence: Synthetic oligonucleotide
gaaucgaaccuggaggcca

SEQ ID NO: 2238843 - RNA, 19 nt, Artificial Sequence
  Description of Artificial Sequence: Synthetic oligonucleotide
gugccgagggaguucaaag

SEQ ID NO: 2238844 - RNA, 19 nt, Artificial Sequence
  Description of Artificial Sequence: Synthetic oligonucleotide
cucagaauaaaguuggauu

SEQ ID NO: 2238845 - RNA, 19 nt, Artificial Sequence
  Description of Artificial Sequence: Synthetic oligonucleotide
caggcacugaaggacagcc

SEQ ID NO: 2238846 - RNA, 19 nt, Artificial Sequence
  Description of Artificial Sequence: Synthetic oligonucleotide
gucgcacccacuugugagg

SEQ ID NO: 2238847 - RNA, 19 nt, Artificial Sequence
  Description of Artificial Sequence: Synthetic oligonucleotide
guaacuuccuguccagauc

SEQ ID NO: 2238848 - RNA, 19 nt, Artificial Sequence
  Description of Artificial Sequence: Synthetic oligonucleotide
ucggucccacugaacagag

SEQ ID NO: 2238849 - RNA, 19 nt, Artificial Sequence
  Description of Artificial Sequence: Synthetic oligonucleotide
gacauccaucuggaaaagg

SEQ ID NO: 2238850 - RNA, 19 nt, Artificial Sequence
  Description of Artificial Sequence: Synthetic oligonucleotide
ggcugauuaccccucgagg

SEQ ID NO: 2238851 - RNA, 19 nt, Artificial Sequence
  Description of Artificial Sequence: Synthetic oligonucleotide
ucaacugccugcugcugac

SEQ ID NO: 2238852 - RNA, 19 nt, Artificial Sequence
  Description of Artificial Sequence: Synthetic oligonucleotide
ucaauuccugagacaggcu

SEQ ID NO: 2238853 - RNA, 19 nt, Artificial Sequence
  Description of Artificial Sequence: Synthetic oligonucleotide
caguaaguuccucagaaua

SEQ ID NO: 2238854 - RNA, 19 nt, Artificial Sequence
  Description of Artificial Sequence: Synthetic oligonucleotide
agccccaauggggagggcc

SEQ ID NO: 2238855 - RNA, 19 nt, Artificial Sequence
  Description of Artificial Sequence: Synthetic oligonucleotide
cuggucauagcgacuggac

SEQ ID NO: 2238856 - RNA, 19 nt, Artificial Sequence
  Description of Artificial Sequence: Synthetic oligonucleotide
gucaagccaauguacaucu

SEQ ID NO: 2238857 - RNA, 19 nt, Artificial Sequence
  Description of Artificial Sequence: Synthetic oligonucleotide
ugaucugggcugcucaauu

SEQ ID NO: 2238858 - RNA, 19 nt, Artificial Sequence
  Description of Artificial Sequence: Synthetic oligonucleotide
ugagaguugagagccuccu

SEQ ID NO: 2238859 - RNA, 19 nt, Artificial Sequence
  Description of Artificial Sequence: Synthetic oligonucleotide
agauccaaagacacaagaa

SEQ ID NO: 2238860 - RNA, 19 nt, Artificial Sequence
  Description of Artificial Sequence: Synthetic oligonucleotide
aaggggaguggcgagggga

SEQ ID NO: 2238861 - RNA, 19 nt, Artificial Sequence
  Description of Artificial Sequence: Synthetic oligonucleotide
cuguacaguaaguuccuca

SEQ ID NO: 2238862 - RNA, 19 nt, Artificial Sequence
  Description of Artificial Sequence: Synthetic oligonucleotide
gacagagcuauggaaugac

SEQ ID NO: 2238863 - RNA, 19 nt, Artificial Sequence
  Description of Artificial Sequence: Synthetic oligonucleotide
uccgaauuacauaggcguu

SEQ ID NO: 2238864 - RNA, 19 nt, Artificial Sequence
  Description of Artificial Sequence: Synthetic oligonucleotide
uggggagcuucaaauccga

SEQ ID NO: 2238865 - RNA, 19 nt, Artificial Sequence
  Description of Artificial Sequence: Synthetic oligonucleotide
aauguacaucucagaacca

SEQ ID NO: 2238866 - RNA, 19 nt, Artificial Sequence
  Description of Artificial Sequence: Synthetic oligonucleotide
cagguaaaucuggagccgg

SEQ ID NO: 2238867 - RNA, 19 nt, Artificial Sequence
  Description of Artificial Sequence: Synthetic oligonucleotide
aaaucuggagccggccuga

SEQ ID NO: 2238868 - RNA, 19 nt, Artificial Sequence
  Description of Artificial Sequence: Synthetic oligonucleotide
ugacagagcuauggaauga

SEQ ID NO: 2238869 - RNA, 19 nt, Artificial Sequence
  Description of Artificial Sequence: Synthetic oligonucleotide
aggacccagccccaauggg

SEQ ID NO: 2238870 - RNA, 19 nt, Artificial Sequence
  Description of Artificial Sequence: Synthetic oligonucleotide
ggaggauccgaugagacuc

SEQ ID NO: 2238871 - RNA, 19 nt, Artificial Sequence
  Description of Artificial Sequence: Synthetic oligonucleotide
ggauuuaguaacuuccugu

SEQ ID NO: 2238872 - RNA, 19 nt, Artificial Sequence
  Description of Artificial Sequence: Synthetic oligonucleotide
aaucgaaccuggaggccag

SEQ ID NO: 2238873 - RNA, 19 nt, Artificial Sequence
  Description of Artificial Sequence: Synthetic oligonucleotide
uggaggauccgaugagacu

SEQ ID NO: 2238874 - RNA, 19 nt, Artificial Sequence
  Description of Artificial Sequence: Synthetic oligonucleotide
cugagaguugagagccucc

SEQ ID NO: 2238875 - RNA, 19 nt, Artificial Sequence
  Description of Artificial Sequence: Synthetic oligonucleotide
aaccacuaggaaggaagcu

SEQ ID NO: 2238876 - RNA, 19 nt, Artificial Sequence
  Description of Artificial Sequence: Synthetic oligonucleotide
gaauguugagagcuuggcu

SEQ ID NO: 2238877 - RNA, 19 nt, Artificial Sequence
  Description of Artificial Sequence: Synthetic oligonucleotide
gaucugggcugcucaauuc

SEQ ID NO: 2238878 - RNA, 19 nt, Artificial Sequence
  Description of Artificial Sequence: Synthetic oligonucleotide
acucaucuagauugacaga

SEQ ID NO: 2238879 - RNA, 19 nt, Artificial Sequence
  Description of Artificial Sequence: Synthetic oligonucleotide
auccaucuggaaaaggccu

SEQ ID NO: 2238880 - RNA, 19 nt, Artificial Sequence
  Description of Artificial Sequence: Synthetic oligonucleotide
acgaauguugagagcuugg

SEQ ID NO: 2238881 - RNA, 19 nt, Artificial Sequence
  Description of Artificial Sequence: Synthetic oligonucleotide
cacaccuuaacuucaggua

SEQ ID NO: 2238882 - RNA, 19 nt, Artificial Sequence
  Description of Artificial Sequence: Synthetic oligonucleotide
cucaucacagucagcucuc

SEQ ID NO: 2238883 - RNA, 19 nt, Artificial Sequence
  Description of Artificial Sequence: Synthetic oligonucleotide
uggcucagaugucgcaccc

SEQ ID NO: 2238884 - RNA, 19 nt, Artificial Sequence
  Description of Artificial Sequence: Synthetic oligonucleotide
uccucagaauaaaguugga

SEQ ID NO: 2238885 - RNA, 19 nt, Artificial Sequence
  Description of Artificial Sequence: Synthetic oligonucleotide
cugagacaggcugauuacc

SEQ ID NO: 2238886 - RNA, 19 nt, Artificial Sequence
  Description of Artificial Sequence: Synthetic oligonucleotide
uccuguucaacugccugcu

SEQ ID NO: 2238887 - RNA, 19 nt, Artificial Sequence
  Description of Artificial Sequence: Synthetic oligonucleotide
aucuggagccggccugagc

SEQ ID NO: 2238888 - RNA, 19 nt, Artificial Sequence
  Description of Artificial Sequence: Synthetic oligonucleotide
ucgcacccacuugugaggg

SEQ ID NO: 2238889 - RNA, 19 nt, Artificial Sequence
  Description of Artificial Sequence: Synthetic oligonucleotide
uggcgaggggaggucaucg

SEQ ID NO: 2238890 - RNA, 19 nt, Artificial Sequence
  Description of Artificial Sequence: Synthetic oligonucleotide
cuagauugacagagcuaug

SEQ ID NO: 2238891 - RNA, 19 nt, Artificial Sequence
  Description of Artificial Sequence: Synthetic oligonucleotide
ccuuaggaaucgaaccugg

SEQ ID NO: 2238892 - RNA, 19 nt, Artificial Sequence
  Description of Artificial Sequence: Synthetic oligonucleotide
gagcuauggaaugacaccu

SEQ ID NO: 2238893 - RNA, 19 nt, Artificial Sequence
  Description of Artificial Sequence: Synthetic oligonucleotide
ggccugagaguugagagcc

SEQ ID NO: 2238894 - RNA, 19 nt, Artificial Sequence
  Description of Artificial Sequence: Synthetic oligonucleotide
ggugcagacgaauguugag

SEQ ID NO: 2238895 - RNA, 19 nt, Artificial Sequence
  Description of Artificial Sequence: Synthetic oligonucleotide
cacugaaggacagccuuag

SEQ ID NO: 2238896 - RNA, 19 nt, Artificial Sequence
  Description of Artificial Sequence: Synthetic oligonucleotide
guucaaaggagaggcuggc

SEQ ID NO: 2238897 - RNA, 19 nt, Artificial Sequence
  Description of Artificial Sequence: Synthetic oligonucleotide
gguuggcacuaccacaggc

SEQ ID NO: 2238898 - RNA, 19 nt, Artificial Sequence
  Description of Artificial Sequence: Synthetic oligonucleotide
aaguuggauuuaguaacuu

SEQ ID NO: 2238899 - RNA, 19 nt, Artificial Sequence
  Description of Artificial Sequence: Synthetic oligonucleotide
ucguucuuuuggcucuggu

SEQ ID NO: 2238900 - RNA, 19 nt, Artificial Sequence
  Description of Artificial Sequence: Synthetic oligonucleotide
accauuagcugcaaucaau

SEQ ID NO: 2238901 - RNA, 19 nt, Artificial Sequence
  Description of Artificial Sequence: Synthetic oligonucleotide
cagacgaauguugagagcu

SEQ ID NO: 2238902 - RNA, 19 nt, Artificial Sequence
  Description of Artificial Sequence: Synthetic oligonucleotide
uccuuguuuggggagcuuc

SEQ ID NO: 2238903 - RNA, 19 nt, Artificial Sequence
  Description of Artificial Sequence: Synthetic oligonucleotide
acuguacaguaaguuccuc

SEQ ID NO: 2238904 - RNA, 19 nt, Artificial Sequence
  Description of Artificial Sequence: Synthetic oligonucleotide
aagagccggaaggggagug

SEQ ID NO: 2238905 - RNA, 19 nt, Artificial Sequence
  Description of Artificial Sequence: Synthetic oligonucleotide
cuucugucaagccaaugua

SEQ ID NO: 2238906 - RNA, 19 nt, Artificial Sequence
  Description of Artificial Sequence: Synthetic oligonucleotide
gcucuugagccguaucucc

SEQ ID NO: 2238907 - RNA, 19 nt, Artificial Sequence
  Description of Artificial Sequence: Synthetic oligonucleotide
agccguaucuccccuugga

SEQ ID NO: 2238908 - RNA, 19 nt, Artificial Sequence
  Description of Artificial Sequence: Synthetic oligonucleotide
gaugagacucaaacucauc

SEQ ID NO: 2238909 - RNA, 19 nt, Artificial Sequence
  Description of Artificial Sequence: Synthetic oligonucleotide
gaugucgcacccacuugug

SEQ ID NO: 2238910 - RNA, 19 nt, Artificial Sequence
  Description of Artificial Sequence: Synthetic oligonucleotide
gggcccauggcuugaaggc

SEQ ID NO: 2238911 - RNA, 19 nt, Artificial Sequence
  Description of Artificial Sequence: Synthetic oligonucleotide
gauuaccccucgaggcagg

SEQ ID NO: 2238912 - RNA, 19 nt, Artificial Sequence
  Description of Artificial Sequence: Synthetic oligonucleotide
cagguggaggauccgauga

SEQ ID NO: 2238913 - RNA, 19 nt, Artificial Sequence
  Description of Artificial Sequence: Synthetic oligonucleotide
aggaagagccggaagggga

SEQ ID NO: 2238914 - RNA, 19 nt, Artificial Sequence
  Description of Artificial Sequence: Synthetic oligonucleotide
agacucaaacucaucuaga

SEQ ID NO: 2238915 - RNA, 19 nt, Artificial Sequence
  Description of Artificial Sequence: Synthetic oligonucleotide
gaggggaggucaucggaga

SEQ ID NO: 2238916 - RNA, 19 nt, Artificial Sequence
  Description of Artificial Sequence: Synthetic oligonucleotide
gugcagacgaauguugaga

SEQ ID NO: 2238917 - RNA, 19 nt, Artificial Sequence
  Description of Artificial Sequence: Synthetic oligonucleotide
cuuaggaaucgaaccugga

SEQ ID NO: 2238918 - RNA, 19 nt, Artificial Sequence
  Description of Artificial Sequence: Synthetic oligonucleotide
aaugaaccauuagcugcaa

SEQ ID NO: 2238919 - RNA, 19 nt, Artificial Sequence
  Description of Artificial Sequence: Synthetic oligonucleotide
ggacccagccccaaugggg

SEQ ID NO: 2238920 - RNA, 19 nt, Artificial Sequence
  Description of Artificial Sequence: Synthetic oligonucleotide
ggagcuucaaauccgaauu

SEQ ID NO: 2238921 - RNA, 19 nt, Artificial Sequence
  Description of Artificial Sequence: Synthetic oligonucleotide
uaguaacuuccuguccaga

SEQ ID NO: 2238922 - RNA, 19 nt, Artificial Sequence
  Description of Artificial Sequence: Synthetic oligonucleotide
ucagaaccacuaggaagga

SEQ ID NO: 2238923 - RNA, 19 nt, Artificial Sequence
  Description of Artificial Sequence: Synthetic oligonucleotide
gaaugacaccucaucaacu

SEQ ID NO: 2238924 - RNA, 19 nt, Artificial Sequence
  Description of Artificial Sequence: Synthetic oligonucleotide
gcuauggaaugacaccuca

SEQ ID NO: 2238925 - RNA, 19 nt, Artificial Sequence
  Description of Artificial Sequence: Synthetic oligonucleotide
guaaaucuggagccggccu

SEQ ID NO: 2238926 - RNA, 19 nt, Artificial Sequence
  Description of Artificial Sequence: Synthetic oligonucleotide
ucaagccaauguacaucuc

SEQ ID NO: 2238927 - RNA, 19 nt, Artificial Sequence
  Description of Artificial Sequence: Synthetic oligonucleotide
augucgcacccacuuguga

SEQ ID NO: 2238928 - RNA, 19 nt, Artificial Sequence
  Description of Artificial Sequence: Synthetic oligonucleotide
ugugagccagggacaucca

SEQ ID NO: 2238929 - RNA, 19 nt, Artificial Sequence
  Description of Artificial Sequence: Synthetic oligonucleotide
auuaccccucgaggcaggg

SEQ ID NO: 2238930 - RNA, 19 nt, Artificial Sequence
  Description of Artificial Sequence: Synthetic oligonucleotide
cagucagcucucccugagg

SEQ ID NO: 2238931 - RNA, 19 nt, Artificial Sequence
  Description of Artificial Sequence: Synthetic oligonucleotide
agagccggaaggggagugg

SEQ ID NO: 2238932 - RNA, 19 nt, Artificial Sequence
  Description of Artificial Sequence: Synthetic oligonucleotide
ggaagagccggaaggggag

SEQ ID NO: 2238933 - RNA, 19 nt, Artificial Sequence
  Description of Artificial Sequence: Synthetic oligonucleotide
ggccagagcaugugugccg

SEQ ID NO: 2238934 - RNA, 19 nt, Artificial Sequence
  Description of Artificial Sequence: Synthetic oligonucleotide
cagaugucgcacccacuug

SEQ ID NO: 2238935 - RNA, 19 nt, Artificial Sequence
  Description of Artificial Sequence: Synthetic oligonucleotide
aguugagagccuccuugua

SEQ ID NO: 2238936 - RNA, 19 nt, Artificial Sequence
  Description of Artificial Sequence: Synthetic oligonucleotide
aaucuggagccggccugag

SEQ ID NO: 2238937 - RNA, 19 nt, Artificial Sequence
  Description of Artificial Sequence: Synthetic oligonucleotide
uuaccccucgaggcagggg

SEQ ID NO: 2238938 - RNA, 19 nt, Artificial Sequence
  Description of Artificial Sequence: Synthetic oligonucleotide
gacccagccccaaugggga

SEQ ID NO: 2238939 - RNA, 19 nt, Artificial Sequence
  Description of Artificial Sequence: Synthetic oligonucleotide
cucuggucauagcgacugg

SEQ ID NO: 2238940 - RNA, 19 nt, Artificial Sequence
  Description of Artificial Sequence: Synthetic oligonucleotide
aggugcagacgaauguuga

SEQ ID NO: 2238941 - RNA, 19 nt, Artificial Sequence
  Description of Artificial Sequence: Synthetic oligonucleotide
cauggcuugaaggccccug

SEQ ID NO: 2238942 - RNA, 19 nt, Artificial Sequence
  Description of Artificial Sequence: Synthetic oligonucleotide
auuccugagacaggcugau

SEQ ID NO: 2238943 - RNA, 19 nt, Artificial Sequence
  Description of Artificial Sequence: Synthetic oligonucleotide
cugacuuugcuguccauau

SEQ ID NO: 2238944 - RNA, 19 nt, Artificial Sequence
  Description of Artificial Sequence: Synthetic oligonucleotide
aucggagagcugguaucuc

SEQ ID NO: 2238945 - RNA, 19 nt, Artificial Sequence
  Description of Artificial Sequence: Synthetic oligonucleotide
caucuggaaaaggccugag

SEQ ID NO: 2238946 - RNA, 19 nt, Artificial Sequence
  Description of Artificial Sequence: Synthetic oligonucleotide
gccucggucccacugaaca

SEQ ID NO: 2238947 - RNA, 19 nt, Artificial Sequence
  Description of Artificial Sequence: Synthetic oligonucleotide
aggucacaccuuaacuuca

SEQ ID NO: 2238948 - RNA, 19 nt, Artificial Sequence
  Description of Artificial Sequence: Synthetic oligonucleotide
gagccggaaggggaguggc

SEQ ID NO: 2238949 - RNA, 19 nt, Artificial Sequence
  Description of Artificial Sequence: Synthetic oligonucleotide
gcucagaugucgcacccac

SEQ ID NO: 2238950 - RNA, 19 nt, Artificial Sequence
  Description of Artificial Sequence: Synthetic oligonucleotide
caccuuaacuucagguaaa

SEQ ID NO: 2238951 - RNA, 19 nt, Artificial Sequence
  Description of Artificial Sequence: Synthetic oligonucleotide
accuuaacuucagguaaau

SEQ ID NO: 2238952 - RNA, 19 nt, Artificial Sequence
  Description of Artificial Sequence: Synthetic oligonucleotide
gugaggguuggcacuacca

SEQ ID NO: 2238953 - RNA, 19 nt, Artificial Sequence
  Description of Artificial Sequence: Synthetic oligonucleotide
ccgagggaguucaaaggag

SEQ ID NO: 2238954 - RNA, 19 nt, Artificial Sequence
  Description of Artificial Sequence: Synthetic oligonucleotide
gcuucaaauccgaauuaca

SEQ ID NO: 2238955 - RNA, 19 nt, Artificial Sequence
  Description of Artificial Sequence: Synthetic oligonucleotide
cucgaggcaggggaaggug

SEQ ID NO: 2238956 - RNA, 19 nt, Artificial Sequence
  Description of Artificial Sequence: Synthetic oligonucleotide
gagggcccauggcuugaag

SEQ ID NO: 2238957 - RNA, 19 nt, Artificial Sequence
  Description of Artificial Sequence: Synthetic oligonucleotide
ccgaauuacauaggcguug

SEQ ID NO: 2238958 - RNA, 19 nt, Artificial Sequence
  Description of Artificial Sequence: Synthetic oligonucleotide
aacuuccuguccagaucca

SEQ ID NO: 2238959 - RNA, 19 nt, Artificial Sequence
  Description of Artificial Sequence: Synthetic oligonucleotide
gccuuaggaaucgaaccug

SEQ ID NO: 2238960 - RNA, 19 nt, Artificial Sequence
  Description of Artificial Sequence: Synthetic oligonucleotide
cccuuggacauccaccuuc

SEQ ID NO: 2238961 - RNA, 19 nt, Artificial Sequence
  Description of Artificial Sequence: Synthetic oligonucleotide
gaaggugcagacgaauguu

SEQ ID NO: 2238962 - RNA, 19 nt, Artificial Sequence
  Description of Artificial Sequence: Synthetic oligonucleotide
cucggucccacugaacaga

SEQ ID NO: 2238963 - RNA, 19 nt, Artificial Sequence
  Description of Artificial Sequence: Synthetic oligonucleotide
gaggauccgaugagacuca

SEQ ID NO: 2238964 - RNA, 19 nt, Artificial Sequence
  Description of Artificial Sequence: Synthetic oligonucleotide
guaucucaucacagucagc

SEQ ID NO: 2238965 - RNA, 19 nt, Artificial Sequence
  Description of Artificial Sequence: Synthetic oligonucleotide
cgaauuacauaggcguugc

SEQ ID NO: 2238966 - RNA, 19 nt, Artificial Sequence
  Description of Artificial Sequence: Synthetic oligonucleotide
gaauuacauaggcguugcu

SEQ ID NO: 2238967 - RNA, 19 nt, Artificial Sequence
  Description of Artificial Sequence: Synthetic oligonucleotide
caguggagggcuccuucuc

SEQ ID NO: 2238968 - RNA, 19 nt, Artificial Sequence
  Description of Artificial Sequence: Synthetic oligonucleotide
ggaaucgaaccuggaggcc

SEQ ID NO: 2238969 - RNA, 19 nt, Artificial Sequence
  Description of Artificial Sequence: Synthetic oligonucleotide
ggcgaggggaggucaucgg

SEQ ID NO: 2238970 - RNA, 19 nt, Artificial Sequence
  Description of Artificial Sequence: Synthetic oligonucleotide
gucaucggagagcugguau

SEQ ID NO: 2238971 - RNA, 19 nt, Artificial Sequence
  Description of Artificial Sequence: Synthetic oligonucleotide
ccgaugagacucaaacuca

SEQ ID NO: 2238972 - RNA, 19 nt, Artificial Sequence
  Description of Artificial Sequence: Synthetic oligonucleotide
caccuucaacaaugaacca

SEQ ID NO: 2238973 - RNA, 19 nt, Artificial Sequence
  Description of Artificial Sequence: Synthetic oligonucleotide
ccggccugagccucggucc

SEQ ID NO: 2238974 - RNA, 19 nt, Artificial Sequence
  Description of Artificial Sequence: Synthetic oligonucleotide
cgaauguugagagcuuggc

SEQ ID NO: 2238975 - RNA, 19 nt, Artificial Sequence
  Description of Artificial Sequence: Synthetic oligonucleotide
cuugugaggguuggcacua

SEQ ID NO: 2238976 - RNA, 19 nt, Artificial Sequence
  Description of Artificial Sequence: Synthetic oligonucleotide
ggcaggucacaccuuaacu

SEQ ID NO: 2238977 - RNA, 19 nt, Artificial Sequence
  Description of Artificial Sequence: Synthetic oligonucleotide
caguucugacuuucccaca

SEQ ID NO: 2238978 - RNA, 19 nt, Artificial Sequence
  Description of Artificial Sequence: Synthetic oligonucleotide
gcaggucacaccuuaacuu

SEQ ID NO: 2238979 - RNA, 19 nt, Artificial Sequence
  Description of Artificial Sequence: Synthetic oligonucleotide
ccucaucaacucgaauucc

SEQ ID NO: 2238980 - RNA, 19 nt, Artificial Sequence
  Description of Artificial Sequence: Synthetic oligonucleotide
uugagccguaucuccccuu

SEQ ID NO: 2238981 - RNA, 19 nt, Artificial Sequence
  Description of Artificial Sequence: Synthetic oligonucleotide
ggguuggcacuaccacagg

SEQ ID NO: 2238982 - RNA, 19 nt, Artificial Sequence
  Description of Artificial Sequence: Synthetic oligonucleotide
gguggaggauccgaugaga

SEQ ID NO: 2238983 - RNA, 19 nt, Artificial Sequence
  Description of Artificial Sequence: Synthetic oligonucleotide
ccguaucuccccuuggaca

SEQ ID NO: 2238984 - RNA, 19 nt, Artificial Sequence
  Description of Artificial Sequence: Synthetic oligonucleotide
cuguggcucagaugucgca

SEQ ID NO: 2238985 - RNA, 19 nt, Artificial Sequence
  Description of Artificial Sequence: Synthetic oligonucleotide
cugucaagccaauguacau

SEQ ID NO: 2238986 - RNA, 19 nt, Artificial Sequence
  Description of Artificial Sequence: Synthetic oligonucleotide
guccagauccaaagacaca

SEQ ID NO: 2238987 - RNA, 19 nt, Artificial Sequence
  Description of Artificial Sequence: Synthetic oligonucleotide
ccucggucccacugaacag

SEQ ID NO: 2238988 - RNA, 19 nt, Artificial Sequence
  Description of Artificial Sequence: Synthetic oligonucleotide
gggagcuucaaauccgaau

SEQ ID NO: 2238989 - RNA, 19 nt, Artificial Sequence
  Description of Artificial Sequence: Synthetic oligonucleotide
gaguggcgaggggagguca

SEQ ID NO: 2238990 - RNA, 19 nt, Artificial Sequence
  Description of Artificial Sequence: Synthetic oligonucleotide
ggcccauggcuugaaggcc

SEQ ID NO: 2238991 - RNA, 19 nt, Artificial Sequence
  Description of Artificial Sequence: Synthetic oligonucleotide
acucgaauuccuggcccau

SEQ ID NO: 2238992 - RNA, 19 nt, Artificial Sequence
  Description of Artificial Sequence: Synthetic oligonucleotide
agacgaauguugagagcuu

SEQ ID NO: 2238993 - RNA, 19 nt, Artificial Sequence
  Description of Artificial Sequence: Synthetic oligonucleotide
cgagggaguucaaaggaga

SEQ ID NO: 2238994 - RNA, 19 nt, Artificial Sequence
  Description of Artificial Sequence: Synthetic oligonucleotide
agccucggucccacugaac

SEQ ID NO: 2238995 - RNA, 19 nt, Artificial Sequence
  Description of Artificial Sequence: Synthetic oligonucleotide
ccuuaacuucagguaaauc

SEQ ID NO: 2238996 - RNA, 19 nt, Artificial Sequence
  Description of Artificial Sequence: Synthetic oligonucleotide
caucggagagcugguaucu

SEQ ID NO: 2238997 - RNA, 19 nt, Artificial Sequence
  Description of Artificial Sequence: Synthetic oligonucleotide
ccugagaguugagagccuc

SEQ ID NO: 2238998 - RNA, 19 nt, Artificial Sequence
  Description of Artificial Sequence: Synthetic oligonucleotide
agacagccucucgaccaca

SEQ ID NO: 2238999 - RNA, 19 nt, Artificial Sequence
  Description of Artificial Sequence: Synthetic oligonucleotide
cuuguacccggggcagguc

SEQ ID NO: 2239000 - RNA, 19 nt, Artificial Sequence
  Description of Artificial Sequence: Synthetic oligonucleotide
ccacaggcacugaaggaca

SEQ ID NO: 2239001 - RNA, 19 nt, Artificial Sequence
  Description of Artificial Sequence: Synthetic oligonucleotide
ccacuaggaaggaagcucu

SEQ ID NO: 2239002 - RNA, 19 nt, Artificial Sequence
  Description of Artificial Sequence: Synthetic oligonucleotide
caggcugauuaccccucga

SEQ ID NO: 2239003 - RNA, 19 nt, Artificial Sequence
  Description of Artificial Sequence: Synthetic oligonucleotide
gagccggccugagccucgg

SEQ ID NO: 2239004 - RNA, 19 nt, Artificial Sequence
  Description of Artificial Sequence: Synthetic oligonucleotide
gggaggucaucggagagcu

SEQ ID NO: 2239005 - RNA, 19 nt, Artificial Sequence
  Description of Artificial Sequence: Synthetic oligonucleotide
gagaguugagagccuccuu

SEQ ID NO: 2239006 - RNA, 19 nt, Artificial Sequence
  Description of Artificial Sequence: Synthetic oligonucleotide
gcgaggggaggucaucgga

SEQ ID NO: 2239007 - RNA, 19 nt, Artificial Sequence
  Description of Artificial Sequence: Synthetic oligonucleotide
agccucucgaccacaucua

SEQ ID NO: 2239008 - RNA, 19 nt, Artificial Sequence
  Description of Artificial Sequence: Synthetic oligonucleotide
guaucuccccuuggacauc

SEQ ID NO: 2239009 - RNA, 19 nt, Artificial Sequence
  Description of Artificial Sequence: Synthetic oligonucleotide
gaagagccggaaggggagu

SEQ ID NO: 2239010 - RNA, 19 nt, Artificial Sequence
  Description of Artificial Sequence: Synthetic oligonucleotide
acccggggcaggucccagu

SEQ ID NO: 2239011 - RNA, 19 nt, Artificial Sequence
  Description of Artificial Sequence: Synthetic oligonucleotide
aguggcgaggggaggucau

SEQ ID NO: 2239012 - RNA, 19 nt, Artificial Sequence
  Description of Artificial Sequence: Synthetic oligonucleotide
aggauccgaugagacucaa

SEQ ID NO: 2239013 - RNA, 19 nt, Artificial Sequence
  Description of Artificial Sequence: Synthetic oligonucleotide
ccggaaggggaguggcgag

SEQ ID NO: 2239014 - RNA, 19 nt, Artificial Sequence
  Description of Artificial Sequence: Synthetic oligonucleotide
gccagagcaugugugccga

SEQ ID NO: 2239015 - RNA, 19 nt, Artificial Sequence
  Description of Artificial Sequence: Synthetic oligonucleotide
cucagaugucgcacccacu

SEQ ID NO: 2239016 - RNA, 19 nt, Artificial Sequence
  Description of Artificial Sequence: Synthetic oligonucleotide
cccaguggagggcuccuuc

SEQ ID NO: 2239017 - RNA, 19 nt, Artificial Sequence
  Description of Artificial Sequence: Synthetic oligonucleotide
gccggccugagccucgguc

SEQ ID NO: 2239018 - RNA, 19 nt, Artificial Sequence
  Description of Artificial Sequence: Synthetic oligonucleotide
uuccugagacaggcugauu

SEQ ID NO: 2239019 - RNA, 19 nt, Artificial Sequence
  Description of Artificial Sequence: Synthetic oligonucleotide
ggagccggccugagccucg

SEQ ID NO: 2239020 - RNA, 19 nt, Artificial Sequence
  Description of Artificial Sequence: Synthetic oligonucleotide
cguugcuguggcucagaug

SEQ ID NO: 2239021 - RNA, 19 nt, Artificial Sequence
  Description of Artificial Sequence: Synthetic oligonucleotide
gugagccagggacauccau

SEQ ID NO: 2239022 - RNA, 19 nt, Artificial Sequence
  Description of Artificial Sequence: Synthetic oligonucleotide
cgaauuccuggcccauaac

SEQ ID NO: 2239023 - RNA, 19 nt, Artificial Sequence
  Description of Artificial Sequence: Synthetic oligonucleotide
gccucucgaccacaucuaa

SEQ ID NO: 2239024 - RNA, 19 nt, Artificial Sequence
  Description of Artificial Sequence: Synthetic oligonucleotide
cagggacauccaucuggaa

SEQ ID NO: 2239025 - RNA, 19 nt, Artificial Sequence
  Description of Artificial Sequence: Synthetic oligonucleotide
cccggggcaggucccagug

SEQ ID NO: 2239026 - RNA, 19 nt, Artificial Sequence
  Description of Artificial Sequence: Synthetic oligonucleotide
cguaucuccccuuggacau

SEQ ID NO: 2239027 - RNA, 19 nt, Artificial Sequence
  Description of Artificial Sequence: Synthetic oligonucleotide
cucgaauuccuggcccaua

SEQ ID NO: 2239028 - RNA, 19 nt, Artificial Sequence
  Description of Artificial Sequence: Synthetic oligonucleotide
ccucucgaccacaucuaaa

SEQ ID NO: 2239029 - RNA, 19 nt, Artificial Sequence
  Description of Artificial Sequence: Synthetic oligonucleotide
ggaguucaaaggagaggcu

SEQ ID NO: 2239030 - RNA, 19 nt, Artificial Sequence
  Description of Artificial Sequence: Synthetic oligonucleotide
cauaggcguugcuguggcu

SEQ ID NO: 2239031 - RNA, 19 nt, Artificial Sequence
  Description of Artificial Sequence: Synthetic oligonucleotide
ccucagaauaaaguuggau

SEQ ID NO: 2239032 - RNA, 19 nt, Artificial Sequence
  Description of Artificial Sequence: Synthetic oligonucleotide
ccggggcaggucccagugg

SEQ ID NO: 2239033 - RNA, 19 nt, Artificial Sequence
  Description of Artificial Sequence: Synthetic oligonucleotide
ggcucagaugucgcaccca

SEQ ID NO: 2239034 - RNA, 19 nt, Artificial Sequence
  Description of Artificial Sequence: Synthetic oligonucleotide
guacccggggcagguccca

SEQ ID NO: 2239035 - RNA, 19 nt, Artificial Sequence
  Description of Artificial Sequence: Synthetic oligonucleotide
gcucucccugagguggcug

SEQ ID NO: 2239036 - RNA, 19 nt, Artificial Sequence
  Description of Artificial Sequence: Synthetic oligonucleotide
caugugugccgagggaguu

SEQ ID NO: 2239037 - RNA, 19 nt, Artificial Sequence
  Description of Artificial Sequence: Synthetic oligonucleotide
ggauccgaugagacucaaa

SEQ ID NO: 2239038 - RNA, 19 nt, Artificial Sequence
  Description of Artificial Sequence: Synthetic oligonucleotide
cacuaggaaggaagcucuu

SEQ ID NO: 2239039 - RNA, 19 nt, Artificial Sequence
  Description of Artificial Sequence: Synthetic oligonucleotide
accccucgaggcaggggaa

SEQ ID NO: 2239040 - RNA, 19 nt, Artificial Sequence
  Description of Artificial Sequence: Synthetic oligonucleotide
aggaagcucuugagccgua

SEQ ID NO: 2239041 - RNA, 19 nt, Artificial Sequence
  Description of Artificial Sequence: Synthetic oligonucleotide
gggaguggcgaggggaggu

SEQ ID NO: 2239042 - RNA, 19 nt, Artificial Sequence
  Description of Artificial Sequence: Synthetic oligonucleotide
ggggaaggugcagacgaau

SEQ ID NO: 2239043 - RNA, 19 nt, Artificial Sequence
  Description of Artificial Sequence: Synthetic oligonucleotide
ggucaucggagagcuggua

SEQ ID NO: 2239044 - RNA, 19 nt, Artificial Sequence
  Description of Artificial Sequence: Synthetic oligonucleotide
cgaugagacucaaacucau

SEQ ID NO: 2239045 - RNA, 19 nt, Artificial Sequence
  Description of Artificial Sequence: Synthetic oligonucleotide
cggccugagccucgguccc

SEQ ID NO: 2239046 - RNA, 19 nt, Artificial Sequence
  Description of Artificial Sequence: Synthetic oligonucleotide
ccaguggagggcuccuucu

SEQ ID NO: 2239047 - RNA, 19 nt, Artificial Sequence
  Description of Artificial Sequence: Synthetic oligonucleotide
agccggccugagccucggu

SEQ ID NO: 2239048 - RNA, 19 nt, Artificial Sequence
  Description of Artificial Sequence: Synthetic oligonucleotide
ccccucgaggcaggggaag

SEQ ID NO: 2239049 - RNA, 19 nt, Artificial Sequence
  Description of Artificial Sequence: Synthetic oligonucleotide
ggggagcuucaaauccgaa

SEQ ID NO: 2239050 - RNA, 19 nt, Artificial Sequence
  Description of Artificial Sequence: Synthetic oligonucleotide
gcacccacuugugaggguu

SEQ ID NO: 2239051 - RNA, 19 nt, Artificial Sequence
  Description of Artificial Sequence: Synthetic oligonucleotide
cagccccaauggggagggc

SEQ ID NO: 2239052 - RNA, 19 nt, Artificial Sequence
  Description of Artificial Sequence: Synthetic oligonucleotide
ggggcaggucacaccuuaa

SEQ ID NO: 2239053 - RNA, 19 nt, Artificial Sequence
  Description of Artificial Sequence: Synthetic oligonucleotide
ccugugagccagggacauc

SEQ ID NO: 2239054 - RNA, 19 nt, Artificial Sequence
  Description of Artificial Sequence: Synthetic oligonucleotide
gcguugcuguggcucagau

SEQ ID NO: 2239055 - RNA, 19 nt, Artificial Sequence
  Description of Artificial Sequence: Synthetic oligonucleotide
ggcucuggucauagcgacu

SEQ ID NO: 2239056 - RNA, 19 nt, Artificial Sequence
  Description of Artificial Sequence: Synthetic oligonucleotide
ccucgaggcaggggaaggu

SEQ ID NO: 2239057 - RNA, 19 nt, Artificial Sequence
  Description of Artificial Sequence: Synthetic oligonucleotide
cgcacccacuugugagggu

SEQ ID NO: 2239058 - RNA, 19 nt, Artificial Sequence
  Description of Artificial Sequence: Synthetic oligonucleotide
uguaguguugaggacaugg

SEQ ID NO: 2239059 - RNA, 19 nt, Artificial Sequence
  Description of Artificial Sequence: Synthetic oligonucleotide
aaaaccggggcuccgacuc

SEQ ID NO: 2239060 - RNA, 19 nt, Artificial Sequence
  Description of Artificial Sequence: Synthetic oligonucleotide
agaaggaugaccuggcguc

SEQ ID NO: 2239061 - RNA, 19 nt, Artificial Sequence
  Description of Artificial Sequence: Synthetic oligonucleotide
uaaagaucaggucuccaag

SEQ ID NO: 2239062 - RNA, 19 nt, Artificial Sequence
  Description of Artificial Sequence: Synthetic oligonucleotide
auacaggcagaguaggagc

SEQ ID NO: 2239063 - RNA, 19 nt, Artificial Sequence
  Description of Artificial Sequence: Synthetic oligonucleotide
ucggagaaaauacuugaag

SEQ ID NO: 2239064 - RNA, 19 nt, Artificial Sequence
  Description of Artificial Sequence: Synthetic oligonucleotide
aauacaggcagaguaggag

SEQ ID NO: 2239065 - RNA, 19 nt, Artificial Sequence
  Description of Artificial Sequence: Synthetic oligonucleotide
caacuuggcaugcagaagg

SEQ ID NO: 2239066 - RNA, 19 nt, Artificial Sequence
  Description of Artificial Sequence: Synthetic oligonucleotide
aaaggccuguacaauacgc

SEQ ID NO: 2239067 - RNA, 19 nt, Artificial Sequence
  Description of Artificial Sequence: Synthetic oligonucleotide
aaaggaggcuggcaaugcc

SEQ ID NO: 2239068 - RNA, 19 nt, Artificial Sequence
  Description of Artificial Sequence: Synthetic oligonucleotide
uguacaauacgccggugag

SEQ ID NO: 2239069 - RNA, 19 nt, Artificial Sequence
  Description of Artificial Sequence: Synthetic oligonucleotide
ucaggcugguuaaagauca

SEQ ID NO: 2239070 - RNA, 19 nt, Artificial Sequence
  Description of Artificial Sequence: Synthetic oligonucleotide
cuagcuagggagaagggag

SEQ ID NO: 2239071 - RNA, 19 nt, Artificial Sequence
  Description of Artificial Sequence: Synthetic oligonucleotide
aauugaguagcugccgacg

SEQ ID NO: 2239072 - RNA, 19 nt, Artificial Sequence
  Description of Artificial Sequence: Synthetic oligonucleotide
uccaggaucacguagcggu

SEQ ID NO: 2239073 - RNA, 19 nt, Artificial Sequence
  Description of Artificial Sequence: Synthetic oligonucleotide
acuuaggucucuaaggagg

SEQ ID NO: 2239074 - RNA, 19 nt, Artificial Sequence
  Description of Artificial Sequence: Synthetic oligonucleotide
aaucacagcacagcccagc

SEQ ID NO: 2239075 - RNA, 19 nt, Artificial Sequence
  Description of Artificial Sequence: Synthetic oligonucleotide
aacgugguuggccauccgg

SEQ ID NO: 2239076 - RNA, 19 nt, Artificial Sequence
  Description of Artificial Sequence: Synthetic oligonucleotide
ucuccaaggaccuugcggu

SEQ ID NO: 2239077 - RNA, 19 nt, Artificial Sequence
  Description of Artificial Sequence: Synthetic oligonucleotide
ucuagaacgugguuggcca

SEQ ID NO: 2239078 - RNA, 19 nt, Artificial Sequence
  Description of Artificial Sequence: Synthetic oligonucleotide
uuaaagaucaggucuccaa

SEQ ID NO: 2239079 - RNA, 19 nt, Artificial Sequence
  Description of Artificial Sequence: Synthetic oligonucleotide
uacaauacgccggugagca

SEQ ID NO: 2239080 - RNA, 19 nt, Artificial Sequence
  Description of Artificial Sequence: Synthetic oligonucleotide
ugggugauggaauugagua

SEQ ID NO: 2239081 - RNA, 19 nt, Artificial Sequence
  Description of Artificial Sequence: Synthetic oligonucleotide
aaggccuguacaauacgcc

SEQ ID NO: 2239082 - RNA, 19 nt, Artificial Sequence
  Description of Artificial Sequence: Synthetic oligonucleotide
aacaccuggaugacggagc

SEQ ID NO: 2239083 - RNA, 19 nt, Artificial Sequence
  Description of Artificial Sequence: Synthetic oligonucleotide
ucacgcuucaggcuguucc

SEQ ID NO: 2239084 - RNA, 19 nt, Artificial Sequence
  Description of Artificial Sequence: Synthetic oligonucleotide
aaauacuugaaggucuccu

SEQ ID NO: 2239085 - RNA, 19 nt, Artificial Sequence
  Description of Artificial Sequence: Synthetic oligonucleotide
gagguaacgggugagcagg

SEQ ID NO: 2239086 - RNA, 19 nt, Artificial Sequence
  Description of Artificial Sequence: Synthetic oligonucleotide
agaaaauacuugaaggucu

SEQ ID NO: 2239087 - RNA, 19 nt, Artificial Sequence
  Description of Artificial Sequence: Synthetic oligonucleotide
uauuccauggaucguucca

SEQ ID NO: 2239088 - RNA, 19 nt, Artificial Sequence
  Description of Artificial Sequence: Synthetic oligonucleotide
ggcaaugacauccacauca

SEQ ID NO: 2239089 - RNA, 19 nt, Artificial Sequence
  Description of Artificial Sequence: Synthetic oligonucleotide
ucggucacaguacacgacc

SEQ ID NO: 2239090 - RNA, 19 nt, Artificial Sequence
  Description of Artificial Sequence: Synthetic oligonucleotide
cuaaggaggaggccuaagg

SEQ ID NO: 2239091 - RNA, 19 nt, Artificial Sequence
  Description of Artificial Sequence: Synthetic oligonucleotide
uaccuagcuagggagaagg

SEQ ID NO: 2239092 - RNA, 19 nt, Artificial Sequence
  Description of Artificial Sequence: Synthetic oligonucleotide
caucaaucacagcacagcc

SEQ ID NO: 2239093 - RNA, 19 nt, Artificial Sequence
  Description of Artificial Sequence: Synthetic oligonucleotide
cuugccaaucaacugcucc

SEQ ID NO: 2239094 - RNA, 19 nt, Artificial Sequence
  Description of Artificial Sequence: Synthetic oligonucleotide
uacacgaccacugugugcu

SEQ ID NO: 2239095 - RNA, 19 nt, Artificial Sequence
  Description of Artificial Sequence: Synthetic oligonucleotide
gcagguauuccauggaucg

SEQ ID NO: 2239096 - RNA, 19 nt, Artificial Sequence
  Description of Artificial Sequence: Synthetic oligonucleotide
gagaaaauacuugaagguc

SEQ ID NO: 2239097 - RNA, 19 nt, Artificial Sequence
  Description of Artificial Sequence: Synthetic oligonucleotide
ucacaguacacgaccacug

SEQ ID NO: 2239098 - RNA, 19 nt, Artificial Sequence
  Description of Artificial Sequence: Synthetic oligonucleotide
gaggccuaaggcuugcugc

SEQ ID NO: 2239099 - RNA, 19 nt, Artificial Sequence
  Description of Artificial Sequence: Synthetic oligonucleotide
ucccguuaggcccaccagg

SEQ ID NO: 2239100 - RNA, 19 nt, Artificial Sequence
  Description of Artificial Sequence: Synthetic oligonucleotide
aggccuguacaauacgccg

SEQ ID NO: 2239101 - RNA, 19 nt, Artificial Sequence
  Description of Artificial Sequence: Synthetic oligonucleotide
aggccuaaggcuugcugcc

SEQ ID NO: 2239102 - RNA, 19 nt, Artificial Sequence
  Description of Artificial Sequence: Synthetic oligonucleotide
aaggcuugcugccuuggug

SEQ ID NO: 2239103 - RNA, 19 nt, Artificial Sequence
  Description of Artificial Sequence: Synthetic oligonucleotide
uguccaggaucacguagcg

SEQ ID NO: 2239104 - RNA, 19 nt, Artificial Sequence
  Description of Artificial Sequence: Synthetic oligonucleotide
cuccuugcggaucucaggg

SEQ ID NO: 2239105 - RNA, 19 nt, Artificial Sequence
  Description of Artificial Sequence: Synthetic oligonucleotide
gucuccaaggaccuugcgg

SEQ ID NO: 2239106 - RNA, 19 nt, Artificial Sequence
  Description of Artificial Sequence: Synthetic oligonucleotide
uccaacuuggcaugcagaa

SEQ ID NO: 2239107 - RNA, 19 nt, Artificial Sequence
  Description of Artificial Sequence: Synthetic oligonucleotide
uagcuagggagaagggagg

SEQ ID NO: 2239108 - RNA, 19 nt, Artificial Sequence
  Description of Artificial Sequence: Synthetic oligonucleotide
uggaugacucgcugcacgg

SEQ ID NO: 2239109 - RNA, 19 nt, Artificial Sequence
  Description of Artificial Sequence: Synthetic oligonucleotide
gacaugguaccugacuuag

SEQ ID NO: 2239110 - RNA, 19 nt, Artificial Sequence
  Description of Artificial Sequence: Synthetic oligonucleotide
gaugacucgcugcacgggc

SEQ ID NO: 2239111 - RNA, 19 nt, Artificial Sequence
  Description of Artificial Sequence: Synthetic oligonucleotide
gagcuuacuggaugacucg

SEQ ID NO: 2239112 - RNA, 19 nt, Artificial Sequence
  Description of Artificial Sequence: Synthetic oligonucleotide
ugugucucggucacaguac

SEQ ID NO: 2239113 - RNA, 19 nt, Artificial Sequence
  Description of Artificial Sequence: Synthetic oligonucleotide
gguguaccuagcuagggag

SEQ ID NO: 2239114 - RNA, 19 nt, Artificial Sequence
  Description of Artificial Sequence: Synthetic oligonucleotide
aggaucacguagcgguacc

SEQ ID NO: 2239115 - RNA, 19 nt, Artificial Sequence
  Description of Artificial Sequence: Synthetic oligonucleotide
aagcacuggacagucagca

SEQ ID NO: 2239116 - RNA, 19 nt, Artificial Sequence
  Description of Artificial Sequence: Synthetic oligonucleotide
uggaauugaguagcugccg

SEQ ID NO: 2239117 - RNA, 19 nt, Artificial Sequence
  Description of Artificial Sequence: Synthetic oligonucleotide
uuacuggaugacucgcugc

SEQ ID NO: 2239118 - RNA, 19 nt, Artificial Sequence
  Description of Artificial Sequence: Synthetic oligonucleotide
gaacccgagccucaguggc

SEQ ID NO: 2239119 - RNA, 19 nt, Artificial Sequence
  Description of Artificial Sequence: Synthetic oligonucleotide
ugcuccaccaggcuggaaa

SEQ ID NO: 2239120 - RNA, 19 nt, Artificial Sequence
  Description of Artificial Sequence: Synthetic oligonucleotide
agaagggaggagguaacgg

SEQ ID NO: 2239121 - RNA, 19 nt, Artificial Sequence
  Description of Artificial Sequence: Synthetic oligonucleotide
caauacgccggugagcagg

SEQ ID NO: 2239122 - RNA, 19 nt, Artificial Sequence
  Description of Artificial Sequence: Synthetic oligonucleotide
cauggaucguuccaacuug

SEQ ID NO: 2239123 - RNA, 19 nt, Artificial Sequence
  Description of Artificial Sequence: Synthetic oligonucleotide
uguuccgcuucaucagccg

SEQ ID NO: 2239124 - RNA, 19 nt, Artificial Sequence
  Description of Artificial Sequence: Synthetic oligonucleotide
gaucguuccaacuuggcau

SEQ ID NO: 2239125 - RNA, 19 nt, Artificial Sequence
  Description of Artificial Sequence: Synthetic oligonucleotide
guguugaggacaugguacc

SEQ ID NO: 2239126 - RNA, 19 nt, Artificial Sequence
  Description of Artificial Sequence: Synthetic oligonucleotide
cuggaugacucgcugcacg

SEQ ID NO: 2239127 - RNA, 19 nt, Artificial Sequence
  Description of Artificial Sequence: Synthetic oligonucleotide
aggaacccgagccucagug

SEQ ID NO: 2239128 - RNA, 19 nt, Artificial Sequence
  Description of Artificial Sequence: Synthetic oligonucleotide
gaauugaguagcugccgac

SEQ ID NO: 2239129 - RNA, 19 nt, Artificial Sequence
  Description of Artificial Sequence: Synthetic oligonucleotide
aggucucuaaggaggaggc

SEQ ID NO: 2239130 - RNA, 19 nt, Artificial Sequence
  Description of Artificial Sequence: Synthetic oligonucleotide
cacugugugcuucauguac

SEQ ID NO: 2239131 - RNA, 19 nt, Artificial Sequence
  Description of Artificial Sequence: Synthetic oligonucleotide
agcuuacuggaugacucgc

SEQ ID NO: 2239132 - RNA, 19 nt, Artificial Sequence
  Description of Artificial Sequence: Synthetic oligonucleotide
cugguuaaagaucaggucu

SEQ ID NO: 2239133 - RNA, 19 nt, Artificial Sequence
  Description of Artificial Sequence: Synthetic oligonucleotide
cuuacuggaugacucgcug

SEQ ID NO: 2239134 - RNA, 19 nt, Artificial Sequence
  Description of Artificial Sequence: Synthetic oligonucleotide
agaacgugguuggccaucc

SEQ ID NO: 2239135 - RNA, 19 nt, Artificial Sequence
  Description of Artificial Sequence: Synthetic oligonucleotide
aucacguagcgguacccuc

SEQ ID NO: 2239136 - RNA, 19 nt, Artificial Sequence
  Description of Artificial Sequence: Synthetic oligonucleotide
augguaccugacuuagguc

SEQ ID NO: 2239137 - RNA, 19 nt, Artificial Sequence
  Description of Artificial Sequence: Synthetic oligonucleotide
ucuccgcggagcuuacugg

SEQ ID NO: 2239138 - RNA, 19 nt, Artificial Sequence
  Description of Artificial Sequence: Synthetic oligonucleotide
ugguguaccuagcuaggga

SEQ ID NO: 2239139 - RNA, 19 nt, Artificial Sequence
  Description of Artificial Sequence: Synthetic oligonucleotide
agguaaaggaggcuggcaa

SEQ ID NO: 2239140 - RNA, 19 nt, Artificial Sequence
  Description of Artificial Sequence: Synthetic oligonucleotide
acaguacacgaccacugug

SEQ ID NO: 2239141 - RNA, 19 nt, Artificial Sequence
  Description of Artificial Sequence: Synthetic oligonucleotide
aucguuccaacuuggcaug

SEQ ID NO: 2239142 - RNA, 19 nt, Artificial Sequence
  Description of Artificial Sequence: Synthetic oligonucleotide
uccaaggaccuugcggucg

SEQ ID NO: 2239143 - RNA, 19 nt, Artificial Sequence
  Description of Artificial Sequence: Synthetic oligonucleotide
aguacacgaccacugugug

SEQ ID NO: 2239144 - RNA, 19 nt, Artificial Sequence
  Description of Artificial Sequence: Synthetic oligonucleotide
ucuuggucucaaacaggag

SEQ ID NO: 2239145 - RNA, 19 nt, Artificial Sequence
  Description of Artificial Sequence: Synthetic oligonucleotide
cuugcggaucucagggugg

SEQ ID NO: 2239146 - RNA, 19 nt, Artificial Sequence
  Description of Artificial Sequence: Synthetic oligonucleotide
gucucggucacaguacacg

SEQ ID NO: 2239147 - RNA, 19 nt, Artificial Sequence
  Description of Artificial Sequence: Synthetic oligonucleotide
augacggagcucuugccug

SEQ ID NO: 2239148 - RNA, 19 nt, Artificial Sequence
  Description of Artificial Sequence: Synthetic oligonucleotide
caaaggccuguacaauacg

SEQ ID NO: 2239149 - RNA, 19 nt, Artificial Sequence
  Description of Artificial Sequence: Synthetic oligonucleotide
agcacacuugccaaucaac

SEQ ID NO: 2239150 - RNA, 19 nt, Artificial Sequence
  Description of Artificial Sequence: Synthetic oligonucleotide
uugguguaccuagcuaggg

SEQ ID NO: 2239151 - RNA, 19 nt, Artificial Sequence
  Description of Artificial Sequence: Synthetic oligonucleotide
aggcuugcugccuuggugu

SEQ ID NO: 2239152 - RNA, 19 nt, Artificial Sequence
  Description of Artificial Sequence: Synthetic oligonucleotide
augaccuggcgucugguga

SEQ ID NO: 2239153 - RNA, 19 nt, Artificial Sequence
  Description of Artificial Sequence: Synthetic oligonucleotide
acagcccagcuguuggaac

SEQ ID NO: 2239154 - RNA, 19 nt, Artificial Sequence
  Description of Artificial Sequence: Synthetic oligonucleotide
ugacucgcugcacgggcgg

SEQ ID NO: 2239155 - RNA, 19 nt, Artificial Sequence
  Description of Artificial Sequence: Synthetic oligonucleotide
gaacaccuggaugacggag

SEQ ID NO: 2239156 - RNA, 19 nt, Artificial Sequence
  Description of Artificial Sequence: Synthetic oligonucleotide
aucuccgcggagcuuacug

SEQ ID NO: 2239157 - RNA, 19 nt, Artificial Sequence
  Description of Artificial Sequence: Synthetic oligonucleotide
ugcacgggcgggauccgcg

SEQ ID NO: 2239158 - RNA, 19 nt, Artificial Sequence
  Description of Artificial Sequence: Synthetic oligonucleotide
ggaacaucuucccaggaga

SEQ ID NO: 2239159 - RNA, 19 nt, Artificial Sequence
  Description of Artificial Sequence: Synthetic oligonucleotide
ugaggcuccacucgcccga

SEQ ID NO: 2239160 - RNA, 19 nt, Artificial Sequence
  Description of Artificial Sequence: Synthetic oligonucleotide
cacgcuucaggcuguuccg

SEQ ID NO: 2239161 - RNA, 19 nt, Artificial Sequence
  Description of Artificial Sequence: Synthetic oligonucleotide
aaaccggggcuccgacucg

SEQ ID NO: 2239162 - RNA, 19 nt, Artificial Sequence
  Description of Artificial Sequence: Synthetic oligonucleotide
guacccucggagaaaauac

SEQ ID NO: 2239163 - RNA, 19 nt, Artificial Sequence
  Description of Artificial Sequence: Synthetic oligonucleotide
agcacuggacagucagcac

SEQ ID NO: 2239164 - RNA, 19 nt, Artificial Sequence
  Description of Artificial Sequence: Synthetic oligonucleotide
uacccucggagaaaauacu

SEQ ID NO: 2239165 - RNA, 19 nt, Artificial Sequence
  Description of Artificial Sequence: Synthetic oligonucleotide
guccucacgcuucaggcug

SEQ ID NO: 2239166 - RNA, 19 nt, Artificial Sequence
  Description of Artificial Sequence: Synthetic oligonucleotide
uguaccuagcuagggagaa

SEQ ID NO: 2239167 - RNA, 19 nt, Artificial Sequence
  Description of Artificial Sequence: Synthetic oligonucleotide
uggaucguuccaacuuggc

SEQ ID NO: 2239168 - RNA, 19 nt, Artificial Sequence
  Description of Artificial Sequence: Synthetic oligonucleotide
aacgggugagcagguaaag

SEQ ID NO: 2239169 - RNA, 19 nt, Artificial Sequence
  Description of Artificial Sequence: Synthetic oligonucleotide
gaugaccuggcgucuggug

SEQ ID NO: 2239170 - RNA, 19 nt, Artificial Sequence
  Description of Artificial Sequence: Synthetic oligonucleotide
ucggccgcuagcccaaucu

SEQ ID NO: 2239171 - RNA, 19 nt, Artificial Sequence
  Description of Artificial Sequence: Synthetic oligonucleotide
uccauggaucguuccaacu

SEQ ID NO: 2239172 - RNA, 19 nt, Artificial Sequence
  Description of Artificial Sequence: Synthetic oligonucleotide
cuugcugccuugguguacc

SEQ ID NO: 2239173 - RNA, 19 nt, Artificial Sequence
  Description of Artificial Sequence: Synthetic oligonucleotide
cccguuaggaacccgagcc

SEQ ID NO: 2239174 - RNA, 19 nt, Artificial Sequence
  Description of Artificial Sequence: Synthetic oligonucleotide
aggcugguuaaagaucagg

SEQ ID NO: 2239175 - RNA, 19 nt, Artificial Sequence
  Description of Artificial Sequence: Synthetic oligonucleotide
cuuaggucucuaaggagga

SEQ ID NO: 2239176 - RNA, 19 nt, Artificial Sequence
  Description of Artificial Sequence: Synthetic oligonucleotide
uuggaacaccuggaugacg

SEQ ID NO: 2239177 - RNA, 19 nt, Artificial Sequence
  Description of Artificial Sequence: Synthetic oligonucleotide
acgccggugagcaggauac

SEQ ID NO: 2239178 - RNA, 19 nt, Artificial Sequence
  Description of Artificial Sequence: Synthetic oligonucleotide
cacuggacagucagcacac

SEQ ID NO: 2239179 - RNA, 19 nt, Artificial Sequence
  Description of Artificial Sequence: Synthetic oligonucleotide
ccagcaagacuucagugcc

SEQ ID NO: 2239180 - RNA, 19 nt, Artificial Sequence
  Description of Artificial Sequence: Synthetic oligonucleotide
guauuccauggaucguucc

SEQ ID NO: 2239181 - RNA, 19 nt, Artificial Sequence
  Description of Artificial Sequence: Synthetic oligonucleotide
ggacagucagcacacuugc

SEQ ID NO: 2239182 - RNA, 19 nt, Artificial Sequence
  Description of Artificial Sequence: Synthetic oligonucleotide
cuguuccgcuucaucagcc

SEQ ID NO: 2239183 - RNA, 19 nt, Artificial Sequence
  Description of Artificial Sequence: Synthetic oligonucleotide
gugccgggcaaugacaucc

SEQ ID NO: 2239184 - RNA, 19 nt, Artificial Sequence
  Description of Artificial Sequence: Synthetic oligonucleotide
ucugcguccucacgcuuca

SEQ ID NO: 2239185 - RNA, 19 nt, Artificial Sequence
  Description of Artificial Sequence: Synthetic oligonucleotide
cuguuggaacaccuggaug

SEQ ID NO: 2239186 - RNA, 19 nt, Artificial Sequence
  Description of Artificial Sequence: Synthetic oligonucleotide
ugaguagcugccgacgguc

SEQ ID NO: 2239187 - RNA, 19 nt, Artificial Sequence
  Description of Artificial Sequence: Synthetic oligonucleotide
cuugcggucgaugucacca

SEQ ID NO: 2239188 - RNA, 19 nt, Artificial Sequence
  Description of Artificial Sequence: Synthetic oligonucleotide
uugaguagcugccgacggu

SEQ ID NO: 2239189 - RNA, 19 nt, Artificial Sequence
  Description of Artificial Sequence: Synthetic oligonucleotide
ucucuaaggaggaggccua

SEQ ID NO: 2239190 - RNA, 19 nt, Artificial Sequence
  Description of Artificial Sequence: Synthetic oligonucleotide
uggcaaugccugcuaggcc

SEQ ID NO: 2239191 - RNA, 19 nt, Artificial Sequence
  Description of Artificial Sequence: Synthetic oligonucleotide
uuaggaacccgagccucag

SEQ ID NO: 2239192 - RNA, 19 nt, Artificial Sequence
  Description of Artificial Sequence: Synthetic oligonucleotide
gucuagaacgugguuggcc

SEQ ID NO: 2239193 - RNA, 19 nt, Artificial Sequence
  Description of Artificial Sequence: Synthetic oligonucleotide
cugccgacggucaggcugg

SEQ ID NO: 2239194 - RNA, 19 nt, Artificial Sequence
  Description of Artificial Sequence: Synthetic oligonucleotide
ucuaaggaggaggccuaag

SEQ ID NO: 2239195 - RNA, 19 nt, Artificial Sequence
  Description of Artificial Sequence: Synthetic oligonucleotide
aggaugaccuggcgucugg

SEQ ID NO: 2239196 - RNA, 19 nt, Artificial Sequence
  Description of Artificial Sequence: Synthetic oligonucleotide
gggugauggaauugaguag

SEQ ID NO: 2239197 - RNA, 19 nt, Artificial Sequence
  Description of Artificial Sequence: Synthetic oligonucleotide
guaacgggugagcagguaa

SEQ ID NO: 2239198 - RNA, 19 nt, Artificial Sequence
  Description of Artificial Sequence: Synthetic oligonucleotide
uucagugccaaaggccugu

SEQ ID NO: 2239199 - RNA, 19 nt, Artificial Sequence
  Description of Artificial Sequence: Synthetic oligonucleotide
cuguacaauacgccgguga

SEQ ID NO: 2239200 - RNA, 19 nt, Artificial Sequence
  Description of Artificial Sequence: Synthetic oligonucleotide
cugggcauugacccuugcc

SEQ ID NO: 2239201 - RNA, 19 nt, Artificial Sequence
  Description of Artificial Sequence: Synthetic oligonucleotide
guuaggcccaccaggaaca

SEQ ID NO: 2239202 - RNA, 19 nt, Artificial Sequence
  Description of Artificial Sequence: Synthetic oligonucleotide
caugguaccugacuuaggu

SEQ ID NO: 2239203 - RNA, 19 nt, Artificial Sequence
  Description of Artificial Sequence: Synthetic oligonucleotide
auggaucguuccaacuugg

SEQ ID NO: 2239204 - RNA, 19 nt, Artificial Sequence
  Description of Artificial Sequence: Synthetic oligonucleotide
uuaggucucuaaggaggag

SEQ ID NO: 2239205 - RNA, 19 nt, Artificial Sequence
  Description of Artificial Sequence: Synthetic oligonucleotide
aggcaaugccucccguuag

SEQ ID NO: 2239206 - RNA, 19 nt, Artificial Sequence
  Description of Artificial Sequence: Synthetic oligonucleotide
gacccuugccucugcgucc

SEQ ID NO: 2239207 - RNA, 19 nt, Artificial Sequence
  Description of Artificial Sequence: Synthetic oligonucleotide
guagcgguacccucggaga

SEQ ID NO: 2239208 - RNA, 19 nt, Artificial Sequence
  Description of Artificial Sequence: Synthetic oligonucleotide
guacacgaccacugugugc

SEQ ID NO: 2239209 - RNA, 19 nt, Artificial Sequence
  Description of Artificial Sequence: Synthetic oligonucleotide
ccugacuuaggucucuaag

SEQ ID NO: 2239210 - RNA, 19 nt, Artificial Sequence
  Description of Artificial Sequence: Synthetic oligonucleotide
uugcggaucucaggguggg

SEQ ID NO: 2239211 - RNA, 19 nt, Artificial Sequence
  Description of Artificial Sequence: Synthetic oligonucleotide
acgggugagcagguaaagg

SEQ ID NO: 2239212 - RNA, 19 nt, Artificial Sequence
  Description of Artificial Sequence: Synthetic oligonucleotide
gaauacaggcagaguagga

SEQ ID NO: 2239213 - RNA, 19 nt, Artificial Sequence
  Description of Artificial Sequence: Synthetic oligonucleotide
gaccuugcggucgauguca

SEQ ID NO: 2239214 - RNA, 19 nt, Artificial Sequence
  Description of Artificial Sequence: Synthetic oligonucleotide
gcugguuaaagaucagguc

SEQ ID NO: 2239215 - RNA, 19 nt, Artificial Sequence
  Description of Artificial Sequence: Synthetic oligonucleotide
aauacgccggugagcagga

SEQ ID NO: 2239216 - RNA, 19 nt, Artificial Sequence
  Description of Artificial Sequence: Synthetic oligonucleotide
uagcgguacccucggagaa

SEQ ID NO: 2239217 - RNA, 19 nt, Artificial Sequence
  Description of Artificial Sequence: Synthetic oligonucleotide
aacuuggcaugcagaagga

SEQ ID NO: 2239218 - RNA, 19 nt, Artificial Sequence
  Description of Artificial Sequence: Synthetic oligonucleotide
auuccauggaucguuccaa

SEQ ID NO: 2239219 - RNA, 19 nt, Artificial Sequence
  Description of Artificial Sequence: Synthetic oligonucleotide
uguugaggacaugguaccu

SEQ ID NO: 2239220 - RNA, 19 nt, Artificial Sequence
  Description of Artificial Sequence: Synthetic oligonucleotide
guacaauacgccggugagc

SEQ ID NO: 2239221 - RNA, 19 nt, Artificial Sequence
  Description of Artificial Sequence: Synthetic oligonucleotide
gugaggcuccacucgcccg

SEQ ID NO: 2239222 - RNA, 19 nt, Artificial Sequence
  Description of Artificial Sequence: Synthetic oligonucleotide
gcugccgacggucaggcug

SEQ ID NO: 2239223 - RNA, 19 nt, Artificial Sequence
  Description of Artificial Sequence: Synthetic oligonucleotide
acuggaugacucgcugcac

SEQ ID NO: 2239224 - RNA, 19 nt, Artificial Sequence
  Description of Artificial Sequence: Synthetic oligonucleotide
gaggcaaugccucccguua

SEQ ID NO: 2239225 - RNA, 19 nt, Artificial Sequence
  Description of Artificial Sequence: Synthetic oligonucleotide
cuaaggcuugcugccuugg

SEQ ID NO: 2239226 - RNA, 19 nt, Artificial Sequence
  Description of Artificial Sequence: Synthetic oligonucleotide
ggaauugaguagcugccga

SEQ ID NO: 2239227 - RNA, 19 nt, Artificial Sequence
  Description of Artificial Sequence: Synthetic oligonucleotide
guagcugccgacggucagg

SEQ ID NO: 2239228 - RNA, 19 nt, Artificial Sequence
  Description of Artificial Sequence: Synthetic oligonucleotide
uggacgacgugccgggcaa

SEQ ID NO: 2239229 - RNA, 19 nt, Artificial Sequence
  Description of Artificial Sequence: Synthetic oligonucleotide
ccaaaggccuguacaauac

SEQ ID NO: 2239230 - RNA, 19 nt, Artificial Sequence
  Description of Artificial Sequence: Synthetic oligonucleotide
cucggucacaguacacgac

SEQ ID NO: 2239231 - RNA, 19 nt, Artificial Sequence
  Description of Artificial Sequence: Synthetic oligonucleotide
ggaacccgagccucagugg

SEQ ID NO: 2239232 - RNA, 19 nt, Artificial Sequence
  Description of Artificial Sequence: Synthetic oligonucleotide
gugugucucggucacagua

SEQ ID NO: 2239233 - RNA, 19 nt, Artificial Sequence
  Description of Artificial Sequence: Synthetic oligonucleotide
cacguagcgguacccucgg

SEQ ID NO: 2239234 - RNA, 19 nt, Artificial Sequence
  Description of Artificial Sequence: Synthetic oligonucleotide
ugagcagguaaaggaggcu

SEQ ID NO: 2239235 - RNA, 19 nt, Artificial Sequence
  Description of Artificial Sequence: Synthetic oligonucleotide
aggagguaacgggugagca

SEQ ID NO: 2239236 - RNA, 19 nt, Artificial Sequence
  Description of Artificial Sequence: Synthetic oligonucleotide
uacgccggugagcaggaua

SEQ ID NO: 2239237 - RNA, 19 nt, Artificial Sequence
  Description of Artificial Sequence: Synthetic oligonucleotide
ugaggcaaugccucccguu

SEQ ID NO: 2239238 - RNA, 19 nt, Artificial Sequence
  Description of Artificial Sequence: Synthetic oligonucleotide
ggcaaugccucccguuagg

SEQ ID NO: 2239239 - RNA, 19 nt, Artificial Sequence
  Description of Artificial Sequence: Synthetic oligonucleotide
aaccggggcuccgacucgg

SEQ ID NO: 2239240 - RNA, 19 nt, Artificial Sequence
  Description of Artificial Sequence: Synthetic oligonucleotide
ggaucguuccaacuuggca

SEQ ID NO: 2239241 - RNA, 19 nt, Artificial Sequence
  Description of Artificial Sequence: Synthetic oligonucleotide
cuucagugccaaaggccug

SEQ ID NO: 2239242 - RNA, 19 nt, Artificial Sequence
  Description of Artificial Sequence: Synthetic oligonucleotide
acggucaggcugguuaaag

SEQ ID NO: 2239243 - RNA, 19 nt, Artificial Sequence
  Description of Artificial Sequence: Synthetic oligonucleotide
acucgcccgaguugucuag

SEQ ID NO: 2239244 - RNA, 19 nt, Artificial Sequence
  Description of Artificial Sequence: Synthetic oligonucleotide
gaccacugugugcuucaug

SEQ ID NO: 2239245 - RNA, 19 nt, Artificial Sequence
  Description of Artificial Sequence: Synthetic oligonucleotide
gaacgugguuggccauccg

SEQ ID NO: 2239246 - RNA, 19 nt, Artificial Sequence
  Description of Artificial Sequence: Synthetic oligonucleotide
cucggagaaaauacuugaa

SEQ ID NO: 2239247 - RNA, 19 nt, Artificial Sequence
  Description of Artificial Sequence: Synthetic oligonucleotide
augacucgcugcacgggcg

SEQ ID NO: 2239248 - RNA, 19 nt, Artificial Sequence
  Description of Artificial Sequence: Synthetic oligonucleotide
aguugucuagaacgugguu

SEQ ID NO: 2239249 - RNA, 19 nt, Artificial Sequence
  Description of Artificial Sequence: Synthetic oligonucleotide
gguuaaagaucaggucucc

SEQ ID NO: 2239250 - RNA, 19 nt, Artificial Sequence
  Description of Artificial Sequence: Synthetic oligonucleotide
gucaggcugguuaaagauc

SEQ ID NO: 2239251 - RNA, 19 nt, Artificial Sequence
  Description of Artificial Sequence: Synthetic oligonucleotide
caguacacgaccacugugu

SEQ ID NO: 2239252 - RNA, 19 nt, Artificial Sequence
  Description of Artificial Sequence: Synthetic oligonucleotide
ugccugaggcaaugccucc

SEQ ID NO: 2239253 - RNA, 19 nt, Artificial Sequence
  Description of Artificial Sequence: Synthetic oligonucleotide
acaauacgccggugagcag

SEQ ID NO: 2239254 - RNA, 19 nt, Artificial Sequence
  Description of Artificial Sequence: Synthetic oligonucleotide
ggccuguacaauacgccgg

SEQ ID NO: 2239255 - RNA, 19 nt, Artificial Sequence
  Description of Artificial Sequence: Synthetic oligonucleotide
uccuugcggaucucagggu

SEQ ID NO: 2239256 - RNA, 19 nt, Artificial Sequence
  Description of Artificial Sequence: Synthetic oligonucleotide
guuggaacaccuggaugac

SEQ ID NO: 2239257 - RNA, 19 nt, Artificial Sequence
  Description of Artificial Sequence: Synthetic oligonucleotide
ggugaggcuccacucgccc

SEQ ID NO: 2239258 - RNA, 19 nt, Artificial Sequence
  Description of Artificial Sequence: Synthetic oligonucleotide
uagaacgugguuggccauc

SEQ ID NO: 2239259 - RNA, 19 nt, Artificial Sequence
  Description of Artificial Sequence: Synthetic oligonucleotide
acaugguaccugacuuagg

SEQ ID NO: 2239260 - RNA, 19 nt, Artificial Sequence
  Description of Artificial Sequence: Synthetic oligonucleotide
gcuguuccgcuucaucagc

SEQ ID NO: 2239261 - RNA, 19 nt, Artificial Sequence
  Description of Artificial Sequence: Synthetic oligonucleotide
ccucggagaaaauacuuga

SEQ ID NO: 2239262 - RNA, 19 nt, Artificial Sequence
  Description of Artificial Sequence: Synthetic oligonucleotide
cccaggagagacagaauac

SEQ ID NO: 2239263 - RNA, 19 nt, Artificial Sequence
  Description of Artificial Sequence: Synthetic oligonucleotide
gucagcacacuugccaauc

SEQ ID NO: 2239264 - RNA, 19 nt, Artificial Sequence
  Description of Artificial Sequence: Synthetic oligonucleotide
cccucggagaaaauacuug

SEQ ID NO: 2239265 - RNA, 19 nt, Artificial Sequence
  Description of Artificial Sequence: Synthetic oligonucleotide
accuagcuagggagaaggg

SEQ ID NO: 2239266 - RNA, 19 nt, Artificial Sequence
  Description of Artificial Sequence: Synthetic oligonucleotide
acggagcucuugccugagg

SEQ ID NO: 2239267 - RNA, 19 nt, Artificial Sequence
  Description of Artificial Sequence: Synthetic oligonucleotide
cucccguuaggcccaccag

SEQ ID NO: 2239268 - RNA, 19 nt, Artificial Sequence
  Description of Artificial Sequence: Synthetic oligonucleotide
caggaucacguagcgguac

SEQ ID NO: 2239269 - RNA, 19 nt, Artificial Sequence
  Description of Artificial Sequence: Synthetic oligonucleotide
cauugacccuugccucugc

SEQ ID NO: 2239270 - RNA, 19 nt, Artificial Sequence
  Description of Artificial Sequence: Synthetic oligonucleotide
caccauucuccagcaagac

SEQ ID NO: 2239271 - RNA, 19 nt, Artificial Sequence
  Description of Artificial Sequence: Synthetic oligonucleotide
ggaggccuaaggcuugcug

SEQ ID NO: 2239272 - RNA, 19 nt, Artificial Sequence
  Description of Artificial Sequence: Synthetic oligonucleotide
gccgcuagcccaaucuccg

SEQ ID NO: 2239273 - RNA, 19 nt, Artificial Sequence
  Description of Artificial Sequence: Synthetic oligonucleotide
guggcagguauuccaugga

SEQ ID NO: 2239274 - RNA, 19 nt, Artificial Sequence
  Description of Artificial Sequence: Synthetic oligonucleotide
caggcugguuaaagaucag

SEQ ID NO: 2239275 - RNA, 19 nt, Artificial Sequence
  Description of Artificial Sequence: Synthetic oligonucleotide
uaggaacccgagccucagu

SEQ ID NO: 2239276 - RNA, 19 nt, Artificial Sequence
  Description of Artificial Sequence: Synthetic oligonucleotide
uaccccggcuggacgacgu

SEQ ID NO: 2239277 - RNA, 19 nt, Artificial Sequence
  Description of Artificial Sequence: Synthetic oligonucleotide
guuaggaacccgagccuca

SEQ ID NO: 2239278 - RNA, 19 nt, Artificial Sequence
  Description of Artificial Sequence: Synthetic oligonucleotide
guaccuagcuagggagaag

SEQ ID NO: 2239279 - RNA, 19 nt, Artificial Sequence
  Description of Artificial Sequence: Synthetic oligonucleotide
ccuugcggaucucagggug

SEQ ID NO: 2239280 - RNA, 19 nt, Artificial Sequence
  Description of Artificial Sequence: Synthetic oligonucleotide
guccaggaucacguagcgg

SEQ ID NO: 2239281 - RNA, 19 nt, Artificial Sequence
  Description of Artificial Sequence: Synthetic oligonucleotide
accuggcgucuggugaggc

SEQ ID NO: 2239282 - RNA, 19 nt, Artificial Sequence
  Description of Artificial Sequence: Synthetic oligonucleotide
acccgagccucaguggcag

SEQ ID NO: 2239283 - RNA, 19 nt, Artificial Sequence
  Description of Artificial Sequence: Synthetic oligonucleotide
gacgacgugccgggcaaug

SEQ ID NO: 2239284 - RNA, 19 nt, Artificial Sequence
  Description of Artificial Sequence: Synthetic oligonucleotide
uccgcggagcuuacuggau

SEQ ID NO: 2239285 - RNA, 19 nt, Artificial Sequence
  Description of Artificial Sequence: Synthetic oligonucleotide
gacgugccgggcaaugaca

SEQ ID NO: 2239286 - RNA, 19 nt, Artificial Sequence
  Description of Artificial Sequence: Synthetic oligonucleotide
gacucggccucagccucgg

SEQ ID NO: 2239287 - RNA, 19 nt, Artificial Sequence
  Description of Artificial Sequence: Synthetic oligonucleotide
gcuaggcccguuaggaacc

SEQ ID NO: 2239288 - RNA, 19 nt, Artificial Sequence
  Description of Artificial Sequence: Synthetic oligonucleotide
gaguaggagccaggaagca

SEQ ID NO: 2239289 - RNA, 19 nt, Artificial Sequence
  Description of Artificial Sequence: Synthetic oligonucleotide
ggucacaguacacgaccac

SEQ ID NO: 2239290 - RNA, 19 nt, Artificial Sequence
  Description of Artificial Sequence: Synthetic oligonucleotide
ggcaugcagaaggaugacc

SEQ ID NO: 2239291 - RNA, 19 nt, Artificial Sequence
  Description of Artificial Sequence: Synthetic oligonucleotide
cagaaggaugaccuggcgu

SEQ ID NO: 2239292 - RNA, 19 nt, Artificial Sequence
  Description of Artificial Sequence: Synthetic oligonucleotide
cucagggugggugauggaa

SEQ ID NO: 2239293 - RNA, 19 nt, Artificial Sequence
  Description of Artificial Sequence: Synthetic oligonucleotide
cuccgcggagcuuacugga

SEQ ID NO: 2239294 - RNA, 19 nt, Artificial Sequence
  Description of Artificial Sequence: Synthetic oligonucleotide
uugcggucgaugucaccau

SEQ ID NO: 2239295 - RNA, 19 nt, Artificial Sequence
  Description of Artificial Sequence: Synthetic oligonucleotide
ccugaggcaaugccucccg

SEQ ID NO: 2239296 - RNA, 19 nt, Artificial Sequence
  Description of Artificial Sequence: Synthetic oligonucleotide
cuccaaggaccuugcgguc

SEQ ID NO: 2239297 - RNA, 19 nt, Artificial Sequence
  Description of Artificial Sequence: Synthetic oligonucleotide
gauaccccggcuggacgac

SEQ ID NO: 2239298 - RNA, 19 nt, Artificial Sequence
  Description of Artificial Sequence: Synthetic oligonucleotide
ggugggugauggaauugag

SEQ ID NO: 2239299 - RNA, 19 nt, Artificial Sequence
  Description of Artificial Sequence: Synthetic oligonucleotide
gaccuggcgucuggugagg

SEQ ID NO: 2239300 - RNA, 19 nt, Artificial Sequence
  Description of Artificial Sequence: Synthetic oligonucleotide
aacccgagccucaguggca

SEQ ID NO: 2239301 - RNA, 19 nt, Artificial Sequence
  Description of Artificial Sequence: Synthetic oligonucleotide
ggauaccccggcuggacga

SEQ ID NO: 2239302 - RNA, 19 nt, Artificial Sequence
  Description of Artificial Sequence: Synthetic oligonucleotide
gucacaguacacgaccacu

SEQ ID NO: 2239303 - RNA, 19 nt, Artificial Sequence
  Description of Artificial Sequence: Synthetic oligonucleotide
ugcggucgaugucaccauu

SEQ ID NO: 2239304 - RNA, 19 nt, Artificial Sequence
  Description of Artificial Sequence: Synthetic oligonucleotide
cucagccucggccgcuagc

SEQ ID NO: 2239305 - RNA, 19 nt, Artificial Sequence
  Description of Artificial Sequence: Synthetic oligonucleotide
ucgcccgaguugucuagaa

SEQ ID NO: 2239306 - RNA, 19 nt, Artificial Sequence
  Description of Artificial Sequence: Synthetic oligonucleotide
cguagcgguacccucggag

SEQ ID NO: 2239307 - RNA, 19 nt, Artificial Sequence
  Description of Artificial Sequence: Synthetic oligonucleotide
gaggaggccuaaggcuugc

SEQ ID NO: 2239308 - RNA, 19 nt, Artificial Sequence
  Description of Artificial Sequence: Synthetic oligonucleotide
gacggagcucuugccugag

SEQ ID NO: 2239309 - RNA, 19 nt, Artificial Sequence
  Description of Artificial Sequence: Synthetic oligonucleotide
guguaccuagcuagggaga

SEQ ID NO: 2239310 - RNA, 19 nt, Artificial Sequence
  Description of Artificial Sequence: Synthetic oligonucleotide
caaucuccgcggagcuuac

SEQ ID NO: 2239311 - RNA, 19 nt, Artificial Sequence
  Description of Artificial Sequence: Synthetic oligonucleotide
gacucgcugcacgggcggg

SEQ ID NO: 2239312 - RNA, 19 nt, Artificial Sequence
  Description of Artificial Sequence: Synthetic oligonucleotide
gguauuccauggaucguuc

SEQ ID NO: 2239313 - RNA, 19 nt, Artificial Sequence
  Description of Artificial Sequence: Synthetic oligonucleotide
gaucacguagcgguacccu

SEQ ID NO: 2239314 - RNA, 19 nt, Artificial Sequence
  Description of Artificial Sequence: Synthetic oligonucleotide
gguacccucggagaaaaua

SEQ ID NO: 2239315 - RNA, 19 nt, Artificial Sequence
  Description of Artificial Sequence: Synthetic oligonucleotide
ggucuccaaggaccuugcg

SEQ ID NO: 2239316 - RNA, 19 nt, Artificial Sequence
  Description of Artificial Sequence: Synthetic oligonucleotide
auaccccggcuggacgacg

SEQ ID NO: 2239317 - RNA, 19 nt, Artificial Sequence
  Description of Artificial Sequence: Synthetic oligonucleotide
cuaggcccguuaggaaccc

SEQ ID NO: 2239318 - RNA, 19 nt, Artificial Sequence
  Description of Artificial Sequence: Synthetic oligonucleotide
cggugagcaggauaccccg

SEQ ID NO: 2239319 - RNA, 19 nt, Artificial Sequence
  Description of Artificial Sequence: Synthetic oligonucleotide
ggugagcaggauaccccgg

SEQ ID NO: 2239320 - RNA, 19 nt, Artificial Sequence
  Description of Artificial Sequence: Synthetic oligonucleotide
acccucggagaaaauacuu

SEQ ID NO: 2239321 - RNA, 19 nt, Artificial Sequence
  Description of Artificial Sequence: Synthetic oligonucleotide
aaucuccgcggagcuuacu

SEQ ID NO: 2239322 - RNA, 19 nt, Artificial Sequence
  Description of Artificial Sequence: Synthetic oligonucleotide
uaggcccguuaggaacccg

SEQ ID NO: 2239323 - RNA, 19 nt, Artificial Sequence
  Description of Artificial Sequence: Synthetic oligonucleotide
gccaaucaacugcuccacc

SEQ ID NO: 2239324 - RNA, 19 nt, Artificial Sequence
  Description of Artificial Sequence: Synthetic oligonucleotide
ggcgggauccgcgagcgug

SEQ ID NO: 2239325 - RNA, 19 nt, Artificial Sequence
  Description of Artificial Sequence: Synthetic oligonucleotide
ggucgaugucaccauucuc

SEQ ID NO: 2239326 - RNA, 19 nt, Artificial Sequence
  Description of Artificial Sequence: Synthetic oligonucleotide
gcaaugccugcuaggcccg

SEQ ID NO: 2239327 - RNA, 19 nt, Artificial Sequence
  Description of Artificial Sequence: Synthetic oligonucleotide
cagcaagacuucagugcca

SEQ ID NO: 2239328 - RNA, 19 nt, Artificial Sequence
  Description of Artificial Sequence: Synthetic oligonucleotide
gcggaucucagggugggug

SEQ ID NO: 2239329 - RNA, 19 nt, Artificial Sequence
  Description of Artificial Sequence: Synthetic oligonucleotide
cuggacgacgugccgggca

SEQ ID NO: 2239330 - RNA, 19 nt, Artificial Sequence
  Description of Artificial Sequence: Synthetic oligonucleotide
ggaucacguagcgguaccc

SEQ ID NO: 2239331 - RNA, 19 nt, Artificial Sequence
  Description of Artificial Sequence: Synthetic oligonucleotide
cuagcccaaucuccgcgga

SEQ ID NO: 2239332 - RNA, 19 nt, Artificial Sequence
  Description of Artificial Sequence: Synthetic oligonucleotide
gccugcuaggcccguuagg

SEQ ID NO: 2239333 - RNA, 19 nt, Artificial Sequence
  Description of Artificial Sequence: Synthetic oligonucleotide
cacgaccacugugugcuuc

SEQ ID NO: 2239334 - RNA, 19 nt, Artificial Sequence
  Description of Artificial Sequence: Synthetic oligonucleotide
caggaacaucuucccagga

SEQ ID NO: 2239335 - RNA, 19 nt, Artificial Sequence
  Description of Artificial Sequence: Synthetic oligonucleotide
ccaacuuggcaugcagaag

SEQ ID NO: 2239336 - RNA, 19 nt, Artificial Sequence
  Description of Artificial Sequence: Synthetic oligonucleotide
gccggugagcaggauaccc

SEQ ID NO: 2239337 - RNA, 19 nt, Artificial Sequence
  Description of Artificial Sequence: Synthetic oligonucleotide
gaaggaugaccuggcgucu

SEQ ID NO: 2239338 - RNA, 19 nt, Artificial Sequence
  Description of Artificial Sequence: Synthetic oligonucleotide
aaugccugcuaggcccguu

SEQ ID NO: 2239339 - RNA, 19 nt, Artificial Sequence
  Description of Artificial Sequence: Synthetic oligonucleotide
gcuagggagaagggaggag

SEQ ID NO: 2239340 - RNA, 19 nt, Artificial Sequence
  Description of Artificial Sequence: Synthetic oligonucleotide
cagccgugccagcugugug

SEQ ID NO: 2239341 - RNA, 19 nt, Artificial Sequence
  Description of Artificial Sequence: Synthetic oligonucleotide
aggcccguuaggaacccga

SEQ ID NO: 2239342 - RNA, 19 nt, Artificial Sequence
  Description of Artificial Sequence: Synthetic oligonucleotide
ggacaugguaccugacuua

SEQ ID NO: 2239343 - RNA, 19 nt, Artificial Sequence
  Description of Artificial Sequence: Synthetic oligonucleotide
ggccgcuagcccaaucucc

SEQ ID NO: 2239344 - RNA, 19 nt, Artificial Sequence
  Description of Artificial Sequence: Synthetic oligonucleotide
uccacucgcccgaguuguc

SEQ ID NO: 2239345 - RNA, 19 nt, Artificial Sequence
  Description of Artificial Sequence: Synthetic oligonucleotide
acgugccgggcaaugacau

SEQ ID NO: 2239346 - RNA, 19 nt, Artificial Sequence
  Description of Artificial Sequence: Synthetic oligonucleotide
ccuaaggcuugcugccuug

SEQ ID NO: 2239347 - RNA, 19 nt, Artificial Sequence
  Description of Artificial Sequence: Synthetic oligonucleotide
gcuccacucgcccgaguug

SEQ ID NO: 2239348 - RNA, 19 nt, Artificial Sequence
  Description of Artificial Sequence: Synthetic oligonucleotide
gggugggugauggaauuga

SEQ ID NO: 2239349 - RNA, 19 nt, Artificial Sequence
  Description of Artificial Sequence: Synthetic oligonucleotide
ggucucuaaggaggaggcc

SEQ ID NO: 2239350 - RNA, 19 nt, Artificial Sequence
  Description of Artificial Sequence: Synthetic oligonucleotide
cgcuagcccaaucuccgcg

SEQ ID NO: 2239351 - RNA, 19 nt, Artificial Sequence
  Description of Artificial Sequence: Synthetic oligonucleotide
gcccguuaggaacccgagc

SEQ ID NO: 2239352 - RNA, 19 nt, Artificial Sequence
  Description of Artificial Sequence: Synthetic oligonucleotide
acgacgugccgggcaauga

SEQ ID NO: 2239353 - RNA, 19 nt, Artificial Sequence
  Description of Artificial Sequence: Synthetic oligonucleotide
gaggcuccacucgcccgag

SEQ ID NO: 2239354 - RNA, 19 nt, Artificial Sequence
  Description of Artificial Sequence: Synthetic oligonucleotide
gcacacuugccaaucaacu

SEQ ID NO: 2239355 - RNA, 19 nt, Artificial Sequence
  Description of Artificial Sequence: Synthetic oligonucleotide
agcgguacccucggagaaa

SEQ ID NO: 2239356 - RNA, 19 nt, Artificial Sequence
  Description of Artificial Sequence: Synthetic oligonucleotide
gugggugauggaauugagu

SEQ ID NO: 2239357 - RNA, 19 nt, Artificial Sequence
  Description of Artificial Sequence: Synthetic oligonucleotide
uugcugccuugguguaccu

SEQ ID NO: 2239358 - RNA, 19 nt, Artificial Sequence
  Description of Artificial Sequence: Synthetic oligonucleotide
cacgggcgggauccgcgag

SEQ ID NO: 2239359 - RNA, 19 nt, Artificial Sequence
  Description of Artificial Sequence: Synthetic oligonucleotide
gccucaguggcagguauuc

SEQ ID NO: 2239360 - RNA, 19 nt, Artificial Sequence
  Description of Artificial Sequence: Synthetic oligonucleotide
ggcauugacccuugccucu

SEQ ID NO: 2239361 - RNA, 19 nt, Artificial Sequence
  Description of Artificial Sequence: Synthetic oligonucleotide
cugcuaggcccguuaggaa

SEQ ID NO: 2239362 - RNA, 19 nt, Artificial Sequence
  Description of Artificial Sequence: Synthetic oligonucleotide
cccggcuggacgacgugcc

SEQ ID NO: 2239363 - RNA, 19 nt, Artificial Sequence
  Description of Artificial Sequence: Synthetic oligonucleotide
ccuagcuagggagaaggga

SEQ ID NO: 2239364 - RNA, 19 nt, Artificial Sequence
  Description of Artificial Sequence: Synthetic oligonucleotide
ggaacaccuggaugacgga

SEQ ID NO: 2239365 - RNA, 19 nt, Artificial Sequence
  Description of Artificial Sequence: Synthetic oligonucleotide
gugauggaauugaguagcu

SEQ ID NO: 2239366 - RNA, 19 nt, Artificial Sequence
  Description of Artificial Sequence: Synthetic oligonucleotide
gcauugacccuugccucug

SEQ ID NO: 2239367 - RNA, 19 nt, Artificial Sequence
  Description of Artificial Sequence: Synthetic oligonucleotide
agguaacgggugagcaggu

SEQ ID NO: 2239368 - RNA, 19 nt, Artificial Sequence
  Description of Artificial Sequence: Synthetic oligonucleotide
gcucuugccugaggcaaug

SEQ ID NO: 2239369 - RNA, 19 nt, Artificial Sequence
  Description of Artificial Sequence: Synthetic oligonucleotide
acucgcugcacgggcggga

SEQ ID NO: 2239370 - RNA, 19 nt, Artificial Sequence
  Description of Artificial Sequence: Synthetic oligonucleotide
ugcugccuugguguaccua

SEQ ID NO: 2239371 - RNA, 19 nt, Artificial Sequence
  Description of Artificial Sequence: Synthetic oligonucleotide
ggcccguuaggaacccgag

SEQ ID NO: 2239372 - RNA, 19 nt, Artificial Sequence
  Description of Artificial Sequence: Synthetic oligonucleotide
ugcggaucucagggugggu

SEQ ID NO: 2239373 - RNA, 19 nt, Artificial Sequence
  Description of Artificial Sequence: Synthetic oligonucleotide
acguagcgguacccucgga

SEQ ID NO: 2239374 - RNA, 19 nt, Artificial Sequence
  Description of Artificial Sequence: Synthetic oligonucleotide
ccgacggucaggcugguua

SEQ ID NO: 2239375 - RNA, 19 nt, Artificial Sequence
  Description of Artificial Sequence: Synthetic oligonucleotide
gccugaggcaaugccuccc

SEQ ID NO: 2239376 - RNA, 19 nt, Artificial Sequence
  Description of Artificial Sequence: Synthetic oligonucleotide
ccgggcaaugacauccaca

SEQ ID NO: 2239377 - RNA, 19 nt, Artificial Sequence
  Description of Artificial Sequence: Synthetic oligonucleotide
cacucgcccgaguugucua

SEQ ID NO: 2239378 - RNA, 19 nt, Artificial Sequence
  Description of Artificial Sequence: Synthetic oligonucleotide
gccuguacaauacgccggu

SEQ ID NO: 2239379 - RNA, 19 nt, Artificial Sequence
  Description of Artificial Sequence: Synthetic oligonucleotide
cuccacucgcccgaguugu

SEQ ID NO: 2239380 - RNA, 19 nt, Artificial Sequence
  Description of Artificial Sequence: Synthetic oligonucleotide
accccggcuggacgacgug

SEQ ID NO: 2239381 - RNA, 19 nt, Artificial Sequence
  Description of Artificial Sequence: Synthetic oligonucleotide
cguuaggaacccgagccuc

SEQ ID NO: 2239382 - RNA, 19 nt, Artificial Sequence
  Description of Artificial Sequence: Synthetic oligonucleotide
ccgcggagcuuacuggaug

SEQ ID NO: 2239383 - RNA, 19 nt, Artificial Sequence
  Description of Artificial Sequence: Synthetic oligonucleotide
ccgaguugucuagaacgug

SEQ ID NO: 2239384 - RNA, 19 nt, Artificial Sequence
  Description of Artificial Sequence: Synthetic oligonucleotide
gacggucaggcugguuaaa

SEQ ID NO: 2239385 - RNA, 19 nt, Artificial Sequence
  Description of Artificial Sequence: Synthetic oligonucleotide
ccaaucuccgcggagcuua

SEQ ID NO: 2239386 - RNA, 19 nt, Artificial Sequence
  Description of Artificial Sequence: Synthetic oligonucleotide
cugcacgggcgggauccgc

SEQ ID NO: 2239387 - RNA, 19 nt, Artificial Sequence
  Description of Artificial Sequence: Synthetic oligonucleotide
ccucaguggcagguauucc

SEQ ID NO: 2239388 - RNA, 19 nt, Artificial Sequence
  Description of Artificial Sequence: Synthetic oligonucleotide
cuagaacgugguuggccau

SEQ ID NO: 2239389 - RNA, 19 nt, Artificial Sequence
  Description of Artificial Sequence: Synthetic oligonucleotide
cgcugcacgggcgggaucc

SEQ ID NO: 2239390 - RNA, 19 nt, Artificial Sequence
  Description of Artificial Sequence: Synthetic oligonucleotide
aucagccgugccagcugug

SEQ ID NO: 2239391 - RNA, 19 nt, Artificial Sequence
  Description of Artificial Sequence: Synthetic oligonucleotide
cgggcaaugacauccacau

SEQ ID NO: 2239392 - RNA, 19 nt, Artificial Sequence
  Description of Artificial Sequence: Synthetic oligonucleotide
cucacgcuucaggcuguuc

SEQ ID NO: 2239393 - RNA, 19 nt, Artificial Sequence
  Description of Artificial Sequence: Synthetic oligonucleotide
ccuugcggucgaugucacc

SEQ ID NO: 2239394 - RNA, 19 nt, Artificial Sequence
  Description of Artificial Sequence: Synthetic oligonucleotide
cgacgugccgggcaaugac

SEQ ID NO: 2239395 - RNA, 19 nt, Artificial Sequence
  Description of Artificial Sequence: Synthetic oligonucleotide
cagggugggugauggaauu

SEQ ID NO: 2239396 - RNA, 19 nt, Artificial Sequence
  Description of Artificial Sequence: Synthetic oligonucleotide
ccucccguuaggcccacca

SEQ ID NO: 2239397 - RNA, 19 nt, Artificial Sequence
  Description of Artificial Sequence: Synthetic oligonucleotide
ccgcuagcccaaucuccgc

SEQ ID NO: 2239398 - RNA, 19 nt, Artificial Sequence
  Description of Artificial Sequence: Synthetic oligonucleotide
gcgggauccgcgagcgugc

SEQ ID NO: 2239399 - RNA, 19 nt, Artificial Sequence
  Description of Artificial Sequence: Synthetic oligonucleotide
ccauggaucguuccaacuu

SEQ ID NO: 2239400 - RNA, 19 nt, Artificial Sequence
  Description of Artificial Sequence: Synthetic oligonucleotide
cucgcccgaguugucuaga

SEQ ID NO: 2239401 - RNA, 19 nt, Artificial Sequence
  Description of Artificial Sequence: Synthetic oligonucleotide
agccucaguggcagguauu

SEQ ID NO: 2239402 - RNA, 19 nt, Artificial Sequence
  Description of Artificial Sequence: Synthetic oligonucleotide
cgugccagcugugugucuc

SEQ ID NO: 2239403 - RNA, 19 nt, Artificial Sequence
  Description of Artificial Sequence: Synthetic oligonucleotide
ccggcuggacgacgugccg

SEQ ID NO: 2239404 - RNA, 19 nt, Artificial Sequence
  Description of Artificial Sequence: Synthetic oligonucleotide
ccaaggaccuugcggucga

SEQ ID NO: 2239405 - RNA, 19 nt, Artificial Sequence
  Description of Artificial Sequence: Synthetic oligonucleotide
cccgaguugucuagaacgu

SEQ ID NO: 2239406 - RNA, 19 nt, Artificial Sequence
  Description of Artificial Sequence: Synthetic oligonucleotide
gcuuacuggaugacucgcu

SEQ ID NO: 2239407 - RNA, 19 nt, Artificial Sequence
  Description of Artificial Sequence: Synthetic oligonucleotide
gcgguacccucggagaaaa

SEQ ID NO: 2239408 - RNA, 19 nt, Artificial Sequence
  Description of Artificial Sequence: Synthetic oligonucleotide
cgcggagcuuacuggauga

SEQ ID NO: 2239409 - RNA, 19 nt, Artificial Sequence
  Description of Artificial Sequence: Synthetic oligonucleotide
gccgggcaaugacauccac

SEQ ID NO: 2239410 - RNA, 19 nt, Artificial Sequence
  Description of Artificial Sequence: Synthetic oligonucleotide
cugcguccucacgcuucag

SEQ ID NO: 2239411 - RNA, 19 nt, Artificial Sequence
  Description of Artificial Sequence: Synthetic oligonucleotide
cugaggcaaugccucccgu

SEQ ID NO: 2239412 - RNA, 19 nt, Artificial Sequence
  Description of Artificial Sequence: Synthetic oligonucleotide
gcggagcuuacuggaugac

SEQ ID NO: 2239413 - RNA, 19 nt, Artificial Sequence
  Description of Artificial Sequence: Synthetic oligonucleotide
ggcuccacucgcccgaguu

SEQ ID NO: 2239414 - RNA, 19 nt, Artificial Sequence
  Description of Artificial Sequence: Synthetic oligonucleotide
ccccggcuggacgacgugc

SEQ ID NO: 2239415 - RNA, 19 nt, Artificial Sequence
  Description of Artificial Sequence: Synthetic oligonucleotide
cggcuggacgacgugccgg

SEQ ID NO: 2239416 - RNA, 19 nt, Artificial Sequence
  Description of Artificial Sequence: Synthetic oligonucleotide
gguaacgggugagcaggua

SEQ ID NO: 2239417 - RNA, 19 nt, Artificial Sequence
  Description of Artificial Sequence: Synthetic oligonucleotide
gcacgggcgggauccgcga

SEQ ID NO: 2239418 - RNA, 19 nt, Artificial Sequence
  Description of Artificial Sequence: Synthetic oligonucleotide
cgggcgggauccgcgagcg

SEQ ID NO: 2239419 - RNA, 19 nt, Artificial Sequence
  Description of Artificial Sequence: Synthetic oligonucleotide
gccucugcguccucacgcu

SEQ ID NO: 2239420 - RNA, 19 nt, Artificial Sequence
  Description of Artificial Sequence: Synthetic oligonucleotide
cgcccgaguugucuagaac

SEQ ID NO: 2239421 - RNA, 19 nt, Artificial Sequence
  Description of Artificial Sequence: Synthetic oligonucleotide
gggauccgcgagcgugcac

SEQ ID NO: 2239422 - RNA, 19 nt, Artificial Sequence
  Description of Artificial Sequence: Synthetic oligonucleotide
gcccaaucuccgcggagcu

SEQ ID NO: 2239423 - RNA, 19 nt, Artificial Sequence
  Description of Artificial Sequence: Synthetic oligonucleotide
auacgccggugagcaggau

SEQ ID NO: 2239424 - RNA, 19 nt, Artificial Sequence
  Description of Artificial Sequence: Synthetic oligonucleotide
ugccucccguuaggcccac

SEQ ID NO: 2239425 - RNA, 19 nt, Artificial Sequence
  Description of Artificial Sequence: Synthetic oligonucleotide
ccgcuucaucagccgugcc

SEQ ID NO: 2239426 - RNA, 19 nt, Artificial Sequence
  Description of Artificial Sequence: Synthetic oligonucleotide
gcugugugucucggucaca

SEQ ID NO: 2239427 - RNA, 19 nt, Artificial Sequence
  Description of Artificial Sequence: Synthetic oligonucleotide
ccguuaggaacccgagccu

SEQ ID NO: 2239428 - RNA, 19 nt, Artificial Sequence
  Description of Artificial Sequence: Synthetic oligonucleotide
cgugccgggcaaugacauc

SEQ ID NO: 2239429 - RNA, 19 nt, Artificial Sequence
  Description of Artificial Sequence: Synthetic oligonucleotide
cgacggucaggcugguuaa

SEQ ID NO: 2239430 - RNA, 19 nt, Artificial Sequence
  Description of Artificial Sequence: Synthetic oligonucleotide
gccuaaggcuugcugccuu

SEQ ID NO: 2239431 - RNA, 19 nt, Artificial Sequence
  Description of Artificial Sequence: Synthetic oligonucleotide
ggaucucagggugggugau

SEQ ID NO: 2239432 - RNA, 19 nt, Artificial Sequence
  Description of Artificial Sequence: Synthetic oligonucleotide
cggccgcuagcccaaucuc

SEQ ID NO: 2239433 - RNA, 19 nt, Artificial Sequence
  Description of Artificial Sequence: Synthetic oligonucleotide
ggccuaaggcuugcugccu

SEQ ID NO: 2239434 - RNA, 19 nt, Artificial Sequence
  Description of Artificial Sequence: Synthetic oligonucleotide
cgucuggugaggcuccacu

SEQ ID NO: 2239435 - RNA, 19 nt, Artificial Sequence
  Description of Artificial Sequence: Synthetic oligonucleotide
gcgucuggugaggcuccac

SEQ ID NO: 2239436 - RNA, 19 nt, Artificial Sequence
  Description of Artificial Sequence: Synthetic oligonucleotide
ccguuaggcccaccaggaa

SEQ ID NO: 2239437 - RNA, 19 nt, Artificial Sequence
  Description of Artificial Sequence: Synthetic oligonucleotide
cucgcugcacgggcgggau

SEQ ID NO: 2239438 - RNA, 19 nt, Artificial Sequence
  Description of Artificial Sequence: Synthetic oligonucleotide
cguccucacgcuucaggcu

SEQ ID NO: 2239439 - RNA, 19 nt, Artificial Sequence
  Description of Artificial Sequence: Synthetic oligonucleotide
ggcgucuggugaggcucca

SEQ ID NO: 2239440 - RNA, 19 nt, Artificial Sequence
  Description of Artificial Sequence: Synthetic oligonucleotide
cggucgaugucaccauucu

SEQ ID NO: 2239441 - RNA, 19 nt, Artificial Sequence
  Description of Artificial Sequence: Synthetic oligonucleotide
ccuggcgucuggugaggcu

SEQ ID NO: 2239442 - RNA, 19 nt, Artificial Sequence
  Description of Artificial Sequence: Synthetic oligonucleotide
caaugccugcuaggcccgu

SEQ ID NO: 2239443 - RNA, 19 nt, Artificial Sequence
  Description of Artificial Sequence: Synthetic oligonucleotide
ccacucgcccgaguugucu

SEQ ID NO: 2239444 - RNA, 19 nt, Artificial Sequence
  Description of Artificial Sequence: Synthetic oligonucleotide
cgccggugagcaggauacc

SEQ ID NO: 2239445 - RNA, 19 nt, Artificial Sequence
  Description of Artificial Sequence: Synthetic oligonucleotide
caaggaccuugcggucgau

SEQ ID NO: 2239446 - RNA, 19 nt, Artificial Sequence
  Description of Artificial Sequence: Synthetic oligonucleotide
gccucccguuaggcccacc

SEQ ID NO: 2239447 - RNA, 19 nt, Artificial Sequence
  Description of Artificial Sequence: Synthetic oligonucleotide
ccauccgggccuuguccuu

SEQ ID NO: 2239448 - RNA, 19 nt, Artificial Sequence
  Description of Artificial Sequence: Synthetic oligonucleotide
ggacgacgugccgggcaau

SEQ ID NO: 2239449 - RNA, 19 nt, Artificial Sequence
  Description of Artificial Sequence: Synthetic oligonucleotide
cgggauccgcgagcgugca

SEQ ID NO: 2239450 - RNA, 19 nt, Artificial Sequence
  Description of Artificial Sequence: Synthetic oligonucleotide
gggcgggauccgcgagcgu

SEQ ID NO: 2239451 - RNA, 19 nt, Artificial Sequence
  Description of Artificial Sequence: Synthetic oligonucleotide
ccgugccagcugugugucu

SEQ ID NO: 2239452 - RNA, 19 nt, Artificial Sequence
  Description of Artificial Sequence: Synthetic oligonucleotide
cccaaucuccgcggagcuu

SEQ ID NO: 2239453 - RNA, 19 nt, Artificial Sequence
  Description of Artificial Sequence: Synthetic oligonucleotide
cgguacccucggagaaaau

SEQ ID NO: 2239454 - RNA, 19 nt, Artificial Sequence
  Description of Artificial Sequence: Synthetic oligonucleotide
gccgacggucaggcugguu

SEQ ID NO: 2239455 - RNA, 19 nt, Artificial Sequence
  Description of Artificial Sequence: Synthetic oligonucleotide
cgaccacugugugcuucau

SEQ ID NO: 2239456 - RNA, 19 nt, Artificial Sequence
  Description of Artificial Sequence: Synthetic oligonucleotide
ccucggccgcuagcccaau

SEQ ID NO: 2239457 - RNA, 19 nt, Artificial Sequence
  Description of Artificial Sequence: Synthetic oligonucleotide
aauguugaagggcacaccc

SEQ ID NO: 2239458 - RNA, 19 nt, Artificial Sequence
  Description of Artificial Sequence: Synthetic oligonucleotide
auaaccuucaaucugaaag

SEQ ID NO: 2239459 - RNA, 19 nt, Artificial Sequence
  Description of Artificial Sequence: Synthetic oligonucleotide
auaaacugggcccaggucc

SEQ ID NO: 2239460 - RNA, 19 nt, Artificial Sequence
  Description of Artificial Sequence: Synthetic oligonucleotide
aguucuuuagcauuugugg

SEQ ID NO: 2239461 - RNA, 19 nt, Artificial Sequence
  Description of Artificial Sequence: Synthetic oligonucleotide
uggauuauaaccuucaauc

SEQ ID NO: 2239462 - RNA, 19 nt, Artificial Sequence
  Description of Artificial Sequence: Synthetic oligonucleotide
ugugcuaucauguagguaa

SEQ ID NO: 2239463 - RNA, 19 nt, Artificial Sequence
  Description of Artificial Sequence: Synthetic oligonucleotide
uuggauguggauuauaacc

SEQ ID NO: 2239464 - RNA, 19 nt, Artificial Sequence
  Description of Artificial Sequence: Synthetic oligonucleotide
uuucgaaggauuuugagcu

SEQ ID NO: 2239465 - RNA, 19 nt, Artificial Sequence
  Description of Artificial Sequence: Synthetic oligonucleotide
uaugauucagauaaauaug

SEQ ID NO: 2239466 - RNA, 19 nt, Artificial Sequence
  Description of Artificial Sequence: Synthetic oligonucleotide
gaaaccauaaacugggccc

SEQ ID NO: 2239467 - RNA, 19 nt, Artificial Sequence
  Description of Artificial Sequence: Synthetic oligonucleotide
aaucucgggacccauuggc

SEQ ID NO: 2239468 - RNA, 19 nt, Artificial Sequence
  Description of Artificial Sequence: Synthetic oligonucleotide
aaaguauggacaaaaucac

SEQ ID NO: 2239469 - RNA, 19 nt, Artificial Sequence
  Description of Artificial Sequence: Synthetic oligonucleotide
acauagaauugacagaggg

SEQ ID NO: 2239470 - RNA, 19 nt, Artificial Sequence
  Description of Artificial Sequence: Synthetic oligonucleotide
aaaacucccuuccagaaca

SEQ ID NO: 2239471 - RNA, 19 nt, Artificial Sequence
  Description of Artificial Sequence: Synthetic oligonucleotide
aaaccauagcaacuccucc

SEQ ID NO: 2239472 - RNA, 19 nt, Artificial Sequence
  Description of Artificial Sequence: Synthetic oligonucleotide
aaaaccgcagcgcauaaug

SEQ ID NO: 2239473 - RNA, 19 nt, Artificial Sequence
  Description of Artificial Sequence: Synthetic oligonucleotide
ugaaagagcgcuaaacagc

SEQ ID NO: 2239474 - RNA, 19 nt, Artificial Sequence
  Description of Artificial Sequence: Synthetic oligonucleotide
uuuucgaaggauuuugagc

SEQ ID NO: 2239475 - RNA, 19 nt, Artificial Sequence
  Description of Artificial Sequence: Synthetic oligonucleotide
cucgauaugauucagauaa

SEQ ID NO: 2239476 - RNA, 19 nt, Artificial Sequence
  Description of Artificial Sequence: Synthetic oligonucleotide
aauugucucaacuuuucga

SEQ ID NO: 2239477 - RNA, 19 nt, Artificial Sequence
  Description of Artificial Sequence: Synthetic oligonucleotide
aaaaucucgggacccauug

SEQ ID NO: 2239478 - RNA, 19 nt, Artificial Sequence
  Description of Artificial Sequence: Synthetic oligonucleotide
uuugguugugagcagagga

SEQ ID NO: 2239479 - RNA, 19 nt, Artificial Sequence
  Description of Artificial Sequence: Synthetic oligonucleotide
gaucuuuuggguuccaggc

SEQ ID NO: 2239480 - RNA, 19 nt, Artificial Sequence
  Description of Artificial Sequence: Synthetic oligonucleotide
uucuuuagcauuuguggag

SEQ ID NO: 2239481 - RNA, 19 nt, Artificial Sequence
  Description of Artificial Sequence: Synthetic oligonucleotide
ucuugguucucgcugaagc

SEQ ID NO: 2239482 - RNA, 19 nt, Artificial Sequence
  Description of Artificial Sequence: Synthetic oligonucleotide
aggauuuugagcuuuggga

SEQ ID NO: 2239483 - RNA, 19 nt, Artificial Sequence
  Description of Artificial Sequence: Synthetic oligonucleotide
acccgaguaaucugaaucc

SEQ ID NO: 2239484 - RNA, 19 nt, Artificial Sequence
  Description of Artificial Sequence: Synthetic oligonucleotide
cauaaugugcuccaccugc

SEQ ID NO: 2239485 - RNA, 19 nt, Artificial Sequence
  Description of Artificial Sequence: Synthetic oligonucleotide
uuuuaaucguuggaugugg

SEQ ID NO: 2239486 - RNA, 19 nt, Artificial Sequence
  Description of Artificial Sequence: Synthetic oligonucleotide
aaguauggacaaaaucacc

SEQ ID NO: 2239487 - RNA, 19 nt, Artificial Sequence
  Description of Artificial Sequence: Synthetic oligonucleotide
auucucacucccuuggagg

SEQ ID NO: 2239488 - RNA, 19 nt, Artificial Sequence
  Description of Artificial Sequence: Synthetic oligonucleotide
ucaggggaagaucuuuugg

SEQ ID NO: 2239489 - RNA, 19 nt, Artificial Sequence
  Description of Artificial Sequence: Synthetic oligonucleotide
uugauaaaccauagcaacu

SEQ ID NO: 2239490 - RNA, 19 nt, Artificial Sequence
  Description of Artificial Sequence: Synthetic oligonucleotide
gguaaaguuggcaagacag

SEQ ID NO: 2239491 - RNA, 19 nt, Artificial Sequence
  Description of Artificial Sequence: Synthetic oligonucleotide
auucagauaaauaugugca

SEQ ID NO: 2239492 - RNA, 19 nt, Artificial Sequence
  Description of Artificial Sequence: Synthetic oligonucleotide
agaucuuuuggguuccagg

SEQ ID NO: 2239493 - RNA, 19 nt, Artificial Sequence
  Description of Artificial Sequence: Synthetic oligonucleotide
gaaagagcgcuaaacagcc

SEQ ID NO: 2239494 - RNA, 19 nt, Artificial Sequence
  Description of Artificial Sequence: Synthetic oligonucleotide
uucuuaaaaccgcagcgca

SEQ ID NO: 2239495 - RNA, 19 nt, Artificial Sequence
  Description of Artificial Sequence: Synthetic oligonucleotide
cauagaauugacagagggc

SEQ ID NO: 2239496 - RNA, 19 nt, Artificial Sequence
  Description of Artificial Sequence: Synthetic oligonucleotide
uaaccuucaaucugaaagu

SEQ ID NO: 2239497 - RNA, 19 nt, Artificial Sequence
  Description of Artificial Sequence: Synthetic oligonucleotide
ucugaauccauaucuuugu

SEQ ID NO: 2239498 - RNA, 19 nt, Artificial Sequence
  Description of Artificial Sequence: Synthetic oligonucleotide
cuggucuacuccuugaccc

SEQ ID NO: 2239499 - RNA, 19 nt, Artificial Sequence
  Description of Artificial Sequence: Synthetic oligonucleotide
cuaucauguagguaagcag

SEQ ID NO: 2239500 - RNA, 19 nt, Artificial Sequence
  Description of Artificial Sequence: Synthetic oligonucleotide
aucaggauugguuuugaug

SEQ ID NO: 2239501 - RNA, 19 nt, Artificial Sequence
  Description of Artificial Sequence: Synthetic oligonucleotide
uuuuccacauagaauugac

SEQ ID NO: 2239502 - RNA, 19 nt, Artificial Sequence
  Description of Artificial Sequence: Synthetic oligonucleotide
auuauaaccuucaaucuga

SEQ ID NO: 2239503 - RNA, 19 nt, Artificial Sequence
  Description of Artificial Sequence: Synthetic oligonucleotide
aaucguuggauguggauua

SEQ ID NO: 2239504 - RNA, 19 nt, Artificial Sequence
  Description of Artificial Sequence: Synthetic oligonucleotide
ugauucagauaaauaugug

SEQ ID NO: 2239505 - RNA, 19 nt, Artificial Sequence
  Description of Artificial Sequence: Synthetic oligonucleotide
auaucuuuguagucugcuc

SEQ ID NO: 2239506 - RNA, 19 nt, Artificial Sequence
  Description of Artificial Sequence: Synthetic oligonucleotide
acuggaaaccauaaacugg

SEQ ID NO: 2239507 - RNA, 19 nt, Artificial Sequence
  Description of Artificial Sequence: Synthetic oligonucleotide
aucccauauucucacuccc

SEQ ID NO: 2239508 - RNA, 19 nt, Artificial Sequence
  Description of Artificial Sequence: Synthetic oligonucleotide
uccuucuuaaaaccgcagc

SEQ ID NO: 2239509 - RNA, 19 nt, Artificial Sequence
  Description of Artificial Sequence: Synthetic oligonucleotide
auaugugcaucucccaaag

SEQ ID NO: 2239510 - RNA, 19 nt, Artificial Sequence
  Description of Artificial Sequence: Synthetic oligonucleotide
aguauggacaaaaucaccu

SEQ ID NO: 2239511 - RNA, 19 nt, Artificial Sequence
  Description of Artificial Sequence: Synthetic oligonucleotide
uaaaccauagcaacuccuc

SEQ ID NO: 2239512 - RNA, 19 nt, Artificial Sequence
  Description of Artificial Sequence: Synthetic oligonucleotide
augccgaacaccgacaagg

SEQ ID NO: 2239513 - RNA, 19 nt, Artificial Sequence
  Description of Artificial Sequence: Synthetic oligonucleotide
uaaaguuggcaagacagcu

SEQ ID NO: 2239514 - RNA, 19 nt, Artificial Sequence
  Description of Artificial Sequence: Synthetic oligonucleotide
gaugauucuucugucauca

SEQ ID NO: 2239515 - RNA, 19 nt, Artificial Sequence
  Description of Artificial Sequence: Synthetic oligonucleotide
cagaacacucuuuugguug

SEQ ID NO: 2239516 - RNA, 19 nt, Artificial Sequence
  Description of Artificial Sequence: Synthetic oligonucleotide
ucugucaucaggauugguu

SEQ ID NO: 2239517 - RNA, 19 nt, Artificial Sequence
  Description of Artificial Sequence: Synthetic oligonucleotide
augauucagauaaauaugu

SEQ ID NO: 2239518 - RNA, 19 nt, Artificial Sequence
  Description of Artificial Sequence: Synthetic oligonucleotide
cagcaucuuugaaagagcg

SEQ ID NO: 2239519 - RNA, 19 nt, Artificial Sequence
  Description of Artificial Sequence: Synthetic oligonucleotide
uuuguagucugcuccaaaa

SEQ ID NO: 2239520 - RNA, 19 nt, Artificial Sequence
  Description of Artificial Sequence: Synthetic oligonucleotide
ucaauugucucaacuuuuc

SEQ ID NO: 2239521 - RNA, 19 nt, Artificial Sequence
  Description of Artificial Sequence: Synthetic oligonucleotide
aagagcgcuaaacagccau

SEQ ID NO: 2239522 - RNA, 19 nt, Artificial Sequence
  Description of Artificial Sequence: Synthetic oligonucleotide
aaccuucaaucugaaaguc

SEQ ID NO: 2239523 - RNA, 19 nt, Artificial Sequence
  Description of Artificial Sequence: Synthetic oligonucleotide
uccauuuuaaucguuggau

SEQ ID NO: 2239524 - RNA, 19 nt, Artificial Sequence
  Description of Artificial Sequence: Synthetic oligonucleotide
aaucaucaauugucucaac

SEQ ID NO: 2239525 - RNA, 19 nt, Artificial Sequence
  Description of Artificial Sequence: Synthetic oligonucleotide
caucucucaggcuguaucg

SEQ ID NO: 2239526 - RNA, 19 nt, Artificial Sequence
  Description of Artificial Sequence: Synthetic oligonucleotide
ucuuuagcauuuguggagc

SEQ ID NO: 2239527 - RNA, 19 nt, Artificial Sequence
  Description of Artificial Sequence: Synthetic oligonucleotide
aaaguuggcaagacagcuc

SEQ ID NO: 2239528 - RNA, 19 nt, Artificial Sequence
  Description of Artificial Sequence: Synthetic oligonucleotide
gaauugacagagggcaugg

SEQ ID NO: 2239529 - RNA, 19 nt, Artificial Sequence
  Description of Artificial Sequence: Synthetic oligonucleotide
ugugcaucucccaaaguau

SEQ ID NO: 2239530 - RNA, 19 nt, Artificial Sequence
  Description of Artificial Sequence: Synthetic oligonucleotide
auggacaaaaucaccuggc

SEQ ID NO: 2239531 - RNA, 19 nt, Artificial Sequence
  Description of Artificial Sequence: Synthetic oligonucleotide
uuuccacauagaauugaca

SEQ ID NO: 2239532 - RNA, 19 nt, Artificial Sequence
  Description of Artificial Sequence: Synthetic oligonucleotide
gacccgaguaaucugaauc

SEQ ID NO: 2239533 - RNA, 19 nt, Artificial Sequence
  Description of Artificial Sequence: Synthetic oligonucleotide
uccacauagaauugacaga

SEQ ID NO: 2239534 - RNA, 19 nt, Artificial Sequence
  Description of Artificial Sequence: Synthetic oligonucleotide
ugaauuuucaguggcucga

SEQ ID NO: 2239535 - RNA, 19 nt, Artificial Sequence
  Description of Artificial Sequence: Synthetic oligonucleotide
aacaccgacaaggugccag

SEQ ID NO: 2239536 - RNA, 19 nt, Artificial Sequence
  Description of Artificial Sequence: Synthetic oligonucleotide
acuggcauagcggagaagu

SEQ ID NO: 2239537 - RNA, 19 nt, Artificial Sequence
  Description of Artificial Sequence: Synthetic oligonucleotide
uaaacugggcccagguccc

SEQ ID NO: 2239538 - RNA, 19 nt, Artificial Sequence
  Description of Artificial Sequence: Synthetic oligonucleotide
uuugggaaaggucuugguu

SEQ ID NO: 2239539 - RNA, 19 nt, Artificial Sequence
  Description of Artificial Sequence: Synthetic oligonucleotide
cuucuuaaaaccgcagcgc

SEQ ID NO: 2239540 - RNA, 19 nt, Artificial Sequence
  Description of Artificial Sequence: Synthetic oligonucleotide
uuuaaucguuggaugugga

SEQ ID NO: 2239541 - RNA, 19 nt, Artificial Sequence
  Description of Artificial Sequence: Synthetic oligonucleotide
ucucccaaaguauggacaa

SEQ ID NO: 2239542 - RNA, 19 nt, Artificial Sequence
  Description of Artificial Sequence: Synthetic oligonucleotide
ucaucucucaggcuguauc

SEQ ID NO: 2239543 - RNA, 19 nt, Artificial Sequence
  Description of Artificial Sequence: Synthetic oligonucleotide
aaaccauaaacugggccca

SEQ ID NO: 2239544 - RNA, 19 nt, Artificial Sequence
  Description of Artificial Sequence: Synthetic oligonucleotide
caauugucucaacuuuucg

SEQ ID NO: 2239545 - RNA, 19 nt, Artificial Sequence
  Description of Artificial Sequence: Synthetic oligonucleotide
uuagcauuuguggagcccu

SEQ ID NO: 2239546 - RNA, 19 nt, Artificial Sequence
  Description of Artificial Sequence: Synthetic oligonucleotide
auuuugagcuuugggaaag

SEQ ID NO: 2239547 - RNA, 19 nt, Artificial Sequence
  Description of Artificial Sequence: Synthetic oligonucleotide
guauggacaaaaucaccug

SEQ ID NO: 2239548 - RNA, 19 nt, Artificial Sequence
  Description of Artificial Sequence: Synthetic oligonucleotide
accgacaaggugccagugc

SEQ ID NO: 2239549 - RNA, 19 nt, Artificial Sequence
  Description of Artificial Sequence: Synthetic oligonucleotide
aauugacagagggcauggc

SEQ ID NO: 2239550 - RNA, 19 nt, Artificial Sequence
  Description of Artificial Sequence: Synthetic oligonucleotide
guucuuuagcauuugugga

SEQ ID NO: 2239551 - RNA, 19 nt, Artificial Sequence
  Description of Artificial Sequence: Synthetic oligonucleotide
uggacaaaaucaccuggcu

SEQ ID NO: 2239552 - RNA, 19 nt, Artificial Sequence
  Description of Artificial Sequence: Synthetic oligonucleotide
agauaaauaugugcaucuc

SEQ ID NO: 2239553 - RNA, 19 nt, Artificial Sequence
  Description of Artificial Sequence: Synthetic oligonucleotide
uuucaguggcucgauauga

SEQ ID NO: 2239554 - RNA, 19 nt, Artificial Sequence
  Description of Artificial Sequence: Synthetic oligonucleotide
augugcaucucccaaagua

SEQ ID NO: 2239555 - RNA, 19 nt, Artificial Sequence
  Description of Artificial Sequence: Synthetic oligonucleotide
ccuucuuaaaaccgcagcg

SEQ ID NO: 2239556 - RNA, 19 nt, Artificial Sequence
  Description of Artificial Sequence: Synthetic oligonucleotide
agguaagcagggcauagcu

SEQ ID NO: 2239557 - RNA, 19 nt, Artificial Sequence
  Description of Artificial Sequence: Synthetic oligonucleotide
agucuucaacuuugaaauc

SEQ ID NO: 2239558 - RNA, 19 nt, Artificial Sequence
  Description of Artificial Sequence: Synthetic oligonucleotide
uugguugugagcagaggaa

SEQ ID NO: 2239559 - RNA, 19 nt, Artificial Sequence
  Description of Artificial Sequence: Synthetic oligonucleotide
gagcagaggaaauucaucu

SEQ ID NO: 2239560 - RNA, 19 nt, Artificial Sequence
  Description of Artificial Sequence: Synthetic oligonucleotide
uacuccuugacccgaguaa

SEQ ID NO: 2239561 - RNA, 19 nt, Artificial Sequence
  Description of Artificial Sequence: Synthetic oligonucleotide
caggcacacaugaugauuc

SEQ ID NO: 2239562 - RNA, 19 nt, Artificial Sequence
  Description of Artificial Sequence: Synthetic oligonucleotide
ccgaacaccgacaaggugc

SEQ ID NO: 2239563 - RNA, 19 nt, Artificial Sequence
  Description of Artificial Sequence: Synthetic oligonucleotide
ggaaaccauaaacugggcc

SEQ ID NO: 2239564 - RNA, 19 nt, Artificial Sequence
  Description of Artificial Sequence: Synthetic oligonucleotide
ucccuuggaggacaguucu

SEQ ID NO: 2239565 - RNA, 19 nt, Artificial Sequence
  Description of Artificial Sequence: Synthetic oligonucleotide
agaacacucuuuugguugu

SEQ ID NO: 2239566 - RNA, 19 nt, Artificial Sequence
  Description of Artificial Sequence: Synthetic oligonucleotide
cacucuuuugguugugagc

SEQ ID NO: 2239567 - RNA, 19 nt, Artificial Sequence
  Description of Artificial Sequence: Synthetic oligonucleotide
cucugguaaaguuggcaag

SEQ ID NO: 2239568 - RNA, 19 nt, Artificial Sequence
  Description of Artificial Sequence: Synthetic oligonucleotide
agaggaaauucaucucuca

SEQ ID NO: 2239569 - RNA, 19 nt, Artificial Sequence
  Description of Artificial Sequence: Synthetic oligonucleotide
uuuagcauuuguggagccc

SEQ ID NO: 2239570 - RNA, 19 nt, Artificial Sequence
  Description of Artificial Sequence: Synthetic oligonucleotide
aaggugccagugccgguac

SEQ ID NO: 2239571 - RNA, 19 nt, Artificial Sequence
  Description of Artificial Sequence: Synthetic oligonucleotide
uaaucguuggauguggauu

SEQ ID NO: 2239572 - RNA, 19 nt, Artificial Sequence
  Description of Artificial Sequence: Synthetic oligonucleotide
cuuccugucgagcagagaa

SEQ ID NO: 2239573 - RNA, 19 nt, Artificial Sequence
  Description of Artificial Sequence: Synthetic oligonucleotide
ugucgagcagagaauccca

SEQ ID NO: 2239574 - RNA, 19 nt, Artificial Sequence
  Description of Artificial Sequence: Synthetic oligonucleotide
acacucuuuugguugugag

SEQ ID NO: 2239575 - RNA, 19 nt, Artificial Sequence
  Description of Artificial Sequence: Synthetic oligonucleotide
gauuuugagcuuugggaaa

SEQ ID NO: 2239576 - RNA, 19 nt, Artificial Sequence
  Description of Artificial Sequence: Synthetic oligonucleotide
caguggcucgauaugauuc

SEQ ID NO: 2239577 - RNA, 19 nt, Artificial Sequence
  Description of Artificial Sequence: Synthetic oligonucleotide
ccacauagaauugacagag

SEQ ID NO: 2239578 - RNA, 19 nt, Artificial Sequence
  Description of Artificial Sequence: Synthetic oligonucleotide
agaauugacagagggcaug

SEQ ID NO: 2239579 - RNA, 19 nt, Artificial Sequence
  Description of Artificial Sequence: Synthetic oligonucleotide
agcuggucuacuccuugac

SEQ ID NO: 2239580 - RNA, 19 nt, Artificial Sequence
  Description of Artificial Sequence: Synthetic oligonucleotide
ucuuaaaaccgcagcgcau

SEQ ID NO: 2239581 - RNA, 19 nt, Artificial Sequence
  Description of Artificial Sequence: Synthetic oligonucleotide
aguggcucgauaugauuca

SEQ ID NO: 2239582 - RNA, 19 nt, Artificial Sequence
  Description of Artificial Sequence: Synthetic oligonucleotide
agagaaucccaggcugucc

SEQ ID NO: 2239583 - RNA, 19 nt, Artificial Sequence
  Description of Artificial Sequence: Synthetic oligonucleotide
uuguagucugcuccaaaau

SEQ ID NO: 2239584 - RNA, 19 nt, Artificial Sequence
  Description of Artificial Sequence: Synthetic oligonucleotide
aggggaagaucuuuugggu

SEQ ID NO: 2239585 - RNA, 19 nt, Artificial Sequence
  Description of Artificial Sequence: Synthetic oligonucleotide
uuauaaccuucaaucugaa

SEQ ID NO: 2239586 - RNA, 19 nt, Artificial Sequence
  Description of Artificial Sequence: Synthetic oligonucleotide
uuaaucguuggauguggau

SEQ ID NO: 2239587 - RNA, 19 nt, Artificial Sequence
  Description of Artificial Sequence: Synthetic oligonucleotide
cacauagaauugacagagg

SEQ ID NO: 2239588 - RNA, 19 nt, Artificial Sequence
  Description of Artificial Sequence: Synthetic oligonucleotide
ucuuuugguugugagcaga

SEQ ID NO: 2239589 - RNA, 19 nt, Artificial Sequence
  Description of Artificial Sequence: Synthetic oligonucleotide
ucaccuggcuucaggcccg

SEQ ID NO: 2239590 - RNA, 19 nt, Artificial Sequence
  Description of Artificial Sequence: Synthetic oligonucleotide
aggacaguucuuuagcauu

SEQ ID NO: 2239591 - RNA, 19 nt, Artificial Sequence
  Description of Artificial Sequence: Synthetic oligonucleotide
aauucaucucucaggcugu

SEQ ID NO: 2239592 - RNA, 19 nt, Artificial Sequence
  Description of Artificial Sequence: Synthetic oligonucleotide
cuuuagcauuuguggagcc

SEQ ID NO: 2239593 - RNA, 19 nt, Artificial Sequence
  Description of Artificial Sequence: Synthetic oligonucleotide
guuggauguggauuauaac

SEQ ID NO: 2239594 - RNA, 19 nt, Artificial Sequence
  Description of Artificial Sequence: Synthetic oligonucleotide
auuuuccacauagaauuga

SEQ ID NO: 2239595 - RNA, 19 nt, Artificial Sequence
  Description of Artificial Sequence: Synthetic oligonucleotide
ggauuuugagcuuugggaa

SEQ ID NO: 2239596 - RNA, 19 nt, Artificial Sequence
  Description of Artificial Sequence: Synthetic oligonucleotide
auuuguggagcccuugaua

SEQ ID NO: 2239597 - RNA, 19 nt, Artificial Sequence
  Description of Artificial Sequence: Synthetic oligonucleotide
gagaaucccaggcugucca

SEQ ID NO: 2239598 - RNA, 19 nt, Artificial Sequence
  Description of Artificial Sequence: Synthetic oligonucleotide
cauuuuaaucguuggaugu

SEQ ID NO: 2239599 - RNA, 19 nt, Artificial Sequence
  Description of Artificial Sequence: Synthetic oligonucleotide
acacaugaugauucuucug

SEQ ID NO: 2239600 - RNA, 19 nt, Artificial Sequence
  Description of Artificial Sequence: Synthetic oligonucleotide
aagaucuuuuggguuccag

SEQ ID NO: 2239601 - RNA, 19 nt, Artificial Sequence
  Description of Artificial Sequence: Synthetic oligonucleotide
uuaaaaccgcagcgcauaa

SEQ ID NO: 2239602 - RNA, 19 nt, Artificial Sequence
  Description of Artificial Sequence: Synthetic oligonucleotide
agcgcuaaacagccauuuc

SEQ ID NO: 2239603 - RNA, 19 nt, Artificial Sequence
  Description of Artificial Sequence: Synthetic oligonucleotide
ugugugcuaucauguaggu

SEQ ID NO: 2239604 - RNA, 19 nt, Artificial Sequence
  Description of Artificial Sequence: Synthetic oligonucleotide
cuguaucgcgccugcaugc

SEQ ID NO: 2239605 - RNA, 19 nt, Artificial Sequence
  Description of Artificial Sequence: Synthetic oligonucleotide
ucccaaaguauggacaaaa

SEQ ID NO: 2239606 - RNA, 19 nt, Artificial Sequence
  Description of Artificial Sequence: Synthetic oligonucleotide
ugaugauucuucugucauc

SEQ ID NO: 2239607 - RNA, 19 nt, Artificial Sequence
  Description of Artificial Sequence: Synthetic oligonucleotide
uugugagcagaggaaauuc

SEQ ID NO: 2239608 - RNA, 19 nt, Artificial Sequence
  Description of Artificial Sequence: Synthetic oligonucleotide
gauguggauuauaaccuuc

SEQ ID NO: 2239609 - RNA, 19 nt, Artificial Sequence
  Description of Artificial Sequence: Synthetic oligonucleotide
auaaaccauagcaacuccu

SEQ ID NO: 2239610 - RNA, 19 nt, Artificial Sequence
  Description of Artificial Sequence: Synthetic oligonucleotide
uccuugacccgaguaaucu

SEQ ID NO: 2239611 - RNA, 19 nt, Artificial Sequence
  Description of Artificial Sequence: Synthetic oligonucleotide
uuuugcagcuggucuacuc

SEQ ID NO: 2239612 - RNA, 19 nt, Artificial Sequence
  Description of Artificial Sequence: Synthetic oligonucleotide
caaaaugucuccacuggaa

SEQ ID NO: 2239613 - RNA, 19 nt, Artificial Sequence
  Description of Artificial Sequence: Synthetic oligonucleotide
uggaaaccauaaacugggc

SEQ ID NO: 2239614 - RNA, 19 nt, Artificial Sequence
  Description of Artificial Sequence: Synthetic oligonucleotide
aauuuucaguggcucgaua

SEQ ID NO: 2239615 - RNA, 19 nt, Artificial Sequence
  Description of Artificial Sequence: Synthetic oligonucleotide
ucucaggcuguaucgcgcc

SEQ ID NO: 2239616 - RNA, 19 nt, Artificial Sequence
  Description of Artificial Sequence: Synthetic oligonucleotide
gcgcuaaacagccauuucc

SEQ ID NO: 2239617 - RNA, 19 nt, Artificial Sequence
  Description of Artificial Sequence: Synthetic oligonucleotide
gguauucacagcaucuuug

SEQ ID NO: 2239618 - RNA, 19 nt, Artificial Sequence
  Description of Artificial Sequence: Synthetic oligonucleotide
cugucgagcagagaauccc

SEQ ID NO: 2239619 - RNA, 19 nt, Artificial Sequence
  Description of Artificial Sequence: Synthetic oligonucleotide
gauugguuuugaugguguc

SEQ ID NO: 2239620 - RNA, 19 nt, Artificial Sequence
  Description of Artificial Sequence: Synthetic oligonucleotide
aaggaggcagugccaucag

SEQ ID NO: 2239621 - RNA, 19 nt, Artificial Sequence
  Description of Artificial Sequence: Synthetic oligonucleotide
uauaaccuucaaucugaaa

SEQ ID NO: 2239622 - RNA, 19 nt, Artificial Sequence
  Description of Artificial Sequence: Synthetic oligonucleotide
uuggcaagacagcucccca

SEQ ID NO: 2239623 - RNA, 19 nt, Artificial Sequence
  Description of Artificial Sequence: Synthetic oligonucleotide
ucuuugaaagagcgcuaaa

SEQ ID NO: 2239624 - RNA, 19 nt, Artificial Sequence
  Description of Artificial Sequence: Synthetic oligonucleotide
uaucgcgccugcaugccga

SEQ ID NO: 2239625 - RNA, 19 nt, Artificial Sequence
  Description of Artificial Sequence: Synthetic oligonucleotide
ucccauauucucacucccu

SEQ ID NO: 2239626 - RNA, 19 nt, Artificial Sequence
  Description of Artificial Sequence: Synthetic oligonucleotide
cagaggaaauucaucucuc

SEQ ID NO: 2239627 - RNA, 19 nt, Artificial Sequence
  Description of Artificial Sequence: Synthetic oligonucleotide
cccuugauaaaccauagca

SEQ ID NO: 2239628 - RNA, 19 nt, Artificial Sequence
  Description of Artificial Sequence: Synthetic oligonucleotide
aucuccugaccucugguaa

SEQ ID NO: 2239629 - RNA, 19 nt, Artificial Sequence
  Description of Artificial Sequence: Synthetic oligonucleotide
agcagcggagugcagcuug

SEQ ID NO: 2239630 - RNA, 19 nt, Artificial Sequence
  Description of Artificial Sequence: Synthetic oligonucleotide
uagaauugacagagggcau

SEQ ID NO: 2239631 - RNA, 19 nt, Artificial Sequence
  Description of Artificial Sequence: Synthetic oligonucleotide
ccauuuuaaucguuggaug

SEQ ID NO: 2239632 - RNA, 19 nt, Artificial Sequence
  Description of Artificial Sequence: Synthetic oligonucleotide
guagguaagcagggcauag

SEQ ID NO: 2239633 - RNA, 19 nt, Artificial Sequence
  Description of Artificial Sequence: Synthetic oligonucleotide
ccaacgacuggcauagcgg

SEQ ID NO: 2239634 - RNA, 19 nt, Artificial Sequence
  Description of Artificial Sequence: Synthetic oligonucleotide
uggcaucccauauucucac

SEQ ID NO: 2239635 - RNA, 19 nt, Artificial Sequence
  Description of Artificial Sequence: Synthetic oligonucleotide
ugcaugccgaacaccgaca

SEQ ID NO: 2239636 - RNA, 19 nt, Artificial Sequence
  Description of Artificial Sequence: Synthetic oligonucleotide
uuugagcuuugggaaaggu

SEQ ID NO: 2239637 - RNA, 19 nt, Artificial Sequence
  Description of Artificial Sequence: Synthetic oligonucleotide
gccaacgacuggcauagcg

SEQ ID NO: 2239638 - RNA, 19 nt, Artificial Sequence
  Description of Artificial Sequence: Synthetic oligonucleotide
aacacucuuuugguuguga

SEQ ID NO: 2239639 - RNA, 19 nt, Artificial Sequence
  Description of Artificial Sequence: Synthetic oligonucleotide
ccaaaguauggacaaaauc

SEQ ID NO: 2239640 - RNA, 19 nt, Artificial Sequence
  Description of Artificial Sequence: Synthetic oligonucleotide
cagauaaauaugugcaucu

SEQ ID NO: 2239641 - RNA, 19 nt, Artificial Sequence
  Description of Artificial Sequence: Synthetic oligonucleotide
accauagcaacuccuccaa

SEQ ID NO: 2239642 - RNA, 19 nt, Artificial Sequence
  Description of Artificial Sequence: Synthetic oligonucleotide
ucucgcugaagcugaauuu

SEQ ID NO: 2239643 - RNA, 19 nt, Artificial Sequence
  Description of Artificial Sequence: Synthetic oligonucleotide
uaugugcaucucccaaagu

SEQ ID NO: 2239644 - RNA, 19 nt, Artificial Sequence
  Description of Artificial Sequence: Synthetic oligonucleotide
auauucucacucccuugga

SEQ ID NO: 2239645 - RNA, 19 nt, Artificial Sequence
  Description of Artificial Sequence: Synthetic oligonucleotide
guuggcaagacagcucccc

SEQ ID NO: 2239646 - RNA, 19 nt, Artificial Sequence
  Description of Artificial Sequence: Synthetic oligonucleotide
agcggagugcagcuuggag

SEQ ID NO: 2239647 - RNA, 19 nt, Artificial Sequence
  Description of Artificial Sequence: Synthetic oligonucleotide
gggaagaucuuuuggguuc

SEQ ID NO: 2239648 - RNA, 19 nt, Artificial Sequence
  Description of Artificial Sequence: Synthetic oligonucleotide
aaacucccuuccagaacac

SEQ ID NO: 2239649 - RNA, 19 nt, Artificial Sequence
  Description of Artificial Sequence: Synthetic oligonucleotide
cuccuucuuaaaaccgcag

SEQ ID NO: 2239650 - RNA, 19 nt, Artificial Sequence
  Description of Artificial Sequence: Synthetic oligonucleotide
aggucuugguucucgcuga

SEQ ID NO: 2239651 - RNA, 19 nt, Artificial Sequence
  Description of Artificial Sequence: Synthetic oligonucleotide
ugaugugugcuaucaugua

SEQ ID NO: 2239652 - RNA, 19 nt, Artificial Sequence
  Description of Artificial Sequence: Synthetic oligonucleotide
cugcaugccgaacaccgac

SEQ ID NO: 2239653 - RNA, 19 nt, Artificial Sequence
  Description of Artificial Sequence: Synthetic oligonucleotide
ugguugugagcagaggaaa

SEQ ID NO: 2239654 - RNA, 19 nt, Artificial Sequence
  Description of Artificial Sequence: Synthetic oligonucleotide
aacagccauuuccauuuua

SEQ ID NO: 2239655 - RNA, 19 nt, Artificial Sequence
  Description of Artificial Sequence: Synthetic oligonucleotide
aaaccgcagcgcauaaugu

SEQ ID NO: 2239656 - RNA, 19 nt, Artificial Sequence
  Description of Artificial Sequence: Synthetic oligonucleotide
ucgauaugauucagauaaa

SEQ ID NO: 2239657 - RNA, 19 nt, Artificial Sequence
  Description of Artificial Sequence: Synthetic oligonucleotide
auguggauuauaaccuuca

SEQ ID NO: 2239658 - RNA, 19 nt, Artificial Sequence
  Description of Artificial Sequence: Synthetic oligonucleotide
uccugucgagcagagaauc

SEQ ID NO: 2239659 - RNA, 19 nt, Artificial Sequence
  Description of Artificial Sequence: Synthetic oligonucleotide
ucgcugaagcugaauuuuc

SEQ ID NO: 2239660 - RNA, 19 nt, Artificial Sequence
  Description of Artificial Sequence: Synthetic oligonucleotide
gucucaacuuuucgaagga

SEQ ID NO: 2239661 - RNA, 19 nt, Artificial Sequence
  Description of Artificial Sequence: Synthetic oligonucleotide
agugccaucaggggaagau

SEQ ID NO: 2239662 - RNA, 19 nt, Artificial Sequence
  Description of Artificial Sequence: Synthetic oligonucleotide
gcagcuuggagccaacgac

SEQ ID NO: 2239663 - RNA, 19 nt, Artificial Sequence
  Description of Artificial Sequence: Synthetic oligonucleotide
caacgacuggcauagcgga

SEQ ID NO: 2239664 - RNA, 19 nt, Artificial Sequence
  Description of Artificial Sequence: Synthetic oligonucleotide
gucugcuccaaaaugucuc

SEQ ID NO: 2239665 - RNA, 19 nt, Artificial Sequence
  Description of Artificial Sequence: Synthetic oligonucleotide
gcggagugcagcuuggagc

SEQ ID NO: 2239666 - RNA, 19 nt, Artificial Sequence
  Description of Artificial Sequence: Synthetic oligonucleotide
ggauuauaaccuucaaucu

SEQ ID NO: 2239667 - RNA, 19 nt, Artificial Sequence
  Description of Artificial Sequence: Synthetic oligonucleotide
uguaucgcgccugcaugcc

SEQ ID NO: 2239668 - RNA, 19 nt, Artificial Sequence
  Description of Artificial Sequence: Synthetic oligonucleotide
ucuacuccuugacccgagu

SEQ ID NO: 2239669 - RNA, 19 nt, Artificial Sequence
  Description of Artificial Sequence: Synthetic oligonucleotide
gguacugcagcuccccgug

SEQ ID NO: 2239670 - RNA, 19 nt, Artificial Sequence
  Description of Artificial Sequence: Synthetic oligonucleotide
uugacccgaguaaucugaa

SEQ ID NO: 2239671 - RNA, 19 nt, Artificial Sequence
  Description of Artificial Sequence: Synthetic oligonucleotide
aacgacuggcauagcggag

SEQ ID NO: 2239672 - RNA, 19 nt, Artificial Sequence
  Description of Artificial Sequence: Synthetic oligonucleotide
ugcuaucauguagguaagc

SEQ ID NO: 2239673 - RNA, 19 nt, Artificial Sequence
  Description of Artificial Sequence: Synthetic oligonucleotide
gguuuugauggugucaauc

SEQ ID NO: 2239674 - RNA, 19 nt, Artificial Sequence
  Description of Artificial Sequence: Synthetic oligonucleotide
guaucgcgccugcaugccg

SEQ ID NO: 2239675 - RNA, 19 nt, Artificial Sequence
  Description of Artificial Sequence: Synthetic oligonucleotide
cuuaaaaccgcagcgcaua

SEQ ID NO: 2239676 - RNA, 19 nt, Artificial Sequence
  Description of Artificial Sequence: Synthetic oligonucleotide
agcccuugauaaaccauag

SEQ ID NO: 2239677 - RNA, 19 nt, Artificial Sequence
  Description of Artificial Sequence: Synthetic oligonucleotide
ucgaaggauuuugagcuuu

SEQ ID NO: 2239678 - RNA, 19 nt, Artificial Sequence
  Description of Artificial Sequence: Synthetic oligonucleotide
gcuaucauguagguaagca

SEQ ID NO: 2239679 - RNA, 19 nt, Artificial Sequence
  Description of Artificial Sequence: Synthetic oligonucleotide
agguacugcagcuccccgu

SEQ ID NO: 2239680 - RNA, 19 nt, Artificial Sequence
  Description of Artificial Sequence: Synthetic oligonucleotide
accucugguaaaguuggca

SEQ ID NO: 2239681 - RNA, 19 nt, Artificial Sequence
  Description of Artificial Sequence: Synthetic oligonucleotide
cagggcauagcuggcaaug

SEQ ID NO: 2239682 - RNA, 19 nt, Artificial Sequence
  Description of Artificial Sequence: Synthetic oligonucleotide
ccauuggcaucccauauuc

SEQ ID NO: 2239683 - RNA, 19 nt, Artificial Sequence
  Description of Artificial Sequence: Synthetic oligonucleotide
acgacuggcauagcggaga

SEQ ID NO: 2239684 - RNA, 19 nt, Artificial Sequence
  Description of Artificial Sequence: Synthetic oligonucleotide
uguagguaagcagggcaua

SEQ ID NO: 2239685 - RNA, 19 nt, Artificial Sequence
  Description of Artificial Sequence: Synthetic oligonucleotide
guggauuauaaccuucaau

SEQ ID NO: 2239686 - RNA, 19 nt, Artificial Sequence
  Description of Artificial Sequence: Synthetic oligonucleotide
gcuguaucgcgccugcaug

SEQ ID NO: 2239687 - RNA, 19 nt, Artificial Sequence
  Description of Artificial Sequence: Synthetic oligonucleotide
ggaggacaguucuuuagca

SEQ ID NO: 2239688 - RNA, 19 nt, Artificial Sequence
  Description of Artificial Sequence: Synthetic oligonucleotide
agcgcauaaugugcuccac

SEQ ID NO: 2239689 - RNA, 19 nt, Artificial Sequence
  Description of Artificial Sequence: Synthetic oligonucleotide
acgguccuccuucuuaaaa

SEQ ID NO: 2239690 - RNA, 19 nt, Artificial Sequence
  Description of Artificial Sequence: Synthetic oligonucleotide
acaccgacaaggugccagu

SEQ ID NO: 2239691 - RNA, 19 nt, Artificial Sequence
  Description of Artificial Sequence: Synthetic oligonucleotide
cgugaugugugcuaucaug

SEQ ID NO: 2239692 - RNA, 19 nt, Artificial Sequence
  Description of Artificial Sequence: Synthetic oligonucleotide
aacucccuuccagaacacu

SEQ ID NO: 2239693 - RNA, 19 nt, Artificial Sequence
  Description of Artificial Sequence: Synthetic oligonucleotide
auguagguaagcagggcau

SEQ ID NO: 2239694 - RNA, 19 nt, Artificial Sequence
  Description of Artificial Sequence: Synthetic oligonucleotide
cucccuuggaggacaguuc

SEQ ID NO: 2239695 - RNA, 19 nt, Artificial Sequence
  Description of Artificial Sequence: Synthetic oligonucleotide
uggcaagacagcuccccau

SEQ ID NO: 2239696 - RNA, 19 nt, Artificial Sequence
  Description of Artificial Sequence: Synthetic oligonucleotide
uggcaauguugaagggcac

SEQ ID NO: 2239697 - RNA, 19 nt, Artificial Sequence
  Description of Artificial Sequence: Synthetic oligonucleotide
acucccuuggaggacaguu

SEQ ID NO: 2239698 - RNA, 19 nt, Artificial Sequence
  Description of Artificial Sequence: Synthetic oligonucleotide
gucgagcagagaaucccag

SEQ ID NO: 2239699 - RNA, 19 nt, Artificial Sequence
  Description of Artificial Sequence: Synthetic oligonucleotide
agcuuggagccaacgacug

SEQ ID NO: 2239700 - RNA, 19 nt, Artificial Sequence
  Description of Artificial Sequence: Synthetic oligonucleotide
gcuggucuacuccuugacc

SEQ ID NO: 2239701 - RNA, 19 nt, Artificial Sequence
  Description of Artificial Sequence: Synthetic oligonucleotide
cggagugcagcuuggagcc

SEQ ID NO: 2239702 - RNA, 19 nt, Artificial Sequence
  Description of Artificial Sequence: Synthetic oligonucleotide
ucuuuguagucugcuccaa

SEQ ID NO: 2239703 - RNA, 19 nt, Artificial Sequence
  Description of Artificial Sequence: Synthetic oligonucleotide
gcugaauuuucaguggcuc

SEQ ID NO: 2239704 - RNA, 19 nt, Artificial Sequence
  Description of Artificial Sequence: Synthetic oligonucleotide
aaagagcgcuaaacagcca

SEQ ID NO: 2239705 - RNA, 19 nt, Artificial Sequence
  Description of Artificial Sequence: Synthetic oligonucleotide
cuaaacagccauuuccauu

SEQ ID NO: 2239706 - RNA, 19 nt, Artificial Sequence
  Description of Artificial Sequence: Synthetic oligonucleotide
agcauuuguggagcccuug

SEQ ID NO: 2239707 - RNA, 19 nt, Artificial Sequence
  Description of Artificial Sequence: Synthetic oligonucleotide
ggugccagugccgguacgg

SEQ ID NO: 2239708 - RNA, 19 nt, Artificial Sequence
  Description of Artificial Sequence: Synthetic oligonucleotide
gcaauguugaagggcacac

SEQ ID NO: 2239709 - RNA, 19 nt, Artificial Sequence
  Description of Artificial Sequence: Synthetic oligonucleotide
ugacccgaguaaucugaau

SEQ ID NO: 2239710 - RNA, 19 nt, Artificial Sequence
  Description of Artificial Sequence: Synthetic oligonucleotide
caggcuguaucgcgccugc

SEQ ID NO: 2239711 - RNA, 19 nt, Artificial Sequence
  Description of Artificial Sequence: Synthetic oligonucleotide
gguaagcagggcauagcug

SEQ ID NO: 2239712 - RNA, 19 nt, Artificial Sequence
  Description of Artificial Sequence: Synthetic oligonucleotide
uaaaaccgcagcgcauaau

SEQ ID NO: 2239713 - RNA, 19 nt, Artificial Sequence
  Description of Artificial Sequence: Synthetic oligonucleotide
cugucaucaggauugguuu

SEQ ID NO: 2239714 - RNA, 19 nt, Artificial Sequence
  Description of Artificial Sequence: Synthetic oligonucleotide
ucaggcccgugaugugugc

SEQ ID NO: 2239715 - RNA, 19 nt, Artificial Sequence
  Description of Artificial Sequence: Synthetic oligonucleotide
gcauaaugugcuccaccug

SEQ ID NO: 2239716 - RNA, 19 nt, Artificial Sequence
  Description of Artificial Sequence: Synthetic oligonucleotide
cuugguucucgcugaagcu

SEQ ID NO: 2239717 - RNA, 19 nt, Artificial Sequence
  Description of Artificial Sequence: Synthetic oligonucleotide
guggcucgauaugauucag

SEQ ID NO: 2239718 - RNA, 19 nt, Artificial Sequence
  Description of Artificial Sequence: Synthetic oligonucleotide
ugucuccacuggaaaccau

SEQ ID NO: 2239719 - RNA, 19 nt, Artificial Sequence
  Description of Artificial Sequence: Synthetic oligonucleotide
ugauggugucaaucacuuu

SEQ ID NO: 2239720 - RNA, 19 nt, Artificial Sequence
  Description of Artificial Sequence: Synthetic oligonucleotide
gcgcauaaugugcuccacc

SEQ ID NO: 2239721 - RNA, 19 nt, Artificial Sequence
  Description of Artificial Sequence: Synthetic oligonucleotide
ccugucgagcagagaaucc

SEQ ID NO: 2239722 - RNA, 19 nt, Artificial Sequence
  Description of Artificial Sequence: Synthetic oligonucleotide
caucuuugaaagagcgcua

SEQ ID NO: 2239723 - RNA, 19 nt, Artificial Sequence
  Description of Artificial Sequence: Synthetic oligonucleotide
cgaacaccgacaaggugcc

SEQ ID NO: 2239724 - RNA, 19 nt, Artificial Sequence
  Description of Artificial Sequence: Synthetic oligonucleotide
ugcugcugagcagcggagu

SEQ ID NO: 2239725 - RNA, 19 nt, Artificial Sequence
  Description of Artificial Sequence: Synthetic oligonucleotide
ggcucgauaugauucagau

SEQ ID NO: 2239726 - RNA, 19 nt, Artificial Sequence
  Description of Artificial Sequence: Synthetic oligonucleotide
gccagugccgguacggucc

SEQ ID NO: 2239727 - RNA, 19 nt, Artificial Sequence
  Description of Artificial Sequence: Synthetic oligonucleotide
gguacgguccuccuucuua

SEQ ID NO: 2239728 - RNA, 19 nt, Artificial Sequence
  Description of Artificial Sequence: Synthetic oligonucleotide
cagagaaucccaggcuguc

SEQ ID NO: 2239729 - RNA, 19 nt, Artificial Sequence
  Description of Artificial Sequence: Synthetic oligonucleotide
caggcccauaucuccugac

SEQ ID NO: 2239730 - RNA, 19 nt, Artificial Sequence
  Description of Artificial Sequence: Synthetic oligonucleotide
cuuggaggacaguucuuua

SEQ ID NO: 2239731 - RNA, 19 nt, Artificial Sequence
  Description of Artificial Sequence: Synthetic oligonucleotide
ugguuuugauggugucaau

SEQ ID NO: 2239732 - RNA, 19 nt, Artificial Sequence
  Description of Artificial Sequence: Synthetic oligonucleotide
cugaauccauaucuuugua

SEQ ID NO: 2239733 - RNA, 19 nt, Artificial Sequence
  Description of Artificial Sequence: Synthetic oligonucleotide
aggugccagugccgguacg

SEQ ID NO: 2239734 - RNA, 19 nt, Artificial Sequence
  Description of Artificial Sequence: Synthetic oligonucleotide
cagcgcauaaugugcucca

SEQ ID NO: 2239735 - RNA, 19 nt, Artificial Sequence
  Description of Artificial Sequence: Synthetic oligonucleotide
ggugguauucacagcaucu

SEQ ID NO: 2239736 - RNA, 19 nt, Artificial Sequence
  Description of Artificial Sequence: Synthetic oligonucleotide
gcagcuggucuacuccuug

SEQ ID NO: 2239737 - RNA, 19 nt, Artificial Sequence
  Description of Artificial Sequence: Synthetic oligonucleotide
gccgguacgguccuccuuc

SEQ ID NO: 2239738 - RNA, 19 nt, Artificial Sequence
  Description of Artificial Sequence: Synthetic oligonucleotide
uucugucaucaggauuggu

SEQ ID NO: 2239739 - RNA, 19 nt, Artificial Sequence
  Description of Artificial Sequence: Synthetic oligonucleotide
gucuacuccuugacccgag

SEQ ID NO: 2239740 - RNA, 19 nt, Artificial Sequence
  Description of Artificial Sequence: Synthetic oligonucleotide
gcauuuguggagcccuuga

SEQ ID NO: 2239741 - RNA, 19 nt, Artificial Sequence
  Description of Artificial Sequence: Synthetic oligonucleotide
gcccuugauaaaccauagc

SEQ ID NO: 2239742 - RNA, 19 nt, Artificial Sequence
  Description of Artificial Sequence: Synthetic oligonucleotide
guacugcagcuccccgugc

SEQ ID NO: 2239743 - RNA, 19 nt, Artificial Sequence
  Description of Artificial Sequence: Synthetic oligonucleotide
cagcuuggagccaacgacu

SEQ ID NO: 2239744 - RNA, 19 nt, Artificial Sequence
  Description of Artificial Sequence: Synthetic oligonucleotide
ccaaaaugucuccacugga

SEQ ID NO: 2239745 - RNA, 19 nt, Artificial Sequence
  Description of Artificial Sequence: Synthetic oligonucleotide
ggagccaacgacuggcaua

SEQ ID NO: 2239746 - RNA, 19 nt, Artificial Sequence
  Description of Artificial Sequence: Synthetic oligonucleotide
gacuggcauagcggagaag

SEQ ID NO: 2239747 - RNA, 19 nt, Artificial Sequence
  Description of Artificial Sequence: Synthetic oligonucleotide
cgguccuccuucuuaaaac

SEQ ID NO: 2239748 - RNA, 19 nt, Artificial Sequence
  Description of Artificial Sequence: Synthetic oligonucleotide
gaccucugguaaaguuggc

SEQ ID NO: 2239749 - RNA, 19 nt, Artificial Sequence
  Description of Artificial Sequence: Synthetic oligonucleotide
cuacuccuugacccgagua

SEQ ID NO: 2239750 - RNA, 19 nt, Artificial Sequence
  Description of Artificial Sequence: Synthetic oligonucleotide
cgcuaaacagccauuucca

SEQ ID NO: 2239751 - RNA, 19 nt, Artificial Sequence
  Description of Artificial Sequence: Synthetic oligonucleotide
ucguuggauguggauuaua

SEQ ID NO: 2239752 - RNA, 19 nt, Artificial Sequence
  Description of Artificial Sequence: Synthetic oligonucleotide
ggcaauguugaagggcaca

SEQ ID NO: 2239753 - RNA, 19 nt, Artificial Sequence
  Description of Artificial Sequence: Synthetic oligonucleotide
gaagaucuuuuggguucca

SEQ ID NO: 2239754 - RNA, 19 nt, Artificial Sequence
  Description of Artificial Sequence: Synthetic oligonucleotide
gaauuuucaguggcucgau

SEQ ID NO: 2239755 - RNA, 19 nt, Artificial Sequence
  Description of Artificial Sequence: Synthetic oligonucleotide
guugugagcagaggaaauu

SEQ ID NO: 2239756 - RNA, 19 nt, Artificial Sequence
  Description of Artificial Sequence: Synthetic oligonucleotide
gccgaacaccgacaaggug

SEQ ID NO: 2239757 - RNA, 19 nt, Artificial Sequence
  Description of Artificial Sequence: Synthetic oligonucleotide
ugccgcggugccuccgcgc

SEQ ID NO: 2239758 - RNA, 19 nt, Artificial Sequence
  Description of Artificial Sequence: Synthetic oligonucleotide
gcccauaucuccugaccuc

SEQ ID NO: 2239759 - RNA, 19 nt, Artificial Sequence
  Description of Artificial Sequence: Synthetic oligonucleotide
ggacaaaaucaccuggcuu

SEQ ID NO: 2239760 - RNA, 19 nt, Artificial Sequence
  Description of Artificial Sequence: Synthetic oligonucleotide
ggcccauaucuccugaccu

SEQ ID NO: 2239761 - RNA, 19 nt, Artificial Sequence
  Description of Artificial Sequence: Synthetic oligonucleotide
uccgcgcccugcugcugag

SEQ ID NO: 2239762 - RNA, 19 nt, Artificial Sequence
  Description of Artificial Sequence: Synthetic oligonucleotide
aggcccgugaugugugcua

SEQ ID NO: 2239763 - RNA, 19 nt, Artificial Sequence
  Description of Artificial Sequence: Synthetic oligonucleotide
cuccccgugccgcggugcc

SEQ ID NO: 2239764 - RNA, 19 nt, Artificial Sequence
  Description of Artificial Sequence: Synthetic oligonucleotide
aucguuggauguggauuau

SEQ ID NO: 2239765 - RNA, 19 nt, Artificial Sequence
  Description of Artificial Sequence: Synthetic oligonucleotide
cauuuguggagcccuugau

SEQ ID NO: 2239766 - RNA, 19 nt, Artificial Sequence
  Description of Artificial Sequence: Synthetic oligonucleotide
ggauugguuuugauggugu

SEQ ID NO: 2239767 - RNA, 19 nt, Artificial Sequence
  Description of Artificial Sequence: Synthetic oligonucleotide
agagcgcuaaacagccauu

SEQ ID NO: 2239768 - RNA, 19 nt, Artificial Sequence
  Description of Artificial Sequence: Synthetic oligonucleotide
caucaggggaagaucuuuu

SEQ ID NO: 2239769 - RNA, 19 nt, Artificial Sequence
  Description of Artificial Sequence: Synthetic oligonucleotide
caggauugguuuugauggu

SEQ ID NO: 2239770 - RNA, 19 nt, Artificial Sequence
  Description of Artificial Sequence: Synthetic oligonucleotide
cucgcugaagcugaauuuu

SEQ ID NO: 2239771 - RNA, 19 nt, Artificial Sequence
  Description of Artificial Sequence: Synthetic oligonucleotide
gagcgcuaaacagccauuu

SEQ ID NO: 2239772 - RNA, 19 nt, Artificial Sequence
  Description of Artificial Sequence: Synthetic oligonucleotide
gcucgauaugauucagaua

SEQ ID NO: 2239773 - RNA, 19 nt, Artificial Sequence
  Description of Artificial Sequence: Synthetic oligonucleotide
agccaacgacuggcauagc

SEQ ID NO: 2239774 - RNA, 19 nt, Artificial Sequence
  Description of Artificial Sequence: Synthetic oligonucleotide
cgaguaaucugaauccaua

SEQ ID NO: 2239775 - RNA, 19 nt, Artificial Sequence
  Description of Artificial Sequence: Synthetic oligonucleotide
cuucaggcccgugaugugu

SEQ ID NO: 2239776 - RNA, 19 nt, Artificial Sequence
  Description of Artificial Sequence: Synthetic oligonucleotide
gcagcggagugcagcuugg

SEQ ID NO: 2239777 - RNA, 19 nt, Artificial Sequence
  Description of Artificial Sequence: Synthetic oligonucleotide
gugccgcggugccuccgcg

SEQ ID NO: 2239778 - RNA, 19 nt, Artificial Sequence
  Description of Artificial Sequence: Synthetic oligonucleotide
ccauaucuccugaccucug

SEQ ID NO: 2239779 - RNA, 19 nt, Artificial Sequence
  Description of Artificial Sequence: Synthetic oligonucleotide
ggggaagaucuuuuggguu

SEQ ID NO: 2239780 - RNA, 19 nt, Artificial Sequence
  Description of Artificial Sequence: Synthetic oligonucleotide
gccgcggugccuccgcgcc

SEQ ID NO: 2239781 - RNA, 19 nt, Artificial Sequence
  Description of Artificial Sequence: Synthetic oligonucleotide
ggucuacuccuugacccga

SEQ ID NO: 2239782 - RNA, 19 nt, Artificial Sequence
  Description of Artificial Sequence: Synthetic oligonucleotide
gugugcuaucauguaggua

SEQ ID NO: 2239783 - RNA, 19 nt, Artificial Sequence
  Description of Artificial Sequence: Synthetic oligonucleotide
aucgcgccugcaugccgaa

SEQ ID NO: 2239784 - RNA, 19 nt, Artificial Sequence
  Description of Artificial Sequence: Synthetic oligonucleotide
agcuccccgugccgcggug

SEQ ID NO: 2239785 - RNA, 19 nt, Artificial Sequence
  Description of Artificial Sequence: Synthetic oligonucleotide
cccgugaugugugcuauca

SEQ ID NO: 2239786 - RNA, 19 nt, Artificial Sequence
  Description of Artificial Sequence: Synthetic oligonucleotide
ggcuguaucgcgccugcau

SEQ ID NO: 2239787 - RNA, 19 nt, Artificial Sequence
  Description of Artificial Sequence: Synthetic oligonucleotide
gcgccugcaugccgaacac

SEQ ID NO: 2239788 - RNA, 19 nt, Artificial Sequence
  Description of Artificial Sequence: Synthetic oligonucleotide
ggcaagacagcuccccauu

SEQ ID NO: 2239789 - RNA, 19 nt, Artificial Sequence
  Description of Artificial Sequence: Synthetic oligonucleotide
gguugugagcagaggaaau

SEQ ID NO: 2239790 - RNA, 19 nt, Artificial Sequence
  Description of Artificial Sequence: Synthetic oligonucleotide
ggucuugguucucgcugaa

SEQ ID NO: 2239791 - RNA, 19 nt, Artificial Sequence
  Description of Artificial Sequence: Synthetic oligonucleotide
aggcuguaucgcgccugca

SEQ ID NO: 2239792 - RNA, 19 nt, Artificial Sequence
  Description of Artificial Sequence: Synthetic oligonucleotide
ccugcaugccgaacaccga

SEQ ID NO: 2239793 - RNA, 19 nt, Artificial Sequence
  Description of Artificial Sequence: Synthetic oligonucleotide
cccaaaguauggacaaaau

SEQ ID NO: 2239794 - RNA, 19 nt, Artificial Sequence
  Description of Artificial Sequence: Synthetic oligonucleotide
ggacccauuggcaucccau

SEQ ID NO: 2239795 - RNA, 19 nt, Artificial Sequence
  Description of Artificial Sequence: Synthetic oligonucleotide
ucgcgccugcaugccgaac

SEQ ID NO: 2239796 - RNA, 19 nt, Artificial Sequence
  Description of Artificial Sequence: Synthetic oligonucleotide
ggagcccuugauaaaccau

SEQ ID NO: 2239797 - RNA, 19 nt, Artificial Sequence
  Description of Artificial Sequence: Synthetic oligonucleotide
cgauaugauucagauaaau

SEQ ID NO: 2239798 - RNA, 19 nt, Artificial Sequence
  Description of Artificial Sequence: Synthetic oligonucleotide
ggugccuccgcgcccugcu

SEQ ID NO: 2239799 - RNA, 19 nt, Artificial Sequence
  Description of Artificial Sequence: Synthetic oligonucleotide
cucaggcuguaucgcgccu

SEQ ID NO: 2239800 - RNA, 19 nt, Artificial Sequence
  Description of Artificial Sequence: Synthetic oligonucleotide
gcaagacagcuccccauuu

SEQ ID NO: 2239801 - RNA, 19 nt, Artificial Sequence
  Description of Artificial Sequence: Synthetic oligonucleotide
ccugaccucugguaaaguu

SEQ ID NO: 2239802 - RNA, 19 nt, Artificial Sequence
  Description of Artificial Sequence: Synthetic oligonucleotide
ccagaacacucuuuugguu

SEQ ID NO: 2239803 - RNA, 19 nt, Artificial Sequence
  Description of Artificial Sequence: Synthetic oligonucleotide
gggaaaggucuugguucuc

SEQ ID NO: 2239804 - RNA, 19 nt, Artificial Sequence
  Description of Artificial Sequence: Synthetic oligonucleotide
cccauaucuccugaccucu

SEQ ID NO: 2239805 - RNA, 19 nt, Artificial Sequence
  Description of Artificial Sequence: Synthetic oligonucleotide
cagcggagugcagcuugga

SEQ ID NO: 2239806 - RNA, 19 nt, Artificial Sequence
  Description of Artificial Sequence: Synthetic oligonucleotide
gugccagugccgguacggu

SEQ ID NO: 2239807 - RNA, 19 nt, Artificial Sequence
  Description of Artificial Sequence: Synthetic oligonucleotide
cgcagcgcauaaugugcuc

SEQ ID NO: 2239808 - RNA, 19 nt, Artificial Sequence
  Description of Artificial Sequence: Synthetic oligonucleotide
gcccgugaugugugcuauc

SEQ ID NO: 2239809 - RNA, 19 nt, Artificial Sequence
  Description of Artificial Sequence: Synthetic oligonucleotide
cgugccgcggugccuccgc

SEQ ID NO: 2239810 - RNA, 19 nt, Artificial Sequence
  Description of Artificial Sequence: Synthetic oligonucleotide
ccuuggaggacaguucuuu

SEQ ID NO: 2239811 - RNA, 19 nt, Artificial Sequence
  Description of Artificial Sequence: Synthetic oligonucleotide
cagugccaucaggggaaga

SEQ ID NO: 2239812 - RNA, 19 nt, Artificial Sequence
  Description of Artificial Sequence: Synthetic oligonucleotide
caggcccgugaugugugcu

SEQ ID NO: 2239813 - RNA, 19 nt, Artificial Sequence
  Description of Artificial Sequence: Synthetic oligonucleotide
ccgcagcgcauaaugugcu

SEQ ID NO: 2239814 - RNA, 19 nt, Artificial Sequence
  Description of Artificial Sequence: Synthetic oligonucleotide
cgcgcccugcugcugagca

SEQ ID NO: 2239815 - RNA, 19 nt, Artificial Sequence
  Description of Artificial Sequence: Synthetic oligonucleotide
cccauuggcaucccauauu

SEQ ID NO: 2239816 - RNA, 19 nt, Artificial Sequence
  Description of Artificial Sequence: Synthetic oligonucleotide
ccccgugccgcggugccuc

SEQ ID NO: 2239817 - RNA, 19 nt, Artificial Sequence
  Description of Artificial Sequence: Synthetic oligonucleotide
ccaucaggggaagaucuuu

SEQ ID NO: 2239818 - RNA, 19 nt, Artificial Sequence
  Description of Artificial Sequence: Synthetic oligonucleotide
ggcccgugaugugugcuau

SEQ ID NO: 2239819 - RNA, 19 nt, Artificial Sequence
  Description of Artificial Sequence: Synthetic oligonucleotide
cagugccgguacgguccuc

SEQ ID NO: 2239820 - RNA, 19 nt, Artificial Sequence
  Description of Artificial Sequence: Synthetic oligonucleotide
cccgugccgcggugccucc

SEQ ID NO: 2239821 - RNA, 19 nt, Artificial Sequence
  Description of Artificial Sequence: Synthetic oligonucleotide
ccgcggugccuccgcgccc

SEQ ID NO: 2239822 - RNA, 19 nt, Artificial Sequence
  Description of Artificial Sequence: Synthetic oligonucleotide
gccuccgcgcccugcugcu

SEQ ID NO: 2239823 - RNA, 19 nt, Artificial Sequence
  Description of Artificial Sequence: Synthetic oligonucleotide
gccaucaggggaagaucuu

SEQ ID NO: 2239824 - RNA, 19 nt, Artificial Sequence
  Description of Artificial Sequence: Synthetic oligonucleotide
ccgugccgcggugccuccg

SEQ ID NO: 2239825 - RNA, 19 nt, Artificial Sequence
  Description of Artificial Sequence: Synthetic oligonucleotide
cacucccuuggaggacagu

SEQ ID NO: 2239826 - RNA, 19 nt, Artificial Sequence
  Description of Artificial Sequence: Synthetic oligonucleotide
ccagugccgguacgguccu

SEQ ID NO: 2239827 - RNA, 19 nt, Artificial Sequence
  Description of Artificial Sequence: Synthetic oligonucleotide
ccgugaugugugcuaucau

SEQ ID NO: 2239828 - RNA, 19 nt, Artificial Sequence
  Description of Artificial Sequence: Synthetic oligonucleotide
ccgguacgguccuccuucu

SEQ ID NO: 2239829 - RNA, 19 nt, Artificial Sequence
  Description of Artificial Sequence: Synthetic oligonucleotide
ccuccgcgcccugcugcug

SEQ ID NO: 2239830 - RNA, 19 nt, Artificial Sequence
  Description of Artificial Sequence: Synthetic oligonucleotide
ccgcgcccugcugcugagc

SEQ ID NO: 2239831 - RNA, 19 nt, Artificial Sequence
  Description of Artificial Sequence: Synthetic oligonucleotide
gcggugccuccgcgcccug

SEQ ID NO: 2239832 - RNA, 19 nt, Artificial Sequence
  Description of Artificial Sequence: Synthetic oligonucleotide
cggugccuccgcgcccugc

SEQ ID NO: 2239833 - RNA, 19 nt, Artificial Sequence
  Description of Artificial Sequence: Synthetic oligonucleotide
cgcggugccuccgcgcccu

SEQ ID NO: 2239834 - RNA, 19 nt, Artificial Sequence
  Description of Artificial Sequence: Synthetic oligonucleotide
cgguacgguccuccuucuu

SEQ ID NO: 2239835 - RNA, 19 nt, Artificial Sequence
  Description of Artificial Sequence: Synthetic oligonucleotide
uuuucaauggaguugaugg

SEQ ID NO: 2239836 - RNA, 19 nt, Artificial Sequence
  Description of Artificial Sequence: Synthetic oligonucleotide
uuaauaugggcccagaaga

SEQ ID NO: 2239837 - RNA, 19 nt, Artificial Sequence
  Description of Artificial Sequence: Synthetic oligonucleotide
agugacuuaauaugggccc

SEQ ID NO: 2239838 - RNA, 19 nt, Artificial Sequence
  Description of Artificial Sequence: Synthetic oligonucleotide
uccaccaucagcgagagcg

SEQ ID NO: 2239839 - RNA, 19 nt, Artificial Sequence
  Description of Artificial Sequence: Synthetic oligonucleotide
ucuaguagcaucuuagcug

SEQ ID NO: 2239840 - RNA, 19 nt, Artificial Sequence
  Description of Artificial Sequence: Synthetic oligonucleotide
aagagcacaucgcuguggc

SEQ ID NO: 2239841 - RNA, 19 nt, Artificial Sequence
  Description of Artificial Sequence: Synthetic oligonucleotide
aucgaucagaucuuccucc

SEQ ID NO: 2239842 - RNA, 19 nt, Artificial Sequence
  Description of Artificial Sequence: Synthetic oligonucleotide
acaugcaaggcauggaugg

SEQ ID NO: 2239843 - RNA, 19 nt, Artificial Sequence
  Description of Artificial Sequence: Synthetic oligonucleotide
cuaguagcaucuuagcugc

SEQ ID NO: 2239844 - RNA, 19 nt, Artificial Sequence
  Description of Artificial Sequence: Synthetic oligonucleotide
uagggcaaaagccagcugc

SEQ ID NO: 2239845 - RNA, 19 nt, Artificial Sequence
  Description of Artificial Sequence: Synthetic oligonucleotide
agcagaggaauccaguuuc

SEQ ID NO: 2239846 - RNA, 19 nt, Artificial Sequence
  Description of Artificial Sequence: Synthetic oligonucleotide
aguaacacccucccgcacc

SEQ ID NO: 2239847 - RNA, 19 nt, Artificial Sequence
  Description of Artificial Sequence: Synthetic oligonucleotide
uguuggucgauacagcgga

SEQ ID NO: 2239848 - RNA, 19 nt, Artificial Sequence
  Description of Artificial Sequence: Synthetic oligonucleotide
uucaccuuguccaggacag

SEQ ID NO: 2239849 - RNA, 19 nt, Artificial Sequence
  Description of Artificial Sequence: Synthetic oligonucleotide
aaagccagcugcccugccc

SEQ ID NO: 2239850 - RNA, 19 nt, Artificial Sequence
  Description of Artificial Sequence: Synthetic oligonucleotide
auaagcagggagcgaaagc

SEQ ID NO: 2239851 - RNA, 19 nt, Artificial Sequence
  Description of Artificial Sequence: Synthetic oligonucleotide
aguugauggugacaccugc

SEQ ID NO: 2239852 - RNA, 19 nt, Artificial Sequence
  Description of Artificial Sequence: Synthetic oligonucleotide
agucuaguagcaucuuagc

SEQ ID NO: 2239853 - RNA, 19 nt, Artificial Sequence
  Description of Artificial Sequence: Synthetic oligonucleotide
gaaagcauaggcagggccg

SEQ ID NO: 2239854 - RNA, 19 nt, Artificial Sequence
  Description of Artificial Sequence: Synthetic oligonucleotide
uaagcagggagcgaaagcc

SEQ ID NO: 2239855 - RNA, 19 nt, Artificial Sequence
  Description of Artificial Sequence: Synthetic oligonucleotide
aaagcauaggcagggccgc

SEQ ID NO: 2239856 - RNA, 19 nt, Artificial Sequence
  Description of Artificial Sequence: Synthetic oligonucleotide
ugaaagcauaggcagggcc

SEQ ID NO: 2239857 - RNA, 19 nt, Artificial Sequence
  Description of Artificial Sequence: Synthetic oligonucleotide
agcgagagcguccagggcg

SEQ ID NO: 2239858 - RNA, 19 nt, Artificial Sequence
  Description of Artificial Sequence: Synthetic oligonucleotide
ucugagucuaguagcaucu

SEQ ID NO: 2239859 - RNA, 19 nt, Artificial Sequence
  Description of Artificial Sequence: Synthetic oligonucleotide
agggcagugacuuaauaug

SEQ ID NO: 2239860 - RNA, 19 nt, Artificial Sequence
  Description of Artificial Sequence: Synthetic oligonucleotide
gucagguucaccccuaucc

SEQ ID NO: 2239861 - RNA, 19 nt, Artificial Sequence
  Description of Artificial Sequence: Synthetic oligonucleotide
cacaguaacacccucccgc

SEQ ID NO: 2239862 - RNA, 19 nt, Artificial Sequence
  Description of Artificial Sequence: Synthetic oligonucleotide
gaugucagcaccaauuuca

SEQ ID NO: 2239863 - RNA, 19 nt, Artificial Sequence
  Description of Artificial Sequence: Synthetic oligonucleotide
accacugggguguuggucg

SEQ ID NO: 2239864 - RNA, 19 nt, Artificial Sequence
  Description of Artificial Sequence: Synthetic oligonucleotide
uuuucacuccaccaucagc

SEQ ID NO: 2239865 - RNA, 19 nt, Artificial Sequence
  Description of Artificial Sequence: Synthetic oligonucleotide
agagaccguggcuuggucc

SEQ ID NO: 2239866 - RNA, 19 nt, Artificial Sequence
  Description of Artificial Sequence: Synthetic oligonucleotide
ucuguugugggcugucagg

SEQ ID NO: 2239867 - RNA, 19 nt, Artificial Sequence
  Description of Artificial Sequence: Synthetic oligonucleotide
uuuugauggcagcagggga

SEQ ID NO: 2239868 - RNA, 19 nt, Artificial Sequence
  Description of Artificial Sequence: Synthetic oligonucleotide
gauacagcggaugacuuug

SEQ ID NO: 2239869 - RNA, 19 nt, Artificial Sequence
  Description of Artificial Sequence: Synthetic oligonucleotide
gacggcaucgaucagaucu

SEQ ID NO: 2239870 - RNA, 19 nt, Artificial Sequence
  Description of Artificial Sequence: Synthetic oligonucleotide
ucagcgagagcguccaggg

SEQ ID NO: 2239871 - RNA, 19 nt, Artificial Sequence
  Description of Artificial Sequence: Synthetic oligonucleotide
uucaauggaguugauggug

SEQ ID NO: 2239872 - RNA, 19 nt, Artificial Sequence
  Description of Artificial Sequence: Synthetic oligonucleotide
gagucuaguagcaucuuag

SEQ ID NO: 2239873 - RNA, 19 nt, Artificial Sequence
  Description of Artificial Sequence: Synthetic oligonucleotide
cauugauaagcagggagcg

SEQ ID NO: 2239874 - RNA, 19 nt, Artificial Sequence
  Description of Artificial Sequence: Synthetic oligonucleotide
cagugacuuaauaugggcc

SEQ ID NO: 2239875 - RNA, 19 nt, Artificial Sequence
  Description of Artificial Sequence: Synthetic oligonucleotide
ucuuggaagucccauuuuc

SEQ ID NO: 2239876 - RNA, 19 nt, Artificial Sequence
  Description of Artificial Sequence: Synthetic oligonucleotide
cuguucugagucuaguagc

SEQ ID NO: 2239877 - RNA, 19 nt, Artificial Sequence
  Description of Artificial Sequence: Synthetic oligonucleotide
uccacagcauugauaagca

SEQ ID NO: 2239878 - RNA, 19 nt, Artificial Sequence
  Description of Artificial Sequence: Synthetic oligonucleotide
aguagcaucuuagcugccc

SEQ ID NO: 2239879 - RNA, 19 nt, Artificial Sequence
  Description of Artificial Sequence: Synthetic oligonucleotide
cagcggaugacuuugggug

SEQ ID NO: 2239880 - RNA, 19 nt, Artificial Sequence
  Description of Artificial Sequence: Synthetic oligonucleotide
gaggaauccaguuucaccu

SEQ ID NO: 2239881 - RNA, 19 nt, Artificial Sequence
  Description of Artificial Sequence: Synthetic oligonucleotide
cuccacagcauugauaagc

SEQ ID NO: 2239882 - RNA, 19 nt, Artificial Sequence
  Description of Artificial Sequence: Synthetic oligonucleotide
ugagcaugagugcccgugg

SEQ ID NO: 2239883 - RNA, 19 nt, Artificial Sequence
  Description of Artificial Sequence: Synthetic oligonucleotide
agcggaugacuuugggugc

SEQ ID NO: 2239884 - RNA, 19 nt, Artificial Sequence
  Description of Artificial Sequence: Synthetic oligonucleotide
ugggcccagaagaagacug

SEQ ID NO: 2239885 - RNA, 19 nt, Artificial Sequence
  Description of Artificial Sequence: Synthetic oligonucleotide
aucgcuguggcgcacuguc

SEQ ID NO: 2239886 - RNA, 19 nt, Artificial Sequence
  Description of Artificial Sequence: Synthetic oligonucleotide
ugacuuugggugcuggcug

SEQ ID NO: 2239887 - RNA, 19 nt, Artificial Sequence
  Description of Artificial Sequence: Synthetic oligonucleotide
cuugugagcugccagaaca

SEQ ID NO: 2239888 - RNA, 19 nt, Artificial Sequence
  Description of Artificial Sequence: Synthetic oligonucleotide
uuggaagucccauuuucac

SEQ ID NO: 2239889 - RNA, 19 nt, Artificial Sequence
  Description of Artificial Sequence: Synthetic oligonucleotide
agacaguuuccugaucagc

SEQ ID NO: 2239890 - RNA, 19 nt, Artificial Sequence
  Description of Artificial Sequence: Synthetic oligonucleotide
uugauaagcagggagcgaa

SEQ ID NO: 2239891 - RNA, 19 nt, Artificial Sequence
  Description of Artificial Sequence: Synthetic oligonucleotide
acaccugccgcacaggaca

SEQ ID NO: 2239892 - RNA, 19 nt, Artificial Sequence
  Description of Artificial Sequence: Synthetic oligonucleotide
aacaccugcugcugugaag

SEQ ID NO: 2239893 - RNA, 19 nt, Artificial Sequence
  Description of Artificial Sequence: Synthetic oligonucleotide
acugcccaugagcugcucc

SEQ ID NO: 2239894 - RNA, 19 nt, Artificial Sequence
  Description of Artificial Sequence: Synthetic oligonucleotide
cuccaccugagcaugagug

SEQ ID NO: 2239895 - RNA, 19 nt, Artificial Sequence
  Description of Artificial Sequence: Synthetic oligonucleotide
aaaagccagcugcccugcc

SEQ ID NO: 2239896 - RNA, 19 nt, Artificial Sequence
  Description of Artificial Sequence: Synthetic oligonucleotide
ucccgcaccaccacugggg

SEQ ID NO: 2239897 - RNA, 19 nt, Artificial Sequence
  Description of Artificial Sequence: Synthetic oligonucleotide
cuucuuuucaauggaguug

SEQ ID NO: 2239898 - RNA, 19 nt, Artificial Sequence
  Description of Artificial Sequence: Synthetic oligonucleotide
uggucgauacagcggauga

SEQ ID NO: 2239899 - RNA, 19 nt, Artificial Sequence
  Description of Artificial Sequence: Synthetic oligonucleotide
agccauggucugcagcucc

SEQ ID NO: 2239900 - RNA, 19 nt, Artificial Sequence
  Description of Artificial Sequence: Synthetic oligonucleotide
gauaagcagggagcgaaag

SEQ ID NO: 2239901 - RNA, 19 nt, Artificial Sequence
  Description of Artificial Sequence: Synthetic oligonucleotide
aagcagggagcgaaagccc

SEQ ID NO: 2239902 - RNA, 19 nt, Artificial Sequence
  Description of Artificial Sequence: Synthetic oligonucleotide
ucugcagcucccguguacg

SEQ ID NO: 2239903 - RNA, 19 nt, Artificial Sequence
  Description of Artificial Sequence: Synthetic oligonucleotide
uucugagucuaguagcauc

SEQ ID NO: 2239904 - RNA, 19 nt, Artificial Sequence
  Description of Artificial Sequence: Synthetic oligonucleotide
gagcacaucgcuguggcgc

SEQ ID NO: 2239905 - RNA, 19 nt, Artificial Sequence
  Description of Artificial Sequence: Synthetic oligonucleotide
ggugaaagcauaggcaggg

SEQ ID NO: 2239906 - RNA, 19 nt, Artificial Sequence
  Description of Artificial Sequence: Synthetic oligonucleotide
uggaagucccauuuucacu

SEQ ID NO: 2239907 - RNA, 19 nt, Artificial Sequence
  Description of Artificial Sequence: Synthetic oligonucleotide
ucccauuuucacuccacca

SEQ ID NO: 2239908 - RNA, 19 nt, Artificial Sequence
  Description of Artificial Sequence: Synthetic oligonucleotide
aaacccacgcucaugucug

SEQ ID NO: 2239909 - RNA, 19 nt, Artificial Sequence
  Description of Artificial Sequence: Synthetic oligonucleotide
ggaagucccauuuucacuc

SEQ ID NO: 2239910 - RNA, 19 nt, Artificial Sequence
  Description of Artificial Sequence: Synthetic oligonucleotide
auuuucacuccaccaucag

SEQ ID NO: 2239911 - RNA, 19 nt, Artificial Sequence
  Description of Artificial Sequence: Synthetic oligonucleotide
uguccucgaugucagcacc

SEQ ID NO: 2239912 - RNA, 19 nt, Artificial Sequence
  Description of Artificial Sequence: Synthetic oligonucleotide
ucccguguacggaugcagg

SEQ ID NO: 2239913 - RNA, 19 nt, Artificial Sequence
  Description of Artificial Sequence: Synthetic oligonucleotide
ugcuccacgagccugccau

SEQ ID NO: 2239914 - RNA, 19 nt, Artificial Sequence
  Description of Artificial Sequence: Synthetic oligonucleotide
gagacaguuuccugaucag

SEQ ID NO: 2239915 - RNA, 19 nt, Artificial Sequence
  Description of Artificial Sequence: Synthetic oligonucleotide
ucacuccaccaucagcgag

SEQ ID NO: 2239916 - RNA, 19 nt, Artificial Sequence
  Description of Artificial Sequence: Synthetic oligonucleotide
ucagcaccaauuucaucca

SEQ ID NO: 2239917 - RNA, 19 nt, Artificial Sequence
  Description of Artificial Sequence: Synthetic oligonucleotide
gaugacuuugggugcuggc

SEQ ID NO: 2239918 - RNA, 19 nt, Artificial Sequence
  Description of Artificial Sequence: Synthetic oligonucleotide
agcaugagugcccguggcg

SEQ ID NO: 2239919 - RNA, 19 nt, Artificial Sequence
  Description of Artificial Sequence: Synthetic oligonucleotide
gcggugaaagcauaggcag

SEQ ID NO: 2239920 - RNA, 19 nt, Artificial Sequence
  Description of Artificial Sequence: Synthetic oligonucleotide
aauggaguugauggugaca

SEQ ID NO: 2239921 - RNA, 19 nt, Artificial Sequence
  Description of Artificial Sequence: Synthetic oligonucleotide
uaugggcccagaagaagac

SEQ ID NO: 2239922 - RNA, 19 nt, Artificial Sequence
  Description of Artificial Sequence: Synthetic oligonucleotide
uggcuagggcaaaagccag

SEQ ID NO: 2239923 - RNA, 19 nt, Artificial Sequence
  Description of Artificial Sequence: Synthetic oligonucleotide
uggcguacacaguaacacc

SEQ ID NO: 2239924 - RNA, 19 nt, Artificial Sequence
  Description of Artificial Sequence: Synthetic oligonucleotide
cuuuucaauggaguugaug

SEQ ID NO: 2239925 - RNA, 19 nt, Artificial Sequence
  Description of Artificial Sequence: Synthetic oligonucleotide
uccaccugagcaugagugc

SEQ ID NO: 2239926 - RNA, 19 nt, Artificial Sequence
  Description of Artificial Sequence: Synthetic oligonucleotide
ugcccugccccgaugaaac

SEQ ID NO: 2239927 - RNA, 19 nt, Artificial Sequence
  Description of Artificial Sequence: Synthetic oligonucleotide
agaagaagacugagcggcc

SEQ ID NO: 2239928 - RNA, 19 nt, Artificial Sequence
  Description of Artificial Sequence: Synthetic oligonucleotide
agggcaaaagccagcugcc

SEQ ID NO: 2239929 - RNA, 19 nt, Artificial Sequence
  Description of Artificial Sequence: Synthetic oligonucleotide
ugagucuaguagcaucuua

SEQ ID NO: 2239930 - RNA, 19 nt, Artificial Sequence
  Description of Artificial Sequence: Synthetic oligonucleotide
gugcccguggcguacacag

SEQ ID NO: 2239931 - RNA, 19 nt, Artificial Sequence
  Description of Artificial Sequence: Synthetic oligonucleotide
guggcuugguccauguccg

SEQ ID NO: 2239932 - RNA, 19 nt, Artificial Sequence
  Description of Artificial Sequence: Synthetic oligonucleotide
guugugggcugucagguuc

SEQ ID NO: 2239933 - RNA, 19 nt, Artificial Sequence
  Description of Artificial Sequence: Synthetic oligonucleotide
cuuggaagucccauuuuca

SEQ ID NO: 2239934 - RNA, 19 nt, Artificial Sequence
  Description of Artificial Sequence: Synthetic oligonucleotide
ugacaccugccgcacagga

SEQ ID NO: 2239935 - RNA, 19 nt, Artificial Sequence
  Description of Artificial Sequence: Synthetic oligonucleotide
acuuaauaugggcccagaa

SEQ ID NO: 2239936 - RNA, 19 nt, Artificial Sequence
  Description of Artificial Sequence: Synthetic oligonucleotide
gaagaagacugagcggccc

SEQ ID NO: 2239937 - RNA, 19 nt, Artificial Sequence
  Description of Artificial Sequence: Synthetic oligonucleotide
agcaccaauuucauccagg

SEQ ID NO: 2239938 - RNA, 19 nt, Artificial Sequence
  Description of Artificial Sequence: Synthetic oligonucleotide
uucaccccuauccuccgga

SEQ ID NO: 2239939 - RNA, 19 nt, Artificial Sequence
  Description of Artificial Sequence: Synthetic oligonucleotide
agcucccguguacggaugc

SEQ ID NO: 2239940 - RNA, 19 nt, Artificial Sequence
  Description of Artificial Sequence: Synthetic oligonucleotide
ucgaucagaucuuccucca

SEQ ID NO: 2239941 - RNA, 19 nt, Artificial Sequence
  Description of Artificial Sequence: Synthetic oligonucleotide
gaaacccacgcucaugucu

SEQ ID NO: 2239942 - RNA, 19 nt, Artificial Sequence
  Description of Artificial Sequence: Synthetic oligonucleotide
gaagucccauuuucacucc

SEQ ID NO: 2239943 - RNA, 19 nt, Artificial Sequence
  Description of Artificial Sequence: Synthetic oligonucleotide
uggucugcagcucccgugu

SEQ ID NO: 2239944 - RNA, 19 nt, Artificial Sequence
  Description of Artificial Sequence: Synthetic oligonucleotide
gaugcaggaggccuccaca

SEQ ID NO: 2239945 - RNA, 19 nt, Artificial Sequence
  Description of Artificial Sequence: Synthetic oligonucleotide
cauuuucacuccaccauca

SEQ ID NO: 2239946 - RNA, 19 nt, Artificial Sequence
  Description of Artificial Sequence: Synthetic oligonucleotide
ugccuguccucgaugucag

SEQ ID NO: 2239947 - RNA, 19 nt, Artificial Sequence
  Description of Artificial Sequence: Synthetic oligonucleotide
gcagugacuuaauaugggc

SEQ ID NO: 2239948 - RNA, 19 nt, Artificial Sequence
  Description of Artificial Sequence: Synthetic oligonucleotide
acacaguaacacccucccg

SEQ ID NO: 2239949 - RNA, 19 nt, Artificial Sequence
  Description of Artificial Sequence: Synthetic oligonucleotide
cauuaucuugugagcugcc

SEQ ID NO: 2239950 - RNA, 19 nt, Artificial Sequence
  Description of Artificial Sequence: Synthetic oligonucleotide
gagaccguggcuuggucca

SEQ ID NO: 2239951 - RNA, 19 nt, Artificial Sequence
  Description of Artificial Sequence: Synthetic oligonucleotide
gaugugccuguccucgaug

SEQ ID NO: 2239952 - RNA, 19 nt, Artificial Sequence
  Description of Artificial Sequence: Synthetic oligonucleotide
cagccaggcgucuuggaag

SEQ ID NO: 2239953 - RNA, 19 nt, Artificial Sequence
  Description of Artificial Sequence: Synthetic oligonucleotide
auaugggcccagaagaaga

SEQ ID NO: 2239954 - RNA, 19 nt, Artificial Sequence
  Description of Artificial Sequence: Synthetic oligonucleotide
ugacuuaauaugggcccag

SEQ ID NO: 2239955 - RNA, 19 nt, Artificial Sequence
  Description of Artificial Sequence: Synthetic oligonucleotide
uuugggugcuggcuggaau

SEQ ID NO: 2239956 - RNA, 19 nt, Artificial Sequence
  Description of Artificial Sequence: Synthetic oligonucleotide
gcauugauaagcagggagc

SEQ ID NO: 2239957 - RNA, 19 nt, Artificial Sequence
  Description of Artificial Sequence: Synthetic oligonucleotide
caucgaucagaucuuccuc

SEQ ID NO: 2239958 - RNA, 19 nt, Artificial Sequence
  Description of Artificial Sequence: Synthetic oligonucleotide
guacacaguaacacccucc

SEQ ID NO: 2239959 - RNA, 19 nt, Artificial Sequence
  Description of Artificial Sequence: Synthetic oligonucleotide
gaugcuguucugagucuag

SEQ ID NO: 2239960 - RNA, 19 nt, Artificial Sequence
  Description of Artificial Sequence: Synthetic oligonucleotide
augacuuugggugcuggcu

SEQ ID NO: 2239961 - RNA, 19 nt, Artificial Sequence
  Description of Artificial Sequence: Synthetic oligonucleotide
uuggucgauacagcggaug

SEQ ID NO: 2239962 - RNA, 19 nt, Artificial Sequence
  Description of Artificial Sequence: Synthetic oligonucleotide
ggcguacacaguaacaccc

SEQ ID NO: 2239963 - RNA, 19 nt, Artificial Sequence
  Description of Artificial Sequence: Synthetic oligonucleotide
aacccacgcucaugucugg

SEQ ID NO: 2239964 - RNA, 19 nt, Artificial Sequence
  Description of Artificial Sequence: Synthetic oligonucleotide
guguuggucgauacagcgg

SEQ ID NO: 2239965 - RNA, 19 nt, Artificial Sequence
  Description of Artificial Sequence: Synthetic oligonucleotide
gucuguugugggcugucag

SEQ ID NO: 2239966 - RNA, 19 nt, Artificial Sequence
  Description of Artificial Sequence: Synthetic oligonucleotide
uugugggcugucagguuca

SEQ ID NO: 2239967 - RNA, 19 nt, Artificial Sequence
  Description of Artificial Sequence: Synthetic oligonucleotide
uucacuccaccaucagcga

SEQ ID NO: 2239968 - RNA, 19 nt, Artificial Sequence
  Description of Artificial Sequence: Synthetic oligonucleotide
gggcagugacuuaauaugg

SEQ ID NO: 2239969 - RNA, 19 nt, Artificial Sequence
  Description of Artificial Sequence: Synthetic oligonucleotide
gggguguuggucgauacag

SEQ ID NO: 2239970 - RNA, 19 nt, Artificial Sequence
  Description of Artificial Sequence: Synthetic oligonucleotide
ugcaggaggccuccacagc

SEQ ID NO: 2239971 - RNA, 19 nt, Artificial Sequence
  Description of Artificial Sequence: Synthetic oligonucleotide
uguacggaugcaggaggcc

SEQ ID NO: 2239972 - RNA, 19 nt, Artificial Sequence
  Description of Artificial Sequence: Synthetic oligonucleotide
ucgauacagcggaugacuu

SEQ ID NO: 2239973 - RNA, 19 nt, Artificial Sequence
  Description of Artificial Sequence: Synthetic oligonucleotide
agagcacaucgcuguggcg

SEQ ID NO: 2239974 - RNA, 19 nt, Artificial Sequence
  Description of Artificial Sequence: Synthetic oligonucleotide
guugauggugacaccugcc

SEQ ID NO: 2239975 - RNA, 19 nt, Artificial Sequence
  Description of Artificial Sequence: Synthetic oligonucleotide
caggcgucuuggaaguccc

SEQ ID NO: 2239976 - RNA, 19 nt, Artificial Sequence
  Description of Artificial Sequence: Synthetic oligonucleotide
agucccauuuucacuccac

SEQ ID NO: 2239977 - RNA, 19 nt, Artificial Sequence
  Description of Artificial Sequence: Synthetic oligonucleotide
ggcagugacuuaauauggg

SEQ ID NO: 2239978 - RNA, 19 nt, Artificial Sequence
  Description of Artificial Sequence: Synthetic oligonucleotide
cagcacaugcaaggcaugg

SEQ ID NO: 2239979 - RNA, 19 nt, Artificial Sequence
  Description of Artificial Sequence: Synthetic oligonucleotide
uuguccaggacagucuuuu

SEQ ID NO: 2239980 - RNA, 19 nt, Artificial Sequence
  Description of Artificial Sequence: Synthetic oligonucleotide
cuguccucgaugucagcac

SEQ ID NO: 2239981 - RNA, 19 nt, Artificial Sequence
  Description of Artificial Sequence: Synthetic oligonucleotide
gucuaguagcaucuuagcu

SEQ ID NO: 2239982 - RNA, 19 nt, Artificial Sequence
  Description of Artificial Sequence: Synthetic oligonucleotide
ugccccgaugaaacccacg

SEQ ID NO: 2239983 - RNA, 19 nt, Artificial Sequence
  Description of Artificial Sequence: Synthetic oligonucleotide
caauggaguugauggugac

SEQ ID NO: 2239984 - RNA, 19 nt, Artificial Sequence
  Description of Artificial Sequence: Synthetic oligonucleotide
cagaacaccugcugcugug

SEQ ID NO: 2239985 - RNA, 19 nt, Artificial Sequence
  Description of Artificial Sequence: Synthetic oligonucleotide
acagccaggcgucuuggaa

SEQ ID NO: 2239986 - RNA, 19 nt, Artificial Sequence
  Description of Artificial Sequence: Synthetic oligonucleotide
ggaauccaguuucaccuug

SEQ ID NO: 2239987 - RNA, 19 nt, Artificial Sequence
  Description of Artificial Sequence: Synthetic oligonucleotide
gaguugauggugacaccug

SEQ ID NO: 2239988 - RNA, 19 nt, Artificial Sequence
  Description of Artificial Sequence: Synthetic oligonucleotide
cugagcaugagugcccgug

SEQ ID NO: 2239989 - RNA, 19 nt, Artificial Sequence
  Description of Artificial Sequence: Synthetic oligonucleotide
acggaugcaggaggccucc

SEQ ID NO: 2239990 - RNA, 19 nt, Artificial Sequence
  Description of Artificial Sequence: Synthetic oligonucleotide
ucaccccuauccuccggag

SEQ ID NO: 2239991 - RNA, 19 nt, Artificial Sequence
  Description of Artificial Sequence: Synthetic oligonucleotide
agccaggcgucuuggaagu

SEQ ID NO: 2239992 - RNA, 19 nt, Artificial Sequence
  Description of Artificial Sequence: Synthetic oligonucleotide
gcaaaagccagcugcccug

SEQ ID NO: 2239993 - RNA, 19 nt, Artificial Sequence
  Description of Artificial Sequence: Synthetic oligonucleotide
auugauaagcagggagcga

SEQ ID NO: 2239994 - RNA, 19 nt, Artificial Sequence
  Description of Artificial Sequence: Synthetic oligonucleotide
accugagcaugagugcccg

SEQ ID NO: 2239995 - RNA, 19 nt, Artificial Sequence
  Description of Artificial Sequence: Synthetic oligonucleotide
agggcggugaaagcauagg

SEQ ID NO: 2239996 - RNA, 19 nt, Artificial Sequence
  Description of Artificial Sequence: Synthetic oligonucleotide
uacggaugcaggaggccuc

SEQ ID NO: 2239997 - RNA, 19 nt, Artificial Sequence
  Description of Artificial Sequence: Synthetic oligonucleotide
caccugagcaugagugccc

SEQ ID NO: 2239998 - RNA, 19 nt, Artificial Sequence
  Description of Artificial Sequence: Synthetic oligonucleotide
uggaugcuguucugagucu

SEQ ID NO: 2239999 - RNA, 19 nt, Artificial Sequence
  Description of Artificial Sequence: Synthetic oligonucleotide
agaucuuccuccaccucug

SEQ ID NO: 2240000 - RNA, 19 nt, Artificial Sequence
  Description of Artificial Sequence: Synthetic oligonucleotide
uguggcgcacugucugucu

SEQ ID NO: 2240001 - RNA, 19 nt, Artificial Sequence
  Description of Artificial Sequence: Synthetic oligonucleotide
auguccggggagcuggcca

SEQ ID NO: 2240002 - RNA, 19 nt, Artificial Sequence
  Description of Artificial Sequence: Synthetic oligonucleotide
gccauuaucuugugagcug

SEQ ID NO: 2240003 - RNA, 19 nt, Artificial Sequence
  Description of Artificial Sequence: Synthetic oligonucleotide
gggcggugaaagcauaggc

SEQ ID NO: 2240004 - RNA, 19 nt, Artificial Sequence
  Description of Artificial Sequence: Synthetic oligonucleotide
guaacacccucccgcacca

SEQ ID NO: 2240005 - RNA, 19 nt, Artificial Sequence
  Description of Artificial Sequence: Synthetic oligonucleotide
ccauuaucuugugagcugc

SEQ ID NO: 2240006 - RNA, 19 nt, Artificial Sequence
  Description of Artificial Sequence: Synthetic oligonucleotide
cagggcggugaaagcauag

SEQ ID NO: 2240007 - RNA, 19 nt, Artificial Sequence
  Description of Artificial Sequence: Synthetic oligonucleotide
gccccgaugaaacccacgc

SEQ ID NO: 2240008 - RNA, 19 nt, Artificial Sequence
  Description of Artificial Sequence: Synthetic oligonucleotide
caaaagccagcugcccugc

SEQ ID NO: 2240009 - RNA, 19 nt, Artificial Sequence
  Description of Artificial Sequence: Synthetic oligonucleotide
ugucagguucaccccuauc

SEQ ID NO: 2240010 - RNA, 19 nt, Artificial Sequence
  Description of Artificial Sequence: Synthetic oligonucleotide
cugccauccuccaccugag

SEQ ID NO: 2240011 - RNA, 19 nt, Artificial Sequence
  Description of Artificial Sequence: Synthetic oligonucleotide
gaagacugagcggccccag

SEQ ID NO: 2240012 - RNA, 19 nt, Artificial Sequence
  Description of Artificial Sequence: Synthetic oligonucleotide
aagcccuuggcuagggcaa

SEQ ID NO: 2240013 - RNA, 19 nt, Artificial Sequence
  Description of Artificial Sequence: Synthetic oligonucleotide
uaguagcaucuuagcugcc

SEQ ID NO: 2240014 - RNA, 19 nt, Artificial Sequence
  Description of Artificial Sequence: Synthetic oligonucleotide
caccccuauccuccggagg

SEQ ID NO: 2240015 - RNA, 19 nt, Artificial Sequence
  Description of Artificial Sequence: Synthetic oligonucleotide
uauccuccggagggcagag

SEQ ID NO: 2240016 - RNA, 19 nt, Artificial Sequence
  Description of Artificial Sequence: Synthetic oligonucleotide
ugaaacccacgcucauguc

SEQ ID NO: 2240017 - RNA, 19 nt, Artificial Sequence
  Description of Artificial Sequence: Synthetic oligonucleotide
aguuuccugaucagccaug

SEQ ID NO: 2240018 - RNA, 19 nt, Artificial Sequence
  Description of Artificial Sequence: Synthetic oligonucleotide
gaucagccauggucugcag

SEQ ID NO: 2240019 - RNA, 19 nt, Artificial Sequence
  Description of Artificial Sequence: Synthetic oligonucleotide
caguuucaccuuguccagg

SEQ ID NO: 2240020 - RNA, 19 nt, Artificial Sequence
  Description of Artificial Sequence: Synthetic oligonucleotide
guguacggaugcaggaggc

SEQ ID NO: 2240021 - RNA, 19 nt, Artificial Sequence
  Description of Artificial Sequence: Synthetic oligonucleotide
gccgcugccacugagcccc

SEQ ID NO: 2240022 - RNA, 19 nt, Artificial Sequence
  Description of Artificial Sequence: Synthetic oligonucleotide
cugaucagccauggucugc

SEQ ID NO: 2240023 - RNA, 19 nt, Artificial Sequence
  Description of Artificial Sequence: Synthetic oligonucleotide
guucaccccuauccuccgg

SEQ ID NO: 2240024 - RNA, 19 nt, Artificial Sequence
  Description of Artificial Sequence: Synthetic oligonucleotide
aggaauccaguuucaccuu

SEQ ID NO: 2240025 - RNA, 19 nt, Artificial Sequence
  Description of Artificial Sequence: Synthetic oligonucleotide
ucuuuucaauggaguugau

SEQ ID NO: 2240026 - RNA, 19 nt, Artificial Sequence
  Description of Artificial Sequence: Synthetic oligonucleotide
gucgauacagcggaugacu

SEQ ID NO: 2240027 - RNA, 19 nt, Artificial Sequence
  Description of Artificial Sequence: Synthetic oligonucleotide
auacagcggaugacuuugg

SEQ ID NO: 2240028 - RNA, 19 nt, Artificial Sequence
  Description of Artificial Sequence: Synthetic oligonucleotide
ugcagcucccguguacgga

SEQ ID NO: 2240029 - RNA, 19 nt, Artificial Sequence
  Description of Artificial Sequence: Synthetic oligonucleotide
ugugccuguccucgauguc

SEQ ID NO: 2240030 - RNA, 19 nt, Artificial Sequence
  Description of Artificial Sequence: Synthetic oligonucleotide
aucuugugagcugccagaa

SEQ ID NO: 2240031 - RNA, 19 nt, Artificial Sequence
  Description of Artificial Sequence: Synthetic oligonucleotide
cagaggaauccaguuucac

SEQ ID NO: 2240032 - RNA, 19 nt, Artificial Sequence
  Description of Artificial Sequence: Synthetic oligonucleotide
gugacuuaauaugggccca

SEQ ID NO: 2240033 - RNA, 19 nt, Artificial Sequence
  Description of Artificial Sequence: Synthetic oligonucleotide
cuccacgagccugccaucc

SEQ ID NO: 2240034 - RNA, 19 nt, Artificial Sequence
  Description of Artificial Sequence: Synthetic oligonucleotide
cguguacggaugcaggagg

SEQ ID NO: 2240035 - RNA, 19 nt, Artificial Sequence
  Description of Artificial Sequence: Synthetic oligonucleotide
cuagggcaaaagccagcug

SEQ ID NO: 2240036 - RNA, 19 nt, Artificial Sequence
  Description of Artificial Sequence: Synthetic oligonucleotide
cagcaccaauuucauccag

SEQ ID NO: 2240037 - RNA, 19 nt, Artificial Sequence
  Description of Artificial Sequence: Synthetic oligonucleotide
cugcagcucccguguacgg

SEQ ID NO: 2240038 - RNA, 19 nt, Artificial Sequence
  Description of Artificial Sequence: Synthetic oligonucleotide
cagaucuuccuccaccucu

SEQ ID NO: 2240039 - RNA, 19 nt, Artificial Sequence
  Description of Artificial Sequence: Synthetic oligonucleotide
agcacaugcaaggcaugga

SEQ ID NO: 2240040 - RNA, 19 nt, Artificial Sequence
  Description of Artificial Sequence: Synthetic oligonucleotide
gauggcagcaggggagaca

SEQ ID NO: 2240041 - RNA, 19 nt, Artificial Sequence
  Description of Artificial Sequence: Synthetic oligonucleotide
gugccuguccucgauguca

SEQ ID NO: 2240042 - RNA, 19 nt, Artificial Sequence
  Description of Artificial Sequence: Synthetic oligonucleotide
cugcccaugagcugcucca

SEQ ID NO: 2240043 - RNA, 19 nt, Artificial Sequence
  Description of Artificial Sequence: Synthetic oligonucleotide
gacuuaauaugggcccaga

SEQ ID NO: 2240044 - RNA, 19 nt, Artificial Sequence
  Description of Artificial Sequence: Synthetic oligonucleotide
cucccguguacggaugcag

SEQ ID NO: 2240045 - RNA, 19 nt, Artificial Sequence
  Description of Artificial Sequence: Synthetic oligonucleotide
acgcucaugucuggagguc

SEQ ID NO: 2240046 - RNA, 19 nt, Artificial Sequence
  Description of Artificial Sequence: Synthetic oligonucleotide
agaagacugagcggcccca

SEQ ID NO: 2240047 - RNA, 19 nt, Artificial Sequence
  Description of Artificial Sequence: Synthetic oligonucleotide
ccacugagccccgugacgg

SEQ ID NO: 2240048 - RNA, 19 nt, Artificial Sequence
  Description of Artificial Sequence: Synthetic oligonucleotide
ccacgcucaugucuggagg

SEQ ID NO: 2240049 - RNA, 19 nt, Artificial Sequence
  Description of Artificial Sequence: Synthetic oligonucleotide
gugaaagcauaggcagggc

SEQ ID NO: 2240050 - RNA, 19 nt, Artificial Sequence
  Description of Artificial Sequence: Synthetic oligonucleotide
gaacaccugcugcugugaa

SEQ ID NO: 2240051 - RNA, 19 nt, Artificial Sequence
  Description of Artificial Sequence: Synthetic oligonucleotide
ggcggugaaagcauaggca

SEQ ID NO: 2240052 - RNA, 19 nt, Artificial Sequence
  Description of Artificial Sequence: Synthetic oligonucleotide
uguugugggcugucagguu

SEQ ID NO: 2240053 - RNA, 19 nt, Artificial Sequence
  Description of Artificial Sequence: Synthetic oligonucleotide
uggcgcacugucugucugu

SEQ ID NO: 2240054 - RNA, 19 nt, Artificial Sequence
  Description of Artificial Sequence: Synthetic oligonucleotide
acaucgcuguggcgcacug

SEQ ID NO: 2240055 - RNA, 19 nt, Artificial Sequence
  Description of Artificial Sequence: Synthetic oligonucleotide
accguggcuugguccaugu

SEQ ID NO: 2240056 - RNA, 19 nt, Artificial Sequence
  Description of Artificial Sequence: Synthetic oligonucleotide
guccagggcggugaaagca

SEQ ID NO: 2240057 - RNA, 19 nt, Artificial Sequence
  Description of Artificial Sequence: Synthetic oligonucleotide
guggcgcacugucugucug

SEQ ID NO: 2240058 - RNA, 19 nt, Artificial Sequence
  Description of Artificial Sequence: Synthetic oligonucleotide
cucccgcaccaccacuggg

SEQ ID NO: 2240059 - RNA, 19 nt, Artificial Sequence
  Description of Artificial Sequence: Synthetic oligonucleotide
gacaccugccgcacaggac

SEQ ID NO: 2240060 - RNA, 19 nt, Artificial Sequence
  Description of Artificial Sequence: Synthetic oligonucleotide
cccgugacggcaucgauca

SEQ ID NO: 2240061 - RNA, 19 nt, Artificial Sequence
  Description of Artificial Sequence: Synthetic oligonucleotide
cagggcagugacuuaauau

SEQ ID NO: 2240062 - RNA, 19 nt, Artificial Sequence
  Description of Artificial Sequence: Synthetic oligonucleotide
gcguccagggcggugaaag

SEQ ID NO: 2240063 - RNA, 19 nt, Artificial Sequence
  Description of Artificial Sequence: Synthetic oligonucleotide
ucgcuguggcgcacugucu

SEQ ID NO: 2240064 - RNA, 19 nt, Artificial Sequence
  Description of Artificial Sequence: Synthetic oligonucleotide
gcaucgaucagaucuuccu

SEQ ID NO: 2240065 - RNA, 19 nt, Artificial Sequence
  Description of Artificial Sequence: Synthetic oligonucleotide
cacucuccagcacaugcaa

SEQ ID NO: 2240066 - RNA, 19 nt, Artificial Sequence
  Description of Artificial Sequence: Synthetic oligonucleotide
uccucgaugucagcaccaa

SEQ ID NO: 2240067 - RNA, 19 nt, Artificial Sequence
  Description of Artificial Sequence: Synthetic oligonucleotide
ccaccugagcaugagugcc

SEQ ID NO: 2240068 - RNA, 19 nt, Artificial Sequence
  Description of Artificial Sequence: Synthetic oligonucleotide
caccugcugcugugaagcc

SEQ ID NO: 2240069 - RNA, 19 nt, Artificial Sequence
  Description of Artificial Sequence: Synthetic oligonucleotide
caguaacacccucccgcac

SEQ ID NO: 2240070 - RNA, 19 nt, Artificial Sequence
  Description of Artificial Sequence: Synthetic oligonucleotide
aggcggacagccaggcguc

SEQ ID NO: 2240071 - RNA, 19 nt, Artificial Sequence
  Description of Artificial Sequence: Synthetic oligonucleotide
cacugagccccgugacggc

SEQ ID NO: 2240072 - RNA, 19 nt, Artificial Sequence
  Description of Artificial Sequence: Synthetic oligonucleotide
gagcggccccagcagagga

SEQ ID NO: 2240073 - RNA, 19 nt, Artificial Sequence
  Description of Artificial Sequence: Synthetic oligonucleotide
aagcauaggcagggccgcu

SEQ ID NO: 2240074 - RNA, 19 nt, Artificial Sequence
  Description of Artificial Sequence: Synthetic oligonucleotide
caggcggacagccaggcgu

SEQ ID NO: 2240075 - RNA, 19 nt, Artificial Sequence
  Description of Artificial Sequence: Synthetic oligonucleotide
agccugccauccuccaccu

SEQ ID NO: 2240076 - RNA, 19 nt, Artificial Sequence
  Description of Artificial Sequence: Synthetic oligonucleotide
acgaugugccuguccucga

SEQ ID NO: 2240077 - RNA, 19 nt, Artificial Sequence
  Description of Artificial Sequence: Synthetic oligonucleotide
gugacaccugccgcacagg

SEQ ID NO: 2240078 - RNA, 19 nt, Artificial Sequence
  Description of Artificial Sequence: Synthetic oligonucleotide
ggagggcagagaccguggc

SEQ ID NO: 2240079 - RNA, 19 nt, Artificial Sequence
  Description of Artificial Sequence: Synthetic oligonucleotide
augggcccagaagaagacu

SEQ ID NO: 2240080 - RNA, 19 nt, Artificial Sequence
  Description of Artificial Sequence: Synthetic oligonucleotide
gcccaugagcugcuccacg

SEQ ID NO: 2240081 - RNA, 19 nt, Artificial Sequence
  Description of Artificial Sequence: Synthetic oligonucleotide
ggcaucgaucagaucuucc

SEQ ID NO: 2240082 - RNA, 19 nt, Artificial Sequence
  Description of Artificial Sequence: Synthetic oligonucleotide
ugagugcccguggcguaca

SEQ ID NO: 2240083 - RNA, 19 nt, Artificial Sequence
  Description of Artificial Sequence: Synthetic oligonucleotide
cagcgagagcguccagggc

SEQ ID NO: 2240084 - RNA, 19 nt, Artificial Sequence
  Description of Artificial Sequence: Synthetic oligonucleotide
ugauggcagcaggggagac

SEQ ID NO: 2240085 - RNA, 19 nt, Artificial Sequence
  Description of Artificial Sequence: Synthetic oligonucleotide
caccugccgcacaggacac

SEQ ID NO: 2240086 - RNA, 19 nt, Artificial Sequence
  Description of Artificial Sequence: Synthetic oligonucleotide
guacggaugcaggaggccu

SEQ ID NO: 2240087 - RNA, 19 nt, Artificial Sequence
  Description of Artificial Sequence: Synthetic oligonucleotide
agcccacacugcccaugag

SEQ ID NO: 2240088 - RNA, 19 nt, Artificial Sequence
  Description of Artificial Sequence: Synthetic oligonucleotide
ggcaaaagccagcugcccu

SEQ ID NO: 2240089 - RNA, 19 nt, Artificial Sequence
  Description of Artificial Sequence: Synthetic oligonucleotide
ccaggcgucuuggaagucc

SEQ ID NO: 2240090 - RNA, 19 nt, Artificial Sequence
  Description of Artificial Sequence: Synthetic oligonucleotide
ugcccguggcguacacagu

SEQ ID NO: 2240091 - RNA, 19 nt, Artificial Sequence
  Description of Artificial Sequence: Synthetic oligonucleotide
caccacugggguguugguc

SEQ ID NO: 2240092 - RNA, 19 nt, Artificial Sequence
  Description of Artificial Sequence: Synthetic oligonucleotide
cagagaccguggcuugguc

SEQ ID NO: 2240093 - RNA, 19 nt, Artificial Sequence
  Description of Artificial Sequence: Synthetic oligonucleotide
cccacgcucaugucuggag

SEQ ID NO: 2240094 - RNA, 19 nt, Artificial Sequence
  Description of Artificial Sequence: Synthetic oligonucleotide
cuauccuccggagggcaga

SEQ ID NO: 2240095 - RNA, 19 nt, Artificial Sequence
  Description of Artificial Sequence: Synthetic oligonucleotide
cacgcucaugucuggaggu

SEQ ID NO: 2240096 - RNA, 19 nt, Artificial Sequence
  Description of Artificial Sequence: Synthetic oligonucleotide
ggccauuaucuugugagcu

SEQ ID NO: 2240097 - RNA, 19 nt, Artificial Sequence
  Description of Artificial Sequence: Synthetic oligonucleotide
cauguccggggagcuggcc

SEQ ID NO: 2240098 - RNA, 19 nt, Artificial Sequence
  Description of Artificial Sequence: Synthetic oligonucleotide
ggucgauacagcggaugac

SEQ ID NO: 2240099 - RNA, 19 nt, Artificial Sequence
  Description of Artificial Sequence: Synthetic oligonucleotide
gcgagagcguccagggcgg

SEQ ID NO: 2240100 - RNA, 19 nt, Artificial Sequence
  Description of Artificial Sequence: Synthetic oligonucleotide
gaccguggcuugguccaug

SEQ ID NO: 2240101 - RNA, 19 nt, Artificial Sequence
  Description of Artificial Sequence: Synthetic oligonucleotide
ggcagagaccguggcuugg

SEQ ID NO: 2240102 - RNA, 19 nt, Artificial Sequence
  Description of Artificial Sequence: Synthetic oligonucleotide
cuguggcgcacugucuguc

SEQ ID NO: 2240103 - RNA, 19 nt, Artificial Sequence
  Description of Artificial Sequence: Synthetic oligonucleotide
acggcaucgaucagaucuu

SEQ ID NO: 2240104 - RNA, 19 nt, Artificial Sequence
  Description of Artificial Sequence: Synthetic oligonucleotide
cagggccgcugccacugag

SEQ ID NO: 2240105 - RNA, 19 nt, Artificial Sequence
  Description of Artificial Sequence: Synthetic oligonucleotide
acccucccgcaccaccacu

SEQ ID NO: 2240106 - RNA, 19 nt, Artificial Sequence
  Description of Artificial Sequence: Synthetic oligonucleotide
gccagaacaccugcugcug

SEQ ID NO: 2240107 - RNA, 19 nt, Artificial Sequence
  Description of Artificial Sequence: Synthetic oligonucleotide
cagcucccguguacggaug

SEQ ID NO: 2240108 - RNA, 19 nt, Artificial Sequence
  Description of Artificial Sequence: Synthetic oligonucleotide
ggcuagggcaaaagccagc

SEQ ID NO: 2240109 - RNA, 19 nt, Artificial Sequence
  Description of Artificial Sequence: Synthetic oligonucleotide
ugugggcugucagguucac

SEQ ID NO: 2240110 - RNA, 19 nt, Artificial Sequence
  Description of Artificial Sequence: Synthetic oligonucleotide
gcacaugcaaggcauggau

SEQ ID NO: 2240111 - RNA, 19 nt, Artificial Sequence
  Description of Artificial Sequence: Synthetic oligonucleotide
uccggagggcagagaccgu

SEQ ID NO: 2240112 - RNA, 19 nt, Artificial Sequence
  Description of Artificial Sequence: Synthetic oligonucleotide
caugagugcccguggcgua

SEQ ID NO: 2240113 - RNA, 19 nt, Artificial Sequence
  Description of Artificial Sequence: Synthetic oligonucleotide
ggcagggccgcugccacug

SEQ ID NO: 2240114 - RNA, 19 nt, Artificial Sequence
  Description of Artificial Sequence: Synthetic oligonucleotide
gggcaaaagccagcugccc

SEQ ID NO: 2240115 - RNA, 19 nt, Artificial Sequence
  Description of Artificial Sequence: Synthetic oligonucleotide
ccuauccuccggagggcag

SEQ ID NO: 2240116 - RNA, 19 nt, Artificial Sequence
  Description of Artificial Sequence: Synthetic oligonucleotide
agcugccagaacaccugcu

SEQ ID NO: 2240117 - RNA, 19 nt, Artificial Sequence
  Description of Artificial Sequence: Synthetic oligonucleotide
ccguguacggaugcaggag

SEQ ID NO: 2240118 - RNA, 19 nt, Artificial Sequence
  Description of Artificial Sequence: Synthetic oligonucleotide
agugcccguggcguacaca

SEQ ID NO: 2240119 - RNA, 19 nt, Artificial Sequence
  Description of Artificial Sequence: Synthetic oligonucleotide
cugucuguugugggcuguc

SEQ ID NO: 2240120 - RNA, 19 nt, Artificial Sequence
  Description of Artificial Sequence: Synthetic oligonucleotide
ugacggcaucgaucagauc

SEQ ID NO: 2240121 - RNA, 19 nt, Artificial Sequence
  Description of Artificial Sequence: Synthetic oligonucleotide
caguuuccugaucagccau

SEQ ID NO: 2240122 - RNA, 19 nt, Artificial Sequence
  Description of Artificial Sequence: Synthetic oligonucleotide
gggcagagaccguggcuug

SEQ ID NO: 2240123 - RNA, 19 nt, Artificial Sequence
  Description of Artificial Sequence: Synthetic oligonucleotide
gagugcccguggcguacac

SEQ ID NO: 2240124 - RNA, 19 nt, Artificial Sequence
  Description of Artificial Sequence: Synthetic oligonucleotide
ccuguccucgaugucagca

SEQ ID NO: 2240125 - RNA, 19 nt, Artificial Sequence
  Description of Artificial Sequence: Synthetic oligonucleotide
ccagcacaugcaaggcaug

SEQ ID NO: 2240126 - RNA, 19 nt, Artificial Sequence
  Description of Artificial Sequence: Synthetic oligonucleotide
cccaugagcugcuccacga

SEQ ID NO: 2240127 - RNA, 19 nt, Artificial Sequence
  Description of Artificial Sequence: Synthetic oligonucleotide
gugacggcaucgaucagau

SEQ ID NO: 2240128 - RNA, 19 nt, Artificial Sequence
  Description of Artificial Sequence: Synthetic oligonucleotide
cccugccccgaugaaaccc

SEQ ID NO: 2240129 - RNA, 19 nt, Artificial Sequence
  Description of Artificial Sequence: Synthetic oligonucleotide
gcuagggcaaaagccagcu

SEQ ID NO: 2240130 - RNA, 19 nt, Artificial Sequence
  Description of Artificial Sequence: Synthetic oligonucleotide
cacccucccgcaccaccac

SEQ ID NO: 2240131 - RNA, 19 nt, Artificial Sequence
  Description of Artificial Sequence: Synthetic oligonucleotide
cguacacaguaacacccuc

SEQ ID NO: 2240132 - RNA, 19 nt, Artificial Sequence
  Description of Artificial Sequence: Synthetic oligonucleotide
ccaggaagagcacaucgcu

SEQ ID NO: 2240133 - RNA, 19 nt, Artificial Sequence
  Description of Artificial Sequence: Synthetic oligonucleotide
gugggcugucagguucacc

SEQ ID NO: 2240134 - RNA, 19 nt, Artificial Sequence
  Description of Artificial Sequence: Synthetic oligonucleotide
ccguggcguacacaguaac

SEQ ID NO: 2240135 - RNA, 19 nt, Artificial Sequence
  Description of Artificial Sequence: Synthetic oligonucleotide
acccacgcucaugucugga

SEQ ID NO: 2240136 - RNA, 19 nt, Artificial Sequence
  Description of Artificial Sequence: Synthetic oligonucleotide
ccccagcagaggaauccag

SEQ ID NO: 2240137 - RNA, 19 nt, Artificial Sequence
  Description of Artificial Sequence: Synthetic oligonucleotide
cgaugucagcaccaauuuc

SEQ ID NO: 2240138 - RNA, 19 nt, Artificial Sequence
  Description of Artificial Sequence: Synthetic oligonucleotide
gcccguggcguacacagua

SEQ ID NO: 2240139 - RNA, 19 nt, Artificial Sequence
  Description of Artificial Sequence: Synthetic oligonucleotide
gcagaggaauccaguuuca

SEQ ID NO: 2240140 - RNA, 19 nt, Artificial Sequence
  Description of Artificial Sequence: Synthetic oligonucleotide
cccucccgcaccaccacug

SEQ ID NO: 2240141 - RNA, 19 nt, Artificial Sequence
  Description of Artificial Sequence: Synthetic oligonucleotide
gggagacaguuuccugauc

SEQ ID NO: 2240142 - RNA, 19 nt, Artificial Sequence
  Description of Artificial Sequence: Synthetic oligonucleotide
cgcuguggcgcacugucug

SEQ ID NO: 2240143 - RNA, 19 nt, Artificial Sequence
  Description of Artificial Sequence: Synthetic oligonucleotide
ccugccccgaugaaaccca

SEQ ID NO: 2240144 - RNA, 19 nt, Artificial Sequence
  Description of Artificial Sequence: Synthetic oligonucleotide
ccucccgcaccaccacugg

SEQ ID NO: 2240145 - RNA, 19 nt, Artificial Sequence
  Description of Artificial Sequence: Synthetic oligonucleotide
cccguguacggaugcagga

SEQ ID NO: 2240146 - RNA, 19 nt, Artificial Sequence
  Description of Artificial Sequence: Synthetic oligonucleotide
cccauuuucacuccaccau

SEQ ID NO: 2240147 - RNA, 19 nt, Artificial Sequence
  Description of Artificial Sequence: Synthetic oligonucleotide
uaacacccucccgcaccac

SEQ ID NO: 2240148 - RNA, 19 nt, Artificial Sequence
  Description of Artificial Sequence: Synthetic oligonucleotide
cagcagaggaauccaguuu

SEQ ID NO: 2240149 - RNA, 19 nt, Artificial Sequence
  Description of Artificial Sequence: Synthetic oligonucleotide
cgcucaugucuggaggucc

SEQ ID NO: 2240150 - RNA, 19 nt, Artificial Sequence
  Description of Artificial Sequence: Synthetic oligonucleotide
ggcugucagguucaccccu

SEQ ID NO: 2240151 - RNA, 19 nt, Artificial Sequence
  Description of Artificial Sequence: Synthetic oligonucleotide
cguggcguacacaguaaca

SEQ ID NO: 2240152 - RNA, 19 nt, Artificial Sequence
  Description of Artificial Sequence: Synthetic oligonucleotide
caccaauuucauccaggau

SEQ ID NO: 2240153 - RNA, 19 nt, Artificial Sequence
  Description of Artificial Sequence: Synthetic oligonucleotide
cuccaccaucagcgagagc

SEQ ID NO: 2240154 - RNA, 19 nt, Artificial Sequence
  Description of Artificial Sequence: Synthetic oligonucleotide
gcaugagugcccguggcgu

SEQ ID NO: 2240155 - RNA, 19 nt, Artificial Sequence
  Description of Artificial Sequence: Synthetic oligonucleotide
guucugagucuaguagcau

SEQ ID NO: 2240156 - RNA, 19 nt, Artificial Sequence
  Description of Artificial Sequence: Synthetic oligonucleotide
caugcaaggcauggauggu

SEQ ID NO: 2240157 - RNA, 19 nt, Artificial Sequence
  Description of Artificial Sequence: Synthetic oligonucleotide
auccuccaccugagcauga

SEQ ID NO: 2240158 - RNA, 19 nt, Artificial Sequence
  Description of Artificial Sequence: Synthetic oligonucleotide
gcagggcagugacuuaaua

SEQ ID NO: 2240159 - RNA, 19 nt, Artificial Sequence
  Description of Artificial Sequence: Synthetic oligonucleotide
ccggagggcagagaccgug

SEQ ID NO: 2240160 - RNA, 19 nt, Artificial Sequence
  Description of Artificial Sequence: Synthetic oligonucleotide
agcccuuggcuagggcaaa

SEQ ID NO: 2240161 - RNA, 19 nt, Artificial Sequence
  Description of Artificial Sequence: Synthetic oligonucleotide
gcagcucccguguacggau

SEQ ID NO: 2240162 - RNA, 19 nt, Artificial Sequence
  Description of Artificial Sequence: Synthetic oligonucleotide
cgugacggcaucgaucaga

SEQ ID NO: 2240163 - RNA, 19 nt, Artificial Sequence
  Description of Artificial Sequence: Synthetic oligonucleotide
cugcccugccccgaugaaa

SEQ ID NO: 2240164 - RNA, 19 nt, Artificial Sequence
  Description of Artificial Sequence: Synthetic oligonucleotide
gagcguccagggcggugaa

SEQ ID NO: 2240165 - RNA, 19 nt, Artificial Sequence
  Description of Artificial Sequence: Synthetic oligonucleotide
ccaggcggacagccaggcg

SEQ ID NO: 2240166 - RNA, 19 nt, Artificial Sequence
  Description of Artificial Sequence: Synthetic oligonucleotide
cuuguccaggacagucuuu

SEQ ID NO: 2240167 - RNA, 19 nt, Artificial Sequence
  Description of Artificial Sequence: Synthetic oligonucleotide
cccaggcggacagccaggc

SEQ ID NO: 2240168 - RNA, 19 nt, Artificial Sequence
  Description of Artificial Sequence: Synthetic oligonucleotide
ccugccgcacaggacacca

SEQ ID NO: 2240169 - RNA, 19 nt, Artificial Sequence
  Description of Artificial Sequence: Synthetic oligonucleotide
gcccugccccgaugaaacc

SEQ ID NO: 2240170 - RNA, 19 nt, Artificial Sequence
  Description of Artificial Sequence: Synthetic oligonucleotide
agaccguggcuugguccau

SEQ ID NO: 2240171 - RNA, 19 nt, Artificial Sequence
  Description of Artificial Sequence: Synthetic oligonucleotide
gcuggccuggaugcuguuc

SEQ ID NO: 2240172 - RNA, 19 nt, Artificial Sequence
  Description of Artificial Sequence: Synthetic oligonucleotide
agcuggccuggaugcuguu

SEQ ID NO: 2240173 - RNA, 19 nt, Artificial Sequence
  Description of Artificial Sequence: Synthetic oligonucleotide
aggcgucuuggaaguccca

SEQ ID NO: 2240174 - RNA, 19 nt, Artificial Sequence
  Description of Artificial Sequence: Synthetic oligonucleotide
guggccccaccaggagagc

SEQ ID NO: 2240175 - RNA, 19 nt, Artificial Sequence
  Description of Artificial Sequence: Synthetic oligonucleotide
gcuccacgagccugccauc

SEQ ID NO: 2240176 - RNA, 19 nt, Artificial Sequence
  Description of Artificial Sequence: Synthetic oligonucleotide
gccuguccucgaugucagc

SEQ ID NO: 2240177 - RNA, 19 nt, Artificial Sequence
  Description of Artificial Sequence: Synthetic oligonucleotide
cugcuccacgagccugcca

SEQ ID NO: 2240178 - RNA, 19 nt, Artificial Sequence
  Description of Artificial Sequence: Synthetic oligonucleotide
gcuguggcgcacugucugu

SEQ ID NO: 2240179 - RNA, 19 nt, Artificial Sequence
  Description of Artificial Sequence: Synthetic oligonucleotide
agcguccagggcggugaaa

SEQ ID NO: 2240180 - RNA, 19 nt, Artificial Sequence
  Description of Artificial Sequence: Synthetic oligonucleotide
gcguacacaguaacacccu

SEQ ID NO: 2240181 - RNA, 19 nt, Artificial Sequence
  Description of Artificial Sequence: Synthetic oligonucleotide
gccccagcagaggaaucca

SEQ ID NO: 2240182 - RNA, 19 nt, Artificial Sequence
  Description of Artificial Sequence: Synthetic oligonucleotide
caccaggagagcagacauu

SEQ ID NO: 2240183 - RNA, 19 nt, Artificial Sequence
  Description of Artificial Sequence: Synthetic oligonucleotide
ccccuauccuccggagggc

SEQ ID NO: 2240184 - RNA, 19 nt, Artificial Sequence
  Description of Artificial Sequence: Synthetic oligonucleotide
guuggucgauacagcggau

SEQ ID NO: 2240185 - RNA, 19 nt, Artificial Sequence
  Description of Artificial Sequence: Synthetic oligonucleotide
ggcgucuuggaagucccau

SEQ ID NO: 2240186 - RNA, 19 nt, Artificial Sequence
  Description of Artificial Sequence: Synthetic oligonucleotide
cgagccugccauccuccac

SEQ ID NO: 2240187 - RNA, 19 nt, Artificial Sequence
  Description of Artificial Sequence: Synthetic oligonucleotide
cugucagguucaccccuau

SEQ ID NO: 2240188 - RNA, 19 nt, Artificial Sequence
  Description of Artificial Sequence: Synthetic oligonucleotide
gcugucagguucaccccua

SEQ ID NO: 2240189 - RNA, 19 nt, Artificial Sequence
  Description of Artificial Sequence: Synthetic oligonucleotide
cacugcccaugagcugcuc

SEQ ID NO: 2240190 - RNA, 19 nt, Artificial Sequence
  Description of Artificial Sequence: Synthetic oligonucleotide
cacaucgcuguggcgcacu

SEQ ID NO: 2240191 - RNA, 19 nt, Artificial Sequence
  Description of Artificial Sequence: Synthetic oligonucleotide
ccgcaccaccacuggggug

SEQ ID NO: 2240192 - RNA, 19 nt, Artificial Sequence
  Description of Artificial Sequence: Synthetic oligonucleotide
gcgucuuggaagucccauu

SEQ ID NO: 2240193 - RNA, 19 nt, Artificial Sequence
  Description of Artificial Sequence: Synthetic oligonucleotide
cgucuuggaagucccauuu

SEQ ID NO: 2240194 - RNA, 19 nt, Artificial Sequence
  Description of Artificial Sequence: Synthetic oligonucleotide
ccacugggguguuggucga

SEQ ID NO: 2240195 - RNA, 19 nt, Artificial Sequence
  Description of Artificial Sequence: Synthetic oligonucleotide
cccguggcguacacaguaa

SEQ ID NO: 2240196 - RNA, 19 nt, Artificial Sequence
  Description of Artificial Sequence: Synthetic oligonucleotide
gcagagaccguggcuuggu

SEQ ID NO: 2240197 - RNA, 19 nt, Artificial Sequence
  Description of Artificial Sequence: Synthetic oligonucleotide
gcucccguguacggaugca

SEQ ID NO: 2240198 - RNA, 19 nt, Artificial Sequence
  Description of Artificial Sequence: Synthetic oligonucleotide
gcggaugacuuugggugcu

SEQ ID NO: 2240199 - RNA, 19 nt, Artificial Sequence
  Description of Artificial Sequence: Synthetic oligonucleotide
cugagucuaguagcaucuu

SEQ ID NO: 2240200 - RNA, 19 nt, Artificial Sequence
  Description of Artificial Sequence: Synthetic oligonucleotide
cccuauccuccggagggca

SEQ ID NO: 2240201 - RNA, 19 nt, Artificial Sequence
  Description of Artificial Sequence: Synthetic oligonucleotide
gcugcccugccccgaugaa

SEQ ID NO: 2240202 - RNA, 19 nt, Artificial Sequence
  Description of Artificial Sequence: Synthetic oligonucleotide
ccagggcggugaaagcaua

SEQ ID NO: 2240203 - RNA, 19 nt, Artificial Sequence
  Description of Artificial Sequence: Synthetic oligonucleotide
caucgcuguggcgcacugu

SEQ ID NO: 2240204 - RNA, 19 nt, Artificial Sequence
  Description of Artificial Sequence: Synthetic oligonucleotide
ccaccaucagcgagagcgu

SEQ ID NO: 2240205 - RNA, 19 nt, Artificial Sequence
  Description of Artificial Sequence: Synthetic oligonucleotide
gcacaucgcuguggcgcac

SEQ ID NO: 2240206 - RNA, 19 nt, Artificial Sequence
  Description of Artificial Sequence: Synthetic oligonucleotide
ccgugacggcaucgaucag

SEQ ID NO: 2240207 - RNA, 19 nt, Artificial Sequence
  Description of Artificial Sequence: Synthetic oligonucleotide
ccguggcuugguccauguc

SEQ ID NO: 2240208 - RNA, 19 nt, Artificial Sequence
  Description of Artificial Sequence: Synthetic oligonucleotide
cggaugacuuugggugcug

SEQ ID NO: 2240209 - RNA, 19 nt, Artificial Sequence
  Description of Artificial Sequence: Synthetic oligonucleotide
ccccgaugaaacccacgcu

SEQ ID NO: 2240210 - RNA, 19 nt, Artificial Sequence
  Description of Artificial Sequence: Synthetic oligonucleotide
cgauacagcggaugacuuu

SEQ ID NO: 2240211 - RNA, 19 nt, Artificial Sequence
  Description of Artificial Sequence: Synthetic oligonucleotide
gggugcuggcuggaaugcu

SEQ ID NO: 2240212 - RNA, 19 nt, Artificial Sequence
  Description of Artificial Sequence: Synthetic oligonucleotide
cccgcaccaccacuggggu

SEQ ID NO: 2240213 - RNA, 19 nt, Artificial Sequence
  Description of Artificial Sequence: Synthetic oligonucleotide
ggaaugcugucagcuucuu

SEQ ID NO: 2240214 - RNA, 19 nt, Artificial Sequence
  Description of Artificial Sequence: Synthetic oligonucleotide
ccccacucuccagcacaug

SEQ ID NO: 2240215 - RNA, 19 nt, Artificial Sequence
  Description of Artificial Sequence: Synthetic oligonucleotide
gccaggcgucuuggaaguc

SEQ ID NO: 2240216 - RNA, 19 nt, Artificial Sequence
  Description of Artificial Sequence: Synthetic oligonucleotide
ggcgcacugucugucuguu

SEQ ID NO: 2240217 - RNA, 19 nt, Artificial Sequence
  Description of Artificial Sequence: Synthetic oligonucleotide
gcccuuggcuagggcaaaa

SEQ ID NO: 2240218 - RNA, 19 nt, Artificial Sequence
  Description of Artificial Sequence: Synthetic oligonucleotide
gcggccccagcagaggaau

SEQ ID NO: 2240219 - RNA, 19 nt, Artificial Sequence
  Description of Artificial Sequence: Synthetic oligonucleotide
ccgcugccacugagccccg

SEQ ID NO: 2240220 - RNA, 19 nt, Artificial Sequence
  Description of Artificial Sequence: Synthetic oligonucleotide
ccucgaugucagcaccaau

SEQ ID NO: 2240221 - RNA, 19 nt, Artificial Sequence
  Description of Artificial Sequence: Synthetic oligonucleotide
ggccaggcugcagggcagu

SEQ ID NO: 2240222 - RNA, 19 nt, Artificial Sequence
  Description of Artificial Sequence: Synthetic oligonucleotide
cacugggguguuggucgau

SEQ ID NO: 2240223 - RNA, 19 nt, Artificial Sequence
  Description of Artificial Sequence: Synthetic oligonucleotide
ccugagcaugagugcccgu

SEQ ID NO: 2240224 - RNA, 19 nt, Artificial Sequence
  Description of Artificial Sequence: Synthetic oligonucleotide
cgaugugccuguccucgau

SEQ ID NO: 2240225 - RNA, 19 nt, Artificial Sequence
  Description of Artificial Sequence: Synthetic oligonucleotide
ggcggacagccaggcgucu

SEQ ID NO: 2240226 - RNA, 19 nt, Artificial Sequence
  Description of Artificial Sequence: Synthetic oligonucleotide
gcggacagccaggcgucuu

SEQ ID NO: 2240227 - RNA, 19 nt, Artificial Sequence
  Description of Artificial Sequence: Synthetic oligonucleotide
gcaccaccacugggguguu

SEQ ID NO: 2240228 - RNA, 19 nt, Artificial Sequence
  Description of Artificial Sequence: Synthetic oligonucleotide
cgagagcguccagggcggu

SEQ ID NO: 2240229 - RNA, 19 nt, Artificial Sequence
  Description of Artificial Sequence: Synthetic oligonucleotide
aaaguuuauguacaaggac

SEQ ID NO: 2240230 - RNA, 19 nt, Artificial Sequence
  Description of Artificial Sequence: Synthetic oligonucleotide
gaugaagaugccuaguugg

SEQ ID NO: 2240231 - RNA, 19 nt, Artificial Sequence
  Description of Artificial Sequence: Synthetic oligonucleotide
aaguuuauguacaaggacg

SEQ ID NO: 2240232 - RNA, 19 nt, Artificial Sequence
  Description of Artificial Sequence: Synthetic oligonucleotide
uuauauagaauguggcugg

SEQ ID NO: 2240233 - RNA, 19 nt, Artificial Sequence
  Description of Artificial Sequence: Synthetic oligonucleotide
uuuauauagaauguggcug

SEQ ID NO: 2240234 - RNA, 19 nt, Artificial Sequence
  Description of Artificial Sequence: Synthetic oligonucleotide
uccagaaugaaacucaccu

SEQ ID NO: 2240235 - RNA, 19 nt, Artificial Sequence
  Description of Artificial Sequence: Synthetic oligonucleotide
acagcuagaacuugguccc

SEQ ID NO: 2240236 - RNA, 19 nt, Artificial Sequence
  Description of Artificial Sequence: Synthetic oligonucleotide
aggcaaaucacauggaagg

SEQ ID NO: 2240237 - RNA, 19 nt, Artificial Sequence
  Description of Artificial Sequence: Synthetic oligonucleotide
aagacucuagugcacaguc

SEQ ID NO: 2240238 - RNA, 19 nt, Artificial Sequence
  Description of Artificial Sequence: Synthetic oligonucleotide
ugugguaccugauaaacgc

SEQ ID NO: 2240239 - RNA, 19 nt, Artificial Sequence
  Description of Artificial Sequence: Synthetic oligonucleotide
agauccaggacccgcaucc

SEQ ID NO: 2240240 - RNA, 19 nt, Artificial Sequence
  Description of Artificial Sequence: Synthetic oligonucleotide
gauguuaaaucccagcuga

SEQ ID NO: 2240241 - RNA, 19 nt, Artificial Sequence
  Description of Artificial Sequence: Synthetic oligonucleotide
gaguuuauauagaaugugg

SEQ ID NO: 2240242 - RNA, 19 nt, Artificial Sequence
  Description of Artificial Sequence: Synthetic oligonucleotide
gaaacuagggaacuccaag

SEQ ID NO: 2240243 - RNA, 19 nt, Artificial Sequence
  Description of Artificial Sequence: Synthetic oligonucleotide
aacucauuguuguagucug

SEQ ID NO: 2240244 - RNA, 19 nt, Artificial Sequence
  Description of Artificial Sequence: Synthetic oligonucleotide
cacagcuagaacuuggucc

SEQ ID NO: 2240245 - RNA, 19 nt, Artificial Sequence
  Description of Artificial Sequence: Synthetic oligonucleotide
ugagaguagaauuuccuga

SEQ ID NO: 2240246 - RNA, 19 nt, Artificial Sequence
  Description of Artificial Sequence: Synthetic oligonucleotide
aacgcuacuugcuuucuag

SEQ ID NO: 2240247 - RNA, 19 nt, Artificial Sequence
  Description of Artificial Sequence: Synthetic oligonucleotide
cucaauauccuggaaaucc

SEQ ID NO: 2240248 - RNA, 19 nt, Artificial Sequence
  Description of Artificial Sequence: Synthetic oligonucleotide
aguacaguagaguuuauau

SEQ ID NO: 2240249 - RNA, 19 nt, Artificial Sequence
  Description of Artificial Sequence: Synthetic oligonucleotide
aaauaagcuguguaaguau

SEQ ID NO: 2240250 - RNA, 19 nt, Artificial Sequence
  Description of Artificial Sequence: Synthetic oligonucleotide
gacuccaaaguuuauguac

SEQ ID NO: 2240251 - RNA, 19 nt, Artificial Sequence
  Description of Artificial Sequence: Synthetic oligonucleotide
gaagaugccuaguugggag

SEQ ID NO: 2240252 - RNA, 19 nt, Artificial Sequence
  Description of Artificial Sequence: Synthetic oligonucleotide
acaucuagacaucauuauc

SEQ ID NO: 2240253 - RNA, 19 nt, Artificial Sequence
  Description of Artificial Sequence: Synthetic oligonucleotide
aaacuagggaacuccaagu

SEQ ID NO: 2240254 - RNA, 19 nt, Artificial Sequence
  Description of Artificial Sequence: Synthetic oligonucleotide
aaugaaacucaccuaggaa

SEQ ID NO: 2240255 - RNA, 19 nt, Artificial Sequence
  Description of Artificial Sequence: Synthetic oligonucleotide
uuggcgaugauaauuguaa

SEQ ID NO: 2240256 - RNA, 19 nt, Artificial Sequence
  Description of Artificial Sequence: Synthetic oligonucleotide
ugcucgaugugcaucagag

SEQ ID NO: 2240257 - RNA, 19 nt, Artificial Sequence
  Description of Artificial Sequence: Synthetic oligonucleotide
auaaacgcuacuugcuuuc

SEQ ID NO: 2240258 - RNA, 19 nt, Artificial Sequence
  Description of Artificial Sequence: Synthetic oligonucleotide
gucuucaagauuucaacag

SEQ ID NO: 2240259 - RNA, 19 nt, Artificial Sequence
  Description of Artificial Sequence: Synthetic oligonucleotide
ucaggcaaagcccuucuag

SEQ ID NO: 2240260 - RNA, 19 nt, Artificial Sequence
  Description of Artificial Sequence: Synthetic oligonucleotide
ugaaacucaccuaggaaac

SEQ ID NO: 2240261 - RNA, 19 nt, Artificial Sequence
  Description of Artificial Sequence: Synthetic oligonucleotide
acuagggaacuccaaguac

SEQ ID NO: 2240262 - RNA, 19 nt, Artificial Sequence
  Description of Artificial Sequence: Synthetic oligonucleotide
ucaccuaggaaacuaggga

SEQ ID NO: 2240263 - RNA, 19 nt, Artificial Sequence
  Description of Artificial Sequence: Synthetic oligonucleotide
cuacuugcuuucuagcugg

SEQ ID NO: 2240264 - RNA, 19 nt, Artificial Sequence
  Description of Artificial Sequence: Synthetic oligonucleotide
aaucacauggaaggucccc

SEQ ID NO: 2240265 - RNA, 19 nt, Artificial Sequence
  Description of Artificial Sequence: Synthetic oligonucleotide
aguuuauguacaaggacgg

SEQ ID NO: 2240266 - RNA, 19 nt, Artificial Sequence
  Description of Artificial Sequence: Synthetic oligonucleotide
gacgauucggggcagaaac

SEQ ID NO: 2240267 - RNA, 19 nt, Artificial Sequence
  Description of Artificial Sequence: Synthetic oligonucleotide
gucaucauaagagauccgg

SEQ ID NO: 2240268 - RNA, 19 nt, Artificial Sequence
  Description of Artificial Sequence: Synthetic oligonucleotide
ugaggaggaauccacgcug

SEQ ID NO: 2240269 - RNA, 19 nt, Artificial Sequence
  Description of Artificial Sequence: Synthetic oligonucleotide
aaggggccaaaacaguguc

SEQ ID NO: 2240270 - RNA, 19 nt, Artificial Sequence
  Description of Artificial Sequence: Synthetic oligonucleotide
acaggcuacagacaucuag

SEQ ID NO: 2240271 - RNA, 19 nt, Artificial Sequence
  Description of Artificial Sequence: Synthetic oligonucleotide
aaaauaagcuguguaagua

SEQ ID NO: 2240272 - RNA, 19 nt, Artificial Sequence
  Description of Artificial Sequence: Synthetic oligonucleotide
acauggaagguccccagac

SEQ ID NO: 2240273 - RNA, 19 nt, Artificial Sequence
  Description of Artificial Sequence: Synthetic oligonucleotide
aagaugccuaguugggagg

SEQ ID NO: 2240274 - RNA, 19 nt, Artificial Sequence
  Description of Artificial Sequence: Synthetic oligonucleotide
gaagcguacacgcaugcug

SEQ ID NO: 2240275 - RNA, 19 nt, Artificial Sequence
  Description of Artificial Sequence: Synthetic oligonucleotide
uuauguacaaggacgggau

SEQ ID NO: 2240276 - RNA, 19 nt, Artificial Sequence
  Description of Artificial Sequence: Synthetic oligonucleotide
ucaucauaagagauccggc

SEQ ID NO: 2240277 - RNA, 19 nt, Artificial Sequence
  Description of Artificial Sequence: Synthetic oligonucleotide
uguaaggaaagaagcguac

SEQ ID NO: 2240278 - RNA, 19 nt, Artificial Sequence
  Description of Artificial Sequence: Synthetic oligonucleotide
ucaauauccuggaaaucca

SEQ ID NO: 2240279 - RNA, 19 nt, Artificial Sequence
  Description of Artificial Sequence: Synthetic oligonucleotide
caaaacagugucucuuugg

SEQ ID NO: 2240280 - RNA, 19 nt, Artificial Sequence
  Description of Artificial Sequence: Synthetic oligonucleotide
ucaugaggaggaauccacg

SEQ ID NO: 2240281 - RNA, 19 nt, Artificial Sequence
  Description of Artificial Sequence: Synthetic oligonucleotide
cucgaugugcaucagaguc

SEQ ID NO: 2240282 - RNA, 19 nt, Artificial Sequence
  Description of Artificial Sequence: Synthetic oligonucleotide
cauuguuguagucugggug

SEQ ID NO: 2240283 - RNA, 19 nt, Artificial Sequence
  Description of Artificial Sequence: Synthetic oligonucleotide
cacuaagccaggaaggcgc

SEQ ID NO: 2240284 - RNA, 19 nt, Artificial Sequence
  Description of Artificial Sequence: Synthetic oligonucleotide
gagaguagaauuuccugac

SEQ ID NO: 2240285 - RNA, 19 nt, Artificial Sequence
  Description of Artificial Sequence: Synthetic oligonucleotide
uggacuccaaaguuuaugu

SEQ ID NO: 2240286 - RNA, 19 nt, Artificial Sequence
  Description of Artificial Sequence: Synthetic oligonucleotide
aagagauccggcuauccau

SEQ ID NO: 2240287 - RNA, 19 nt, Artificial Sequence
  Description of Artificial Sequence: Synthetic oligonucleotide
uaucugugguaccugauaa

SEQ ID NO: 2240288 - RNA, 19 nt, Artificial Sequence
  Description of Artificial Sequence: Synthetic oligonucleotide
auuguaaggaaagaagcgu

SEQ ID NO: 2240289 - RNA, 19 nt, Artificial Sequence
  Description of Artificial Sequence: Synthetic oligonucleotide
uaagcuaucuccccauccu

SEQ ID NO: 2240290 - RNA, 19 nt, Artificial Sequence
  Description of Artificial Sequence: Synthetic oligonucleotide
uauacucucucaugaggag

SEQ ID NO: 2240291 - RNA, 19 nt, Artificial Sequence
  Description of Artificial Sequence: Synthetic oligonucleotide
ucucucaugaggaggaauc

SEQ ID NO: 2240292 - RNA, 19 nt, Artificial Sequence
  Description of Artificial Sequence: Synthetic oligonucleotide
auaggcaggcaggaaaacc

SEQ ID NO: 2240293 - RNA, 19 nt, Artificial Sequence
  Description of Artificial Sequence: Synthetic oligonucleotide
aaacugggucaacucauug

SEQ ID NO: 2240294 - RNA, 19 nt, Artificial Sequence
  Description of Artificial Sequence: Synthetic oligonucleotide
agaguuuauauagaaugug

SEQ ID NO: 2240295 - RNA, 19 nt, Artificial Sequence
  Description of Artificial Sequence: Synthetic oligonucleotide
cauccacuaagccaggaag

SEQ ID NO: 2240296 - RNA, 19 nt, Artificial Sequence
  Description of Artificial Sequence: Synthetic oligonucleotide
ugcucaauauccuggaaau

SEQ ID NO: 2240297 - RNA, 19 nt, Artificial Sequence
  Description of Artificial Sequence: Synthetic oligonucleotide
gguauacucucucaugagg

SEQ ID NO: 2240298 - RNA, 19 nt, Artificial Sequence
  Description of Artificial Sequence: Synthetic oligonucleotide
gaaugaaacucaccuagga

SEQ ID NO: 2240299 - RNA, 19 nt, Artificial Sequence
  Description of Artificial Sequence: Synthetic oligonucleotide
aagcuaucuccccauccuc

SEQ ID NO: 2240300 - RNA, 19 nt, Artificial Sequence
  Description of Artificial Sequence: Synthetic oligonucleotide
ucagugugacgauucgggg

SEQ ID NO: 2240301 - RNA, 19 nt, Artificial Sequence
  Description of Artificial Sequence: Synthetic oligonucleotide
agugugacgauucggggca

SEQ ID NO: 2240302 - RNA, 19 nt, Artificial Sequence
  Description of Artificial Sequence: Synthetic oligonucleotide
agaugaagaugccuaguug

SEQ ID NO: 2240303 - RNA, 19 nt, Artificial Sequence
  Description of Artificial Sequence: Synthetic oligonucleotide
ucauaagagauccggcuau

SEQ ID NO: 2240304 - RNA, 19 nt, Artificial Sequence
  Description of Artificial Sequence: Synthetic oligonucleotide
gcagauuccacauggagug

SEQ ID NO: 2240305 - RNA, 19 nt, Artificial Sequence
  Description of Artificial Sequence: Synthetic oligonucleotide
auaagagauccggcuaucc

SEQ ID NO: 2240306 - RNA, 19 nt, Artificial Sequence
  Description of Artificial Sequence: Synthetic oligonucleotide
uggcagauuccacauggag

SEQ ID NO: 2240307 - RNA, 19 nt, Artificial Sequence
  Description of Artificial Sequence: Synthetic oligonucleotide
uguguuggacuccaaaguu

SEQ ID NO: 2240308 - RNA, 19 nt, Artificial Sequence
  Description of Artificial Sequence: Synthetic oligonucleotide
caugaggaggaauccacgc

SEQ ID NO: 2240309 - RNA, 19 nt, Artificial Sequence
  Description of Artificial Sequence: Synthetic oligonucleotide
uaggaaacuagggaacucc

SEQ ID NO: 2240310 - RNA, 19 nt, Artificial Sequence
  Description of Artificial Sequence: Synthetic oligonucleotide
uguuggacuccaaaguuua

SEQ ID NO: 2240311 - RNA, 19 nt, Artificial Sequence
  Description of Artificial Sequence: Synthetic oligonucleotide
ugggucaacucauuguugu

SEQ ID NO: 2240312 - RNA, 19 nt, Artificial Sequence
  Description of Artificial Sequence: Synthetic oligonucleotide
ggcgaugauaauuguaagg

SEQ ID NO: 2240313 - RNA, 19 nt, Artificial Sequence
  Description of Artificial Sequence: Synthetic oligonucleotide
caggcaaaucacauggaag

SEQ ID NO: 2240314 - RNA, 19 nt, Artificial Sequence
  Description of Artificial Sequence: Synthetic oligonucleotide
ucucgagcugucuucaaga

SEQ ID NO: 2240315 - RNA, 19 nt, Artificial Sequence
  Description of Artificial Sequence: Synthetic oligonucleotide
ucggauguuaaaucccagc

SEQ ID NO: 2240316 - RNA, 19 nt, Artificial Sequence
  Description of Artificial Sequence: Synthetic oligonucleotide
ggccaggcaaaucacaugg

SEQ ID NO: 2240317 - RNA, 19 nt, Artificial Sequence
  Description of Artificial Sequence: Synthetic oligonucleotide
ugcaucagagucuggaauc

SEQ ID NO: 2240318 - RNA, 19 nt, Artificial Sequence
  Description of Artificial Sequence: Synthetic oligonucleotide
aacuagggaacuccaagua

SEQ ID NO: 2240319 - RNA, 19 nt, Artificial Sequence
  Description of Artificial Sequence: Synthetic oligonucleotide
aaaucacauggaagguccc

SEQ ID NO: 2240320 - RNA, 19 nt, Artificial Sequence
  Description of Artificial Sequence: Synthetic oligonucleotide
gagggaaggggccaaaaca

SEQ ID NO: 2240321 - RNA, 19 nt, Artificial Sequence
  Description of Artificial Sequence: Synthetic oligonucleotide
ugauaaacgcuacuugcuu

SEQ ID NO: 2240322 - RNA, 19 nt, Artificial Sequence
  Description of Artificial Sequence: Synthetic oligonucleotide
caggaaaaccacuggguag

SEQ ID NO: 2240323 - RNA, 19 nt, Artificial Sequence
  Description of Artificial Sequence: Synthetic oligonucleotide
agugcugugggcugcaaga

SEQ ID NO: 2240324 - RNA, 19 nt, Artificial Sequence
  Description of Artificial Sequence: Synthetic oligonucleotide
auauccuggaaauccacau

SEQ ID NO: 2240325 - RNA, 19 nt, Artificial Sequence
  Description of Artificial Sequence: Synthetic oligonucleotide
agaauuuccugacuggcuu

SEQ ID NO: 2240326 - RNA, 19 nt, Artificial Sequence
  Description of Artificial Sequence: Synthetic oligonucleotide
uccacauggagugcugugg

SEQ ID NO: 2240327 - RNA, 19 nt, Artificial Sequence
  Description of Artificial Sequence: Synthetic oligonucleotide
cuccucggauguuaaaucc

SEQ ID NO: 2240328 - RNA, 19 nt, Artificial Sequence
  Description of Artificial Sequence: Synthetic oligonucleotide
uccucggauguuaaauccc

SEQ ID NO: 2240329 - RNA, 19 nt, Artificial Sequence
  Description of Artificial Sequence: Synthetic oligonucleotide
cucaugaggaggaauccac

SEQ ID NO: 2240330 - RNA, 19 nt, Artificial Sequence
  Description of Artificial Sequence: Synthetic oligonucleotide
accugauaaacgcuacuug

SEQ ID NO: 2240331 - RNA, 19 nt, Artificial Sequence
  Description of Artificial Sequence: Synthetic oligonucleotide
gcaaagcccuucuagaucc

SEQ ID NO: 2240332 - RNA, 19 nt, Artificial Sequence
  Description of Artificial Sequence: Synthetic oligonucleotide
ucaacagcuuugcugugcu

SEQ ID NO: 2240333 - RNA, 19 nt, Artificial Sequence
  Description of Artificial Sequence: Synthetic oligonucleotide
ccugauaaacgcuacuugc

SEQ ID NO: 2240334 - RNA, 19 nt, Artificial Sequence
  Description of Artificial Sequence: Synthetic oligonucleotide
cuagggaacuccaaguaca

SEQ ID NO: 2240335 - RNA, 19 nt, Artificial Sequence
  Description of Artificial Sequence: Synthetic oligonucleotide
guaagcuaucuccccaucc

SEQ ID NO: 2240336 - RNA, 19 nt, Artificial Sequence
  Description of Artificial Sequence: Synthetic oligonucleotide
ugguauacucucucaugag

SEQ ID NO: 2240337 - RNA, 19 nt, Artificial Sequence
  Description of Artificial Sequence: Synthetic oligonucleotide
uuuggcgaugauaauugua

SEQ ID NO: 2240338 - RNA, 19 nt, Artificial Sequence
  Description of Artificial Sequence: Synthetic oligonucleotide
guuuauauagaauguggcu

SEQ ID NO: 2240339 - RNA, 19 nt, Artificial Sequence
  Description of Artificial Sequence: Synthetic oligonucleotide
guagaauuuccugacuggc

SEQ ID NO: 2240340 - RNA, 19 nt, Artificial Sequence
  Description of Artificial Sequence: Synthetic oligonucleotide
gauuucucgagcugucuuc

SEQ ID NO: 2240341 - RNA, 19 nt, Artificial Sequence
  Description of Artificial Sequence: Synthetic oligonucleotide
uguguaaguaucuguggua

SEQ ID NO: 2240342 - RNA, 19 nt, Artificial Sequence
  Description of Artificial Sequence: Synthetic oligonucleotide
agcgugcucuggcagauuc

SEQ ID NO: 2240343 - RNA, 19 nt, Artificial Sequence
  Description of Artificial Sequence: Synthetic oligonucleotide
acgcuacuugcuuucuagc

SEQ ID NO: 2240344 - RNA, 19 nt, Artificial Sequence
  Description of Artificial Sequence: Synthetic oligonucleotide
caucuagacaucauuaucu

SEQ ID NO: 2240345 - RNA, 19 nt, Artificial Sequence
  Description of Artificial Sequence: Synthetic oligonucleotide
auacucucucaugaggagg

SEQ ID NO: 2240346 - RNA, 19 nt, Artificial Sequence
  Description of Artificial Sequence: Synthetic oligonucleotide
uaagcuguguaaguaucug

SEQ ID NO: 2240347 - RNA, 19 nt, Artificial Sequence
  Description of Artificial Sequence: Synthetic oligonucleotide
cacgcaugcugauuucucg

SEQ ID NO: 2240348 - RNA, 19 nt, Artificial Sequence
  Description of Artificial Sequence: Synthetic oligonucleotide
gauccggcuauccauuuca

SEQ ID NO: 2240349 - RNA, 19 nt, Artificial Sequence
  Description of Artificial Sequence: Synthetic oligonucleotide
agaugccuaguugggaggc

SEQ ID NO: 2240350 - RNA, 19 nt, Artificial Sequence
  Description of Artificial Sequence: Synthetic oligonucleotide
ucuagcuggcuuuccacac

SEQ ID NO: 2240351 - RNA, 19 nt, Artificial Sequence
  Description of Artificial Sequence: Synthetic oligonucleotide
acaucauucacagcuagaa

SEQ ID NO: 2240352 - RNA, 19 nt, Artificial Sequence
  Description of Artificial Sequence: Synthetic oligonucleotide
uuggacuccaaaguuuaug

SEQ ID NO: 2240353 - RNA, 19 nt, Artificial Sequence
  Description of Artificial Sequence: Synthetic oligonucleotide
aggguucucauaggcaggc

SEQ ID NO: 2240354 - RNA, 19 nt, Artificial Sequence
  Description of Artificial Sequence: Synthetic oligonucleotide
cagugugacgauucggggc

SEQ ID NO: 2240355 - RNA, 19 nt, Artificial Sequence
  Description of Artificial Sequence: Synthetic oligonucleotide
auucacagcuagaacuugg

SEQ ID NO: 2240356 - RNA, 19 nt, Artificial Sequence
  Description of Artificial Sequence: Synthetic oligonucleotide
uucuagcuggcuuuccaca

SEQ ID NO: 2240357 - RNA, 19 nt, Artificial Sequence
  Description of Artificial Sequence: Synthetic oligonucleotide
ugggcugcaagacucuagu

SEQ ID NO: 2240358 - RNA, 19 nt, Artificial Sequence
  Description of Artificial Sequence: Synthetic oligonucleotide
agaaugaaacucaccuagg

SEQ ID NO: 2240359 - RNA, 19 nt, Artificial Sequence
  Description of Artificial Sequence: Synthetic oligonucleotide
gaaucccgcgcucacgacc

SEQ ID NO: 2240360 - RNA, 19 nt, Artificial Sequence
  Description of Artificial Sequence: Synthetic oligonucleotide
uuccagaaugaaacucacc

SEQ ID NO: 2240361 - RNA, 19 nt, Artificial Sequence
  Description of Artificial Sequence: Synthetic oligonucleotide
uggcgaugauaauuguaag

SEQ ID NO: 2240362 - RNA, 19 nt, Artificial Sequence
  Description of Artificial Sequence: Synthetic oligonucleotide
aggacgggauggcauggcc

SEQ ID NO: 2240363 - RNA, 19 nt, Artificial Sequence
  Description of Artificial Sequence: Synthetic oligonucleotide
agcuaucuccccauccucc

SEQ ID NO: 2240364 - RNA, 19 nt, Artificial Sequence
  Description of Artificial Sequence: Synthetic oligonucleotide
uacaaggacgggauggcau

SEQ ID NO: 2240365 - RNA, 19 nt, Artificial Sequence
  Description of Artificial Sequence: Synthetic oligonucleotide
accuaggaaacuagggaac

SEQ ID NO: 2240366 - RNA, 19 nt, Artificial Sequence
  Description of Artificial Sequence: Synthetic oligonucleotide
aucauaagagauccggcua

SEQ ID NO: 2240367 - RNA, 19 nt, Artificial Sequence
  Description of Artificial Sequence: Synthetic oligonucleotide
agggaaggggccaaaacag

SEQ ID NO: 2240368 - RNA, 19 nt, Artificial Sequence
  Description of Artificial Sequence: Synthetic oligonucleotide
cuggaggguucucauaggc

SEQ ID NO: 2240369 - RNA, 19 nt, Artificial Sequence
  Description of Artificial Sequence: Synthetic oligonucleotide
uuccaaguguguuggacuc

SEQ ID NO: 2240370 - RNA, 19 nt, Artificial Sequence
  Description of Artificial Sequence: Synthetic oligonucleotide
uccggcuauccauuucagg

SEQ ID NO: 2240371 - RNA, 19 nt, Artificial Sequence
  Description of Artificial Sequence: Synthetic oligonucleotide
ccggcuauccauuucaggc

SEQ ID NO: 2240372 - RNA, 19 nt, Artificial Sequence
  Description of Artificial Sequence: Synthetic oligonucleotide
gcuacagacaucuagacau

SEQ ID NO: 2240373 - RNA, 19 nt, Artificial Sequence
  Description of Artificial Sequence: Synthetic oligonucleotide
guguaaguaucugugguac

SEQ ID NO: 2240374 - RNA, 19 nt, Artificial Sequence
  Description of Artificial Sequence: Synthetic oligonucleotide
uugguccccuucuugaagu

SEQ ID NO: 2240375 - RNA, 19 nt, Artificial Sequence
  Description of Artificial Sequence: Synthetic oligonucleotide
guauacucucucaugagga

SEQ ID NO: 2240376 - RNA, 19 nt, Artificial Sequence
  Description of Artificial Sequence: Synthetic oligonucleotide
gauucggggcagaaacugg

SEQ ID NO: 2240377 - RNA, 19 nt, Artificial Sequence
  Description of Artificial Sequence: Synthetic oligonucleotide
uccugcucgaugugcauca

SEQ ID NO: 2240378 - RNA, 19 nt, Artificial Sequence
  Description of Artificial Sequence: Synthetic oligonucleotide
agcuguguaaguaucugug

SEQ ID NO: 2240379 - RNA, 19 nt, Artificial Sequence
  Description of Artificial Sequence: Synthetic oligonucleotide
cuuuuggggagggaagggg

SEQ ID NO: 2240380 - RNA, 19 nt, Artificial Sequence
  Description of Artificial Sequence: Synthetic oligonucleotide
cuaguugggaggccuuucc

SEQ ID NO: 2240381 - RNA, 19 nt, Artificial Sequence
  Description of Artificial Sequence: Synthetic oligonucleotide
uguagucugggugguauac

SEQ ID NO: 2240382 - RNA, 19 nt, Artificial Sequence
  Description of Artificial Sequence: Synthetic oligonucleotide
ugguaccugauaaacgcua

SEQ ID NO: 2240383 - RNA, 19 nt, Artificial Sequence
  Description of Artificial Sequence: Synthetic oligonucleotide
agaguagaauuuccugacu

SEQ ID NO: 2240384 - RNA, 19 nt, Artificial Sequence
  Description of Artificial Sequence: Synthetic oligonucleotide
ucacauggaagguccccag

SEQ ID NO: 2240385 - RNA, 19 nt, Artificial Sequence
  Description of Artificial Sequence: Synthetic oligonucleotide
guuuauguacaaggacggg

SEQ ID NO: 2240386 - RNA, 19 nt, Artificial Sequence
  Description of Artificial Sequence: Synthetic oligonucleotide
uucuagauccaggacccgc

SEQ ID NO: 2240387 - RNA, 19 nt, Artificial Sequence
  Description of Artificial Sequence: Synthetic oligonucleotide
gcuguguaaguaucugugg

SEQ ID NO: 2240388 - RNA, 19 nt, Artificial Sequence
  Description of Artificial Sequence: Synthetic oligonucleotide
ugauuucucgagcugucuu

SEQ ID NO: 2240389 - RNA, 19 nt, Artificial Sequence
  Description of Artificial Sequence: Synthetic oligonucleotide
aaacucaccuaggaaacua

SEQ ID NO: 2240390 - RNA, 19 nt, Artificial Sequence
  Description of Artificial Sequence: Synthetic oligonucleotide
ugcugugcucaauauccug

SEQ ID NO: 2240391 - RNA, 19 nt, Artificial Sequence
  Description of Artificial Sequence: Synthetic oligonucleotide
ggauguuaaaucccagcug

SEQ ID NO: 2240392 - RNA, 19 nt, Artificial Sequence
  Description of Artificial Sequence: Synthetic oligonucleotide
aaggacgggauggcauggc

SEQ ID NO: 2240393 - RNA, 19 nt, Artificial Sequence
  Description of Artificial Sequence: Synthetic oligonucleotide
ucaacucauuguuguaguc

SEQ ID NO: 2240394 - RNA, 19 nt, Artificial Sequence
  Description of Artificial Sequence: Synthetic oligonucleotide
aagcguacacgcaugcuga

SEQ ID NO: 2240395 - RNA, 19 nt, Artificial Sequence
  Description of Artificial Sequence: Synthetic oligonucleotide
gacucuagugcacaguccu

SEQ ID NO: 2240396 - RNA, 19 nt, Artificial Sequence
  Description of Artificial Sequence: Synthetic oligonucleotide
ucuagacaucauuaucuuu

SEQ ID NO: 2240397 - RNA, 19 nt, Artificial Sequence
  Description of Artificial Sequence: Synthetic oligonucleotide
ugcugauuucucgagcugu

SEQ ID NO: 2240398 - RNA, 19 nt, Artificial Sequence
  Description of Artificial Sequence: Synthetic oligonucleotide
cuuuggagucuuccaagug

SEQ ID NO: 2240399 - RNA, 19 nt, Artificial Sequence
  Description of Artificial Sequence: Synthetic oligonucleotide
cuagccagcgugcucuggc

SEQ ID NO: 2240400 - RNA, 19 nt, Artificial Sequence
  Description of Artificial Sequence: Synthetic oligonucleotide
uuuuggcgaugauaauugu

SEQ ID NO: 2240401 - RNA, 19 nt, Artificial Sequence
  Description of Artificial Sequence: Synthetic oligonucleotide
aaagcccuucuagauccag

SEQ ID NO: 2240402 - RNA, 19 nt, Artificial Sequence
  Description of Artificial Sequence: Synthetic oligonucleotide
ucucaugaggaggaaucca

SEQ ID NO: 2240403 - RNA, 19 nt, Artificial Sequence
  Description of Artificial Sequence: Synthetic oligonucleotide
aucuagacaucauuaucuu

SEQ ID NO: 2240404 - RNA, 19 nt, Artificial Sequence
  Description of Artificial Sequence: Synthetic oligonucleotide
agacucuagugcacagucc

SEQ ID NO: 2240405 - RNA, 19 nt, Artificial Sequence
  Description of Artificial Sequence: Synthetic oligonucleotide
cuggguagucaucauaaga

SEQ ID NO: 2240406 - RNA, 19 nt, Artificial Sequence
  Description of Artificial Sequence: Synthetic oligonucleotide
aguagaguuuauauagaau

SEQ ID NO: 2240407 - RNA, 19 nt, Artificial Sequence
  Description of Artificial Sequence: Synthetic oligonucleotide
ggugguauacucucucaug

SEQ ID NO: 2240408 - RNA, 19 nt, Artificial Sequence
  Description of Artificial Sequence: Synthetic oligonucleotide
acuuuuggggagggaaggg

SEQ ID NO: 2240409 - RNA, 19 nt, Artificial Sequence
  Description of Artificial Sequence: Synthetic oligonucleotide
gcgaugauaauuguaagga

SEQ ID NO: 2240410 - RNA, 19 nt, Artificial Sequence
  Description of Artificial Sequence: Synthetic oligonucleotide
gcuacuugcuuucuagcug

SEQ ID NO: 2240411 - RNA, 19 nt, Artificial Sequence
  Description of Artificial Sequence: Synthetic oligonucleotide
caggcuacagacaucuaga

SEQ ID NO: 2240412 - RNA, 19 nt, Artificial Sequence
  Description of Artificial Sequence: Synthetic oligonucleotide
ggucaacucauuguuguag

SEQ ID NO: 2240413 - RNA, 19 nt, Artificial Sequence
  Description of Artificial Sequence: Synthetic oligonucleotide
auaagcuguguaaguaucu

SEQ ID NO: 2240414 - RNA, 19 nt, Artificial Sequence
  Description of Artificial Sequence: Synthetic oligonucleotide
caccuaggaaacuagggaa

SEQ ID NO: 2240415 - RNA, 19 nt, Artificial Sequence
  Description of Artificial Sequence: Synthetic oligonucleotide
aaguacaguagaguuuaua

SEQ ID NO: 2240416 - RNA, 19 nt, Artificial Sequence
  Description of Artificial Sequence: Synthetic oligonucleotide
uauauagaauguggcuggu

SEQ ID NO: 2240417 - RNA, 19 nt, Artificial Sequence
  Description of Artificial Sequence: Synthetic oligonucleotide
acucaccuaggaaacuagg

SEQ ID NO: 2240418 - RNA, 19 nt, Artificial Sequence
  Description of Artificial Sequence: Synthetic oligonucleotide
uaccugauaaacgcuacuu

SEQ ID NO: 2240419 - RNA, 19 nt, Artificial Sequence
  Description of Artificial Sequence: Synthetic oligonucleotide
aaucccgcgcucacgacca

SEQ ID NO: 2240420 - RNA, 19 nt, Artificial Sequence
  Description of Artificial Sequence: Synthetic oligonucleotide
ugggugguauacucucuca

SEQ ID NO: 2240421 - RNA, 19 nt, Artificial Sequence
  Description of Artificial Sequence: Synthetic oligonucleotide
gaggguucucauaggcagg

SEQ ID NO: 2240422 - RNA, 19 nt, Artificial Sequence
  Description of Artificial Sequence: Synthetic oligonucleotide
agacaucuagacaucauua

SEQ ID NO: 2240423 - RNA, 19 nt, Artificial Sequence
  Description of Artificial Sequence: Synthetic oligonucleotide
caucauaagagauccggcu

SEQ ID NO: 2240424 - RNA, 19 nt, Artificial Sequence
  Description of Artificial Sequence: Synthetic oligonucleotide
agaaacugggucaacucau

SEQ ID NO: 2240425 - RNA, 19 nt, Artificial Sequence
  Description of Artificial Sequence: Synthetic oligonucleotide
agaauguggcugguaagcu

SEQ ID NO: 2240426 - RNA, 19 nt, Artificial Sequence
  Description of Artificial Sequence: Synthetic oligonucleotide
gacaucuagacaucauuau

SEQ ID NO: 2240427 - RNA, 19 nt, Artificial Sequence
  Description of Artificial Sequence: Synthetic oligonucleotide
cucggauguuaaaucccag

SEQ ID NO: 2240428 - RNA, 19 nt, Artificial Sequence
  Description of Artificial Sequence: Synthetic oligonucleotide
auuucucgagcugucuuca

SEQ ID NO: 2240429 - RNA, 19 nt, Artificial Sequence
  Description of Artificial Sequence: Synthetic oligonucleotide
uagugcacaguccucucuu

SEQ ID NO: 2240430 - RNA, 19 nt, Artificial Sequence
  Description of Artificial Sequence: Synthetic oligonucleotide
ggaacuccaaguacaguag

SEQ ID NO: 2240431 - RNA, 19 nt, Artificial Sequence
  Description of Artificial Sequence: Synthetic oligonucleotide
acaguagaguuuauauaga

SEQ ID NO: 2240432 - RNA, 19 nt, Artificial Sequence
  Description of Artificial Sequence: Synthetic oligonucleotide
acgcaugcugauuucucga

SEQ ID NO: 2240433 - RNA, 19 nt, Artificial Sequence
  Description of Artificial Sequence: Synthetic oligonucleotide
gaggcuucuucagugugac

SEQ ID NO: 2240434 - RNA, 19 nt, Artificial Sequence
  Description of Artificial Sequence: Synthetic oligonucleotide
gucugggugguauacucuc

SEQ ID NO: 2240435 - RNA, 19 nt, Artificial Sequence
  Description of Artificial Sequence: Synthetic oligonucleotide
cugggucaacucauuguug

SEQ ID NO: 2240436 - RNA, 19 nt, Artificial Sequence
  Description of Artificial Sequence: Synthetic oligonucleotide
cauggagugcugugggcug

SEQ ID NO: 2240437 - RNA, 19 nt, Artificial Sequence
  Description of Artificial Sequence: Synthetic oligonucleotide
ugguaagcuaucuccccau

SEQ ID NO: 2240438 - RNA, 19 nt, Artificial Sequence
  Description of Artificial Sequence: Synthetic oligonucleotide
gauaaacgcuacuugcuuu

SEQ ID NO: 2240439 - RNA, 19 nt, Artificial Sequence
  Description of Artificial Sequence: Synthetic oligonucleotide
agcuuugcugugcucaaua

SEQ ID NO: 2240440 - RNA, 19 nt, Artificial Sequence
  Description of Artificial Sequence: Synthetic oligonucleotide
aucacauggaaggucccca

SEQ ID NO: 2240441 - RNA, 19 nt, Artificial Sequence
  Description of Artificial Sequence: Synthetic oligonucleotide
aaacgcuacuugcuuucua

SEQ ID NO: 2240442 - RNA, 19 nt, Artificial Sequence
  Description of Artificial Sequence: Synthetic oligonucleotide
uacacgcaugcugauuucu

SEQ ID NO: 2240443 - RNA, 19 nt, Artificial Sequence
  Description of Artificial Sequence: Synthetic oligonucleotide
uuuccuccucggauguuaa

SEQ ID NO: 2240444 - RNA, 19 nt, Artificial Sequence
  Description of Artificial Sequence: Synthetic oligonucleotide
aaguccugcucgaugugca

SEQ ID NO: 2240445 - RNA, 19 nt, Artificial Sequence
  Description of Artificial Sequence: Synthetic oligonucleotide
ucuagugcacaguccucuc

SEQ ID NO: 2240446 - RNA, 19 nt, Artificial Sequence
  Description of Artificial Sequence: Synthetic oligonucleotide
gauggcauggccaggcaaa

SEQ ID NO: 2240447 - RNA, 19 nt, Artificial Sequence
  Description of Artificial Sequence: Synthetic oligonucleotide
agagggcuagccagcgugc

SEQ ID NO: 2240448 - RNA, 19 nt, Artificial Sequence
  Description of Artificial Sequence: Synthetic oligonucleotide
gaauguggcugguaagcua

SEQ ID NO: 2240449 - RNA, 19 nt, Artificial Sequence
  Description of Artificial Sequence: Synthetic oligonucleotide
accaggaggcuucuucagu

SEQ ID NO: 2240450 - RNA, 19 nt, Artificial Sequence
  Description of Artificial Sequence: Synthetic oligonucleotide
uucggggcagaaacugggu

SEQ ID NO: 2240451 - RNA, 19 nt, Artificial Sequence
  Description of Artificial Sequence: Synthetic oligonucleotide
caugcugauuucucgagcu

SEQ ID NO: 2240452 - RNA, 19 nt, Artificial Sequence
  Description of Artificial Sequence: Synthetic oligonucleotide
caggcaaagcccuucuaga

SEQ ID NO: 2240453 - RNA, 19 nt, Artificial Sequence
  Description of Artificial Sequence: Synthetic oligonucleotide
augcugauuucucgagcug

SEQ ID NO: 2240454 - RNA, 19 nt, Artificial Sequence
  Description of Artificial Sequence: Synthetic oligonucleotide
cugauaaacgcuacuugcu

SEQ ID NO: 2240455 - RNA, 19 nt, Artificial Sequence
  Description of Artificial Sequence: Synthetic oligonucleotide
aaucccagcugagcaccag

SEQ ID NO: 2240456 - RNA, 19 nt, Artificial Sequence
  Description of Artificial Sequence: Synthetic oligonucleotide
aggcgcugagaguagaauu

SEQ ID NO: 2240457 - RNA, 19 nt, Artificial Sequence
  Description of Artificial Sequence: Synthetic oligonucleotide
uggagucuuccaagugugu

SEQ ID NO: 2240458 - RNA, 19 nt, Artificial Sequence
  Description of Artificial Sequence: Synthetic oligonucleotide
uacuugcuuucuagcuggc

SEQ ID NO: 2240459 - RNA, 19 nt, Artificial Sequence
  Description of Artificial Sequence: Synthetic oligonucleotide
ggaaggggccaaaacagug

SEQ ID NO: 2240460 - RNA, 19 nt, Artificial Sequence
  Description of Artificial Sequence: Synthetic oligonucleotide
uaaacgcuacuugcuuucu

SEQ ID NO: 2240461 - RNA, 19 nt, Artificial Sequence
  Description of Artificial Sequence: Synthetic oligonucleotide
ucgagcugucuucaagauu

SEQ ID NO: 2240462 - RNA, 19 nt, Artificial Sequence
  Description of Artificial Sequence: Synthetic oligonucleotide
guguguuggacuccaaagu

SEQ ID NO: 2240463 - RNA, 19 nt, Artificial Sequence
  Description of Artificial Sequence: Synthetic oligonucleotide
cuaucuccccauccucccc

SEQ ID NO: 2240464 - RNA, 19 nt, Artificial Sequence
  Description of Artificial Sequence: Synthetic oligonucleotide
cucagagggcuagccagcg

SEQ ID NO: 2240465 - RNA, 19 nt, Artificial Sequence
  Description of Artificial Sequence: Synthetic oligonucleotide
uccaaguguguuggacucc

SEQ ID NO: 2240466 - RNA, 19 nt, Artificial Sequence
  Description of Artificial Sequence: Synthetic oligonucleotide
uggcuucucagagggcuag

SEQ ID NO: 2240467 - RNA, 19 nt, Artificial Sequence
  Description of Artificial Sequence: Synthetic oligonucleotide
aaggcgcugagaguagaau

SEQ ID NO: 2240468 - RNA, 19 nt, Artificial Sequence
  Description of Artificial Sequence: Synthetic oligonucleotide
cauucacagcuagaacuug

SEQ ID NO: 2240469 - RNA, 19 nt, Artificial Sequence
  Description of Artificial Sequence: Synthetic oligonucleotide
gcugguaagcuaucucccc

SEQ ID NO: 2240470 - RNA, 19 nt, Artificial Sequence
  Description of Artificial Sequence: Synthetic oligonucleotide
agucaucauaagagauccg

SEQ ID NO: 2240471 - RNA, 19 nt, Artificial Sequence
  Description of Artificial Sequence: Synthetic oligonucleotide
acacgcaugcugauuucuc

SEQ ID NO: 2240472 - RNA, 19 nt, Artificial Sequence
  Description of Artificial Sequence: Synthetic oligonucleotide
cuaggaaacuagggaacuc

SEQ ID NO: 2240473 - RNA, 19 nt, Artificial Sequence
  Description of Artificial Sequence: Synthetic oligonucleotide
cuuccaaguguguuggacu

SEQ ID NO: 2240474 - RNA, 19 nt, Artificial Sequence
  Description of Artificial Sequence: Synthetic oligonucleotide
ggguagucaucauaagaga

SEQ ID NO: 2240475 - RNA, 19 nt, Artificial Sequence
  Description of Artificial Sequence: Synthetic oligonucleotide
caccaggaggcuucuucag

SEQ ID NO: 2240476 - RNA, 19 nt, Artificial Sequence
  Description of Artificial Sequence: Synthetic oligonucleotide
gucaacucauuguuguagu

SEQ ID NO: 2240477 - RNA, 19 nt, Artificial Sequence
  Description of Artificial Sequence: Synthetic oligonucleotide
cuguguaaguaucuguggu

SEQ ID NO: 2240478 - RNA, 19 nt, Artificial Sequence
  Description of Artificial Sequence: Synthetic oligonucleotide
aauccacgcuggaggguuc

SEQ ID NO: 2240479 - RNA, 19 nt, Artificial Sequence
  Description of Artificial Sequence: Synthetic oligonucleotide
aggaaacuagggaacucca

SEQ ID NO: 2240480 - RNA, 19 nt, Artificial Sequence
  Description of Artificial Sequence: Synthetic oligonucleotide
agccagcgugcucuggcag

SEQ ID NO: 2240481 - RNA, 19 nt, Artificial Sequence
  Description of Artificial Sequence: Synthetic oligonucleotide
gaugccuaguugggaggcc

SEQ ID NO: 2240482 - RNA, 19 nt, Artificial Sequence
  Description of Artificial Sequence: Synthetic oligonucleotide
cauaagagauccggcuauc

SEQ ID NO: 2240483 - RNA, 19 nt, Artificial Sequence
  Description of Artificial Sequence: Synthetic oligonucleotide
uucaggcaaagcccuucua

SEQ ID NO: 2240484 - RNA, 19 nt, Artificial Sequence
  Description of Artificial Sequence: Synthetic oligonucleotide
caggaaggcgcugagagua

SEQ ID NO: 2240485 - RNA, 19 nt, Artificial Sequence
  Description of Artificial Sequence: Synthetic oligonucleotide
uagccagcgugcucuggca

SEQ ID NO: 2240486 - RNA, 19 nt, Artificial Sequence
  Description of Artificial Sequence: Synthetic oligonucleotide
guggcugguaagcuaucuc

SEQ ID NO: 2240487 - RNA, 19 nt, Artificial Sequence
  Description of Artificial Sequence: Synthetic oligonucleotide
gcaugcugauuucucgagc

SEQ ID NO: 2240488 - RNA, 19 nt, Artificial Sequence
  Description of Artificial Sequence: Synthetic oligonucleotide
acucuagugcacaguccuc

SEQ ID NO: 2240489 - RNA, 19 nt, Artificial Sequence
  Description of Artificial Sequence: Synthetic oligonucleotide
cauaggcaggcaggaaaac

SEQ ID NO: 2240490 - RNA, 19 nt, Artificial Sequence
  Description of Artificial Sequence: Synthetic oligonucleotide
gcaaaucacauggaagguc

SEQ ID NO: 2240491 - RNA, 19 nt, Artificial Sequence
  Description of Artificial Sequence: Synthetic oligonucleotide
uuguagucugggugguaua

SEQ ID NO: 2240492 - RNA, 19 nt, Artificial Sequence
  Description of Artificial Sequence: Synthetic oligonucleotide
ggccuuuccuccucggaug

SEQ ID NO: 2240493 - RNA, 19 nt, Artificial Sequence
  Description of Artificial Sequence: Synthetic oligonucleotide
aaaucccagcugagcacca

SEQ ID NO: 2240494 - RNA, 19 nt, Artificial Sequence
  Description of Artificial Sequence: Synthetic oligonucleotide
agaagcguacacgcaugcu

SEQ ID NO: 2240495 - RNA, 19 nt, Artificial Sequence
  Description of Artificial Sequence: Synthetic oligonucleotide
cuggaaucaccuuggagau

SEQ ID NO: 2240496 - RNA, 19 nt, Artificial Sequence
  Description of Artificial Sequence: Synthetic oligonucleotide
gguaccugauaaacgcuac

SEQ ID NO: 2240497 - RNA, 19 nt, Artificial Sequence
  Description of Artificial Sequence: Synthetic oligonucleotide
augccuaguugggaggccu

SEQ ID NO: 2240498 - RNA, 19 nt, Artificial Sequence
  Description of Artificial Sequence: Synthetic oligonucleotide
aggaggaauccacgcugga

SEQ ID NO: 2240499 - RNA, 19 nt, Artificial Sequence
  Description of Artificial Sequence: Synthetic oligonucleotide
agugcacaguccucucuuu

SEQ ID NO: 2240500 - RNA, 19 nt, Artificial Sequence
  Description of Artificial Sequence: Synthetic oligonucleotide
agcuagaacuugguccccu

SEQ ID NO: 2240501 - RNA, 19 nt, Artificial Sequence
  Description of Artificial Sequence: Synthetic oligonucleotide
ccaaaacagugucucuuug

SEQ ID NO: 2240502 - RNA, 19 nt, Artificial Sequence
  Description of Artificial Sequence: Synthetic oligonucleotide
auauagaauguggcuggua

SEQ ID NO: 2240503 - RNA, 19 nt, Artificial Sequence
  Description of Artificial Sequence: Synthetic oligonucleotide
agucugggugguauacucu

SEQ ID NO: 2240504 - RNA, 19 nt, Artificial Sequence
  Description of Artificial Sequence: Synthetic oligonucleotide
ugcuuucuagcuggcuuuc

SEQ ID NO: 2240505 - RNA, 19 nt, Artificial Sequence
  Description of Artificial Sequence: Synthetic oligonucleotide
gauccaggacccgcauccc

SEQ ID NO: 2240506 - RNA, 19 nt, Artificial Sequence
  Description of Artificial Sequence: Synthetic oligonucleotide
gugggcugcaagacucuag

SEQ ID NO: 2240507 - RNA, 19 nt, Artificial Sequence
  Description of Artificial Sequence: Synthetic oligonucleotide
agagauccggcuauccauu

SEQ ID NO: 2240508 - RNA, 19 nt, Artificial Sequence
  Description of Artificial Sequence: Synthetic oligonucleotide
guacacgcaugcugauuuc

SEQ ID NO: 2240509 - RNA, 19 nt, Artificial Sequence
  Description of Artificial Sequence: Synthetic oligonucleotide
ugacgauucggggcagaaa

SEQ ID NO: 2240510 - RNA, 19 nt, Artificial Sequence
  Description of Artificial Sequence: Synthetic oligonucleotide
gaaacucaccuaggaaacu

SEQ ID NO: 2240511 - RNA, 19 nt, Artificial Sequence
  Description of Artificial Sequence: Synthetic oligonucleotide
ggcuauccauuucaggcaa

SEQ ID NO: 2240512 - RNA, 19 nt, Artificial Sequence
  Description of Artificial Sequence: Synthetic oligonucleotide
ugugacgauucggggcaga

SEQ ID NO: 2240513 - RNA, 19 nt, Artificial Sequence
  Description of Artificial Sequence: Synthetic oligonucleotide
ccuccucggauguuaaauc

SEQ ID NO: 2240514 - RNA, 19 nt, Artificial Sequence
  Description of Artificial Sequence: Synthetic oligonucleotide
acuaagccaggaaggcgcu

SEQ ID NO: 2240515 - RNA, 19 nt, Artificial Sequence
  Description of Artificial Sequence: Synthetic oligonucleotide
ggaaagaagcguacacgca

SEQ ID NO: 2240516 - RNA, 19 nt, Artificial Sequence
  Description of Artificial Sequence: Synthetic oligonucleotide
ucccgcccgaaucccgcgc

SEQ ID NO: 2240517 - RNA, 19 nt, Artificial Sequence
  Description of Artificial Sequence: Synthetic oligonucleotide
gugcaucagagucuggaau

SEQ ID NO: 2240518 - RNA, 19 nt, Artificial Sequence
  Description of Artificial Sequence: Synthetic oligonucleotide
guaccugauaaacgcuacu

SEQ ID NO: 2240519 - RNA, 19 nt, Artificial Sequence
  Description of Artificial Sequence: Synthetic oligonucleotide
accacuggguagucaucau

SEQ ID NO: 2240520 - RNA, 19 nt, Artificial Sequence
  Description of Artificial Sequence: Synthetic oligonucleotide
cagacaucuagacaucauu

SEQ ID NO: 2240521 - RNA, 19 nt, Artificial Sequence
  Description of Artificial Sequence: Synthetic oligonucleotide
ccacuaagccaggaaggcg

SEQ ID NO: 2240522 - RNA, 19 nt, Artificial Sequence
  Description of Artificial Sequence: Synthetic oligonucleotide
gguaagcuaucuccccauc

SEQ ID NO: 2240523 - RNA, 19 nt, Artificial Sequence
  Description of Artificial Sequence: Synthetic oligonucleotide
acgauucggggcagaaacu

SEQ ID NO: 2240524 - RNA, 19 nt, Artificial Sequence
  Description of Artificial Sequence: Synthetic oligonucleotide
agcguacacgcaugcugau

SEQ ID NO: 2240525 - RNA, 19 nt, Artificial Sequence
  Description of Artificial Sequence: Synthetic oligonucleotide
gaauccacgcuggaggguu

SEQ ID NO: 2240526 - RNA, 19 nt, Artificial Sequence
  Description of Artificial Sequence: Synthetic oligonucleotide
cacauggaagguccccaga

SEQ ID NO: 2240527 - RNA, 19 nt, Artificial Sequence
  Description of Artificial Sequence: Synthetic oligonucleotide
gaaggcgcugagaguagaa

SEQ ID NO: 2240528 - RNA, 19 nt, Artificial Sequence
  Description of Artificial Sequence: Synthetic oligonucleotide
uuccuccucggauguuaaa

SEQ ID NO: 2240529 - RNA, 19 nt, Artificial Sequence
  Description of Artificial Sequence: Synthetic oligonucleotide
cuggcagauuccacaugga

SEQ ID NO: 2240530 - RNA, 19 nt, Artificial Sequence
  Description of Artificial Sequence: Synthetic oligonucleotide
auccggcuauccauuucag

SEQ ID NO: 2240531 - RNA, 19 nt, Artificial Sequence
  Description of Artificial Sequence: Synthetic oligonucleotide
ugugggcugcaagacucua

SEQ ID NO: 2240532 - RNA, 19 nt, Artificial Sequence
  Description of Artificial Sequence: Synthetic oligonucleotide
uguuguagucuggguggua

SEQ ID NO: 2240533 - RNA, 19 nt, Artificial Sequence
  Description of Artificial Sequence: Synthetic oligonucleotide
ugccuaguugggaggccuu

SEQ ID NO: 2240534 - RNA, 19 nt, Artificial Sequence
  Description of Artificial Sequence: Synthetic oligonucleotide
gugcugugggcugcaagac

SEQ ID NO: 2240535 - RNA, 19 nt, Artificial Sequence
  Description of Artificial Sequence: Synthetic oligonucleotide
cucuagugcacaguccucu

SEQ ID NO: 2240536 - RNA, 19 nt, Artificial Sequence
  Description of Artificial Sequence: Synthetic oligonucleotide
cauggaagguccccagacu

SEQ ID NO: 2240537 - RNA, 19 nt, Artificial Sequence
  Description of Artificial Sequence: Synthetic oligonucleotide
caacagcuuugcugugcuc

SEQ ID NO: 2240538 - RNA, 19 nt, Artificial Sequence
  Description of Artificial Sequence: Synthetic oligonucleotide
cuaagccaggaaggcgcug

SEQ ID NO: 2240539 - RNA, 19 nt, Artificial Sequence
  Description of Artificial Sequence: Synthetic oligonucleotide
gggcugcaagacucuagug

SEQ ID NO: 2240540 - RNA, 19 nt, Artificial Sequence
  Description of Artificial Sequence: Synthetic oligonucleotide
cgagcugucuucaagauuu

SEQ ID NO: 2240541 - RNA, 19 nt, Artificial Sequence
  Description of Artificial Sequence: Synthetic oligonucleotide
acgggauggcauggccagg

SEQ ID NO: 2240542 - RNA, 19 nt, Artificial Sequence
  Description of Artificial Sequence: Synthetic oligonucleotide
cgcaugcugauuucucgag

SEQ ID NO: 2240543 - RNA, 19 nt, Artificial Sequence
  Description of Artificial Sequence: Synthetic oligonucleotide
cuagugcacaguccucucu

SEQ ID NO: 2240544 - RNA, 19 nt, Artificial Sequence
  Description of Artificial Sequence: Synthetic oligonucleotide
caaagcccuucuagaucca

SEQ ID NO: 2240545 - RNA, 19 nt, Artificial Sequence
  Description of Artificial Sequence: Synthetic oligonucleotide
ggaaacuagggaacuccaa

SEQ ID NO: 2240546 - RNA, 19 nt, Artificial Sequence
  Description of Artificial Sequence: Synthetic oligonucleotide
guccugcucgaugugcauc

SEQ ID NO: 2240547 - RNA, 19 nt, Artificial Sequence
  Description of Artificial Sequence: Synthetic oligonucleotide
gcugagaguagaauuuccu

SEQ ID NO: 2240548 - RNA, 19 nt, Artificial Sequence
  Description of Artificial Sequence: Synthetic oligonucleotide
caggacccgcaucccgccc

SEQ ID NO: 2240549 - RNA, 19 nt, Artificial Sequence
  Description of Artificial Sequence: Synthetic oligonucleotide
cagcuagaacuuggucccc

SEQ ID NO: 2240550 - RNA, 19 nt, Artificial Sequence
  Description of Artificial Sequence: Synthetic oligonucleotide
ggauggcauggccaggcaa

SEQ ID NO: 2240551 - RNA, 19 nt, Artificial Sequence
  Description of Artificial Sequence: Synthetic oligonucleotide
cgauucggggcagaaacug

SEQ ID NO: 2240552 - RNA, 19 nt, Artificial Sequence
  Description of Artificial Sequence: Synthetic oligonucleotide
ggcaggaaaaccacugggu

SEQ ID NO: 2240553 - RNA, 19 nt, Artificial Sequence
  Description of Artificial Sequence: Synthetic oligonucleotide
cucgagcugucuucaagau

SEQ ID NO: 2240554 - RNA, 19 nt, Artificial Sequence
  Description of Artificial Sequence: Synthetic oligonucleotide
gugguaccugauaaacgcu

SEQ ID NO: 2240555 - RNA, 19 nt, Artificial Sequence
  Description of Artificial Sequence: Synthetic oligonucleotide
cgaugauaauuguaaggaa

SEQ ID NO: 2240556 - RNA, 19 nt, Artificial Sequence
  Description of Artificial Sequence: Synthetic oligonucleotide
guguuggacuccaaaguuu

SEQ ID NO: 2240557 - RNA, 19 nt, Artificial Sequence
  Description of Artificial Sequence: Synthetic oligonucleotide
acccgcaucccgcccgaau

SEQ ID NO: 2240558 - RNA, 19 nt, Artificial Sequence
  Description of Artificial Sequence: Synthetic oligonucleotide
guagucugggugguauacu

SEQ ID NO: 2240559 - RNA, 19 nt, Artificial Sequence
  Description of Artificial Sequence: Synthetic oligonucleotide
gugacgauucggggcagaa

SEQ ID NO: 2240560 - RNA, 19 nt, Artificial Sequence
  Description of Artificial Sequence: Synthetic oligonucleotide
gagauccggcuauccauuu

SEQ ID NO: 2240561 - RNA, 19 nt, Artificial Sequence
  Description of Artificial Sequence: Synthetic oligonucleotide
ggacgggauggcauggcca

SEQ ID NO: 2240562 - RNA, 19 nt, Artificial Sequence
  Description of Artificial Sequence: Synthetic oligonucleotide
ccgcaucccgcccgaaucc

SEQ ID NO: 2240563 - RNA, 19 nt, Artificial Sequence
  Description of Artificial Sequence: Synthetic oligonucleotide
gcccuucuagauccaggac

SEQ ID NO: 2240564 - RNA, 19 nt, Artificial Sequence
  Description of Artificial Sequence: Synthetic oligonucleotide
gugugacgauucggggcag

SEQ ID NO: 2240565 - RNA, 19 nt, Artificial Sequence
  Description of Artificial Sequence: Synthetic oligonucleotide
cccgcaucccgcccgaauc

SEQ ID NO: 2240566 - RNA, 19 nt, Artificial Sequence
  Description of Artificial Sequence: Synthetic oligonucleotide
caagacucuagugcacagu

SEQ ID NO: 2240567 - RNA, 19 nt, Artificial Sequence
  Description of Artificial Sequence: Synthetic oligonucleotide
ucccgcgcucacgaccacu

SEQ ID NO: 2240568 - RNA, 19 nt, Artificial Sequence
  Description of Artificial Sequence: Synthetic oligonucleotide
cggauguuaaaucccagcu

SEQ ID NO: 2240569 - RNA, 19 nt, Artificial Sequence
  Description of Artificial Sequence: Synthetic oligonucleotide
ccaaguguguuggacucca

SEQ ID NO: 2240570 - RNA, 19 nt, Artificial Sequence
  Description of Artificial Sequence: Synthetic oligonucleotide
ccgaaucccgcgcucacga

SEQ ID NO: 2240571 - RNA, 19 nt, Artificial Sequence
  Description of Artificial Sequence: Synthetic oligonucleotide
gggugguauacucucucau

SEQ ID NO: 2240572 - RNA, 19 nt, Artificial Sequence
  Description of Artificial Sequence: Synthetic oligonucleotide
ggagaugaagaugccuagu

SEQ ID NO: 2240573 - RNA, 19 nt, Artificial Sequence
  Description of Artificial Sequence: Synthetic oligonucleotide
gcaucccgcccgaaucccg

SEQ ID NO: 2240574 - RNA, 19 nt, Artificial Sequence
  Description of Artificial Sequence: Synthetic oligonucleotide
cugauuucucgagcugucu

SEQ ID NO: 2240575 - RNA, 19 nt, Artificial Sequence
  Description of Artificial Sequence: Synthetic oligonucleotide
gggucaacucauuguugua

SEQ ID NO: 2240576 - RNA, 19 nt, Artificial Sequence
  Description of Artificial Sequence: Synthetic oligonucleotide
caaguguguuggacuccaa

SEQ ID NO: 2240577 - RNA, 19 nt, Artificial Sequence
  Description of Artificial Sequence: Synthetic oligonucleotide
gccagcgugcucuggcaga

SEQ ID NO: 2240578 - RNA, 19 nt, Artificial Sequence
  Description of Artificial Sequence: Synthetic oligonucleotide
gccaaaacagugucucuuu

SEQ ID NO: 2240579 - RNA, 19 nt, Artificial Sequence
  Description of Artificial Sequence: Synthetic oligonucleotide
ggaaggcgcugagaguaga

SEQ ID NO: 2240580 - RNA, 19 nt, Artificial Sequence
  Description of Artificial Sequence: Synthetic oligonucleotide
cggcuauccauuucaggca

SEQ ID NO: 2240581 - RNA, 19 nt, Artificial Sequence
  Description of Artificial Sequence: Synthetic oligonucleotide
cuagauccaggacccgcau

SEQ ID NO: 2240582 - RNA, 19 nt, Artificial Sequence
  Description of Artificial Sequence: Synthetic oligonucleotide
ggcgcugagaguagaauuu

SEQ ID NO: 2240583 - RNA, 19 nt, Artificial Sequence
  Description of Artificial Sequence: Synthetic oligonucleotide
ccuaguugggaggccuuuc

SEQ ID NO: 2240584 - RNA, 19 nt, Artificial Sequence
  Description of Artificial Sequence: Synthetic oligonucleotide
cacgcuggaggguucucau

SEQ ID NO: 2240585 - RNA, 19 nt, Artificial Sequence
  Description of Artificial Sequence: Synthetic oligonucleotide
gggcuagccagcgugcucu

SEQ ID NO: 2240586 - RNA, 19 nt, Artificial Sequence
  Description of Artificial Sequence: Synthetic oligonucleotide
cccgaaucccgcgcucacg

SEQ ID NO: 2240587 - RNA, 19 nt, Artificial Sequence
  Description of Artificial Sequence: Synthetic oligonucleotide
ccuaggaaacuagggaacu

SEQ ID NO: 2240588 - RNA, 19 nt, Artificial Sequence
  Description of Artificial Sequence: Synthetic oligonucleotide
ggcuucucagagggcuagc

SEQ ID NO: 2240589 - RNA, 19 nt, Artificial Sequence
  Description of Artificial Sequence: Synthetic oligonucleotide
ggcuagccagcgugcucug

SEQ ID NO: 2240590 - RNA, 19 nt, Artificial Sequence
  Description of Artificial Sequence: Synthetic oligonucleotide
guuggacuccaaaguuuau

SEQ ID NO: 2240591 - RNA, 19 nt, Artificial Sequence
  Description of Artificial Sequence: Synthetic oligonucleotide
cucucucaugaggaggaau

SEQ ID NO: 2240592 - RNA, 19 nt, Artificial Sequence
  Description of Artificial Sequence: Synthetic oligonucleotide
cguacacgcaugcugauuu

SEQ ID NO: 2240593 - RNA, 19 nt, Artificial Sequence
  Description of Artificial Sequence: Synthetic oligonucleotide
cuucuucagugugacgauu

SEQ ID NO: 2240594 - RNA, 19 nt, Artificial Sequence
  Description of Artificial Sequence: Synthetic oligonucleotide
gggaaggggccaaaacagu

SEQ ID NO: 2240595 - RNA, 19 nt, Artificial Sequence
  Description of Artificial Sequence: Synthetic oligonucleotide
gccaggcaaaucacaugga

SEQ ID NO: 2240596 - RNA, 19 nt, Artificial Sequence
  Description of Artificial Sequence: Synthetic oligonucleotide
gaagguccccagacucuau

SEQ ID NO: 2240597 - RNA, 19 nt, Artificial Sequence
  Description of Artificial Sequence: Synthetic oligonucleotide
ccacuggguagucaucaua

SEQ ID NO: 2240598 - RNA, 19 nt, Artificial Sequence
  Description of Artificial Sequence: Synthetic oligonucleotide
gcccgaaucccgcgcucac

SEQ ID NO: 2240599 - RNA, 19 nt, Artificial Sequence
  Description of Artificial Sequence: Synthetic oligonucleotide
cgaaucccgcgcucacgac

SEQ ID NO: 2240600 - RNA, 19 nt, Artificial Sequence
  Description of Artificial Sequence: Synthetic oligonucleotide
gcuagaacuugguccccuu

SEQ ID NO: 2240601 - RNA, 19 nt, Artificial Sequence
  Description of Artificial Sequence: Synthetic oligonucleotide
cgcaucccgcccgaauccc

SEQ ID NO: 2240602 - RNA, 19 nt, Artificial Sequence
  Description of Artificial Sequence: Synthetic oligonucleotide
gggcagaaacugggucaac

SEQ ID NO: 2240603 - RNA, 19 nt, Artificial Sequence
  Description of Artificial Sequence: Synthetic oligonucleotide
cagcuuugcugugcucaau

SEQ ID NO: 2240604 - RNA, 19 nt, Artificial Sequence
  Description of Artificial Sequence: Synthetic oligonucleotide
gcugagcaccaggaggcuu

SEQ ID NO: 2240605 - RNA, 19 nt, Artificial Sequence
  Description of Artificial Sequence: Synthetic oligonucleotide
gcguacacgcaugcugauu

SEQ ID NO: 2240606 - RNA, 19 nt, Artificial Sequence
  Description of Artificial Sequence: Synthetic oligonucleotide
gccuaguugggaggccuuu

SEQ ID NO: 2240607 - RNA, 19 nt, Artificial Sequence
  Description of Artificial Sequence: Synthetic oligonucleotide
ccagcgugcucuggcagau

SEQ ID NO: 2240608 - RNA, 19 nt, Artificial Sequence
  Description of Artificial Sequence: Synthetic oligonucleotide
cccgcccgaaucccgcgcu

SEQ ID NO: 2240609 - RNA, 19 nt, Artificial Sequence
  Description of Artificial Sequence: Synthetic oligonucleotide
cgcccgaaucccgcgcuca

SEQ ID NO: 2240610 - RNA, 19 nt, Artificial Sequence
  Description of Artificial Sequence: Synthetic oligonucleotide
cagcgugcucuggcagauu

SEQ ID NO: 2240611 - RNA, 19 nt, Artificial Sequence
  Description of Artificial Sequence: Synthetic oligonucleotide
ccuuuccuccucggauguu

SEQ ID NO: 2240612 - RNA, 19 nt, Artificial Sequence
  Description of Artificial Sequence: Synthetic oligonucleotide
aguguaauugaauuucagc

SEQ ID NO: 2240613 - RNA, 19 nt, Artificial Sequence
  Description of Artificial Sequence: Synthetic oligonucleotide
accccuucaaacuuuaucc

SEQ ID NO: 2240614 - RNA, 19 nt, Artificial Sequence
  Description of Artificial Sequence: Synthetic oligonucleotide
uuuuauuaauaaauucucc

SEQ ID NO: 2240615 - RNA, 19 nt, Artificial Sequence
  Description of Artificial Sequence: Synthetic oligonucleotide
guguaauugaauuucagcc

SEQ ID NO: 2240616 - RNA, 19 nt, Artificial Sequence
  Description of Artificial Sequence: Synthetic oligonucleotide
aaugaauggacgaugagug

SEQ ID NO: 2240617 - RNA, 19 nt, Artificial Sequence
  Description of Artificial Sequence: Synthetic oligonucleotide
uguaauugaauuucagccc

SEQ ID NO: 2240618 - RNA, 19 nt, Artificial Sequence
  Description of Artificial Sequence: Synthetic oligonucleotide
uauuaauaaauucucccac

SEQ ID NO: 2240619 - RNA, 19 nt, Artificial Sequence
  Description of Artificial Sequence: Synthetic oligonucleotide
ugaauuucagcccaucuga

SEQ ID NO: 2240620 - RNA, 19 nt, Artificial Sequence
  Description of Artificial Sequence: Synthetic oligonucleotide
aaacuuuucucuccgucgg

SEQ ID NO: 2240621 - RNA, 19 nt, Artificial Sequence
  Description of Artificial Sequence: Synthetic oligonucleotide
ugcuuugugacccagcuug

SEQ ID NO: 2240622 - RNA, 19 nt, Artificial Sequence
  Description of Artificial Sequence: Synthetic oligonucleotide
uaaacuuuucucuccgucg

SEQ ID NO: 2240623 - RNA, 19 nt, Artificial Sequence
  Description of Artificial Sequence: Synthetic oligonucleotide
aggucccuaaaucugaccc

SEQ ID NO: 2240624 - RNA, 19 nt, Artificial Sequence
  Description of Artificial Sequence: Synthetic oligonucleotide
agaccaggaaaccagaaag

SEQ ID NO: 2240625 - RNA, 19 nt, Artificial Sequence
  Description of Artificial Sequence: Synthetic oligonucleotide
gacagggcaaucuagacac

SEQ ID NO: 2240626 - RNA, 19 nt, Artificial Sequence
  Description of Artificial Sequence: Synthetic oligonucleotide
ugaaacuuaguguaauuga

SEQ ID NO: 2240627 - RNA, 19 nt, Artificial Sequence
  Description of Artificial Sequence: Synthetic oligonucleotide
cuaaaucugacccacuccc

SEQ ID NO: 2240628 - RNA, 19 nt, Artificial Sequence
  Description of Artificial Sequence: Synthetic oligonucleotide
aucagcaccaacccgaguc

SEQ ID NO: 2240629 - RNA, 19 nt, Artificial Sequence
  Description of Artificial Sequence: Synthetic oligonucleotide
uaguaaacuuuucucuccg

SEQ ID NO: 2240630 - RNA, 19 nt, Artificial Sequence
  Description of Artificial Sequence: Synthetic oligonucleotide
uugaauuucagcccaucug

SEQ ID NO: 2240631 - RNA, 19 nt, Artificial Sequence
  Description of Artificial Sequence: Synthetic oligonucleotide
ugaauggacgaugaguggg

SEQ ID NO: 2240632 - RNA, 19 nt, Artificial Sequence
  Description of Artificial Sequence: Synthetic oligonucleotide
aaaucugacccacucccag

SEQ ID NO: 2240633 - RNA, 19 nt, Artificial Sequence
  Description of Artificial Sequence: Synthetic oligonucleotide
ugaaucaccaccucacccc

SEQ ID NO: 2240634 - RNA, 19 nt, Artificial Sequence
  Description of Artificial Sequence: Synthetic oligonucleotide
uuugugacccagcuugagg

SEQ ID NO: 2240635 - RNA, 19 nt, Artificial Sequence
  Description of Artificial Sequence: Synthetic oligonucleotide
aucagugccacaccugggc

SEQ ID NO: 2240636 - RNA, 19 nt, Artificial Sequence
  Description of Artificial Sequence: Synthetic oligonucleotide
cuuaguguaauugaauuuc

SEQ ID NO: 2240637 - RNA, 19 nt, Artificial Sequence
  Description of Artificial Sequence: Synthetic oligonucleotide
uccagaaugaaugaaugga

SEQ ID NO: 2240638 - RNA, 19 nt, Artificial Sequence
  Description of Artificial Sequence: Synthetic oligonucleotide
accaaggccagacuaagag

SEQ ID NO: 2240639 - RNA, 19 nt, Artificial Sequence
  Description of Artificial Sequence: Synthetic oligonucleotide
aagcagaagucgcugugcg

SEQ ID NO: 2240640 - RNA, 19 nt, Artificial Sequence
  Description of Artificial Sequence: Synthetic oligonucleotide
agauccgcgcuccaggagc

SEQ ID NO: 2240641 - RNA, 19 nt, Artificial Sequence
  Description of Artificial Sequence: Synthetic oligonucleotide
ugggaggugaaucaccacc

SEQ ID NO: 2240642 - RNA, 19 nt, Artificial Sequence
  Description of Artificial Sequence: Synthetic oligonucleotide
aaaugcugcgguuccuuag

SEQ ID NO: 2240643 - RNA, 19 nt, Artificial Sequence
  Description of Artificial Sequence: Synthetic oligonucleotide
ugugguuggaagagucugg

SEQ ID NO: 2240644 - RNA, 19 nt, Artificial Sequence
  Description of Artificial Sequence: Synthetic oligonucleotide
uuaguguuaagcacagguc

SEQ ID NO: 2240645 - RNA, 19 nt, Artificial Sequence
  Description of Artificial Sequence: Synthetic oligonucleotide
guaauugaauuucagccca

SEQ ID NO: 2240646 - RNA, 19 nt, Artificial Sequence
  Description of Artificial Sequence: Synthetic oligonucleotide
guaguaaacuuuucucucc

SEQ ID NO: 2240647 - RNA, 19 nt, Artificial Sequence
  Description of Artificial Sequence: Synthetic oligonucleotide
aacacgaggaucugcggca

SEQ ID NO: 2240648 - RNA, 19 nt, Artificial Sequence
  Description of Artificial Sequence: Synthetic oligonucleotide
uaguguaauugaauuucag

SEQ ID NO: 2240649 - RNA, 19 nt, Artificial Sequence
  Description of Artificial Sequence: Synthetic oligonucleotide
caagccggagccaugauug

SEQ ID NO: 2240650 - RNA, 19 nt, Artificial Sequence
  Description of Artificial Sequence: Synthetic oligonucleotide
caugcacuugucgagaucc

SEQ ID NO: 2240651 - RNA, 19 nt, Artificial Sequence
  Description of Artificial Sequence: Synthetic oligonucleotide
aauugaauuucagcccauc

SEQ ID NO: 2240652 - RNA, 19 nt, Artificial Sequence
  Description of Artificial Sequence: Synthetic oligonucleotide
aguguuaagcacagguccc

SEQ ID NO: 2240653 - RNA, 19 nt, Artificial Sequence
  Description of Artificial Sequence: Synthetic oligonucleotide
cagacuaagagcaccuccc

SEQ ID NO: 2240654 - RNA, 19 nt, Artificial Sequence
  Description of Artificial Sequence: Synthetic oligonucleotide
ugaacccuaagcccagucc

SEQ ID NO: 2240655 - RNA, 19 nt, Artificial Sequence
  Description of Artificial Sequence: Synthetic oligonucleotide
ugaaugaauggacgaugag

SEQ ID NO: 2240656 - RNA, 19 nt, Artificial Sequence
  Description of Artificial Sequence: Synthetic oligonucleotide
auugaauuucagcccaucu

SEQ ID NO: 2240657 - RNA, 19 nt, Artificial Sequence
  Description of Artificial Sequence: Synthetic oligonucleotide
uguguauuagggccagccc

SEQ ID NO: 2240658 - RNA, 19 nt, Artificial Sequence
  Description of Artificial Sequence: Synthetic oligonucleotide
uuucagcccaucugagugg

SEQ ID NO: 2240659 - RNA, 19 nt, Artificial Sequence
  Description of Artificial Sequence: Synthetic oligonucleotide
agggcugaaacuuagugua

SEQ ID NO: 2240660 - RNA, 19 nt, Artificial Sequence
  Description of Artificial Sequence: Synthetic oligonucleotide
aucaccaccucaccccacc

SEQ ID NO: 2240661 - RNA, 19 nt, Artificial Sequence
  Description of Artificial Sequence: Synthetic oligonucleotide
ucgagauccgcgcuccagg

SEQ ID NO: 2240662 - RNA, 19 nt, Artificial Sequence
  Description of Artificial Sequence: Synthetic oligonucleotide
aaaccaaggccagacuaag

SEQ ID NO: 2240663 - RNA, 19 nt, Artificial Sequence
  Description of Artificial Sequence: Synthetic oligonucleotide
aucugacccacucccaggg

SEQ ID NO: 2240664 - RNA, 19 nt, Artificial Sequence
  Description of Artificial Sequence: Synthetic oligonucleotide
cugaaacuuaguguaauug

SEQ ID NO: 2240665 - RNA, 19 nt, Artificial Sequence
  Description of Artificial Sequence: Synthetic oligonucleotide
uguguguugcuuugugacc

SEQ ID NO: 2240666 - RNA, 19 nt, Artificial Sequence
  Description of Artificial Sequence: Synthetic oligonucleotide
augaauggacgaugagugg

SEQ ID NO: 2240667 - RNA, 19 nt, Artificial Sequence
  Description of Artificial Sequence: Synthetic oligonucleotide
aaauucucccaccccuuca

SEQ ID NO: 2240668 - RNA, 19 nt, Artificial Sequence
  Description of Artificial Sequence: Synthetic oligonucleotide
gaggaucugcggcagaggc

SEQ ID NO: 2240669 - RNA, 19 nt, Artificial Sequence
  Description of Artificial Sequence: Synthetic oligonucleotide
gugggugggaccuagugug

SEQ ID NO: 2240670 - RNA, 19 nt, Artificial Sequence
  Description of Artificial Sequence: Synthetic oligonucleotide
uagaggaugggugugugug

SEQ ID NO: 2240671 - RNA, 19 nt, Artificial Sequence
  Description of Artificial Sequence: Synthetic oligonucleotide
ugccgcuagagcauggggc

SEQ ID NO: 2240672 - RNA, 19 nt, Artificial Sequence
  Description of Artificial Sequence: Synthetic oligonucleotide
uguauuagggccagcccuc

SEQ ID NO: 2240673 - RNA, 19 nt, Artificial Sequence
  Description of Artificial Sequence: Synthetic oligonucleotide
augauugccggucccgcgg

SEQ ID NO: 2240674 - RNA, 19 nt, Artificial Sequence
  Description of Artificial Sequence: Synthetic oligonucleotide
cuccccugaacccuaagcc

SEQ ID NO: 2240675 - RNA, 19 nt, Artificial Sequence
  Description of Artificial Sequence: Synthetic oligonucleotide
cuuaguguguguugcuuug

SEQ ID NO: 2240676 - RNA, 19 nt, Artificial Sequence
  Description of Artificial Sequence: Synthetic oligonucleotide
gaaacuuaguguaauugaa

SEQ ID NO: 2240677 - RNA, 19 nt, Artificial Sequence
  Description of Artificial Sequence: Synthetic oligonucleotide
acgaugagugggcaccggc

SEQ ID NO: 2240678 - RNA, 19 nt, Artificial Sequence
  Description of Artificial Sequence: Synthetic oligonucleotide
guguguguugcuuugugac

SEQ ID NO: 2240679 - RNA, 19 nt, Artificial Sequence
  Description of Artificial Sequence: Synthetic oligonucleotide
acuuaguguaauugaauuu

SEQ ID NO: 2240680 - RNA, 19 nt, Artificial Sequence
  Description of Artificial Sequence: Synthetic oligonucleotide
cugcccuggaaccagagac

SEQ ID NO: 2240681 - RNA, 19 nt, Artificial Sequence
  Description of Artificial Sequence: Synthetic oligonucleotide
uuaagcacaggucccuaaa

SEQ ID NO: 2240682 - RNA, 19 nt, Artificial Sequence
  Description of Artificial Sequence: Synthetic oligonucleotide
caagaagcgcaguccaugc

SEQ ID NO: 2240683 - RNA, 19 nt, Artificial Sequence
  Description of Artificial Sequence: Synthetic oligonucleotide
ccccaaauaaacuaucccc

SEQ ID NO: 2240684 - RNA, 19 nt, Artificial Sequence
  Description of Artificial Sequence: Synthetic oligonucleotide
caucccaagcagaagucgc

SEQ ID NO: 2240685 - RNA, 19 nt, Artificial Sequence
  Description of Artificial Sequence: Synthetic oligonucleotide
guaaacuuuucucuccguc

SEQ ID NO: 2240686 - RNA, 19 nt, Artificial Sequence
  Description of Artificial Sequence: Synthetic oligonucleotide
ucgcgcuggacaagaagcg

SEQ ID NO: 2240687 - RNA, 19 nt, Artificial Sequence
  Description of Artificial Sequence: Synthetic oligonucleotide
uggacaagaagcgcagucc

SEQ ID NO: 2240688 - RNA, 19 nt, Artificial Sequence
  Description of Artificial Sequence: Synthetic oligonucleotide
ggaucagugccacaccugg

SEQ ID NO: 2240689 - RNA, 19 nt, Artificial Sequence
  Description of Artificial Sequence: Synthetic oligonucleotide
uaaaucugacccacuccca

SEQ ID NO: 2240690 - RNA, 19 nt, Artificial Sequence
  Description of Artificial Sequence: Synthetic oligonucleotide
aagccggagccaugauugc

SEQ ID NO: 2240691 - RNA, 19 nt, Artificial Sequence
  Description of Artificial Sequence: Synthetic oligonucleotide
agacagggcaaucuagaca

SEQ ID NO: 2240692 - RNA, 19 nt, Artificial Sequence
  Description of Artificial Sequence: Synthetic oligonucleotide
uccccugaacccuaagccc

SEQ ID NO: 2240693 - RNA, 19 nt, Artificial Sequence
  Description of Artificial Sequence: Synthetic oligonucleotide
gaccuagugugucugcccc

SEQ ID NO: 2240694 - RNA, 19 nt, Artificial Sequence
  Description of Artificial Sequence: Synthetic oligonucleotide
cuccagaccaggaaaccag

SEQ ID NO: 2240695 - RNA, 19 nt, Artificial Sequence
  Description of Artificial Sequence: Synthetic oligonucleotide
uggacgaugagugggcacc

SEQ ID NO: 2240696 - RNA, 19 nt, Artificial Sequence
  Description of Artificial Sequence: Synthetic oligonucleotide
caacacgaggaucugcggc

SEQ ID NO: 2240697 - RNA, 19 nt, Artificial Sequence
  Description of Artificial Sequence: Synthetic oligonucleotide
uaguguguguugcuuugug

SEQ ID NO: 2240698 - RNA, 19 nt, Artificial Sequence
  Description of Artificial Sequence: Synthetic oligonucleotide
cuaagcccaguccugggag

SEQ ID NO: 2240699 - RNA, 19 nt, Artificial Sequence
  Description of Artificial Sequence: Synthetic oligonucleotide
ugcugcgcaucccaagcag

SEQ ID NO: 2240700 - RNA, 19 nt, Artificial Sequence
  Description of Artificial Sequence: Synthetic oligonucleotide
ugucugccccucaagucag

SEQ ID NO: 2240701 - RNA, 19 nt, Artificial Sequence
  Description of Artificial Sequence: Synthetic oligonucleotide
gaaugaauggacgaugagu

SEQ ID NO: 2240702 - RNA, 19 nt, Artificial Sequence
  Description of Artificial Sequence: Synthetic oligonucleotide
aguguguguugcuuuguga

SEQ ID NO: 2240703 - RNA, 19 nt, Artificial Sequence
  Description of Artificial Sequence: Synthetic oligonucleotide
guuccuuaguguguguugc

SEQ ID NO: 2240704 - RNA, 19 nt, Artificial Sequence
  Description of Artificial Sequence: Synthetic oligonucleotide
uguugcuuugugacccagc

SEQ ID NO: 2240705 - RNA, 19 nt, Artificial Sequence
  Description of Artificial Sequence: Synthetic oligonucleotide
agucccaacacgaggaucu

SEQ ID NO: 2240706 - RNA, 19 nt, Artificial Sequence
  Description of Artificial Sequence: Synthetic oligonucleotide
uuuagaggaugggugugug

SEQ ID NO: 2240707 - RNA, 19 nt, Artificial Sequence
  Description of Artificial Sequence: Synthetic oligonucleotide
agugggugggaccuagugu

SEQ ID NO: 2240708 - RNA, 19 nt, Artificial Sequence
  Description of Artificial Sequence: Synthetic oligonucleotide
cagagacagggcaaucuag

SEQ ID NO: 2240709 - RNA, 19 nt, Artificial Sequence
  Description of Artificial Sequence: Synthetic oligonucleotide
gaauggacgaugagugggc

SEQ ID NO: 2240710 - RNA, 19 nt, Artificial Sequence
  Description of Artificial Sequence: Synthetic oligonucleotide
aggccagacuaagagcacc

SEQ ID NO: 2240711 - RNA, 19 nt, Artificial Sequence
  Description of Artificial Sequence: Synthetic oligonucleotide
uaagcacaggucccuaaau

SEQ ID NO: 2240712 - RNA, 19 nt, Artificial Sequence
  Description of Artificial Sequence: Synthetic oligonucleotide
uccaccagucuccucuaug

SEQ ID NO: 2240713 - RNA, 19 nt, Artificial Sequence
  Description of Artificial Sequence: Synthetic oligonucleotide
aagaagcgcaguccaugca

SEQ ID NO: 2240714 - RNA, 19 nt, Artificial Sequence
  Description of Artificial Sequence: Synthetic oligonucleotide
ugugucugccccucaaguc

SEQ ID NO: 2240715 - RNA, 19 nt, Artificial Sequence
  Description of Artificial Sequence: Synthetic oligonucleotide
auggacgaugagugggcac

SEQ ID NO: 2240716 - RNA, 19 nt, Artificial Sequence
  Description of Artificial Sequence: Synthetic oligonucleotide
gucgcgcuggacaagaagc

SEQ ID NO: 2240717 - RNA, 19 nt, Artificial Sequence
  Description of Artificial Sequence: Synthetic oligonucleotide
uccugggaggugaaucacc

SEQ ID NO: 2240718 - RNA, 19 nt, Artificial Sequence
  Description of Artificial Sequence: Synthetic oligonucleotide
guguguauuagggccagcc

SEQ ID NO: 2240719 - RNA, 19 nt, Artificial Sequence
  Description of Artificial Sequence: Synthetic oligonucleotide
augaaugaauggacgauga

SEQ ID NO: 2240720 - RNA, 19 nt, Artificial Sequence
  Description of Artificial Sequence: Synthetic oligonucleotide
gaggugaaucaccaccuca

SEQ ID NO: 2240721 - RNA, 19 nt, Artificial Sequence
  Description of Artificial Sequence: Synthetic oligonucleotide
uggaucagugccacaccug

SEQ ID NO: 2240722 - RNA, 19 nt, Artificial Sequence
  Description of Artificial Sequence: Synthetic oligonucleotide
uccagaccaggaaaccaga

SEQ ID NO: 2240723 - RNA, 19 nt, Artificial Sequence
  Description of Artificial Sequence: Synthetic oligonucleotide
caugauugccggucccgcg

SEQ ID NO: 2240724 - RNA, 19 nt, Artificial Sequence
  Description of Artificial Sequence: Synthetic oligonucleotide
agugugucugccccucaag

SEQ ID NO: 2240725 - RNA, 19 nt, Artificial Sequence
  Description of Artificial Sequence: Synthetic oligonucleotide
caacccgagucccaacacg

SEQ ID NO: 2240726 - RNA, 19 nt, Artificial Sequence
  Description of Artificial Sequence: Synthetic oligonucleotide
agcagaagucgcugugcgg

SEQ ID NO: 2240727 - RNA, 19 nt, Artificial Sequence
  Description of Artificial Sequence: Synthetic oligonucleotide
aaagcagcgccaaaaccaa

SEQ ID NO: 2240728 - RNA, 19 nt, Artificial Sequence
  Description of Artificial Sequence: Synthetic oligonucleotide
agccaugauugccgguccc

SEQ ID NO: 2240729 - RNA, 19 nt, Artificial Sequence
  Description of Artificial Sequence: Synthetic oligonucleotide
gagugggugggaccuagug

SEQ ID NO: 2240730 - RNA, 19 nt, Artificial Sequence
  Description of Artificial Sequence: Synthetic oligonucleotide
augagugggcaccggcgcg

SEQ ID NO: 2240731 - RNA, 19 nt, Artificial Sequence
  Description of Artificial Sequence: Synthetic oligonucleotide
gugucugccccucaaguca

SEQ ID NO: 2240732 - RNA, 19 nt, Artificial Sequence
  Description of Artificial Sequence: Synthetic oligonucleotide
gaacccuaagcccaguccu

SEQ ID NO: 2240733 - RNA, 19 nt, Artificial Sequence
  Description of Artificial Sequence: Synthetic oligonucleotide
aacccgagucccaacacga

SEQ ID NO: 2240734 - RNA, 19 nt, Artificial Sequence
  Description of Artificial Sequence: Synthetic oligonucleotide
aauggacgaugagugggca

SEQ ID NO: 2240735 - RNA, 19 nt, Artificial Sequence
  Description of Artificial Sequence: Synthetic oligonucleotide
gaaucaccaccucacccca

SEQ ID NO: 2240736 - RNA, 19 nt, Artificial Sequence
  Description of Artificial Sequence: Synthetic oligonucleotide
agacuaagagcaccuccca

SEQ ID NO: 2240737 - RNA, 19 nt, Artificial Sequence
  Description of Artificial Sequence: Synthetic oligonucleotide
ugcgguuccuuagugugug

SEQ ID NO: 2240738 - RNA, 19 nt, Artificial Sequence
  Description of Artificial Sequence: Synthetic oligonucleotide
uuagaggaugggugugugu

SEQ ID NO: 2240739 - RNA, 19 nt, Artificial Sequence
  Description of Artificial Sequence: Synthetic oligonucleotide
uagacacccuggaaggcuc

SEQ ID NO: 2240740 - RNA, 19 nt, Artificial Sequence
  Description of Artificial Sequence: Synthetic oligonucleotide
ugacccacucccagggcug

SEQ ID NO: 2240741 - RNA, 19 nt, Artificial Sequence
  Description of Artificial Sequence: Synthetic oligonucleotide
cccaacacgaggaucugcg

SEQ ID NO: 2240742 - RNA, 19 nt, Artificial Sequence
  Description of Artificial Sequence: Synthetic oligonucleotide
ucuagacacccuggaaggc

SEQ ID NO: 2240743 - RNA, 19 nt, Artificial Sequence
  Description of Artificial Sequence: Synthetic oligonucleotide
accaacccgagucccaaca

SEQ ID NO: 2240744 - RNA, 19 nt, Artificial Sequence
  Description of Artificial Sequence: Synthetic oligonucleotide
caagcagaagucgcugugc

SEQ ID NO: 2240745 - RNA, 19 nt, Artificial Sequence
  Description of Artificial Sequence: Synthetic oligonucleotide
caguccaugcacuugucga

SEQ ID NO: 2240746 - RNA, 19 nt, Artificial Sequence
  Description of Artificial Sequence: Synthetic oligonucleotide
cagggcaaucuagacaccc

SEQ ID NO: 2240747 - RNA, 19 nt, Artificial Sequence
  Description of Artificial Sequence: Synthetic oligonucleotide
agagacagggcaaucuaga

SEQ ID NO: 2240748 - RNA, 19 nt, Artificial Sequence
  Description of Artificial Sequence: Synthetic oligonucleotide
guugucuggaaggccaggc

SEQ ID NO: 2240749 - RNA, 19 nt, Artificial Sequence
  Description of Artificial Sequence: Synthetic oligonucleotide
agaagucgcugugcggucg

SEQ ID NO: 2240750 - RNA, 19 nt, Artificial Sequence
  Description of Artificial Sequence: Synthetic oligonucleotide
gcugcgguuccuuagugug

SEQ ID NO: 2240751 - RNA, 19 nt, Artificial Sequence
  Description of Artificial Sequence: Synthetic oligonucleotide
ugugacccagcuugaggcu

SEQ ID NO: 2240752 - RNA, 19 nt, Artificial Sequence
  Description of Artificial Sequence: Synthetic oligonucleotide
ugauugccggucccgcggc

SEQ ID NO: 2240753 - RNA, 19 nt, Artificial Sequence
  Description of Artificial Sequence: Synthetic oligonucleotide
guguauuagggccagcccu

SEQ ID NO: 2240754 - RNA, 19 nt, Artificial Sequence
  Description of Artificial Sequence: Synthetic oligonucleotide
caucugagugggugggacc

SEQ ID NO: 2240755 - RNA, 19 nt, Artificial Sequence
  Description of Artificial Sequence: Synthetic oligonucleotide
cccuuuuagaggaugggug

SEQ ID NO: 2240756 - RNA, 19 nt, Artificial Sequence
  Description of Artificial Sequence: Synthetic oligonucleotide
ugcacuugucgagauccgc

SEQ ID NO: 2240757 - RNA, 19 nt, Artificial Sequence
  Description of Artificial Sequence: Synthetic oligonucleotide
agccggagccaugauugcc

SEQ ID NO: 2240758 - RNA, 19 nt, Artificial Sequence
  Description of Artificial Sequence: Synthetic oligonucleotide
aaccagagacagggcaauc

SEQ ID NO: 2240759 - RNA, 19 nt, Artificial Sequence
  Description of Artificial Sequence: Synthetic oligonucleotide
uugucgagauccgcgcucc

SEQ ID NO: 2240760 - RNA, 19 nt, Artificial Sequence
  Description of Artificial Sequence: Synthetic oligonucleotide
aucugagugggugggaccu

SEQ ID NO: 2240761 - RNA, 19 nt, Artificial Sequence
  Description of Artificial Sequence: Synthetic oligonucleotide
gguuccuuaguguguguug

SEQ ID NO: 2240762 - RNA, 19 nt, Artificial Sequence
  Description of Artificial Sequence: Synthetic oligonucleotide
acuuuucucuccgucggca

SEQ ID NO: 2240763 - RNA, 19 nt, Artificial Sequence
  Description of Artificial Sequence: Synthetic oligonucleotide
acaggucccuaaaucugac

SEQ ID NO: 2240764 - RNA, 19 nt, Artificial Sequence
  Description of Artificial Sequence: Synthetic oligonucleotide
accagagacagggcaaucu

SEQ ID NO: 2240765 - RNA, 19 nt, Artificial Sequence
  Description of Artificial Sequence: Synthetic oligonucleotide
cagcgccaaaaccaaggcc

SEQ ID NO: 2240766 - RNA, 19 nt, Artificial Sequence
  Description of Artificial Sequence: Synthetic oligonucleotide
gaagucgcugugcggucgc

SEQ ID NO: 2240767 - RNA, 19 nt, Artificial Sequence
  Description of Artificial Sequence: Synthetic oligonucleotide
acuugucgagauccgcgcu

SEQ ID NO: 2240768 - RNA, 19 nt, Artificial Sequence
  Description of Artificial Sequence: Synthetic oligonucleotide
uuaguguguguugcuuugu

SEQ ID NO: 2240769 - RNA, 19 nt, Artificial Sequence
  Description of Artificial Sequence: Synthetic oligonucleotide
cuaagagcaccucccagaa

SEQ ID NO: 2240770 - RNA, 19 nt, Artificial Sequence
  Description of Artificial Sequence: Synthetic oligonucleotide
ccagacuaagagcaccucc

SEQ ID NO: 2240771 - RNA, 19 nt, Artificial Sequence
  Description of Artificial Sequence: Synthetic oligonucleotide
ggugaaucaccaccucacc

SEQ ID NO: 2240772 - RNA, 19 nt, Artificial Sequence
  Description of Artificial Sequence: Synthetic oligonucleotide
acgaggaucugcggcagag

SEQ ID NO: 2240773 - RNA, 19 nt, Artificial Sequence
  Description of Artificial Sequence: Synthetic oligonucleotide
aaccagaaagcagcgccaa

SEQ ID NO: 2240774 - RNA, 19 nt, Artificial Sequence
  Description of Artificial Sequence: Synthetic oligonucleotide
uuguuccccggccgcggcg

SEQ ID NO: 2240775 - RNA, 19 nt, Artificial Sequence
  Description of Artificial Sequence: Synthetic oligonucleotide
ucuccgucggcaccgucuc

SEQ ID NO: 2240776 - RNA, 19 nt, Artificial Sequence
  Description of Artificial Sequence: Synthetic oligonucleotide
ucccaagcagaagucgcug

SEQ ID NO: 2240777 - RNA, 19 nt, Artificial Sequence
  Description of Artificial Sequence: Synthetic oligonucleotide
aacccuaagcccaguccug

SEQ ID NO: 2240778 - RNA, 19 nt, Artificial Sequence
  Description of Artificial Sequence: Synthetic oligonucleotide
gucccuaaaucugacccac

SEQ ID NO: 2240779 - RNA, 19 nt, Artificial Sequence
  Description of Artificial Sequence: Synthetic oligonucleotide
caggucccuaaaucugacc

SEQ ID NO: 2240780 - RNA, 19 nt, Artificial Sequence
  Description of Artificial Sequence: Synthetic oligonucleotide
ggcaaucuagacacccugg

SEQ ID NO: 2240781 - RNA, 19 nt, Artificial Sequence
  Description of Artificial Sequence: Synthetic oligonucleotide
ggacaagaagcgcagucca

SEQ ID NO: 2240782 - RNA, 19 nt, Artificial Sequence
  Description of Artificial Sequence: Synthetic oligonucleotide
agaaugggccagagcaguc

SEQ ID NO: 2240783 - RNA, 19 nt, Artificial Sequence
  Description of Artificial Sequence: Synthetic oligonucleotide
uggaagagucuggcugggg

SEQ ID NO: 2240784 - RNA, 19 nt, Artificial Sequence
  Description of Artificial Sequence: Synthetic oligonucleotide
gagcaccucccagaauggg

SEQ ID NO: 2240785 - RNA, 19 nt, Artificial Sequence
  Description of Artificial Sequence: Synthetic oligonucleotide
agucgcugugcggucgcgc

SEQ ID NO: 2240786 - RNA, 19 nt, Artificial Sequence
  Description of Artificial Sequence: Synthetic oligonucleotide
gggcaaucuagacacccug

SEQ ID NO: 2240787 - RNA, 19 nt, Artificial Sequence
  Description of Artificial Sequence: Synthetic oligonucleotide
gcacuugucgagauccgcg

SEQ ID NO: 2240788 - RNA, 19 nt, Artificial Sequence
  Description of Artificial Sequence: Synthetic oligonucleotide
ugcgcaucccaagcagaag

SEQ ID NO: 2240789 - RNA, 19 nt, Artificial Sequence
  Description of Artificial Sequence: Synthetic oligonucleotide
cugggguugucuggaaggc

SEQ ID NO: 2240790 - RNA, 19 nt, Artificial Sequence
  Description of Artificial Sequence: Synthetic oligonucleotide
guuaagcacaggucccuaa

SEQ ID NO: 2240791 - RNA, 19 nt, Artificial Sequence
  Description of Artificial Sequence: Synthetic oligonucleotide
ggaaggcuccccugaaccc

SEQ ID NO: 2240792 - RNA, 19 nt, Artificial Sequence
  Description of Artificial Sequence: Synthetic oligonucleotide
ccagggcugaaacuuagug

SEQ ID NO: 2240793 - RNA, 19 nt, Artificial Sequence
  Description of Artificial Sequence: Synthetic oligonucleotide
uuggggagagcaggagacc

SEQ ID NO: 2240794 - RNA, 19 nt, Artificial Sequence
  Description of Artificial Sequence: Synthetic oligonucleotide
ugggaccuagugugucugc

SEQ ID NO: 2240795 - RNA, 19 nt, Artificial Sequence
  Description of Artificial Sequence: Synthetic oligonucleotide
ugggguugucuggaaggcc

SEQ ID NO: 2240796 - RNA, 19 nt, Artificial Sequence
  Description of Artificial Sequence: Synthetic oligonucleotide
ccccuugugcaaaugcugc

SEQ ID NO: 2240797 - RNA, 19 nt, Artificial Sequence
  Description of Artificial Sequence: Synthetic oligonucleotide
augcugcgguuccuuagug

SEQ ID NO: 2240798 - RNA, 19 nt, Artificial Sequence
  Description of Artificial Sequence: Synthetic oligonucleotide
ccccuucaaacuuuauccc

SEQ ID NO: 2240799 - RNA, 19 nt, Artificial Sequence
  Description of Artificial Sequence: Synthetic oligonucleotide
aaccaaggccagacuaaga

SEQ ID NO: 2240800 - RNA, 19 nt, Artificial Sequence
  Description of Artificial Sequence: Synthetic oligonucleotide
ucccuaaaucugacccacu

SEQ ID NO: 2240801 - RNA, 19 nt, Artificial Sequence
  Description of Artificial Sequence: Synthetic oligonucleotide
gcaaucuagacacccugga

SEQ ID NO: 2240802 - RNA, 19 nt, Artificial Sequence
  Description of Artificial Sequence: Synthetic oligonucleotide
cugaacccuaagcccaguc

SEQ ID NO: 2240803 - RNA, 19 nt, Artificial Sequence
  Description of Artificial Sequence: Synthetic oligonucleotide
agacacccuggaaggcucc

SEQ ID NO: 2240804 - RNA, 19 nt, Artificial Sequence
  Description of Artificial Sequence: Synthetic oligonucleotide
uccuuaguguguguugcuu

SEQ ID NO: 2240805 - RNA, 19 nt, Artificial Sequence
  Description of Artificial Sequence: Synthetic oligonucleotide
ccuugugcaaaugcugcgg

SEQ ID NO: 2240806 - RNA, 19 nt, Artificial Sequence
  Description of Artificial Sequence: Synthetic oligonucleotide
gacgaugagugggcaccgg

SEQ ID NO: 2240807 - RNA, 19 nt, Artificial Sequence
  Description of Artificial Sequence: Synthetic oligonucleotide
ggaccuagugugucugccc

SEQ ID NO: 2240808 - RNA, 19 nt, Artificial Sequence
  Description of Artificial Sequence: Synthetic oligonucleotide
guguguguauuagggccag

SEQ ID NO: 2240809 - RNA, 19 nt, Artificial Sequence
  Description of Artificial Sequence: Synthetic oligonucleotide
cuggaaggcuccccugaac

SEQ ID NO: 2240810 - RNA, 19 nt, Artificial Sequence
  Description of Artificial Sequence: Synthetic oligonucleotide
uguuaagcacaggucccua

SEQ ID NO: 2240811 - RNA, 19 nt, Artificial Sequence
  Description of Artificial Sequence: Synthetic oligonucleotide
caggcuggcuccagaauga

SEQ ID NO: 2240812 - RNA, 19 nt, Artificial Sequence
  Description of Artificial Sequence: Synthetic oligonucleotide
ggucgcgcuggacaagaag

SEQ ID NO: 2240813 - RNA, 19 nt, Artificial Sequence
  Description of Artificial Sequence: Synthetic oligonucleotide
cagggcugaaacuuagugu

SEQ ID NO: 2240814 - RNA, 19 nt, Artificial Sequence
  Description of Artificial Sequence: Synthetic oligonucleotide
ugccuggugcuuguucccc

SEQ ID NO: 2240815 - RNA, 19 nt, Artificial Sequence
  Description of Artificial Sequence: Synthetic oligonucleotide
cugcggccaagccggagcc

SEQ ID NO: 2240816 - RNA, 19 nt, Artificial Sequence
  Description of Artificial Sequence: Synthetic oligonucleotide
cugagugggugggaccuag

SEQ ID NO: 2240817 - RNA, 19 nt, Artificial Sequence
  Description of Artificial Sequence: Synthetic oligonucleotide
ugggccagagcagucugaa

SEQ ID NO: 2240818 - RNA, 19 nt, Artificial Sequence
  Description of Artificial Sequence: Synthetic oligonucleotide
ggagccaugauugccgguc

SEQ ID NO: 2240819 - RNA, 19 nt, Artificial Sequence
  Description of Artificial Sequence: Synthetic oligonucleotide
aagucgcugugcggucgcg

SEQ ID NO: 2240820 - RNA, 19 nt, Artificial Sequence
  Description of Artificial Sequence: Synthetic oligonucleotide
gccggagccaugauugccg

SEQ ID NO: 2240821 - RNA, 19 nt, Artificial Sequence
  Description of Artificial Sequence: Synthetic oligonucleotide
ugcaaaugcugcgguuccu

SEQ ID NO: 2240822 - RNA, 19 nt, Artificial Sequence
  Description of Artificial Sequence: Synthetic oligonucleotide
gugcuuguuccccggccgc

SEQ ID NO: 2240823 - RNA, 19 nt, Artificial Sequence
  Description of Artificial Sequence: Synthetic oligonucleotide
accuagugugucugccccu

SEQ ID NO: 2240824 - RNA, 19 nt, Artificial Sequence
  Description of Artificial Sequence: Synthetic oligonucleotide
acacgaggaucugcggcag

SEQ ID NO: 2240825 - RNA, 19 nt, Artificial Sequence
  Description of Artificial Sequence: Synthetic oligonucleotide
gucgagauccgcgcuccag

SEQ ID NO: 2240826 - RNA, 19 nt, Artificial Sequence
  Description of Artificial Sequence: Synthetic oligonucleotide
ggugcugcugcgcauccca

SEQ ID NO: 2240827 - RNA, 19 nt, Artificial Sequence
  Description of Artificial Sequence: Synthetic oligonucleotide
aucccaagcagaagucgcu

SEQ ID NO: 2240828 - RNA, 19 nt, Artificial Sequence
  Description of Artificial Sequence: Synthetic oligonucleotide
ggucccuaaaucugaccca

SEQ ID NO: 2240829 - RNA, 19 nt, Artificial Sequence
  Description of Artificial Sequence: Synthetic oligonucleotide
gugggaccuagugugucug

SEQ ID NO: 2240830 - RNA, 19 nt, Artificial Sequence
  Description of Artificial Sequence: Synthetic oligonucleotide
uccgcgcuccaggagcugc

SEQ ID NO: 2240831 - RNA, 19 nt, Artificial Sequence
  Description of Artificial Sequence: Synthetic oligonucleotide
cccgagucccaacacgagg

SEQ ID NO: 2240832 - RNA, 19 nt, Artificial Sequence
  Description of Artificial Sequence: Synthetic oligonucleotide
uguguguauuagggccagc

SEQ ID NO: 2240833 - RNA, 19 nt, Artificial Sequence
  Description of Artificial Sequence: Synthetic oligonucleotide
gagucccaacacgaggauc

SEQ ID NO: 2240834 - RNA, 19 nt, Artificial Sequence
  Description of Artificial Sequence: Synthetic oligonucleotide
gaagagucuggcugggguu

SEQ ID NO: 2240835 - RNA, 19 nt, Artificial Sequence
  Description of Artificial Sequence: Synthetic oligonucleotide
gcugcggccaagccggagc

SEQ ID NO: 2240836 - RNA, 19 nt, Artificial Sequence
  Description of Artificial Sequence: Synthetic oligonucleotide
acaccugggcagcccucuc

SEQ ID NO: 2240837 - RNA, 19 nt, Artificial Sequence
  Description of Artificial Sequence: Synthetic oligonucleotide
ggucuccaggacuugggga

SEQ ID NO: 2240838 - RNA, 19 nt, Artificial Sequence
  Description of Artificial Sequence: Synthetic oligonucleotide
cgaugagugggcaccggcg

SEQ ID NO: 2240839 - RNA, 19 nt, Artificial Sequence
  Description of Artificial Sequence: Synthetic oligonucleotide
ccaacacgaggaucugcgg

SEQ ID NO: 2240840 - RNA, 19 nt, Artificial Sequence
  Description of Artificial Sequence: Synthetic oligonucleotide
cuagagcauggggcggugc

SEQ ID NO: 2240841 - RNA, 19 nt, Artificial Sequence
  Description of Artificial Sequence: Synthetic oligonucleotide
ccccuuaguguuaagcaca

SEQ ID NO: 2240842 - RNA, 19 nt, Artificial Sequence
  Description of Artificial Sequence: Synthetic oligonucleotide
gugugucugccccucaagu

SEQ ID NO: 2240843 - RNA, 19 nt, Artificial Sequence
  Description of Artificial Sequence: Synthetic oligonucleotide
cauggggcggugccuggug

SEQ ID NO: 2240844 - RNA, 19 nt, Artificial Sequence
  Description of Artificial Sequence: Synthetic oligonucleotide
gaaugggccagagcagucu

SEQ ID NO: 2240845 - RNA, 19 nt, Artificial Sequence
  Description of Artificial Sequence: Synthetic oligonucleotide
gaggaugggugugugugua

SEQ ID NO: 2240846 - RNA, 19 nt, Artificial Sequence
  Description of Artificial Sequence: Synthetic oligonucleotide
guguugcuuugugacccag

SEQ ID NO: 2240847 - RNA, 19 nt, Artificial Sequence
  Description of Artificial Sequence: Synthetic oligonucleotide
gccaugauugccggucccg

SEQ ID NO: 2240848 - RNA, 19 nt, Artificial Sequence
  Description of Artificial Sequence: Synthetic oligonucleotide
uggggcggugccuggugcu

SEQ ID NO: 2240849 - RNA, 19 nt, Artificial Sequence
  Description of Artificial Sequence: Synthetic oligonucleotide
gggguugucuggaaggcca

SEQ ID NO: 2240850 - RNA, 19 nt, Artificial Sequence
  Description of Artificial Sequence: Synthetic oligonucleotide
gcccuggaaccagagacag

SEQ ID NO: 2240851 - RNA, 19 nt, Artificial Sequence
  Description of Artificial Sequence: Synthetic oligonucleotide
cugcgcaucccaagcagaa

SEQ ID NO: 2240852 - RNA, 19 nt, Artificial Sequence
  Description of Artificial Sequence: Synthetic oligonucleotide
gggugcuccucacuggauc

SEQ ID NO: 2240853 - RNA, 19 nt, Artificial Sequence
  Description of Artificial Sequence: Synthetic oligonucleotide
gcgcaucagcaccaacccg

SEQ ID NO: 2240854 - RNA, 19 nt, Artificial Sequence
  Description of Artificial Sequence: Synthetic oligonucleotide
gugacccagcuugaggcuc

SEQ ID NO: 2240855 - RNA, 19 nt, Artificial Sequence
  Description of Artificial Sequence: Synthetic oligonucleotide
gaagcgcaguccaugcacu

SEQ ID NO: 2240856 - RNA, 19 nt, Artificial Sequence
  Description of Artificial Sequence: Synthetic oligonucleotide
ccgagucccaacacgagga

SEQ ID NO: 2240857 - RNA, 19 nt, Artificial Sequence
  Description of Artificial Sequence: Synthetic oligonucleotide
ggaaccagagacagggcaa

SEQ ID NO: 2240858 - RNA, 19 nt, Artificial Sequence
  Description of Artificial Sequence: Synthetic oligonucleotide
caaaugcugcgguuccuua

SEQ ID NO: 2240859 - RNA, 19 nt, Artificial Sequence
  Description of Artificial Sequence: Synthetic oligonucleotide
cuagacacccuggaaggcu

SEQ ID NO: 2240860 - RNA, 19 nt, Artificial Sequence
  Description of Artificial Sequence: Synthetic oligonucleotide
cucccugcccuggaaccag

SEQ ID NO: 2240861 - RNA, 19 nt, Artificial Sequence
  Description of Artificial Sequence: Synthetic oligonucleotide
cgcgcaucagcaccaaccc

SEQ ID NO: 2240862 - RNA, 19 nt, Artificial Sequence
  Description of Artificial Sequence: Synthetic oligonucleotide
ucagcccaucugagugggu

SEQ ID NO: 2240863 - RNA, 19 nt, Artificial Sequence
  Description of Artificial Sequence: Synthetic oligonucleotide
ggaggugaaucaccaccuc

SEQ ID NO: 2240864 - RNA, 19 nt, Artificial Sequence
  Description of Artificial Sequence: Synthetic oligonucleotide
gaaccagagacagggcaau

SEQ ID NO: 2240865 - RNA, 19 nt, Artificial Sequence
  Description of Artificial Sequence: Synthetic oligonucleotide
cugacccacucccagggcu

SEQ ID NO: 2240866 - RNA, 19 nt, Artificial Sequence
  Description of Artificial Sequence: Synthetic oligonucleotide
acccgagucccaacacgag

SEQ ID NO: 2240867 - RNA, 19 nt, Artificial Sequence
  Description of Artificial Sequence: Synthetic oligonucleotide
ugcggucgcgcuggacaag

SEQ ID NO: 2240868 - RNA, 19 nt, Artificial Sequence
  Description of Artificial Sequence: Synthetic oligonucleotide
aaggcuccccugaacccua

SEQ ID NO: 2240869 - RNA, 19 nt, Artificial Sequence
  Description of Artificial Sequence: Synthetic oligonucleotide
agccaggucuccaggacuu

SEQ ID NO: 2240870 - RNA, 19 nt, Artificial Sequence
  Description of Artificial Sequence: Synthetic oligonucleotide
agcaccaacccgaguccca

SEQ ID NO: 2240871 - RNA, 19 nt, Artificial Sequence
  Description of Artificial Sequence: Synthetic oligonucleotide
gcccaucugaguggguggg

SEQ ID NO: 2240872 - RNA, 19 nt, Artificial Sequence
  Description of Artificial Sequence: Synthetic oligonucleotide
caccaacccgagucccaac

SEQ ID NO: 2240873 - RNA, 19 nt, Artificial Sequence
  Description of Artificial Sequence: Synthetic oligonucleotide
cucuccgucggcaccgucu

SEQ ID NO: 2240874 - RNA, 19 nt, Artificial Sequence
  Description of Artificial Sequence: Synthetic oligonucleotide
guguuaagcacaggucccu

SEQ ID NO: 2240875 - RNA, 19 nt, Artificial Sequence
  Description of Artificial Sequence: Synthetic oligonucleotide
gcgcaucccaagcagaagu

SEQ ID NO: 2240876 - RNA, 19 nt, Artificial Sequence
  Description of Artificial Sequence: Synthetic oligonucleotide
ccggagccaugauugccgg

SEQ ID NO: 2240877 - RNA, 19 nt, Artificial Sequence
  Description of Artificial Sequence: Synthetic oligonucleotide
gcaccgucuccagaccagg

SEQ ID NO: 2240878 - RNA, 19 nt, Artificial Sequence
  Description of Artificial Sequence: Synthetic oligonucleotide
gaucugcggcagaggcugc

SEQ ID NO: 2240879 - RNA, 19 nt, Artificial Sequence
  Description of Artificial Sequence: Synthetic oligonucleotide
ggcaccgucuccagaccag

SEQ ID NO: 2240880 - RNA, 19 nt, Artificial Sequence
  Description of Artificial Sequence: Synthetic oligonucleotide
agcugccgcuagagcaugg

SEQ ID NO: 2240881 - RNA, 19 nt, Artificial Sequence
  Description of Artificial Sequence: Synthetic oligonucleotide
cuagugugucugccccuca

SEQ ID NO: 2240882 - RNA, 19 nt, Artificial Sequence
  Description of Artificial Sequence: Synthetic oligonucleotide
gcuuguuccccggccgcgg

SEQ ID NO: 2240883 - RNA, 19 nt, Artificial Sequence
  Description of Artificial Sequence: Synthetic oligonucleotide
ccccuugugguuggaagag

SEQ ID NO: 2240884 - RNA, 19 nt, Artificial Sequence
  Description of Artificial Sequence: Synthetic oligonucleotide
cugccccucaagucagcca

SEQ ID NO: 2240885 - RNA, 19 nt, Artificial Sequence
  Description of Artificial Sequence: Synthetic oligonucleotide
ccaacccgagucccaacac

SEQ ID NO: 2240886 - RNA, 19 nt, Artificial Sequence
  Description of Artificial Sequence: Synthetic oligonucleotide
gcgcgggugcuccucacug

SEQ ID NO: 2240887 - RNA, 19 nt, Artificial Sequence
  Description of Artificial Sequence: Synthetic oligonucleotide
gugcggucgcgcuggacaa

SEQ ID NO: 2240888 - RNA, 19 nt, Artificial Sequence
  Description of Artificial Sequence: Synthetic oligonucleotide
cgcuggacaagaagcgcag

SEQ ID NO: 2240889 - RNA, 19 nt, Artificial Sequence
  Description of Artificial Sequence: Synthetic oligonucleotide
gucgcugugcggucgcgcu

SEQ ID NO: 2240890 - RNA, 19 nt, Artificial Sequence
  Description of Artificial Sequence: Synthetic oligonucleotide
caccgucuccagaccagga

SEQ ID NO: 2240891 - RNA, 19 nt, Artificial Sequence
  Description of Artificial Sequence: Synthetic oligonucleotide
ggggagagcaggagacccc

SEQ ID NO: 2240892 - RNA, 19 nt, Artificial Sequence
  Description of Artificial Sequence: Synthetic oligonucleotide
gcgccaaaaccaaggccag

SEQ ID NO: 2240893 - RNA, 19 nt, Artificial Sequence
  Description of Artificial Sequence: Synthetic oligonucleotide
ccuuaguguuaagcacagg

SEQ ID NO: 2240894 - RNA, 19 nt, Artificial Sequence
  Description of Artificial Sequence: Synthetic oligonucleotide
gcugaaacuuaguguaauu

SEQ ID NO: 2240895 - RNA, 19 nt, Artificial Sequence
  Description of Artificial Sequence: Synthetic oligonucleotide
accggcgcgggugcuccuc

SEQ ID NO: 2240896 - RNA, 19 nt, Artificial Sequence
  Description of Artificial Sequence: Synthetic oligonucleotide
cccuggaaccagagacagg

SEQ ID NO: 2240897 - RNA, 19 nt, Artificial Sequence
  Description of Artificial Sequence: Synthetic oligonucleotide
ggugggaccuagugugucu

SEQ ID NO: 2240898 - RNA, 19 nt, Artificial Sequence
  Description of Artificial Sequence: Synthetic oligonucleotide
ccuagugugucugccccuc

SEQ ID NO: 2240899 - RNA, 19 nt, Artificial Sequence
  Description of Artificial Sequence: Synthetic oligonucleotide
gauccgcgcuccaggagcu

SEQ ID NO: 2240900 - RNA, 19 nt, Artificial Sequence
  Description of Artificial Sequence: Synthetic oligonucleotide
gcgggugcuccucacugga

SEQ ID NO: 2240901 - RNA, 19 nt, Artificial Sequence
  Description of Artificial Sequence: Synthetic oligonucleotide
gacccacucccagggcuga

SEQ ID NO: 2240902 - RNA, 19 nt, Artificial Sequence
  Description of Artificial Sequence: Synthetic oligonucleotide
ccaggacuuggggagagca

SEQ ID NO: 2240903 - RNA, 19 nt, Artificial Sequence
  Description of Artificial Sequence: Synthetic oligonucleotide
ccagagacagggcaaucua

SEQ ID NO: 2240904 - RNA, 19 nt, Artificial Sequence
  Description of Artificial Sequence: Synthetic oligonucleotide
cugcgguuccuuagugugu

SEQ ID NO: 2240905 - RNA, 19 nt, Artificial Sequence
  Description of Artificial Sequence: Synthetic oligonucleotide
aggcuggcuccagaaugaa

SEQ ID NO: 2240906 - RNA, 19 nt, Artificial Sequence
  Description of Artificial Sequence: Synthetic oligonucleotide
ggccaagccggagccauga

SEQ ID NO: 2240907 - RNA, 19 nt, Artificial Sequence
  Description of Artificial Sequence: Synthetic oligonucleotide
agugggcaccggcgcgggu

SEQ ID NO: 2240908 - RNA, 19 nt, Artificial Sequence
  Description of Artificial Sequence: Synthetic oligonucleotide
ggcugaaacuuaguguaau

SEQ ID NO: 2240909 - RNA, 19 nt, Artificial Sequence
  Description of Artificial Sequence: Synthetic oligonucleotide
cgcggcgcgcaucagcacc

SEQ ID NO: 2240910 - RNA, 19 nt, Artificial Sequence
  Description of Artificial Sequence: Synthetic oligonucleotide
ccgucuccagaccaggaaa

SEQ ID NO: 2240911 - RNA, 19 nt, Artificial Sequence
  Description of Artificial Sequence: Synthetic oligonucleotide
gcugcgcaucccaagcaga

SEQ ID NO: 2240912 - RNA, 19 nt, Artificial Sequence
  Description of Artificial Sequence: Synthetic oligonucleotide
ggcuccccugaacccuaag

SEQ ID NO: 2240913 - RNA, 19 nt, Artificial Sequence
  Description of Artificial Sequence: Synthetic oligonucleotide
cagcccucccagagggcca

SEQ ID NO: 2240914 - RNA, 19 nt, Artificial Sequence
  Description of Artificial Sequence: Synthetic oligonucleotide
gcuuugugacccagcuuga

SEQ ID NO: 2240915 - RNA, 19 nt, Artificial Sequence
  Description of Artificial Sequence: Synthetic oligonucleotide
gucugccccucaagucagc

SEQ ID NO: 2240916 - RNA, 19 nt, Artificial Sequence
  Description of Artificial Sequence: Synthetic oligonucleotide
cacccuggaaggcuccccu

SEQ ID NO: 2240917 - RNA, 19 nt, Artificial Sequence
  Description of Artificial Sequence: Synthetic oligonucleotide
cacgaggaucugcggcaga

SEQ ID NO: 2240918 - RNA, 19 nt, Artificial Sequence
  Description of Artificial Sequence: Synthetic oligonucleotide
gggugggaccuaguguguc

SEQ ID NO: 2240919 - RNA, 19 nt, Artificial Sequence
  Description of Artificial Sequence: Synthetic oligonucleotide
gcuagagcauggggcggug

SEQ ID NO: 2240920 - RNA, 19 nt, Artificial Sequence
  Description of Artificial Sequence: Synthetic oligonucleotide
cucccaccccuucaaacuu

SEQ ID NO: 2240921 - RNA, 19 nt, Artificial Sequence
  Description of Artificial Sequence: Synthetic oligonucleotide
cgcgggugcuccucacugg

SEQ ID NO: 2240922 - RNA, 19 nt, Artificial Sequence
  Description of Artificial Sequence: Synthetic oligonucleotide
cgcgcuggacaagaagcgc

SEQ ID NO: 2240923 - RNA, 19 nt, Artificial Sequence
  Description of Artificial Sequence: Synthetic oligonucleotide
gccgcggcgcgcaucagca

SEQ ID NO: 2240924 - RNA, 19 nt, Artificial Sequence
  Description of Artificial Sequence: Synthetic oligonucleotide
gccagacuaagagcaccuc

SEQ ID NO: 2240925 - RNA, 19 nt, Artificial Sequence
  Description of Artificial Sequence: Synthetic oligonucleotide
ggccagacuaagagcaccu

SEQ ID NO: 2240926 - RNA, 19 nt, Artificial Sequence
  Description of Artificial Sequence: Synthetic oligonucleotide
gccccucaagucagccagg

SEQ ID NO: 2240927 - RNA, 19 nt, Artificial Sequence
  Description of Artificial Sequence: Synthetic oligonucleotide
ccuuaguguguguugcuuu

SEQ ID NO: 2240928 - RNA, 19 nt, Artificial Sequence
  Description of Artificial Sequence: Synthetic oligonucleotide
ccgcuagagcauggggcgg

SEQ ID NO: 2240929 - RNA, 19 nt, Artificial Sequence
  Description of Artificial Sequence: Synthetic oligonucleotide
auccgcgcuccaggagcug

SEQ ID NO: 2240930 - RNA, 19 nt, Artificial Sequence
  Description of Artificial Sequence: Synthetic oligonucleotide
ggagcugccgcuagagcau

SEQ ID NO: 2240931 - RNA, 19 nt, Artificial Sequence
  Description of Artificial Sequence: Synthetic oligonucleotide
cgagauccgcgcuccagga

SEQ ID NO: 2240932 - RNA, 19 nt, Artificial Sequence
  Description of Artificial Sequence: Synthetic oligonucleotide
gcaccggcgcgggugcucc

SEQ ID NO: 2240933 - RNA, 19 nt, Artificial Sequence
  Description of Artificial Sequence: Synthetic oligonucleotide
gcggucgcgcuggacaaga

SEQ ID NO: 2240934 - RNA, 19 nt, Artificial Sequence
  Description of Artificial Sequence: Synthetic oligonucleotide
gcaccaacccgagucccaa

SEQ ID NO: 2240935 - RNA, 19 nt, Artificial Sequence
  Description of Artificial Sequence: Synthetic oligonucleotide
cacaccugggcagcccucu

SEQ ID NO: 2240936 - RNA, 19 nt, Artificial Sequence
  Description of Artificial Sequence: Synthetic oligonucleotide
gggcggugccuggugcuug

SEQ ID NO: 2240937 - RNA, 19 nt, Artificial Sequence
  Description of Artificial Sequence: Synthetic oligonucleotide
ggcggugccuggugcuugu

SEQ ID NO: 2240938 - RNA, 19 nt, Artificial Sequence
  Description of Artificial Sequence: Synthetic oligonucleotide
aggcuccccugaacccuaa

SEQ ID NO: 2240939 - RNA, 19 nt, Artificial Sequence
  Description of Artificial Sequence: Synthetic oligonucleotide
cgcgcuccaggagcugccg

SEQ ID NO: 2240940 - RNA, 19 nt, Artificial Sequence
  Description of Artificial Sequence: Synthetic oligonucleotide
ggcgcgggugcuccucacu

SEQ ID NO: 2240941 - RNA, 19 nt, Artificial Sequence
  Description of Artificial Sequence: Synthetic oligonucleotide
ggcaccggcgcgggugcuc

SEQ ID NO: 2240942 - RNA, 19 nt, Artificial Sequence
  Description of Artificial Sequence: Synthetic oligonucleotide
cggcaccgucuccagacca

SEQ ID NO: 2240943 - RNA, 19 nt, Artificial Sequence
  Description of Artificial Sequence: Synthetic oligonucleotide
ggcuggcuccagaaugaau

SEQ ID NO: 2240944 - RNA, 19 nt, Artificial Sequence
  Description of Artificial Sequence: Synthetic oligonucleotide
gcggccaagccggagccau

SEQ ID NO: 2240945 - RNA, 19 nt, Artificial Sequence
  Description of Artificial Sequence: Synthetic oligonucleotide
gcgguuccuuagugugugu

SEQ ID NO: 2240946 - RNA, 19 nt, Artificial Sequence
  Description of Artificial Sequence: Synthetic oligonucleotide
ccgcggcgcgcaucagcac

SEQ ID NO: 2240947 - RNA, 19 nt, Artificial Sequence
  Description of Artificial Sequence: Synthetic oligonucleotide
cggccaagccggagccaug

SEQ ID NO: 2240948 - RNA, 19 nt, Artificial Sequence
  Description of Artificial Sequence: Synthetic oligonucleotide
gcauggggcggugccuggu

SEQ ID NO: 2240949 - RNA, 19 nt, Artificial Sequence
  Description of Artificial Sequence: Synthetic oligonucleotide
gccaagccggagccaugau

SEQ ID NO: 2240950 - RNA, 19 nt, Artificial Sequence
  Description of Artificial Sequence: Synthetic oligonucleotide
ccggcgcgggugcuccuca

SEQ ID NO: 2240951 - RNA, 19 nt, Artificial Sequence
  Description of Artificial Sequence: Synthetic oligonucleotide
cgucggcaccgucuccaga

SEQ ID NO: 2240952 - RNA, 19 nt, Artificial Sequence
  Description of Artificial Sequence: Synthetic oligonucleotide
ccugaacccuaagcccagu

SEQ ID NO: 2240953 - RNA, 19 nt, Artificial Sequence
  Description of Artificial Sequence: Synthetic oligonucleotide
cggcgcgggugcuccucac

SEQ ID NO: 2240954 - RNA, 19 nt, Artificial Sequence
  Description of Artificial Sequence: Synthetic oligonucleotide
cgcuagagcauggggcggu

SEQ ID NO: 2240955 - RNA, 19 nt, Artificial Sequence
  Description of Artificial Sequence: Synthetic oligonucleotide
ggggcggugccuggugcuu

SEQ ID NO: 2240956 - RNA, 19 nt, Artificial Sequence
  Description of Artificial Sequence: Synthetic oligonucleotide
cgguuccuuaguguguguu

SEQ ID NO: 2240957 - RNA, 19 nt, Artificial Sequence
  Description of Artificial Sequence: Synthetic oligonucleotide
caccggcgcgggugcuccu

SEQ ID NO: 2240958 - RNA, 19 nt, Artificial Sequence
  Description of Artificial Sequence: Synthetic oligonucleotide
cggucgcgcuggacaagaa

SEQ ID NO: 2240959 - RNA, 19 nt, Artificial Sequence
  Description of Artificial Sequence: Synthetic oligonucleotide
cccggccgcggcgcgcauc

SEQ ID NO: 2240960 - RNA, 19 nt, Artificial Sequence
  Description of Artificial Sequence: Synthetic oligonucleotide
cgggugcuccucacuggau

SEQ ID NO: 2240961 - RNA, 19 nt, Artificial Sequence
  Description of Artificial Sequence: Synthetic oligonucleotide
gcggugccuggugcuuguu

SEQ ID NO: 2240962 - RNA, 19 nt, Artificial Sequence
  Description of Artificial Sequence: Synthetic oligonucleotide
cggccgcggcgcgcaucag

SEQ ID NO: 2240963 - RNA, 19 nt, Artificial Sequence
  Description of Artificial Sequence: Synthetic oligonucleotide
aauaccuccaccaucaacc

SEQ ID NO: 2240964 - RNA, 19 nt, Artificial Sequence
  Description of Artificial Sequence: Synthetic oligonucleotide
uuuauaauuaacugcagca

SEQ ID NO: 2240965 - RNA, 19 nt, Artificial Sequence
  Description of Artificial Sequence: Synthetic oligonucleotide
ucuucuauaauuccaauac

SEQ ID NO: 2240966 - RNA, 19 nt, Artificial Sequence
  Description of Artificial Sequence: Synthetic oligonucleotide
aauugcuuuaguuugccag

SEQ ID NO: 2240967 - RNA, 19 nt, Artificial Sequence
  Description of Artificial Sequence: Synthetic oligonucleotide
aaagaagucacaaaaucac

SEQ ID NO: 2240968 - RNA, 19 nt, Artificial Sequence
  Description of Artificial Sequence: Synthetic oligonucleotide
aaucugaccacacaggaug

SEQ ID NO: 2240969 - RNA, 19 nt, Artificial Sequence
  Description of Artificial Sequence: Synthetic oligonucleotide
ugaagauacacaaagacua

SEQ ID NO: 2240970 - RNA, 19 nt, Artificial Sequence
  Description of Artificial Sequence: Synthetic oligonucleotide
aaugcagacgaucugcuuc

SEQ ID NO: 2240971 - RNA, 19 nt, Artificial Sequence
  Description of Artificial Sequence: Synthetic oligonucleotide
ucuggaacagccaagcagg

SEQ ID NO: 2240972 - RNA, 19 nt, Artificial Sequence
  Description of Artificial Sequence: Synthetic oligonucleotide
cuucauucaucuuacagcg

SEQ ID NO: 2240973 - RNA, 19 nt, Artificial Sequence
  Description of Artificial Sequence: Synthetic oligonucleotide
uuuaacacaguaaaucucu

SEQ ID NO: 2240974 - RNA, 19 nt, Artificial Sequence
  Description of Artificial Sequence: Synthetic oligonucleotide
aaauuuguguguuugcucu

SEQ ID NO: 2240975 - RNA, 19 nt, Artificial Sequence
  Description of Artificial Sequence: Synthetic oligonucleotide
aagauguccauccacaagu

SEQ ID NO: 2240976 - RNA, 19 nt, Artificial Sequence
  Description of Artificial Sequence: Synthetic oligonucleotide
aauuccaauaccuccacca

SEQ ID NO: 2240977 - RNA, 19 nt, Artificial Sequence
  Description of Artificial Sequence: Synthetic oligonucleotide
ugcuaaauaaucagugccg

SEQ ID NO: 2240978 - RNA, 19 nt, Artificial Sequence
  Description of Artificial Sequence: Synthetic oligonucleotide
ucuucauucaucuuacagc

SEQ ID NO: 2240979 - RNA, 19 nt, Artificial Sequence
  Description of Artificial Sequence: Synthetic oligonucleotide
acuacagagaaacaucuuc

SEQ ID NO: 2240980 - RNA, 19 nt, Artificial Sequence
  Description of Artificial Sequence: Synthetic oligonucleotide
uucuauaauuccaauaccu

SEQ ID NO: 2240981 - RNA, 19 nt, Artificial Sequence
  Description of Artificial Sequence: Synthetic oligonucleotide
uucuuuauaccauugacuc

SEQ ID NO: 2240982 - RNA, 19 nt, Artificial Sequence
  Description of Artificial Sequence: Synthetic oligonucleotide
aauaugaaagauguccauc

SEQ ID NO: 2240983 - RNA, 19 nt, Artificial Sequence
  Description of Artificial Sequence: Synthetic oligonucleotide
aucacagucucuuugaucu

SEQ ID NO: 2240984 - RNA, 19 nt, Artificial Sequence
  Description of Artificial Sequence: Synthetic oligonucleotide
ucugauuggauccagcaga

SEQ ID NO: 2240985 - RNA, 19 nt, Artificial Sequence
  Description of Artificial Sequence: Synthetic oligonucleotide
cuauaauuccaauaccucc

SEQ ID NO: 2240986 - RNA, 19 nt, Artificial Sequence
  Description of Artificial Sequence: Synthetic oligonucleotide
auuaacugcagcaucaaac

SEQ ID NO: 2240987 - RNA, 19 nt, Artificial Sequence
  Description of Artificial Sequence: Synthetic oligonucleotide
uuaacugcagcaucaaacc

SEQ ID NO: 2240988 - RNA, 19 nt, Artificial Sequence
  Description of Artificial Sequence: Synthetic oligonucleotide
gaaucuuugugcaaguagg

SEQ ID NO: 2240989 - RNA, 19 nt, Artificial Sequence
  Description of Artificial Sequence: Synthetic oligonucleotide
ugcaaguaggaaauguagg

SEQ ID NO: 2240990 - RNA, 19 nt, Artificial Sequence
  Description of Artificial Sequence: Synthetic oligonucleotide
accaucaaccaccugagac

SEQ ID NO: 2240991 - RNA, 19 nt, Artificial Sequence
  Description of Artificial Sequence: Synthetic oligonucleotide
uguaggguuuccuugauga

SEQ ID NO: 2240992 - RNA, 19 nt, Artificial Sequence
  Description of Artificial Sequence: Synthetic oligonucleotide
uccaccaucaaccaccuga

SEQ ID NO: 2240993 - RNA, 19 nt, Artificial Sequence
  Description of Artificial Sequence: Synthetic oligonucleotide
cuuuauaccauugacucag

SEQ ID NO: 2240994 - RNA, 19 nt, Artificial Sequence
  Description of Artificial Sequence: Synthetic oligonucleotide
uuugccagggccaauaaaa

SEQ ID NO: 2240995 - RNA, 19 nt, Artificial Sequence
  Description of Artificial Sequence: Synthetic oligonucleotide
guuuccuugaugaagauac

SEQ ID NO: 2240996 - RNA, 19 nt, Artificial Sequence
  Description of Artificial Sequence: Synthetic oligonucleotide
auugcuuuaguuugccagg

SEQ ID NO: 2240997 - RNA, 19 nt, Artificial Sequence
  Description of Artificial Sequence: Synthetic oligonucleotide
uccaauaccuccaccauca

SEQ ID NO: 2240998 - RNA, 19 nt, Artificial Sequence
  Description of Artificial Sequence: Synthetic oligonucleotide
aaagauguccauccacaag

SEQ ID NO: 2240999 - RNA, 19 nt, Artificial Sequence
  Description of Artificial Sequence: Synthetic oligonucleotide
ucaaaguaaacauccacuc

SEQ ID NO: 2241000 - RNA, 19 nt, Artificial Sequence
  Description of Artificial Sequence: Synthetic oligonucleotide
aaaucucucucuuguaaug

SEQ ID NO: 2241001 - RNA, 19 nt, Artificial Sequence
  Description of Artificial Sequence: Synthetic oligonucleotide
agucaaaccaggcauaccu

SEQ ID NO: 2241002 - RNA, 19 nt, Artificial Sequence
  Description of Artificial Sequence: Synthetic oligonucleotide
agaaucuuugugcaaguag

SEQ ID NO: 2241003 - RNA, 19 nt, Artificial Sequence
  Description of Artificial Sequence: Synthetic oligonucleotide
uccugaacuccaaucaggg

SEQ ID NO: 2241004 - RNA, 19 nt, Artificial Sequence
  Description of Artificial Sequence: Synthetic oligonucleotide
aaauaaucagugccggugu

SEQ ID NO: 2241005 - RNA, 19 nt, Artificial Sequence
  Description of Artificial Sequence: Synthetic oligonucleotide
aaauguaggguuuccuuga

SEQ ID NO: 2241006 - RNA, 19 nt, Artificial Sequence
  Description of Artificial Sequence: Synthetic oligonucleotide
agucucuuugaucuuuagc

SEQ ID NO: 2241007 - RNA, 19 nt, Artificial Sequence
  Description of Artificial Sequence: Synthetic oligonucleotide
uuccaauccauuuaucaca

SEQ ID NO: 2241008 - RNA, 19 nt, Artificial Sequence
  Description of Artificial Sequence: Synthetic oligonucleotide
uauaccauugacucagcug

SEQ ID NO: 2241009 - RNA, 19 nt, Artificial Sequence
  Description of Artificial Sequence: Synthetic oligonucleotide
uauuguacugggaaaucug

SEQ ID NO: 2241010 - RNA, 19 nt, Artificial Sequence
  Description of Artificial Sequence: Synthetic oligonucleotide
ugaacuccaaucagggaag

SEQ ID NO: 2241011 - RNA, 19 nt, Artificial Sequence
  Description of Artificial Sequence: Synthetic oligonucleotide
gugcuaaauaaucagugcc

SEQ ID NO: 2241012 - RNA, 19 nt, Artificial Sequence
  Description of Artificial Sequence: Synthetic oligonucleotide
uuuccaauccauuuaucac

SEQ ID NO: 2241013 - RNA, 19 nt, Artificial Sequence
  Description of Artificial Sequence: Synthetic oligonucleotide
ugauucucgaagcuguucu

SEQ ID NO: 2241014 - RNA, 19 nt, Artificial Sequence
  Description of Artificial Sequence: Synthetic oligonucleotide
uuccugaacuccaaucagg

SEQ ID NO: 2241015 - RNA, 19 nt, Artificial Sequence
  Description of Artificial Sequence: Synthetic oligonucleotide
auaauuccaauaccuccac

SEQ ID NO: 2241016 - RNA, 19 nt, Artificial Sequence
  Description of Artificial Sequence: Synthetic oligonucleotide
auaaggcacgucuuuauug

SEQ ID NO: 2241017 - RNA, 19 nt, Artificial Sequence
  Description of Artificial Sequence: Synthetic oligonucleotide
caaggugcuaaauaaucag

SEQ ID NO: 2241018 - RNA, 19 nt, Artificial Sequence
  Description of Artificial Sequence: Synthetic oligonucleotide
aagcagguggccaaucugc

SEQ ID NO: 2241019 - RNA, 19 nt, Artificial Sequence
  Description of Artificial Sequence: Synthetic oligonucleotide
uuuccugaacuccaaucag

SEQ ID NO: 2241020 - RNA, 19 nt, Artificial Sequence
  Description of Artificial Sequence: Synthetic oligonucleotide
acaaauucccaccacucug

SEQ ID NO: 2241021 - RNA, 19 nt, Artificial Sequence
  Description of Artificial Sequence: Synthetic oligonucleotide
aauuuguguguuugcucuc

SEQ ID NO: 2241022 - RNA, 19 nt, Artificial Sequence
  Description of Artificial Sequence: Synthetic oligonucleotide
ugacuuaucacuguaucac

SEQ ID NO: 2241023 - RNA, 19 nt, Artificial Sequence
  Description of Artificial Sequence: Synthetic oligonucleotide
ucuggauugcuucuacagc

SEQ ID NO: 2241024 - RNA, 19 nt, Artificial Sequence
  Description of Artificial Sequence: Synthetic oligonucleotide
augcagacgaucugcuucc

SEQ ID NO: 2241025 - RNA, 19 nt, Artificial Sequence
  Description of Artificial Sequence: Synthetic oligonucleotide
uccgacauugucaaaguaa

SEQ ID NO: 2241026 - RNA, 19 nt, Artificial Sequence
  Description of Artificial Sequence: Synthetic oligonucleotide
gaaaucugaccacacagga

SEQ ID NO: 2241027 - RNA, 19 nt, Artificial Sequence
  Description of Artificial Sequence: Synthetic oligonucleotide
gauucaucugacuuaucac

SEQ ID NO: 2241028 - RNA, 19 nt, Artificial Sequence
  Description of Artificial Sequence: Synthetic oligonucleotide
caaauucccaccacucugg

SEQ ID NO: 2241029 - RNA, 19 nt, Artificial Sequence
  Description of Artificial Sequence: Synthetic oligonucleotide
acucccauguuuuccaauc

SEQ ID NO: 2241030 - RNA, 19 nt, Artificial Sequence
  Description of Artificial Sequence: Synthetic oligonucleotide
uagcuuuccuucuuuauac

SEQ ID NO: 2241031 - RNA, 19 nt, Artificial Sequence
  Description of Artificial Sequence: Synthetic oligonucleotide
uccauccacaaguuguggg

SEQ ID NO: 2241032 - RNA, 19 nt, Artificial Sequence
  Description of Artificial Sequence: Synthetic oligonucleotide
uuugcucucuucuauaauu

SEQ ID NO: 2241033 - RNA, 19 nt, Artificial Sequence
  Description of Artificial Sequence: Synthetic oligonucleotide
aauccauuuaucacagucu

SEQ ID NO: 2241034 - RNA, 19 nt, Artificial Sequence
  Description of Artificial Sequence: Synthetic oligonucleotide
uccagaauugcuuuaguuu

SEQ ID NO: 2241035 - RNA, 19 nt, Artificial Sequence
  Description of Artificial Sequence: Synthetic oligonucleotide
aggaggauaaggcacgucu

SEQ ID NO: 2241036 - RNA, 19 nt, Artificial Sequence
  Description of Artificial Sequence: Synthetic oligonucleotide
caggcauaccuauagcucc

SEQ ID NO: 2241037 - RNA, 19 nt, Artificial Sequence
  Description of Artificial Sequence: Synthetic oligonucleotide
caaucagggaagucaaacc

SEQ ID NO: 2241038 - RNA, 19 nt, Artificial Sequence
  Description of Artificial Sequence: Synthetic oligonucleotide
ucacaaaaucaccucuggc

SEQ ID NO: 2241039 - RNA, 19 nt, Artificial Sequence
  Description of Artificial Sequence: Synthetic oligonucleotide
uuauaauuaacugcagcau

SEQ ID NO: 2241040 - RNA, 19 nt, Artificial Sequence
  Description of Artificial Sequence: Synthetic oligonucleotide
uaaggcacgucuuuauugu

SEQ ID NO: 2241041 - RNA, 19 nt, Artificial Sequence
  Description of Artificial Sequence: Synthetic oligonucleotide
uccacaaauucccaccacu

SEQ ID NO: 2241042 - RNA, 19 nt, Artificial Sequence
  Description of Artificial Sequence: Synthetic oligonucleotide
cugggcaugauucucgaag

SEQ ID NO: 2241043 - RNA, 19 nt, Artificial Sequence
  Description of Artificial Sequence: Synthetic oligonucleotide
uaugaaagauguccaucca

SEQ ID NO: 2241044 - RNA, 19 nt, Artificial Sequence
  Description of Artificial Sequence: Synthetic oligonucleotide
ucuuuauuguacugggaaa

SEQ ID NO: 2241045 - RNA, 19 nt, Artificial Sequence
  Description of Artificial Sequence: Synthetic oligonucleotide
gucacaaaaucaccucugg

SEQ ID NO: 2241046 - RNA, 19 nt, Artificial Sequence
  Description of Artificial Sequence: Synthetic oligonucleotide
agauacacaaagacuacag

SEQ ID NO: 2241047 - RNA, 19 nt, Artificial Sequence
  Description of Artificial Sequence: Synthetic oligonucleotide
ucaaccaccugagacagcu

SEQ ID NO: 2241048 - RNA, 19 nt, Artificial Sequence
  Description of Artificial Sequence: Synthetic oligonucleotide
cucuggaacagccaagcag

SEQ ID NO: 2241049 - RNA, 19 nt, Artificial Sequence
  Description of Artificial Sequence: Synthetic oligonucleotide
agcuuuccuucuuuauacc

SEQ ID NO: 2241050 - RNA, 19 nt, Artificial Sequence
  Description of Artificial Sequence: Synthetic oligonucleotide
aucacugaugucuccuccg

SEQ ID NO: 2241051 - RNA, 19 nt, Artificial Sequence
  Description of Artificial Sequence: Synthetic oligonucleotide
uaacugcagcaucaaaccc

SEQ ID NO: 2241052 - RNA, 19 nt, Artificial Sequence
  Description of Artificial Sequence: Synthetic oligonucleotide
gaagucacaaaaucaccuc

SEQ ID NO: 2241053 - RNA, 19 nt, Artificial Sequence
  Description of Artificial Sequence: Synthetic oligonucleotide
uuauuguacugggaaaucu

SEQ ID NO: 2241054 - RNA, 19 nt, Artificial Sequence
  Description of Artificial Sequence: Synthetic oligonucleotide
uccuccgacauugucaaag

SEQ ID NO: 2241055 - RNA, 19 nt, Artificial Sequence
  Description of Artificial Sequence: Synthetic oligonucleotide
ucuuuauaccauugacuca

SEQ ID NO: 2241056 - RNA, 19 nt, Artificial Sequence
  Description of Artificial Sequence: Synthetic oligonucleotide
uaucacugaugucuccucc

SEQ ID NO: 2241057 - RNA, 19 nt, Artificial Sequence
  Description of Artificial Sequence: Synthetic oligonucleotide
ugugcaaguaggaaaugua

SEQ ID NO: 2241058 - RNA, 19 nt, Artificial Sequence
  Description of Artificial Sequence: Synthetic oligonucleotide
acagagaaacaucuucuga

SEQ ID NO: 2241059 - RNA, 19 nt, Artificial Sequence
  Description of Artificial Sequence: Synthetic oligonucleotide
uguccauccacaaguugug

SEQ ID NO: 2241060 - RNA, 19 nt, Artificial Sequence
  Description of Artificial Sequence: Synthetic oligonucleotide
auugacucagcuguagcag

SEQ ID NO: 2241061 - RNA, 19 nt, Artificial Sequence
  Description of Artificial Sequence: Synthetic oligonucleotide
uaacacaguaaaucucucu

SEQ ID NO: 2241062 - RNA, 19 nt, Artificial Sequence
  Description of Artificial Sequence: Synthetic oligonucleotide
guacugggaaaucugacca

SEQ ID NO: 2241063 - RNA, 19 nt, Artificial Sequence
  Description of Artificial Sequence: Synthetic oligonucleotide
ugggcaugauucucgaagc

SEQ ID NO: 2241064 - RNA, 19 nt, Artificial Sequence
  Description of Artificial Sequence: Synthetic oligonucleotide
accaggcauaccuauagcu

SEQ ID NO: 2241065 - RNA, 19 nt, Artificial Sequence
  Description of Artificial Sequence: Synthetic oligonucleotide
uagcuccaagaaaauauga

SEQ ID NO: 2241066 - RNA, 19 nt, Artificial Sequence
  Description of Artificial Sequence: Synthetic oligonucleotide
gauuggauccagcagauau

SEQ ID NO: 2241067 - RNA, 19 nt, Artificial Sequence
  Description of Artificial Sequence: Synthetic oligonucleotide
aaugcaacucccauguuuu

SEQ ID NO: 2241068 - RNA, 19 nt, Artificial Sequence
  Description of Artificial Sequence: Synthetic oligonucleotide
caaauuuguguguuugcuc

SEQ ID NO: 2241069 - RNA, 19 nt, Artificial Sequence
  Description of Artificial Sequence: Synthetic oligonucleotide
uuauaccauugacucagcu

SEQ ID NO: 2241070 - RNA, 19 nt, Artificial Sequence
  Description of Artificial Sequence: Synthetic oligonucleotide
cauaccuauagcuccaaga

SEQ ID NO: 2241071 - RNA, 19 nt, Artificial Sequence
  Description of Artificial Sequence: Synthetic oligonucleotide
acuccaaucagggaaguca

SEQ ID NO: 2241072 - RNA, 19 nt, Artificial Sequence
  Description of Artificial Sequence: Synthetic oligonucleotide
uucaucuuacagcgcaugu

SEQ ID NO: 2241073 - RNA, 19 nt, Artificial Sequence
  Description of Artificial Sequence: Synthetic oligonucleotide
ugugggucuaccuuuucaa

SEQ ID NO: 2241074 - RNA, 19 nt, Artificial Sequence
  Description of Artificial Sequence: Synthetic oligonucleotide
cuggauugcuucuacagca

SEQ ID NO: 2241075 - RNA, 19 nt, Artificial Sequence
  Description of Artificial Sequence: Synthetic oligonucleotide
aaguaaacauccacuccag

SEQ ID NO: 2241076 - RNA, 19 nt, Artificial Sequence
  Description of Artificial Sequence: Synthetic oligonucleotide
cuuuucaaggccauuccca

SEQ ID NO: 2241077 - RNA, 19 nt, Artificial Sequence
  Description of Artificial Sequence: Synthetic oligonucleotide
ccagaauugcuuuaguuug

SEQ ID NO: 2241078 - RNA, 19 nt, Artificial Sequence
  Description of Artificial Sequence: Synthetic oligonucleotide
accuauagcuccaagaaaa

SEQ ID NO: 2241079 - RNA, 19 nt, Artificial Sequence
  Description of Artificial Sequence: Synthetic oligonucleotide
uaagaaucuuugugcaagu

SEQ ID NO: 2241080 - RNA, 19 nt, Artificial Sequence
  Description of Artificial Sequence: Synthetic oligonucleotide
uaauuccaauaccuccacc

SEQ ID NO: 2241081 - RNA, 19 nt, Artificial Sequence
  Description of Artificial Sequence: Synthetic oligonucleotide
uugcucucuucuauaauuc

SEQ ID NO: 2241082 - RNA, 19 nt, Artificial Sequence
  Description of Artificial Sequence: Synthetic oligonucleotide
ggugcuaaauaaucagugc

SEQ ID NO: 2241083 - RNA, 19 nt, Artificial Sequence
  Description of Artificial Sequence: Synthetic oligonucleotide
ucaaaccaggcauaccuau

SEQ ID NO: 2241084 - RNA, 19 nt, Artificial Sequence
  Description of Artificial Sequence: Synthetic oligonucleotide
uuggauccagcagauaugu

SEQ ID NO: 2241085 - RNA, 19 nt, Artificial Sequence
  Description of Artificial Sequence: Synthetic oligonucleotide
gauccagcagauaugugac

SEQ ID NO: 2241086 - RNA, 19 nt, Artificial Sequence
  Description of Artificial Sequence: Synthetic oligonucleotide
uuugaucuuuagcuuuccu

SEQ ID NO: 2241087 - RNA, 19 nt, Artificial Sequence
  Description of Artificial Sequence: Synthetic oligonucleotide
uugcuuuaguuugccaggg

SEQ ID NO: 2241088 - RNA, 19 nt, Artificial Sequence
  Description of Artificial Sequence: Synthetic oligonucleotide
uguuugcucucuucuauaa

SEQ ID NO: 2241089 - RNA, 19 nt, Artificial Sequence
  Description of Artificial Sequence: Synthetic oligonucleotide
cagaauugcuuuaguuugc

SEQ ID NO: 2241090 - RNA, 19 nt, Artificial Sequence
  Description of Artificial Sequence: Synthetic oligonucleotide
uucccuauguugccuccgg

SEQ ID NO: 2241091 - RNA, 19 nt, Artificial Sequence
  Description of Artificial Sequence: Synthetic oligonucleotide
guugccuccggucaucaug

SEQ ID NO: 2241092 - RNA, 19 nt, Artificial Sequence
  Description of Artificial Sequence: Synthetic oligonucleotide
aggugcuaaauaaucagug

SEQ ID NO: 2241093 - RNA, 19 nt, Artificial Sequence
  Description of Artificial Sequence: Synthetic oligonucleotide
cagagaaacaucuucugaa

SEQ ID NO: 2241094 - RNA, 19 nt, Artificial Sequence
  Description of Artificial Sequence: Synthetic oligonucleotide
ucuccuccgacauugucaa

SEQ ID NO: 2241095 - RNA, 19 nt, Artificial Sequence
  Description of Artificial Sequence: Synthetic oligonucleotide
gaagauacacaaagacuac

SEQ ID NO: 2241096 - RNA, 19 nt, Artificial Sequence
  Description of Artificial Sequence: Synthetic oligonucleotide
gcuaaauaaucagugccgg

SEQ ID NO: 2241097 - RNA, 19 nt, Artificial Sequence
  Description of Artificial Sequence: Synthetic oligonucleotide
uuuauaccauugacucagc

SEQ ID NO: 2241098 - RNA, 19 nt, Artificial Sequence
  Description of Artificial Sequence: Synthetic oligonucleotide
uaucacagucucuuugauc

SEQ ID NO: 2241099 - RNA, 19 nt, Artificial Sequence
  Description of Artificial Sequence: Synthetic oligonucleotide
uaccuauagcuccaagaaa

SEQ ID NO: 2241100 - RNA, 19 nt, Artificial Sequence
  Description of Artificial Sequence: Synthetic oligonucleotide
auagcuccaagaaaauaug

SEQ ID NO: 2241101 - RNA, 19 nt, Artificial Sequence
  Description of Artificial Sequence: Synthetic oligonucleotide
ugcaacucccauguuuucc

SEQ ID NO: 2241102 - RNA, 19 nt, Artificial Sequence
  Description of Artificial Sequence: Synthetic oligonucleotide
auggacuggaaugcaacuc

SEQ ID NO: 2241103 - RNA, 19 nt, Artificial Sequence
  Description of Artificial Sequence: Synthetic oligonucleotide
aauguaggguuuccuugau

SEQ ID NO: 2241104 - RNA, 19 nt, Artificial Sequence
  Description of Artificial Sequence: Synthetic oligonucleotide
gucugauuggauccagcag

SEQ ID NO: 2241105 - RNA, 19 nt, Artificial Sequence
  Description of Artificial Sequence: Synthetic oligonucleotide
uuccaauaccuccaccauc

SEQ ID NO: 2241106 - RNA, 19 nt, Artificial Sequence
  Description of Artificial Sequence: Synthetic oligonucleotide
caucaaccaccugagacag

SEQ ID NO: 2241107 - RNA, 19 nt, Artificial Sequence
  Description of Artificial Sequence: Synthetic oligonucleotide
ucuaccuuuucaaggccau

SEQ ID NO: 2241108 - RNA, 19 nt, Artificial Sequence
  Description of Artificial Sequence: Synthetic oligonucleotide
uucugaaaugcagacgauc

SEQ ID NO: 2241109 - RNA, 19 nt, Artificial Sequence
  Description of Artificial Sequence: Synthetic oligonucleotide
gaagucaaaccaggcauac

SEQ ID NO: 2241110 - RNA, 19 nt, Artificial Sequence
  Description of Artificial Sequence: Synthetic oligonucleotide
acuuaucacuguaucacug

SEQ ID NO: 2241111 - RNA, 19 nt, Artificial Sequence
  Description of Artificial Sequence: Synthetic oligonucleotide
auguuuuccaauccauuua

SEQ ID NO: 2241112 - RNA, 19 nt, Artificial Sequence
  Description of Artificial Sequence: Synthetic oligonucleotide
ucucuuugaucuuuagcuu

SEQ ID NO: 2241113 - RNA, 19 nt, Artificial Sequence
  Description of Artificial Sequence: Synthetic oligonucleotide
cuucuuuauaccauugacu

SEQ ID NO: 2241114 - RNA, 19 nt, Artificial Sequence
  Description of Artificial Sequence: Synthetic oligonucleotide
uugacucagcuguagcagu

SEQ ID NO: 2241115 - RNA, 19 nt, Artificial Sequence
  Description of Artificial Sequence: Synthetic oligonucleotide
gaaagauguccauccacaa

SEQ ID NO: 2241116 - RNA, 19 nt, Artificial Sequence
  Description of Artificial Sequence: Synthetic oligonucleotide
ucacugaugucuccuccga

SEQ ID NO: 2241117 - RNA, 19 nt, Artificial Sequence
  Description of Artificial Sequence: Synthetic oligonucleotide
cucuggccaaauuugugug

SEQ ID NO: 2241118 - RNA, 19 nt, Artificial Sequence
  Description of Artificial Sequence: Synthetic oligonucleotide
uaccuuuucaaggccauuc

SEQ ID NO: 2241119 - RNA, 19 nt, Artificial Sequence
  Description of Artificial Sequence: Synthetic oligonucleotide
cauugacucagcuguagca

SEQ ID NO: 2241120 - RNA, 19 nt, Artificial Sequence
  Description of Artificial Sequence: Synthetic oligonucleotide
gggucuaccuuuucaaggc

SEQ ID NO: 2241121 - RNA, 19 nt, Artificial Sequence
  Description of Artificial Sequence: Synthetic oligonucleotide
cugacuuaucacuguauca

SEQ ID NO: 2241122 - RNA, 19 nt, Artificial Sequence
  Description of Artificial Sequence: Synthetic oligonucleotide
uucucgaagcuguucugcu

SEQ ID NO: 2241123 - RNA, 19 nt, Artificial Sequence
  Description of Artificial Sequence: Synthetic oligonucleotide
ucuggccaaauuugugugu

SEQ ID NO: 2241124 - RNA, 19 nt, Artificial Sequence
  Description of Artificial Sequence: Synthetic oligonucleotide
ucucucuuguaauguuucu

SEQ ID NO: 2241125 - RNA, 19 nt, Artificial Sequence
  Description of Artificial Sequence: Synthetic oligonucleotide
aggcacgucuuuauuguac

SEQ ID NO: 2241126 - RNA, 19 nt, Artificial Sequence
  Description of Artificial Sequence: Synthetic oligonucleotide
agcggaggaggauaaggca

SEQ ID NO: 2241127 - RNA, 19 nt, Artificial Sequence
  Description of Artificial Sequence: Synthetic oligonucleotide
auccagaauugcuuuaguu

SEQ ID NO: 2241128 - RNA, 19 nt, Artificial Sequence
  Description of Artificial Sequence: Synthetic oligonucleotide
uuccgauucaucugacuua

SEQ ID NO: 2241129 - RNA, 19 nt, Artificial Sequence
  Description of Artificial Sequence: Synthetic oligonucleotide
ugcuuuaguuugccagggc

SEQ ID NO: 2241130 - RNA, 19 nt, Artificial Sequence
  Description of Artificial Sequence: Synthetic oligonucleotide
aaaaucaccucuggccaaa

SEQ ID NO: 2241131 - RNA, 19 nt, Artificial Sequence
  Description of Artificial Sequence: Synthetic oligonucleotide
uccgauucaucugacuuau

SEQ ID NO: 2241132 - RNA, 19 nt, Artificial Sequence
  Description of Artificial Sequence: Synthetic oligonucleotide
cacuguaucacugaugucu

SEQ ID NO: 2241133 - RNA, 19 nt, Artificial Sequence
  Description of Artificial Sequence: Synthetic oligonucleotide
aaccccaguucugauguca

SEQ ID NO: 2241134 - RNA, 19 nt, Artificial Sequence
  Description of Artificial Sequence: Synthetic oligonucleotide
cuuguaauguuucuuuccu

SEQ ID NO: 2241135 - RNA, 19 nt, Artificial Sequence
  Description of Artificial Sequence: Synthetic oligonucleotide
gugggucuaccuuuucaag

SEQ ID NO: 2241136 - RNA, 19 nt, Artificial Sequence
  Description of Artificial Sequence: Synthetic oligonucleotide
aaaucugaccacacaggau

SEQ ID NO: 2241137 - RNA, 19 nt, Artificial Sequence
  Description of Artificial Sequence: Synthetic oligonucleotide
ucucuucuauaauuccaau

SEQ ID NO: 2241138 - RNA, 19 nt, Artificial Sequence
  Description of Artificial Sequence: Synthetic oligonucleotide
caauaccuccaccaucaac

SEQ ID NO: 2241139 - RNA, 19 nt, Artificial Sequence
  Description of Artificial Sequence: Synthetic oligonucleotide
ugcuccacugacaaccauu

SEQ ID NO: 2241140 - RNA, 19 nt, Artificial Sequence
  Description of Artificial Sequence: Synthetic oligonucleotide
uaauuaacugcagcaucaa

SEQ ID NO: 2241141 - RNA, 19 nt, Artificial Sequence
  Description of Artificial Sequence: Synthetic oligonucleotide
acgaucugcuucccuaugu

SEQ ID NO: 2241142 - RNA, 19 nt, Artificial Sequence
  Description of Artificial Sequence: Synthetic oligonucleotide
aacucccauguuuuccaau

SEQ ID NO: 2241143 - RNA, 19 nt, Artificial Sequence
  Description of Artificial Sequence: Synthetic oligonucleotide
cuuugugcaaguaggaaau

SEQ ID NO: 2241144 - RNA, 19 nt, Artificial Sequence
  Description of Artificial Sequence: Synthetic oligonucleotide
uuugugcaaguaggaaaug

SEQ ID NO: 2241145 - RNA, 19 nt, Artificial Sequence
  Description of Artificial Sequence: Synthetic oligonucleotide
uacugggaaaucugaccac

SEQ ID NO: 2241146 - RNA, 19 nt, Artificial Sequence
  Description of Artificial Sequence: Synthetic oligonucleotide
ugcccagccaaagauccgc

SEQ ID NO: 2241147 - RNA, 19 nt, Artificial Sequence
  Description of Artificial Sequence: Synthetic oligonucleotide
auaaucagugccggugucu

SEQ ID NO: 2241148 - RNA, 19 nt, Artificial Sequence
  Description of Artificial Sequence: Synthetic oligonucleotide
uggccaaucugcccagcca

SEQ ID NO: 2241149 - RNA, 19 nt, Artificial Sequence
  Description of Artificial Sequence: Synthetic oligonucleotide
cugccaaggugcuaaauaa

SEQ ID NO: 2241150 - RNA, 19 nt, Artificial Sequence
  Description of Artificial Sequence: Synthetic oligonucleotide
auuuguguguuugcucucu

SEQ ID NO: 2241151 - RNA, 19 nt, Artificial Sequence
  Description of Artificial Sequence: Synthetic oligonucleotide
auugucugauuggauccag

SEQ ID NO: 2241152 - RNA, 19 nt, Artificial Sequence
  Description of Artificial Sequence: Synthetic oligonucleotide
auucccauccagaauugcu

SEQ ID NO: 2241153 - RNA, 19 nt, Artificial Sequence
  Description of Artificial Sequence: Synthetic oligonucleotide
ucaucuuacagcgcaugua

SEQ ID NO: 2241154 - RNA, 19 nt, Artificial Sequence
  Description of Artificial Sequence: Synthetic oligonucleotide
aucagugccggugucuuca

SEQ ID NO: 2241155 - RNA, 19 nt, Artificial Sequence
  Description of Artificial Sequence: Synthetic oligonucleotide
auguaggguuuccuugaug

SEQ ID NO: 2241156 - RNA, 19 nt, Artificial Sequence
  Description of Artificial Sequence: Synthetic oligonucleotide
cucuucuauaauuccaaua

SEQ ID NO: 2241157 - RNA, 19 nt, Artificial Sequence
  Description of Artificial Sequence: Synthetic oligonucleotide
gugucuucauucaucuuac

SEQ ID NO: 2241158 - RNA, 19 nt, Artificial Sequence
  Description of Artificial Sequence: Synthetic oligonucleotide
cuuugaucuuuagcuuucc

SEQ ID NO: 2241159 - RNA, 19 nt, Artificial Sequence
  Description of Artificial Sequence: Synthetic oligonucleotide
accauugacucagcuguag

SEQ ID NO: 2241160 - RNA, 19 nt, Artificial Sequence
  Description of Artificial Sequence: Synthetic oligonucleotide
uuucaaggccauucccauc

SEQ ID NO: 2241161 - RNA, 19 nt, Artificial Sequence
  Description of Artificial Sequence: Synthetic oligonucleotide
augcaacucccauguuuuc

SEQ ID NO: 2241162 - RNA, 19 nt, Artificial Sequence
  Description of Artificial Sequence: Synthetic oligonucleotide
uuguguguuugcucucuuc

SEQ ID NO: 2241163 - RNA, 19 nt, Artificial Sequence
  Description of Artificial Sequence: Synthetic oligonucleotide
aagaaucuuugugcaagua

SEQ ID NO: 2241164 - RNA, 19 nt, Artificial Sequence
  Description of Artificial Sequence: Synthetic oligonucleotide
gacuuaucacuguaucacu

SEQ ID NO: 2241165 - RNA, 19 nt, Artificial Sequence
  Description of Artificial Sequence: Synthetic oligonucleotide
cacugacaaccauugucug

SEQ ID NO: 2241166 - RNA, 19 nt, Artificial Sequence
  Description of Artificial Sequence: Synthetic oligonucleotide
gacgaucugcuucccuaug

SEQ ID NO: 2241167 - RNA, 19 nt, Artificial Sequence
  Description of Artificial Sequence: Synthetic oligonucleotide
cucagcuguagcaguccag

SEQ ID NO: 2241168 - RNA, 19 nt, Artificial Sequence
  Description of Artificial Sequence: Synthetic oligonucleotide
auccacuccagcugggcau

SEQ ID NO: 2241169 - RNA, 19 nt, Artificial Sequence
  Description of Artificial Sequence: Synthetic oligonucleotide
caguaaaucucucucuugu

SEQ ID NO: 2241170 - RNA, 19 nt, Artificial Sequence
  Description of Artificial Sequence: Synthetic oligonucleotide
cacaaguugugggucuacc

SEQ ID NO: 2241171 - RNA, 19 nt, Artificial Sequence
  Description of Artificial Sequence: Synthetic oligonucleotide
guaucacugaugucuccuc

SEQ ID NO: 2241172 - RNA, 19 nt, Artificial Sequence
  Description of Artificial Sequence: Synthetic oligonucleotide
aaggcacgucuuuauugua

SEQ ID NO: 2241173 - RNA, 19 nt, Artificial Sequence
  Description of Artificial Sequence: Synthetic oligonucleotide
uggauccagcagauaugug

SEQ ID NO: 2241174 - RNA, 19 nt, Artificial Sequence
  Description of Artificial Sequence: Synthetic oligonucleotide
gcuguuccgauucaucuga

SEQ ID NO: 2241175 - RNA, 19 nt, Artificial Sequence
  Description of Artificial Sequence: Synthetic oligonucleotide
cuccggucaucauggacug

SEQ ID NO: 2241176 - RNA, 19 nt, Artificial Sequence
  Description of Artificial Sequence: Synthetic oligonucleotide
aaucaccucuggccaaauu

SEQ ID NO: 2241177 - RNA, 19 nt, Artificial Sequence
  Description of Artificial Sequence: Synthetic oligonucleotide
agacgaucugcuucccuau

SEQ ID NO: 2241178 - RNA, 19 nt, Artificial Sequence
  Description of Artificial Sequence: Synthetic oligonucleotide
aucugcccagccaaagauc

SEQ ID NO: 2241179 - RNA, 19 nt, Artificial Sequence
  Description of Artificial Sequence: Synthetic oligonucleotide
aucuuugugcaaguaggaa

SEQ ID NO: 2241180 - RNA, 19 nt, Artificial Sequence
  Description of Artificial Sequence: Synthetic oligonucleotide
ggaugauguggcuguuccg

SEQ ID NO: 2241181 - RNA, 19 nt, Artificial Sequence
  Description of Artificial Sequence: Synthetic oligonucleotide
guaggaaauguaggguuuc

SEQ ID NO: 2241182 - RNA, 19 nt, Artificial Sequence
  Description of Artificial Sequence: Synthetic oligonucleotide
guuccgauucaucugacuu

SEQ ID NO: 2241183 - RNA, 19 nt, Artificial Sequence
  Description of Artificial Sequence: Synthetic oligonucleotide
caaagacuacagagaaaca

SEQ ID NO: 2241184 - RNA, 19 nt, Artificial Sequence
  Description of Artificial Sequence: Synthetic oligonucleotide
ucucgaagcuguucugcua

SEQ ID NO: 2241185 - RNA, 19 nt, Artificial Sequence
  Description of Artificial Sequence: Synthetic oligonucleotide
uuuguguguuugcucucuu

SEQ ID NO: 2241186 - RNA, 19 nt, Artificial Sequence
  Description of Artificial Sequence: Synthetic oligonucleotide
ccaaucagggaagucaaac

SEQ ID NO: 2241187 - RNA, 19 nt, Artificial Sequence
  Description of Artificial Sequence: Synthetic oligonucleotide
ugcuucccuauguugccuc

SEQ ID NO: 2241188 - RNA, 19 nt, Artificial Sequence
  Description of Artificial Sequence: Synthetic oligonucleotide
uggaacagccaagcaggug

SEQ ID NO: 2241189 - RNA, 19 nt, Artificial Sequence
  Description of Artificial Sequence: Synthetic oligonucleotide
gcagcggaggaggauaagg

SEQ ID NO: 2241190 - RNA, 19 nt, Artificial Sequence
  Description of Artificial Sequence: Synthetic oligonucleotide
uaguuugccagggccaaua

SEQ ID NO: 2241191 - RNA, 19 nt, Artificial Sequence
  Description of Artificial Sequence: Synthetic oligonucleotide
guggccaaucugcccagcc

SEQ ID NO: 2241192 - RNA, 19 nt, Artificial Sequence
  Description of Artificial Sequence: Synthetic oligonucleotide
cuucccuauguugccuccg

SEQ ID NO: 2241193 - RNA, 19 nt, Artificial Sequence
  Description of Artificial Sequence: Synthetic oligonucleotide
caucaaaccccaguucuga

SEQ ID NO: 2241194 - RNA, 19 nt, Artificial Sequence
  Description of Artificial Sequence: Synthetic oligonucleotide
ggcaugauucucgaagcug

SEQ ID NO: 2241195 - RNA, 19 nt, Artificial Sequence
  Description of Artificial Sequence: Synthetic oligonucleotide
ggccaaauuuguguguuug

SEQ ID NO: 2241196 - RNA, 19 nt, Artificial Sequence
  Description of Artificial Sequence: Synthetic oligonucleotide
ccaggcauaccuauagcuc

SEQ ID NO: 2241197 - RNA, 19 nt, Artificial Sequence
  Description of Artificial Sequence: Synthetic oligonucleotide
ccaaggugcuaaauaauca

SEQ ID NO: 2241198 - RNA, 19 nt, Artificial Sequence
  Description of Artificial Sequence: Synthetic oligonucleotide
augauguggcuguuccgau

SEQ ID NO: 2241199 - RNA, 19 nt, Artificial Sequence
  Description of Artificial Sequence: Synthetic oligonucleotide
caaggccauucccauccag

SEQ ID NO: 2241200 - RNA, 19 nt, Artificial Sequence
  Description of Artificial Sequence: Synthetic oligonucleotide
ggucuaccuuuucaaggcc

SEQ ID NO: 2241201 - RNA, 19 nt, Artificial Sequence
  Description of Artificial Sequence: Synthetic oligonucleotide
ucccuauguugccuccggu

SEQ ID NO: 2241202 - RNA, 19 nt, Artificial Sequence
  Description of Artificial Sequence: Synthetic oligonucleotide
gcaacucccauguuuucca

SEQ ID NO: 2241203 - RNA, 19 nt, Artificial Sequence
  Description of Artificial Sequence: Synthetic oligonucleotide
ccaucaaccaccugagaca

SEQ ID NO: 2241204 - RNA, 19 nt, Artificial Sequence
  Description of Artificial Sequence: Synthetic oligonucleotide
uauguugccuccggucauc

SEQ ID NO: 2241205 - RNA, 19 nt, Artificial Sequence
  Description of Artificial Sequence: Synthetic oligonucleotide
caaucugcccagccaaaga

SEQ ID NO: 2241206 - RNA, 19 nt, Artificial Sequence
  Description of Artificial Sequence: Synthetic oligonucleotide
aaccauugucugauuggau

SEQ ID NO: 2241207 - RNA, 19 nt, Artificial Sequence
  Description of Artificial Sequence: Synthetic oligonucleotide
gccaaggugcuaaauaauc

SEQ ID NO: 2241208 - RNA, 19 nt, Artificial Sequence
  Description of Artificial Sequence: Synthetic oligonucleotide
agcugggcaugauucucga

SEQ ID NO: 2241209 - RNA, 19 nt, Artificial Sequence
  Description of Artificial Sequence: Synthetic oligonucleotide
cuaaauaaucagugccggu

SEQ ID NO: 2241210 - RNA, 19 nt, Artificial Sequence
  Description of Artificial Sequence: Synthetic oligonucleotide
gauccgcaggcaccugcug

SEQ ID NO: 2241211 - RNA, 19 nt, Artificial Sequence
  Description of Artificial Sequence: Synthetic oligonucleotide
aaagauccgcaggcaccug

SEQ ID NO: 2241212 - RNA, 19 nt, Artificial Sequence
  Description of Artificial Sequence: Synthetic oligonucleotide
ucuuuccuucuggauugcu

SEQ ID NO: 2241213 - RNA, 19 nt, Artificial Sequence
  Description of Artificial Sequence: Synthetic oligonucleotide
ucacuguaucacugauguc

SEQ ID NO: 2241214 - RNA, 19 nt, Artificial Sequence
  Description of Artificial Sequence: Synthetic oligonucleotide
uaccauugacucagcugua

SEQ ID NO: 2241215 - RNA, 19 nt, Artificial Sequence
  Description of Artificial Sequence: Synthetic oligonucleotide
uguggcuguuccgauucau

SEQ ID NO: 2241216 - RNA, 19 nt, Artificial Sequence
  Description of Artificial Sequence: Synthetic oligonucleotide
agguggccaaucugcccag

SEQ ID NO: 2241217 - RNA, 19 nt, Artificial Sequence
  Description of Artificial Sequence: Synthetic oligonucleotide
ccgacauugucaaaguaaa

SEQ ID NO: 2241218 - RNA, 19 nt, Artificial Sequence
  Description of Artificial Sequence: Synthetic oligonucleotide
gaggauaaggcacgucuuu

SEQ ID NO: 2241219 - RNA, 19 nt, Artificial Sequence
  Description of Artificial Sequence: Synthetic oligonucleotide
guuugccagggccaauaaa

SEQ ID NO: 2241220 - RNA, 19 nt, Artificial Sequence
  Description of Artificial Sequence: Synthetic oligonucleotide
aguccaggcugaaauuuau

SEQ ID NO: 2241221 - RNA, 19 nt, Artificial Sequence
  Description of Artificial Sequence: Synthetic oligonucleotide
aaaucaccucuggccaaau

SEQ ID NO: 2241222 - RNA, 19 nt, Artificial Sequence
  Description of Artificial Sequence: Synthetic oligonucleotide
aucugaccacacaggauga

SEQ ID NO: 2241223 - RNA, 19 nt, Artificial Sequence
  Description of Artificial Sequence: Synthetic oligonucleotide
ccuauguugccuccgguca

SEQ ID NO: 2241224 - RNA, 19 nt, Artificial Sequence
  Description of Artificial Sequence: Synthetic oligonucleotide
aucaaccaccugagacagc

SEQ ID NO: 2241225 - RNA, 19 nt, Artificial Sequence
  Description of Artificial Sequence: Synthetic oligonucleotide
caaaccaggcauaccuaua

SEQ ID NO: 2241226 - RNA, 19 nt, Artificial Sequence
  Description of Artificial Sequence: Synthetic oligonucleotide
cauccacuccagcugggca

SEQ ID NO: 2241227 - RNA, 19 nt, Artificial Sequence
  Description of Artificial Sequence: Synthetic oligonucleotide
guguuugcucucuucuaua

SEQ ID NO: 2241228 - RNA, 19 nt, Artificial Sequence
  Description of Artificial Sequence: Synthetic oligonucleotide
gccauucccauccagaauu

SEQ ID NO: 2241229 - RNA, 19 nt, Artificial Sequence
  Description of Artificial Sequence: Synthetic oligonucleotide
gcauaccuauagcuccaag

SEQ ID NO: 2241230 - RNA, 19 nt, Artificial Sequence
  Description of Artificial Sequence: Synthetic oligonucleotide
ggaaauguaggguuuccuu

SEQ ID NO: 2241231 - RNA, 19 nt, Artificial Sequence
  Description of Artificial Sequence: Synthetic oligonucleotide
guguguuugcucucuucua

SEQ ID NO: 2241232 - RNA, 19 nt, Artificial Sequence
  Description of Artificial Sequence: Synthetic oligonucleotide
gugccggugucuucauuca

SEQ ID NO: 2241233 - RNA, 19 nt, Artificial Sequence
  Description of Artificial Sequence: Synthetic oligonucleotide
guugugggucuaccuuuuc

SEQ ID NO: 2241234 - RNA, 19 nt, Artificial Sequence
  Description of Artificial Sequence: Synthetic oligonucleotide
uggccaaauuuguguguuu

SEQ ID NO: 2241235 - RNA, 19 nt, Artificial Sequence
  Description of Artificial Sequence: Synthetic oligonucleotide
uccggucaucauggacugg

SEQ ID NO: 2241236 - RNA, 19 nt, Artificial Sequence
  Description of Artificial Sequence: Synthetic oligonucleotide
cacaguaaaucucucucuu

SEQ ID NO: 2241237 - RNA, 19 nt, Artificial Sequence
  Description of Artificial Sequence: Synthetic oligonucleotide
caaguugugggucuaccuu

SEQ ID NO: 2241238 - RNA, 19 nt, Artificial Sequence
  Description of Artificial Sequence: Synthetic oligonucleotide
gcacgucuuuauuguacug

SEQ ID NO: 2241239 - RNA, 19 nt, Artificial Sequence
  Description of Artificial Sequence: Synthetic oligonucleotide
ugcagacgaucugcuuccc

SEQ ID NO: 2241240 - RNA, 19 nt, Artificial Sequence
  Description of Artificial Sequence: Synthetic oligonucleotide
agauccgcaggcaccugcu

SEQ ID NO: 2241241 - RNA, 19 nt, Artificial Sequence
  Description of Artificial Sequence: Synthetic oligonucleotide
gaggcauuucucauguguu

SEQ ID NO: 2241242 - RNA, 19 nt, Artificial Sequence
  Description of Artificial Sequence: Synthetic oligonucleotide
caccugcugcuccacugac

SEQ ID NO: 2241243 - RNA, 19 nt, Artificial Sequence
  Description of Artificial Sequence: Synthetic oligonucleotide
guggcuguuccgauucauc

SEQ ID NO: 2241244 - RNA, 19 nt, Artificial Sequence
  Description of Artificial Sequence: Synthetic oligonucleotide
cccuauguugccuccgguc

SEQ ID NO: 2241245 - RNA, 19 nt, Artificial Sequence
  Description of Artificial Sequence: Synthetic oligonucleotide
cugauuggauccagcagau

SEQ ID NO: 2241246 - RNA, 19 nt, Artificial Sequence
  Description of Artificial Sequence: Synthetic oligonucleotide
caaccaccugagacagcug

SEQ ID NO: 2241247 - RNA, 19 nt, Artificial Sequence
  Description of Artificial Sequence: Synthetic oligonucleotide
ugauuggauccagcagaua

SEQ ID NO: 2241248 - RNA, 19 nt, Artificial Sequence
  Description of Artificial Sequence: Synthetic oligonucleotide
gcaugauucucgaagcugu

SEQ ID NO: 2241249 - RNA, 19 nt, Artificial Sequence
  Description of Artificial Sequence: Synthetic oligonucleotide
gcuucccuauguugccucc

SEQ ID NO: 2241250 - RNA, 19 nt, Artificial Sequence
  Description of Artificial Sequence: Synthetic oligonucleotide
ucagugccggugucuucau

SEQ ID NO: 2241251 - RNA, 19 nt, Artificial Sequence
  Description of Artificial Sequence: Synthetic oligonucleotide
ggcacgucuuuauuguacu

SEQ ID NO: 2241252 - RNA, 19 nt, Artificial Sequence
  Description of Artificial Sequence: Synthetic oligonucleotide
gaggaggauaaggcacguc

SEQ ID NO: 2241253 - RNA, 19 nt, Artificial Sequence
  Description of Artificial Sequence: Synthetic oligonucleotide
guccaggcugaaauuuauc

SEQ ID NO: 2241254 - RNA, 19 nt, Artificial Sequence
  Description of Artificial Sequence: Synthetic oligonucleotide
gucaaaccaggcauaccua

SEQ ID NO: 2241255 - RNA, 19 nt, Artificial Sequence
  Description of Artificial Sequence: Synthetic oligonucleotide
cugaugucuccuccgacau

SEQ ID NO: 2241256 - RNA, 19 nt, Artificial Sequence
  Description of Artificial Sequence: Synthetic oligonucleotide
ccuccggucaucauggacu

SEQ ID NO: 2241257 - RNA, 19 nt, Artificial Sequence
  Description of Artificial Sequence: Synthetic oligonucleotide
ggauaaggcacgucuuuau

SEQ ID NO: 2241258 - RNA, 19 nt, Artificial Sequence
  Description of Artificial Sequence: Synthetic oligonucleotide
cagccaagcagguggccaa

SEQ ID NO: 2241259 - RNA, 19 nt, Artificial Sequence
  Description of Artificial Sequence: Synthetic oligonucleotide
agcagauaugugaccuuuu

SEQ ID NO: 2241260 - RNA, 19 nt, Artificial Sequence
  Description of Artificial Sequence: Synthetic oligonucleotide
cauuuaucacagucucuuu

SEQ ID NO: 2241261 - RNA, 19 nt, Artificial Sequence
  Description of Artificial Sequence: Synthetic oligonucleotide
guagcaguccaggcugaaa

SEQ ID NO: 2241262 - RNA, 19 nt, Artificial Sequence
  Description of Artificial Sequence: Synthetic oligonucleotide
cugcugcuccacugacaac

SEQ ID NO: 2241263 - RNA, 19 nt, Artificial Sequence
  Description of Artificial Sequence: Synthetic oligonucleotide
cauccagaauugcuuuagu

SEQ ID NO: 2241264 - RNA, 19 nt, Artificial Sequence
  Description of Artificial Sequence: Synthetic oligonucleotide
gguuuccuugaugaagaua

SEQ ID NO: 2241265 - RNA, 19 nt, Artificial Sequence
  Description of Artificial Sequence: Synthetic oligonucleotide
cacacaggaugauguggcu

SEQ ID NO: 2241266 - RNA, 19 nt, Artificial Sequence
  Description of Artificial Sequence: Synthetic oligonucleotide
agcugccaaggugcuaaau

SEQ ID NO: 2241267 - RNA, 19 nt, Artificial Sequence
  Description of Artificial Sequence: Synthetic oligonucleotide
ccauccacaaguugugggu

SEQ ID NO: 2241268 - RNA, 19 nt, Artificial Sequence
  Description of Artificial Sequence: Synthetic oligonucleotide
ccauuuaucacagucucuu

SEQ ID NO: 2241269 - RNA, 19 nt, Artificial Sequence
  Description of Artificial Sequence: Synthetic oligonucleotide
caccugagacagcugccaa

SEQ ID NO: 2241270 - RNA, 19 nt, Artificial Sequence
  Description of Artificial Sequence: Synthetic oligonucleotide
cuggaacagccaagcaggu

SEQ ID NO: 2241271 - RNA, 19 nt, Artificial Sequence
  Description of Artificial Sequence: Synthetic oligonucleotide
ggucaucauggacuggaau

SEQ ID NO: 2241272 - RNA, 19 nt, Artificial Sequence
  Description of Artificial Sequence: Synthetic oligonucleotide
caccaucaaccaccugaga

SEQ ID NO: 2241273 - RNA, 19 nt, Artificial Sequence
  Description of Artificial Sequence: Synthetic oligonucleotide
ccggucaucauggacugga

SEQ ID NO: 2241274 - RNA, 19 nt, Artificial Sequence
  Description of Artificial Sequence: Synthetic oligonucleotide
caugauucucgaagcuguu

SEQ ID NO: 2241275 - RNA, 19 nt, Artificial Sequence
  Description of Artificial Sequence: Synthetic oligonucleotide
cuggccaaauuuguguguu

SEQ ID NO: 2241276 - RNA, 19 nt, Artificial Sequence
  Description of Artificial Sequence: Synthetic oligonucleotide
gggcaugauucucgaagcu

SEQ ID NO: 2241277 - RNA, 19 nt, Artificial Sequence
  Description of Artificial Sequence: Synthetic oligonucleotide
ccggugucuucauucaucu

SEQ ID NO: 2241278 - RNA, 19 nt, Artificial Sequence
  Description of Artificial Sequence: Synthetic oligonucleotide
cuccaccaucaaccaccug

SEQ ID NO: 2241279 - RNA, 19 nt, Artificial Sequence
  Description of Artificial Sequence: Synthetic oligonucleotide
cagcagauaugugaccuuu

SEQ ID NO: 2241280 - RNA, 19 nt, Artificial Sequence
  Description of Artificial Sequence: Synthetic oligonucleotide
ccaggcugaaauuuaucuu

SEQ ID NO: 2241281 - RNA, 19 nt, Artificial Sequence
  Description of Artificial Sequence: Synthetic oligonucleotide
ggcagcggaggaggauaag

SEQ ID NO: 2241282 - RNA, 19 nt, Artificial Sequence
  Description of Artificial Sequence: Synthetic oligonucleotide
gguggccaaucugcccagc

SEQ ID NO: 2241283 - RNA, 19 nt, Artificial Sequence
  Description of Artificial Sequence: Synthetic oligonucleotide
ccacaaguugugggucuac

SEQ ID NO: 2241284 - RNA, 19 nt, Artificial Sequence
  Description of Artificial Sequence: Synthetic oligonucleotide
ccuccgacauugucaaagu

SEQ ID NO: 2241285 - RNA, 19 nt, Artificial Sequence
  Description of Artificial Sequence: Synthetic oligonucleotide
ggcauaccuauagcuccaa

SEQ ID NO: 2241286 - RNA, 19 nt, Artificial Sequence
  Description of Artificial Sequence: Synthetic oligonucleotide
ccaagcagguggccaaucu

SEQ ID NO: 2241287 - RNA, 19 nt, Artificial Sequence
  Description of Artificial Sequence: Synthetic oligonucleotide
ccgauucaucugacuuauc

SEQ ID NO: 2241288 - RNA, 19 nt, Artificial Sequence
  Description of Artificial Sequence: Synthetic oligonucleotide
cugcuucccuauguugccu

SEQ ID NO: 2241289 - RNA, 19 nt, Artificial Sequence
  Description of Artificial Sequence: Synthetic oligonucleotide
ggaggaggauaaggcacgu

SEQ ID NO: 2241290 - RNA, 19 nt, Artificial Sequence
  Description of Artificial Sequence: Synthetic oligonucleotide
cuccuccgacauugucaaa

SEQ ID NO: 2241291 - RNA, 19 nt, Artificial Sequence
  Description of Artificial Sequence: Synthetic oligonucleotide
gggcagcggaggaggauaa

SEQ ID NO: 2241292 - RNA, 19 nt, Artificial Sequence
  Description of Artificial Sequence: Synthetic oligonucleotide
cuaccuuuucaaggccauu

SEQ ID NO: 2241293 - RNA, 19 nt, Artificial Sequence
  Description of Artificial Sequence: Synthetic oligonucleotide
ccaauaccuccaccaucaa

SEQ ID NO: 2241294 - RNA, 19 nt, Artificial Sequence
  Description of Artificial Sequence: Synthetic oligonucleotide
ccccaguucugaugucaaa

SEQ ID NO: 2241295 - RNA, 19 nt, Artificial Sequence
  Description of Artificial Sequence: Synthetic oligonucleotide
ccgcaggcaccugcugcuc

SEQ ID NO: 2241296 - RNA, 19 nt, Artificial Sequence
  Description of Artificial Sequence: Synthetic oligonucleotide
aauuauuaggacuuucucc

SEQ ID NO: 2241297 - RNA, 19 nt, Artificial Sequence
  Description of Artificial Sequence: Synthetic oligonucleotide
aaauagggaaauuauuagg

SEQ ID NO: 2241298 - RNA, 19 nt, Artificial Sequence
  Description of Artificial Sequence: Synthetic oligonucleotide
aaguugaaauuucagcucg

SEQ ID NO: 2241299 - RNA, 19 nt, Artificial Sequence
  Description of Artificial Sequence: Synthetic oligonucleotide
ugaaauuucagcucgauau

SEQ ID NO: 2241300 - RNA, 19 nt, Artificial Sequence
  Description of Artificial Sequence: Synthetic oligonucleotide
aaauuauuaggacuuucuc

SEQ ID NO: 2241301 - RNA, 19 nt, Artificial Sequence
  Description of Artificial Sequence: Synthetic oligonucleotide
aaaugaaggaucuaaaauu

SEQ ID NO: 2241302 - RNA, 19 nt, Artificial Sequence
  Description of Artificial Sequence: Synthetic oligonucleotide
uucagaaacguuuugagga

SEQ ID NO: 2241303 - RNA, 19 nt, Artificial Sequence
  Description of Artificial Sequence: Synthetic oligonucleotide
aaaaugaaggaucuaaaau

SEQ ID NO: 2241304 - RNA, 19 nt, Artificial Sequence
  Description of Artificial Sequence: Synthetic oligonucleotide
guuagcuuuuaucugaugg

SEQ ID NO: 2241305 - RNA, 19 nt, Artificial Sequence
  Description of Artificial Sequence: Synthetic oligonucleotide
auuauuaggacuuucucca

SEQ ID NO: 2241306 - RNA, 19 nt, Artificial Sequence
  Description of Artificial Sequence: Synthetic oligonucleotide
uaaauagggaaauuauuag

SEQ ID NO: 2241307 - RNA, 19 nt, Artificial Sequence
  Description of Artificial Sequence: Synthetic oligonucleotide
auuaauuguacuucagguc

SEQ ID NO: 2241308 - RNA, 19 nt, Artificial Sequence
  Description of Artificial Sequence: Synthetic oligonucleotide
uuaauuuccuccuucaagu

SEQ ID NO: 2241309 - RNA, 19 nt, Artificial Sequence
  Description of Artificial Sequence: Synthetic oligonucleotide
guaauucaaauccaaauug

SEQ ID NO: 2241310 - RNA, 19 nt, Artificial Sequence
  Description of Artificial Sequence: Synthetic oligonucleotide
uaauucaaauccaaauugc

SEQ ID NO: 2241311 - RNA, 19 nt, Artificial Sequence
  Description of Artificial Sequence: Synthetic oligonucleotide
ucuauuucugaagucaacg

SEQ ID NO: 2241312 - RNA, 19 nt, Artificial Sequence
  Description of Artificial Sequence: Synthetic oligonucleotide
uucaaguugaaauuucagc

SEQ ID NO: 2241313 - RNA, 19 nt, Artificial Sequence
  Description of Artificial Sequence: Synthetic oligonucleotide
aagguauuuauuuuguaaa

SEQ ID NO: 2241314 - RNA, 19 nt, Artificial Sequence
  Description of Artificial Sequence: Synthetic oligonucleotide
aauagggaaauuauuagga

SEQ ID NO: 2241315 - RNA, 19 nt, Artificial Sequence
  Description of Artificial Sequence: Synthetic oligonucleotide
uuaccuuuccuuuaguuga

SEQ ID NO: 2241316 - RNA, 19 nt, Artificial Sequence
  Description of Artificial Sequence: Synthetic oligonucleotide
uuuaccuuuccuuuaguug

SEQ ID NO: 2241317 - RNA, 19 nt, Artificial Sequence
  Description of Artificial Sequence: Synthetic oligonucleotide
auuuuguaaauguaagucu

SEQ ID NO: 2241318 - RNA, 19 nt, Artificial Sequence
  Description of Artificial Sequence: Synthetic oligonucleotide
gauauuuucagaugacaac

SEQ ID NO: 2241319 - RNA, 19 nt, Artificial Sequence
  Description of Artificial Sequence: Synthetic oligonucleotide
uauuggcuaaucuaaggag

SEQ ID NO: 2241320 - RNA, 19 nt, Artificial Sequence
  Description of Artificial Sequence: Synthetic oligonucleotide
auagggaaauuauuaggac

SEQ ID NO: 2241321 - RNA, 19 nt, Artificial Sequence
  Description of Artificial Sequence: Synthetic oligonucleotide
uuauccagcuuacuauugg

SEQ ID NO: 2241322 - RNA, 19 nt, Artificial Sequence
  Description of Artificial Sequence: Synthetic oligonucleotide
ucuaaguccagauuucucu

SEQ ID NO: 2241323 - RNA, 19 nt, Artificial Sequence
  Description of Artificial Sequence: Synthetic oligonucleotide
ucucugacuccaaagcucg

SEQ ID NO: 2241324 - RNA, 19 nt, Artificial Sequence
  Description of Artificial Sequence: Synthetic oligonucleotide
uuuccuuuaguugaucagg

SEQ ID NO: 2241325 - RNA, 19 nt, Artificial Sequence
  Description of Artificial Sequence: Synthetic oligonucleotide
aaggaucuaaaauuuugcu

SEQ ID NO: 2241326 - RNA, 19 nt, Artificial Sequence
  Description of Artificial Sequence: Synthetic oligonucleotide
uuacuauuggcuaaucuaa

SEQ ID NO: 2241327 - RNA, 19 nt, Artificial Sequence
  Description of Artificial Sequence: Synthetic oligonucleotide
gauucuuuagucuuggcaa

SEQ ID NO: 2241328 - RNA, 19 nt, Artificial Sequence
  Description of Artificial Sequence: Synthetic oligonucleotide
ucuuauuaauuguacuuca

SEQ ID NO: 2241329 - RNA, 19 nt, Artificial Sequence
  Description of Artificial Sequence: Synthetic oligonucleotide
uaguugaucaggaucaggu

SEQ ID NO: 2241330 - RNA, 19 nt, Artificial Sequence
  Description of Artificial Sequence: Synthetic oligonucleotide
uguauaguaugucauuuuc

SEQ ID NO: 2241331 - RNA, 19 nt, Artificial Sequence
  Description of Artificial Sequence: Synthetic oligonucleotide
ucuaaaauuuugcuaguuc

SEQ ID NO: 2241332 - RNA, 19 nt, Artificial Sequence
  Description of Artificial Sequence: Synthetic oligonucleotide
gauacgcauccuuugagag

SEQ ID NO: 2241333 - RNA, 19 nt, Artificial Sequence
  Description of Artificial Sequence: Synthetic oligonucleotide
uaaauguaagucuuccaca

SEQ ID NO: 2241334 - RNA, 19 nt, Artificial Sequence
  Description of Artificial Sequence: Synthetic oligonucleotide
aaucuaaggagcuggaguu

SEQ ID NO: 2241335 - RNA, 19 nt, Artificial Sequence
  Description of Artificial Sequence: Synthetic oligonucleotide
cuuuaguugaucaggauca

SEQ ID NO: 2241336 - RNA, 19 nt, Artificial Sequence
  Description of Artificial Sequence: Synthetic oligonucleotide
ucuuucuuauuaauuguac

SEQ ID NO: 2241337 - RNA, 19 nt, Artificial Sequence
  Description of Artificial Sequence: Synthetic oligonucleotide
ucauuuaccuuuccuuuag

SEQ ID NO: 2241338 - RNA, 19 nt, Artificial Sequence
  Description of Artificial Sequence: Synthetic oligonucleotide
aaucuguucuagcucuggg

SEQ ID NO: 2241339 - RNA, 19 nt, Artificial Sequence
  Description of Artificial Sequence: Synthetic oligonucleotide
uauaguaugucauuuucua

SEQ ID NO: 2241340 - RNA, 19 nt, Artificial Sequence
  Description of Artificial Sequence: Synthetic oligonucleotide
auuuucagaugacaacuuc

SEQ ID NO: 2241341 - RNA, 19 nt, Artificial Sequence
  Description of Artificial Sequence: Synthetic oligonucleotide
uucagcucgauauuuucag

SEQ ID NO: 2241342 - RNA, 19 nt, Artificial Sequence
  Description of Artificial Sequence: Synthetic oligonucleotide
uuggcaaaucuuuauuugc

SEQ ID NO: 2241343 - RNA, 19 nt, Artificial Sequence
  Description of Artificial Sequence: Synthetic oligonucleotide
aaucucuuggaagagcuug

SEQ ID NO: 2241344 - RNA, 19 nt, Artificial Sequence
  Description of Artificial Sequence: Synthetic oligonucleotide
uguucaaguugaaauuuca

SEQ ID NO: 2241345 - RNA, 19 nt, Artificial Sequence
  Description of Artificial Sequence: Synthetic oligonucleotide
uauuugcuuguucaaguug

SEQ ID NO: 2241346 - RNA, 19 nt, Artificial Sequence
  Description of Artificial Sequence: Synthetic oligonucleotide
uuagcuuuuaucugaugga

SEQ ID NO: 2241347 - RNA, 19 nt, Artificial Sequence
  Description of Artificial Sequence: Synthetic oligonucleotide
cuuucucugacuccaaagc

SEQ ID NO: 2241348 - RNA, 19 nt, Artificial Sequence
  Description of Artificial Sequence: Synthetic oligonucleotide
ggcuagguaauucaaaucc

SEQ ID NO: 2241349 - RNA, 19 nt, Artificial Sequence
  Description of Artificial Sequence: Synthetic oligonucleotide
uucuaaaguacgaaguuuu

SEQ ID NO: 2241350 - RNA, 19 nt, Artificial Sequence
  Description of Artificial Sequence: Synthetic oligonucleotide
uagggaaauuauuaggacu

SEQ ID NO: 2241351 - RNA, 19 nt, Artificial Sequence
  Description of Artificial Sequence: Synthetic oligonucleotide
aaagcucgcacuccuaaga

SEQ ID NO: 2241352 - RNA, 19 nt, Artificial Sequence
  Description of Artificial Sequence: Synthetic oligonucleotide
gaagguauuuauuuuguaa

SEQ ID NO: 2241353 - RNA, 19 nt, Artificial Sequence
  Description of Artificial Sequence: Synthetic oligonucleotide
ucaaguguugcuugucuag

SEQ ID NO: 2241354 - RNA, 19 nt, Artificial Sequence
  Description of Artificial Sequence: Synthetic oligonucleotide
gaaggaucuaaaauuuugc

SEQ ID NO: 2241355 - RNA, 19 nt, Artificial Sequence
  Description of Artificial Sequence: Synthetic oligonucleotide
aagcucgcacuccuaagac

SEQ ID NO: 2241356 - RNA, 19 nt, Artificial Sequence
  Description of Artificial Sequence: Synthetic oligonucleotide
aaugaaggaucuaaaauuu

SEQ ID NO: 2241357 - RNA, 19 nt, Artificial Sequence
  Description of Artificial Sequence: Synthetic oligonucleotide
cuaggucugacuuucugag

SEQ ID NO: 2241358 - RNA, 19 nt, Artificial Sequence
  Description of Artificial Sequence: Synthetic oligonucleotide
aauaaauagggaaauuauu

SEQ ID NO: 2241359 - RNA, 19 nt, Artificial Sequence
  Description of Artificial Sequence: Synthetic oligonucleotide
uuagucuuggcaaaucuuu

SEQ ID NO: 2241360 - RNA, 19 nt, Artificial Sequence
  Description of Artificial Sequence: Synthetic oligonucleotide
uugaucaggaucaggugug

SEQ ID NO: 2241361 - RNA, 19 nt, Artificial Sequence
  Description of Artificial Sequence: Synthetic oligonucleotide
uucuuuauccagcuuacua

SEQ ID NO: 2241362 - RNA, 19 nt, Artificial Sequence
  Description of Artificial Sequence: Synthetic oligonucleotide
aacagggcuagguaauuca

SEQ ID NO: 2241363 - RNA, 19 nt, Artificial Sequence
  Description of Artificial Sequence: Synthetic oligonucleotide
agacccucugaccuguacc

SEQ ID NO: 2241364 - RNA, 19 nt, Artificial Sequence
  Description of Artificial Sequence: Synthetic oligonucleotide
uuaucugauggauuaguuc

SEQ ID NO: 2241365 - RNA, 19 nt, Artificial Sequence
  Description of Artificial Sequence: Synthetic oligonucleotide
caagucucuuacuugauuc

SEQ ID NO: 2241366 - RNA, 19 nt, Artificial Sequence
  Description of Artificial Sequence: Synthetic oligonucleotide
uuguaaauguaagucuucc

SEQ ID NO: 2241367 - RNA, 19 nt, Artificial Sequence
  Description of Artificial Sequence: Synthetic oligonucleotide
ugaccuguacccaaguuuc

SEQ ID NO: 2241368 - RNA, 19 nt, Artificial Sequence
  Description of Artificial Sequence: Synthetic oligonucleotide
uguaaauguaagucuucca

SEQ ID NO: 2241369 - RNA, 19 nt, Artificial Sequence
  Description of Artificial Sequence: Synthetic oligonucleotide
ugucucuaggucauuuacc

SEQ ID NO: 2241370 - RNA, 19 nt, Artificial Sequence
  Description of Artificial Sequence: Synthetic oligonucleotide
cuuguuagcuuuuaucuga

SEQ ID NO: 2241371 - RNA, 19 nt, Artificial Sequence
  Description of Artificial Sequence: Synthetic oligonucleotide
acagugaucaucugacucu

SEQ ID NO: 2241372 - RNA, 19 nt, Artificial Sequence
  Description of Artificial Sequence: Synthetic oligonucleotide
ucuaggucugacuuucuga

SEQ ID NO: 2241373 - RNA, 19 nt, Artificial Sequence
  Description of Artificial Sequence: Synthetic oligonucleotide
uccacaacagaaucucuug

SEQ ID NO: 2241374 - RNA, 19 nt, Artificial Sequence
  Description of Artificial Sequence: Synthetic oligonucleotide
ucauuuucuaaguccagau

SEQ ID NO: 2241375 - RNA, 19 nt, Artificial Sequence
  Description of Artificial Sequence: Synthetic oligonucleotide
aguguugcuugucuagguc

SEQ ID NO: 2241376 - RNA, 19 nt, Artificial Sequence
  Description of Artificial Sequence: Synthetic oligonucleotide
gacagugaucaucugacuc

SEQ ID NO: 2241377 - RNA, 19 nt, Artificial Sequence
  Description of Artificial Sequence: Synthetic oligonucleotide
uucuuucuuauuaauugua

SEQ ID NO: 2241378 - RNA, 19 nt, Artificial Sequence
  Description of Artificial Sequence: Synthetic oligonucleotide
uuccguuucaacuuccuau

SEQ ID NO: 2241379 - RNA, 19 nt, Artificial Sequence
  Description of Artificial Sequence: Synthetic oligonucleotide
uuccuuuaguugaucagga

SEQ ID NO: 2241380 - RNA, 19 nt, Artificial Sequence
  Description of Artificial Sequence: Synthetic oligonucleotide
ugagcugugucucuagguc

SEQ ID NO: 2241381 - RNA, 19 nt, Artificial Sequence
  Description of Artificial Sequence: Synthetic oligonucleotide
uugaucugucuccacaccu

SEQ ID NO: 2241382 - RNA, 19 nt, Artificial Sequence
  Description of Artificial Sequence: Synthetic oligonucleotide
cuuacuauuggcuaaucua

SEQ ID NO: 2241383 - RNA, 19 nt, Artificial Sequence
  Description of Artificial Sequence: Synthetic oligonucleotide
uauccagcuuacuauuggc

SEQ ID NO: 2241384 - RNA, 19 nt, Artificial Sequence
  Description of Artificial Sequence: Synthetic oligonucleotide
ucaacgacuggggauacgc

SEQ ID NO: 2241385 - RNA, 19 nt, Artificial Sequence
  Description of Artificial Sequence: Synthetic oligonucleotide
ucuaccagacccucugacc

SEQ ID NO: 2241386 - RNA, 19 nt, Artificial Sequence
  Description of Artificial Sequence: Synthetic oligonucleotide
ucuugaucugucuccacac

SEQ ID NO: 2241387 - RNA, 19 nt, Artificial Sequence
  Description of Artificial Sequence: Synthetic oligonucleotide
uuuuaucugauggauuagu

SEQ ID NO: 2241388 - RNA, 19 nt, Artificial Sequence
  Description of Artificial Sequence: Synthetic oligonucleotide
uguucuagcucugggacug

SEQ ID NO: 2241389 - RNA, 19 nt, Artificial Sequence
  Description of Artificial Sequence: Synthetic oligonucleotide
aaauugcucagaaaguuuu

SEQ ID NO: 2241390 - RNA, 19 nt, Artificial Sequence
  Description of Artificial Sequence: Synthetic oligonucleotide
cuugauucuuuagucuugg

SEQ ID NO: 2241391 - RNA, 19 nt, Artificial Sequence
  Description of Artificial Sequence: Synthetic oligonucleotide
ugaagucaacgacugggga

SEQ ID NO: 2241392 - RNA, 19 nt, Artificial Sequence
  Description of Artificial Sequence: Synthetic oligonucleotide
uaauuuccuccuucaagug

SEQ ID NO: 2241393 - RNA, 19 nt, Artificial Sequence
  Description of Artificial Sequence: Synthetic oligonucleotide
uguugcuugucuaggucug

SEQ ID NO: 2241394 - RNA, 19 nt, Artificial Sequence
  Description of Artificial Sequence: Synthetic oligonucleotide
agcucgcacuccuaagacc

SEQ ID NO: 2241395 - RNA, 19 nt, Artificial Sequence
  Description of Artificial Sequence: Synthetic oligonucleotide
aaacguuuugaggaucuca

SEQ ID NO: 2241396 - RNA, 19 nt, Artificial Sequence
  Description of Artificial Sequence: Synthetic oligonucleotide
uuaguugaucaggaucagg

SEQ ID NO: 2241397 - RNA, 19 nt, Artificial Sequence
  Description of Artificial Sequence: Synthetic oligonucleotide
ucuaaggagcuggaguucc

SEQ ID NO: 2241398 - RNA, 19 nt, Artificial Sequence
  Description of Artificial Sequence: Synthetic oligonucleotide
aacuucuguucuaagagaa

SEQ ID NO: 2241399 - RNA, 19 nt, Artificial Sequence
  Description of Artificial Sequence: Synthetic oligonucleotide
cuauuggcuaaucuaagga

SEQ ID NO: 2241400 - RNA, 19 nt, Artificial Sequence
  Description of Artificial Sequence: Synthetic oligonucleotide
ugcuuucagcuccaguuug

SEQ ID NO: 2241401 - RNA, 19 nt, Artificial Sequence
  Description of Artificial Sequence: Synthetic oligonucleotide
ucaggugugcugcuuucag

SEQ ID NO: 2241402 - RNA, 19 nt, Artificial Sequence
  Description of Artificial Sequence: Synthetic oligonucleotide
uucuguucuaagagaauau

SEQ ID NO: 2241403 - RNA, 19 nt, Artificial Sequence
  Description of Artificial Sequence: Synthetic oligonucleotide
agguauuuauuuuguaaau

SEQ ID NO: 2241404 - RNA, 19 nt, Artificial Sequence
  Description of Artificial Sequence: Synthetic oligonucleotide
aacgacuggggauacgcau

SEQ ID NO: 2241405 - RNA, 19 nt, Artificial Sequence
  Description of Artificial Sequence: Synthetic oligonucleotide
uuucuugaagguauuuauu

SEQ ID NO: 2241406 - RNA, 19 nt, Artificial Sequence
  Description of Artificial Sequence: Synthetic oligonucleotide
aaguguugcuugucuaggu

SEQ ID NO: 2241407 - RNA, 19 nt, Artificial Sequence
  Description of Artificial Sequence: Synthetic oligonucleotide
gaagcagcaacagggcuag

SEQ ID NO: 2241408 - RNA, 19 nt, Artificial Sequence
  Description of Artificial Sequence: Synthetic oligonucleotide
cacacauuuccuucaaguc

SEQ ID NO: 2241409 - RNA, 19 nt, Artificial Sequence
  Description of Artificial Sequence: Synthetic oligonucleotide
gguauuuauuuuguaaaug

SEQ ID NO: 2241410 - RNA, 19 nt, Artificial Sequence
  Description of Artificial Sequence: Synthetic oligonucleotide
ucugggacugucuuuccac

SEQ ID NO: 2241411 - RNA, 19 nt, Artificial Sequence
  Description of Artificial Sequence: Synthetic oligonucleotide
uuaguucugccuuucuuua

SEQ ID NO: 2241412 - RNA, 19 nt, Artificial Sequence
  Description of Artificial Sequence: Synthetic oligonucleotide
gaucucaaucuguucuagc

SEQ ID NO: 2241413 - RNA, 19 nt, Artificial Sequence
  Description of Artificial Sequence: Synthetic oligonucleotide
auaguaugucauuuucuaa

SEQ ID NO: 2241414 - RNA, 19 nt, Artificial Sequence
  Description of Artificial Sequence: Synthetic oligonucleotide
cuccacaccuucagaaacg

SEQ ID NO: 2241415 - RNA, 19 nt, Artificial Sequence
  Description of Artificial Sequence: Synthetic oligonucleotide
agaaucucuuggaagagcu

SEQ ID NO: 2241416 - RNA, 19 nt, Artificial Sequence
  Description of Artificial Sequence: Synthetic oligonucleotide
uugaaauuucagcucgaua

SEQ ID NO: 2241417 - RNA, 19 nt, Artificial Sequence
  Description of Artificial Sequence: Synthetic oligonucleotide
aacguuuugaggaucucaa

SEQ ID NO: 2241418 - RNA, 19 nt, Artificial Sequence
  Description of Artificial Sequence: Synthetic oligonucleotide
uccaggacuuucuccaucu

SEQ ID NO: 2241419 - RNA, 19 nt, Artificial Sequence
  Description of Artificial Sequence: Synthetic oligonucleotide
agcucgauauuuucagaug

SEQ ID NO: 2241420 - RNA, 19 nt, Artificial Sequence
  Description of Artificial Sequence: Synthetic oligonucleotide
uuucuaaaguacgaaguuu

SEQ ID NO: 2241421 - RNA, 19 nt, Artificial Sequence
  Description of Artificial Sequence: Synthetic oligonucleotide
ucagaaacguuuugaggau

SEQ ID NO: 2241422 - RNA, 19 nt, Artificial Sequence
  Description of Artificial Sequence: Synthetic oligonucleotide
uggauaagcucuugaucug

SEQ ID NO: 2241423 - RNA, 19 nt, Artificial Sequence
  Description of Artificial Sequence: Synthetic oligonucleotide
ucauguauaguaugucauu

SEQ ID NO: 2241424 - RNA, 19 nt, Artificial Sequence
  Description of Artificial Sequence: Synthetic oligonucleotide
uccgaagcagcaacagggc

SEQ ID NO: 2241425 - RNA, 19 nt, Artificial Sequence
  Description of Artificial Sequence: Synthetic oligonucleotide
uucuaccagacccucugac

SEQ ID NO: 2241426 - RNA, 19 nt, Artificial Sequence
  Description of Artificial Sequence: Synthetic oligonucleotide
cuauuucugaagucaacga

SEQ ID NO: 2241427 - RNA, 19 nt, Artificial Sequence
  Description of Artificial Sequence: Synthetic oligonucleotide
aguuugguccuuguuagcu

SEQ ID NO: 2241428 - RNA, 19 nt, Artificial Sequence
  Description of Artificial Sequence: Synthetic oligonucleotide
uucuaaguccagauuucuc

SEQ ID NO: 2241429 - RNA, 19 nt, Artificial Sequence
  Description of Artificial Sequence: Synthetic oligonucleotide
aggucauuuaccuuuccuu

SEQ ID NO: 2241430 - RNA, 19 nt, Artificial Sequence
  Description of Artificial Sequence: Synthetic oligonucleotide
uccagcuuacuauuggcua

SEQ ID NO: 2241431 - RNA, 19 nt, Artificial Sequence
  Description of Artificial Sequence: Synthetic oligonucleotide
ucucuuacuugauucuuua

SEQ ID NO: 2241432 - RNA, 19 nt, Artificial Sequence
  Description of Artificial Sequence: Synthetic oligonucleotide
ucuaggucauuuaccuuuc

SEQ ID NO: 2241433 - RNA, 19 nt, Artificial Sequence
  Description of Artificial Sequence: Synthetic oligonucleotide
uuuaguugaucaggaucag

SEQ ID NO: 2241434 - RNA, 19 nt, Artificial Sequence
  Description of Artificial Sequence: Synthetic oligonucleotide
cucgauauuuucagaugac

SEQ ID NO: 2241435 - RNA, 19 nt, Artificial Sequence
  Description of Artificial Sequence: Synthetic oligonucleotide
cuuccgaagcagcaacagg

SEQ ID NO: 2241436 - RNA, 19 nt, Artificial Sequence
  Description of Artificial Sequence: Synthetic oligonucleotide
uacgcauccuuugagaguu

SEQ ID NO: 2241437 - RNA, 19 nt, Artificial Sequence
  Description of Artificial Sequence: Synthetic oligonucleotide
agcucugggacugucuuuc

SEQ ID NO: 2241438 - RNA, 19 nt, Artificial Sequence
  Description of Artificial Sequence: Synthetic oligonucleotide
uggguccucauguauagua

SEQ ID NO: 2241439 - RNA, 19 nt, Artificial Sequence
  Description of Artificial Sequence: Synthetic oligonucleotide
agggaaauuauuaggacuu

SEQ ID NO: 2241440 - RNA, 19 nt, Artificial Sequence
  Description of Artificial Sequence: Synthetic oligonucleotide
cuugaucugucuccacacc

SEQ ID NO: 2241441 - RNA, 19 nt, Artificial Sequence
  Description of Artificial Sequence: Synthetic oligonucleotide
aagucaacgacuggggaua

SEQ ID NO: 2241442 - RNA, 19 nt, Artificial Sequence
  Description of Artificial Sequence: Synthetic oligonucleotide
ucaagucucuuacuugauu

SEQ ID NO: 2241443 - RNA, 19 nt, Artificial Sequence
  Description of Artificial Sequence: Synthetic oligonucleotide
ggcuaaucuaaggagcugg

SEQ ID NO: 2241444 - RNA, 19 nt, Artificial Sequence
  Description of Artificial Sequence: Synthetic oligonucleotide
uacuucaggucuucaauuu

SEQ ID NO: 2241445 - RNA, 19 nt, Artificial Sequence
  Description of Artificial Sequence: Synthetic oligonucleotide
uggggauacgcauccuuug

SEQ ID NO: 2241446 - RNA, 19 nt, Artificial Sequence
  Description of Artificial Sequence: Synthetic oligonucleotide
cuagguaauucaaauccaa

SEQ ID NO: 2241447 - RNA, 19 nt, Artificial Sequence
  Description of Artificial Sequence: Synthetic oligonucleotide
agucuuggcaaaucuuuau

SEQ ID NO: 2241448 - RNA, 19 nt, Artificial Sequence
  Description of Artificial Sequence: Synthetic oligonucleotide
ucagcucgauauuuucaga

SEQ ID NO: 2241449 - RNA, 19 nt, Artificial Sequence
  Description of Artificial Sequence: Synthetic oligonucleotide
uccguuucaacuuccuauu

SEQ ID NO: 2241450 - RNA, 19 nt, Artificial Sequence
  Description of Artificial Sequence: Synthetic oligonucleotide
gugucucuaggucauuuac

SEQ ID NO: 2241451 - RNA, 19 nt, Artificial Sequence
  Description of Artificial Sequence: Synthetic oligonucleotide
uuccuggauaagcucuuga

SEQ ID NO: 2241452 - RNA, 19 nt, Artificial Sequence
  Description of Artificial Sequence: Synthetic oligonucleotide
aguuuccguuucaacuucc

SEQ ID NO: 2241453 - RNA, 19 nt, Artificial Sequence
  Description of Artificial Sequence: Synthetic oligonucleotide
guaugucauuuucuaaguc

SEQ ID NO: 2241454 - RNA, 19 nt, Artificial Sequence
  Description of Artificial Sequence: Synthetic oligonucleotide
uuguuagcuuuuaucugau

SEQ ID NO: 2241455 - RNA, 19 nt, Artificial Sequence
  Description of Artificial Sequence: Synthetic oligonucleotide
uucaaguguugcuugucua

SEQ ID NO: 2241456 - RNA, 19 nt, Artificial Sequence
  Description of Artificial Sequence: Synthetic oligonucleotide
uguuagcuuuuaucugaug

SEQ ID NO: 2241457 - RNA, 19 nt, Artificial Sequence
  Description of Artificial Sequence: Synthetic oligonucleotide
uagcuuuuaucugauggau

SEQ ID NO: 2241458 - RNA, 19 nt, Artificial Sequence
  Description of Artificial Sequence: Synthetic oligonucleotide
cuaaucuaaggagcuggag

SEQ ID NO: 2241459 - RNA, 19 nt, Artificial Sequence
  Description of Artificial Sequence: Synthetic oligonucleotide
agaaacguuuugaggaucu

SEQ ID NO: 2241460 - RNA, 19 nt, Artificial Sequence
  Description of Artificial Sequence: Synthetic oligonucleotide
ccaguuugguccuuguuag

SEQ ID NO: 2241461 - RNA, 19 nt, Artificial Sequence
  Description of Artificial Sequence: Synthetic oligonucleotide
auguauaguaugucauuuu

SEQ ID NO: 2241462 - RNA, 19 nt, Artificial Sequence
  Description of Artificial Sequence: Synthetic oligonucleotide
auacgcauccuuugagagu

SEQ ID NO: 2241463 - RNA, 19 nt, Artificial Sequence
  Description of Artificial Sequence: Synthetic oligonucleotide
accuguacccaaguuuccg

SEQ ID NO: 2241464 - RNA, 19 nt, Artificial Sequence
  Description of Artificial Sequence: Synthetic oligonucleotide
caaagcucgcacuccuaag

SEQ ID NO: 2241465 - RNA, 19 nt, Artificial Sequence
  Description of Artificial Sequence: Synthetic oligonucleotide
ccuuuaguugaucaggauc

SEQ ID NO: 2241466 - RNA, 19 nt, Artificial Sequence
  Description of Artificial Sequence: Synthetic oligonucleotide
ugugcugcuuucagcucca

SEQ ID NO: 2241467 - RNA, 19 nt, Artificial Sequence
  Description of Artificial Sequence: Synthetic oligonucleotide
uuuugacagugaucaucug

SEQ ID NO: 2241468 - RNA, 19 nt, Artificial Sequence
  Description of Artificial Sequence: Synthetic oligonucleotide
uuuccguuucaacuuccua

SEQ ID NO: 2241469 - RNA, 19 nt, Artificial Sequence
  Description of Artificial Sequence: Synthetic oligonucleotide
gguggguccucauguauag

SEQ ID NO: 2241470 - RNA, 19 nt, Artificial Sequence
  Description of Artificial Sequence: Synthetic oligonucleotide
ugacucuauuucugaaguc

SEQ ID NO: 2241471 - RNA, 19 nt, Artificial Sequence
  Description of Artificial Sequence: Synthetic oligonucleotide
uucaagucucuuacuugau

SEQ ID NO: 2241472 - RNA, 19 nt, Artificial Sequence
  Description of Artificial Sequence: Synthetic oligonucleotide
caaucuguucuagcucugg

SEQ ID NO: 2241473 - RNA, 19 nt, Artificial Sequence
  Description of Artificial Sequence: Synthetic oligonucleotide
acuugauucuuuagucuug

SEQ ID NO: 2241474 - RNA, 19 nt, Artificial Sequence
  Description of Artificial Sequence: Synthetic oligonucleotide
gaagucaacgacuggggau

SEQ ID NO: 2241475 - RNA, 19 nt, Artificial Sequence
  Description of Artificial Sequence: Synthetic oligonucleotide
ugugucucuaggucauuua

SEQ ID NO: 2241476 - RNA, 19 nt, Artificial Sequence
  Description of Artificial Sequence: Synthetic oligonucleotide
gucuaggucugacuuucug

SEQ ID NO: 2241477 - RNA, 19 nt, Artificial Sequence
  Description of Artificial Sequence: Synthetic oligonucleotide
ugacaacuucaaguuuucc

SEQ ID NO: 2241478 - RNA, 19 nt, Artificial Sequence
  Description of Artificial Sequence: Synthetic oligonucleotide
gucuuuccacuucuaccag

SEQ ID NO: 2241479 - RNA, 19 nt, Artificial Sequence
  Description of Artificial Sequence: Synthetic oligonucleotide
cuucuguucuaagagaaua

SEQ ID NO: 2241480 - RNA, 19 nt, Artificial Sequence
  Description of Artificial Sequence: Synthetic oligonucleotide
caggugugcugcuuucagc

SEQ ID NO: 2241481 - RNA, 19 nt, Artificial Sequence
  Description of Artificial Sequence: Synthetic oligonucleotide
ugguggguccucauguaua

SEQ ID NO: 2241482 - RNA, 19 nt, Artificial Sequence
  Description of Artificial Sequence: Synthetic oligonucleotide
gauaagcucuugaucuguc

SEQ ID NO: 2241483 - RNA, 19 nt, Artificial Sequence
  Description of Artificial Sequence: Synthetic oligonucleotide
uccucauguauaguauguc

SEQ ID NO: 2241484 - RNA, 19 nt, Artificial Sequence
  Description of Artificial Sequence: Synthetic oligonucleotide
cugacucuauuucugaagu

SEQ ID NO: 2241485 - RNA, 19 nt, Artificial Sequence
  Description of Artificial Sequence: Synthetic oligonucleotide
uccacaccuucagaaacgu

SEQ ID NO: 2241486 - RNA, 19 nt, Artificial Sequence
  Description of Artificial Sequence: Synthetic oligonucleotide
uccuuuaguugaucaggau

SEQ ID NO: 2241487 - RNA, 19 nt, Artificial Sequence
  Description of Artificial Sequence: Synthetic oligonucleotide
acgacuggggauacgcauc

SEQ ID NO: 2241488 - RNA, 19 nt, Artificial Sequence
  Description of Artificial Sequence: Synthetic oligonucleotide
gaucaggugugcugcuuuc

SEQ ID NO: 2241489 - RNA, 19 nt, Artificial Sequence
  Description of Artificial Sequence: Synthetic oligonucleotide
agcagcaacagggcuaggu

SEQ ID NO: 2241490 - RNA, 19 nt, Artificial Sequence
  Description of Artificial Sequence: Synthetic oligonucleotide
cuaggucauuuaccuuucc

SEQ ID NO: 2241491 - RNA, 19 nt, Artificial Sequence
  Description of Artificial Sequence: Synthetic oligonucleotide
gggauacgcauccuuugag

SEQ ID NO: 2241492 - RNA, 19 nt, Artificial Sequence
  Description of Artificial Sequence: Synthetic oligonucleotide
cagaugacaacuucaaguu

SEQ ID NO: 2241493 - RNA, 19 nt, Artificial Sequence
  Description of Artificial Sequence: Synthetic oligonucleotide
cucauguauaguaugucau

SEQ ID NO: 2241494 - RNA, 19 nt, Artificial Sequence
  Description of Artificial Sequence: Synthetic oligonucleotide
uaccuuuccuuuaguugau

SEQ ID NO: 2241495 - RNA, 19 nt, Artificial Sequence
  Description of Artificial Sequence: Synthetic oligonucleotide
cucuaggucauuuaccuuu

SEQ ID NO: 2241496 - RNA, 19 nt, Artificial Sequence
  Description of Artificial Sequence: Synthetic oligonucleotide
uaccagacccucugaccug

SEQ ID NO: 2241497 - RNA, 19 nt, Artificial Sequence
  Description of Artificial Sequence: Synthetic oligonucleotide
cguuuugaggaucucaauc

SEQ ID NO: 2241498 - RNA, 19 nt, Artificial Sequence
  Description of Artificial Sequence: Synthetic oligonucleotide
gauuaguucugccuuucuu

SEQ ID NO: 2241499 - RNA, 19 nt, Artificial Sequence
  Description of Artificial Sequence: Synthetic oligonucleotide
cuaccagacccucugaccu

SEQ ID NO: 2241500 - RNA, 19 nt, Artificial Sequence
  Description of Artificial Sequence: Synthetic oligonucleotide
ggaaauuauuaggacuuuc

SEQ ID NO: 2241501 - RNA, 19 nt, Artificial Sequence
  Description of Artificial Sequence: Synthetic oligonucleotide
caguuugguccuuguuagc

SEQ ID NO: 2241502 - RNA, 19 nt, Artificial Sequence
  Description of Artificial Sequence: Synthetic oligonucleotide
guauaguaugucauuuucu

SEQ ID NO: 2241503 - RNA, 19 nt, Artificial Sequence
  Description of Artificial Sequence: Synthetic oligonucleotide
agucaacgacuggggauac

SEQ ID NO: 2241504 - RNA, 19 nt, Artificial Sequence
  Description of Artificial Sequence: Synthetic oligonucleotide
ugcugcuuucagcuccagu

SEQ ID NO: 2241505 - RNA, 19 nt, Artificial Sequence
  Description of Artificial Sequence: Synthetic oligonucleotide
auccagcuuacuauuggcu

SEQ ID NO: 2241506 - RNA, 19 nt, Artificial Sequence
  Description of Artificial Sequence: Synthetic oligonucleotide
uggcuaaucuaaggagcug

SEQ ID NO: 2241507 - RNA, 19 nt, Artificial Sequence
  Description of Artificial Sequence: Synthetic oligonucleotide
ucucuaggucauuuaccuu

SEQ ID NO: 2241508 - RNA, 19 nt, Artificial Sequence
  Description of Artificial Sequence: Synthetic oligonucleotide
acguuuugaggaucucaau

SEQ ID NO: 2241509 - RNA, 19 nt, Artificial Sequence
  Description of Artificial Sequence: Synthetic oligonucleotide
agcuuacuauuggcuaauc

SEQ ID NO: 2241510 - RNA, 19 nt, Artificial Sequence
  Description of Artificial Sequence: Synthetic oligonucleotide
ugucuaggucugacuuucu

SEQ ID NO: 2241511 - RNA, 19 nt, Artificial Sequence
  Description of Artificial Sequence: Synthetic oligonucleotide
auuguacuucaggucuuca

SEQ ID NO: 2241512 - RNA, 19 nt, Artificial Sequence
  Description of Artificial Sequence: Synthetic oligonucleotide
ggaucucaaucuguucuag

SEQ ID NO: 2241513 - RNA, 19 nt, Artificial Sequence
  Description of Artificial Sequence: Synthetic oligonucleotide
cagaaacguuuugaggauc

SEQ ID NO: 2241514 - RNA, 19 nt, Artificial Sequence
  Description of Artificial Sequence: Synthetic oligonucleotide
agucucuuacuugauucuu

SEQ ID NO: 2241515 - RNA, 19 nt, Artificial Sequence
  Description of Artificial Sequence: Synthetic oligonucleotide
cagcaacagggcuagguaa

SEQ ID NO: 2241516 - RNA, 19 nt, Artificial Sequence
  Description of Artificial Sequence: Synthetic oligonucleotide
gaaacguuuugaggaucuc

SEQ ID NO: 2241517 - RNA, 19 nt, Artificial Sequence
  Description of Artificial Sequence: Synthetic oligonucleotide
agcaacagggcuagguaau

SEQ ID NO: 2241518 - RNA, 19 nt, Artificial Sequence
  Description of Artificial Sequence: Synthetic oligonucleotide
gaccuguacccaaguuucc

SEQ ID NO: 2241519 - RNA, 19 nt, Artificial Sequence
  Description of Artificial Sequence: Synthetic oligonucleotide
uccaaagcucgcacuccua

SEQ ID NO: 2241520 - RNA, 19 nt, Artificial Sequence
  Description of Artificial Sequence: Synthetic oligonucleotide
ugggacugucuuuccacuu

SEQ ID NO: 2241521 - RNA, 19 nt, Artificial Sequence
  Description of Artificial Sequence: Synthetic oligonucleotide
caccuucagaaacguuuug

SEQ ID NO: 2241522 - RNA, 19 nt, Artificial Sequence
  Description of Artificial Sequence: Synthetic oligonucleotide
ucuccaggacuuucuccau

SEQ ID NO: 2241523 - RNA, 19 nt, Artificial Sequence
  Description of Artificial Sequence: Synthetic oligonucleotide
gcuagguaauucaaaucca

SEQ ID NO: 2241524 - RNA, 19 nt, Artificial Sequence
  Description of Artificial Sequence: Synthetic oligonucleotide
acaccuucagaaacguuuu

SEQ ID NO: 2241525 - RNA, 19 nt, Artificial Sequence
  Description of Artificial Sequence: Synthetic oligonucleotide
caacagggcuagguaauuc

SEQ ID NO: 2241526 - RNA, 19 nt, Artificial Sequence
  Description of Artificial Sequence: Synthetic oligonucleotide
gggcuagguaauucaaauc

SEQ ID NO: 2241527 - RNA, 19 nt, Artificial Sequence
  Description of Artificial Sequence: Synthetic oligonucleotide
cauguauaguaugucauuu

SEQ ID NO: 2241528 - RNA, 19 nt, Artificial Sequence
  Description of Artificial Sequence: Synthetic oligonucleotide
agcuuuuaucugauggauu

SEQ ID NO: 2241529 - RNA, 19 nt, Artificial Sequence
  Description of Artificial Sequence: Synthetic oligonucleotide
gggacugucuuuccacuuc

SEQ ID NO: 2241530 - RNA, 19 nt, Artificial Sequence
  Description of Artificial Sequence: Synthetic oligonucleotide
aucaggugugcugcuuuca

SEQ ID NO: 2241531 - RNA, 19 nt, Artificial Sequence
  Description of Artificial Sequence: Synthetic oligonucleotide
ggucauuuaccuuuccuuu

SEQ ID NO: 2241532 - RNA, 19 nt, Artificial Sequence
  Description of Artificial Sequence: Synthetic oligonucleotide
cagcucgauauuuucagau

SEQ ID NO: 2241533 - RNA, 19 nt, Artificial Sequence
  Description of Artificial Sequence: Synthetic oligonucleotide
acuucuguucuaagagaau

SEQ ID NO: 2241534 - RNA, 19 nt, Artificial Sequence
  Description of Artificial Sequence: Synthetic oligonucleotide
ggggauacgcauccuuuga

SEQ ID NO: 2241535 - RNA, 19 nt, Artificial Sequence
  Description of Artificial Sequence: Synthetic oligonucleotide
aucuuccgaagcagcaaca

SEQ ID NO: 2241536 - RNA, 19 nt, Artificial Sequence
  Description of Artificial Sequence: Synthetic oligonucleotide
cagggcuagguaauucaaa

SEQ ID NO: 2241537 - RNA, 19 nt, Artificial Sequence
  Description of Artificial Sequence: Synthetic oligonucleotide
cagacccucugaccuguac

SEQ ID NO: 2241538 - RNA, 19 nt, Artificial Sequence
  Description of Artificial Sequence: Synthetic oligonucleotide
gucaacgacuggggauacg

SEQ ID NO: 2241539 - RNA, 19 nt, Artificial Sequence
  Description of Artificial Sequence: Synthetic oligonucleotide
cuacuucuuucuuauuaau

SEQ ID NO: 2241540 - RNA, 19 nt, Artificial Sequence
  Description of Artificial Sequence: Synthetic oligonucleotide
cauccuuugagaguuguuu

SEQ ID NO: 2241541 - RNA, 19 nt, Artificial Sequence
  Description of Artificial Sequence: Synthetic oligonucleotide
cucgcacuccuaagaccug

SEQ ID NO: 2241542 - RNA, 19 nt, Artificial Sequence
  Description of Artificial Sequence: Synthetic oligonucleotide
gcuuacuauuggcuaaucu

SEQ ID NO: 2241543 - RNA, 19 nt, Artificial Sequence
  Description of Artificial Sequence: Synthetic oligonucleotide
cucugggacugucuuucca

SEQ ID NO: 2241544 - RNA, 19 nt, Artificial Sequence
  Description of Artificial Sequence: Synthetic oligonucleotide
caacgacuggggauacgca

SEQ ID NO: 2241545 - RNA, 19 nt, Artificial Sequence
  Description of Artificial Sequence: Synthetic oligonucleotide
cauuuucuaaguccagauu

SEQ ID NO: 2241546 - RNA, 19 nt, Artificial Sequence
  Description of Artificial Sequence: Synthetic oligonucleotide
gcuugguggguccucaugu

SEQ ID NO: 2241547 - RNA, 19 nt, Artificial Sequence
  Description of Artificial Sequence: Synthetic oligonucleotide
cuugguggguccucaugua

SEQ ID NO: 2241548 - RNA, 19 nt, Artificial Sequence
  Description of Artificial Sequence: Synthetic oligonucleotide
ugguccuuguuagcuuuua

SEQ ID NO: 2241549 - RNA, 19 nt, Artificial Sequence
  Description of Artificial Sequence: Synthetic oligonucleotide
gcagcaacagggcuaggua

SEQ ID NO: 2241550 - RNA, 19 nt, Artificial Sequence
  Description of Artificial Sequence: Synthetic oligonucleotide
ccagcuuacuauuggcuaa

SEQ ID NO: 2241551 - RNA, 19 nt, Artificial Sequence
  Description of Artificial Sequence: Synthetic oligonucleotide
gcuaaucuaaggagcugga

SEQ ID NO: 2241552 - RNA, 19 nt, Artificial Sequence
  Description of Artificial Sequence: Synthetic oligonucleotide
cgacuggggauacgcaucc

SEQ ID NO: 2241553 - RNA, 19 nt, Artificial Sequence
  Description of Artificial Sequence: Synthetic oligonucleotide
gcucgcacuccuaagaccu

SEQ ID NO: 2241554 - RNA, 19 nt, Artificial Sequence
  Description of Artificial Sequence: Synthetic oligonucleotide
cauuuaccuuuccuuuagu

SEQ ID NO: 2241555 - RNA, 19 nt, Artificial Sequence
  Description of Artificial Sequence: Synthetic oligonucleotide
cuccaaagcucgcacuccu

SEQ ID NO: 2241556 - RNA, 19 nt, Artificial Sequence
  Description of Artificial Sequence: Synthetic oligonucleotide
ggauaagcucuugaucugu

SEQ ID NO: 2241557 - RNA, 19 nt, Artificial Sequence
  Description of Artificial Sequence: Synthetic oligonucleotide
ggacugucuuuccacuucu

SEQ ID NO: 2241558 - RNA, 19 nt, Artificial Sequence
  Description of Artificial Sequence: Synthetic oligonucleotide
acccucugaccuguaccca

SEQ ID NO: 2241559 - RNA, 19 nt, Artificial Sequence
  Description of Artificial Sequence: Synthetic oligonucleotide
agugaucaucugacucuau

SEQ ID NO: 2241560 - RNA, 19 nt, Artificial Sequence
  Description of Artificial Sequence: Synthetic oligonucleotide
ccaaagcucgcacuccuaa

SEQ ID NO: 2241561 - RNA, 19 nt, Artificial Sequence
  Description of Artificial Sequence: Synthetic oligonucleotide
aggaucaggugugcugcuu

SEQ ID NO: 2241562 - RNA, 19 nt, Artificial Sequence
  Description of Artificial Sequence: Synthetic oligonucleotide
gaagagcuugguggguccu

SEQ ID NO: 2241563 - RNA, 19 nt, Artificial Sequence
  Description of Artificial Sequence: Synthetic oligonucleotide
cuguacccaaguuuccguu

SEQ ID NO: 2241564 - RNA, 19 nt, Artificial Sequence
  Description of Artificial Sequence: Synthetic oligonucleotide
gaaucucuuggaagagcuu

SEQ ID NO: 2241565 - RNA, 19 nt, Artificial Sequence
  Description of Artificial Sequence: Synthetic oligonucleotide
cacuucuaccagacccucu

SEQ ID NO: 2241566 - RNA, 19 nt, Artificial Sequence
  Description of Artificial Sequence: Synthetic oligonucleotide
ggaucaggugugcugcuuu

SEQ ID NO: 2241567 - RNA, 19 nt, Artificial Sequence
  Description of Artificial Sequence: Synthetic oligonucleotide
gguccuuguuagcuuuuau

SEQ ID NO: 2241568 - RNA, 19 nt, Artificial Sequence
  Description of Artificial Sequence: Synthetic oligonucleotide
ccacuucuaccagacccuc

SEQ ID NO: 2241569 - RNA, 19 nt, Artificial Sequence
  Description of Artificial Sequence: Synthetic oligonucleotide
ccuguacccaaguuuccgu

SEQ ID NO: 2241570 - RNA, 19 nt, Artificial Sequence
  Description of Artificial Sequence: Synthetic oligonucleotide
acgcauccuuugagaguug

SEQ ID NO: 2241571 - RNA, 19 nt, Artificial Sequence
  Description of Artificial Sequence: Synthetic oligonucleotide
cccucugaccuguacccaa

SEQ ID NO: 2241572 - RNA, 19 nt, Artificial Sequence
  Description of Artificial Sequence: Synthetic oligonucleotide
caggaucaggugugcugcu

SEQ ID NO: 2241573 - RNA, 19 nt, Artificial Sequence
  Description of Artificial Sequence: Synthetic oligonucleotide
ggguccucauguauaguau

SEQ ID NO: 2241574 - RNA, 19 nt, Artificial Sequence
  Description of Artificial Sequence: Synthetic oligonucleotide
gagcuugguggguccucau

SEQ ID NO: 2241575 - RNA, 19 nt, Artificial Sequence
  Description of Artificial Sequence: Synthetic oligonucleotide
gggaaauuauuaggacuuu

SEQ ID NO: 2241576 - RNA, 19 nt, Artificial Sequence
  Description of Artificial Sequence: Synthetic oligonucleotide
gacuggggauacgcauccu

SEQ ID NO: 2241577 - RNA, 19 nt, Artificial Sequence
  Description of Artificial Sequence: Synthetic oligonucleotide
guucuagcucugggacugu

SEQ ID NO: 2241578 - RNA, 19 nt, Artificial Sequence
  Description of Artificial Sequence: Synthetic oligonucleotide
gcaacagggcuagguaauu

SEQ ID NO: 2241579 - RNA, 19 nt, Artificial Sequence
  Description of Artificial Sequence: Synthetic oligonucleotide
ccguuucaacuuccuauuu

SEQ ID NO: 2241580 - RNA, 19 nt, Artificial Sequence
  Description of Artificial Sequence: Synthetic oligonucleotide
auagccauucgauagcgcc

SEQ ID NO: 2241581 - RNA, 19 nt, Artificial Sequence
  Description of Artificial Sequence: Synthetic oligonucleotide
gguacaugcagccagaagg

SEQ ID NO: 2241582 - RNA, 19 nt, Artificial Sequence
  Description of Artificial Sequence: Synthetic oligonucleotide
uuuaagggcagcugaauag

SEQ ID NO: 2241583 - RNA, 19 nt, Artificial Sequence
  Description of Artificial Sequence: Synthetic oligonucleotide
agugaugacugauucuugc

SEQ ID NO: 2241584 - RNA, 19 nt, Artificial Sequence
  Description of Artificial Sequence: Synthetic oligonucleotide
acaauacagggucagcugc

SEQ ID NO: 2241585 - RNA, 19 nt, Artificial Sequence
  Description of Artificial Sequence: Synthetic oligonucleotide
guugaggugggcuuuaagg

SEQ ID NO: 2241586 - RNA, 19 nt, Artificial Sequence
  Description of Artificial Sequence: Synthetic oligonucleotide
cacaccaagaccuugggcc

SEQ ID NO: 2241587 - RNA, 19 nt, Artificial Sequence
  Description of Artificial Sequence: Synthetic oligonucleotide
aauagacacggcugaacuc

SEQ ID NO: 2241588 - RNA, 19 nt, Artificial Sequence
  Description of Artificial Sequence: Synthetic oligonucleotide
cucaguacaauacaggguc

SEQ ID NO: 2241589 - RNA, 19 nt, Artificial Sequence
  Description of Artificial Sequence: Synthetic oligonucleotide
agcaacucuagguugccgc

SEQ ID NO: 2241590 - RNA, 19 nt, Artificial Sequence
  Description of Artificial Sequence: Synthetic oligonucleotide
aacucugcggcugaugucg

SEQ ID NO: 2241591 - RNA, 19 nt, Artificial Sequence
  Description of Artificial Sequence: Synthetic oligonucleotide
ugaaaaggaaagagccugg

SEQ ID NO: 2241592 - RNA, 19 nt, Artificial Sequence
  Description of Artificial Sequence: Synthetic oligonucleotide
acgaauggaggccuggccc

SEQ ID NO: 2241593 - RNA, 19 nt, Artificial Sequence
  Description of Artificial Sequence: Synthetic oligonucleotide
cuuaugcagcucaaaacgg

SEQ ID NO: 2241594 - RNA, 19 nt, Artificial Sequence
  Description of Artificial Sequence: Synthetic oligonucleotide
gauauagccauucgauagc

SEQ ID NO: 2241595 - RNA, 19 nt, Artificial Sequence
  Description of Artificial Sequence: Synthetic oligonucleotide
ugggcaacccuauggaugg

SEQ ID NO: 2241596 - RNA, 19 nt, Artificial Sequence
  Description of Artificial Sequence: Synthetic oligonucleotide
ggauauagccauucgauag

SEQ ID NO: 2241597 - RNA, 19 nt, Artificial Sequence
  Description of Artificial Sequence: Synthetic oligonucleotide
aaugucuggcggaugacac

SEQ ID NO: 2241598 - RNA, 19 nt, Artificial Sequence
  Description of Artificial Sequence: Synthetic oligonucleotide
accaaaucggcuccagccc

SEQ ID NO: 2241599 - RNA, 19 nt, Artificial Sequence
  Description of Artificial Sequence: Synthetic oligonucleotide
uucgauagcgcccucagua

SEQ ID NO: 2241600 - RNA, 19 nt, Artificial Sequence
  Description of Artificial Sequence: Synthetic oligonucleotide
acggcugaacucuugaaag

SEQ ID NO: 2241601 - RNA, 19 nt, Artificial Sequence
  Description of Artificial Sequence: Synthetic oligonucleotide
ugcaugcugguccuuaugc

SEQ ID NO: 2241602 - RNA, 19 nt, Artificial Sequence
  Description of Artificial Sequence: Synthetic oligonucleotide
caaagucacugguacaugc

SEQ ID NO: 2241603 - RNA, 19 nt, Artificial Sequence
  Description of Artificial Sequence: Synthetic oligonucleotide
ccuuaugcagcucaaaacg

SEQ ID NO: 2241604 - RNA, 19 nt, Artificial Sequence
  Description of Artificial Sequence: Synthetic oligonucleotide
gaccccaucguaugcagcg

SEQ ID NO: 2241605 - RNA, 19 nt, Artificial Sequence
  Description of Artificial Sequence: Synthetic oligonucleotide
agaagaagcuccgaugggg

SEQ ID NO: 2241606 - RNA, 19 nt, Artificial Sequence
  Description of Artificial Sequence: Synthetic oligonucleotide
gaaagcggggagcacagcc

SEQ ID NO: 2241607 - RNA, 19 nt, Artificial Sequence
  Description of Artificial Sequence: Synthetic oligonucleotide
ucuagguugccgcccaucc

SEQ ID NO: 2241608 - RNA, 19 nt, Artificial Sequence
  Description of Artificial Sequence: Synthetic oligonucleotide
aagcacagcgcgcagagaa

SEQ ID NO: 2241609 - RNA, 19 nt, Artificial Sequence
  Description of Artificial Sequence: Synthetic oligonucleotide
ggucccauggaucacaaag

SEQ ID NO: 2241610 - RNA, 19 nt, Artificial Sequence
  Description of Artificial Sequence: Synthetic oligonucleotide
gaggccgaagcacagcgcg

SEQ ID NO: 2241611 - RNA, 19 nt, Artificial Sequence
  Description of Artificial Sequence: Synthetic oligonucleotide
uacaauacagggucagcug

SEQ ID NO: 2241612 - RNA, 19 nt, Artificial Sequence
  Description of Artificial Sequence: Synthetic oligonucleotide
ugugguguggccugcagga

SEQ ID NO: 2241613 - RNA, 19 nt, Artificial Sequence
  Description of Artificial Sequence: Synthetic oligonucleotide
uccuuaugcagcucaaaac

SEQ ID NO: 2241614 - RNA, 19 nt, Artificial Sequence
  Description of Artificial Sequence: Synthetic oligonucleotide
agaagacguggccaggagg

SEQ ID NO: 2241615 - RNA, 19 nt, Artificial Sequence
  Description of Artificial Sequence: Synthetic oligonucleotide
gaagacguggccaggaggc

SEQ ID NO: 2241616 - RNA, 19 nt, Artificial Sequence
  Description of Artificial Sequence: Synthetic oligonucleotide
aaagcggggagcacagccc

SEQ ID NO: 2241617 - RNA, 19 nt, Artificial Sequence
  Description of Artificial Sequence: Synthetic oligonucleotide
gaaaaggaaagagccuggg

SEQ ID NO: 2241618 - RNA, 19 nt, Artificial Sequence
  Description of Artificial Sequence: Synthetic oligonucleotide
aaacggaaggcagcaacuc

SEQ ID NO: 2241619 - RNA, 19 nt, Artificial Sequence
  Description of Artificial Sequence: Synthetic oligonucleotide
gauucuugcagcuccaugu

SEQ ID NO: 2241620 - RNA, 19 nt, Artificial Sequence
  Description of Artificial Sequence: Synthetic oligonucleotide
auauagccauucgauagcg

SEQ ID NO: 2241621 - RNA, 19 nt, Artificial Sequence
  Description of Artificial Sequence: Synthetic oligonucleotide
uugaaagcggggagcacag

SEQ ID NO: 2241622 - RNA, 19 nt, Artificial Sequence
  Description of Artificial Sequence: Synthetic oligonucleotide
ucuugcagcuccaugucgu

SEQ ID NO: 2241623 - RNA, 19 nt, Artificial Sequence
  Description of Artificial Sequence: Synthetic oligonucleotide
caaaacggaaggcagcaac

SEQ ID NO: 2241624 - RNA, 19 nt, Artificial Sequence
  Description of Artificial Sequence: Synthetic oligonucleotide
acucuugaaagcggggagc

SEQ ID NO: 2241625 - RNA, 19 nt, Artificial Sequence
  Description of Artificial Sequence: Synthetic oligonucleotide
uucccaguuaccccauucc

SEQ ID NO: 2241626 - RNA, 19 nt, Artificial Sequence
  Description of Artificial Sequence: Synthetic oligonucleotide
auagacacggcugaacucu

SEQ ID NO: 2241627 - RNA, 19 nt, Artificial Sequence
  Description of Artificial Sequence: Synthetic oligonucleotide
agugccaccucacaugggu

SEQ ID NO: 2241628 - RNA, 19 nt, Artificial Sequence
  Description of Artificial Sequence: Synthetic oligonucleotide
aacgggguacgaauggagg

SEQ ID NO: 2241629 - RNA, 19 nt, Artificial Sequence
  Description of Artificial Sequence: Synthetic oligonucleotide
cauccguucagcgaagacc

SEQ ID NO: 2241630 - RNA, 19 nt, Artificial Sequence
  Description of Artificial Sequence: Synthetic oligonucleotide
aaaacggaaggcagcaacu

SEQ ID NO: 2241631 - RNA, 19 nt, Artificial Sequence
  Description of Artificial Sequence: Synthetic oligonucleotide
ugauucuugcagcuccaug

SEQ ID NO: 2241632 - RNA, 19 nt, Artificial Sequence
  Description of Artificial Sequence: Synthetic oligonucleotide
caggacgcacaccacagcg

SEQ ID NO: 2241633 - RNA, 19 nt, Artificial Sequence
  Description of Artificial Sequence: Synthetic oligonucleotide
uagguugccgcccauccgu

SEQ ID NO: 2241634 - RNA, 19 nt, Artificial Sequence
  Description of Artificial Sequence: Synthetic oligonucleotide
caggcuucaccaaaucggc

SEQ ID NO: 2241635 - RNA, 19 nt, Artificial Sequence
  Description of Artificial Sequence: Synthetic oligonucleotide
ccagaagaagcuccgaugg

SEQ ID NO: 2241636 - RNA, 19 nt, Artificial Sequence
  Description of Artificial Sequence: Synthetic oligonucleotide
ccaggcuucaccaaaucgg

SEQ ID NO: 2241637 - RNA, 19 nt, Artificial Sequence
  Description of Artificial Sequence: Synthetic oligonucleotide
gaauagacacggcugaacu

SEQ ID NO: 2241638 - RNA, 19 nt, Artificial Sequence
  Description of Artificial Sequence: Synthetic oligonucleotide
aaaagggcccggcgcucgc

SEQ ID NO: 2241639 - RNA, 19 nt, Artificial Sequence
  Description of Artificial Sequence: Synthetic oligonucleotide
ucaguacaauacaggguca

SEQ ID NO: 2241640 - RNA, 19 nt, Artificial Sequence
  Description of Artificial Sequence: Synthetic oligonucleotide
uagccauucgauagcgccc

SEQ ID NO: 2241641 - RNA, 19 nt, Artificial Sequence
  Description of Artificial Sequence: Synthetic oligonucleotide
cucagcaucacugcagggc

SEQ ID NO: 2241642 - RNA, 19 nt, Artificial Sequence
  Description of Artificial Sequence: Synthetic oligonucleotide
agaccuugggccuggggag

SEQ ID NO: 2241643 - RNA, 19 nt, Artificial Sequence
  Description of Artificial Sequence: Synthetic oligonucleotide
agggucagcugccccacgc

SEQ ID NO: 2241644 - RNA, 19 nt, Artificial Sequence
  Description of Artificial Sequence: Synthetic oligonucleotide
uggauauagccauucgaua

SEQ ID NO: 2241645 - RNA, 19 nt, Artificial Sequence
  Description of Artificial Sequence: Synthetic oligonucleotide
aacucuagguugccgccca

SEQ ID NO: 2241646 - RNA, 19 nt, Artificial Sequence
  Description of Artificial Sequence: Synthetic oligonucleotide
uauagccauucgauagcgc

SEQ ID NO: 2241647 - RNA, 19 nt, Artificial Sequence
  Description of Artificial Sequence: Synthetic oligonucleotide
ugaauagacacggcugaac

SEQ ID NO: 2241648 - RNA, 19 nt, Artificial Sequence
  Description of Artificial Sequence: Synthetic oligonucleotide
gaacaguggcaaugucugg

SEQ ID NO: 2241649 - RNA, 19 nt, Artificial Sequence
  Description of Artificial Sequence: Synthetic oligonucleotide
aaagucacugguacaugca

SEQ ID NO: 2241650 - RNA, 19 nt, Artificial Sequence
  Description of Artificial Sequence: Synthetic oligonucleotide
ucgugggcaacccuaugga

SEQ ID NO: 2241651 - RNA, 19 nt, Artificial Sequence
  Description of Artificial Sequence: Synthetic oligonucleotide
gacgaugcugggcugugug

SEQ ID NO: 2241652 - RNA, 19 nt, Artificial Sequence
  Description of Artificial Sequence: Synthetic oligonucleotide
cauucgauagcgcccucag

SEQ ID NO: 2241653 - RNA, 19 nt, Artificial Sequence
  Description of Artificial Sequence: Synthetic oligonucleotide
caguagcaacucuagguug

SEQ ID NO: 2241654 - RNA, 19 nt, Artificial Sequence
  Description of Artificial Sequence: Synthetic oligonucleotide
ugggcaccggcgaagggcc

SEQ ID NO: 2241655 - RNA, 19 nt, Artificial Sequence
  Description of Artificial Sequence: Synthetic oligonucleotide
ggcugaacucuugaaagcg

SEQ ID NO: 2241656 - RNA, 19 nt, Artificial Sequence
  Description of Artificial Sequence: Synthetic oligonucleotide
aguggcaaugucuggcgga

SEQ ID NO: 2241657 - RNA, 19 nt, Artificial Sequence
  Description of Artificial Sequence: Synthetic oligonucleotide
agcgcccucaguacaauac

SEQ ID NO: 2241658 - RNA, 19 nt, Artificial Sequence
  Description of Artificial Sequence: Synthetic oligonucleotide
aagcggggagcacagccca

SEQ ID NO: 2241659 - RNA, 19 nt, Artificial Sequence
  Description of Artificial Sequence: Synthetic oligonucleotide
ugggcccucggccaguagc

SEQ ID NO: 2241660 - RNA, 19 nt, Artificial Sequence
  Description of Artificial Sequence: Synthetic oligonucleotide
gagaagacguggccaggag

SEQ ID NO: 2241661 - RNA, 19 nt, Artificial Sequence
  Description of Artificial Sequence: Synthetic oligonucleotide
gaugucgcgguguggugug

SEQ ID NO: 2241662 - RNA, 19 nt, Artificial Sequence
  Description of Artificial Sequence: Synthetic oligonucleotide
gaacucuugaaagcgggga

SEQ ID NO: 2241663 - RNA, 19 nt, Artificial Sequence
  Description of Artificial Sequence: Synthetic oligonucleotide
caacgggguacgaauggag

SEQ ID NO: 2241664 - RNA, 19 nt, Artificial Sequence
  Description of Artificial Sequence: Synthetic oligonucleotide
ucgauagcgcccucaguac

SEQ ID NO: 2241665 - RNA, 19 nt, Artificial Sequence
  Description of Artificial Sequence: Synthetic oligonucleotide
acagcgcgcagagaagcgc

SEQ ID NO: 2241666 - RNA, 19 nt, Artificial Sequence
  Description of Artificial Sequence: Synthetic oligonucleotide
acaccaagaccuugggccu

SEQ ID NO: 2241667 - RNA, 19 nt, Artificial Sequence
  Description of Artificial Sequence: Synthetic oligonucleotide
agcgcaacgggguacgaau

SEQ ID NO: 2241668 - RNA, 19 nt, Artificial Sequence
  Description of Artificial Sequence: Synthetic oligonucleotide
auucccagaagaagcuccg

SEQ ID NO: 2241669 - RNA, 19 nt, Artificial Sequence
  Description of Artificial Sequence: Synthetic oligonucleotide
ucuggcggaugacacgggu

SEQ ID NO: 2241670 - RNA, 19 nt, Artificial Sequence
  Description of Artificial Sequence: Synthetic oligonucleotide
aacccuauggaugguccca

SEQ ID NO: 2241671 - RNA, 19 nt, Artificial Sequence
  Description of Artificial Sequence: Synthetic oligonucleotide
ucccagaagaagcuccgau

SEQ ID NO: 2241672 - RNA, 19 nt, Artificial Sequence
  Description of Artificial Sequence: Synthetic oligonucleotide
ugugugcccggaucggggc

SEQ ID NO: 2241673 - RNA, 19 nt, Artificial Sequence
  Description of Artificial Sequence: Synthetic oligonucleotide
gaugacacggguggccacc

SEQ ID NO: 2241674 - RNA, 19 nt, Artificial Sequence
  Description of Artificial Sequence: Synthetic oligonucleotide
gaggggcgcagacagacga

SEQ ID NO: 2241675 - RNA, 19 nt, Artificial Sequence
  Description of Artificial Sequence: Synthetic oligonucleotide
gugggcaacccuauggaug

SEQ ID NO: 2241676 - RNA, 19 nt, Artificial Sequence
  Description of Artificial Sequence: Synthetic oligonucleotide
gacacggcugaacucuuga

SEQ ID NO: 2241677 - RNA, 19 nt, Artificial Sequence
  Description of Artificial Sequence: Synthetic oligonucleotide
gaugcugggcugugugccc

SEQ ID NO: 2241678 - RNA, 19 nt, Artificial Sequence
  Description of Artificial Sequence: Synthetic oligonucleotide
cuugaaagcggggagcaca

SEQ ID NO: 2241679 - RNA, 19 nt, Artificial Sequence
  Description of Artificial Sequence: Synthetic oligonucleotide
caucguaugcagcggcccc

SEQ ID NO: 2241680 - RNA, 19 nt, Artificial Sequence
  Description of Artificial Sequence: Synthetic oligonucleotide
gugaugacugauucuugca

SEQ ID NO: 2241681 - RNA, 19 nt, Artificial Sequence
  Description of Artificial Sequence: Synthetic oligonucleotide
cucccuaccacccuuccca

SEQ ID NO: 2241682 - RNA, 19 nt, Artificial Sequence
  Description of Artificial Sequence: Synthetic oligonucleotide
aaucggcuccagcccauga

SEQ ID NO: 2241683 - RNA, 19 nt, Artificial Sequence
  Description of Artificial Sequence: Synthetic oligonucleotide
cuagguugccgcccauccg

SEQ ID NO: 2241684 - RNA, 19 nt, Artificial Sequence
  Description of Artificial Sequence: Synthetic oligonucleotide
caacccuauggaugguccc

SEQ ID NO: 2241685 - RNA, 19 nt, Artificial Sequence
  Description of Artificial Sequence: Synthetic oligonucleotide
ugaugucgcgguguggugu

SEQ ID NO: 2241686 - RNA, 19 nt, Artificial Sequence
  Description of Artificial Sequence: Synthetic oligonucleotide
ccuauggauggucccaugg

SEQ ID NO: 2241687 - RNA, 19 nt, Artificial Sequence
  Description of Artificial Sequence: Synthetic oligonucleotide
ugggcuuuaagggcagcug

SEQ ID NO: 2241688 - RNA, 19 nt, Artificial Sequence
  Description of Artificial Sequence: Synthetic oligonucleotide
ccaguuaccccauucccag

SEQ ID NO: 2241689 - RNA, 19 nt, Artificial Sequence
  Description of Artificial Sequence: Synthetic oligonucleotide
aagggcagcugaauagaca

SEQ ID NO: 2241690 - RNA, 19 nt, Artificial Sequence
  Description of Artificial Sequence: Synthetic oligonucleotide
aggacgcacaccacagcgc

SEQ ID NO: 2241691 - RNA, 19 nt, Artificial Sequence
  Description of Artificial Sequence: Synthetic oligonucleotide
ccccauucccagaagaagc

SEQ ID NO: 2241692 - RNA, 19 nt, Artificial Sequence
  Description of Artificial Sequence: Synthetic oligonucleotide
cagcgcgcagagaagcgcg

SEQ ID NO: 2241693 - RNA, 19 nt, Artificial Sequence
  Description of Artificial Sequence: Synthetic oligonucleotide
gccaggcuucaccaaaucg

SEQ ID NO: 2241694 - RNA, 19 nt, Artificial Sequence
  Description of Artificial Sequence: Synthetic oligonucleotide
cucaaaacggaaggcagca

SEQ ID NO: 2241695 - RNA, 19 nt, Artificial Sequence
  Description of Artificial Sequence: Synthetic oligonucleotide
uucaccaaaucggcuccag

SEQ ID NO: 2241696 - RNA, 19 nt, Artificial Sequence
  Description of Artificial Sequence: Synthetic oligonucleotide
cacgcugccgggcuccugg

SEQ ID NO: 2241697 - RNA, 19 nt, Artificial Sequence
  Description of Artificial Sequence: Synthetic oligonucleotide
gcccaugaaaaggaaagag

SEQ ID NO: 2241698 - RNA, 19 nt, Artificial Sequence
  Description of Artificial Sequence: Synthetic oligonucleotide
cacagcgcgcagagaagcg

SEQ ID NO: 2241699 - RNA, 19 nt, Artificial Sequence
  Description of Artificial Sequence: Synthetic oligonucleotide
cuucccaguuaccccauuc

SEQ ID NO: 2241700 - RNA, 19 nt, Artificial Sequence
  Description of Artificial Sequence: Synthetic oligonucleotide
uagcaacucuagguugccg

SEQ ID NO: 2241701 - RNA, 19 nt, Artificial Sequence
  Description of Artificial Sequence: Synthetic oligonucleotide
cacccuucccaguuacccc

SEQ ID NO: 2241702 - RNA, 19 nt, Artificial Sequence
  Description of Artificial Sequence: Synthetic oligonucleotide
gcugcagcgguccuuggag

SEQ ID NO: 2241703 - RNA, 19 nt, Artificial Sequence
  Description of Artificial Sequence: Synthetic oligonucleotide
ggcuucaccaaaucggcuc

SEQ ID NO: 2241704 - RNA, 19 nt, Artificial Sequence
  Description of Artificial Sequence: Synthetic oligonucleotide
aguagccggcacgagaaga

SEQ ID NO: 2241705 - RNA, 19 nt, Artificial Sequence
  Description of Artificial Sequence: Synthetic oligonucleotide
cuauggauggucccaugga

SEQ ID NO: 2241706 - RNA, 19 nt, Artificial Sequence
  Description of Artificial Sequence: Synthetic oligonucleotide
guacaugcagccagaagga

SEQ ID NO: 2241707 - RNA, 19 nt, Artificial Sequence
  Description of Artificial Sequence: Synthetic oligonucleotide
uggggaggcauuucugcau

SEQ ID NO: 2241708 - RNA, 19 nt, Artificial Sequence
  Description of Artificial Sequence: Synthetic oligonucleotide
gcuggauauagccauucga

SEQ ID NO: 2241709 - RNA, 19 nt, Artificial Sequence
  Description of Artificial Sequence: Synthetic oligonucleotide
cagugaugacugauucuug

SEQ ID NO: 2241710 - RNA, 19 nt, Artificial Sequence
  Description of Artificial Sequence: Synthetic oligonucleotide
cagacagacgaugcugggc

SEQ ID NO: 2241711 - RNA, 19 nt, Artificial Sequence
  Description of Artificial Sequence: Synthetic oligonucleotide
ugcaggaaaagggcccggc

SEQ ID NO: 2241712 - RNA, 19 nt, Artificial Sequence
  Description of Artificial Sequence: Synthetic oligonucleotide
cuugcagcuccaugucgug

SEQ ID NO: 2241713 - RNA, 19 nt, Artificial Sequence
  Description of Artificial Sequence: Synthetic oligonucleotide
caguggcaaugucuggcgg

SEQ ID NO: 2241714 - RNA, 19 nt, Artificial Sequence
  Description of Artificial Sequence: Synthetic oligonucleotide
ucugagcccucuuccugga

SEQ ID NO: 2241715 - RNA, 19 nt, Artificial Sequence
  Description of Artificial Sequence: Synthetic oligonucleotide
cucucaguccagugccacc

SEQ ID NO: 2241716 - RNA, 19 nt, Artificial Sequence
  Description of Artificial Sequence: Synthetic oligonucleotide
cagggucaggcgcagcgcc

SEQ ID NO: 2241717 - RNA, 19 nt, Artificial Sequence
  Description of Artificial Sequence: Synthetic oligonucleotide
aguccagugccaccucaca

SEQ ID NO: 2241718 - RNA, 19 nt, Artificial Sequence
  Description of Artificial Sequence: Synthetic oligonucleotide
gcugaacucuugaaagcgg

SEQ ID NO: 2241719 - RNA, 19 nt, Artificial Sequence
  Description of Artificial Sequence: Synthetic oligonucleotide
gaucacaaagucacuggua

SEQ ID NO: 2241720 - RNA, 19 nt, Artificial Sequence
  Description of Artificial Sequence: Synthetic oligonucleotide
cuccaugucgugggcaacc

SEQ ID NO: 2241721 - RNA, 19 nt, Artificial Sequence
  Description of Artificial Sequence: Synthetic oligonucleotide
gacagacgaugcugggcug

SEQ ID NO: 2241722 - RNA, 19 nt, Artificial Sequence
  Description of Artificial Sequence: Synthetic oligonucleotide
uggccaggaggccgaagca

SEQ ID NO: 2241723 - RNA, 19 nt, Artificial Sequence
  Description of Artificial Sequence: Synthetic oligonucleotide
ugucgugggcaacccuaug

SEQ ID NO: 2241724 - RNA, 19 nt, Artificial Sequence
  Description of Artificial Sequence: Synthetic oligonucleotide
ucccuaccacccuucccag

SEQ ID NO: 2241725 - RNA, 19 nt, Artificial Sequence
  Description of Artificial Sequence: Synthetic oligonucleotide
guugcucccaggucucuca

SEQ ID NO: 2241726 - RNA, 19 nt, Artificial Sequence
  Description of Artificial Sequence: Synthetic oligonucleotide
acauggguugaggugggcu

SEQ ID NO: 2241727 - RNA, 19 nt, Artificial Sequence
  Description of Artificial Sequence: Synthetic oligonucleotide
ggcuggauauagccauucg

SEQ ID NO: 2241728 - RNA, 19 nt, Artificial Sequence
  Description of Artificial Sequence: Synthetic oligonucleotide
auucgauagcgcccucagu

SEQ ID NO: 2241729 - RNA, 19 nt, Artificial Sequence
  Description of Artificial Sequence: Synthetic oligonucleotide
ggcacgagaagacguggcc

SEQ ID NO: 2241730 - RNA, 19 nt, Artificial Sequence
  Description of Artificial Sequence: Synthetic oligonucleotide
uccaugucgugggcaaccc

SEQ ID NO: 2241731 - RNA, 19 nt, Artificial Sequence
  Description of Artificial Sequence: Synthetic oligonucleotide
acacggguggccaccacag

SEQ ID NO: 2241732 - RNA, 19 nt, Artificial Sequence
  Description of Artificial Sequence: Synthetic oligonucleotide
guugccgcccauccguuca

SEQ ID NO: 2241733 - RNA, 19 nt, Artificial Sequence
  Description of Artificial Sequence: Synthetic oligonucleotide
aaagggcccggcgcucgcg

SEQ ID NO: 2241734 - RNA, 19 nt, Artificial Sequence
  Description of Artificial Sequence: Synthetic oligonucleotide
agccauucgauagcgcccu

SEQ ID NO: 2241735 - RNA, 19 nt, Artificial Sequence
  Description of Artificial Sequence: Synthetic oligonucleotide
guagccggcacgagaagac

SEQ ID NO: 2241736 - RNA, 19 nt, Artificial Sequence
  Description of Artificial Sequence: Synthetic oligonucleotide
ugcagcgguccuuggagua

SEQ ID NO: 2241737 - RNA, 19 nt, Artificial Sequence
  Description of Artificial Sequence: Synthetic oligonucleotide
caacucuagguugccgccc

SEQ ID NO: 2241738 - RNA, 19 nt, Artificial Sequence
  Description of Artificial Sequence: Synthetic oligonucleotide
gaguagccggcacgagaag

SEQ ID NO: 2241739 - RNA, 19 nt, Artificial Sequence
  Description of Artificial Sequence: Synthetic oligonucleotide
gguacgaauggaggccugg

SEQ ID NO: 2241740 - RNA, 19 nt, Artificial Sequence
  Description of Artificial Sequence: Synthetic oligonucleotide
agcgaagaccugggcaccg

SEQ ID NO: 2241741 - RNA, 19 nt, Artificial Sequence
  Description of Artificial Sequence: Synthetic oligonucleotide
aaaucggcuccagcccaug

SEQ ID NO: 2241742 - RNA, 19 nt, Artificial Sequence
  Description of Artificial Sequence: Synthetic oligonucleotide
guagcaacucuagguugcc

SEQ ID NO: 2241743 - RNA, 19 nt, Artificial Sequence
  Description of Artificial Sequence: Synthetic oligonucleotide
gcaacucuagguugccgcc

SEQ ID NO: 2241744 - RNA, 19 nt, Artificial Sequence
  Description of Artificial Sequence: Synthetic oligonucleotide
caagaccuugggccugggg

SEQ ID NO: 2241745 - RNA, 19 nt, Artificial Sequence
  Description of Artificial Sequence: Synthetic oligonucleotide
gauagcgcccucaguacaa

SEQ ID NO: 2241746 - RNA, 19 nt, Artificial Sequence
  Description of Artificial Sequence: Synthetic oligonucleotide
agcccaugaaaaggaaaga

SEQ ID NO: 2241747 - RNA, 19 nt, Artificial Sequence
  Description of Artificial Sequence: Synthetic oligonucleotide
gggcugugugcccggaucg

SEQ ID NO: 2241748 - RNA, 19 nt, Artificial Sequence
  Description of Artificial Sequence: Synthetic oligonucleotide
accaagaccuugggccugg

SEQ ID NO: 2241749 - RNA, 19 nt, Artificial Sequence
  Description of Artificial Sequence: Synthetic oligonucleotide
ucaaaacggaaggcagcaa

SEQ ID NO: 2241750 - RNA, 19 nt, Artificial Sequence
  Description of Artificial Sequence: Synthetic oligonucleotide
guacgaauggaggccuggc

SEQ ID NO: 2241751 - RNA, 19 nt, Artificial Sequence
  Description of Artificial Sequence: Synthetic oligonucleotide
uugccgcccauccguucag

SEQ ID NO: 2241752 - RNA, 19 nt, Artificial Sequence
  Description of Artificial Sequence: Synthetic oligonucleotide
ugacugauucuugcagcuc

SEQ ID NO: 2241753 - RNA, 19 nt, Artificial Sequence
  Description of Artificial Sequence: Synthetic oligonucleotide
agcugcagcgguccuugga

SEQ ID NO: 2241754 - RNA, 19 nt, Artificial Sequence
  Description of Artificial Sequence: Synthetic oligonucleotide
cuggggaggcauuucugca

SEQ ID NO: 2241755 - RNA, 19 nt, Artificial Sequence
  Description of Artificial Sequence: Synthetic oligonucleotide
ucuugaaagcggggagcac

SEQ ID NO: 2241756 - RNA, 19 nt, Artificial Sequence
  Description of Artificial Sequence: Synthetic oligonucleotide
ccuuggaguagccggcacg

SEQ ID NO: 2241757 - RNA, 19 nt, Artificial Sequence
  Description of Artificial Sequence: Synthetic oligonucleotide
ggggaggcauuucugcaug

SEQ ID NO: 2241758 - RNA, 19 nt, Artificial Sequence
  Description of Artificial Sequence: Synthetic oligonucleotide
gcucaaaacggaaggcagc

SEQ ID NO: 2241759 - RNA, 19 nt, Artificial Sequence
  Description of Artificial Sequence: Synthetic oligonucleotide
ccacagugaugacugauuc

SEQ ID NO: 2241760 - RNA, 19 nt, Artificial Sequence
  Description of Artificial Sequence: Synthetic oligonucleotide
caaugucuggcggaugaca

SEQ ID NO: 2241761 - RNA, 19 nt, Artificial Sequence
  Description of Artificial Sequence: Synthetic oligonucleotide
cgguccuuggaguagccgg

SEQ ID NO: 2241762 - RNA, 19 nt, Artificial Sequence
  Description of Artificial Sequence: Synthetic oligonucleotide
cugaugucgcgguguggug

SEQ ID NO: 2241763 - RNA, 19 nt, Artificial Sequence
  Description of Artificial Sequence: Synthetic oligonucleotide
ugugcccggaucggggcug

SEQ ID NO: 2241764 - RNA, 19 nt, Artificial Sequence
  Description of Artificial Sequence: Synthetic oligonucleotide
gccccggcuggauauagcc

SEQ ID NO: 2241765 - RNA, 19 nt, Artificial Sequence
  Description of Artificial Sequence: Synthetic oligonucleotide
cugcaugcugguccuuaug

SEQ ID NO: 2241766 - RNA, 19 nt, Artificial Sequence
  Description of Artificial Sequence: Synthetic oligonucleotide
gcaacccuauggauggucc

SEQ ID NO: 2241767 - RNA, 19 nt, Artificial Sequence
  Description of Artificial Sequence: Synthetic oligonucleotide
agggucaggcgcagcgccc

SEQ ID NO: 2241768 - RNA, 19 nt, Artificial Sequence
  Description of Artificial Sequence: Synthetic oligonucleotide
uccguucagcgaagaccug

SEQ ID NO: 2241769 - RNA, 19 nt, Artificial Sequence
  Description of Artificial Sequence: Synthetic oligonucleotide
caacucugcggcugauguc

SEQ ID NO: 2241770 - RNA, 19 nt, Artificial Sequence
  Description of Artificial Sequence: Synthetic oligonucleotide
gcucgcggggaccccaucg

SEQ ID NO: 2241771 - RNA, 19 nt, Artificial Sequence
  Description of Artificial Sequence: Synthetic oligonucleotide
ugucgcggugugguguggc

SEQ ID NO: 2241772 - RNA, 19 nt, Artificial Sequence
  Description of Artificial Sequence: Synthetic oligonucleotide
aggccgaagcacagcgcgc

SEQ ID NO: 2241773 - RNA, 19 nt, Artificial Sequence
  Description of Artificial Sequence: Synthetic oligonucleotide
acucugcggcugaugucgc

SEQ ID NO: 2241774 - RNA, 19 nt, Artificial Sequence
  Description of Artificial Sequence: Synthetic oligonucleotide
ugccccacgcugccgggcu

SEQ ID NO: 2241775 - RNA, 19 nt, Artificial Sequence
  Description of Artificial Sequence: Synthetic oligonucleotide
agcaacucugcggcugaug

SEQ ID NO: 2241776 - RNA, 19 nt, Artificial Sequence
  Description of Artificial Sequence: Synthetic oligonucleotide
cguucagcgaagaccuggg

SEQ ID NO: 2241777 - RNA, 19 nt, Artificial Sequence
  Description of Artificial Sequence: Synthetic oligonucleotide
gggaccccaucguaugcag

SEQ ID NO: 2241778 - RNA, 19 nt, Artificial Sequence
  Description of Artificial Sequence: Synthetic oligonucleotide
agcgguccuuggaguagcc

SEQ ID NO: 2241779 - RNA, 19 nt, Artificial Sequence
  Description of Artificial Sequence: Synthetic oligonucleotide
accacagcgcaacggggua

SEQ ID NO: 2241780 - RNA, 19 nt, Artificial Sequence
  Description of Artificial Sequence: Synthetic oligonucleotide
ggaucggggcugcccaggg

SEQ ID NO: 2241781 - RNA, 19 nt, Artificial Sequence
  Description of Artificial Sequence: Synthetic oligonucleotide
gucgcggugugguguggcc

SEQ ID NO: 2241782 - RNA, 19 nt, Artificial Sequence
  Description of Artificial Sequence: Synthetic oligonucleotide
ggaguagccggcacgagaa

SEQ ID NO: 2241783 - RNA, 19 nt, Artificial Sequence
  Description of Artificial Sequence: Synthetic oligonucleotide
gguccuuggaguagccggc

SEQ ID NO: 2241784 - RNA, 19 nt, Artificial Sequence
  Description of Artificial Sequence: Synthetic oligonucleotide
ccguucagcgaagaccugg

SEQ ID NO: 2241785 - RNA, 19 nt, Artificial Sequence
  Description of Artificial Sequence: Synthetic oligonucleotide
gcaacucugcggcugaugu

SEQ ID NO: 2241786 - RNA, 19 nt, Artificial Sequence
  Description of Artificial Sequence: Synthetic oligonucleotide
ggugugguguggccugcag

SEQ ID NO: 2241787 - RNA, 19 nt, Artificial Sequence
  Description of Artificial Sequence: Synthetic oligonucleotide
ggcagcaacucugcggcug

SEQ ID NO: 2241788 - RNA, 19 nt, Artificial Sequence
  Description of Artificial Sequence: Synthetic oligonucleotide
agaccugggcaccggcgaa

SEQ ID NO: 2241789 - RNA, 19 nt, Artificial Sequence
  Description of Artificial Sequence: Synthetic oligonucleotide
gucccauggaucacaaagu

SEQ ID NO: 2241790 - RNA, 19 nt, Artificial Sequence
  Description of Artificial Sequence: Synthetic oligonucleotide
cagcgaagaccugggcacc

SEQ ID NO: 2241791 - RNA, 19 nt, Artificial Sequence
  Description of Artificial Sequence: Synthetic oligonucleotide
cgaagcacagcgcgcagag

SEQ ID NO: 2241792 - RNA, 19 nt, Artificial Sequence
  Description of Artificial Sequence: Synthetic oligonucleotide
ucgcggugugguguggccu

SEQ ID NO: 2241793 - RNA, 19 nt, Artificial Sequence
  Description of Artificial Sequence: Synthetic oligonucleotide
gggaggcauuucugcaugc

SEQ ID NO: 2241794 - RNA, 19 nt, Artificial Sequence
  Description of Artificial Sequence: Synthetic oligonucleotide
agccggcacgagaagacgu

SEQ ID NO: 2241795 - RNA, 19 nt, Artificial Sequence
  Description of Artificial Sequence: Synthetic oligonucleotide
gccgcccauccguucagcg

SEQ ID NO: 2241796 - RNA, 19 nt, Artificial Sequence
  Description of Artificial Sequence: Synthetic oligonucleotide
ccugggucaagccgcugcc

SEQ ID NO: 2241797 - RNA, 19 nt, Artificial Sequence
  Description of Artificial Sequence: Synthetic oligonucleotide
cccaucguaugcagcggcc

SEQ ID NO: 2241798 - RNA, 19 nt, Artificial Sequence
  Description of Artificial Sequence: Synthetic oligonucleotide
cgcaacgggguacgaaugg

SEQ ID NO: 2241799 - RNA, 19 nt, Artificial Sequence
  Description of Artificial Sequence: Synthetic oligonucleotide
uagcgcccucaguacaaua

SEQ ID NO: 2241800 - RNA, 19 nt, Artificial Sequence
  Description of Artificial Sequence: Synthetic oligonucleotide
ccacaccaagaccuugggc

SEQ ID NO: 2241801 - RNA, 19 nt, Artificial Sequence
  Description of Artificial Sequence: Synthetic oligonucleotide
cauggaucacaaagucacu

SEQ ID NO: 2241802 - RNA, 19 nt, Artificial Sequence
  Description of Artificial Sequence: Synthetic oligonucleotide
ugacacggguggccaccac

SEQ ID NO: 2241803 - RNA, 19 nt, Artificial Sequence
  Description of Artificial Sequence: Synthetic oligonucleotide
cccaguuaccccauuccca

SEQ ID NO: 2241804 - RNA, 19 nt, Artificial Sequence
  Description of Artificial Sequence: Synthetic oligonucleotide
gcgcagacagacgaugcug

SEQ ID NO: 2241805 - RNA, 19 nt, Artificial Sequence
  Description of Artificial Sequence: Synthetic oligonucleotide
cucuagguugccgcccauc

SEQ ID NO: 2241806 - RNA, 19 nt, Artificial Sequence
  Description of Artificial Sequence: Synthetic oligonucleotide
gucaagccgcugccccucc

SEQ ID NO: 2241807 - RNA, 19 nt, Artificial Sequence
  Description of Artificial Sequence: Synthetic oligonucleotide
auggguugaggugggcuuu

SEQ ID NO: 2241808 - RNA, 19 nt, Artificial Sequence
  Description of Artificial Sequence: Synthetic oligonucleotide
cagacgaugcugggcugug

SEQ ID NO: 2241809 - RNA, 19 nt, Artificial Sequence
  Description of Artificial Sequence: Synthetic oligonucleotide
ucgcggggaccccaucgua

SEQ ID NO: 2241810 - RNA, 19 nt, Artificial Sequence
  Description of Artificial Sequence: Synthetic oligonucleotide
aggugggcuuuaagggcag

SEQ ID NO: 2241811 - RNA, 19 nt, Artificial Sequence
  Description of Artificial Sequence: Synthetic oligonucleotide
cauggguugaggugggcuu

SEQ ID NO: 2241812 - RNA, 19 nt, Artificial Sequence
  Description of Artificial Sequence: Synthetic oligonucleotide
cugaauagacacggcugaa

SEQ ID NO: 2241813 - RNA, 19 nt, Artificial Sequence
  Description of Artificial Sequence: Synthetic oligonucleotide
uggucccauggaucacaaa

SEQ ID NO: 2241814 - RNA, 19 nt, Artificial Sequence
  Description of Artificial Sequence: Synthetic oligonucleotide
ccgcgaggggcgcagacag

SEQ ID NO: 2241815 - RNA, 19 nt, Artificial Sequence
  Description of Artificial Sequence: Synthetic oligonucleotide
ccaaaucggcuccagccca

SEQ ID NO: 2241816 - RNA, 19 nt, Artificial Sequence
  Description of Artificial Sequence: Synthetic oligonucleotide
acccuauggauggucccau

SEQ ID NO: 2241817 - RNA, 19 nt, Artificial Sequence
  Description of Artificial Sequence: Synthetic oligonucleotide
gcggggaccccaucguaug

SEQ ID NO: 2241818 - RNA, 19 nt, Artificial Sequence
  Description of Artificial Sequence: Synthetic oligonucleotide
cgaagggccgcgaggggcg

SEQ ID NO: 2241819 - RNA, 19 nt, Artificial Sequence
  Description of Artificial Sequence: Synthetic oligonucleotide
auagcgcccucaguacaau

SEQ ID NO: 2241820 - RNA, 19 nt, Artificial Sequence
  Description of Artificial Sequence: Synthetic oligonucleotide
gcacgagaagacguggcca

SEQ ID NO: 2241821 - RNA, 19 nt, Artificial Sequence
  Description of Artificial Sequence: Synthetic oligonucleotide
gcgaggggcgcagacagac

SEQ ID NO: 2241822 - RNA, 19 nt, Artificial Sequence
  Description of Artificial Sequence: Synthetic oligonucleotide
gucuggcggaugacacggg

SEQ ID NO: 2241823 - RNA, 19 nt, Artificial Sequence
  Description of Artificial Sequence: Synthetic oligonucleotide
caccaagaccuugggccug

SEQ ID NO: 2241824 - RNA, 19 nt, Artificial Sequence
  Description of Artificial Sequence: Synthetic oligonucleotide
caccacagcgcaacggggu

SEQ ID NO: 2241825 - RNA, 19 nt, Artificial Sequence
  Description of Artificial Sequence: Synthetic oligonucleotide
augucgugggcaacccuau

SEQ ID NO: 2241826 - RNA, 19 nt, Artificial Sequence
  Description of Artificial Sequence: Synthetic oligonucleotide
cagggucagcugccccacg

SEQ ID NO: 2241827 - RNA, 19 nt, Artificial Sequence
  Description of Artificial Sequence: Synthetic oligonucleotide
gccugcaggcaccauccac

SEQ ID NO: 2241828 - RNA, 19 nt, Artificial Sequence
  Description of Artificial Sequence: Synthetic oligonucleotide
gcugaugucgcgguguggu

SEQ ID NO: 2241829 - RNA, 19 nt, Artificial Sequence
  Description of Artificial Sequence: Synthetic oligonucleotide
gggcguugcucccaggucu

SEQ ID NO: 2241830 - RNA, 19 nt, Artificial Sequence
  Description of Artificial Sequence: Synthetic oligonucleotide
gucaggcgcagcgccccgg

SEQ ID NO: 2241831 - RNA, 19 nt, Artificial Sequence
  Description of Artificial Sequence: Synthetic oligonucleotide
uggguugaggugggcuuua

SEQ ID NO: 2241832 - RNA, 19 nt, Artificial Sequence
  Description of Artificial Sequence: Synthetic oligonucleotide
gcagcgguccuuggaguag

SEQ ID NO: 2241833 - RNA, 19 nt, Artificial Sequence
  Description of Artificial Sequence: Synthetic oligonucleotide
augucgcgguguggugugg

SEQ ID NO: 2241834 - RNA, 19 nt, Artificial Sequence
  Description of Artificial Sequence: Synthetic oligonucleotide
guccagugccaccucacau

SEQ ID NO: 2241835 - RNA, 19 nt, Artificial Sequence
  Description of Artificial Sequence: Synthetic oligonucleotide
gcgaagggccgcgaggggc

SEQ ID NO: 2241836 - RNA, 19 nt, Artificial Sequence
  Description of Artificial Sequence: Synthetic oligonucleotide
aggcagcaacucugcggcu

SEQ ID NO: 2241837 - RNA, 19 nt, Artificial Sequence
  Description of Artificial Sequence: Synthetic oligonucleotide
gcggaugacacggguggcc

SEQ ID NO: 2241838 - RNA, 19 nt, Artificial Sequence
  Description of Artificial Sequence: Synthetic oligonucleotide
gcgcccucaguacaauaca

SEQ ID NO: 2241839 - RNA, 19 nt, Artificial Sequence
  Description of Artificial Sequence: Synthetic oligonucleotide
ggcgaagggccgcgagggg

SEQ ID NO: 2241840 - RNA, 19 nt, Artificial Sequence
  Description of Artificial Sequence: Synthetic oligonucleotide
gcagcaacucugcggcuga

SEQ ID NO: 2241841 - RNA, 19 nt, Artificial Sequence
  Description of Artificial Sequence: Synthetic oligonucleotide
agacgaugcugggcugugu

SEQ ID NO: 2241842 - RNA, 19 nt, Artificial Sequence
  Description of Artificial Sequence: Synthetic oligonucleotide
acucuagguugccgcccau

SEQ ID NO: 2241843 - RNA, 19 nt, Artificial Sequence
  Description of Artificial Sequence: Synthetic oligonucleotide
gaagggccgcgaggggcgc

SEQ ID NO: 2241844 - RNA, 19 nt, Artificial Sequence
  Description of Artificial Sequence: Synthetic oligonucleotide
cagcugcagcgguccuugg

SEQ ID NO: 2241845 - RNA, 19 nt, Artificial Sequence
  Description of Artificial Sequence: Synthetic oligonucleotide
ggcaacccuauggaugguc

SEQ ID NO: 2241846 - RNA, 19 nt, Artificial Sequence
  Description of Artificial Sequence: Synthetic oligonucleotide
ccauccguucagcgaagac

SEQ ID NO: 2241847 - RNA, 19 nt, Artificial Sequence
  Description of Artificial Sequence: Synthetic oligonucleotide
gucucucaguccagugcca

SEQ ID NO: 2241848 - RNA, 19 nt, Artificial Sequence
  Description of Artificial Sequence: Synthetic oligonucleotide
ccucaguacaauacagggu

SEQ ID NO: 2241849 - RNA, 19 nt, Artificial Sequence
  Description of Artificial Sequence: Synthetic oligonucleotide
ugccgcccauccguucagc

SEQ ID NO: 2241850 - RNA, 19 nt, Artificial Sequence
  Description of Artificial Sequence: Synthetic oligonucleotide
gcaacgggguacgaaugga

SEQ ID NO: 2241851 - RNA, 19 nt, Artificial Sequence
  Description of Artificial Sequence: Synthetic oligonucleotide
gcccagccaggcuucacca

SEQ ID NO: 2241852 - RNA, 19 nt, Artificial Sequence
  Description of Artificial Sequence: Synthetic oligonucleotide
gcgguccuuggaguagccg

SEQ ID NO: 2241853 - RNA, 19 nt, Artificial Sequence
  Description of Artificial Sequence: Synthetic oligonucleotide
ggucaggcgcagcgccccg

SEQ ID NO: 2241854 - RNA, 19 nt, Artificial Sequence
  Description of Artificial Sequence: Synthetic oligonucleotide
ggaccccaucguaugcagc

SEQ ID NO: 2241855 - RNA, 19 nt, Artificial Sequence
  Description of Artificial Sequence: Synthetic oligonucleotide
ggccgaagcacagcgcgca

SEQ ID NO: 2241856 - RNA, 19 nt, Artificial Sequence
  Description of Artificial Sequence: Synthetic oligonucleotide
ggggcguugcucccagguc

SEQ ID NO: 2241857 - RNA, 19 nt, Artificial Sequence
  Description of Artificial Sequence: Synthetic oligonucleotide
gcaaugucuggcggaugac

SEQ ID NO: 2241858 - RNA, 19 nt, Artificial Sequence
  Description of Artificial Sequence: Synthetic oligonucleotide
cugggccaggacgcacacc

SEQ ID NO: 2241859 - RNA, 19 nt, Artificial Sequence
  Description of Artificial Sequence: Synthetic oligonucleotide
cugguacaugcagccagaa

SEQ ID NO: 2241860 - RNA, 19 nt, Artificial Sequence
  Description of Artificial Sequence: Synthetic oligonucleotide
agcggggagcacagcccag

SEQ ID NO: 2241861 - RNA, 19 nt, Artificial Sequence
  Description of Artificial Sequence: Synthetic oligonucleotide
ggaaaagggcccggcgcuc

SEQ ID NO: 2241862 - RNA, 19 nt, Artificial Sequence
  Description of Artificial Sequence: Synthetic oligonucleotide
gcccucggccaguagcaac

SEQ ID NO: 2241863 - RNA, 19 nt, Artificial Sequence
  Description of Artificial Sequence: Synthetic oligonucleotide
gcauuucugcaugcugguc

SEQ ID NO: 2241864 - RNA, 19 nt, Artificial Sequence
  Description of Artificial Sequence: Synthetic oligonucleotide
guggcaaugucuggcggau

SEQ ID NO: 2241865 - RNA, 19 nt, Artificial Sequence
  Description of Artificial Sequence: Synthetic oligonucleotide
cuaccacccuucccaguua

SEQ ID NO: 2241866 - RNA, 19 nt, Artificial Sequence
  Description of Artificial Sequence: Synthetic oligonucleotide
gcgcaacgggguacgaaug

SEQ ID NO: 2241867 - RNA, 19 nt, Artificial Sequence
  Description of Artificial Sequence: Synthetic oligonucleotide
ggggaccccaucguaugca

SEQ ID NO: 2241868 - RNA, 19 nt, Artificial Sequence
  Description of Artificial Sequence: Synthetic oligonucleotide
gguugccgcccauccguuc

SEQ ID NO: 2241869 - RNA, 19 nt, Artificial Sequence
  Description of Artificial Sequence: Synthetic oligonucleotide
aagggccgcgaggggcgca

SEQ ID NO: 2241870 - RNA, 19 nt, Artificial Sequence
  Description of Artificial Sequence: Synthetic oligonucleotide
cccauucccagaagaagcu

SEQ ID NO: 2241871 - RNA, 19 nt, Artificial Sequence
  Description of Artificial Sequence: Synthetic oligonucleotide
caaaucggcuccagcccau

SEQ ID NO: 2241872 - RNA, 19 nt, Artificial Sequence
  Description of Artificial Sequence: Synthetic oligonucleotide
ggcggaugacacggguggc

SEQ ID NO: 2241873 - RNA, 19 nt, Artificial Sequence
  Description of Artificial Sequence: Synthetic oligonucleotide
cugccccacgcugccgggc

SEQ ID NO: 2241874 - RNA, 19 nt, Artificial Sequence
  Description of Artificial Sequence: Synthetic oligonucleotide
acagcgcaacgggguacga

SEQ ID NO: 2241875 - RNA, 19 nt, Artificial Sequence
  Description of Artificial Sequence: Synthetic oligonucleotide
ggauggucccauggaucac

SEQ ID NO: 2241876 - RNA, 19 nt, Artificial Sequence
  Description of Artificial Sequence: Synthetic oligonucleotide
ggcgcagacagacgaugcu

SEQ ID NO: 2241877 - RNA, 19 nt, Artificial Sequence
  Description of Artificial Sequence: Synthetic oligonucleotide
gccuggggaggcauuucug

SEQ ID NO: 2241878 - RNA, 19 nt, Artificial Sequence
  Description of Artificial Sequence: Synthetic oligonucleotide
cugcagcgguccuuggagu

SEQ ID NO: 2241879 - RNA, 19 nt, Artificial Sequence
  Description of Artificial Sequence: Synthetic oligonucleotide
cccuauggauggucccaug

SEQ ID NO: 2241880 - RNA, 19 nt, Artificial Sequence
  Description of Artificial Sequence: Synthetic oligonucleotide
gcggggagcacagcccagc

SEQ ID NO: 2241881 - RNA, 19 nt, Artificial Sequence
  Description of Artificial Sequence: Synthetic oligonucleotide
cgcagagaagcgcggcuac

SEQ ID NO: 2241882 - RNA, 19 nt, Artificial Sequence
  Description of Artificial Sequence: Synthetic oligonucleotide
ggguacgaauggaggccug

SEQ ID NO: 2241883 - RNA, 19 nt, Artificial Sequence
  Description of Artificial Sequence: Synthetic oligonucleotide
cgaggggcgcagacagacg

SEQ ID NO: 2241884 - RNA, 19 nt, Artificial Sequence
  Description of Artificial Sequence: Synthetic oligonucleotide
gguggccaccacagugaug

SEQ ID NO: 2241885 - RNA, 19 nt, Artificial Sequence
  Description of Artificial Sequence: Synthetic oligonucleotide
cgcacaccacagcgcaacg

SEQ ID NO: 2241886 - RNA, 19 nt, Artificial Sequence
  Description of Artificial Sequence: Synthetic oligonucleotide
ggaggcauuucugcaugcu

SEQ ID NO: 2241887 - RNA, 19 nt, Artificial Sequence
  Description of Artificial Sequence: Synthetic oligonucleotide
ggccuggggaggcauuucu

SEQ ID NO: 2241888 - RNA, 19 nt, Artificial Sequence
  Description of Artificial Sequence: Synthetic oligonucleotide
cccucccuaccacccuucc

SEQ ID NO: 2241889 - RNA, 19 nt, Artificial Sequence
  Description of Artificial Sequence: Synthetic oligonucleotide
ggcguugcucccaggucuc

SEQ ID NO: 2241890 - RNA, 19 nt, Artificial Sequence
  Description of Artificial Sequence: Synthetic oligonucleotide
cagccaggcuucaccaaau

SEQ ID NO: 2241891 - RNA, 19 nt, Artificial Sequence
  Description of Artificial Sequence: Synthetic oligonucleotide
cucgcggggaccccaucgu

SEQ ID NO: 2241892 - RNA, 19 nt, Artificial Sequence
  Description of Artificial Sequence: Synthetic oligonucleotide
aggggcgcagacagacgau

SEQ ID NO: 2241893 - RNA, 19 nt, Artificial Sequence
  Description of Artificial Sequence: Synthetic oligonucleotide
ccgggcuccugggucaagc

SEQ ID NO: 2241894 - RNA, 19 nt, Artificial Sequence
  Description of Artificial Sequence: Synthetic oligonucleotide
gcaccggcgaagggccgcg

SEQ ID NO: 2241895 - RNA, 19 nt, Artificial Sequence
  Description of Artificial Sequence: Synthetic oligonucleotide
gagccugggccaggacgca

SEQ ID NO: 2241896 - RNA, 19 nt, Artificial Sequence
  Description of Artificial Sequence: Synthetic oligonucleotide
gcuuuaagggcagcugaau

SEQ ID NO: 2241897 - RNA, 19 nt, Artificial Sequence
  Description of Artificial Sequence: Synthetic oligonucleotide
cgauagcgcccucaguaca

SEQ ID NO: 2241898 - RNA, 19 nt, Artificial Sequence
  Description of Artificial Sequence: Synthetic oligonucleotide
gggguacgaauggaggccu

SEQ ID NO: 2241899 - RNA, 19 nt, Artificial Sequence
  Description of Artificial Sequence: Synthetic oligonucleotide
cccggcuggauauagccau

SEQ ID NO: 2241900 - RNA, 19 nt, Artificial Sequence
  Description of Artificial Sequence: Synthetic oligonucleotide
ccauucgauagcgcccuca

SEQ ID NO: 2241901 - RNA, 19 nt, Artificial Sequence
  Description of Artificial Sequence: Synthetic oligonucleotide
ccuaccacccuucccaguu

SEQ ID NO: 2241902 - RNA, 19 nt, Artificial Sequence
  Description of Artificial Sequence: Synthetic oligonucleotide
ccacagcgcaacgggguac

SEQ ID NO: 2241903 - RNA, 19 nt, Artificial Sequence
  Description of Artificial Sequence: Synthetic oligonucleotide
cgcccauccguucagcgaa

SEQ ID NO: 2241904 - RNA, 19 nt, Artificial Sequence
  Description of Artificial Sequence: Synthetic oligonucleotide
gugcccggaucggggcugc

SEQ ID NO: 2241905 - RNA, 19 nt, Artificial Sequence
  Description of Artificial Sequence: Synthetic oligonucleotide
ugccgggcuccugggucaa

SEQ ID NO: 2241906 - RNA, 19 nt, Artificial Sequence
  Description of Artificial Sequence: Synthetic oligonucleotide
cccggaucggggcugccca

SEQ ID NO: 2241907 - RNA, 19 nt, Artificial Sequence
  Description of Artificial Sequence: Synthetic oligonucleotide
cagcgcaacgggguacgaa

SEQ ID NO: 2241908 - RNA, 19 nt, Artificial Sequence
  Description of Artificial Sequence: Synthetic oligonucleotide
agguugccgcccauccguu

SEQ ID NO: 2241909 - RNA, 19 nt, Artificial Sequence
  Description of Artificial Sequence: Synthetic oligonucleotide
ccaccucacauggguugag

SEQ ID NO: 2241910 - RNA, 19 nt, Artificial Sequence
  Description of Artificial Sequence: Synthetic oligonucleotide
gcgcgcagagaagcgcggc

SEQ ID NO: 2241911 - RNA, 19 nt, Artificial Sequence
  Description of Artificial Sequence: Synthetic oligonucleotide
ccgcccauccguucagcga

SEQ ID NO: 2241912 - RNA, 19 nt, Artificial Sequence
  Description of Artificial Sequence: Synthetic oligonucleotide
ccggaucggggcugcccag

SEQ ID NO: 2241913 - RNA, 19 nt, Artificial Sequence
  Description of Artificial Sequence: Synthetic oligonucleotide
gcuccaugucgugggcaac

SEQ ID NO: 2241914 - RNA, 19 nt, Artificial Sequence
  Description of Artificial Sequence: Synthetic oligonucleotide
cgagaagacguggccagga

SEQ ID NO: 2241915 - RNA, 19 nt, Artificial Sequence
  Description of Artificial Sequence: Synthetic oligonucleotide
gcccauccguucagcgaag

SEQ ID NO: 2241916 - RNA, 19 nt, Artificial Sequence
  Description of Artificial Sequence: Synthetic oligonucleotide
ccccggcuggauauagcca

SEQ ID NO: 2241917 - RNA, 19 nt, Artificial Sequence
  Description of Artificial Sequence: Synthetic oligonucleotide
ugcccggaucggggcugcc

SEQ ID NO: 2241918 - RNA, 19 nt, Artificial Sequence
  Description of Artificial Sequence: Synthetic oligonucleotide
gcgccccggcuggauauag

SEQ ID NO: 2241919 - RNA, 19 nt, Artificial Sequence
  Description of Artificial Sequence: Synthetic oligonucleotide
gcccggaucggggcugccc

SEQ ID NO: 2241920 - RNA, 19 nt, Artificial Sequence
  Description of Artificial Sequence: Synthetic oligonucleotide
cagcgccccggcuggauau

SEQ ID NO: 2241921 - RNA, 19 nt, Artificial Sequence
  Description of Artificial Sequence: Synthetic oligonucleotide
cggcuggauauagccauuc

SEQ ID NO: 2241922 - RNA, 19 nt, Artificial Sequence
  Description of Artificial Sequence: Synthetic oligonucleotide
ccaagaccuugggccuggg

SEQ ID NO: 2241923 - RNA, 19 nt, Artificial Sequence
  Description of Artificial Sequence: Synthetic oligonucleotide
gcgcagagaagcgcggcua

SEQ ID NO: 2241924 - RNA, 19 nt, Artificial Sequence
  Description of Artificial Sequence: Synthetic oligonucleotide
cggaucggggcugcccagg

SEQ ID NO: 2241925 - RNA, 19 nt, Artificial Sequence
  Description of Artificial Sequence: Synthetic oligonucleotide
cggcugaugucgcggugug

SEQ ID NO: 2241926 - RNA, 19 nt, Artificial Sequence
  Description of Artificial Sequence: Synthetic oligonucleotide
gggcaccggcgaagggccg

SEQ ID NO: 2241927 - RNA, 19 nt, Artificial Sequence
  Description of Artificial Sequence: Synthetic oligonucleotide
gcggugugguguggccugc

SEQ ID NO: 2241928 - RNA, 19 nt, Artificial Sequence
  Description of Artificial Sequence: Synthetic oligonucleotide
gccauucgauagcgcccuc

SEQ ID NO: 2241929 - RNA, 19 nt, Artificial Sequence
  Description of Artificial Sequence: Synthetic oligonucleotide
agcgccccggcuggauaua

SEQ ID NO: 2241930 - RNA, 19 nt, Artificial Sequence
  Description of Artificial Sequence: Synthetic oligonucleotide
gugccaccucacauggguu

SEQ ID NO: 2241931 - RNA, 19 nt, Artificial Sequence
  Description of Artificial Sequence: Synthetic oligonucleotide
cgccccggcuggauauagc

SEQ ID NO: 2241932 - RNA, 19 nt, Artificial Sequence
  Description of Artificial Sequence: Synthetic oligonucleotide
cggcuccagcccaugaaaa

SEQ ID NO: 2241933 - RNA, 19 nt, Artificial Sequence
  Description of Artificial Sequence: Synthetic oligonucleotide
cccucugagcccucuuccu

SEQ ID NO: 2241934 - RNA, 19 nt, Artificial Sequence
  Description of Artificial Sequence: Synthetic oligonucleotide
cguugcucccaggucucuc

SEQ ID NO: 2241935 - RNA, 19 nt, Artificial Sequence
  Description of Artificial Sequence: Synthetic oligonucleotide
gggccuggggaggcauuuc

SEQ ID NO: 2241936 - RNA, 19 nt, Artificial Sequence
  Description of Artificial Sequence: Synthetic oligonucleotide
cccagccaggcuucaccaa

SEQ ID NO: 2241937 - RNA, 19 nt, Artificial Sequence
  Description of Artificial Sequence: Synthetic oligonucleotide
cccauccguucagcgaaga

SEQ ID NO: 2241938 - RNA, 19 nt, Artificial Sequence
  Description of Artificial Sequence: Synthetic oligonucleotide
cuggcccucugagcccucu

SEQ ID NO: 2241939 - RNA, 19 nt, Artificial Sequence
  Description of Artificial Sequence: Synthetic oligonucleotide
caccggcgaagggccgcga

SEQ ID NO: 2241940 - RNA, 19 nt, Artificial Sequence
  Description of Artificial Sequence: Synthetic oligonucleotide
gccgggcuccugggucaag

SEQ ID NO: 2241941 - RNA, 19 nt, Artificial Sequence
  Description of Artificial Sequence: Synthetic oligonucleotide
cgcggggaccccaucguau

SEQ ID NO: 2241942 - RNA, 19 nt, Artificial Sequence
  Description of Artificial Sequence: Synthetic oligonucleotide
cagcaacucugcggcugau

SEQ ID NO: 2241943 - RNA, 19 nt, Artificial Sequence
  Description of Artificial Sequence: Synthetic oligonucleotide
gggcaacccuauggauggu

SEQ ID NO: 2241944 - RNA, 19 nt, Artificial Sequence
  Description of Artificial Sequence: Synthetic oligonucleotide
ccggcuggauauagccauu

SEQ ID NO: 2241945 - RNA, 19 nt, Artificial Sequence
  Description of Artificial Sequence: Synthetic oligonucleotide
gcguugcucccaggucucu

SEQ ID NO: 2241946 - RNA, 19 nt, Artificial Sequence
  Description of Artificial Sequence: Synthetic oligonucleotide
cccuucccaguuaccccau

SEQ ID NO: 2241947 - RNA, 19 nt, Artificial Sequence
  Description of Artificial Sequence: Synthetic oligonucleotide
cgcucgcggggaccccauc

SEQ ID NO: 2241948 - RNA, 19 nt, Artificial Sequence
  Description of Artificial Sequence: Synthetic oligonucleotide
gcgcucgcggggaccccau

SEQ ID NO: 2241949 - RNA, 19 nt, Artificial Sequence
  Description of Artificial Sequence: Synthetic oligonucleotide
aauagauucaaccggaauc

SEQ ID NO: 2241950 - RNA, 19 nt, Artificial Sequence
  Description of Artificial Sequence: Synthetic oligonucleotide
ugauguugcagacauaugg

SEQ ID NO: 2241951 - RNA, 19 nt, Artificial Sequence
  Description of Artificial Sequence: Synthetic oligonucleotide
cuugauggagucuaaaugg

SEQ ID NO: 2241952 - RNA, 19 nt, Artificial Sequence
  Description of Artificial Sequence: Synthetic oligonucleotide
ucguaaauagauucaaccg

SEQ ID NO: 2241953 - RNA, 19 nt, Artificial Sequence
  Description of Artificial Sequence: Synthetic oligonucleotide
uuagaaauguggauacucg

SEQ ID NO: 2241954 - RNA, 19 nt, Artificial Sequence
  Description of Artificial Sequence: Synthetic oligonucleotide
cauaauggaggcaugagcc

SEQ ID NO: 2241955 - RNA, 19 nt, Artificial Sequence
  Description of Artificial Sequence: Synthetic oligonucleotide
uggaugaaucccuugaugg

SEQ ID NO: 2241956 - RNA, 19 nt, Artificial Sequence
  Description of Artificial Sequence: Synthetic oligonucleotide
aguuucaagacucugucuc

SEQ ID NO: 2241957 - RNA, 19 nt, Artificial Sequence
  Description of Artificial Sequence: Synthetic oligonucleotide
auagauucaaccggaaucc

SEQ ID NO: 2241958 - RNA, 19 nt, Artificial Sequence
  Description of Artificial Sequence: Synthetic oligonucleotide
aacuccuccauuccgcugc

SEQ ID NO: 2241959 - RNA, 19 nt, Artificial Sequence
  Description of Artificial Sequence: Synthetic oligonucleotide
ucgaccauuagaauuuugg

SEQ ID NO: 2241960 - RNA, 19 nt, Artificial Sequence
  Description of Artificial Sequence: Synthetic oligonucleotide
aucagucguaaauagauuc

SEQ ID NO: 2241961 - RNA, 19 nt, Artificial Sequence
  Description of Artificial Sequence: Synthetic oligonucleotide
uccauaaagcucaaaagca

SEQ ID NO: 2241962 - RNA, 19 nt, Artificial Sequence
  Description of Artificial Sequence: Synthetic oligonucleotide
aaagcucaaaagcaccuuc

SEQ ID NO: 2241963 - RNA, 19 nt, Artificial Sequence
  Description of Artificial Sequence: Synthetic oligonucleotide
acacuggcaacacaaaucg

SEQ ID NO: 2241964 - RNA, 19 nt, Artificial Sequence
  Description of Artificial Sequence: Synthetic oligonucleotide
uauggguuuccacaggccg

SEQ ID NO: 2241965 - RNA, 19 nt, Artificial Sequence
  Description of Artificial Sequence: Synthetic oligonucleotide
uagagcuuauccaugcugg

SEQ ID NO: 2241966 - RNA, 19 nt, Artificial Sequence
  Description of Artificial Sequence: Synthetic oligonucleotide
cuaagagggguuuuggugg

SEQ ID NO: 2241967 - RNA, 19 nt, Artificial Sequence
  Description of Artificial Sequence: Synthetic oligonucleotide
gagucuaaaugguugaaag

SEQ ID NO: 2241968 - RNA, 19 nt, Artificial Sequence
  Description of Artificial Sequence: Synthetic oligonucleotide
uguggauacucguauaugc

SEQ ID NO: 2241969 - RNA, 19 nt, Artificial Sequence
  Description of Artificial Sequence: Synthetic oligonucleotide
cuccauaaagcucaaaagc

SEQ ID NO: 2241970 - RNA, 19 nt, Artificial Sequence
  Description of Artificial Sequence: Synthetic oligonucleotide
gucguaaauagauucaacc

SEQ ID NO: 2241971 - RNA, 19 nt, Artificial Sequence
  Description of Artificial Sequence: Synthetic oligonucleotide
uucagucgcauaauggagg

SEQ ID NO: 2241972 - RNA, 19 nt, Artificial Sequence
  Description of Artificial Sequence: Synthetic oligonucleotide
gacuucauaggauaacucc

SEQ ID NO: 2241973 - RNA, 19 nt, Artificial Sequence
  Description of Artificial Sequence: Synthetic oligonucleotide
cauaggauaacuccucugg

SEQ ID NO: 2241974 - RNA, 19 nt, Artificial Sequence
  Description of Artificial Sequence: Synthetic oligonucleotide
uuaguucccaguuucaaga

SEQ ID NO: 2241975 - RNA, 19 nt, Artificial Sequence
  Description of Artificial Sequence: Synthetic oligonucleotide
ucaucagucguaaauagau

SEQ ID NO: 2241976 - RNA, 19 nt, Artificial Sequence
  Description of Artificial Sequence: Synthetic oligonucleotide
uagaguacagcuccugggg

SEQ ID NO: 2241977 - RNA, 19 nt, Artificial Sequence
  Description of Artificial Sequence: Synthetic oligonucleotide
ucccauauauuucugucag

SEQ ID NO: 2241978 - RNA, 19 nt, Artificial Sequence
  Description of Artificial Sequence: Synthetic oligonucleotide
uuagaguacagcuccuggg

SEQ ID NO: 2241979 - RNA, 19 nt, Artificial Sequence
  Description of Artificial Sequence: Synthetic oligonucleotide
ucuaagagggguuuuggug

SEQ ID NO: 2241980 - RNA, 19 nt, Artificial Sequence
  Description of Artificial Sequence: Synthetic oligonucleotide
ugauguaggauaguugggg

SEQ ID NO: 2241981 - RNA, 19 nt, Artificial Sequence
  Description of Artificial Sequence: Synthetic oligonucleotide
gaauauucugaugacuccg

SEQ ID NO: 2241982 - RNA, 19 nt, Artificial Sequence
  Description of Artificial Sequence: Synthetic oligonucleotide
gauucaaccggaauccugg

SEQ ID NO: 2241983 - RNA, 19 nt, Artificial Sequence
  Description of Artificial Sequence: Synthetic oligonucleotide
ucuaaaugguugaaaguga

SEQ ID NO: 2241984 - RNA, 19 nt, Artificial Sequence
  Description of Artificial Sequence: Synthetic oligonucleotide
auaggauaacuccucuggc

SEQ ID NO: 2241985 - RNA, 19 nt, Artificial Sequence
  Description of Artificial Sequence: Synthetic oligonucleotide
uauaugcaggucuuggaag

SEQ ID NO: 2241986 - RNA, 19 nt, Artificial Sequence
  Description of Artificial Sequence: Synthetic oligonucleotide
auucccauauauuucuguc

SEQ ID NO: 2241987 - RNA, 19 nt, Artificial Sequence
  Description of Artificial Sequence: Synthetic oligonucleotide
uccacuugauguaggauag

SEQ ID NO: 2241988 - RNA, 19 nt, Artificial Sequence
  Description of Artificial Sequence: Synthetic oligonucleotide
gaccauuagaauuuuggac

SEQ ID NO: 2241989 - RNA, 19 nt, Artificial Sequence
  Description of Artificial Sequence: Synthetic oligonucleotide
aaugguugaaagugaccag

SEQ ID NO: 2241990 - RNA, 19 nt, Artificial Sequence
  Description of Artificial Sequence: Synthetic oligonucleotide
guugaaagugaccagcagc

SEQ ID NO: 2241991 - RNA, 19 nt, Artificial Sequence
  Description of Artificial Sequence: Synthetic oligonucleotide
aauguggauacucguauau

SEQ ID NO: 2241992 - RNA, 19 nt, Artificial Sequence
  Description of Artificial Sequence: Synthetic oligonucleotide
gacauauggguuuccacag

SEQ ID NO: 2241993 - RNA, 19 nt, Artificial Sequence
  Description of Artificial Sequence: Synthetic oligonucleotide
gauguugcagacauauggg

SEQ ID NO: 2241994 - RNA, 19 nt, Artificial Sequence
  Description of Artificial Sequence: Synthetic oligonucleotide
gucuaaaugguugaaagug

SEQ ID NO: 2241995 - RNA, 19 nt, Artificial Sequence
  Description of Artificial Sequence: Synthetic oligonucleotide
guaguuuccaccaugcuug

SEQ ID NO: 2241996 - RNA, 19 nt, Artificial Sequence
  Description of Artificial Sequence: Synthetic oligonucleotide
ugguucagucgcauaaugg

SEQ ID NO: 2241997 - RNA, 19 nt, Artificial Sequence
  Description of Artificial Sequence: Synthetic oligonucleotide
agugaccagcagcacaucc

SEQ ID NO: 2241998 - RNA, 19 nt, Artificial Sequence
  Description of Artificial Sequence: Synthetic oligonucleotide
ugaauauucugaugacucc

SEQ ID NO: 2241999 - RNA, 19 nt, Artificial Sequence
  Description of Artificial Sequence: Synthetic oligonucleotide
ucaaccggaauccugguuc

SEQ ID NO: 2242000 - RNA, 19 nt, Artificial Sequence
  Description of Artificial Sequence: Synthetic oligonucleotide
agacauauggguuuccaca

SEQ ID NO: 2242001 - RNA, 19 nt, Artificial Sequence
  Description of Artificial Sequence: Synthetic oligonucleotide
aauauucugaugacuccgg

SEQ ID NO: 2242002 - RNA, 19 nt, Artificial Sequence
  Description of Artificial Sequence: Synthetic oligonucleotide
acuggcaacacaaaucgac

SEQ ID NO: 2242003 - RNA, 19 nt, Artificial Sequence
  Description of Artificial Sequence: Synthetic oligonucleotide
uguguagccuguauguuga

SEQ ID NO: 2242004 - RNA, 19 nt, Artificial Sequence
  Description of Artificial Sequence: Synthetic oligonucleotide
uggauacucguauaugcag

SEQ ID NO: 2242005 - RNA, 19 nt, Artificial Sequence
  Description of Artificial Sequence: Synthetic oligonucleotide
uacucguauaugcaggucu

SEQ ID NO: 2242006 - RNA, 19 nt, Artificial Sequence
  Description of Artificial Sequence: Synthetic oligonucleotide
aacacaaaucgaccauuag

SEQ ID NO: 2242007 - RNA, 19 nt, Artificial Sequence
  Description of Artificial Sequence: Synthetic oligonucleotide
gaauuuuggacuuuguccu

SEQ ID NO: 2242008 - RNA, 19 nt, Artificial Sequence
  Description of Artificial Sequence: Synthetic oligonucleotide
acacaaaucgaccauuaga

SEQ ID NO: 2242009 - RNA, 19 nt, Artificial Sequence
  Description of Artificial Sequence: Synthetic oligonucleotide
ggaggcaugagccaggcgg

SEQ ID NO: 2242010 - RNA, 19 nt, Artificial Sequence
  Description of Artificial Sequence: Synthetic oligonucleotide
aagcucaaaagcaccuucc

SEQ ID NO: 2242011 - RNA, 19 nt, Artificial Sequence
  Description of Artificial Sequence: Synthetic oligonucleotide
gauggagucuaaaugguug

SEQ ID NO: 2242012 - RNA, 19 nt, Artificial Sequence
  Description of Artificial Sequence: Synthetic oligonucleotide
ucagucguaaauagauuca

SEQ ID NO: 2242013 - RNA, 19 nt, Artificial Sequence
  Description of Artificial Sequence: Synthetic oligonucleotide
gaugaaucccuugauggag

SEQ ID NO: 2242014 - RNA, 19 nt, Artificial Sequence
  Description of Artificial Sequence: Synthetic oligonucleotide
uccgugaucucaaacuccc

SEQ ID NO: 2242015 - RNA, 19 nt, Artificial Sequence
  Description of Artificial Sequence: Synthetic oligonucleotide
gaggcuaaguucuuugaug

SEQ ID NO: 2242016 - RNA, 19 nt, Artificial Sequence
  Description of Artificial Sequence: Synthetic oligonucleotide
uaggauaacuccucuggcc

SEQ ID NO: 2242017 - RNA, 19 nt, Artificial Sequence
  Description of Artificial Sequence: Synthetic oligonucleotide
cuucaucagucguaaauag

SEQ ID NO: 2242018 - RNA, 19 nt, Artificial Sequence
  Description of Artificial Sequence: Synthetic oligonucleotide
gauaguuggggaguccugg

SEQ ID NO: 2242019 - RNA, 19 nt, Artificial Sequence
  Description of Artificial Sequence: Synthetic oligonucleotide
cacaaaucgaccauuagaa

SEQ ID NO: 2242020 - RNA, 19 nt, Artificial Sequence
  Description of Artificial Sequence: Synthetic oligonucleotide
cuuagaguacagcuccugg

SEQ ID NO: 2242021 - RNA, 19 nt, Artificial Sequence
  Description of Artificial Sequence: Synthetic oligonucleotide
cauguuaguucccaguuuc

SEQ ID NO: 2242022 - RNA, 19 nt, Artificial Sequence
  Description of Artificial Sequence: Synthetic oligonucleotide
aaaucgaccauuagaauuu

SEQ ID NO: 2242023 - RNA, 19 nt, Artificial Sequence
  Description of Artificial Sequence: Synthetic oligonucleotide
auucugaugacuccgggaa

SEQ ID NO: 2242024 - RNA, 19 nt, Artificial Sequence
  Description of Artificial Sequence: Synthetic oligonucleotide
cauauggguuuccacaggc

SEQ ID NO: 2242025 - RNA, 19 nt, Artificial Sequence
  Description of Artificial Sequence: Synthetic oligonucleotide
aggcuaaguucuuugaugu

SEQ ID NO: 2242026 - RNA, 19 nt, Artificial Sequence
  Description of Artificial Sequence: Synthetic oligonucleotide
uugaugacuucauaggaua

SEQ ID NO: 2242027 - RNA, 19 nt, Artificial Sequence
  Description of Artificial Sequence: Synthetic oligonucleotide
guuaguucccaguuucaag

SEQ ID NO: 2242028 - RNA, 19 nt, Artificial Sequence
  Description of Artificial Sequence: Synthetic oligonucleotide
agagcuuauccaugcuggc

SEQ ID NO: 2242029 - RNA, 19 nt, Artificial Sequence
  Description of Artificial Sequence: Synthetic oligonucleotide
agagauucccauauauuuc

SEQ ID NO: 2242030 - RNA, 19 nt, Artificial Sequence
  Description of Artificial Sequence: Synthetic oligonucleotide
uucaucagucguaaauaga

SEQ ID NO: 2242031 - RNA, 19 nt, Artificial Sequence
  Description of Artificial Sequence: Synthetic oligonucleotide
auuagaauuuuggacuuug

SEQ ID NO: 2242032 - RNA, 19 nt, Artificial Sequence
  Description of Artificial Sequence: Synthetic oligonucleotide
uguacauguuaguucccag

SEQ ID NO: 2242033 - RNA, 19 nt, Artificial Sequence
  Description of Artificial Sequence: Synthetic oligonucleotide
gaaagccauggucaucagg

SEQ ID NO: 2242034 - RNA, 19 nt, Artificial Sequence
  Description of Artificial Sequence: Synthetic oligonucleotide
auauucugaugacuccggg

SEQ ID NO: 2242035 - RNA, 19 nt, Artificial Sequence
  Description of Artificial Sequence: Synthetic oligonucleotide
aggauaacuccucuggccu

SEQ ID NO: 2242036 - RNA, 19 nt, Artificial Sequence
  Description of Artificial Sequence: Synthetic oligonucleotide
uagaaauguggauacucgu

SEQ ID NO: 2242037 - RNA, 19 nt, Artificial Sequence
  Description of Artificial Sequence: Synthetic oligonucleotide
ucguauaugcaggucuugg

SEQ ID NO: 2242038 - RNA, 19 nt, Artificial Sequence
  Description of Artificial Sequence: Synthetic oligonucleotide
auaugcaggucuuggaaga

SEQ ID NO: 2242039 - RNA, 19 nt, Artificial Sequence
  Description of Artificial Sequence: Synthetic oligonucleotide
gacuuuguccuuuagaaau

SEQ ID NO: 2242040 - RNA, 19 nt, Artificial Sequence
  Description of Artificial Sequence: Synthetic oligonucleotide
ucagucgcauaauggaggc

SEQ ID NO: 2242041 - RNA, 19 nt, Artificial Sequence
  Description of Artificial Sequence: Synthetic oligonucleotide
agucuaaaugguugaaagu

SEQ ID NO: 2242042 - RNA, 19 nt, Artificial Sequence
  Description of Artificial Sequence: Synthetic oligonucleotide
uauucugaugacuccggga

SEQ ID NO: 2242043 - RNA, 19 nt, Artificial Sequence
  Description of Artificial Sequence: Synthetic oligonucleotide
ucugaugacuccgggaacc

SEQ ID NO: 2242044 - RNA, 19 nt, Artificial Sequence
  Description of Artificial Sequence: Synthetic oligonucleotide
uuggacuuuguccuuuaga

SEQ ID NO: 2242045 - RNA, 19 nt, Artificial Sequence
  Description of Artificial Sequence: Synthetic oligonucleotide
agcuuauccaugcuggccu

SEQ ID NO: 2242046 - RNA, 19 nt, Artificial Sequence
  Description of Artificial Sequence: Synthetic oligonucleotide
ugcuccgugaucucaaacu

SEQ ID NO: 2242047 - RNA, 19 nt, Artificial Sequence
  Description of Artificial Sequence: Synthetic oligonucleotide
uguauguugaugacuucau

SEQ ID NO: 2242048 - RNA, 19 nt, Artificial Sequence
  Description of Artificial Sequence: Synthetic oligonucleotide
gaaagugaccagcagcaca

SEQ ID NO: 2242049 - RNA, 19 nt, Artificial Sequence
  Description of Artificial Sequence: Synthetic oligonucleotide
uccuguguagccuguaugu

SEQ ID NO: 2242050 - RNA, 19 nt, Artificial Sequence
  Description of Artificial Sequence: Synthetic oligonucleotide
uacauguuaguucccaguu

SEQ ID NO: 2242051 - RNA, 19 nt, Artificial Sequence
  Description of Artificial Sequence: Synthetic oligonucleotide
cguaaauagauucaaccgg

SEQ ID NO: 2242052 - RNA, 19 nt, Artificial Sequence
  Description of Artificial Sequence: Synthetic oligonucleotide
ucuuuuggucuaagagggg

SEQ ID NO: 2242053 - RNA, 19 nt, Artificial Sequence
  Description of Artificial Sequence: Synthetic oligonucleotide
auugaauauucugaugacu

SEQ ID NO: 2242054 - RNA, 19 nt, Artificial Sequence
  Description of Artificial Sequence: Synthetic oligonucleotide
ucgccuuugucauugaaua

SEQ ID NO: 2242055 - RNA, 19 nt, Artificial Sequence
  Description of Artificial Sequence: Synthetic oligonucleotide
cauugaauauucugaugac

SEQ ID NO: 2242056 - RNA, 19 nt, Artificial Sequence
  Description of Artificial Sequence: Synthetic oligonucleotide
acuucuucgccuuugucau

SEQ ID NO: 2242057 - RNA, 19 nt, Artificial Sequence
  Description of Artificial Sequence: Synthetic oligonucleotide
uccuuuagaaauguggaua

SEQ ID NO: 2242058 - RNA, 19 nt, Artificial Sequence
  Description of Artificial Sequence: Synthetic oligonucleotide
agacucugucuccauaaag

SEQ ID NO: 2242059 - RNA, 19 nt, Artificial Sequence
  Description of Artificial Sequence: Synthetic oligonucleotide
uugaucuccaucccuccca

SEQ ID NO: 2242060 - RNA, 19 nt, Artificial Sequence
  Description of Artificial Sequence: Synthetic oligonucleotide
uuuacuucuucgccuuugu

SEQ ID NO: 2242061 - RNA, 19 nt, Artificial Sequence
  Description of Artificial Sequence: Synthetic oligonucleotide
uucgcgcuguacauguuag

SEQ ID NO: 2242062 - RNA, 19 nt, Artificial Sequence
  Description of Artificial Sequence: Synthetic oligonucleotide
uaauggaggcaugagccag

SEQ ID NO: 2242063 - RNA, 19 nt, Artificial Sequence
  Description of Artificial Sequence: Synthetic oligonucleotide
agcaccuuccuucugggca

SEQ ID NO: 2242064 - RNA, 19 nt, Artificial Sequence
  Description of Artificial Sequence: Synthetic oligonucleotide
uuagaauuuuggacuuugu

SEQ ID NO: 2242065 - RNA, 19 nt, Artificial Sequence
  Description of Artificial Sequence: Synthetic oligonucleotide
ugggcagccacguaguuuc

SEQ ID NO: 2242066 - RNA, 19 nt, Artificial Sequence
  Description of Artificial Sequence: Synthetic oligonucleotide
ugguugaaagugaccagca

SEQ ID NO: 2242067 - RNA, 19 nt, Artificial Sequence
  Description of Artificial Sequence: Synthetic oligonucleotide
uaaauagauucaaccggaa

SEQ ID NO: 2242068 - RNA, 19 nt, Artificial Sequence
  Description of Artificial Sequence: Synthetic oligonucleotide
gauguaggauaguugggga

SEQ ID NO: 2242069 - RNA, 19 nt, Artificial Sequence
  Description of Artificial Sequence: Synthetic oligonucleotide
ugggcguggacacagcaac

SEQ ID NO: 2242070 - RNA, 19 nt, Artificial Sequence
  Description of Artificial Sequence: Synthetic oligonucleotide
cacuugguauuugaaagcc

SEQ ID NO: 2242071 - RNA, 19 nt, Artificial Sequence
  Description of Artificial Sequence: Synthetic oligonucleotide
gauaacuccucuggccugg

SEQ ID NO: 2242072 - RNA, 19 nt, Artificial Sequence
  Description of Artificial Sequence: Synthetic oligonucleotide
uugguuuugcugcuccgug

SEQ ID NO: 2242073 - RNA, 19 nt, Artificial Sequence
  Description of Artificial Sequence: Synthetic oligonucleotide
uguugcagacauauggguu

SEQ ID NO: 2242074 - RNA, 19 nt, Artificial Sequence
  Description of Artificial Sequence: Synthetic oligonucleotide
cuucauaggauaacuccuc

SEQ ID NO: 2242075 - RNA, 19 nt, Artificial Sequence
  Description of Artificial Sequence: Synthetic oligonucleotide
guuuugguuuugcugcucc

SEQ ID NO: 2242076 - RNA, 19 nt, Artificial Sequence
  Description of Artificial Sequence: Synthetic oligonucleotide
auccacuugauguaggaua

SEQ ID NO: 2242077 - RNA, 19 nt, Artificial Sequence
  Description of Artificial Sequence: Synthetic oligonucleotide
caggcggucauacacaguc

SEQ ID NO: 2242078 - RNA, 19 nt, Artificial Sequence
  Description of Artificial Sequence: Synthetic oligonucleotide
guuucaagacucugucucc

SEQ ID NO: 2242079 - RNA, 19 nt, Artificial Sequence
  Description of Artificial Sequence: Synthetic oligonucleotide
acauauggguuuccacagg

SEQ ID NO: 2242080 - RNA, 19 nt, Artificial Sequence
  Description of Artificial Sequence: Synthetic oligonucleotide
uugguauuugaaagccaug

SEQ ID NO: 2242081 - RNA, 19 nt, Artificial Sequence
  Description of Artificial Sequence: Synthetic oligonucleotide
gagagauucccauauauuu

SEQ ID NO: 2242082 - RNA, 19 nt, Artificial Sequence
  Description of Artificial Sequence: Synthetic oligonucleotide
aaauguggauacucguaua

SEQ ID NO: 2242083 - RNA, 19 nt, Artificial Sequence
  Description of Artificial Sequence: Synthetic oligonucleotide
auguugcagacauaugggu

SEQ ID NO: 2242084 - RNA, 19 nt, Artificial Sequence
  Description of Artificial Sequence: Synthetic oligonucleotide
gagauucccauauauuucu

SEQ ID NO: 2242085 - RNA, 19 nt, Artificial Sequence
  Description of Artificial Sequence: Synthetic oligonucleotide
ggaacucaccagcagagag

SEQ ID NO: 2242086 - RNA, 19 nt, Artificial Sequence
  Description of Artificial Sequence: Synthetic oligonucleotide
augacuucauaggauaacu

SEQ ID NO: 2242087 - RNA, 19 nt, Artificial Sequence
  Description of Artificial Sequence: Synthetic oligonucleotide
acuucauaggauaacuccu

SEQ ID NO: 2242088 - RNA, 19 nt, Artificial Sequence
  Description of Artificial Sequence: Synthetic oligonucleotide
ugaggcuaaguucuuugau

SEQ ID NO: 2242089 - RNA, 19 nt, Artificial Sequence
  Description of Artificial Sequence: Synthetic oligonucleotide
acuccgggaaccucaguuc

SEQ ID NO: 2242090 - RNA, 19 nt, Artificial Sequence
  Description of Artificial Sequence: Synthetic oligonucleotide
uuccacaggccgauucgcg

SEQ ID NO: 2242091 - RNA, 19 nt, Artificial Sequence
  Description of Artificial Sequence: Synthetic oligonucleotide
cuguguagccuguauguug

SEQ ID NO: 2242092 - RNA, 19 nt, Artificial Sequence
  Description of Artificial Sequence: Synthetic oligonucleotide
aaucccuugauggagucua

SEQ ID NO: 2242093 - RNA, 19 nt, Artificial Sequence
  Description of Artificial Sequence: Synthetic oligonucleotide
uuugggcguggacacagca

SEQ ID NO: 2242094 - RNA, 19 nt, Artificial Sequence
  Description of Artificial Sequence: Synthetic oligonucleotide
uccauuccgcugcuggucc

SEQ ID NO: 2242095 - RNA, 19 nt, Artificial Sequence
  Description of Artificial Sequence: Synthetic oligonucleotide
uucuucgccuuugucauug

SEQ ID NO: 2242096 - RNA, 19 nt, Artificial Sequence
  Description of Artificial Sequence: Synthetic oligonucleotide
ugggguuugaacagcuccu

SEQ ID NO: 2242097 - RNA, 19 nt, Artificial Sequence
  Description of Artificial Sequence: Synthetic oligonucleotide
agggaacaggcccggacac

SEQ ID NO: 2242098 - RNA, 19 nt, Artificial Sequence
  Description of Artificial Sequence: Synthetic oligonucleotide
gaaccucaguuccccaggg

SEQ ID NO: 2242099 - RNA, 19 nt, Artificial Sequence
  Description of Artificial Sequence: Synthetic oligonucleotide
agcaacacuugguauuuga

SEQ ID NO: 2242100 - RNA, 19 nt, Artificial Sequence
  Description of Artificial Sequence: Synthetic oligonucleotide
agucguaaauagauucaac

SEQ ID NO: 2242101 - RNA, 19 nt, Artificial Sequence
  Description of Artificial Sequence: Synthetic oligonucleotide
auggagucuaaaugguuga

SEQ ID NO: 2242102 - RNA, 19 nt, Artificial Sequence
  Description of Artificial Sequence: Synthetic oligonucleotide
aguuccccagggaacaggc

SEQ ID NO: 2242103 - RNA, 19 nt, Artificial Sequence
  Description of Artificial Sequence: Synthetic oligonucleotide
gaugacuucauaggauaac

SEQ ID NO: 2242104 - RNA, 19 nt, Artificial Sequence
  Description of Artificial Sequence: Synthetic oligonucleotide
auaaagcucaaaagcaccu

SEQ ID NO: 2242105 - RNA, 19 nt, Artificial Sequence
  Description of Artificial Sequence: Synthetic oligonucleotide
caucccucccauuagccug

SEQ ID NO: 2242106 - RNA, 19 nt, Artificial Sequence
  Description of Artificial Sequence: Synthetic oligonucleotide
uaagagggguuuugguggc

SEQ ID NO: 2242107 - RNA, 19 nt, Artificial Sequence
  Description of Artificial Sequence: Synthetic oligonucleotide
gaaauguggauacucguau

SEQ ID NO: 2242108 - RNA, 19 nt, Artificial Sequence
  Description of Artificial Sequence: Synthetic oligonucleotide
uugguggcaauguuuuccu

SEQ ID NO: 2242109 - RNA, 19 nt, Artificial Sequence
  Description of Artificial Sequence: Synthetic oligonucleotide
ccuuuagaaauguggauac

SEQ ID NO: 2242110 - RNA, 19 nt, Artificial Sequence
  Description of Artificial Sequence: Synthetic oligonucleotide
guucagucgcauaauggag

SEQ ID NO: 2242111 - RNA, 19 nt, Artificial Sequence
  Description of Artificial Sequence: Synthetic oligonucleotide
guauaugcaggucuuggaa

SEQ ID NO: 2242112 - RNA, 19 nt, Artificial Sequence
  Description of Artificial Sequence: Synthetic oligonucleotide
auauggguuuccacaggcc

SEQ ID NO: 2242113 - RNA, 19 nt, Artificial Sequence
  Description of Artificial Sequence: Synthetic oligonucleotide
uugauguugcagacauaug

SEQ ID NO: 2242114 - RNA, 19 nt, Artificial Sequence
  Description of Artificial Sequence: Synthetic oligonucleotide
gguucagucgcauaaugga

SEQ ID NO: 2242115 - RNA, 19 nt, Artificial Sequence
  Description of Artificial Sequence: Synthetic oligonucleotide
ggauacucguauaugcagg

SEQ ID NO: 2242116 - RNA, 19 nt, Artificial Sequence
  Description of Artificial Sequence: Synthetic oligonucleotide
gcauaauggaggcaugagc

SEQ ID NO: 2242117 - RNA, 19 nt, Artificial Sequence
  Description of Artificial Sequence: Synthetic oligonucleotide
acaaaucgaccauuagaau

SEQ ID NO: 2242118 - RNA, 19 nt, Artificial Sequence
  Description of Artificial Sequence: Synthetic oligonucleotide
gcuaaguucuuugauguug

SEQ ID NO: 2242119 - RNA, 19 nt, Artificial Sequence
  Description of Artificial Sequence: Synthetic oligonucleotide
acauccuuugggcguggac

SEQ ID NO: 2242120 - RNA, 19 nt, Artificial Sequence
  Description of Artificial Sequence: Synthetic oligonucleotide
cuccgugaucucaaacucc

SEQ ID NO: 2242121 - RNA, 19 nt, Artificial Sequence
  Description of Artificial Sequence: Synthetic oligonucleotide
uucagggccacucguuuuc

SEQ ID NO: 2242122 - RNA, 19 nt, Artificial Sequence
  Description of Artificial Sequence: Synthetic oligonucleotide
uuuuggucuaagagggguu

SEQ ID NO: 2242123 - RNA, 19 nt, Artificial Sequence
  Description of Artificial Sequence: Synthetic oligonucleotide
agucgcauaauggaggcau

SEQ ID NO: 2242124 - RNA, 19 nt, Artificial Sequence
  Description of Artificial Sequence: Synthetic oligonucleotide
uuugguuuugcugcuccgu

SEQ ID NO: 2242125 - RNA, 19 nt, Artificial Sequence
  Description of Artificial Sequence: Synthetic oligonucleotide
agcucaaaagcaccuuccu

SEQ ID NO: 2242126 - RNA, 19 nt, Artificial Sequence
  Description of Artificial Sequence: Synthetic oligonucleotide
ugauggagucuaaaugguu

SEQ ID NO: 2242127 - RNA, 19 nt, Artificial Sequence
  Description of Artificial Sequence: Synthetic oligonucleotide
auauuucugucagcugccg

SEQ ID NO: 2242128 - RNA, 19 nt, Artificial Sequence
  Description of Artificial Sequence: Synthetic oligonucleotide
agccacguaguuuccacca

SEQ ID NO: 2242129 - RNA, 19 nt, Artificial Sequence
  Description of Artificial Sequence: Synthetic oligonucleotide
gaugacuccgggaaccuca

SEQ ID NO: 2242130 - RNA, 19 nt, Artificial Sequence
  Description of Artificial Sequence: Synthetic oligonucleotide
cuugaucuccaucccuccc

SEQ ID NO: 2242131 - RNA, 19 nt, Artificial Sequence
  Description of Artificial Sequence: Synthetic oligonucleotide
ccauaaagcucaaaagcac

SEQ ID NO: 2242132 - RNA, 19 nt, Artificial Sequence
  Description of Artificial Sequence: Synthetic oligonucleotide
ccuugauggagucuaaaug

SEQ ID NO: 2242133 - RNA, 19 nt, Artificial Sequence
  Description of Artificial Sequence: Synthetic oligonucleotide
aguucccaguuucaagacu

SEQ ID NO: 2242134 - RNA, 19 nt, Artificial Sequence
  Description of Artificial Sequence: Synthetic oligonucleotide
aagacucugucuccauaaa

SEQ ID NO: 2242135 - RNA, 19 nt, Artificial Sequence
  Description of Artificial Sequence: Synthetic oligonucleotide
uguuaguucccaguuucaa

SEQ ID NO: 2242136 - RNA, 19 nt, Artificial Sequence
  Description of Artificial Sequence: Synthetic oligonucleotide
guucccaguuucaagacuc

SEQ ID NO: 2242137 - RNA, 19 nt, Artificial Sequence
  Description of Artificial Sequence: Synthetic oligonucleotide
cagacauauggguuuccac

SEQ ID NO: 2242138 - RNA, 19 nt, Artificial Sequence
  Description of Artificial Sequence: Synthetic oligonucleotide
aauccugguucagggccac

SEQ ID NO: 2242139 - RNA, 19 nt, Artificial Sequence
  Description of Artificial Sequence: Synthetic oligonucleotide
gauacucguauaugcaggu

SEQ ID NO: 2242140 - RNA, 19 nt, Artificial Sequence
  Description of Artificial Sequence: Synthetic oligonucleotide
augcuggccugguucaguc

SEQ ID NO: 2242141 - RNA, 19 nt, Artificial Sequence
  Description of Artificial Sequence: Synthetic oligonucleotide
uaguucccaguuucaagac

SEQ ID NO: 2242142 - RNA, 19 nt, Artificial Sequence
  Description of Artificial Sequence: Synthetic oligonucleotide
caaaucgaccauuagaauu

SEQ ID NO: 2242143 - RNA, 19 nt, Artificial Sequence
  Description of Artificial Sequence: Synthetic oligonucleotide
ugguuuugcugcuccguga

SEQ ID NO: 2242144 - RNA, 19 nt, Artificial Sequence
  Description of Artificial Sequence: Synthetic oligonucleotide
cuccgggaaccucaguucc

SEQ ID NO: 2242145 - RNA, 19 nt, Artificial Sequence
  Description of Artificial Sequence: Synthetic oligonucleotide
ucaagacucugucuccaua

SEQ ID NO: 2242146 - RNA, 19 nt, Artificial Sequence
  Description of Artificial Sequence: Synthetic oligonucleotide
ggucucauccacuugaugu

SEQ ID NO: 2242147 - RNA, 19 nt, Artificial Sequence
  Description of Artificial Sequence: Synthetic oligonucleotide
ugugucuuugaggcuaagu

SEQ ID NO: 2242148 - RNA, 19 nt, Artificial Sequence
  Description of Artificial Sequence: Synthetic oligonucleotide
agggccacucguuuucuug

SEQ ID NO: 2242149 - RNA, 19 nt, Artificial Sequence
  Description of Artificial Sequence: Synthetic oligonucleotide
cugguucagucgcauaaug

SEQ ID NO: 2242150 - RNA, 19 nt, Artificial Sequence
  Description of Artificial Sequence: Synthetic oligonucleotide
augagccaggcggucauac

SEQ ID NO: 2242151 - RNA, 19 nt, Artificial Sequence
  Description of Artificial Sequence: Synthetic oligonucleotide
gauccgggccaacuccucc

SEQ ID NO: 2242152 - RNA, 19 nt, Artificial Sequence
  Description of Artificial Sequence: Synthetic oligonucleotide
uuacuucuucgccuuuguc

SEQ ID NO: 2242153 - RNA, 19 nt, Artificial Sequence
  Description of Artificial Sequence: Synthetic oligonucleotide
ugaaucccuugauggaguc

SEQ ID NO: 2242154 - RNA, 19 nt, Artificial Sequence
  Description of Artificial Sequence: Synthetic oligonucleotide
cuguauguugaugacuuca

SEQ ID NO: 2242155 - RNA, 19 nt, Artificial Sequence
  Description of Artificial Sequence: Synthetic oligonucleotide
auaguuggggaguccugga

SEQ ID NO: 2242156 - RNA, 19 nt, Artificial Sequence
  Description of Artificial Sequence: Synthetic oligonucleotide
uggucuaagagggguuuug

SEQ ID NO: 2242157 - RNA, 19 nt, Artificial Sequence
  Description of Artificial Sequence: Synthetic oligonucleotide
uuagccuggccaagaaauu

SEQ ID NO: 2242158 - RNA, 19 nt, Artificial Sequence
  Description of Artificial Sequence: Synthetic oligonucleotide
cucguuuucuugaucucca

SEQ ID NO: 2242159 - RNA, 19 nt, Artificial Sequence
  Description of Artificial Sequence: Synthetic oligonucleotide
ucgcauaauggaggcauga

SEQ ID NO: 2242160 - RNA, 19 nt, Artificial Sequence
  Description of Artificial Sequence: Synthetic oligonucleotide
accaugcuugaauccuguc

SEQ ID NO: 2242161 - RNA, 19 nt, Artificial Sequence
  Description of Artificial Sequence: Synthetic oligonucleotide
ccuuugucauugaauauuc

SEQ ID NO: 2242162 - RNA, 19 nt, Artificial Sequence
  Description of Artificial Sequence: Synthetic oligonucleotide
uccucuucaucagucguaa

SEQ ID NO: 2242163 - RNA, 19 nt, Artificial Sequence
  Description of Artificial Sequence: Synthetic oligonucleotide
agauucaaccggaauccug

SEQ ID NO: 2242164 - RNA, 19 nt, Artificial Sequence
  Description of Artificial Sequence: Synthetic oligonucleotide
agaaauguggauacucgua

SEQ ID NO: 2242165 - RNA, 19 nt, Artificial Sequence
  Description of Artificial Sequence: Synthetic oligonucleotide
uuuggucuaagagggguuu

SEQ ID NO: 2242166 - RNA, 19 nt, Artificial Sequence
  Description of Artificial Sequence: Synthetic oligonucleotide
ggcaauguuuuccuguguc

SEQ ID NO: 2242167 - RNA, 19 nt, Artificial Sequence
  Description of Artificial Sequence: Synthetic oligonucleotide
auacucguauaugcagguc

SEQ ID NO: 2242168 - RNA, 19 nt, Artificial Sequence
  Description of Artificial Sequence: Synthetic oligonucleotide
gguugaaagugaccagcag

SEQ ID NO: 2242169 - RNA, 19 nt, Artificial Sequence
  Description of Artificial Sequence: Synthetic oligonucleotide
accggaauccugguucagg

SEQ ID NO: 2242170 - RNA, 19 nt, Artificial Sequence
  Description of Artificial Sequence: Synthetic oligonucleotide
auguggauacucguauaug

SEQ ID NO: 2242171 - RNA, 19 nt, Artificial Sequence
  Description of Artificial Sequence: Synthetic oligonucleotide
uuuugguggcaauguuuuc

SEQ ID NO: 2242172 - RNA, 19 nt, Artificial Sequence
  Description of Artificial Sequence: Synthetic oligonucleotide
acauguuaguucccaguuu

SEQ ID NO: 2242173 - RNA, 19 nt, Artificial Sequence
  Description of Artificial Sequence: Synthetic oligonucleotide
gaacucaccagcagagaga

SEQ ID NO: 2242174 - RNA, 19 nt, Artificial Sequence
  Description of Artificial Sequence: Synthetic oligonucleotide
uccgggaaccucaguuccc

SEQ ID NO: 2242175 - RNA, 19 nt, Artificial Sequence
  Description of Artificial Sequence: Synthetic oligonucleotide
auucgcgcuguacauguua

SEQ ID NO: 2242176 - RNA, 19 nt, Artificial Sequence
  Description of Artificial Sequence: Synthetic oligonucleotide
cuucuuuacuucuucgccu

SEQ ID NO: 2242177 - RNA, 19 nt, Artificial Sequence
  Description of Artificial Sequence: Synthetic oligonucleotide
agggccuucuuagaguaca

SEQ ID NO: 2242178 - RNA, 19 nt, Artificial Sequence
  Description of Artificial Sequence: Synthetic oligonucleotide
uaaagcucaaaagcaccuu

SEQ ID NO: 2242179 - RNA, 19 nt, Artificial Sequence
  Description of Artificial Sequence: Synthetic oligonucleotide
uugggcguggacacagcaa

SEQ ID NO: 2242180 - RNA, 19 nt, Artificial Sequence
  Description of Artificial Sequence: Synthetic oligonucleotide
uaguuggggaguccuggau

SEQ ID NO: 2242181 - RNA, 19 nt, Artificial Sequence
  Description of Artificial Sequence: Synthetic oligonucleotide
uucaaccggaauccugguu

SEQ ID NO: 2242182 - RNA, 19 nt, Artificial Sequence
  Description of Artificial Sequence: Synthetic oligonucleotide
uggcaauguuuuccugugu

SEQ ID NO: 2242183 - RNA, 19 nt, Artificial Sequence
  Description of Artificial Sequence: Synthetic oligonucleotide
gugucuuugaggcuaaguu

SEQ ID NO: 2242184 - RNA, 19 nt, Artificial Sequence
  Description of Artificial Sequence: Synthetic oligonucleotide
guggacacagcaacacuug

SEQ ID NO: 2242185 - RNA, 19 nt, Artificial Sequence
  Description of Artificial Sequence: Synthetic oligonucleotide
ggucuaagagggguuuugg

SEQ ID NO: 2242186 - RNA, 19 nt, Artificial Sequence
  Description of Artificial Sequence: Synthetic oligonucleotide
guacauguuaguucccagu

SEQ ID NO: 2242187 - RNA, 19 nt, Artificial Sequence
  Description of Artificial Sequence: Synthetic oligonucleotide
ugcugcuccgugaucucaa

SEQ ID NO: 2242188 - RNA, 19 nt, Artificial Sequence
  Description of Artificial Sequence: Synthetic oligonucleotide
agagagauucccauauauu

SEQ ID NO: 2242189 - RNA, 19 nt, Artificial Sequence
  Description of Artificial Sequence: Synthetic oligonucleotide
agggguuuugguggcaaug

SEQ ID NO: 2242190 - RNA, 19 nt, Artificial Sequence
  Description of Artificial Sequence: Synthetic oligonucleotide
cuuauccaugcuggccugg

SEQ ID NO: 2242191 - RNA, 19 nt, Artificial Sequence
  Description of Artificial Sequence: Synthetic oligonucleotide
ggaugaaucccuugaugga

SEQ ID NO: 2242192 - RNA, 19 nt, Artificial Sequence
  Description of Artificial Sequence: Synthetic oligonucleotide
uggaggcaugagccaggcg

SEQ ID NO: 2242193 - RNA, 19 nt, Artificial Sequence
  Description of Artificial Sequence: Synthetic oligonucleotide
augaaucccuugauggagu

SEQ ID NO: 2242194 - RNA, 19 nt, Artificial Sequence
  Description of Artificial Sequence: Synthetic oligonucleotide
uuauccaugcuggccuggu

SEQ ID NO: 2242195 - RNA, 19 nt, Artificial Sequence
  Description of Artificial Sequence: Synthetic oligonucleotide
ucuuugaggcuaaguucuu

SEQ ID NO: 2242196 - RNA, 19 nt, Artificial Sequence
  Description of Artificial Sequence: Synthetic oligonucleotide
gcuccugggguuugaacag

SEQ ID NO: 2242197 - RNA, 19 nt, Artificial Sequence
  Description of Artificial Sequence: Synthetic oligonucleotide
uaugcaggucuuggaagaa

SEQ ID NO: 2242198 - RNA, 19 nt, Artificial Sequence
  Description of Artificial Sequence: Synthetic oligonucleotide
uaggauaguuggggagucc

SEQ ID NO: 2242199 - RNA, 19 nt, Artificial Sequence
  Description of Artificial Sequence: Synthetic oligonucleotide
caugcuugaauccugucuu

SEQ ID NO: 2242200 - RNA, 19 nt, Artificial Sequence
  Description of Artificial Sequence: Synthetic oligonucleotide
aaucgaccauuagaauuuu

SEQ ID NO: 2242201 - RNA, 19 nt, Artificial Sequence
  Description of Artificial Sequence: Synthetic oligonucleotide
acguaguuuccaccaugcu

SEQ ID NO: 2242202 - RNA, 19 nt, Artificial Sequence
  Description of Artificial Sequence: Synthetic oligonucleotide
uggagucuaaaugguugaa

SEQ ID NO: 2242203 - RNA, 19 nt, Artificial Sequence
  Description of Artificial Sequence: Synthetic oligonucleotide
caacacaaaucgaccauua

SEQ ID NO: 2242204 - RNA, 19 nt, Artificial Sequence
  Description of Artificial Sequence: Synthetic oligonucleotide
gggaaccucaguuccccag

SEQ ID NO: 2242205 - RNA, 19 nt, Artificial Sequence
  Description of Artificial Sequence: Synthetic oligonucleotide
aggcggucauacacagucc

SEQ ID NO: 2242206 - RNA, 19 nt, Artificial Sequence
  Description of Artificial Sequence: Synthetic oligonucleotide
gcuggccugguucagucgc

SEQ ID NO: 2242207 - RNA, 19 nt, Artificial Sequence
  Description of Artificial Sequence: Synthetic oligonucleotide
agccuguauguugaugacu

SEQ ID NO: 2242208 - RNA, 19 nt, Artificial Sequence
  Description of Artificial Sequence: Synthetic oligonucleotide
guauguugaugacuucaua

SEQ ID NO: 2242209 - RNA, 19 nt, Artificial Sequence
  Description of Artificial Sequence: Synthetic oligonucleotide
ucguuuucuugaucuccau

SEQ ID NO: 2242210 - RNA, 19 nt, Artificial Sequence
  Description of Artificial Sequence: Synthetic oligonucleotide
cucaguuccccagggaaca

SEQ ID NO: 2242211 - RNA, 19 nt, Artificial Sequence
  Description of Artificial Sequence: Synthetic oligonucleotide
ggguuugaacagcuccucc

SEQ ID NO: 2242212 - RNA, 19 nt, Artificial Sequence
  Description of Artificial Sequence: Synthetic oligonucleotide
cacucguuuucuugaucuc

SEQ ID NO: 2242213 - RNA, 19 nt, Artificial Sequence
  Description of Artificial Sequence: Synthetic oligonucleotide
cuuugggcguggacacagc

SEQ ID NO: 2242214 - RNA, 19 nt, Artificial Sequence
  Description of Artificial Sequence: Synthetic oligonucleotide
ggauaacuccucuggccug

SEQ ID NO: 2242215 - RNA, 19 nt, Artificial Sequence
  Description of Artificial Sequence: Synthetic oligonucleotide
uccugguucagggccacuc

SEQ ID NO: 2242216 - RNA, 19 nt, Artificial Sequence
  Description of Artificial Sequence: Synthetic oligonucleotide
cuuuuggucuaagaggggu

SEQ ID NO: 2242217 - RNA, 19 nt, Artificial Sequence
  Description of Artificial Sequence: Synthetic oligonucleotide
guaggauaguuggggaguc

SEQ ID NO: 2242218 - RNA, 19 nt, Artificial Sequence
  Description of Artificial Sequence: Synthetic oligonucleotide
gaacaggcccggacacugg

SEQ ID NO: 2242219 - RNA, 19 nt, Artificial Sequence
  Description of Artificial Sequence: Synthetic oligonucleotide
gacuccgggaaccucaguu

SEQ ID NO: 2242220 - RNA, 19 nt, Artificial Sequence
  Description of Artificial Sequence: Synthetic oligonucleotide
gggaguccuggaugaaucc

SEQ ID NO: 2242221 - RNA, 19 nt, Artificial Sequence
  Description of Artificial Sequence: Synthetic oligonucleotide
aaccggaauccugguucag

SEQ ID NO: 2242222 - RNA, 19 nt, Artificial Sequence
  Description of Artificial Sequence: Synthetic oligonucleotide
cagagagauucccauauau

SEQ ID NO: 2242223 - RNA, 19 nt, Artificial Sequence
  Description of Artificial Sequence: Synthetic oligonucleotide
gccuucuuagaguacagcu

SEQ ID NO: 2242224 - RNA, 19 nt, Artificial Sequence
  Description of Artificial Sequence: Synthetic oligonucleotide
gguggcaauguuuuccugu

SEQ ID NO: 2242225 - RNA, 19 nt, Artificial Sequence
  Description of Artificial Sequence: Synthetic oligonucleotide
cucguauaugcaggucuug

SEQ ID NO: 2242226 - RNA, 19 nt, Artificial Sequence
  Description of Artificial Sequence: Synthetic oligonucleotide
caacuccuccauuccgcug

SEQ ID NO: 2242227 - RNA, 19 nt, Artificial Sequence
  Description of Artificial Sequence: Synthetic oligonucleotide
caccagcagagagauuccc

SEQ ID NO: 2242228 - RNA, 19 nt, Artificial Sequence
  Description of Artificial Sequence: Synthetic oligonucleotide
caaccggaauccugguuca

SEQ ID NO: 2242229 - RNA, 19 nt, Artificial Sequence
  Description of Artificial Sequence: Synthetic oligonucleotide
ggaaggucucauccacuug

SEQ ID NO: 2242230 - RNA, 19 nt, Artificial Sequence
  Description of Artificial Sequence: Synthetic oligonucleotide
auguuaguucccaguuuca

SEQ ID NO: 2242231 - RNA, 19 nt, Artificial Sequence
  Description of Artificial Sequence: Synthetic oligonucleotide
caguuccccagggaacagg

SEQ ID NO: 2242232 - RNA, 19 nt, Artificial Sequence
  Description of Artificial Sequence: Synthetic oligonucleotide
cugcuccgugaucucaaac

SEQ ID NO: 2242233 - RNA, 19 nt, Artificial Sequence
  Description of Artificial Sequence: Synthetic oligonucleotide
cagucguaaauagauucaa

SEQ ID NO: 2242234 - RNA, 19 nt, Artificial Sequence
  Description of Artificial Sequence: Synthetic oligonucleotide
accagcagagagauuccca

SEQ ID NO: 2242235 - RNA, 19 nt, Artificial Sequence
  Description of Artificial Sequence: Synthetic oligonucleotide
gguauuugaaagccauggu

SEQ ID NO: 2242236 - RNA, 19 nt, Artificial Sequence
  Description of Artificial Sequence: Synthetic oligonucleotide
ucuucgccuuugucauuga

SEQ ID NO: 2242237 - RNA, 19 nt, Artificial Sequence
  Description of Artificial Sequence: Synthetic oligonucleotide
gucuaagagggguuuuggu

SEQ ID NO: 2242238 - RNA, 19 nt, Artificial Sequence
  Description of Artificial Sequence: Synthetic oligonucleotide
ucggaucaucuggaacuca

SEQ ID NO: 2242239 - RNA, 19 nt, Artificial Sequence
  Description of Artificial Sequence: Synthetic oligonucleotide
uaacuccucuggccuggac

SEQ ID NO: 2242240 - RNA, 19 nt, Artificial Sequence
  Description of Artificial Sequence: Synthetic oligonucleotide
cuugaauccugucuucuuu

SEQ ID NO: 2242241 - RNA, 19 nt, Artificial Sequence
  Description of Artificial Sequence: Synthetic oligonucleotide
ucgcgcuguacauguuagu

SEQ ID NO: 2242242 - RNA, 19 nt, Artificial Sequence
  Description of Artificial Sequence: Synthetic oligonucleotide
cauuagccuggccaagaaa

SEQ ID NO: 2242243 - RNA, 19 nt, Artificial Sequence
  Description of Artificial Sequence: Synthetic oligonucleotide
uggggaguccuggaugaau

SEQ ID NO: 2242244 - RNA, 19 nt, Artificial Sequence
  Description of Artificial Sequence: Synthetic oligonucleotide
aagagggguuuugguggca

SEQ ID NO: 2242245 - RNA, 19 nt, Artificial Sequence
  Description of Artificial Sequence: Synthetic oligonucleotide
aucgaccauuagaauuuug

SEQ ID NO: 2242246 - RNA, 19 nt, Artificial Sequence
  Description of Artificial Sequence: Synthetic oligonucleotide
acucguauaugcaggucuu

SEQ ID NO: 2242247 - RNA, 19 nt, Artificial Sequence
  Description of Artificial Sequence: Synthetic oligonucleotide
ccugguucagggccacucg

SEQ ID NO: 2242248 - RNA, 19 nt, Artificial Sequence
  Description of Artificial Sequence: Synthetic oligonucleotide
gcagccacguaguuuccac

SEQ ID NO: 2242249 - RNA, 19 nt, Artificial Sequence
  Description of Artificial Sequence: Synthetic oligonucleotide
augacuccgggaaccucag

SEQ ID NO: 2242250 - RNA, 19 nt, Artificial Sequence
  Description of Artificial Sequence: Synthetic oligonucleotide
gcgcuguacauguuaguuc

SEQ ID NO: 2242251 - RNA, 19 nt, Artificial Sequence
  Description of Artificial Sequence: Synthetic oligonucleotide
ucccuugauggagucuaaa

SEQ ID NO: 2242252 - RNA, 19 nt, Artificial Sequence
  Description of Artificial Sequence: Synthetic oligonucleotide
guuuugcugcuccgugauc

SEQ ID NO: 2242253 - RNA, 19 nt, Artificial Sequence
  Description of Artificial Sequence: Synthetic oligonucleotide
ucagggccacucguuuucu

SEQ ID NO: 2242254 - RNA, 19 nt, Artificial Sequence
  Description of Artificial Sequence: Synthetic oligonucleotide
gucgcauaauggaggcaug

SEQ ID NO: 2242255 - RNA, 19 nt, Artificial Sequence
  Description of Artificial Sequence: Synthetic oligonucleotide
ccucaguuccccagggaac

SEQ ID NO: 2242256 - RNA, 19 nt, Artificial Sequence
  Description of Artificial Sequence: Synthetic oligonucleotide
ggagucuaaaugguugaaa

SEQ ID NO: 2242257 - RNA, 19 nt, Artificial Sequence
  Description of Artificial Sequence: Synthetic oligonucleotide
ccuggccaagaaauucagc

SEQ ID NO: 2242258 - RNA, 19 nt, Artificial Sequence
  Description of Artificial Sequence: Synthetic oligonucleotide
gcuuauccaugcuggccug

SEQ ID NO: 2242259 - RNA, 19 nt, Artificial Sequence
  Description of Artificial Sequence: Synthetic oligonucleotide
agagggguuuugguggcaa

SEQ ID NO: 2242260 - RNA, 19 nt, Artificial Sequence
  Description of Artificial Sequence: Synthetic oligonucleotide
gccugguucagucgcauaa

SEQ ID NO: 2242261 - RNA, 19 nt, Artificial Sequence
  Description of Artificial Sequence: Synthetic oligonucleotide
ugucagcugccggaagguc

SEQ ID NO: 2242262 - RNA, 19 nt, Artificial Sequence
  Description of Artificial Sequence: Synthetic oligonucleotide
uuggucuaagagggguuuu

SEQ ID NO: 2242263 - RNA, 19 nt, Artificial Sequence
  Description of Artificial Sequence: Synthetic oligonucleotide
gaguacagcuccugggguu

SEQ ID NO: 2242264 - RNA, 19 nt, Artificial Sequence
  Description of Artificial Sequence: Synthetic oligonucleotide
ccuuugggcguggacacag

SEQ ID NO: 2242265 - RNA, 19 nt, Artificial Sequence
  Description of Artificial Sequence: Synthetic oligonucleotide
ugacuccgggaaccucagu

SEQ ID NO: 2242266 - RNA, 19 nt, Artificial Sequence
  Description of Artificial Sequence: Synthetic oligonucleotide
gggccaacuccuccauucc

SEQ ID NO: 2242267 - RNA, 19 nt, Artificial Sequence
  Description of Artificial Sequence: Synthetic oligonucleotide
ggcguggacacagcaacac

SEQ ID NO: 2242268 - RNA, 19 nt, Artificial Sequence
  Description of Artificial Sequence: Synthetic oligonucleotide
ggggaguccuggaugaauc

SEQ ID NO: 2242269 - RNA, 19 nt, Artificial Sequence
  Description of Artificial Sequence: Synthetic oligonucleotide
aggcaugagccaggcgguc

SEQ ID NO: 2242270 - RNA, 19 nt, Artificial Sequence
  Description of Artificial Sequence: Synthetic oligonucleotide
cgaccauuagaauuuugga

SEQ ID NO: 2242271 - RNA, 19 nt, Artificial Sequence
  Description of Artificial Sequence: Synthetic oligonucleotide
cacuggcaacacaaaucga

SEQ ID NO: 2242272 - RNA, 19 nt, Artificial Sequence
  Description of Artificial Sequence: Synthetic oligonucleotide
gggccacucguuuucuuga

SEQ ID NO: 2242273 - RNA, 19 nt, Artificial Sequence
  Description of Artificial Sequence: Synthetic oligonucleotide
ugucuccauaaagcucaaa

SEQ ID NO: 2242274 - RNA, 19 nt, Artificial Sequence
  Description of Artificial Sequence: Synthetic oligonucleotide
cauuccgcugcugguccug

SEQ ID NO: 2242275 - RNA, 19 nt, Artificial Sequence
  Description of Artificial Sequence: Synthetic oligonucleotide
cagggccuucuuagaguac

SEQ ID NO: 2242276 - RNA, 19 nt, Artificial Sequence
  Description of Artificial Sequence: Synthetic oligonucleotide
ggauaguuggggaguccug

SEQ ID NO: 2242277 - RNA, 19 nt, Artificial Sequence
  Description of Artificial Sequence: Synthetic oligonucleotide
ccacucguuuucuugaucu

SEQ ID NO: 2242278 - RNA, 19 nt, Artificial Sequence
  Description of Artificial Sequence: Synthetic oligonucleotide
caucagucguaaauagauu

SEQ ID NO: 2242279 - RNA, 19 nt, Artificial Sequence
  Description of Artificial Sequence: Synthetic oligonucleotide
ggccuucuuagaguacagc

SEQ ID NO: 2242280 - RNA, 19 nt, Artificial Sequence
  Description of Artificial Sequence: Synthetic oligonucleotide
agcucuucuuuuggucuaa

SEQ ID NO: 2242281 - RNA, 19 nt, Artificial Sequence
  Description of Artificial Sequence: Synthetic oligonucleotide
ggcggucauacacaguccu

SEQ ID NO: 2242282 - RNA, 19 nt, Artificial Sequence
  Description of Artificial Sequence: Synthetic oligonucleotide
cagugucugucggaucauc

SEQ ID NO: 2242283 - RNA, 19 nt, Artificial Sequence
  Description of Artificial Sequence: Synthetic oligonucleotide
gguuuugcugcuccgugau

SEQ ID NO: 2242284 - RNA, 19 nt, Artificial Sequence
  Description of Artificial Sequence: Synthetic oligonucleotide
cuucgccuuugucauugaa

SEQ ID NO: 2242285 - RNA, 19 nt, Artificial Sequence
  Description of Artificial Sequence: Synthetic oligonucleotide
gaggcaugagccaggcggu

SEQ ID NO: 2242286 - RNA, 19 nt, Artificial Sequence
  Description of Artificial Sequence: Synthetic oligonucleotide
gcaacacuugguauuugaa

SEQ ID NO: 2242287 - RNA, 19 nt, Artificial Sequence
  Description of Artificial Sequence: Synthetic oligonucleotide
gaaucccuugauggagucu

SEQ ID NO: 2242288 - RNA, 19 nt, Artificial Sequence
  Description of Artificial Sequence: Synthetic oligonucleotide
ggacacuggcaacacaaau

SEQ ID NO: 2242289 - RNA, 19 nt, Artificial Sequence
  Description of Artificial Sequence: Synthetic oligonucleotide
cguauaugcaggucuugga

SEQ ID NO: 2242290 - RNA, 19 nt, Artificial Sequence
  Description of Artificial Sequence: Synthetic oligonucleotide
ccuguauguugaugacuuc

SEQ ID NO: 2242291 - RNA, 19 nt, Artificial Sequence
  Description of Artificial Sequence: Synthetic oligonucleotide
cagcagagagauucccaua

SEQ ID NO: 2242292 - RNA, 19 nt, Artificial Sequence
  Description of Artificial Sequence: Synthetic oligonucleotide
gcuguacauguuaguuccc

SEQ ID NO: 2242293 - RNA, 19 nt, Artificial Sequence
  Description of Artificial Sequence: Synthetic oligonucleotide
caccaugcuugaauccugu

SEQ ID NO: 2242294 - RNA, 19 nt, Artificial Sequence
  Description of Artificial Sequence: Synthetic oligonucleotide
ccaugcuugaauccugucu

SEQ ID NO: 2242295 - RNA, 19 nt, Artificial Sequence
  Description of Artificial Sequence: Synthetic oligonucleotide
uuggggaguccuggaugaa

SEQ ID NO: 2242296 - RNA, 19 nt, Artificial Sequence
  Description of Artificial Sequence: Synthetic oligonucleotide
cuggccugguucagucgca

SEQ ID NO: 2242297 - RNA, 19 nt, Artificial Sequence
  Description of Artificial Sequence: Synthetic oligonucleotide
ccgggaaccucaguucccc

SEQ ID NO: 2242298 - RNA, 19 nt, Artificial Sequence
  Description of Artificial Sequence: Synthetic oligonucleotide
cugguucagggccacucgu

SEQ ID NO: 2242299 - RNA, 19 nt, Artificial Sequence
  Description of Artificial Sequence: Synthetic oligonucleotide
acaggcccggacacuggca

SEQ ID NO: 2242300 - RNA, 19 nt, Artificial Sequence
  Description of Artificial Sequence: Synthetic oligonucleotide
gccuguauguugaugacuu

SEQ ID NO: 2242301 - RNA, 19 nt, Artificial Sequence
  Description of Artificial Sequence: Synthetic oligonucleotide
guucagggccacucguuuu

SEQ ID NO: 2242302 - RNA, 19 nt, Artificial Sequence
  Description of Artificial Sequence: Synthetic oligonucleotide
cugucuccauaaagcucaa

SEQ ID NO: 2242303 - RNA, 19 nt, Artificial Sequence
  Description of Artificial Sequence: Synthetic oligonucleotide
ccauuagaauuuuggacuu

SEQ ID NO: 2242304 - RNA, 19 nt, Artificial Sequence
  Description of Artificial Sequence: Synthetic oligonucleotide
ggcaugagccaggcgguca

SEQ ID NO: 2242305 - RNA, 19 nt, Artificial Sequence
  Description of Artificial Sequence: Synthetic oligonucleotide
gagggguuuugguggcaau

SEQ ID NO: 2242306 - RNA, 19 nt, Artificial Sequence
  Description of Artificial Sequence: Synthetic oligonucleotide
gguucagggccacucguuu

SEQ ID NO: 2242307 - RNA, 19 nt, Artificial Sequence
  Description of Artificial Sequence: Synthetic oligonucleotide
ccagcagagagauucccau

SEQ ID NO: 2242308 - RNA, 19 nt, Artificial Sequence
  Description of Artificial Sequence: Synthetic oligonucleotide
ccgauucgcgcuguacaug

SEQ ID NO: 2242309 - RNA, 19 nt, Artificial Sequence
  Description of Artificial Sequence: Synthetic oligonucleotide
cuuugaggcuaaguucuuu

SEQ ID NO: 2242310 - RNA, 19 nt, Artificial Sequence
  Description of Artificial Sequence: Synthetic oligonucleotide
ucccucccauuagccuggc

SEQ ID NO: 2242311 - RNA, 19 nt, Artificial Sequence
  Description of Artificial Sequence: Synthetic oligonucleotide
cauccacuugauguaggau

SEQ ID NO: 2242312 - RNA, 19 nt, Artificial Sequence
  Description of Artificial Sequence: Synthetic oligonucleotide
aucccuugauggagucuaa

SEQ ID NO: 2242313 - RNA, 19 nt, Artificial Sequence
  Description of Artificial Sequence: Synthetic oligonucleotide
cgauucgcgcuguacaugu

SEQ ID NO: 2242314 - RNA, 19 nt, Artificial Sequence
  Description of Artificial Sequence: Synthetic oligonucleotide
ccauuagccuggccaagaa

SEQ ID NO: 2242315 - RNA, 19 nt, Artificial Sequence
  Description of Artificial Sequence: Synthetic oligonucleotide
gccgauucgcgcuguacau

SEQ ID NO: 2242316 - RNA, 19 nt, Artificial Sequence
  Description of Artificial Sequence: Synthetic oligonucleotide
gcggucauacacaguccuc

SEQ ID NO: 2242317 - RNA, 19 nt, Artificial Sequence
  Description of Artificial Sequence: Synthetic oligonucleotide
cccauuagccuggccaaga

SEQ ID NO: 2242318 - RNA, 19 nt, Artificial Sequence
  Description of Artificial Sequence: Synthetic oligonucleotide
gcacauccuuugggcgugg

SEQ ID NO: 2242319 - RNA, 19 nt, Artificial Sequence
  Description of Artificial Sequence: Synthetic oligonucleotide
gcguggacacagcaacacu

SEQ ID NO: 2242320 - RNA, 19 nt, Artificial Sequence
  Description of Artificial Sequence: Synthetic oligonucleotide
ggcuaaguucuuugauguu

SEQ ID NO: 2242321 - RNA, 19 nt, Artificial Sequence
  Description of Artificial Sequence: Synthetic oligonucleotide
ccugugucuuugaggcuaa

SEQ ID NO: 2242322 - RNA, 19 nt, Artificial Sequence
  Description of Artificial Sequence: Synthetic oligonucleotide
cacauccuuugggcgugga

SEQ ID NO: 2242323 - RNA, 19 nt, Artificial Sequence
  Description of Artificial Sequence: Synthetic oligonucleotide
ccaucccucccauuagccu

SEQ ID NO: 2242324 - RNA, 19 nt, Artificial Sequence
  Description of Artificial Sequence: Synthetic oligonucleotide
guguagccuguauguugau

SEQ ID NO: 2242325 - RNA, 19 nt, Artificial Sequence
  Description of Artificial Sequence: Synthetic oligonucleotide
gauucgcgcuguacauguu

SEQ ID NO: 2242326 - RNA, 19 nt, Artificial Sequence
  Description of Artificial Sequence: Synthetic oligonucleotide
cuucuucgccuuugucauu

SEQ ID NO: 2242327 - RNA, 19 nt, Artificial Sequence
  Description of Artificial Sequence: Synthetic oligonucleotide
gggcagccacguaguuucc

SEQ ID NO: 2242328 - RNA, 19 nt, Artificial Sequence
  Description of Artificial Sequence: Synthetic oligonucleotide
gccacguaguuuccaccau

SEQ ID NO: 2242329 - RNA, 19 nt, Artificial Sequence
  Description of Artificial Sequence: Synthetic oligonucleotide
cggacacuggcaacacaaa

SEQ ID NO: 2242330 - RNA, 19 nt, Artificial Sequence
  Description of Artificial Sequence: Synthetic oligonucleotide
ccggaaggucucauccacu

SEQ ID NO: 2242331 - RNA, 19 nt, Artificial Sequence
  Description of Artificial Sequence: Synthetic oligonucleotide
gggaacaggcccggacacu

SEQ ID NO: 2242332 - RNA, 19 nt, Artificial Sequence
  Description of Artificial Sequence: Synthetic oligonucleotide
cccaugauccgggccaacu

SEQ ID NO: 2242333 - RNA, 19 nt, Artificial Sequence
  Description of Artificial Sequence: Synthetic oligonucleotide
cggaaggucucauccacuu

SEQ ID NO: 2242334 - RNA, 19 nt, Artificial Sequence
  Description of Artificial Sequence: Synthetic oligonucleotide
caggccgauucgcgcugua

SEQ ID NO: 2242335 - RNA, 19 nt, Artificial Sequence
  Description of Artificial Sequence: Synthetic oligonucleotide
ccuguguagccuguauguu

SEQ ID NO: 2242336 - RNA, 19 nt, Artificial Sequence
  Description of Artificial Sequence: Synthetic oligonucleotide
cgcgcuguacauguuaguu

SEQ ID NO: 2242337 - RNA, 19 nt, Artificial Sequence
  Description of Artificial Sequence: Synthetic oligonucleotide
cgccuuugucauugaauau

SEQ ID NO: 2242338 - RNA, 19 nt, Artificial Sequence
  Description of Artificial Sequence: Synthetic oligonucleotide
cgggaaccucaguucccca

SEQ ID NO: 2242339 - RNA, 19 nt, Artificial Sequence
  Description of Artificial Sequence: Synthetic oligonucleotide
ccccaugauccgggccaac

SEQ ID NO: 2242340 - RNA, 19 nt, Artificial Sequence
  Description of Artificial Sequence: Synthetic oligonucleotide
ccauggucaucaggucaua

SEQ ID NO: 2242341 - RNA, 19 nt, Artificial Sequence
  Description of Artificial Sequence: Synthetic oligonucleotide
ccgggccaacuccuccauu

SEQ ID NO: 2242342 - RNA, 19 nt, Artificial Sequence
  Description of Artificial Sequence: Synthetic oligonucleotide
gauacaacaggacagagag

SEQ ID NO: 2242343 - RNA, 19 nt, Artificial Sequence
  Description of Artificial Sequence: Synthetic oligonucleotide
aauaucgugauggacauac

SEQ ID NO: 2242344 - RNA, 19 nt, Artificial Sequence
  Description of Artificial Sequence: Synthetic oligonucleotide
cauaauucaagauccaccg

SEQ ID NO: 2242345 - RNA, 19 nt, Artificial Sequence
  Description of Artificial Sequence: Synthetic oligonucleotide
gaucaggucauaaauaucg

SEQ ID NO: 2242346 - RNA, 19 nt, Artificial Sequence
  Description of Artificial Sequence: Synthetic oligonucleotide
gucauaaauaucgugaugg

SEQ ID NO: 2242347 - RNA, 19 nt, Artificial Sequence
  Description of Artificial Sequence: Synthetic oligonucleotide
uagugcagcaacuucaugg

SEQ ID NO: 2242348 - RNA, 19 nt, Artificial Sequence
  Description of Artificial Sequence: Synthetic oligonucleotide
gaugacauaauucaagauc

SEQ ID NO: 2242349 - RNA, 19 nt, Artificial Sequence
  Description of Artificial Sequence: Synthetic oligonucleotide
uaauucaagauccaccgug

SEQ ID NO: 2242350 - RNA, 19 nt, Artificial Sequence
  Description of Artificial Sequence: Synthetic oligonucleotide
uugcauuggaaucuaagag

SEQ ID NO: 2242351 - RNA, 19 nt, Artificial Sequence
  Description of Artificial Sequence: Synthetic oligonucleotide
gaaucuaagagacauuuca

SEQ ID NO: 2242352 - RNA, 19 nt, Artificial Sequence
  Description of Artificial Sequence: Synthetic oligonucleotide
uuguuggaagcguugaugg

SEQ ID NO: 2242353 - RNA, 19 nt, Artificial Sequence
  Description of Artificial Sequence: Synthetic oligonucleotide
uaaagaucaggucauaaau

SEQ ID NO: 2242354 - RNA, 19 nt, Artificial Sequence
  Description of Artificial Sequence: Synthetic oligonucleotide
aagaucaggucauaaauau

SEQ ID NO: 2242355 - RNA, 19 nt, Artificial Sequence
  Description of Artificial Sequence: Synthetic oligonucleotide
aaauucacucucuggcugg

SEQ ID NO: 2242356 - RNA, 19 nt, Artificial Sequence
  Description of Artificial Sequence: Synthetic oligonucleotide
aauucaagauccaccgugc

SEQ ID NO: 2242357 - RNA, 19 nt, Artificial Sequence
  Description of Artificial Sequence: Synthetic oligonucleotide
uuugcauuggaaucuaaga

SEQ ID NO: 2242358 - RNA, 19 nt, Artificial Sequence
  Description of Artificial Sequence: Synthetic oligonucleotide
aaugucuuucugcugaaga

SEQ ID NO: 2242359 - RNA, 19 nt, Artificial Sequence
  Description of Artificial Sequence: Synthetic oligonucleotide
aggcauuugguguagagag

SEQ ID NO: 2242360 - RNA, 19 nt, Artificial Sequence
  Description of Artificial Sequence: Synthetic oligonucleotide
uuuugcauuggaaucuaag

SEQ ID NO: 2242361 - RNA, 19 nt, Artificial Sequence
  Description of Artificial Sequence: Synthetic oligonucleotide
uguuuucacgagcagauac

SEQ ID NO: 2242362 - RNA, 19 nt, Artificial Sequence
  Description of Artificial Sequence: Synthetic oligonucleotide
aaucuaagagacauuucac

SEQ ID NO: 2242363 - RNA, 19 nt, Artificial Sequence
  Description of Artificial Sequence: Synthetic oligonucleotide
acaggcguaaaugaggggc

SEQ ID NO: 2242364 - RNA, 19 nt, Artificial Sequence
  Description of Artificial Sequence: Synthetic oligonucleotide
auaaauaucgugauggaca

SEQ ID NO: 2242365 - RNA, 19 nt, Artificial Sequence
  Description of Artificial Sequence: Synthetic oligonucleotide
gaucgucccauccaguugg

SEQ ID NO: 2242366 - RNA, 19 nt, Artificial Sequence
  Description of Artificial Sequence: Synthetic oligonucleotide
ucgugauggacauacaucu

SEQ ID NO: 2242367 - RNA, 19 nt, Artificial Sequence
  Description of Artificial Sequence: Synthetic oligonucleotide
gucacauucacaccaagcc

SEQ ID NO: 2242368 - RNA, 19 nt, Artificial Sequence
  Description of Artificial Sequence: Synthetic oligonucleotide
uacggagucuaugugaugg

SEQ ID NO: 2242369 - RNA, 19 nt, Artificial Sequence
  Description of Artificial Sequence: Synthetic oligonucleotide
uacaacaggacagagagaa

SEQ ID NO: 2242370 - RNA, 19 nt, Artificial Sequence
  Description of Artificial Sequence: Synthetic oligonucleotide
uccgcaagaaccuucaggu

SEQ ID NO: 2242371 - RNA, 19 nt, Artificial Sequence
  Description of Artificial Sequence: Synthetic oligonucleotide
uuuguuaaaggcggcaucc

SEQ ID NO: 2242372 - RNA, 19 nt, Artificial Sequence
  Description of Artificial Sequence: Synthetic oligonucleotide
ucaggugagagucucucag

SEQ ID NO: 2242373 - RNA, 19 nt, Artificial Sequence
  Description of Artificial Sequence: Synthetic oligonucleotide
agauccaccgugccgaugg

SEQ ID NO: 2242374 - RNA, 19 nt, Artificial Sequence
  Description of Artificial Sequence: Synthetic oligonucleotide
uucaagauccaccgugccg

SEQ ID NO: 2242375 - RNA, 19 nt, Artificial Sequence
  Description of Artificial Sequence: Synthetic oligonucleotide
caugcugcagcaauagugc

SEQ ID NO: 2242376 - RNA, 19 nt, Artificial Sequence
  Description of Artificial Sequence: Synthetic oligonucleotide
uuugccaguuucuucuggg

SEQ ID NO: 2242377 - RNA, 19 nt, Artificial Sequence
  Description of Artificial Sequence: Synthetic oligonucleotide
aaagugucccugcuggcag

SEQ ID NO: 2242378 - RNA, 19 nt, Artificial Sequence
  Description of Artificial Sequence: Synthetic oligonucleotide
ugguuggucacauucacac

SEQ ID NO: 2242379 - RNA, 19 nt, Artificial Sequence
  Description of Artificial Sequence: Synthetic oligonucleotide
ucuaagagacauuucacua

SEQ ID NO: 2242380 - RNA, 19 nt, Artificial Sequence
  Description of Artificial Sequence: Synthetic oligonucleotide
uuaaagaucaggucauaaa

SEQ ID NO: 2242381 - RNA, 19 nt, Artificial Sequence
  Description of Artificial Sequence: Synthetic oligonucleotide
cauaagguucaucugggcc

SEQ ID NO: 2242382 - RNA, 19 nt, Artificial Sequence
  Description of Artificial Sequence: Synthetic oligonucleotide
uucaacaggagggagacga

SEQ ID NO: 2242383 - RNA, 19 nt, Artificial Sequence
  Description of Artificial Sequence: Synthetic oligonucleotide
aagcccacuagcaggaacc

SEQ ID NO: 2242384 - RNA, 19 nt, Artificial Sequence
  Description of Artificial Sequence: Synthetic oligonucleotide
caggacagagagaaggucg

SEQ ID NO: 2242385 - RNA, 19 nt, Artificial Sequence
  Description of Artificial Sequence: Synthetic oligonucleotide
auaugcaggggagaggagc

SEQ ID NO: 2242386 - RNA, 19 nt, Artificial Sequence
  Description of Artificial Sequence: Synthetic oligonucleotide
caacaggacagagagaagg

SEQ ID NO: 2242387 - RNA, 19 nt, Artificial Sequence
  Description of Artificial Sequence: Synthetic oligonucleotide
auaagggaugacauaauuc

SEQ ID NO: 2242388 - RNA, 19 nt, Artificial Sequence
  Description of Artificial Sequence: Synthetic oligonucleotide
aucuaagagacauuucacu

SEQ ID NO: 2242389 - RNA, 19 nt, Artificial Sequence
  Description of Artificial Sequence: Synthetic oligonucleotide
gaacaggcguaaaugaggg

SEQ ID NO: 2242390 - RNA, 19 nt, Artificial Sequence
  Description of Artificial Sequence: Synthetic oligonucleotide
uacugccugcuucauaagg

SEQ ID NO: 2242391 - RNA, 19 nt, Artificial Sequence
  Description of Artificial Sequence: Synthetic oligonucleotide
cacauggucuccaaaauuc

SEQ ID NO: 2242392 - RNA, 19 nt, Artificial Sequence
  Description of Artificial Sequence: Synthetic oligonucleotide
uuuacggagucuaugugau

SEQ ID NO: 2242393 - RNA, 19 nt, Artificial Sequence
  Description of Artificial Sequence: Synthetic oligonucleotide
uaaauaucgugauggacau

SEQ ID NO: 2242394 - RNA, 19 nt, Artificial Sequence
  Description of Artificial Sequence: Synthetic oligonucleotide
auucaagauccaccgugcc

SEQ ID NO: 2242395 - RNA, 19 nt, Artificial Sequence
  Description of Artificial Sequence: Synthetic oligonucleotide
guugauggaggcuccaugc

SEQ ID NO: 2242396 - RNA, 19 nt, Artificial Sequence
  Description of Artificial Sequence: Synthetic oligonucleotide
ucaagauccaccgugccga

SEQ ID NO: 2242397 - RNA, 19 nt, Artificial Sequence
  Description of Artificial Sequence: Synthetic oligonucleotide
agggagacgagguccgucc

SEQ ID NO: 2242398 - RNA, 19 nt, Artificial Sequence
  Description of Artificial Sequence: Synthetic oligonucleotide
agaacaggcguaaaugagg

SEQ ID NO: 2242399 - RNA, 19 nt, Artificial Sequence
  Description of Artificial Sequence: Synthetic oligonucleotide
cugaacucgggcuuuacac

SEQ ID NO: 2242400 - RNA, 19 nt, Artificial Sequence
  Description of Artificial Sequence: Synthetic oligonucleotide
uguugaagcugaacucggg

SEQ ID NO: 2242401 - RNA, 19 nt, Artificial Sequence
  Description of Artificial Sequence: Synthetic oligonucleotide
uaugugauggcggagacuu

SEQ ID NO: 2242402 - RNA, 19 nt, Artificial Sequence
  Description of Artificial Sequence: Synthetic oligonucleotide
gaaccuucaggugagaguc

SEQ ID NO: 2242403 - RNA, 19 nt, Artificial Sequence
  Description of Artificial Sequence: Synthetic oligonucleotide
cacguauuuaaagaucagg

SEQ ID NO: 2242404 - RNA, 19 nt, Artificial Sequence
  Description of Artificial Sequence: Synthetic oligonucleotide
uuucacuaccugaaagugu

SEQ ID NO: 2242405 - RNA, 19 nt, Artificial Sequence
  Description of Artificial Sequence: Synthetic oligonucleotide
gagacauuucacuaccuga

SEQ ID NO: 2242406 - RNA, 19 nt, Artificial Sequence
  Description of Artificial Sequence: Synthetic oligonucleotide
ucuguuguuggaagcguug

SEQ ID NO: 2242407 - RNA, 19 nt, Artificial Sequence
  Description of Artificial Sequence: Synthetic oligonucleotide
uaucgugauggacauacau

SEQ ID NO: 2242408 - RNA, 19 nt, Artificial Sequence
  Description of Artificial Sequence: Synthetic oligonucleotide
ucauaaauaucgugaugga

SEQ ID NO: 2242409 - RNA, 19 nt, Artificial Sequence
  Description of Artificial Sequence: Synthetic oligonucleotide
acguauuuaaagaucaggu

SEQ ID NO: 2242410 - RNA, 19 nt, Artificial Sequence
  Description of Artificial Sequence: Synthetic oligonucleotide
uguagagagcguuuacgga

SEQ ID NO: 2242411 - RNA, 19 nt, Artificial Sequence
  Description of Artificial Sequence: Synthetic oligonucleotide
uuuuguuaaaggcggcauc

SEQ ID NO: 2242412 - RNA, 19 nt, Artificial Sequence
  Description of Artificial Sequence: Synthetic oligonucleotide
uguguuucuggcacccgag

SEQ ID NO: 2242413 - RNA, 19 nt, Artificial Sequence
  Description of Artificial Sequence: Synthetic oligonucleotide
auuucacuaccugaaagug

SEQ ID NO: 2242414 - RNA, 19 nt, Artificial Sequence
  Description of Artificial Sequence: Synthetic oligonucleotide
uuuaaagaucaggucauaa

SEQ ID NO: 2242415 - RNA, 19 nt, Artificial Sequence
  Description of Artificial Sequence: Synthetic oligonucleotide
ugauggaggcuccaugcug

SEQ ID NO: 2242416 - RNA, 19 nt, Artificial Sequence
  Description of Artificial Sequence: Synthetic oligonucleotide
ucgggcuuuacaccaaugu

SEQ ID NO: 2242417 - RNA, 19 nt, Artificial Sequence
  Description of Artificial Sequence: Synthetic oligonucleotide
guuuacggagucuauguga

SEQ ID NO: 2242418 - RNA, 19 nt, Artificial Sequence
  Description of Artificial Sequence: Synthetic oligonucleotide
uggaaucuaagagacauuu

SEQ ID NO: 2242419 - RNA, 19 nt, Artificial Sequence
  Description of Artificial Sequence: Synthetic oligonucleotide
gagcagauacaacaggaca

SEQ ID NO: 2242420 - RNA, 19 nt, Artificial Sequence
  Description of Artificial Sequence: Synthetic oligonucleotide
uuugcucgagggauguuga

SEQ ID NO: 2242421 - RNA, 19 nt, Artificial Sequence
  Description of Artificial Sequence: Synthetic oligonucleotide
aacaggcguaaaugagggg

SEQ ID NO: 2242422 - RNA, 19 nt, Artificial Sequence
  Description of Artificial Sequence: Synthetic oligonucleotide
gacauacaucucuacugcc

SEQ ID NO: 2242423 - RNA, 19 nt, Artificial Sequence
  Description of Artificial Sequence: Synthetic oligonucleotide
gucuccaaaauucacucuc

SEQ ID NO: 2242424 - RNA, 19 nt, Artificial Sequence
  Description of Artificial Sequence: Synthetic oligonucleotide
agaaccuucaggugagagu

SEQ ID NO: 2242425 - RNA, 19 nt, Artificial Sequence
  Description of Artificial Sequence: Synthetic oligonucleotide
cacauucacaccaagccca

SEQ ID NO: 2242426 - RNA, 19 nt, Artificial Sequence
  Description of Artificial Sequence: Synthetic oligonucleotide
ugcuucaacaggagggaga

SEQ ID NO: 2242427 - RNA, 19 nt, Artificial Sequence
  Description of Artificial Sequence: Synthetic oligonucleotide
caccaagcccacuagcagg

SEQ ID NO: 2242428 - RNA, 19 nt, Artificial Sequence
  Description of Artificial Sequence: Synthetic oligonucleotide
aucgugauggacauacauc

SEQ ID NO: 2242429 - RNA, 19 nt, Artificial Sequence
  Description of Artificial Sequence: Synthetic oligonucleotide
ucuaugugauggcggagac

SEQ ID NO: 2242430 - RNA, 19 nt, Artificial Sequence
  Description of Artificial Sequence: Synthetic oligonucleotide
accagaacaggcguaaaug

SEQ ID NO: 2242431 - RNA, 19 nt, Artificial Sequence
  Description of Artificial Sequence: Synthetic oligonucleotide
uccggaucgucccauccag

SEQ ID NO: 2242432 - RNA, 19 nt, Artificial Sequence
  Description of Artificial Sequence: Synthetic oligonucleotide
aaugaggggcguguucccg

SEQ ID NO: 2242433 - RNA, 19 nt, Artificial Sequence
  Description of Artificial Sequence: Synthetic oligonucleotide
cuccgcaagaaccuucagg

SEQ ID NO: 2242434 - RNA, 19 nt, Artificial Sequence
  Description of Artificial Sequence: Synthetic oligonucleotide
gcauuugguguagagagcg

SEQ ID NO: 2242435 - RNA, 19 nt, Artificial Sequence
  Description of Artificial Sequence: Synthetic oligonucleotide
ggcaccaugcuucaacagg

SEQ ID NO: 2242436 - RNA, 19 nt, Artificial Sequence
  Description of Artificial Sequence: Synthetic oligonucleotide
uaucagguuuugcauugga

SEQ ID NO: 2242437 - RNA, 19 nt, Artificial Sequence
  Description of Artificial Sequence: Synthetic oligonucleotide
aauucacucucuggcuggg

SEQ ID NO: 2242438 - RNA, 19 nt, Artificial Sequence
  Description of Artificial Sequence: Synthetic oligonucleotide
acuggcauaagggaugaca

SEQ ID NO: 2242439 - RNA, 19 nt, Artificial Sequence
  Description of Artificial Sequence: Synthetic oligonucleotide
guuguuggaagcguugaug

SEQ ID NO: 2242440 - RNA, 19 nt, Artificial Sequence
  Description of Artificial Sequence: Synthetic oligonucleotide
ugugauggcggagacuucu

SEQ ID NO: 2242441 - RNA, 19 nt, Artificial Sequence
  Description of Artificial Sequence: Synthetic oligonucleotide
acggagucuaugugauggc

SEQ ID NO: 2242442 - RNA, 19 nt, Artificial Sequence
  Description of Artificial Sequence: Synthetic oligonucleotide
caggcguaaaugaggggcg

SEQ ID NO: 2242443 - RNA, 19 nt, Artificial Sequence
  Description of Artificial Sequence: Synthetic oligonucleotide
ugccaguuucuucugggcu

SEQ ID NO: 2242444 - RNA, 19 nt, Artificial Sequence
  Description of Artificial Sequence: Synthetic oligonucleotide
auaauucaagauccaccgu

SEQ ID NO: 2242445 - RNA, 19 nt, Artificial Sequence
  Description of Artificial Sequence: Synthetic oligonucleotide
cucauuugccuccaugguc

SEQ ID NO: 2242446 - RNA, 19 nt, Artificial Sequence
  Description of Artificial Sequence: Synthetic oligonucleotide
cauggucuccaaaauucac

SEQ ID NO: 2242447 - RNA, 19 nt, Artificial Sequence
  Description of Artificial Sequence: Synthetic oligonucleotide
ucacaccaagcccacuagc

SEQ ID NO: 2242448 - RNA, 19 nt, Artificial Sequence
  Description of Artificial Sequence: Synthetic oligonucleotide
aagugucccugcuggcagg

SEQ ID NO: 2242449 - RNA, 19 nt, Artificial Sequence
  Description of Artificial Sequence: Synthetic oligonucleotide
ugaagaucuugaaggcuuc

SEQ ID NO: 2242450 - RNA, 19 nt, Artificial Sequence
  Description of Artificial Sequence: Synthetic oligonucleotide
cacgagcagauacaacagg

SEQ ID NO: 2242451 - RNA, 19 nt, Artificial Sequence
  Description of Artificial Sequence: Synthetic oligonucleotide
gauggcggagacuucuuuc

SEQ ID NO: 2242452 - RNA, 19 nt, Artificial Sequence
  Description of Artificial Sequence: Synthetic oligonucleotide
uugccucuguuguuggaag

SEQ ID NO: 2242453 - RNA, 19 nt, Artificial Sequence
  Description of Artificial Sequence: Synthetic oligonucleotide
uuggggaucucuguuuuca

SEQ ID NO: 2242454 - RNA, 19 nt, Artificial Sequence
  Description of Artificial Sequence: Synthetic oligonucleotide
aauagugcagcaacuucau

SEQ ID NO: 2242455 - RNA, 19 nt, Artificial Sequence
  Description of Artificial Sequence: Synthetic oligonucleotide
uguuucuggcacccgagua

SEQ ID NO: 2242456 - RNA, 19 nt, Artificial Sequence
  Description of Artificial Sequence: Synthetic oligonucleotide
uaggcaccaugcuucaaca

SEQ ID NO: 2242457 - RNA, 19 nt, Artificial Sequence
  Description of Artificial Sequence: Synthetic oligonucleotide
uuguucagcugccccagcu

SEQ ID NO: 2242458 - RNA, 19 nt, Artificial Sequence
  Description of Artificial Sequence: Synthetic oligonucleotide
uccugguuggucacauuca

SEQ ID NO: 2242459 - RNA, 19 nt, Artificial Sequence
  Description of Artificial Sequence: Synthetic oligonucleotide
gguguagagagcguuuacg

SEQ ID NO: 2242460 - RNA, 19 nt, Artificial Sequence
  Description of Artificial Sequence: Synthetic oligonucleotide
aaggcggcauccucauuug

SEQ ID NO: 2242461 - RNA, 19 nt, Artificial Sequence
  Description of Artificial Sequence: Synthetic oligonucleotide
uuaaaggcggcauccucau

SEQ ID NO: 2242462 - RNA, 19 nt, Artificial Sequence
  Description of Artificial Sequence: Synthetic oligonucleotide
ucucuuugcucgagggaug

SEQ ID NO: 2242463 - RNA, 19 nt, Artificial Sequence
  Description of Artificial Sequence: Synthetic oligonucleotide
auucacaccaagcccacua

SEQ ID NO: 2242464 - RNA, 19 nt, Artificial Sequence
  Description of Artificial Sequence: Synthetic oligonucleotide
uccaccgugccgauggccu

SEQ ID NO: 2242465 - RNA, 19 nt, Artificial Sequence
  Description of Artificial Sequence: Synthetic oligonucleotide
gcagcaauagugcagcaac

SEQ ID NO: 2242466 - RNA, 19 nt, Artificial Sequence
  Description of Artificial Sequence: Synthetic oligonucleotide
agguuuugcauuggaaucu

SEQ ID NO: 2242467 - RNA, 19 nt, Artificial Sequence
  Description of Artificial Sequence: Synthetic oligonucleotide
auggcggagacuucuuucu

SEQ ID NO: 2242468 - RNA, 19 nt, Artificial Sequence
  Description of Artificial Sequence: Synthetic oligonucleotide
cuuugcucgagggauguug

SEQ ID NO: 2242469 - RNA, 19 nt, Artificial Sequence
  Description of Artificial Sequence: Synthetic oligonucleotide
ugcucgagggauguugaag

SEQ ID NO: 2242470 - RNA, 19 nt, Artificial Sequence
  Description of Artificial Sequence: Synthetic oligonucleotide
gaucuugaaggcuucuugu

SEQ ID NO: 2242471 - RNA, 19 nt, Artificial Sequence
  Description of Artificial Sequence: Synthetic oligonucleotide
agaucaggucauaaauauc

SEQ ID NO: 2242472 - RNA, 19 nt, Artificial Sequence
  Description of Artificial Sequence: Synthetic oligonucleotide
uuucacgagcagauacaac

SEQ ID NO: 2242473 - RNA, 19 nt, Artificial Sequence
  Description of Artificial Sequence: Synthetic oligonucleotide
uuacaccaaugucuuucug

SEQ ID NO: 2242474 - RNA, 19 nt, Artificial Sequence
  Description of Artificial Sequence: Synthetic oligonucleotide
agcggcacagcuuggcuug

SEQ ID NO: 2242475 - RNA, 19 nt, Artificial Sequence
  Description of Artificial Sequence: Synthetic oligonucleotide
ccagcucucucuuugcucg

SEQ ID NO: 2242476 - RNA, 19 nt, Artificial Sequence
  Description of Artificial Sequence: Synthetic oligonucleotide
acuaccugaaagugucccu

SEQ ID NO: 2242477 - RNA, 19 nt, Artificial Sequence
  Description of Artificial Sequence: Synthetic oligonucleotide
acccgaguaggcaccaugc

SEQ ID NO: 2242478 - RNA, 19 nt, Artificial Sequence
  Description of Artificial Sequence: Synthetic oligonucleotide
ugcuccgcaagaaccuuca

SEQ ID NO: 2242479 - RNA, 19 nt, Artificial Sequence
  Description of Artificial Sequence: Synthetic oligonucleotide
uccccacguauuuaaagau

SEQ ID NO: 2242480 - RNA, 19 nt, Artificial Sequence
  Description of Artificial Sequence: Synthetic oligonucleotide
ccaugcugcagcaauagug

SEQ ID NO: 2242481 - RNA, 19 nt, Artificial Sequence
  Description of Artificial Sequence: Synthetic oligonucleotide
uguuggaagcguugaugga

SEQ ID NO: 2242482 - RNA, 19 nt, Artificial Sequence
  Description of Artificial Sequence: Synthetic oligonucleotide
gugccgauggccucauccg

SEQ ID NO: 2242483 - RNA, 19 nt, Artificial Sequence
  Description of Artificial Sequence: Synthetic oligonucleotide
gcucgagggauguugaagc

SEQ ID NO: 2242484 - RNA, 19 nt, Artificial Sequence
  Description of Artificial Sequence: Synthetic oligonucleotide
cuaucacugcucgugcagg

SEQ ID NO: 2242485 - RNA, 19 nt, Artificial Sequence
  Description of Artificial Sequence: Synthetic oligonucleotide
uugccaguuucuucugggc

SEQ ID NO: 2242486 - RNA, 19 nt, Artificial Sequence
  Description of Artificial Sequence: Synthetic oligonucleotide
gggaugacauaauucaaga

SEQ ID NO: 2242487 - RNA, 19 nt, Artificial Sequence
  Description of Artificial Sequence: Synthetic oligonucleotide
ugucccugcuggcaggcca

SEQ ID NO: 2242488 - RNA, 19 nt, Artificial Sequence
  Description of Artificial Sequence: Synthetic oligonucleotide
aucucuguuuucacgagca

SEQ ID NO: 2242489 - RNA, 19 nt, Artificial Sequence
  Description of Artificial Sequence: Synthetic oligonucleotide
aggugagagucucucagaa

SEQ ID NO: 2242490 - RNA, 19 nt, Artificial Sequence
  Description of Artificial Sequence: Synthetic oligonucleotide
gacagagagaaggucguca

SEQ ID NO: 2242491 - RNA, 19 nt, Artificial Sequence
  Description of Artificial Sequence: Synthetic oligonucleotide
uccugcuccgcaagaaccu

SEQ ID NO: 2242492 - RNA, 19 nt, Artificial Sequence
  Description of Artificial Sequence: Synthetic oligonucleotide
guccccacguauuuaaaga

SEQ ID NO: 2242493 - RNA, 19 nt, Artificial Sequence
  Description of Artificial Sequence: Synthetic oligonucleotide
gcauuggaaucuaagagac

SEQ ID NO: 2242494 - RNA, 19 nt, Artificial Sequence
  Description of Artificial Sequence: Synthetic oligonucleotide
cauuucacuaccugaaagu

SEQ ID NO: 2242495 - RNA, 19 nt, Artificial Sequence
  Description of Artificial Sequence: Synthetic oligonucleotide
guccugguuggucacauuc

SEQ ID NO: 2242496 - RNA, 19 nt, Artificial Sequence
  Description of Artificial Sequence: Synthetic oligonucleotide
cacuaccugaaaguguccc

SEQ ID NO: 2242497 - RNA, 19 nt, Artificial Sequence
  Description of Artificial Sequence: Synthetic oligonucleotide
gagagucucucagaagcug

SEQ ID NO: 2242498 - RNA, 19 nt, Artificial Sequence
  Description of Artificial Sequence: Synthetic oligonucleotide
cuaccugaaagugucccug

SEQ ID NO: 2242499 - RNA, 19 nt, Artificial Sequence
  Description of Artificial Sequence: Synthetic oligonucleotide
ggauguugaagcugaacuc

SEQ ID NO: 2242500 - RNA, 19 nt, Artificial Sequence
  Description of Artificial Sequence: Synthetic oligonucleotide
agagagcguuuacggaguc

SEQ ID NO: 2242501 - RNA, 19 nt, Artificial Sequence
  Description of Artificial Sequence: Synthetic oligonucleotide
ucacuaccugaaagugucc

SEQ ID NO: 2242502 - RNA, 19 nt, Artificial Sequence
  Description of Artificial Sequence: Synthetic oligonucleotide
caucucuacugccugcuuc

SEQ ID NO: 2242503 - RNA, 19 nt, Artificial Sequence
  Description of Artificial Sequence: Synthetic oligonucleotide
agccauaugcaggggagag

SEQ ID NO: 2242504 - RNA, 19 nt, Artificial Sequence
  Description of Artificial Sequence: Synthetic oligonucleotide
uacaucucuacugccugcu

SEQ ID NO: 2242505 - RNA, 19 nt, Artificial Sequence
  Description of Artificial Sequence: Synthetic oligonucleotide
ggucauaaauaucgugaug

SEQ ID NO: 2242506 - RNA, 19 nt, Artificial Sequence
  Description of Artificial Sequence: Synthetic oligonucleotide
ggagacuucuuucuuucac

SEQ ID NO: 2242507 - RNA, 19 nt, Artificial Sequence
  Description of Artificial Sequence: Synthetic oligonucleotide
uccuuuuaucagguuuugc

SEQ ID NO: 2242508 - RNA, 19 nt, Artificial Sequence
  Description of Artificial Sequence: Synthetic oligonucleotide
ggagucuaugugauggcgg

SEQ ID NO: 2242509 - RNA, 19 nt, Artificial Sequence
  Description of Artificial Sequence: Synthetic oligonucleotide
ucgagggauguugaagcug

SEQ ID NO: 2242510 - RNA, 19 nt, Artificial Sequence
  Description of Artificial Sequence: Synthetic oligonucleotide
ucacucucuggcugggaga

SEQ ID NO: 2242511 - RNA, 19 nt, Artificial Sequence
  Description of Artificial Sequence: Synthetic oligonucleotide
accuucaggugagagucuc

SEQ ID NO: 2242512 - RNA, 19 nt, Artificial Sequence
  Description of Artificial Sequence: Synthetic oligonucleotide
ugccugcuucauaagguuc

SEQ ID NO: 2242513 - RNA, 19 nt, Artificial Sequence
  Description of Artificial Sequence: Synthetic oligonucleotide
cuuuuaucagguuuugcau

SEQ ID NO: 2242514 - RNA, 19 nt, Artificial Sequence
  Description of Artificial Sequence: Synthetic oligonucleotide
ugguguagagagcguuuac

SEQ ID NO: 2242515 - RNA, 19 nt, Artificial Sequence
  Description of Artificial Sequence: Synthetic oligonucleotide
gguccccacguauuuaaag

SEQ ID NO: 2242516 - RNA, 19 nt, Artificial Sequence
  Description of Artificial Sequence: Synthetic oligonucleotide
auagugcagcaacuucaug

SEQ ID NO: 2242517 - RNA, 19 nt, Artificial Sequence
  Description of Artificial Sequence: Synthetic oligonucleotide
aguuggggaucucuguuuu

SEQ ID NO: 2242518 - RNA, 19 nt, Artificial Sequence
  Description of Artificial Sequence: Synthetic oligonucleotide
gcuggagcacacuuggggc

SEQ ID NO: 2242519 - RNA, 19 nt, Artificial Sequence
  Description of Artificial Sequence: Synthetic oligonucleotide
uacacuuguucagcugccc

SEQ ID NO: 2242520 - RNA, 19 nt, Artificial Sequence
  Description of Artificial Sequence: Synthetic oligonucleotide
gaggcauuugguguagaga

SEQ ID NO: 2242521 - RNA, 19 nt, Artificial Sequence
  Description of Artificial Sequence: Synthetic oligonucleotide
guuuucacgagcagauaca

SEQ ID NO: 2242522 - RNA, 19 nt, Artificial Sequence
  Description of Artificial Sequence: Synthetic oligonucleotide
agcguuuacggagucuaug

SEQ ID NO: 2242523 - RNA, 19 nt, Artificial Sequence
  Description of Artificial Sequence: Synthetic oligonucleotide
ggcauaagggaugacauaa

SEQ ID NO: 2242524 - RNA, 19 nt, Artificial Sequence
  Description of Artificial Sequence: Synthetic oligonucleotide
augguccccacguauuuaa

SEQ ID NO: 2242525 - RNA, 19 nt, Artificial Sequence
  Description of Artificial Sequence: Synthetic oligonucleotide
uuacggagucuaugugaug

SEQ ID NO: 2242526 - RNA, 19 nt, Artificial Sequence
  Description of Artificial Sequence: Synthetic oligonucleotide
cguauuuaaagaucagguc

SEQ ID NO: 2242527 - RNA, 19 nt, Artificial Sequence
  Description of Artificial Sequence: Synthetic oligonucleotide
agagcguuuacggagucua

SEQ ID NO: 2242528 - RNA, 19 nt, Artificial Sequence
  Description of Artificial Sequence: Synthetic oligonucleotide
cauccggaucgucccaucc

SEQ ID NO: 2242529 - RNA, 19 nt, Artificial Sequence
  Description of Artificial Sequence: Synthetic oligonucleotide
aggcggcauccucauuugc

SEQ ID NO: 2242530 - RNA, 19 nt, Artificial Sequence
  Description of Artificial Sequence: Synthetic oligonucleotide
agacgagguccguccggcc

SEQ ID NO: 2242531 - RNA, 19 nt, Artificial Sequence
  Description of Artificial Sequence: Synthetic oligonucleotide
uccaugcugcagcaauagu

SEQ ID NO: 2242532 - RNA, 19 nt, Artificial Sequence
  Description of Artificial Sequence: Synthetic oligonucleotide
ucagcacacauggucucca

SEQ ID NO: 2242533 - RNA, 19 nt, Artificial Sequence
  Description of Artificial Sequence: Synthetic oligonucleotide
cuucaggugagagucucuc

SEQ ID NO: 2242534 - RNA, 19 nt, Artificial Sequence
  Description of Artificial Sequence: Synthetic oligonucleotide
gagacgagguccguccggc

SEQ ID NO: 2242535 - RNA, 19 nt, Artificial Sequence
  Description of Artificial Sequence: Synthetic oligonucleotide
aggcaccaugcuucaacag

SEQ ID NO: 2242536 - RNA, 19 nt, Artificial Sequence
  Description of Artificial Sequence: Synthetic oligonucleotide
ggugagagucucucagaag

SEQ ID NO: 2242537 - RNA, 19 nt, Artificial Sequence
  Description of Artificial Sequence: Synthetic oligonucleotide
agcaauagugcagcaacuu

SEQ ID NO: 2242538 - RNA, 19 nt, Artificial Sequence
  Description of Artificial Sequence: Synthetic oligonucleotide
accugaaagugucccugcu

SEQ ID NO: 2242539 - RNA, 19 nt, Artificial Sequence
  Description of Artificial Sequence: Synthetic oligonucleotide
gcaauagugcagcaacuuc

SEQ ID NO: 2242540 - RNA, 19 nt, Artificial Sequence
  Description of Artificial Sequence: Synthetic oligonucleotide
ggucacauucacaccaagc

SEQ ID NO: 2242541 - RNA, 19 nt, Artificial Sequence
  Description of Artificial Sequence: Synthetic oligonucleotide
aagguucaucugggccucc

SEQ ID NO: 2242542 - RNA, 19 nt, Artificial Sequence
  Description of Artificial Sequence: Synthetic oligonucleotide
uugguguagagagcguuua

SEQ ID NO: 2242543 - RNA, 19 nt, Artificial Sequence
  Description of Artificial Sequence: Synthetic oligonucleotide
auccggaucgucccaucca

SEQ ID NO: 2242544 - RNA, 19 nt, Artificial Sequence
  Description of Artificial Sequence: Synthetic oligonucleotide
caccaugcuucaacaggag

SEQ ID NO: 2242545 - RNA, 19 nt, Artificial Sequence
  Description of Artificial Sequence: Synthetic oligonucleotide
ccgagguccuuuuaucagg

SEQ ID NO: 2242546 - RNA, 19 nt, Artificial Sequence
  Description of Artificial Sequence: Synthetic oligonucleotide
gacgagguccguccggcca

SEQ ID NO: 2242547 - RNA, 19 nt, Artificial Sequence
  Description of Artificial Sequence: Synthetic oligonucleotide
auccaccgugccgauggcc

SEQ ID NO: 2242548 - RNA, 19 nt, Artificial Sequence
  Description of Artificial Sequence: Synthetic oligonucleotide
uggcauaagggaugacaua

SEQ ID NO: 2242549 - RNA, 19 nt, Artificial Sequence
  Description of Artificial Sequence: Synthetic oligonucleotide
uguugccucuguuguugga

SEQ ID NO: 2242550 - RNA, 19 nt, Artificial Sequence
  Description of Artificial Sequence: Synthetic oligonucleotide
uccguccggccaugcaagg

SEQ ID NO: 2242551 - RNA, 19 nt, Artificial Sequence
  Description of Artificial Sequence: Synthetic oligonucleotide
gcaagaaccuucaggugag

SEQ ID NO: 2242552 - RNA, 19 nt, Artificial Sequence
  Description of Artificial Sequence: Synthetic oligonucleotide
aucaggucauaaauaucgu

SEQ ID NO: 2242553 - RNA, 19 nt, Artificial Sequence
  Description of Artificial Sequence: Synthetic oligonucleotide
cucuguuuucacgagcaga

SEQ ID NO: 2242554 - RNA, 19 nt, Artificial Sequence
  Description of Artificial Sequence: Synthetic oligonucleotide
guacacuuguucagcugcc

SEQ ID NO: 2242555 - RNA, 19 nt, Artificial Sequence
  Description of Artificial Sequence: Synthetic oligonucleotide
aggacagagagaaggucgu

SEQ ID NO: 2242556 - RNA, 19 nt, Artificial Sequence
  Description of Artificial Sequence: Synthetic oligonucleotide
gguuggucacauucacacc

SEQ ID NO: 2242557 - RNA, 19 nt, Artificial Sequence
  Description of Artificial Sequence: Synthetic oligonucleotide
cauuggaaucuaagagaca

SEQ ID NO: 2242558 - RNA, 19 nt, Artificial Sequence
  Description of Artificial Sequence: Synthetic oligonucleotide
agucuaugugauggcggag

SEQ ID NO: 2242559 - RNA, 19 nt, Artificial Sequence
  Description of Artificial Sequence: Synthetic oligonucleotide
cuuguguuucuggcacccg

SEQ ID NO: 2242560 - RNA, 19 nt, Artificial Sequence
  Description of Artificial Sequence: Synthetic oligonucleotide
gccgagguccuuuuaucag

SEQ ID NO: 2242561 - RNA, 19 nt, Artificial Sequence
  Description of Artificial Sequence: Synthetic oligonucleotide
cuggagcacacuuggggca

SEQ ID NO: 2242562 - RNA, 19 nt, Artificial Sequence
  Description of Artificial Sequence: Synthetic oligonucleotide
uucugcuguggggauguac

SEQ ID NO: 2242563 - RNA, 19 nt, Artificial Sequence
  Description of Artificial Sequence: Synthetic oligonucleotide
cuacugccugcuucauaag

SEQ ID NO: 2242564 - RNA, 19 nt, Artificial Sequence
  Description of Artificial Sequence: Synthetic oligonucleotide
aucagguuuugcauuggaa

SEQ ID NO: 2242565 - RNA, 19 nt, Artificial Sequence
  Description of Artificial Sequence: Synthetic oligonucleotide
augcuucaacaggagggag

SEQ ID NO: 2242566 - RNA, 19 nt, Artificial Sequence
  Description of Artificial Sequence: Synthetic oligonucleotide
ccuaucacugcucgugcag

SEQ ID NO: 2242567 - RNA, 19 nt, Artificial Sequence
  Description of Artificial Sequence: Synthetic oligonucleotide
gccucuguuguuggaagcg

SEQ ID NO: 2242568 - RNA, 19 nt, Artificial Sequence
  Description of Artificial Sequence: Synthetic oligonucleotide
gaggcuccaugcugcagca

SEQ ID NO: 2242569 - RNA, 19 nt, Artificial Sequence
  Description of Artificial Sequence: Synthetic oligonucleotide
ccagaacaggcguaaauga

SEQ ID NO: 2242570 - RNA, 19 nt, Artificial Sequence
  Description of Artificial Sequence: Synthetic oligonucleotide
caccaaugucuuucugcug

SEQ ID NO: 2242571 - RNA, 19 nt, Artificial Sequence
  Description of Artificial Sequence: Synthetic oligonucleotide
gggagacugugccaugagc

SEQ ID NO: 2242572 - RNA, 19 nt, Artificial Sequence
  Description of Artificial Sequence: Synthetic oligonucleotide
ggaucgucccauccaguug

SEQ ID NO: 2242573 - RNA, 19 nt, Artificial Sequence
  Description of Artificial Sequence: Synthetic oligonucleotide
ggagacgagguccguccgg

SEQ ID NO: 2242574 - RNA, 19 nt, Artificial Sequence
  Description of Artificial Sequence: Synthetic oligonucleotide
cacccgaguaggcaccaug

SEQ ID NO: 2242575 - RNA, 19 nt, Artificial Sequence
  Description of Artificial Sequence: Synthetic oligonucleotide
cauaagggaugacauaauu

SEQ ID NO: 2242576 - RNA, 19 nt, Artificial Sequence
  Description of Artificial Sequence: Synthetic oligonucleotide
cucgggcuuuacaccaaug

SEQ ID NO: 2242577 - RNA, 19 nt, Artificial Sequence
  Description of Artificial Sequence: Synthetic oligonucleotide
cugguuggucacauucaca

SEQ ID NO: 2242578 - RNA, 19 nt, Artificial Sequence
  Description of Artificial Sequence: Synthetic oligonucleotide
ugcaggggagaggagccgu

SEQ ID NO: 2242579 - RNA, 19 nt, Artificial Sequence
  Description of Artificial Sequence: Synthetic oligonucleotide
guugccucuguuguuggaa

SEQ ID NO: 2242580 - RNA, 19 nt, Artificial Sequence
  Description of Artificial Sequence: Synthetic oligonucleotide
ugccuccaugguccccacg

SEQ ID NO: 2242581 - RNA, 19 nt, Artificial Sequence
  Description of Artificial Sequence: Synthetic oligonucleotide
ucgucccauccaguugggg

SEQ ID NO: 2242582 - RNA, 19 nt, Artificial Sequence
  Description of Artificial Sequence: Synthetic oligonucleotide
agcugaacucgggcuuuac

SEQ ID NO: 2242583 - RNA, 19 nt, Artificial Sequence
  Description of Artificial Sequence: Synthetic oligonucleotide
gggcuuuacaccaaugucu

SEQ ID NO: 2242584 - RNA, 19 nt, Artificial Sequence
  Description of Artificial Sequence: Synthetic oligonucleotide
ccugguuggucacauucac

SEQ ID NO: 2242585 - RNA, 19 nt, Artificial Sequence
  Description of Artificial Sequence: Synthetic oligonucleotide
cgugccgauggccucaucc

SEQ ID NO: 2242586 - RNA, 19 nt, Artificial Sequence
  Description of Artificial Sequence: Synthetic oligonucleotide
aaauaucgugauggacaua

SEQ ID NO: 2242587 - RNA, 19 nt, Artificial Sequence
  Description of Artificial Sequence: Synthetic oligonucleotide
ugcucgugcaggccguguu

SEQ ID NO: 2242588 - RNA, 19 nt, Artificial Sequence
  Description of Artificial Sequence: Synthetic oligonucleotide
cuucugggcuggagcacac

SEQ ID NO: 2242589 - RNA, 19 nt, Artificial Sequence
  Description of Artificial Sequence: Synthetic oligonucleotide
ucgugcaggccguguugcc

SEQ ID NO: 2242590 - RNA, 19 nt, Artificial Sequence
  Description of Artificial Sequence: Synthetic oligonucleotide
gcuuguguuucuggcaccc

SEQ ID NO: 2242591 - RNA, 19 nt, Artificial Sequence
  Description of Artificial Sequence: Synthetic oligonucleotide
guccguccggccaugcaag

SEQ ID NO: 2242592 - RNA, 19 nt, Artificial Sequence
  Description of Artificial Sequence: Synthetic oligonucleotide
gcucucucuuugcucgagg

SEQ ID NO: 2242593 - RNA, 19 nt, Artificial Sequence
  Description of Artificial Sequence: Synthetic oligonucleotide
gauccaccgugccgauggc

SEQ ID NO: 2242594 - RNA, 19 nt, Artificial Sequence
  Description of Artificial Sequence: Synthetic oligonucleotide
cugcuccgcaagaaccuuc

SEQ ID NO: 2242595 - RNA, 19 nt, Artificial Sequence
  Description of Artificial Sequence: Synthetic oligonucleotide
gacugugccaugagcugga

SEQ ID NO: 2242596 - RNA, 19 nt, Artificial Sequence
  Description of Artificial Sequence: Synthetic oligonucleotide
gcggagacuucuuucuuuc

SEQ ID NO: 2242597 - RNA, 19 nt, Artificial Sequence
  Description of Artificial Sequence: Synthetic oligonucleotide
uggcugggagacugugcca

SEQ ID NO: 2242598 - RNA, 19 nt, Artificial Sequence
  Description of Artificial Sequence: Synthetic oligonucleotide
acucgggcuuuacaccaau

SEQ ID NO: 2242599 - RNA, 19 nt, Artificial Sequence
  Description of Artificial Sequence: Synthetic oligonucleotide
ccacguauuuaaagaucag

SEQ ID NO: 2242600 - RNA, 19 nt, Artificial Sequence
  Description of Artificial Sequence: Synthetic oligonucleotide
ccugaaagugucccugcug

SEQ ID NO: 2242601 - RNA, 19 nt, Artificial Sequence
  Description of Artificial Sequence: Synthetic oligonucleotide
ggaaucuaagagacauuuc

SEQ ID NO: 2242602 - RNA, 19 nt, Artificial Sequence
  Description of Artificial Sequence: Synthetic oligonucleotide
ccauaugcaggggagagga

SEQ ID NO: 2242603 - RNA, 19 nt, Artificial Sequence
  Description of Artificial Sequence: Synthetic oligonucleotide
cgcaagaaccuucagguga

SEQ ID NO: 2242604 - RNA, 19 nt, Artificial Sequence
  Description of Artificial Sequence: Synthetic oligonucleotide
uugcucgagggauguugaa

SEQ ID NO: 2242605 - RNA, 19 nt, Artificial Sequence
  Description of Artificial Sequence: Synthetic oligonucleotide
gcaccaugcuucaacagga

SEQ ID NO: 2242606 - RNA, 19 nt, Artificial Sequence
  Description of Artificial Sequence: Synthetic oligonucleotide
auacaacaggacagagaga

SEQ ID NO: 2242607 - RNA, 19 nt, Artificial Sequence
  Description of Artificial Sequence: Synthetic oligonucleotide
acgagguccguccggccau

SEQ ID NO: 2242608 - RNA, 19 nt, Artificial Sequence
  Description of Artificial Sequence: Synthetic oligonucleotide
uggcggagacuucuuucuu

SEQ ID NO: 2242609 - RNA, 19 nt, Artificial Sequence
  Description of Artificial Sequence: Synthetic oligonucleotide
gggagacgagguccguccg

SEQ ID NO: 2242610 - RNA, 19 nt, Artificial Sequence
  Description of Artificial Sequence: Synthetic oligonucleotide
cgagcagauacaacaggac

SEQ ID NO: 2242611 - RNA, 19 nt, Artificial Sequence
  Description of Artificial Sequence: Synthetic oligonucleotide
ggcauuugguguagagagc

SEQ ID NO: 2242612 - RNA, 19 nt, Artificial Sequence
  Description of Artificial Sequence: Synthetic oligonucleotide
aggggcguguucccgccga

SEQ ID NO: 2242613 - RNA, 19 nt, Artificial Sequence
  Description of Artificial Sequence: Synthetic oligonucleotide
cguguucccgccgaggucc

SEQ ID NO: 2242614 - RNA, 19 nt, Artificial Sequence
  Description of Artificial Sequence: Synthetic oligonucleotide
ccccacguauuuaaagauc

SEQ ID NO: 2242615 - RNA, 19 nt, Artificial Sequence
  Description of Artificial Sequence: Synthetic oligonucleotide
gcguuuacggagucuaugu

SEQ ID NO: 2242616 - RNA, 19 nt, Artificial Sequence
  Description of Artificial Sequence: Synthetic oligonucleotide
uaaaggcggcauccucauu

SEQ ID NO: 2242617 - RNA, 19 nt, Artificial Sequence
  Description of Artificial Sequence: Synthetic oligonucleotide
ggcuuguguuucuggcacc

SEQ ID NO: 2242618 - RNA, 19 nt, Artificial Sequence
  Description of Artificial Sequence: Synthetic oligonucleotide
gagggagacgagguccguc

SEQ ID NO: 2242619 - RNA, 19 nt, Artificial Sequence
  Description of Artificial Sequence: Synthetic oligonucleotide
ggaugacauaauucaagau

SEQ ID NO: 2242620 - RNA, 19 nt, Artificial Sequence
  Description of Artificial Sequence: Synthetic oligonucleotide
gccauaugcaggggagagg

SEQ ID NO: 2242621 - RNA, 19 nt, Artificial Sequence
  Description of Artificial Sequence: Synthetic oligonucleotide
auaucgugauggacauaca

SEQ ID NO: 2242622 - RNA, 19 nt, Artificial Sequence
  Description of Artificial Sequence: Synthetic oligonucleotide
gcugaacucgggcuuuaca

SEQ ID NO: 2242623 - RNA, 19 nt, Artificial Sequence
  Description of Artificial Sequence: Synthetic oligonucleotide
aacucgggcuuuacaccaa

SEQ ID NO: 2242624 - RNA, 19 nt, Artificial Sequence
  Description of Artificial Sequence: Synthetic oligonucleotide
aggcguaaaugaggggcgu

SEQ ID NO: 2242625 - RNA, 19 nt, Artificial Sequence
  Description of Artificial Sequence: Synthetic oligonucleotide
ggggagaggagccguccug

SEQ ID NO: 2242626 - RNA, 19 nt, Artificial Sequence
  Description of Artificial Sequence: Synthetic oligonucleotide
gguccguccggccaugcaa

SEQ ID NO: 2242627 - RNA, 19 nt, Artificial Sequence
  Description of Artificial Sequence: Synthetic oligonucleotide
aucgucccauccaguuggg

SEQ ID NO: 2242628 - RNA, 19 nt, Artificial Sequence
  Description of Artificial Sequence: Synthetic oligonucleotide
augugauggcggagacuuc

SEQ ID NO: 2242629 - RNA, 19 nt, Artificial Sequence
  Description of Artificial Sequence: Synthetic oligonucleotide
cacacauggucuccaaaau

SEQ ID NO: 2242630 - RNA, 19 nt, Artificial Sequence
  Description of Artificial Sequence: Synthetic oligonucleotide
cguuuacggagucuaugug

SEQ ID NO: 2242631 - RNA, 19 nt, Artificial Sequence
  Description of Artificial Sequence: Synthetic oligonucleotide
agguccguccggccaugca

SEQ ID NO: 2242632 - RNA, 19 nt, Artificial Sequence
  Description of Artificial Sequence: Synthetic oligonucleotide
cacagcuuggcuuguguuu

SEQ ID NO: 2242633 - RNA, 19 nt, Artificial Sequence
  Description of Artificial Sequence: Synthetic oligonucleotide
guuuugcauuggaaucuaa

SEQ ID NO: 2242634 - RNA, 19 nt, Artificial Sequence
  Description of Artificial Sequence: Synthetic oligonucleotide
ucucuacugccugcuucau

SEQ ID NO: 2242635 - RNA, 19 nt, Artificial Sequence
  Description of Artificial Sequence: Synthetic oligonucleotide
agguucaucugggccuccu

SEQ ID NO: 2242636 - RNA, 19 nt, Artificial Sequence
  Description of Artificial Sequence: Synthetic oligonucleotide
cgggcuuuacaccaauguc

SEQ ID NO: 2242637 - RNA, 19 nt, Artificial Sequence
  Description of Artificial Sequence: Synthetic oligonucleotide
cucgagggauguugaagcu

SEQ ID NO: 2242638 - RNA, 19 nt, Artificial Sequence
  Description of Artificial Sequence: Synthetic oligonucleotide
cguugauggaggcuccaug

SEQ ID NO: 2242639 - RNA, 19 nt, Artificial Sequence
  Description of Artificial Sequence: Synthetic oligonucleotide
guguuucuggcacccgagu

SEQ ID NO: 2242640 - RNA, 19 nt, Artificial Sequence
  Description of Artificial Sequence: Synthetic oligonucleotide
cggagucuaugugauggcg

SEQ ID NO: 2242641 - RNA, 19 nt, Artificial Sequence
  Description of Artificial Sequence: Synthetic oligonucleotide
cauuugguguagagagcgu

SEQ ID NO: 2242642 - RNA, 19 nt, Artificial Sequence
  Description of Artificial Sequence: Synthetic oligonucleotide
ggcguaaaugaggggcgug

SEQ ID NO: 2242643 - RNA, 19 nt, Artificial Sequence
  Description of Artificial Sequence: Synthetic oligonucleotide
ccuccugcuccgcaagaac

SEQ ID NO: 2242644 - RNA, 19 nt, Artificial Sequence
  Description of Artificial Sequence: Synthetic oligonucleotide
ggucuccaaaauucacucu

SEQ ID NO: 2242645 - RNA, 19 nt, Artificial Sequence
  Description of Artificial Sequence: Synthetic oligonucleotide
gagcggcacagcuuggcuu

SEQ ID NO: 2242646 - RNA, 19 nt, Artificial Sequence
  Description of Artificial Sequence: Synthetic oligonucleotide
gguuuugcauuggaaucua

SEQ ID NO: 2242647 - RNA, 19 nt, Artificial Sequence
  Description of Artificial Sequence: Synthetic oligonucleotide
gguccuuuuaucagguuuu

SEQ ID NO: 2242648 - RNA, 19 nt, Artificial Sequence
  Description of Artificial Sequence: Synthetic oligonucleotide
auggccucauccggaucgu

SEQ ID NO: 2242649 - RNA, 19 nt, Artificial Sequence
  Description of Artificial Sequence: Synthetic oligonucleotide
caccagaacaggcguaaau

SEQ ID NO: 2242650 - RNA, 19 nt, Artificial Sequence
  Description of Artificial Sequence: Synthetic oligonucleotide
ccgcaagaaccuucaggug

SEQ ID NO: 2242651 - RNA, 19 nt, Artificial Sequence
  Description of Artificial Sequence: Synthetic oligonucleotide
aguaggcaccaugcuucaa

SEQ ID NO: 2242652 - RNA, 19 nt, Artificial Sequence
  Description of Artificial Sequence: Synthetic oligonucleotide
cagguggagcggcacagcu

SEQ ID NO: 2242653 - RNA, 19 nt, Artificial Sequence
  Description of Artificial Sequence: Synthetic oligonucleotide
gagagcguuuacggagucu

SEQ ID NO: 2242654 - RNA, 19 nt, Artificial Sequence
  Description of Artificial Sequence: Synthetic oligonucleotide
cgugauggacauacaucuc

SEQ ID NO: 2242655 - RNA, 19 nt, Artificial Sequence
  Description of Artificial Sequence: Synthetic oligonucleotide
uucccgccgagguccuuuu

SEQ ID NO: 2242656 - RNA, 19 nt, Artificial Sequence
  Description of Artificial Sequence: Synthetic oligonucleotide
gagguccguccggccaugc

SEQ ID NO: 2242657 - RNA, 19 nt, Artificial Sequence
  Description of Artificial Sequence: Synthetic oligonucleotide
cucuguuguuggaagcguu

SEQ ID NO: 2242658 - RNA, 19 nt, Artificial Sequence
  Description of Artificial Sequence: Synthetic oligonucleotide
gugccaugagcuggaccac

SEQ ID NO: 2242659 - RNA, 19 nt, Artificial Sequence
  Description of Artificial Sequence: Synthetic oligonucleotide
cugccugcuucauaagguu

SEQ ID NO: 2242660 - RNA, 19 nt, Artificial Sequence
  Description of Artificial Sequence: Synthetic oligonucleotide
gcuccgcaagaaccuucag

SEQ ID NO: 2242661 - RNA, 19 nt, Artificial Sequence
  Description of Artificial Sequence: Synthetic oligonucleotide
ggcguguucccgccgaggu

SEQ ID NO: 2242662 - RNA, 19 nt, Artificial Sequence
  Description of Artificial Sequence: Synthetic oligonucleotide
aggccguguugccucuguu

SEQ ID NO: 2242663 - RNA, 19 nt, Artificial Sequence
  Description of Artificial Sequence: Synthetic oligonucleotide
gccccagcucucucuuugc

SEQ ID NO: 2242664 - RNA, 19 nt, Artificial Sequence
  Description of Artificial Sequence: Synthetic oligonucleotide
cuaugugauggcggagacu

SEQ ID NO: 2242665 - RNA, 19 nt, Artificial Sequence
  Description of Artificial Sequence: Synthetic oligonucleotide
cuguuuucacgagcagaua

SEQ ID NO: 2242666 - RNA, 19 nt, Artificial Sequence
  Description of Artificial Sequence: Synthetic oligonucleotide
gccaccagaacaggcguaa

SEQ ID NO: 2242667 - RNA, 19 nt, Artificial Sequence
  Description of Artificial Sequence: Synthetic oligonucleotide
cagcacacauggucuccaa

SEQ ID NO: 2242668 - RNA, 19 nt, Artificial Sequence
  Description of Artificial Sequence: Synthetic oligonucleotide
ccgccgagguccuuuuauc

SEQ ID NO: 2242669 - RNA, 19 nt, Artificial Sequence
  Description of Artificial Sequence: Synthetic oligonucleotide
gggcguguucccgccgagg

SEQ ID NO: 2242670 - RNA, 19 nt, Artificial Sequence
  Description of Artificial Sequence: Synthetic oligonucleotide
ggacagagagaaggucguc

SEQ ID NO: 2242671 - RNA, 19 nt, Artificial Sequence
  Description of Artificial Sequence: Synthetic oligonucleotide
ucccgccgagguccuuuua

SEQ ID NO: 2242672 - RNA, 19 nt, Artificial Sequence
  Description of Artificial Sequence: Synthetic oligonucleotide
cgucagcacacauggucuc

SEQ ID NO: 2242673 - RNA, 19 nt, Artificial Sequence
  Description of Artificial Sequence: Synthetic oligonucleotide
cacuuggggcacuggcaua

SEQ ID NO: 2242674 - RNA, 19 nt, Artificial Sequence
  Description of Artificial Sequence: Synthetic oligonucleotide
gagguccuuuuaucagguu

SEQ ID NO: 2242675 - RNA, 19 nt, Artificial Sequence
  Description of Artificial Sequence: Synthetic oligonucleotide
ggcggagacuucuuucuuu

SEQ ID NO: 2242676 - RNA, 19 nt, Artificial Sequence
  Description of Artificial Sequence: Synthetic oligonucleotide
gccgauggccucauccgga

SEQ ID NO: 2242677 - RNA, 19 nt, Artificial Sequence
  Description of Artificial Sequence: Synthetic oligonucleotide
gcguaaaugaggggcgugu

SEQ ID NO: 2242678 - RNA, 19 nt, Artificial Sequence
  Description of Artificial Sequence: Synthetic oligonucleotide
cacuggcauaagggaugac

SEQ ID NO: 2242679 - RNA, 19 nt, Artificial Sequence
  Description of Artificial Sequence: Synthetic oligonucleotide
cccuaucacugcucgugca

SEQ ID NO: 2242680 - RNA, 19 nt, Artificial Sequence
  Description of Artificial Sequence: Synthetic oligonucleotide
cguccggccaugcaaggca

SEQ ID NO: 2242681 - RNA, 19 nt, Artificial Sequence
  Description of Artificial Sequence: Synthetic oligonucleotide
cgccgagguccuuuuauca

SEQ ID NO: 2242682 - RNA, 19 nt, Artificial Sequence
  Description of Artificial Sequence: Synthetic oligonucleotide
gcguguucccgccgagguc

SEQ ID NO: 2242683 - RNA, 19 nt, Artificial Sequence
  Description of Artificial Sequence: Synthetic oligonucleotide
cacugcucgugcaggccgu

SEQ ID NO: 2242684 - RNA, 19 nt, Artificial Sequence
  Description of Artificial Sequence: Synthetic oligonucleotide
ccagguggagcggcacagc

SEQ ID NO: 2242685 - RNA, 19 nt, Artificial Sequence
  Description of Artificial Sequence: Synthetic oligonucleotide
gagcguuuacggagucuau

SEQ ID NO: 2242686 - RNA, 19 nt, Artificial Sequence
  Description of Artificial Sequence: Synthetic oligonucleotide
caccuuccgcaggcacagc

SEQ ID NO: 2242687 - RNA, 19 nt, Artificial Sequence
  Description of Artificial Sequence: Synthetic oligonucleotide
ggagaggagccguccuggu

SEQ ID NO: 2242688 - RNA, 19 nt, Artificial Sequence
  Description of Artificial Sequence: Synthetic oligonucleotide
ccguccggccaugcaaggc

SEQ ID NO: 2242689 - RNA, 19 nt, Artificial Sequence
  Description of Artificial Sequence: Synthetic oligonucleotide
caagauccaccgugccgau

SEQ ID NO: 2242690 - RNA, 19 nt, Artificial Sequence
  Description of Artificial Sequence: Synthetic oligonucleotide
gggcacuggcauaagggau

SEQ ID NO: 2242691 - RNA, 19 nt, Artificial Sequence
  Description of Artificial Sequence: Synthetic oligonucleotide
gcauaagggaugacauaau

SEQ ID NO: 2242692 - RNA, 19 nt, Artificial Sequence
  Description of Artificial Sequence: Synthetic oligonucleotide
cucauccggaucgucccau

SEQ ID NO: 2242693 - RNA, 19 nt, Artificial Sequence
  Description of Artificial Sequence: Synthetic oligonucleotide
gcacagcuuggcuuguguu

SEQ ID NO: 2242694 - RNA, 19 nt, Artificial Sequence
  Description of Artificial Sequence: Synthetic oligonucleotide
cgagguccuuuuaucaggu

SEQ ID NO: 2242695 - RNA, 19 nt, Artificial Sequence
  Description of Artificial Sequence: Synthetic oligonucleotide
ccaccgugccgauggccuc

SEQ ID NO: 2242696 - RNA, 19 nt, Artificial Sequence
  Description of Artificial Sequence: Synthetic oligonucleotide
accgugccgauggccucau

SEQ ID NO: 2242697 - RNA, 19 nt, Artificial Sequence
  Description of Artificial Sequence: Synthetic oligonucleotide
aggcuccaugcugcagcaa

SEQ ID NO: 2242698 - RNA, 19 nt, Artificial Sequence
  Description of Artificial Sequence: Synthetic oligonucleotide
gcaggggagaggagccguc

SEQ ID NO: 2242699 - RNA, 19 nt, Artificial Sequence
  Description of Artificial Sequence: Synthetic oligonucleotide
ccucauccggaucguccca

SEQ ID NO: 2242700 - RNA, 19 nt, Artificial Sequence
  Description of Artificial Sequence: Synthetic oligonucleotide
ccgaguaggcaccaugcuu

SEQ ID NO: 2242701 - RNA, 19 nt, Artificial Sequence
  Description of Artificial Sequence: Synthetic oligonucleotide
guucccgccgagguccuuu

SEQ ID NO: 2242702 - RNA, 19 nt, Artificial Sequence
  Description of Artificial Sequence: Synthetic oligonucleotide
uguucccgccgagguccuu

SEQ ID NO: 2242703 - RNA, 19 nt, Artificial Sequence
  Description of Artificial Sequence: Synthetic oligonucleotide
aggagccguccugguuggu

SEQ ID NO: 2242704 - RNA, 19 nt, Artificial Sequence
  Description of Artificial Sequence: Synthetic oligonucleotide
gccuccugcuccgcaagaa

SEQ ID NO: 2242705 - RNA, 19 nt, Artificial Sequence
  Description of Artificial Sequence: Synthetic oligonucleotide
ccuucaggugagagucucu

SEQ ID NO: 2242706 - RNA, 19 nt, Artificial Sequence
  Description of Artificial Sequence: Synthetic oligonucleotide
ggccaccagaacaggcgua

SEQ ID NO: 2242707 - RNA, 19 nt, Artificial Sequence
  Description of Artificial Sequence: Synthetic oligonucleotide
ccucuguuguuggaagcgu

SEQ ID NO: 2242708 - RNA, 19 nt, Artificial Sequence
  Description of Artificial Sequence: Synthetic oligonucleotide
cccgaguaggcaccaugcu

SEQ ID NO: 2242709 - RNA, 19 nt, Artificial Sequence
  Description of Artificial Sequence: Synthetic oligonucleotide
ccaugguccccacguauuu

SEQ ID NO: 2242710 - RNA, 19 nt, Artificial Sequence
  Description of Artificial Sequence: Synthetic oligonucleotide
gccguccugguuggucaca

SEQ ID NO: 2242711 - RNA, 19 nt, Artificial Sequence
  Description of Artificial Sequence: Synthetic oligonucleotide
cccgccgagguccuuuuau

SEQ ID NO: 2242712 - RNA, 19 nt, Artificial Sequence
  Description of Artificial Sequence: Synthetic oligonucleotide
ggucgucagcacacauggu

SEQ ID NO: 2242713 - RNA, 19 nt, Artificial Sequence
  Description of Artificial Sequence: Synthetic oligonucleotide
cggaucgucccauccaguu

SEQ ID NO: 2242714 - RNA, 19 nt, Artificial Sequence
  Description of Artificial Sequence: Synthetic oligonucleotide
guguucccgccgagguccu

SEQ ID NO: 2242715 - RNA, 19 nt, Artificial Sequence
  Description of Artificial Sequence: Synthetic oligonucleotide
ggagcacacuuggggcacu

SEQ ID NO: 2242716 - RNA, 19 nt, Artificial Sequence
  Description of Artificial Sequence: Synthetic oligonucleotide
ccgauggccucauccggau

SEQ ID NO: 2242717 - RNA, 19 nt, Artificial Sequence
  Description of Artificial Sequence: Synthetic oligonucleotide
ggagggagacgagguccgu

SEQ ID NO: 2242718 - RNA, 19 nt, Artificial Sequence
  Description of Artificial Sequence: Synthetic oligonucleotide
ccaccagaacaggcguaaa

SEQ ID NO: 2242719 - RNA, 19 nt, Artificial Sequence
  Description of Artificial Sequence: Synthetic oligonucleotide
gccaugcaaggcagccaua

SEQ ID NO: 2242720 - RNA, 19 nt, Artificial Sequence
  Description of Artificial Sequence: Synthetic oligonucleotide
ccggaucgucccauccagu

SEQ ID NO: 2242721 - RNA, 19 nt, Artificial Sequence
  Description of Artificial Sequence: Synthetic oligonucleotide
cgagguccguccggccaug

SEQ ID NO: 2242722 - RNA, 19 nt, Artificial Sequence
  Description of Artificial Sequence: Synthetic oligonucleotide
cggccaugcaaggcagcca

SEQ ID NO: 2242723 - RNA, 19 nt, Artificial Sequence
  Description of Artificial Sequence: Synthetic oligonucleotide
cggcacagcuuggcuugug

SEQ ID NO: 2242724 - RNA, 19 nt, Artificial Sequence
  Description of Artificial Sequence: Synthetic oligonucleotide
ccguguugccucuguuguu

SEQ ID NO: 2242725 - RNA, 19 nt, Artificial Sequence
  Description of Artificial Sequence: Synthetic oligonucleotide
gcggcacagcuuggcuugu

SEQ ID NO: 2242726 - RNA, 19 nt, Artificial Sequence
  Description of Artificial Sequence: Synthetic oligonucleotide
ccgugccgauggccucauc

SEQ ID NO: 2242727 - RNA, 19 nt, Artificial Sequence
  Description of Artificial Sequence: Synthetic oligonucleotide
gcacccgaguaggcaccau

SEQ ID NO: 2242728 - RNA, 19 nt, Artificial Sequence
  Description of Artificial Sequence: Synthetic oligonucleotide
cguccugguuggucacauu

SEQ ID NO: 2242729 - RNA, 19 nt, Artificial Sequence
  Description of Artificial Sequence: Synthetic oligonucleotide
aauauauccuuacaaaugc

SEQ ID NO: 2242730 - RNA, 19 nt, Artificial Sequence
  Description of Artificial Sequence: Synthetic oligonucleotide
aagucuauguaccuggcgg

SEQ ID NO: 2242731 - RNA, 19 nt, Artificial Sequence
  Description of Artificial Sequence: Synthetic oligonucleotide
uaaaauaucucaauaaaua

SEQ ID NO: 2242732 - RNA, 19 nt, Artificial Sequence
  Description of Artificial Sequence: Synthetic oligonucleotide
acaaaugcacucuugaauc

SEQ ID NO: 2242733 - RNA, 19 nt, Artificial Sequence
  Description of Artificial Sequence: Synthetic oligonucleotide
aacauauacacugaacagg

SEQ ID NO: 2242734 - RNA, 19 nt, Artificial Sequence
  Description of Artificial Sequence: Synthetic oligonucleotide
uaucucaauaaauaaaaca

SEQ ID NO: 2242735 - RNA, 19 nt, Artificial Sequence
  Description of Artificial Sequence: Synthetic oligonucleotide
uggggcauuacacacagcg

SEQ ID NO: 2242736 - RNA, 19 nt, Artificial Sequence
  Description of Artificial Sequence: Synthetic oligonucleotide
uaaaagaauggcuagcuga

SEQ ID NO: 2242737 - RNA, 19 nt, Artificial Sequence
  Description of Artificial Sequence: Synthetic oligonucleotide
aauccaaugaugaggacac

SEQ ID NO: 2242738 - RNA, 19 nt, Artificial Sequence
  Description of Artificial Sequence: Synthetic oligonucleotide
aaacccaggaggauaaucc

SEQ ID NO: 2242739 - RNA, 19 nt, Artificial Sequence
  Description of Artificial Sequence: Synthetic oligonucleotide
cuuauuguccaucucgucg

SEQ ID NO: 2242740 - RNA, 19 nt, Artificial Sequence
  Description of Artificial Sequence: Synthetic oligonucleotide
acaaaagucacuggcaggc

SEQ ID NO: 2242741 - RNA, 19 nt, Artificial Sequence
  Description of Artificial Sequence: Synthetic oligonucleotide
aaauacaaauccaauauau

SEQ ID NO: 2242742 - RNA, 19 nt, Artificial Sequence
  Description of Artificial Sequence: Synthetic oligonucleotide
aacagguucuacaagaaug

SEQ ID NO: 2242743 - RNA, 19 nt, Artificial Sequence
  Description of Artificial Sequence: Synthetic oligonucleotide
uguucuaagagccuugguc

SEQ ID NO: 2242744 - RNA, 19 nt, Artificial Sequence
  Description of Artificial Sequence: Synthetic oligonucleotide
caauauauccuuacaaaug

SEQ ID NO: 2242745 - RNA, 19 nt, Artificial Sequence
  Description of Artificial Sequence: Synthetic oligonucleotide
uauauccuuacaaaugcac

SEQ ID NO: 2242746 - RNA, 19 nt, Artificial Sequence
  Description of Artificial Sequence: Synthetic oligonucleotide
auauaaaagaauggcuagc

SEQ ID NO: 2242747 - RNA, 19 nt, Artificial Sequence
  Description of Artificial Sequence: Synthetic oligonucleotide
cagggaauauaaaagaaug

SEQ ID NO: 2242748 - RNA, 19 nt, Artificial Sequence
  Description of Artificial Sequence: Synthetic oligonucleotide
guucuaagagccuuggucc

SEQ ID NO: 2242749 - RNA, 19 nt, Artificial Sequence
  Description of Artificial Sequence: Synthetic oligonucleotide
aagaauggcuagcugagca

SEQ ID NO: 2242750 - RNA, 19 nt, Artificial Sequence
  Description of Artificial Sequence: Synthetic oligonucleotide
gaugaucuugcgcagcgcg

SEQ ID NO: 2242751 - RNA, 19 nt, Artificial Sequence
  Description of Artificial Sequence: Synthetic oligonucleotide
uccaguuuaaacagguucu

SEQ ID NO: 2242752 - RNA, 19 nt, Artificial Sequence
  Description of Artificial Sequence: Synthetic oligonucleotide
auuacacacagcguguggc

SEQ ID NO: 2242753 - RNA, 19 nt, Artificial Sequence
  Description of Artificial Sequence: Synthetic oligonucleotide
acauauacacugaacaggg

SEQ ID NO: 2242754 - RNA, 19 nt, Artificial Sequence
  Description of Artificial Sequence: Synthetic oligonucleotide
aguuuaaacagguucuaca

SEQ ID NO: 2242755 - RNA, 19 nt, Artificial Sequence
  Description of Artificial Sequence: Synthetic oligonucleotide
uuauuguccaucucgucgc

SEQ ID NO: 2242756 - RNA, 19 nt, Artificial Sequence
  Description of Artificial Sequence: Synthetic oligonucleotide
uacaaaugcacucuugaau

SEQ ID NO: 2242757 - RNA, 19 nt, Artificial Sequence
  Description of Artificial Sequence: Synthetic oligonucleotide
uauaaaagaauggcuagcu

SEQ ID NO: 2242758 - RNA, 19 nt, Artificial Sequence
  Description of Artificial Sequence: Synthetic oligonucleotide
agaauuccaggcuuccucg

SEQ ID NO: 2242759 - RNA, 19 nt, Artificial Sequence
  Description of Artificial Sequence: Synthetic oligonucleotide
uccaauauauccuuacaaa

SEQ ID NO: 2242760 - RNA, 19 nt, Artificial Sequence
  Description of Artificial Sequence: Synthetic oligonucleotide
aauaaagagcaggagugug

SEQ ID NO: 2242761 - RNA, 19 nt, Artificial Sequence
  Description of Artificial Sequence: Synthetic oligonucleotide
aagaaugcaugucaguuuu

SEQ ID NO: 2242762 - RNA, 19 nt, Artificial Sequence
  Description of Artificial Sequence: Synthetic oligonucleotide
agucuauguaccuggcggc

SEQ ID NO: 2242763 - RNA, 19 nt, Artificial Sequence
  Description of Artificial Sequence: Synthetic oligonucleotide
gaacagggaauauaaaaga

SEQ ID NO: 2242764 - RNA, 19 nt, Artificial Sequence
  Description of Artificial Sequence: Synthetic oligonucleotide
gaaggcguagcugagacgc

SEQ ID NO: 2242765 - RNA, 19 nt, Artificial Sequence
  Description of Artificial Sequence: Synthetic oligonucleotide
acagguucuacaagaaugc

SEQ ID NO: 2242766 - RNA, 19 nt, Artificial Sequence
  Description of Artificial Sequence: Synthetic oligonucleotide
caacauauacacugaacag

SEQ ID NO: 2242767 - RNA, 19 nt, Artificial Sequence
  Description of Artificial Sequence: Synthetic oligonucleotide
uuagagggaaauacaaauc

SEQ ID NO: 2242768 - RNA, 19 nt, Artificial Sequence
  Description of Artificial Sequence: Synthetic oligonucleotide
auauacacugaacagggaa

SEQ ID NO: 2242769 - RNA, 19 nt, Artificial Sequence
  Description of Artificial Sequence: Synthetic oligonucleotide
uggguucuuguucuaagag

SEQ ID NO: 2242770 - RNA, 19 nt, Artificial Sequence
  Description of Artificial Sequence: Synthetic oligonucleotide
auaaagagcaggagugugc

SEQ ID NO: 2242771 - RNA, 19 nt, Artificial Sequence
  Description of Artificial Sequence: Synthetic oligonucleotide
uccaugugcaggcaggccc

SEQ ID NO: 2242772 - RNA, 19 nt, Artificial Sequence
  Description of Artificial Sequence: Synthetic oligonucleotide
cucggaacagccaugggag

SEQ ID NO: 2242773 - RNA, 19 nt, Artificial Sequence
  Description of Artificial Sequence: Synthetic oligonucleotide
gaggauaauccaaugauga

SEQ ID NO: 2242774 - RNA, 19 nt, Artificial Sequence
  Description of Artificial Sequence: Synthetic oligonucleotide
ucgacuucuugcuguagcg

SEQ ID NO: 2242775 - RNA, 19 nt, Artificial Sequence
  Description of Artificial Sequence: Synthetic oligonucleotide
aaggacugcgcgcucggac

SEQ ID NO: 2242776 - RNA, 19 nt, Artificial Sequence
  Description of Artificial Sequence: Synthetic oligonucleotide
uuagcugguaaaauaucuc

SEQ ID NO: 2242777 - RNA, 19 nt, Artificial Sequence
  Description of Artificial Sequence: Synthetic oligonucleotide
aaacuaaaacccaggagga

SEQ ID NO: 2242778 - RNA, 19 nt, Artificial Sequence
  Description of Artificial Sequence: Synthetic oligonucleotide
gaagucuauguaccuggcg

SEQ ID NO: 2242779 - RNA, 19 nt, Artificial Sequence
  Description of Artificial Sequence: Synthetic oligonucleotide
auaaaagaauggcuagcug

SEQ ID NO: 2242780 - RNA, 19 nt, Artificial Sequence
  Description of Artificial Sequence: Synthetic oligonucleotide
gggaauauaaaagaauggc

SEQ ID NO: 2242781 - RNA, 19 nt, Artificial Sequence
  Description of Artificial Sequence: Synthetic oligonucleotide
aggaggauaauccaaugau

SEQ ID NO: 2242782 - RNA, 19 nt, Artificial Sequence
  Description of Artificial Sequence: Synthetic oligonucleotide
gacuucuugcuguagcgcc

SEQ ID NO: 2242783 - RNA, 19 nt, Artificial Sequence
  Description of Artificial Sequence: Synthetic oligonucleotide
aaucuagagcuuuccagaa

SEQ ID NO: 2242784 - RNA, 19 nt, Artificial Sequence
  Description of Artificial Sequence: Synthetic oligonucleotide
agggaauauaaaagaaugg

SEQ ID NO: 2242785 - RNA, 19 nt, Artificial Sequence
  Description of Artificial Sequence: Synthetic oligonucleotide
uaaagagcaggagugugcc

SEQ ID NO: 2242786 - RNA, 19 nt, Artificial Sequence
  Description of Artificial Sequence: Synthetic oligonucleotide
aaauaaagagcaggagugu

SEQ ID NO: 2242787 - RNA, 19 nt, Artificial Sequence
  Description of Artificial Sequence: Synthetic oligonucleotide
auccaauauauccuuacaa

SEQ ID NO: 2242788 - RNA, 19 nt, Artificial Sequence
  Description of Artificial Sequence: Synthetic oligonucleotide
uaaacagguucuacaagaa

SEQ ID NO: 2242789 - RNA, 19 nt, Artificial Sequence
  Description of Artificial Sequence: Synthetic oligonucleotide
aauggcuagcugagcaggc

SEQ ID NO: 2242790 - RNA, 19 nt, Artificial Sequence
  Description of Artificial Sequence: Synthetic oligonucleotide
aaagucacuggcaggcagg

SEQ ID NO: 2242791 - RNA, 19 nt, Artificial Sequence
  Description of Artificial Sequence: Synthetic oligonucleotide
gaauggcuagcugagcagg

SEQ ID NO: 2242792 - RNA, 19 nt, Artificial Sequence
  Description of Artificial Sequence: Synthetic oligonucleotide
aaugcacucuugaaucuag

SEQ ID NO: 2242793 - RNA, 19 nt, Artificial Sequence
  Description of Artificial Sequence: Synthetic oligonucleotide
augaggacacaaaagucac

SEQ ID NO: 2242794 - RNA, 19 nt, Artificial Sequence
  Description of Artificial Sequence: Synthetic oligonucleotide
cacucuugaaucuagagcu

SEQ ID NO: 2242795 - RNA, 19 nt, Artificial Sequence
  Description of Artificial Sequence: Synthetic oligonucleotide
uuccaugcgccacacggag

SEQ ID NO: 2242796 - RNA, 19 nt, Artificial Sequence
  Description of Artificial Sequence: Synthetic oligonucleotide
gguucuacaagaaugcaug

SEQ ID NO: 2242797 - RNA, 19 nt, Artificial Sequence
  Description of Artificial Sequence: Synthetic oligonucleotide
ugggaggcggacauggacc

SEQ ID NO: 2242798 - RNA, 19 nt, Artificial Sequence
  Description of Artificial Sequence: Synthetic oligonucleotide
aacagggaauauaaaagaa

SEQ ID NO: 2242799 - RNA, 19 nt, Artificial Sequence
  Description of Artificial Sequence: Synthetic oligonucleotide
uuacaaaugcacucuugaa

SEQ ID NO: 2242800 - RNA, 19 nt, Artificial Sequence
  Description of Artificial Sequence: Synthetic oligonucleotide
ucacuuagcugguaaaaua

SEQ ID NO: 2242801 - RNA, 19 nt, Artificial Sequence
  Description of Artificial Sequence: Synthetic oligonucleotide
guggggaugaucuugcgca

SEQ ID NO: 2242802 - RNA, 19 nt, Artificial Sequence
  Description of Artificial Sequence: Synthetic oligonucleotide
gagaaggcguagcugagac

SEQ ID NO: 2242803 - RNA, 19 nt, Artificial Sequence
  Description of Artificial Sequence: Synthetic oligonucleotide
acggagaaggcguagcuga

SEQ ID NO: 2242804 - RNA, 19 nt, Artificial Sequence
  Description of Artificial Sequence: Synthetic oligonucleotide
cagaaccugguacaggaag

SEQ ID NO: 2242805 - RNA, 19 nt, Artificial Sequence
  Description of Artificial Sequence: Synthetic oligonucleotide
ugcaugucaguuuuauuua

SEQ ID NO: 2242806 - RNA, 19 nt, Artificial Sequence
  Description of Artificial Sequence: Synthetic oligonucleotide
agcugagacgcucgugagc

SEQ ID NO: 2242807 - RNA, 19 nt, Artificial Sequence
  Description of Artificial Sequence: Synthetic oligonucleotide
uggggcaucucugggaagg

SEQ ID NO: 2242808 - RNA, 19 nt, Artificial Sequence
  Description of Artificial Sequence: Synthetic oligonucleotide
cuugaaucuagagcuuucc

SEQ ID NO: 2242809 - RNA, 19 nt, Artificial Sequence
  Description of Artificial Sequence: Synthetic oligonucleotide
acgcucgugagccacguag

SEQ ID NO: 2242810 - RNA, 19 nt, Artificial Sequence
  Description of Artificial Sequence: Synthetic oligonucleotide
gaauuccaggcuuccucgg

SEQ ID NO: 2242811 - RNA, 19 nt, Artificial Sequence
  Description of Artificial Sequence: Synthetic oligonucleotide
uguggcagucacuuagcug

SEQ ID NO: 2242812 - RNA, 19 nt, Artificial Sequence
  Description of Artificial Sequence: Synthetic oligonucleotide
cuuagagggaaauacaaau

SEQ ID NO: 2242813 - RNA, 19 nt, Artificial Sequence
  Description of Artificial Sequence: Synthetic oligonucleotide
ucguugagcgacugggugc

SEQ ID NO: 2242814 - RNA, 19 nt, Artificial Sequence
  Description of Artificial Sequence: Synthetic oligonucleotide
uugagcgucuggaucuugc

SEQ ID NO: 2242815 - RNA, 19 nt, Artificial Sequence
  Description of Artificial Sequence: Synthetic oligonucleotide
ggaaauacaaauccaauau

SEQ ID NO: 2242816 - RNA, 19 nt, Artificial Sequence
  Description of Artificial Sequence: Synthetic oligonucleotide
uuggguucuuguucuaaga

SEQ ID NO: 2242817 - RNA, 19 nt, Artificial Sequence
  Description of Artificial Sequence: Synthetic oligonucleotide
uucuaagagccuuggucca

SEQ ID NO: 2242818 - RNA, 19 nt, Artificial Sequence
  Description of Artificial Sequence: Synthetic oligonucleotide
uugucagaggggagcgugg

SEQ ID NO: 2242819 - RNA, 19 nt, Artificial Sequence
  Description of Artificial Sequence: Synthetic oligonucleotide
cuuguucuaagagccuugg

SEQ ID NO: 2242820 - RNA, 19 nt, Artificial Sequence
  Description of Artificial Sequence: Synthetic oligonucleotide
aagcaacauauacacugaa

SEQ ID NO: 2242821 - RNA, 19 nt, Artificial Sequence
  Description of Artificial Sequence: Synthetic oligonucleotide
uuacacacagcguguggca

SEQ ID NO: 2242822 - RNA, 19 nt, Artificial Sequence
  Description of Artificial Sequence: Synthetic oligonucleotide
cauuacacacagcgugugg

SEQ ID NO: 2242823 - RNA, 19 nt, Artificial Sequence
  Description of Artificial Sequence: Synthetic oligonucleotide
auauccuuacaaaugcacu

SEQ ID NO: 2242824 - RNA, 19 nt, Artificial Sequence
  Description of Artificial Sequence: Synthetic oligonucleotide
cucgacuucuugcuguagc

SEQ ID NO: 2242825 - RNA, 19 nt, Artificial Sequence
  Description of Artificial Sequence: Synthetic oligonucleotide
guaccuggcggccagcuug

SEQ ID NO: 2242826 - RNA, 19 nt, Artificial Sequence
  Description of Artificial Sequence: Synthetic oligonucleotide
cuucuugccgcgcuugccc

SEQ ID NO: 2242827 - RNA, 19 nt, Artificial Sequence
  Description of Artificial Sequence: Synthetic oligonucleotide
acuuagcugguaaaauauc

SEQ ID NO: 2242828 - RNA, 19 nt, Artificial Sequence
  Description of Artificial Sequence: Synthetic oligonucleotide
cacugaacagggaauauaa

SEQ ID NO: 2242829 - RNA, 19 nt, Artificial Sequence
  Description of Artificial Sequence: Synthetic oligonucleotide
cuguccaugugcaggcagg

SEQ ID NO: 2242830 - RNA, 19 nt, Artificial Sequence
  Description of Artificial Sequence: Synthetic oligonucleotide
ucccauggggcaucucugg

SEQ ID NO: 2242831 - RNA, 19 nt, Artificial Sequence
  Description of Artificial Sequence: Synthetic oligonucleotide
cuaaaacccaggaggauaa

SEQ ID NO: 2242832 - RNA, 19 nt, Artificial Sequence
  Description of Artificial Sequence: Synthetic oligonucleotide
cucgucgcucugcagaacc

SEQ ID NO: 2242833 - RNA, 19 nt, Artificial Sequence
  Description of Artificial Sequence: Synthetic oligonucleotide
acuaaaacccaggaggaua

SEQ ID NO: 2242834 - RNA, 19 nt, Artificial Sequence
  Description of Artificial Sequence: Synthetic oligonucleotide
ggcacuuagagggaaauac

SEQ ID NO: 2242835 - RNA, 19 nt, Artificial Sequence
  Description of Artificial Sequence: Synthetic oligonucleotide
gcacucuugaaucuagagc

SEQ ID NO: 2242836 - RNA, 19 nt, Artificial Sequence
  Description of Artificial Sequence: Synthetic oligonucleotide
uucuugccgcgcuugcccg

SEQ ID NO: 2242837 - RNA, 19 nt, Artificial Sequence
  Description of Artificial Sequence: Synthetic oligonucleotide
aaaaggcacuuagagggaa

SEQ ID NO: 2242838 - RNA, 19 nt, Artificial Sequence
  Description of Artificial Sequence: Synthetic oligonucleotide
acagggaauauaaaagaau

SEQ ID NO: 2242839 - RNA, 19 nt, Artificial Sequence
  Description of Artificial Sequence: Synthetic oligonucleotide
uucuacaagaaugcauguc

SEQ ID NO: 2242840 - RNA, 19 nt, Artificial Sequence
  Description of Artificial Sequence: Synthetic oligonucleotide
cacuuagagggaaauacaa

SEQ ID NO: 2242841 - RNA, 19 nt, Artificial Sequence
  Description of Artificial Sequence: Synthetic oligonucleotide
gaggcggacauggaccacg

SEQ ID NO: 2242842 - RNA, 19 nt, Artificial Sequence
  Description of Artificial Sequence: Synthetic oligonucleotide
auuguuccugggugugggg

SEQ ID NO: 2242843 - RNA, 19 nt, Artificial Sequence
  Description of Artificial Sequence: Synthetic oligonucleotide
ggguucuuguucuaagagc

SEQ ID NO: 2242844 - RNA, 19 nt, Artificial Sequence
  Description of Artificial Sequence: Synthetic oligonucleotide
ugaggacacaaaagucacu

SEQ ID NO: 2242845 - RNA, 19 nt, Artificial Sequence
  Description of Artificial Sequence: Synthetic oligonucleotide
agcuccucgaaggacugcg

SEQ ID NO: 2242846 - RNA, 19 nt, Artificial Sequence
  Description of Artificial Sequence: Synthetic oligonucleotide
uggcuagcugagcaggcca

SEQ ID NO: 2242847 - RNA, 19 nt, Artificial Sequence
  Description of Artificial Sequence: Synthetic oligonucleotide
uccaucucgucgcucugca

SEQ ID NO: 2242848 - RNA, 19 nt, Artificial Sequence
  Description of Artificial Sequence: Synthetic oligonucleotide
ucggaacagccaugggagg

SEQ ID NO: 2242849 - RNA, 19 nt, Artificial Sequence
  Description of Artificial Sequence: Synthetic oligonucleotide
uguuccuggguguggggca

SEQ ID NO: 2242850 - RNA, 19 nt, Artificial Sequence
  Description of Artificial Sequence: Synthetic oligonucleotide
ucuaagagccuugguccag

SEQ ID NO: 2242851 - RNA, 19 nt, Artificial Sequence
  Description of Artificial Sequence: Synthetic oligonucleotide
auggcuagcugagcaggcc

SEQ ID NO: 2242852 - RNA, 19 nt, Artificial Sequence
  Description of Artificial Sequence: Synthetic oligonucleotide
cucguugagcgacugggug

SEQ ID NO: 2242853 - RNA, 19 nt, Artificial Sequence
  Description of Artificial Sequence: Synthetic oligonucleotide
gaccacgcuccuuccaugc

SEQ ID NO: 2242854 - RNA, 19 nt, Artificial Sequence
  Description of Artificial Sequence: Synthetic oligonucleotide
agagggaaauacaaaucca

SEQ ID NO: 2242855 - RNA, 19 nt, Artificial Sequence
  Description of Artificial Sequence: Synthetic oligonucleotide
agcguggggaugaucuugc

SEQ ID NO: 2242856 - RNA, 19 nt, Artificial Sequence
  Description of Artificial Sequence: Synthetic oligonucleotide
cuccucgaaggacugcgcg

SEQ ID NO: 2242857 - RNA, 19 nt, Artificial Sequence
  Description of Artificial Sequence: Synthetic oligonucleotide
uucgcucgacuucuugcug

SEQ ID NO: 2242858 - RNA, 19 nt, Artificial Sequence
  Description of Artificial Sequence: Synthetic oligonucleotide
gggaugaucuugcgcagcg

SEQ ID NO: 2242859 - RNA, 19 nt, Artificial Sequence
  Description of Artificial Sequence: Synthetic oligonucleotide
aaaugcacucuugaaucua

SEQ ID NO: 2242860 - RNA, 19 nt, Artificial Sequence
  Description of Artificial Sequence: Synthetic oligonucleotide
ccaaacuaaaacccaggag

SEQ ID NO: 2242861 - RNA, 19 nt, Artificial Sequence
  Description of Artificial Sequence: Synthetic oligonucleotide
augcgccacacggagaagg

SEQ ID NO: 2242862 - RNA, 19 nt, Artificial Sequence
  Description of Artificial Sequence: Synthetic oligonucleotide
gaucuugcgcagcgcggcg

SEQ ID NO: 2242863 - RNA, 19 nt, Artificial Sequence
  Description of Artificial Sequence: Synthetic oligonucleotide
cuugucagaggggagcgug

SEQ ID NO: 2242864 - RNA, 19 nt, Artificial Sequence
  Description of Artificial Sequence: Synthetic oligonucleotide
aucuuauuguccaucucgu

SEQ ID NO: 2242865 - RNA, 19 nt, Artificial Sequence
  Description of Artificial Sequence: Synthetic oligonucleotide
cucggacugcccuucuugc

SEQ ID NO: 2242866 - RNA, 19 nt, Artificial Sequence
  Description of Artificial Sequence: Synthetic oligonucleotide
gaaggccucguugagcgac

SEQ ID NO: 2242867 - RNA, 19 nt, Artificial Sequence
  Description of Artificial Sequence: Synthetic oligonucleotide
cuauguaccuggcggccag

SEQ ID NO: 2242868 - RNA, 19 nt, Artificial Sequence
  Description of Artificial Sequence: Synthetic oligonucleotide
aacuaaaacccaggaggau

SEQ ID NO: 2242869 - RNA, 19 nt, Artificial Sequence
  Description of Artificial Sequence: Synthetic oligonucleotide
auauauccuuacaaaugca

SEQ ID NO: 2242870 - RNA, 19 nt, Artificial Sequence
  Description of Artificial Sequence: Synthetic oligonucleotide
gcuggugcccaucccaugg

SEQ ID NO: 2242871 - RNA, 19 nt, Artificial Sequence
  Description of Artificial Sequence: Synthetic oligonucleotide
uggggaugaucuugcgcag

SEQ ID NO: 2242872 - RNA, 19 nt, Artificial Sequence
  Description of Artificial Sequence: Synthetic oligonucleotide
ugcgccacacggagaaggc

SEQ ID NO: 2242873 - RNA, 19 nt, Artificial Sequence
  Description of Artificial Sequence: Synthetic oligonucleotide
uuguucuaagagccuuggu

SEQ ID NO: 2242874 - RNA, 19 nt, Artificial Sequence
  Description of Artificial Sequence: Synthetic oligonucleotide
aaggcacuuagagggaaau

SEQ ID NO: 2242875 - RNA, 19 nt, Artificial Sequence
  Description of Artificial Sequence: Synthetic oligonucleotide
ggaauauaaaagaauggcu

SEQ ID NO: 2242876 - RNA, 19 nt, Artificial Sequence
  Description of Artificial Sequence: Synthetic oligonucleotide
gcugagacgcucgugagcc

SEQ ID NO: 2242877 - RNA, 19 nt, Artificial Sequence
  Description of Artificial Sequence: Synthetic oligonucleotide
ucgcucgacuucuugcugu

SEQ ID NO: 2242878 - RNA, 19 nt, Artificial Sequence
  Description of Artificial Sequence: Synthetic oligonucleotide
agcuuuccagaaagauucc

SEQ ID NO: 2242879 - RNA, 19 nt, Artificial Sequence
  Description of Artificial Sequence: Synthetic oligonucleotide
uggaccacgcuccuuccau

SEQ ID NO: 2242880 - RNA, 19 nt, Artificial Sequence
  Description of Artificial Sequence: Synthetic oligonucleotide
ucuauguaccuggcggcca

SEQ ID NO: 2242881 - RNA, 19 nt, Artificial Sequence
  Description of Artificial Sequence: Synthetic oligonucleotide
ugagcgucuggaucuugcu

SEQ ID NO: 2242882 - RNA, 19 nt, Artificial Sequence
  Description of Artificial Sequence: Synthetic oligonucleotide
agaaccugguacaggaagu

SEQ ID NO: 2242883 - RNA, 19 nt, Artificial Sequence
  Description of Artificial Sequence: Synthetic oligonucleotide
aggacugcgcgcucggacu

SEQ ID NO: 2242884 - RNA, 19 nt, Artificial Sequence
  Description of Artificial Sequence: Synthetic oligonucleotide
ugaaccugggucugcuguc

SEQ ID NO: 2242885 - RNA, 19 nt, Artificial Sequence
  Description of Artificial Sequence: Synthetic oligonucleotide
caggaggauaauccaauga

SEQ ID NO: 2242886 - RNA, 19 nt, Artificial Sequence
  Description of Artificial Sequence: Synthetic oligonucleotide
cacgcuccuuccaugcgcc

SEQ ID NO: 2242887 - RNA, 19 nt, Artificial Sequence
  Description of Artificial Sequence: Synthetic oligonucleotide
uugcgcagcgcggcgaagg

SEQ ID NO: 2242888 - RNA, 19 nt, Artificial Sequence
  Description of Artificial Sequence: Synthetic oligonucleotide
uguccaugugcaggcaggc

SEQ ID NO: 2242889 - RNA, 19 nt, Artificial Sequence
  Description of Artificial Sequence: Synthetic oligonucleotide
ucggacugcccuucuugcc

SEQ ID NO: 2242890 - RNA, 19 nt, Artificial Sequence
  Description of Artificial Sequence: Synthetic oligonucleotide
acuuagagggaaauacaaa

SEQ ID NO: 2242891 - RNA, 19 nt, Artificial Sequence
  Description of Artificial Sequence: Synthetic oligonucleotide
agucacuuagcugguaaaa

SEQ ID NO: 2242892 - RNA, 19 nt, Artificial Sequence
  Description of Artificial Sequence: Synthetic oligonucleotide
gcguguggcagucacuuag

SEQ ID NO: 2242893 - RNA, 19 nt, Artificial Sequence
  Description of Artificial Sequence: Synthetic oligonucleotide
aucuucgcucgacuucuug

SEQ ID NO: 2242894 - RNA, 19 nt, Artificial Sequence
  Description of Artificial Sequence: Synthetic oligonucleotide
ugagcgacugggugcgcug

SEQ ID NO: 2242895 - RNA, 19 nt, Artificial Sequence
  Description of Artificial Sequence: Synthetic oligonucleotide
agagcuuuccagaaagauu

SEQ ID NO: 2242896 - RNA, 19 nt, Artificial Sequence
  Description of Artificial Sequence: Synthetic oligonucleotide
uggcgcucgcgcacguugg

SEQ ID NO: 2242897 - RNA, 19 nt, Artificial Sequence
  Description of Artificial Sequence: Synthetic oligonucleotide
cacagcguguggcagucac

SEQ ID NO: 2242898 - RNA, 19 nt, Artificial Sequence
  Description of Artificial Sequence: Synthetic oligonucleotide
ggaaggaugugaaccuggg

SEQ ID NO: 2242899 - RNA, 19 nt, Artificial Sequence
  Description of Artificial Sequence: Synthetic oligonucleotide
aucuagagcuuuccagaaa

SEQ ID NO: 2242900 - RNA, 19 nt, Artificial Sequence
  Description of Artificial Sequence: Synthetic oligonucleotide
ugugaaccugggucugcug

SEQ ID NO: 2242901 - RNA, 19 nt, Artificial Sequence
  Description of Artificial Sequence: Synthetic oligonucleotide
accacgcuccuuccaugcg

SEQ ID NO: 2242902 - RNA, 19 nt, Artificial Sequence
  Description of Artificial Sequence: Synthetic oligonucleotide
agcgacugggugcgcuggc

SEQ ID NO: 2242903 - RNA, 19 nt, Artificial Sequence
  Description of Artificial Sequence: Synthetic oligonucleotide
ugggaaggaugugaaccug

SEQ ID NO: 2242904 - RNA, 19 nt, Artificial Sequence
  Description of Artificial Sequence: Synthetic oligonucleotide
gaugugaaccugggucugc

SEQ ID NO: 2242905 - RNA, 19 nt, Artificial Sequence
  Description of Artificial Sequence: Synthetic oligonucleotide
agguucuacaagaaugcau

SEQ ID NO: 2242906 - RNA, 19 nt, Artificial Sequence
  Description of Artificial Sequence: Synthetic oligonucleotide
cacuuagcugguaaaauau

SEQ ID NO: 2242907 - RNA, 19 nt, Artificial Sequence
  Description of Artificial Sequence: Synthetic oligonucleotide
uguccaucucgucgcucug

SEQ ID NO: 2242908 - RNA, 19 nt, Artificial Sequence
  Description of Artificial Sequence: Synthetic oligonucleotide
ugcgcgcucggacugcccu

SEQ ID NO: 2242909 - RNA, 19 nt, Artificial Sequence
  Description of Artificial Sequence: Synthetic oligonucleotide
gagcguggggaugaucuug

SEQ ID NO: 2242910 - RNA, 19 nt, Artificial Sequence
  Description of Artificial Sequence: Synthetic oligonucleotide
gguacaggaagucuaugua

SEQ ID NO: 2242911 - RNA, 19 nt, Artificial Sequence
  Description of Artificial Sequence: Synthetic oligonucleotide
agcugguaaaauaucucaa

SEQ ID NO: 2242912 - RNA, 19 nt, Artificial Sequence
  Description of Artificial Sequence: Synthetic oligonucleotide
gucuauguaccuggcggcc

SEQ ID NO: 2242913 - RNA, 19 nt, Artificial Sequence
  Description of Artificial Sequence: Synthetic oligonucleotide
aaccugggucugcugucca

SEQ ID NO: 2242914 - RNA, 19 nt, Artificial Sequence
  Description of Artificial Sequence: Synthetic oligonucleotide
cauauacacugaacaggga

SEQ ID NO: 2242915 - RNA, 19 nt, Artificial Sequence
  Description of Artificial Sequence: Synthetic oligonucleotide
aggcguagcugagacgcuc

SEQ ID NO: 2242916 - RNA, 19 nt, Artificial Sequence
  Description of Artificial Sequence: Synthetic oligonucleotide
uccggagguggguggcgcg

SEQ ID NO: 2242917 - RNA, 19 nt, Artificial Sequence
  Description of Artificial Sequence: Synthetic oligonucleotide
cuuccucggaacagccaug

SEQ ID NO: 2242918 - RNA, 19 nt, Artificial Sequence
  Description of Artificial Sequence: Synthetic oligonucleotide
uccuuccaugcgccacacg

SEQ ID NO: 2242919 - RNA, 19 nt, Artificial Sequence
  Description of Artificial Sequence: Synthetic oligonucleotide
guggcgcggcgcuaguggg

SEQ ID NO: 2242920 - RNA, 19 nt, Artificial Sequence
  Description of Artificial Sequence: Synthetic oligonucleotide
uccaugcgccacacggaga

SEQ ID NO: 2242921 - RNA, 19 nt, Artificial Sequence
  Description of Artificial Sequence: Synthetic oligonucleotide
ccccaaacuaaaacccagg

SEQ ID NO: 2242922 - RNA, 19 nt, Artificial Sequence
  Description of Artificial Sequence: Synthetic oligonucleotide
uaccuggcggccagcuuga

SEQ ID NO: 2242923 - RNA, 19 nt, Artificial Sequence
  Description of Artificial Sequence: Synthetic oligonucleotide
aggggucuuggguucuugu

SEQ ID NO: 2242924 - RNA, 19 nt, Artificial Sequence
  Description of Artificial Sequence: Synthetic oligonucleotide
gcggacauggaccacgcuc

SEQ ID NO: 2242925 - RNA, 19 nt, Artificial Sequence
  Description of Artificial Sequence: Synthetic oligonucleotide
cuggcgcucgcgcacguug

SEQ ID NO: 2242926 - RNA, 19 nt, Artificial Sequence
  Description of Artificial Sequence: Synthetic oligonucleotide
ggcaucucugggaaggaug

SEQ ID NO: 2242927 - RNA, 19 nt, Artificial Sequence
  Description of Artificial Sequence: Synthetic oligonucleotide
cggacauggaccacgcucc

SEQ ID NO: 2242928 - RNA, 19 nt, Artificial Sequence
  Description of Artificial Sequence: Synthetic oligonucleotide
guucuacaagaaugcaugu

SEQ ID NO: 2242929 - RNA, 19 nt, Artificial Sequence
  Description of Artificial Sequence: Synthetic oligonucleotide
caaaugcacucuugaaucu

SEQ ID NO: 2242930 - RNA, 19 nt, Artificial Sequence
  Description of Artificial Sequence: Synthetic oligonucleotide
gccuugguccaguuuaaac

SEQ ID NO: 2242931 - RNA, 19 nt, Artificial Sequence
  Description of Artificial Sequence: Synthetic oligonucleotide
gacugcccuucuugccgcg

SEQ ID NO: 2242932 - RNA, 19 nt, Artificial Sequence
  Description of Artificial Sequence: Synthetic oligonucleotide
uugagcgacugggugcgcu

SEQ ID NO: 2242933 - RNA, 19 nt, Artificial Sequence
  Description of Artificial Sequence: Synthetic oligonucleotide
acugcccuucuugccgcgc

SEQ ID NO: 2242934 - RNA, 19 nt, Artificial Sequence
  Description of Artificial Sequence: Synthetic oligonucleotide
ugccaucuucgcucgacuu

SEQ ID NO: 2242935 - RNA, 19 nt, Artificial Sequence
  Description of Artificial Sequence: Synthetic oligonucleotide
gagcgacugggugcgcugg

SEQ ID NO: 2242936 - RNA, 19 nt, Artificial Sequence
  Description of Artificial Sequence: Synthetic oligonucleotide
aggcggacauggaccacgc

SEQ ID NO: 2242937 - RNA, 19 nt, Artificial Sequence
  Description of Artificial Sequence: Synthetic oligonucleotide
acugaacagggaauauaaa

SEQ ID NO: 2242938 - RNA, 19 nt, Artificial Sequence
  Description of Artificial Sequence: Synthetic oligonucleotide
ccaauauauccuuacaaau

SEQ ID NO: 2242939 - RNA, 19 nt, Artificial Sequence
  Description of Artificial Sequence: Synthetic oligonucleotide
cucgugagccacguagcug

SEQ ID NO: 2242940 - RNA, 19 nt, Artificial Sequence
  Description of Artificial Sequence: Synthetic oligonucleotide
cagcuggucaucuuauugu

SEQ ID NO: 2242941 - RNA, 19 nt, Artificial Sequence
  Description of Artificial Sequence: Synthetic oligonucleotide
cacggagaaggcguagcug

SEQ ID NO: 2242942 - RNA, 19 nt, Artificial Sequence
  Description of Artificial Sequence: Synthetic oligonucleotide
acguuggccaggaugcgcu

SEQ ID NO: 2242943 - RNA, 19 nt, Artificial Sequence
  Description of Artificial Sequence: Synthetic oligonucleotide
auggaccacgcuccuucca

SEQ ID NO: 2242944 - RNA, 19 nt, Artificial Sequence
  Description of Artificial Sequence: Synthetic oligonucleotide
ggucgggcugccaucuucg

SEQ ID NO: 2242945 - RNA, 19 nt, Artificial Sequence
  Description of Artificial Sequence: Synthetic oligonucleotide
augugaaccugggucugcu

SEQ ID NO: 2242946 - RNA, 19 nt, Artificial Sequence
  Description of Artificial Sequence: Synthetic oligonucleotide
gcucggacugcccuucuug

SEQ ID NO: 2242947 - RNA, 19 nt, Artificial Sequence
  Description of Artificial Sequence: Synthetic oligonucleotide
gcaagaauuccaggcuucc

SEQ ID NO: 2242948 - RNA, 19 nt, Artificial Sequence
  Description of Artificial Sequence: Synthetic oligonucleotide
gcugagcaggccaugaaga

SEQ ID NO: 2242949 - RNA, 19 nt, Artificial Sequence
  Description of Artificial Sequence: Synthetic oligonucleotide
uauguaccuggcggccagc

SEQ ID NO: 2242950 - RNA, 19 nt, Artificial Sequence
  Description of Artificial Sequence: Synthetic oligonucleotide
cuucgcucgacuucuugcu

SEQ ID NO: 2242951 - RNA, 19 nt, Artificial Sequence
  Description of Artificial Sequence: Synthetic oligonucleotide
uggcggagcggguccggag

SEQ ID NO: 2242952 - RNA, 19 nt, Artificial Sequence
  Description of Artificial Sequence: Synthetic oligonucleotide
gcaugucaguuuuauuuaa

SEQ ID NO: 2242953 - RNA, 19 nt, Artificial Sequence
  Description of Artificial Sequence: Synthetic oligonucleotide
cugguacaggaagucuaug

SEQ ID NO: 2242954 - RNA, 19 nt, Artificial Sequence
  Description of Artificial Sequence: Synthetic oligonucleotide
gcugguaaaauaucucaau

SEQ ID NO: 2242955 - RNA, 19 nt, Artificial Sequence
  Description of Artificial Sequence: Synthetic oligonucleotide
gcgcacguuggccaggaug

SEQ ID NO: 2242956 - RNA, 19 nt, Artificial Sequence
  Description of Artificial Sequence: Synthetic oligonucleotide
uaagagccuugguccaguu

SEQ ID NO: 2242957 - RNA, 19 nt, Artificial Sequence
  Description of Artificial Sequence: Synthetic oligonucleotide
cuugccgcgcuugcccggg

SEQ ID NO: 2242958 - RNA, 19 nt, Artificial Sequence
  Description of Artificial Sequence: Synthetic oligonucleotide
ggucaucuuauuguccauc

SEQ ID NO: 2242959 - RNA, 19 nt, Artificial Sequence
  Description of Artificial Sequence: Synthetic oligonucleotide
ggagcggguccggaggugg

SEQ ID NO: 2242960 - RNA, 19 nt, Artificial Sequence
  Description of Artificial Sequence: Synthetic oligonucleotide
ggcguagcugagacgcucg

SEQ ID NO: 2242961 - RNA, 19 nt, Artificial Sequence
  Description of Artificial Sequence: Synthetic oligonucleotide
gcagucacuuagcugguaa

SEQ ID NO: 2242962 - RNA, 19 nt, Artificial Sequence
  Description of Artificial Sequence: Synthetic oligonucleotide
cagccaugggaggucuggg

SEQ ID NO: 2242963 - RNA, 19 nt, Artificial Sequence
  Description of Artificial Sequence: Synthetic oligonucleotide
ccucggaacagccauggga

SEQ ID NO: 2242964 - RNA, 19 nt, Artificial Sequence
  Description of Artificial Sequence: Synthetic oligonucleotide
cagucacuuagcugguaaa

SEQ ID NO: 2242965 - RNA, 19 nt, Artificial Sequence
  Description of Artificial Sequence: Synthetic oligonucleotide
gcauuacacacagcgugug

SEQ ID NO: 2242966 - RNA, 19 nt, Artificial Sequence
  Description of Artificial Sequence: Synthetic oligonucleotide
ggacugcccuucuugccgc

SEQ ID NO: 2242967 - RNA, 19 nt, Artificial Sequence
  Description of Artificial Sequence: Synthetic oligonucleotide
cggacugcccuucuugccg

SEQ ID NO: 2242968 - RNA, 19 nt, Artificial Sequence
  Description of Artificial Sequence: Synthetic oligonucleotide
uucuugcuguagcgccgcu

SEQ ID NO: 2242969 - RNA, 19 nt, Artificial Sequence
  Description of Artificial Sequence: Synthetic oligonucleotide
guccaucucgucgcucugc

SEQ ID NO: 2242970 - RNA, 19 nt, Artificial Sequence
  Description of Artificial Sequence: Synthetic oligonucleotide
uggcgcggcgcuaguggga

SEQ ID NO: 2242971 - RNA, 19 nt, Artificial Sequence
  Description of Artificial Sequence: Synthetic oligonucleotide
cugggugcgcuggcgcucg

SEQ ID NO: 2242972 - RNA, 19 nt, Artificial Sequence
  Description of Artificial Sequence: Synthetic oligonucleotide
gucacuuagcugguaaaau

SEQ ID NO: 2242973 - RNA, 19 nt, Artificial Sequence
  Description of Artificial Sequence: Synthetic oligonucleotide
gugugccagcaagaauucc

SEQ ID NO: 2242974 - RNA, 19 nt, Artificial Sequence
  Description of Artificial Sequence: Synthetic oligonucleotide
cuugcccggggucgggcug

SEQ ID NO: 2242975 - RNA, 19 nt, Artificial Sequence
  Description of Artificial Sequence: Synthetic oligonucleotide
ggugcgcuggcgcucgcgc

SEQ ID NO: 2242976 - RNA, 19 nt, Artificial Sequence
  Description of Artificial Sequence: Synthetic oligonucleotide
cagguucuacaagaaugca

SEQ ID NO: 2242977 - RNA, 19 nt, Artificial Sequence
  Description of Artificial Sequence: Synthetic oligonucleotide
ggaugugaaccugggucug

SEQ ID NO: 2242978 - RNA, 19 nt, Artificial Sequence
  Description of Artificial Sequence: Synthetic oligonucleotide
ccacgcuccuuccaugcgc

SEQ ID NO: 2242979 - RNA, 19 nt, Artificial Sequence
  Description of Artificial Sequence: Synthetic oligonucleotide
aaggcguagcugagacgcu

SEQ ID NO: 2242980 - RNA, 19 nt, Artificial Sequence
  Description of Artificial Sequence: Synthetic oligonucleotide
gcggcgaaggccucguuga

SEQ ID NO: 2242981 - RNA, 19 nt, Artificial Sequence
  Description of Artificial Sequence: Synthetic oligonucleotide
augcacucuugaaucuaga

SEQ ID NO: 2242982 - RNA, 19 nt, Artificial Sequence
  Description of Artificial Sequence: Synthetic oligonucleotide
cguugagcgacugggugcg

SEQ ID NO: 2242983 - RNA, 19 nt, Artificial Sequence
  Description of Artificial Sequence: Synthetic oligonucleotide
gggcugccaucuucgcucg

SEQ ID NO: 2242984 - RNA, 19 nt, Artificial Sequence
  Description of Artificial Sequence: Synthetic oligonucleotide
gcugagcuugucagagggg

SEQ ID NO: 2242985 - RNA, 19 nt, Artificial Sequence
  Description of Artificial Sequence: Synthetic oligonucleotide
gucgggcugccaucuucgc

SEQ ID NO: 2242986 - RNA, 19 nt, Artificial Sequence
  Description of Artificial Sequence: Synthetic oligonucleotide
gcgucuggaucuugcugag

SEQ ID NO: 2242987 - RNA, 19 nt, Artificial Sequence
  Description of Artificial Sequence: Synthetic oligonucleotide
ggaccacgcuccuuccaug

SEQ ID NO: 2242988 - RNA, 19 nt, Artificial Sequence
  Description of Artificial Sequence: Synthetic oligonucleotide
ggacugcgcgcucggacug

SEQ ID NO: 2242989 - RNA, 19 nt, Artificial Sequence
  Description of Artificial Sequence: Synthetic oligonucleotide
guguggggcauuacacaca

SEQ ID NO: 2242990 - RNA, 19 nt, Artificial Sequence
  Description of Artificial Sequence: Synthetic oligonucleotide
caggaugcgcuggcucugc

SEQ ID NO: 2242991 - RNA, 19 nt, Artificial Sequence
  Description of Artificial Sequence: Synthetic oligonucleotide
agacgcucgugagccacgu

SEQ ID NO: 2242992 - RNA, 19 nt, Artificial Sequence
  Description of Artificial Sequence: Synthetic oligonucleotide
cgggcugccaucuucgcuc

SEQ ID NO: 2242993 - RNA, 19 nt, Artificial Sequence
  Description of Artificial Sequence: Synthetic oligonucleotide
cuagugggaggcggacaug

SEQ ID NO: 2242994 - RNA, 19 nt, Artificial Sequence
  Description of Artificial Sequence: Synthetic oligonucleotide
gggagcguggggaugaucu

SEQ ID NO: 2242995 - RNA, 19 nt, Artificial Sequence
  Description of Artificial Sequence: Synthetic oligonucleotide
aucuugcgcagcgcggcga

SEQ ID NO: 2242996 - RNA, 19 nt, Artificial Sequence
  Description of Artificial Sequence: Synthetic oligonucleotide
uugcccggggucgggcugc

SEQ ID NO: 2242997 - RNA, 19 nt, Artificial Sequence
  Description of Artificial Sequence: Synthetic oligonucleotide
ggcgaaggccucguugagc

SEQ ID NO: 2242998 - RNA, 19 nt, Artificial Sequence
  Description of Artificial Sequence: Synthetic oligonucleotide
ucucgucgcucugcagaac

SEQ ID NO: 2242999 - RNA, 19 nt, Artificial Sequence
  Description of Artificial Sequence: Synthetic oligonucleotide
cguguggcagucacuuagc

SEQ ID NO: 2243000 - RNA, 19 nt, Artificial Sequence
  Description of Artificial Sequence: Synthetic oligonucleotide
ugccgcgcuugcccggggu

SEQ ID NO: 2243001 - RNA, 19 nt, Artificial Sequence
  Description of Artificial Sequence: Synthetic oligonucleotide
ucgcgcacguuggccagga

SEQ ID NO: 2243002 - RNA, 19 nt, Artificial Sequence
  Description of Artificial Sequence: Synthetic oligonucleotide
ggcaggcccuggcggagcg

SEQ ID NO: 2243003 - RNA, 19 nt, Artificial Sequence
  Description of Artificial Sequence: Synthetic oligonucleotide
gagccacguagcugcagcu

SEQ ID NO: 2243004 - RNA, 19 nt, Artificial Sequence
  Description of Artificial Sequence: Synthetic oligonucleotide
ugcccaucccauggggcau

SEQ ID NO: 2243005 - RNA, 19 nt, Artificial Sequence
  Description of Artificial Sequence: Synthetic oligonucleotide
ggaugaucuugcgcagcgc

SEQ ID NO: 2243006 - RNA, 19 nt, Artificial Sequence
  Description of Artificial Sequence: Synthetic oligonucleotide
auccaaugaugaggacaca

SEQ ID NO: 2243007 - RNA, 19 nt, Artificial Sequence
  Description of Artificial Sequence: Synthetic oligonucleotide
aggcacuuagagggaaaua

SEQ ID NO: 2243008 - RNA, 19 nt, Artificial Sequence
  Description of Artificial Sequence: Synthetic oligonucleotide
agaaugcaugucaguuuua

SEQ ID NO: 2243009 - RNA, 19 nt, Artificial Sequence
  Description of Artificial Sequence: Synthetic oligonucleotide
acagcguguggcagucacu

SEQ ID NO: 2243010 - RNA, 19 nt, Artificial Sequence
  Description of Artificial Sequence: Synthetic oligonucleotide
gagccuugguccaguuuaa

SEQ ID NO: 2243011 - RNA, 19 nt, Artificial Sequence
  Description of Artificial Sequence: Synthetic oligonucleotide
guucuuguucuaagagccu

SEQ ID NO: 2243012 - RNA, 19 nt, Artificial Sequence
  Description of Artificial Sequence: Synthetic oligonucleotide
cucgaaggacugcgcgcuc

SEQ ID NO: 2243013 - RNA, 19 nt, Artificial Sequence
  Description of Artificial Sequence: Synthetic oligonucleotide
gaaggacugcgcgcucgga

SEQ ID NO: 2243014 - RNA, 19 nt, Artificial Sequence
  Description of Artificial Sequence: Synthetic oligonucleotide
ccaugcgccacacggagaa

SEQ ID NO: 2243015 - RNA, 19 nt, Artificial Sequence
  Description of Artificial Sequence: Synthetic oligonucleotide
agcguguggcagucacuua

SEQ ID NO: 2243016 - RNA, 19 nt, Artificial Sequence
  Description of Artificial Sequence: Synthetic oligonucleotide
caugcgccacacggagaag

SEQ ID NO: 2243017 - RNA, 19 nt, Artificial Sequence
  Description of Artificial Sequence: Synthetic oligonucleotide
gcuagugggaggcggacau

SEQ ID NO: 2243018 - RNA, 19 nt, Artificial Sequence
  Description of Artificial Sequence: Synthetic oligonucleotide
uggcggccagcuugagcgu

SEQ ID NO: 2243019 - RNA, 19 nt, Artificial Sequence
  Description of Artificial Sequence: Synthetic oligonucleotide
ggagaaggcguagcugaga

SEQ ID NO: 2243020 - RNA, 19 nt, Artificial Sequence
  Description of Artificial Sequence: Synthetic oligonucleotide
gcguggggaugaucuugcg

SEQ ID NO: 2243021 - RNA, 19 nt, Artificial Sequence
  Description of Artificial Sequence: Synthetic oligonucleotide
cucgcgcacguuggccagg

SEQ ID NO: 2243022 - RNA, 19 nt, Artificial Sequence
  Description of Artificial Sequence: Synthetic oligonucleotide
agucacuggcaggcaggca

SEQ ID NO: 2243023 - RNA, 19 nt, Artificial Sequence
  Description of Artificial Sequence: Synthetic oligonucleotide
ggcauuacacacagcgugu

SEQ ID NO: 2243024 - RNA, 19 nt, Artificial Sequence
  Description of Artificial Sequence: Synthetic oligonucleotide
gggucgggcugccaucuuc

SEQ ID NO: 2243025 - RNA, 19 nt, Artificial Sequence
  Description of Artificial Sequence: Synthetic oligonucleotide
caugugcaggcaggcccug

SEQ ID NO: 2243026 - RNA, 19 nt, Artificial Sequence
  Description of Artificial Sequence: Synthetic oligonucleotide
cgcucgugagccacguagc

SEQ ID NO: 2243027 - RNA, 19 nt, Artificial Sequence
  Description of Artificial Sequence: Synthetic oligonucleotide
gcgccacacggagaaggcg

SEQ ID NO: 2243028 - RNA, 19 nt, Artificial Sequence
  Description of Artificial Sequence: Synthetic oligonucleotide
agccuugguccaguuuaaa

SEQ ID NO: 2243029 - RNA, 19 nt, Artificial Sequence
  Description of Artificial Sequence: Synthetic oligonucleotide
cugggucugcuguccaugu

SEQ ID NO: 2243030 - RNA, 19 nt, Artificial Sequence
  Description of Artificial Sequence: Synthetic oligonucleotide
cuaagagccuugguccagu

SEQ ID NO: 2243031 - RNA, 19 nt, Artificial Sequence
  Description of Artificial Sequence: Synthetic oligonucleotide
ggcuggugcccaucccaug

SEQ ID NO: 2243032 - RNA, 19 nt, Artificial Sequence
  Description of Artificial Sequence: Synthetic oligonucleotide
cuugcgcagcgcggcgaag

SEQ ID NO: 2243033 - RNA, 19 nt, Artificial Sequence
  Description of Artificial Sequence: Synthetic oligonucleotide
uggguggcgcggcgcuagu

SEQ ID NO: 2243034 - RNA, 19 nt, Artificial Sequence
  Description of Artificial Sequence: Synthetic oligonucleotide
acgcuccuuccaugcgcca

SEQ ID NO: 2243035 - RNA, 19 nt, Artificial Sequence
  Description of Artificial Sequence: Synthetic oligonucleotide
ccuggcggccagcuugagc

SEQ ID NO: 2243036 - RNA, 19 nt, Artificial Sequence
  Description of Artificial Sequence: Synthetic oligonucleotide
cgacuucuugcuguagcgc

SEQ ID NO: 2243037 - RNA, 19 nt, Artificial Sequence
  Description of Artificial Sequence: Synthetic oligonucleotide
gguccggagguggguggcg

SEQ ID NO: 2243038 - RNA, 19 nt, Artificial Sequence
  Description of Artificial Sequence: Synthetic oligonucleotide
cugcgcgcucggacugccc

SEQ ID NO: 2243039 - RNA, 19 nt, Artificial Sequence
  Description of Artificial Sequence: Synthetic oligonucleotide
cugagacgcucgugagcca

SEQ ID NO: 2243040 - RNA, 19 nt, Artificial Sequence
  Description of Artificial Sequence: Synthetic oligonucleotide
ccaucucgucgcucugcag

SEQ ID NO: 2243041 - RNA, 19 nt, Artificial Sequence
  Description of Artificial Sequence: Synthetic oligonucleotide
cagcgcggcgaaggccucg

SEQ ID NO: 2243042 - RNA, 19 nt, Artificial Sequence
  Description of Artificial Sequence: Synthetic oligonucleotide
ggagugugccagcaagaau

SEQ ID NO: 2243043 - RNA, 19 nt, Artificial Sequence
  Description of Artificial Sequence: Synthetic oligonucleotide
guugagcgacugggugcgc

SEQ ID NO: 2243044 - RNA, 19 nt, Artificial Sequence
  Description of Artificial Sequence: Synthetic oligonucleotide
gcucgacuucuugcuguag

SEQ ID NO: 2243045 - RNA, 19 nt, Artificial Sequence
  Description of Artificial Sequence: Synthetic oligonucleotide
ggcgcucgcgcacguuggc

SEQ ID NO: 2243046 - RNA, 19 nt, Artificial Sequence
  Description of Artificial Sequence: Synthetic oligonucleotide
ggcgggaggggucuugggu

SEQ ID NO: 2243047 - RNA, 19 nt, Artificial Sequence
  Description of Artificial Sequence: Synthetic oligonucleotide
guggggcauuacacacagc

SEQ ID NO: 2243048 - RNA, 19 nt, Artificial Sequence
  Description of Artificial Sequence: Synthetic oligonucleotide
ugggugcgcuggcgcucgc

SEQ ID NO: 2243049 - RNA, 19 nt, Artificial Sequence
  Description of Artificial Sequence: Synthetic oligonucleotide
gcuccucgaaggacugcgc

SEQ ID NO: 2243050 - RNA, 19 nt, Artificial Sequence
  Description of Artificial Sequence: Synthetic oligonucleotide
gcucgugagccacguagcu

SEQ ID NO: 2243051 - RNA, 19 nt, Artificial Sequence
  Description of Artificial Sequence: Synthetic oligonucleotide
gcccuggcggagcgggucc

SEQ ID NO: 2243052 - RNA, 19 nt, Artificial Sequence
  Description of Artificial Sequence: Synthetic oligonucleotide
cccaggaggauaauccaau

SEQ ID NO: 2243053 - RNA, 19 nt, Artificial Sequence
  Description of Artificial Sequence: Synthetic oligonucleotide
gacgcucgugagccacgua

SEQ ID NO: 2243054 - RNA, 19 nt, Artificial Sequence
  Description of Artificial Sequence: Synthetic oligonucleotide
cgcggcgaaggccucguug

SEQ ID NO: 2243055 - RNA, 19 nt, Artificial Sequence
  Description of Artificial Sequence: Synthetic oligonucleotide
ccaucuucgcucgacuucu

SEQ ID NO: 2243056 - RNA, 19 nt, Artificial Sequence
  Description of Artificial Sequence: Synthetic oligonucleotide
gcccuucuugccgcgcuug

SEQ ID NO: 2243057 - RNA, 19 nt, Artificial Sequence
  Description of Artificial Sequence: Synthetic oligonucleotide
ggcgcuagugggaggcgga

SEQ ID NO: 2243058 - RNA, 19 nt, Artificial Sequence
  Description of Artificial Sequence: Synthetic oligonucleotide
ggggcauuacacacagcgu

SEQ ID NO: 2243059 - RNA, 19 nt, Artificial Sequence
  Description of Artificial Sequence: Synthetic oligonucleotide
cgcggcgcuagugggaggc

SEQ ID NO: 2243060 - RNA, 19 nt, Artificial Sequence
  Description of Artificial Sequence: Synthetic oligonucleotide
gcggguccggaggugggug

SEQ ID NO: 2243061 - RNA, 19 nt, Artificial Sequence
  Description of Artificial Sequence: Synthetic oligonucleotide
ccgcgcuugcccggggucg

SEQ ID NO: 2243062 - RNA, 19 nt, Artificial Sequence
  Description of Artificial Sequence: Synthetic oligonucleotide
gacauggaccacgcuccuu

SEQ ID NO: 2243063 - RNA, 19 nt, Artificial Sequence
  Description of Artificial Sequence: Synthetic oligonucleotide
gcgcucgcgcacguuggcc

SEQ ID NO: 2243064 - RNA, 19 nt, Artificial Sequence
  Description of Artificial Sequence: Synthetic oligonucleotide
ggacauggaccacgcuccu

SEQ ID NO: 2243065 - RNA, 19 nt, Artificial Sequence
  Description of Artificial Sequence: Synthetic oligonucleotide
gcgggaggggucuuggguu

SEQ ID NO: 2243066 - RNA, 19 nt, Artificial Sequence
  Description of Artificial Sequence: Synthetic oligonucleotide
ccaugugcaggcaggcccu

SEQ ID NO: 2243067 - RNA, 19 nt, Artificial Sequence
  Description of Artificial Sequence: Synthetic oligonucleotide
guuccuggguguggggcau

SEQ ID NO: 2243068 - RNA, 19 nt, Artificial Sequence
  Description of Artificial Sequence: Synthetic oligonucleotide
gccgcgcuugcccgggguc

SEQ ID NO: 2243069 - RNA, 19 nt, Artificial Sequence
  Description of Artificial Sequence: Synthetic oligonucleotide
ggaggcggacauggaccac

SEQ ID NO: 2243070 - RNA, 19 nt, Artificial Sequence
  Description of Artificial Sequence: Synthetic oligonucleotide
ccucgaaggacugcgcgcu

SEQ ID NO: 2243071 - RNA, 19 nt, Artificial Sequence
  Description of Artificial Sequence: Synthetic oligonucleotide
gcggcgcuagugggaggcg

SEQ ID NO: 2243072 - RNA, 19 nt, Artificial Sequence
  Description of Artificial Sequence: Synthetic oligonucleotide
gcgcagcgcggcgaaggcc

SEQ ID NO: 2243073 - RNA, 19 nt, Artificial Sequence
  Description of Artificial Sequence: Synthetic oligonucleotide
gcgcuagugggaggcggac

SEQ ID NO: 2243074 - RNA, 19 nt, Artificial Sequence
  Description of Artificial Sequence: Synthetic oligonucleotide
ggcccuggcggagcggguc

SEQ ID NO: 2243075 - RNA, 19 nt, Artificial Sequence
  Description of Artificial Sequence: Synthetic oligonucleotide
ggguggcgcggcgcuagug

SEQ ID NO: 2243076 - RNA, 19 nt, Artificial Sequence
  Description of Artificial Sequence: Synthetic oligonucleotide
cgcuccuuccaugcgccac

SEQ ID NO: 2243077 - RNA, 19 nt, Artificial Sequence
  Description of Artificial Sequence: Synthetic oligonucleotide
cgucuggaucuugcugagc

SEQ ID NO: 2243078 - RNA, 19 nt, Artificial Sequence
  Description of Artificial Sequence: Synthetic oligonucleotide
cggcgcuagugggaggcgg

SEQ ID NO: 2243079 - RNA, 19 nt, Artificial Sequence
  Description of Artificial Sequence: Synthetic oligonucleotide
gguccaguuuaaacagguu

SEQ ID NO: 2243080 - RNA, 19 nt, Artificial Sequence
  Description of Artificial Sequence: Synthetic oligonucleotide
gcgcggcgcuagugggagg

SEQ ID NO: 2243081 - RNA, 19 nt, Artificial Sequence
  Description of Artificial Sequence: Synthetic oligonucleotide
ccucguugagcgacugggu

SEQ ID NO: 2243082 - RNA, 19 nt, Artificial Sequence
  Description of Artificial Sequence: Synthetic oligonucleotide
gccacacggagaaggcgua

SEQ ID NO: 2243083 - RNA, 19 nt, Artificial Sequence
  Description of Artificial Sequence: Synthetic oligonucleotide
ggcagucacuuagcuggua

SEQ ID NO: 2243084 - RNA, 19 nt, Artificial Sequence
  Description of Artificial Sequence: Synthetic oligonucleotide
cgcagcgcggcgaaggccu

SEQ ID NO: 2243085 - RNA, 19 nt, Artificial Sequence
  Description of Artificial Sequence: Synthetic oligonucleotide
ggggagcguggggaugauc

SEQ ID NO: 2243086 - RNA, 19 nt, Artificial Sequence
  Description of Artificial Sequence: Synthetic oligonucleotide
gcguagcugagacgcucgu

SEQ ID NO: 2243087 - RNA, 19 nt, Artificial Sequence
  Description of Artificial Sequence: Synthetic oligonucleotide
caucuucgcucgacuucuu

SEQ ID NO: 2243088 - RNA, 19 nt, Artificial Sequence
  Description of Artificial Sequence: Synthetic oligonucleotide
gcggagcggguccggaggu

SEQ ID NO: 2243089 - RNA, 19 nt, Artificial Sequence
  Description of Artificial Sequence: Synthetic oligonucleotide
gcgcuugcccggggucggg

SEQ ID NO: 2243090 - RNA, 19 nt, Artificial Sequence
  Description of Artificial Sequence: Synthetic oligonucleotide
cgcgcuugcccggggucgg

SEQ ID NO: 2243091 - RNA, 19 nt, Artificial Sequence
  Description of Artificial Sequence: Synthetic oligonucleotide
ccacguagcugcagcuggu

SEQ ID NO: 2243092 - RNA, 19 nt, Artificial Sequence
  Description of Artificial Sequence: Synthetic oligonucleotide
ggcugccaucuucgcucga

SEQ ID NO: 2243093 - RNA, 19 nt, Artificial Sequence
  Description of Artificial Sequence: Synthetic oligonucleotide
cgcgcucggacugcccuuc

SEQ ID NO: 2243094 - RNA, 19 nt, Artificial Sequence
  Description of Artificial Sequence: Synthetic oligonucleotide
cgcucgacuucuugcugua

SEQ ID NO: 2243095 - RNA, 19 nt, Artificial Sequence
  Description of Artificial Sequence: Synthetic oligonucleotide
cgcuagugggaggcggaca

SEQ ID NO: 2243096 - RNA, 19 nt, Artificial Sequence
  Description of Artificial Sequence: Synthetic oligonucleotide
gcagcgcggcgaaggccuc

SEQ ID NO: 2243097 - RNA, 19 nt, Artificial Sequence
  Description of Artificial Sequence: Synthetic oligonucleotide
cccggggucgggcugccau

SEQ ID NO: 2243098 - RNA, 19 nt, Artificial Sequence
  Description of Artificial Sequence: Synthetic oligonucleotide
cggagcggguccggaggug

SEQ ID NO: 2243099 - RNA, 19 nt, Artificial Sequence
  Description of Artificial Sequence: Synthetic oligonucleotide
ggaggggucuuggguucuu

SEQ ID NO: 2243100 - RNA, 19 nt, Artificial Sequence
  Description of Artificial Sequence: Synthetic oligonucleotide
gcgcucggacugcccuucu

SEQ ID NO: 2243101 - RNA, 19 nt, Artificial Sequence
  Description of Artificial Sequence: Synthetic oligonucleotide
gcgcgcucggacugcccuu

SEQ ID NO: 2243102 - RNA, 19 nt, Artificial Sequence
  Description of Artificial Sequence: Synthetic oligonucleotide
ggggucgggcugccaucuu

SEQ ID NO: 2243103 - RNA, 19 nt, Artificial Sequence
  Description of Artificial Sequence: Synthetic oligonucleotide
cggggucgggcugccaucu

SEQ ID NO: 2243104 - RNA, 19 nt, Artificial Sequence
  Description of Artificial Sequence: Synthetic oligonucleotide
cuggggcgggaggggucuu

SEQ ID NO: 2243105 - RNA, 19 nt, Artificial Sequence
  Description of Artificial Sequence: Synthetic oligonucleotide
cgcucggacugcccuucuu

SEQ ID NO: 2243106 - RNA, 19 nt, Artificial Sequence
  Description of Artificial Sequence: Synthetic oligonucleotide
cgcuggcgcucgcgcacgu

SEQ ID NO: 2243107 - RNA, 19 nt, Artificial Sequence
  Description of Artificial Sequence: Synthetic oligonucleotide
cgcgcacguuggccaggau

SEQ ID NO: 2243108 - RNA, 19 nt, Artificial Sequence
  Description of Artificial Sequence: Synthetic oligonucleotide
auuucugacagccagcucc

SEQ ID NO: 2243109 - RNA, 19 nt, Artificial Sequence
  Description of Artificial Sequence: Synthetic oligonucleotide
aaaguuauuggugaugauc

SEQ ID NO: 2243110 - RNA, 19 nt, Artificial Sequence
  Description of Artificial Sequence: Synthetic oligonucleotide
aagcagcgcguauagaucc

SEQ ID NO: 2243111 - RNA, 19 nt, Artificial Sequence
  Description of Artificial Sequence: Synthetic oligonucleotide
ugaugaucgagaaagggug

SEQ ID NO: 2243112 - RNA, 19 nt, Artificial Sequence
  Description of Artificial Sequence: Synthetic oligonucleotide
acaagacucucauaguccc

SEQ ID NO: 2243113 - RNA, 19 nt, Artificial Sequence
  Description of Artificial Sequence: Synthetic oligonucleotide
uauagauccaucuguaaga

SEQ ID NO: 2243114 - RNA, 19 nt, Artificial Sequence
  Description of Artificial Sequence: Synthetic oligonucleotide
cuugcaaacuccacuaugg

SEQ ID NO: 2243115 - RNA, 19 nt, Artificial Sequence
  Description of Artificial Sequence: Synthetic oligonucleotide
uuacacuuccacuugagcu

SEQ ID NO: 2243116 - RNA, 19 nt, Artificial Sequence
  Description of Artificial Sequence: Synthetic oligonucleotide
gaaagcaccagguugagaa

SEQ ID NO: 2243117 - RNA, 19 nt, Artificial Sequence
  Description of Artificial Sequence: Synthetic oligonucleotide
aauccugugucacuggggu

SEQ ID NO: 2243118 - RNA, 19 nt, Artificial Sequence
  Description of Artificial Sequence: Synthetic oligonucleotide
ucauaugcggcccuggcug

SEQ ID NO: 2243119 - RNA, 19 nt, Artificial Sequence
  Description of Artificial Sequence: Synthetic oligonucleotide
uuauuggugaugaucgaga

SEQ ID NO: 2243120 - RNA, 19 nt, Artificial Sequence
  Description of Artificial Sequence: Synthetic oligonucleotide
uccacuauggcguugccug

SEQ ID NO: 2243121 - RNA, 19 nt, Artificial Sequence
  Description of Artificial Sequence: Synthetic oligonucleotide
cuucauuucugacagccag

SEQ ID NO: 2243122 - RNA, 19 nt, Artificial Sequence
  Description of Artificial Sequence: Synthetic oligonucleotide
ugacaagacucucauaguc

SEQ ID NO: 2243123 - RNA, 19 nt, Artificial Sequence
  Description of Artificial Sequence: Synthetic oligonucleotide
agauccaucuguaagagcu

SEQ ID NO: 2243124 - RNA, 19 nt, Artificial Sequence
  Description of Artificial Sequence: Synthetic oligonucleotide
cuuucuggaaagcaccagg

SEQ ID NO: 2243125 - RNA, 19 nt, Artificial Sequence
  Description of Artificial Sequence: Synthetic oligonucleotide
ucuggaguagccaccuagg

SEQ ID NO: 2243126 - RNA, 19 nt, Artificial Sequence
  Description of Artificial Sequence: Synthetic oligonucleotide
aaagcaccagguugagaac

SEQ ID NO: 2243127 - RNA, 19 nt, Artificial Sequence
  Description of Artificial Sequence: Synthetic oligonucleotide
aacuccacuauggcguugc

SEQ ID NO: 2243128 - RNA, 19 nt, Artificial Sequence
  Description of Artificial Sequence: Synthetic oligonucleotide
auaauccugugucacuggg

SEQ ID NO: 2243129 - RNA, 19 nt, Artificial Sequence
  Description of Artificial Sequence: Synthetic oligonucleotide
cauagucccuuucugacag

SEQ ID NO: 2243130 - RNA, 19 nt, Artificial Sequence
  Description of Artificial Sequence: Synthetic oligonucleotide
ucugucaguaccgccaagg

SEQ ID NO: 2243131 - RNA, 19 nt, Artificial Sequence
  Description of Artificial Sequence: Synthetic oligonucleotide
ugauaauccugugucacug

SEQ ID NO: 2243132 - RNA, 19 nt, Artificial Sequence
  Description of Artificial Sequence: Synthetic oligonucleotide
gaucgagaaaggguggugg

SEQ ID NO: 2243133 - RNA, 19 nt, Artificial Sequence
  Description of Artificial Sequence: Synthetic oligonucleotide
uuucuggaaagcaccaggu

SEQ ID NO: 2243134 - RNA, 19 nt, Artificial Sequence
  Description of Artificial Sequence: Synthetic oligonucleotide
agcuccgcggcccugacac

SEQ ID NO: 2243135 - RNA, 19 nt, Artificial Sequence
  Description of Artificial Sequence: Synthetic oligonucleotide
uccuuuucucaucaagucu

SEQ ID NO: 2243136 - RNA, 19 nt, Artificial Sequence
  Description of Artificial Sequence: Synthetic oligonucleotide
uaauccugugucacugggg

SEQ ID NO: 2243137 - RNA, 19 nt, Artificial Sequence
  Description of Artificial Sequence: Synthetic oligonucleotide
gacgggaacccucuucucg

SEQ ID NO: 2243138 - RNA, 19 nt, Artificial Sequence
  Description of Artificial Sequence: Synthetic oligonucleotide
guugagaaccucuccauac

SEQ ID NO: 2243139 - RNA, 19 nt, Artificial Sequence
  Description of Artificial Sequence: Synthetic oligonucleotide
ucuaguguuguggugcucc

SEQ ID NO: 2243140 - RNA, 19 nt, Artificial Sequence
  Description of Artificial Sequence: Synthetic oligonucleotide
ucuuacacuuccacuugag

SEQ ID NO: 2243141 - RNA, 19 nt, Artificial Sequence
  Description of Artificial Sequence: Synthetic oligonucleotide
ucaucaagucucugggucc

SEQ ID NO: 2243142 - RNA, 19 nt, Artificial Sequence
  Description of Artificial Sequence: Synthetic oligonucleotide
ugggagagcuguuaccggg

SEQ ID NO: 2243143 - RNA, 19 nt, Artificial Sequence
  Description of Artificial Sequence: Synthetic oligonucleotide
ugucaguaccgccaaggcc

SEQ ID NO: 2243144 - RNA, 19 nt, Artificial Sequence
  Description of Artificial Sequence: Synthetic oligonucleotide
cacuucauuucugacagcc

SEQ ID NO: 2243145 - RNA, 19 nt, Artificial Sequence
  Description of Artificial Sequence: Synthetic oligonucleotide
cucauagucccuuucugac

SEQ ID NO: 2243146 - RNA, 19 nt, Artificial Sequence
  Description of Artificial Sequence: Synthetic oligonucleotide
uucuccucaaugccaagca

SEQ ID NO: 2243147 - RNA, 19 nt, Artificial Sequence
  Description of Artificial Sequence: Synthetic oligonucleotide
gacaagacucucauagucc

SEQ ID NO: 2243148 - RNA, 19 nt, Artificial Sequence
  Description of Artificial Sequence: Synthetic oligonucleotide
uucauuucugacagccagc

SEQ ID NO: 2243149 - RNA, 19 nt, Artificial Sequence
  Description of Artificial Sequence: Synthetic oligonucleotide
ugcucuaguguuguggugc

SEQ ID NO: 2243150 - RNA, 19 nt, Artificial Sequence
  Description of Artificial Sequence: Synthetic oligonucleotide
agcaucugucaguaccgcc

SEQ ID NO: 2243151 - RNA, 19 nt, Artificial Sequence
  Description of Artificial Sequence: Synthetic oligonucleotide
ucgaaggcgugcaaucucc

SEQ ID NO: 2243152 - RNA, 19 nt, Artificial Sequence
  Description of Artificial Sequence: Synthetic oligonucleotide
auagauccaucuguaagag

SEQ ID NO: 2243153 - RNA, 19 nt, Artificial Sequence
  Description of Artificial Sequence: Synthetic oligonucleotide
gaugaucgagaaagggugg

SEQ ID NO: 2243154 - RNA, 19 nt, Artificial Sequence
  Description of Artificial Sequence: Synthetic oligonucleotide
guuauuggugaugaucgag

SEQ ID NO: 2243155 - RNA, 19 nt, Artificial Sequence
  Description of Artificial Sequence: Synthetic oligonucleotide
uggaguagccaccuaggga

SEQ ID NO: 2243156 - RNA, 19 nt, Artificial Sequence
  Description of Artificial Sequence: Synthetic oligonucleotide
cucaucaagucucuggguc

SEQ ID NO: 2243157 - RNA, 19 nt, Artificial Sequence
  Description of Artificial Sequence: Synthetic oligonucleotide
uguuaccgggcuacguggg

SEQ ID NO: 2243158 - RNA, 19 nt, Artificial Sequence
  Description of Artificial Sequence: Synthetic oligonucleotide
uuccuuuucucaucaaguc

SEQ ID NO: 2243159 - RNA, 19 nt, Artificial Sequence
  Description of Artificial Sequence: Synthetic oligonucleotide
aucgagaaagggugguggg

SEQ ID NO: 2243160 - RNA, 19 nt, Artificial Sequence
  Description of Artificial Sequence: Synthetic oligonucleotide
cuuacacuuccacuugagc

SEQ ID NO: 2243161 - RNA, 19 nt, Artificial Sequence
  Description of Artificial Sequence: Synthetic oligonucleotide
ucauccucuucccucacuc

SEQ ID NO: 2243162 - RNA, 19 nt, Artificial Sequence
  Description of Artificial Sequence: Synthetic oligonucleotide
cuguuaccgggcuacgugg

SEQ ID NO: 2243163 - RNA, 19 nt, Artificial Sequence
  Description of Artificial Sequence: Synthetic oligonucleotide
ucauuucugacagccagcu

SEQ ID NO: 2243164 - RNA, 19 nt, Artificial Sequence
  Description of Artificial Sequence: Synthetic oligonucleotide
uucuuacacuuccacuuga

SEQ ID NO: 2243165 - RNA, 19 nt, Artificial Sequence
  Description of Artificial Sequence: Synthetic oligonucleotide
uggcgcaugcgcaucauga

SEQ ID NO: 2243166 - RNA, 19 nt, Artificial Sequence
  Description of Artificial Sequence: Synthetic oligonucleotide
cuugagcuuuaguuugggg

SEQ ID NO: 2243167 - RNA, 19 nt, Artificial Sequence
  Description of Artificial Sequence: Synthetic oligonucleotide
agcgcguauagauccaucu

SEQ ID NO: 2243168 - RNA, 19 nt, Artificial Sequence
  Description of Artificial Sequence: Synthetic oligonucleotide
uugauaauccugugucacu

SEQ ID NO: 2243169 - RNA, 19 nt, Artificial Sequence
  Description of Artificial Sequence: Synthetic oligonucleotide
uucuguucuuccucgcagc

SEQ ID NO: 2243170 - RNA, 19 nt, Artificial Sequence
  Description of Artificial Sequence: Synthetic oligonucleotide
aaaaguuauuggugaugau

SEQ ID NO: 2243171 - RNA, 19 nt, Artificial Sequence
  Description of Artificial Sequence: Synthetic oligonucleotide
aaagcugguggaagaguuc

SEQ ID NO: 2243172 - RNA, 19 nt, Artificial Sequence
  Description of Artificial Sequence: Synthetic oligonucleotide
aaucuccugcucuaguguu

SEQ ID NO: 2243173 - RNA, 19 nt, Artificial Sequence
  Description of Artificial Sequence: Synthetic oligonucleotide
ggaacccucuucucgaagg

SEQ ID NO: 2243174 - RNA, 19 nt, Artificial Sequence
  Description of Artificial Sequence: Synthetic oligonucleotide
ugucauaugcggcccuggc

SEQ ID NO: 2243175 - RNA, 19 nt, Artificial Sequence
  Description of Artificial Sequence: Synthetic oligonucleotide
uucaccucuuugucugccg

SEQ ID NO: 2243176 - RNA, 19 nt, Artificial Sequence
  Description of Artificial Sequence: Synthetic oligonucleotide
uccuucuuacacuuccacu

SEQ ID NO: 2243177 - RNA, 19 nt, Artificial Sequence
  Description of Artificial Sequence: Synthetic oligonucleotide
uccucgcagccucugcucg

SEQ ID NO: 2243178 - RNA, 19 nt, Artificial Sequence
  Description of Artificial Sequence: Synthetic oligonucleotide
ggugaugaucgagaaaggg

SEQ ID NO: 2243179 - RNA, 19 nt, Artificial Sequence
  Description of Artificial Sequence: Synthetic oligonucleotide
ucugcucgcgguccuggcg

SEQ ID NO: 2243180 - RNA, 19 nt, Artificial Sequence
  Description of Artificial Sequence: Synthetic oligonucleotide
ccuuugauaauccuguguc

SEQ ID NO: 2243181 - RNA, 19 nt, Artificial Sequence
  Description of Artificial Sequence: Synthetic oligonucleotide
ugccaagcagcgcguauag

SEQ ID NO: 2243182 - RNA, 19 nt, Artificial Sequence
  Description of Artificial Sequence: Synthetic oligonucleotide
acacuugcaaacuccacua

SEQ ID NO: 2243183 - RNA, 19 nt, Artificial Sequence
  Description of Artificial Sequence: Synthetic oligonucleotide
auacuucugcaaaagccuc

SEQ ID NO: 2243184 - RNA, 19 nt, Artificial Sequence
  Description of Artificial Sequence: Synthetic oligonucleotide
ucgagaaaggguggugggg

SEQ ID NO: 2243185 - RNA, 19 nt, Artificial Sequence
  Description of Artificial Sequence: Synthetic oligonucleotide
ggugggagagcuguuaccg

SEQ ID NO: 2243186 - RNA, 19 nt, Artificial Sequence
  Description of Artificial Sequence: Synthetic oligonucleotide
uccccugccuucaauauuu

SEQ ID NO: 2243187 - RNA, 19 nt, Artificial Sequence
  Description of Artificial Sequence: Synthetic oligonucleotide
uucagaggguuguccaccc

SEQ ID NO: 2243188 - RNA, 19 nt, Artificial Sequence
  Description of Artificial Sequence: Synthetic oligonucleotide
aacccucuucucgaaggcg

SEQ ID NO: 2243189 - RNA, 19 nt, Artificial Sequence
  Description of Artificial Sequence: Synthetic oligonucleotide
ggugcuccggcucucaucc

SEQ ID NO: 2243190 - RNA, 19 nt, Artificial Sequence
  Description of Artificial Sequence: Synthetic oligonucleotide
cuggaguagccaccuaggg

SEQ ID NO: 2243191 - RNA, 19 nt, Artificial Sequence
  Description of Artificial Sequence: Synthetic oligonucleotide
uuugucguggguggcagga

SEQ ID NO: 2243192 - RNA, 19 nt, Artificial Sequence
  Description of Artificial Sequence: Synthetic oligonucleotide
cugccuucuuucuggaaag

SEQ ID NO: 2243193 - RNA, 19 nt, Artificial Sequence
  Description of Artificial Sequence: Synthetic oligonucleotide
cagaggguuguccacccgg

SEQ ID NO: 2243194 - RNA, 19 nt, Artificial Sequence
  Description of Artificial Sequence: Synthetic oligonucleotide
cacuugagcuuuaguuugg

SEQ ID NO: 2243195 - RNA, 19 nt, Artificial Sequence
  Description of Artificial Sequence: Synthetic oligonucleotide
ugagaaccucuccauacuu

SEQ ID NO: 2243196 - RNA, 19 nt, Artificial Sequence
  Description of Artificial Sequence: Synthetic oligonucleotide
ucuuucuggaaagcaccag

SEQ ID NO: 2243197 - RNA, 19 nt, Artificial Sequence
  Description of Artificial Sequence: Synthetic oligonucleotide
gaacccucuucucgaaggc

SEQ ID NO: 2243198 - RNA, 19 nt, Artificial Sequence
  Description of Artificial Sequence: Synthetic oligonucleotide
aaugccaagcagcgcguau

SEQ ID NO: 2243199 - RNA, 19 nt, Artificial Sequence
  Description of Artificial Sequence: Synthetic oligonucleotide
aaaagccucaggaggacau

SEQ ID NO: 2243200 - RNA, 19 nt, Artificial Sequence
  Description of Artificial Sequence: Synthetic oligonucleotide
uguuguggugcuccggcuc

SEQ ID NO: 2243201 - RNA, 19 nt, Artificial Sequence
  Description of Artificial Sequence: Synthetic oligonucleotide
cuuugauaauccuguguca

SEQ ID NO: 2243202 - RNA, 19 nt, Artificial Sequence
  Description of Artificial Sequence: Synthetic oligonucleotide
uucucgaaggcgugcaauc

SEQ ID NO: 2243203 - RNA, 19 nt, Artificial Sequence
  Description of Artificial Sequence: Synthetic oligonucleotide
uuuugucguggguggcagg

SEQ ID NO: 2243204 - RNA, 19 nt, Artificial Sequence
  Description of Artificial Sequence: Synthetic oligonucleotide
cuaguguuguggugcuccg

SEQ ID NO: 2243205 - RNA, 19 nt, Artificial Sequence
  Description of Artificial Sequence: Synthetic oligonucleotide
accuagggauucaucuucc

SEQ ID NO: 2243206 - RNA, 19 nt, Artificial Sequence
  Description of Artificial Sequence: Synthetic oligonucleotide
aguuauuggugaugaucga

SEQ ID NO: 2243207 - RNA, 19 nt, Artificial Sequence
  Description of Artificial Sequence: Synthetic oligonucleotide
ucagaggguuguccacccg

SEQ ID NO: 2243208 - RNA, 19 nt, Artificial Sequence
  Description of Artificial Sequence: Synthetic oligonucleotide
auagucccuuucugacagc

SEQ ID NO: 2243209 - RNA, 19 nt, Artificial Sequence
  Description of Artificial Sequence: Synthetic oligonucleotide
uagauccaucuguaagagc

SEQ ID NO: 2243210 - RNA, 19 nt, Artificial Sequence
  Description of Artificial Sequence: Synthetic oligonucleotide
caagcagcgcguauagauc

SEQ ID NO: 2243211 - RNA, 19 nt, Artificial Sequence
  Description of Artificial Sequence: Synthetic oligonucleotide
ugcaaucuccugcucuagu

SEQ ID NO: 2243212 - RNA, 19 nt, Artificial Sequence
  Description of Artificial Sequence: Synthetic oligonucleotide
ucaaugccaagcagcgcgu

SEQ ID NO: 2243213 - RNA, 19 nt, Artificial Sequence
  Description of Artificial Sequence: Synthetic oligonucleotide
caucuguaagagcucuuug

SEQ ID NO: 2243214 - RNA, 19 nt, Artificial Sequence
  Description of Artificial Sequence: Synthetic oligonucleotide
cugucaguaccgccaaggc

SEQ ID NO: 2243215 - RNA, 19 nt, Artificial Sequence
  Description of Artificial Sequence: Synthetic oligonucleotide
cugagcccuuugauaaucc

SEQ ID NO: 2243216 - RNA, 19 nt, Artificial Sequence
  Description of Artificial Sequence: Synthetic oligonucleotide
caccuagggauucaucuuc

SEQ ID NO: 2243217 - RNA, 19 nt, Artificial Sequence
  Description of Artificial Sequence: Synthetic oligonucleotide
caucaugacaagacucuca

SEQ ID NO: 2243218 - RNA, 19 nt, Artificial Sequence
  Description of Artificial Sequence: Synthetic oligonucleotide
ccugacacuugcaaacucc

SEQ ID NO: 2243219 - RNA, 19 nt, Artificial Sequence
  Description of Artificial Sequence: Synthetic oligonucleotide
agaggguuguccacccggc

SEQ ID NO: 2243220 - RNA, 19 nt, Artificial Sequence
  Description of Artificial Sequence: Synthetic oligonucleotide
uugucauaugcggcccugg

SEQ ID NO: 2243221 - RNA, 19 nt, Artificial Sequence
  Description of Artificial Sequence: Synthetic oligonucleotide
ugaucgagaaaggguggug

SEQ ID NO: 2243222 - RNA, 19 nt, Artificial Sequence
  Description of Artificial Sequence: Synthetic oligonucleotide
aguaccgccaaggccuggg

SEQ ID NO: 2243223 - RNA, 19 nt, Artificial Sequence
  Description of Artificial Sequence: Synthetic oligonucleotide
acgggaacccucuucucga

SEQ ID NO: 2243224 - RNA, 19 nt, Artificial Sequence
  Description of Artificial Sequence: Synthetic oligonucleotide
cugcucgcgguccuggcgg

SEQ ID NO: 2243225 - RNA, 19 nt, Artificial Sequence
  Description of Artificial Sequence: Synthetic oligonucleotide
gugggagagcuguuaccgg

SEQ ID NO: 2243226 - RNA, 19 nt, Artificial Sequence
  Description of Artificial Sequence: Synthetic oligonucleotide
agcugcucuuggguuaucg

SEQ ID NO: 2243227 - RNA, 19 nt, Artificial Sequence
  Description of Artificial Sequence: Synthetic oligonucleotide
ggaguagccaccuagggau

SEQ ID NO: 2243228 - RNA, 19 nt, Artificial Sequence
  Description of Artificial Sequence: Synthetic oligonucleotide
ucaguaccgccaaggccug

SEQ ID NO: 2243229 - RNA, 19 nt, Artificial Sequence
  Description of Artificial Sequence: Synthetic oligonucleotide
acuccacuauggcguugcc

SEQ ID NO: 2243230 - RNA, 19 nt, Artificial Sequence
  Description of Artificial Sequence: Synthetic oligonucleotide
uaguguuguggugcuccgg

SEQ ID NO: 2243231 - RNA, 19 nt, Artificial Sequence
  Description of Artificial Sequence: Synthetic oligonucleotide
gcuguuaccgggcuacgug

SEQ ID NO: 2243232 - RNA, 19 nt, Artificial Sequence
  Description of Artificial Sequence: Synthetic oligonucleotide
gacucucauagucccuuuc

SEQ ID NO: 2243233 - RNA, 19 nt, Artificial Sequence
  Description of Artificial Sequence: Synthetic oligonucleotide
ucuccucaccuugucauau

SEQ ID NO: 2243234 - RNA, 19 nt, Artificial Sequence
  Description of Artificial Sequence: Synthetic oligonucleotide
gcagcaucugucaguaccg

SEQ ID NO: 2243235 - RNA, 19 nt, Artificial Sequence
  Description of Artificial Sequence: Synthetic oligonucleotide
uaccgggcuacguggguug

SEQ ID NO: 2243236 - RNA, 19 nt, Artificial Sequence
  Description of Artificial Sequence: Synthetic oligonucleotide
accgccaaggccugggaaa

SEQ ID NO: 2243237 - RNA, 19 nt, Artificial Sequence
  Description of Artificial Sequence: Synthetic oligonucleotide
ggcccugacacuugcaaac

SEQ ID NO: 2243238 - RNA, 19 nt, Artificial Sequence
  Description of Artificial Sequence: Synthetic oligonucleotide
augaucgagaaaggguggu

SEQ ID NO: 2243239 - RNA, 19 nt, Artificial Sequence
  Description of Artificial Sequence: Synthetic oligonucleotide
gugaugaucgagaaagggu

SEQ ID NO: 2243240 - RNA, 19 nt, Artificial Sequence
  Description of Artificial Sequence: Synthetic oligonucleotide
gccgccuucuccucaaugc

SEQ ID NO: 2243241 - RNA, 19 nt, Artificial Sequence
  Description of Artificial Sequence: Synthetic oligonucleotide
ugccgccuucuccucaaug

SEQ ID NO: 2243242 - RNA, 19 nt, Artificial Sequence
  Description of Artificial Sequence: Synthetic oligonucleotide
caccucuuugucugccgcc

SEQ ID NO: 2243243 - RNA, 19 nt, Artificial Sequence
  Description of Artificial Sequence: Synthetic oligonucleotide
acuauggcguugccugccu

SEQ ID NO: 2243244 - RNA, 19 nt, Artificial Sequence
  Description of Artificial Sequence: Synthetic oligonucleotide
acguggguugccccucauc

SEQ ID NO: 2243245 - RNA, 19 nt, Artificial Sequence
  Description of Artificial Sequence: Synthetic oligonucleotide
ucaugacaagacucucaua

SEQ ID NO: 2243246 - RNA, 19 nt, Artificial Sequence
  Description of Artificial Sequence: Synthetic oligonucleotide
acccggcccacuucauuuc

SEQ ID NO: 2243247 - RNA, 19 nt, Artificial Sequence
  Description of Artificial Sequence: Synthetic oligonucleotide
cuugucauaugcggcccug

SEQ ID NO: 2243248 - RNA, 19 nt, Artificial Sequence
  Description of Artificial Sequence: Synthetic oligonucleotide
cacuauggcguugccugcc

SEQ ID NO: 2243249 - RNA, 19 nt, Artificial Sequence
  Description of Artificial Sequence: Synthetic oligonucleotide
gaaagcugguggaagaguu

SEQ ID NO: 2243250 - RNA, 19 nt, Artificial Sequence
  Description of Artificial Sequence: Synthetic oligonucleotide
cacugggguccacugugcc

SEQ ID NO: 2243251 - RNA, 19 nt, Artificial Sequence
  Description of Artificial Sequence: Synthetic oligonucleotide
uggcggaucugcuccugga

SEQ ID NO: 2243252 - RNA, 19 nt, Artificial Sequence
  Description of Artificial Sequence: Synthetic oligonucleotide
uaccgccaaggccugggaa

SEQ ID NO: 2243253 - RNA, 19 nt, Artificial Sequence
  Description of Artificial Sequence: Synthetic oligonucleotide
ggcaaucagcugcuggcgc

SEQ ID NO: 2243254 - RNA, 19 nt, Artificial Sequence
  Description of Artificial Sequence: Synthetic oligonucleotide
ugccuucuuucuggaaagc

SEQ ID NO: 2243255 - RNA, 19 nt, Artificial Sequence
  Description of Artificial Sequence: Synthetic oligonucleotide
ccggcucucauccucuucc

SEQ ID NO: 2243256 - RNA, 19 nt, Artificial Sequence
  Description of Artificial Sequence: Synthetic oligonucleotide
ccucaccuugucauaugcg

SEQ ID NO: 2243257 - RNA, 19 nt, Artificial Sequence
  Description of Artificial Sequence: Synthetic oligonucleotide
acccucuucucgaaggcgu

SEQ ID NO: 2243258 - RNA, 19 nt, Artificial Sequence
  Description of Artificial Sequence: Synthetic oligonucleotide
ucgcgguccuggcggaucu

SEQ ID NO: 2243259 - RNA, 19 nt, Artificial Sequence
  Description of Artificial Sequence: Synthetic oligonucleotide
cugcucuaguguuguggug

SEQ ID NO: 2243260 - RNA, 19 nt, Artificial Sequence
  Description of Artificial Sequence: Synthetic oligonucleotide
cuccucaccuugucauaug

SEQ ID NO: 2243261 - RNA, 19 nt, Artificial Sequence
  Description of Artificial Sequence: Synthetic oligonucleotide
gccaccuagggauucaucu

SEQ ID NO: 2243262 - RNA, 19 nt, Artificial Sequence
  Description of Artificial Sequence: Synthetic oligonucleotide
cauuucugacagccagcuc

SEQ ID NO: 2243263 - RNA, 19 nt, Artificial Sequence
  Description of Artificial Sequence: Synthetic oligonucleotide
uguccacccggcccacuuc

SEQ ID NO: 2243264 - RNA, 19 nt, Artificial Sequence
  Description of Artificial Sequence: Synthetic oligonucleotide
cuuugcuguuccuccagcu

SEQ ID NO: 2243265 - RNA, 19 nt, Artificial Sequence
  Description of Artificial Sequence: Synthetic oligonucleotide
uccgcggcccugacacuug

SEQ ID NO: 2243266 - RNA, 19 nt, Artificial Sequence
  Description of Artificial Sequence: Synthetic oligonucleotide
ugccugccuucuuucugga

SEQ ID NO: 2243267 - RNA, 19 nt, Artificial Sequence
  Description of Artificial Sequence: Synthetic oligonucleotide
caaucuccugcucuagugu

SEQ ID NO: 2243268 - RNA, 19 nt, Artificial Sequence
  Description of Artificial Sequence: Synthetic oligonucleotide
uuaccgggcuacguggguu

SEQ ID NO: 2243269 - RNA, 19 nt, Artificial Sequence
  Description of Artificial Sequence: Synthetic oligonucleotide
gcgcguauagauccaucug

SEQ ID NO: 2243270 - RNA, 19 nt, Artificial Sequence
  Description of Artificial Sequence: Synthetic oligonucleotide
ucgcagccucugcucgcgg

SEQ ID NO: 2243271 - RNA, 19 nt, Artificial Sequence
  Description of Artificial Sequence: Synthetic oligonucleotide
gagcuguuaccgggcuacg

SEQ ID NO: 2243272 - RNA, 19 nt, Artificial Sequence
  Description of Artificial Sequence: Synthetic oligonucleotide
caugcgcaucaugacaaga

SEQ ID NO: 2243273 - RNA, 19 nt, Artificial Sequence
  Description of Artificial Sequence: Synthetic oligonucleotide
uguggugcuccggcucuca

SEQ ID NO: 2243274 - RNA, 19 nt, Artificial Sequence
  Description of Artificial Sequence: Synthetic oligonucleotide
cuccagcugacgggaaccc

SEQ ID NO: 2243275 - RNA, 19 nt, Artificial Sequence
  Description of Artificial Sequence: Synthetic oligonucleotide
uggaccagucuuugcuguu

SEQ ID NO: 2243276 - RNA, 19 nt, Artificial Sequence
  Description of Artificial Sequence: Synthetic oligonucleotide
gucauaugcggcccuggcu

SEQ ID NO: 2243277 - RNA, 19 nt, Artificial Sequence
  Description of Artificial Sequence: Synthetic oligonucleotide
auggcguugccugccuucu

SEQ ID NO: 2243278 - RNA, 19 nt, Artificial Sequence
  Description of Artificial Sequence: Synthetic oligonucleotide
ccuuucugacagcacugag

SEQ ID NO: 2243279 - RNA, 19 nt, Artificial Sequence
  Description of Artificial Sequence: Synthetic oligonucleotide
cuuugucugccgccuucuc

SEQ ID NO: 2243280 - RNA, 19 nt, Artificial Sequence
  Description of Artificial Sequence: Synthetic oligonucleotide
accgggcuacguggguugc

SEQ ID NO: 2243281 - RNA, 19 nt, Artificial Sequence
  Description of Artificial Sequence: Synthetic oligonucleotide
gggaacccucuucucgaag

SEQ ID NO: 2243282 - RNA, 19 nt, Artificial Sequence
  Description of Artificial Sequence: Synthetic oligonucleotide
agacucucauagucccuuu

SEQ ID NO: 2243283 - RNA, 19 nt, Artificial Sequence
  Description of Artificial Sequence: Synthetic oligonucleotide
aucaagucucuggguccuc

SEQ ID NO: 2243284 - RNA, 19 nt, Artificial Sequence
  Description of Artificial Sequence: Synthetic oligonucleotide
cucugcucgcgguccuggc

SEQ ID NO: 2243285 - RNA, 19 nt, Artificial Sequence
  Description of Artificial Sequence: Synthetic oligonucleotide
agcuguuaccgggcuacgu

SEQ ID NO: 2243286 - RNA, 19 nt, Artificial Sequence
  Description of Artificial Sequence: Synthetic oligonucleotide
caaaagccucaggaggaca

SEQ ID NO: 2243287 - RNA, 19 nt, Artificial Sequence
  Description of Artificial Sequence: Synthetic oligonucleotide
caucugucaguaccgccaa

SEQ ID NO: 2243288 - RNA, 19 nt, Artificial Sequence
  Description of Artificial Sequence: Synthetic oligonucleotide
gggcugucccuccaaccag

SEQ ID NO: 2243289 - RNA, 19 nt, Artificial Sequence
  Description of Artificial Sequence: Synthetic oligonucleotide
augccaagcagcgcguaua

SEQ ID NO: 2243290 - RNA, 19 nt, Artificial Sequence
  Description of Artificial Sequence: Synthetic oligonucleotide
ccuucuuacacuuccacuu

SEQ ID NO: 2243291 - RNA, 19 nt, Artificial Sequence
  Description of Artificial Sequence: Synthetic oligonucleotide
ccugccuucuuucuggaaa

SEQ ID NO: 2243292 - RNA, 19 nt, Artificial Sequence
  Description of Artificial Sequence: Synthetic oligonucleotide
gguuccccugccuucaaua

SEQ ID NO: 2243293 - RNA, 19 nt, Artificial Sequence
  Description of Artificial Sequence: Synthetic oligonucleotide
gguugagaaccucuccaua

SEQ ID NO: 2243294 - RNA, 19 nt, Artificial Sequence
  Description of Artificial Sequence: Synthetic oligonucleotide
agccaccuagggauucauc

SEQ ID NO: 2243295 - RNA, 19 nt, Artificial Sequence
  Description of Artificial Sequence: Synthetic oligonucleotide
cagcgcguauagauccauc

SEQ ID NO: 2243296 - RNA, 19 nt, Artificial Sequence
  Description of Artificial Sequence: Synthetic oligonucleotide
gcugacgggaacccucuuc

SEQ ID NO: 2243297 - RNA, 19 nt, Artificial Sequence
  Description of Artificial Sequence: Synthetic oligonucleotide
cucuucucgaaggcgugca

SEQ ID NO: 2243298 - RNA, 19 nt, Artificial Sequence
  Description of Artificial Sequence: Synthetic oligonucleotide
cuggcgcaugcgcaucaug

SEQ ID NO: 2243299 - RNA, 19 nt, Artificial Sequence
  Description of Artificial Sequence: Synthetic oligonucleotide
ggggugggagagcuguuac

SEQ ID NO: 2243300 - RNA, 19 nt, Artificial Sequence
  Description of Artificial Sequence: Synthetic oligonucleotide
gcgcaucaugacaagacuc

SEQ ID NO: 2243301 - RNA, 19 nt, Artificial Sequence
  Description of Artificial Sequence: Synthetic oligonucleotide
ucucuggaguagccaccua

SEQ ID NO: 2243302 - RNA, 19 nt, Artificial Sequence
  Description of Artificial Sequence: Synthetic oligonucleotide
ccgccuucuccucaaugcc

SEQ ID NO: 2243303 - RNA, 19 nt, Artificial Sequence
  Description of Artificial Sequence: Synthetic oligonucleotide
cugcuggcgcucagcugcc

SEQ ID NO: 2243304 - RNA, 19 nt, Artificial Sequence
  Description of Artificial Sequence: Synthetic oligonucleotide
gggagagcuguuaccgggc

SEQ ID NO: 2243305 - RNA, 19 nt, Artificial Sequence
  Description of Artificial Sequence: Synthetic oligonucleotide
gcgcaugcgcaucaugaca

SEQ ID NO: 2243306 - RNA, 19 nt, Artificial Sequence
  Description of Artificial Sequence: Synthetic oligonucleotide
guuccccugccuucaauau

SEQ ID NO: 2243307 - RNA, 19 nt, Artificial Sequence
  Description of Artificial Sequence: Synthetic oligonucleotide
guagccaccuagggauuca

SEQ ID NO: 2243308 - RNA, 19 nt, Artificial Sequence
  Description of Artificial Sequence: Synthetic oligonucleotide
ccaagcagcgcguauagau

SEQ ID NO: 2243309 - RNA, 19 nt, Artificial Sequence
  Description of Artificial Sequence: Synthetic oligonucleotide
ccuccagcugacgggaacc

SEQ ID NO: 2243310 - RNA, 19 nt, Artificial Sequence
  Description of Artificial Sequence: Synthetic oligonucleotide
gccuucaauauuuucuguu

SEQ ID NO: 2243311 - RNA, 19 nt, Artificial Sequence
  Description of Artificial Sequence: Synthetic oligonucleotide
uacguggguugccccucau

SEQ ID NO: 2243312 - RNA, 19 nt, Artificial Sequence
  Description of Artificial Sequence: Synthetic oligonucleotide
gcccuuugauaauccugug

SEQ ID NO: 2243313 - RNA, 19 nt, Artificial Sequence
  Description of Artificial Sequence: Synthetic oligonucleotide
ccacuauggcguugccugc

SEQ ID NO: 2243314 - RNA, 19 nt, Artificial Sequence
  Description of Artificial Sequence: Synthetic oligonucleotide
cucacuccccugggccugg

SEQ ID NO: 2243315 - RNA, 19 nt, Artificial Sequence
  Description of Artificial Sequence: Synthetic oligonucleotide
auaugcggcccuggcugca

SEQ ID NO: 2243316 - RNA, 19 nt, Artificial Sequence
  Description of Artificial Sequence: Synthetic oligonucleotide
uagccaccuagggauucau

SEQ ID NO: 2243317 - RNA, 19 nt, Artificial Sequence
  Description of Artificial Sequence: Synthetic oligonucleotide
caagacucucauagucccu

SEQ ID NO: 2243318 - RNA, 19 nt, Artificial Sequence
  Description of Artificial Sequence: Synthetic oligonucleotide
ggaccagucuuugcuguuc

SEQ ID NO: 2243319 - RNA, 19 nt, Artificial Sequence
  Description of Artificial Sequence: Synthetic oligonucleotide
uccacccggcccacuucau

SEQ ID NO: 2243320 - RNA, 19 nt, Artificial Sequence
  Description of Artificial Sequence: Synthetic oligonucleotide
guuaccgggcuacgugggu

SEQ ID NO: 2243321 - RNA, 19 nt, Artificial Sequence
  Description of Artificial Sequence: Synthetic oligonucleotide
guaccgccaaggccuggga

SEQ ID NO: 2243322 - RNA, 19 nt, Artificial Sequence
  Description of Artificial Sequence: Synthetic oligonucleotide
ggaggacaucucuggagua

SEQ ID NO: 2243323 - RNA, 19 nt, Artificial Sequence
  Description of Artificial Sequence: Synthetic oligonucleotide
gcguauagauccaucugua

SEQ ID NO: 2243324 - RNA, 19 nt, Artificial Sequence
  Description of Artificial Sequence: Synthetic oligonucleotide
cgcaugcgcaucaugacaa

SEQ ID NO: 2243325 - RNA, 19 nt, Artificial Sequence
  Description of Artificial Sequence: Synthetic oligonucleotide
cuacguggguugccccuca

SEQ ID NO: 2243326 - RNA, 19 nt, Artificial Sequence
  Description of Artificial Sequence: Synthetic oligonucleotide
cucuaguguuguggugcuc

SEQ ID NO: 2243327 - RNA, 19 nt, Artificial Sequence
  Description of Artificial Sequence: Synthetic oligonucleotide
cucgcgguccuggcggauc

SEQ ID NO: 2243328 - RNA, 19 nt, Artificial Sequence
  Description of Artificial Sequence: Synthetic oligonucleotide
guguuguggugcuccggcu

SEQ ID NO: 2243329 - RNA, 19 nt, Artificial Sequence
  Description of Artificial Sequence: Synthetic oligonucleotide
ggguugccccucaucuucc

SEQ ID NO: 2243330 - RNA, 19 nt, Artificial Sequence
  Description of Artificial Sequence: Synthetic oligonucleotide
cccugacacuugcaaacuc

SEQ ID NO: 2243331 - RNA, 19 nt, Artificial Sequence
  Description of Artificial Sequence: Synthetic oligonucleotide
cguauagauccaucuguaa

SEQ ID NO: 2243332 - RNA, 19 nt, Artificial Sequence
  Description of Artificial Sequence: Synthetic oligonucleotide
ccacuucauuucugacagc

SEQ ID NO: 2243333 - RNA, 19 nt, Artificial Sequence
  Description of Artificial Sequence: Synthetic oligonucleotide
cccugccuucaauauuuuc

SEQ ID NO: 2243334 - RNA, 19 nt, Artificial Sequence
  Description of Artificial Sequence: Synthetic oligonucleotide
gggcuacguggguugcccc

SEQ ID NO: 2243335 - RNA, 19 nt, Artificial Sequence
  Description of Artificial Sequence: Synthetic oligonucleotide
cacuccccugggccugggc

SEQ ID NO: 2243336 - RNA, 19 nt, Artificial Sequence
  Description of Artificial Sequence: Synthetic oligonucleotide
uggcguugccugccuucuu

SEQ ID NO: 2243337 - RNA, 19 nt, Artificial Sequence
  Description of Artificial Sequence: Synthetic oligonucleotide
cuucucgaaggcgugcaau

SEQ ID NO: 2243338 - RNA, 19 nt, Artificial Sequence
  Description of Artificial Sequence: Synthetic oligonucleotide
cgcguauagauccaucugu

SEQ ID NO: 2243339 - RNA, 19 nt, Artificial Sequence
  Description of Artificial Sequence: Synthetic oligonucleotide
cgcaucaugacaagacucu

SEQ ID NO: 2243340 - RNA, 19 nt, Artificial Sequence
  Description of Artificial Sequence: Synthetic oligonucleotide
cacccggcccacuucauuu

SEQ ID NO: 2243341 - RNA, 19 nt, Artificial Sequence
  Description of Artificial Sequence: Synthetic oligonucleotide
caguaccgccaaggccugg

SEQ ID NO: 2243342 - RNA, 19 nt, Artificial Sequence
  Description of Artificial Sequence: Synthetic oligonucleotide
ccucgcagccucugcucgc

SEQ ID NO: 2243343 - RNA, 19 nt, Artificial Sequence
  Description of Artificial Sequence: Synthetic oligonucleotide
ccgccaaggccugggaaag

SEQ ID NO: 2243344 - RNA, 19 nt, Artificial Sequence
  Description of Artificial Sequence: Synthetic oligonucleotide
cagcugacgggaacccucu

SEQ ID NO: 2243345 - RNA, 19 nt, Artificial Sequence
  Description of Artificial Sequence: Synthetic oligonucleotide
agcugacgggaacccucuu

SEQ ID NO: 2243346 - RNA, 19 nt, Artificial Sequence
  Description of Artificial Sequence: Synthetic oligonucleotide
gcucuaguguuguggugcu

SEQ ID NO: 2243347 - RNA, 19 nt, Artificial Sequence
  Description of Artificial Sequence: Synthetic oligonucleotide
cguggguugccccucaucu

SEQ ID NO: 2243348 - RNA, 19 nt, Artificial Sequence
  Description of Artificial Sequence: Synthetic oligonucleotide
gcuacguggguugccccuc

SEQ ID NO: 2243349 - RNA, 19 nt, Artificial Sequence
  Description of Artificial Sequence: Synthetic oligonucleotide
gcgguccuggcggaucugc

SEQ ID NO: 2243350 - RNA, 19 nt, Artificial Sequence
  Description of Artificial Sequence: Synthetic oligonucleotide
cugucccuccaaccaggaa

SEQ ID NO: 2243351 - RNA, 19 nt, Artificial Sequence
  Description of Artificial Sequence: Synthetic oligonucleotide
cuccacuauggcguugccu

SEQ ID NO: 2243352 - RNA, 19 nt, Artificial Sequence
  Description of Artificial Sequence: Synthetic oligonucleotide
ggcuacguggguugccccu

SEQ ID NO: 2243353 - RNA, 19 nt, Artificial Sequence
  Description of Artificial Sequence: Synthetic oligonucleotide
ugacagcacugagcccuuu

SEQ ID NO: 2243354 - RNA, 19 nt, Artificial Sequence
  Description of Artificial Sequence: Synthetic oligonucleotide
ggcgugcaaucuccugcuc

SEQ ID NO: 2243355 - RNA, 19 nt, Artificial Sequence
  Description of Artificial Sequence: Synthetic oligonucleotide
guggguugccccucaucuu

SEQ ID NO: 2243356 - RNA, 19 nt, Artificial Sequence
  Description of Artificial Sequence: Synthetic oligonucleotide
cacugagcccuuugauaau

SEQ ID NO: 2243357 - RNA, 19 nt, Artificial Sequence
  Description of Artificial Sequence: Synthetic oligonucleotide
cgggcuacguggguugccc

SEQ ID NO: 2243358 - RNA, 19 nt, Artificial Sequence
  Description of Artificial Sequence: Synthetic oligonucleotide
caaugccaagcagcgcgua

SEQ ID NO: 2243359 - RNA, 19 nt, Artificial Sequence
  Description of Artificial Sequence: Synthetic oligonucleotide
gggguccacugugcccugg

SEQ ID NO: 2243360 - RNA, 19 nt, Artificial Sequence
  Description of Artificial Sequence: Synthetic oligonucleotide
cccuuucugacagcacuga

SEQ ID NO: 2243361 - RNA, 19 nt, Artificial Sequence
  Description of Artificial Sequence: Synthetic oligonucleotide
cccuccaaccaggaaaucu

SEQ ID NO: 2243362 - RNA, 19 nt, Artificial Sequence
  Description of Artificial Sequence: Synthetic oligonucleotide
ccucacuccccugggccug

SEQ ID NO: 2243363 - RNA, 19 nt, Artificial Sequence
  Description of Artificial Sequence: Synthetic oligonucleotide
gaguagccaccuagggauu

SEQ ID NO: 2243364 - RNA, 19 nt, Artificial Sequence
  Description of Artificial Sequence: Synthetic oligonucleotide
gguugccccucaucuuccu

SEQ ID NO: 2243365 - RNA, 19 nt, Artificial Sequence
  Description of Artificial Sequence: Synthetic oligonucleotide
ccuagggauucaucuuccu

SEQ ID NO: 2243366 - RNA, 19 nt, Artificial Sequence
  Description of Artificial Sequence: Synthetic oligonucleotide
ccgcggcccugacacuugc

SEQ ID NO: 2243367 - RNA, 19 nt, Artificial Sequence
  Description of Artificial Sequence: Synthetic oligonucleotide
gccaagcagcgcguauaga

SEQ ID NO: 2243368 - RNA, 19 nt, Artificial Sequence
  Description of Artificial Sequence: Synthetic oligonucleotide
gccugccuucuuucuggaa

SEQ ID NO: 2243369 - RNA, 19 nt, Artificial Sequence
  Description of Artificial Sequence: Synthetic oligonucleotide
gcccugacacuugcaaacu

SEQ ID NO: 2243370 - RNA, 19 nt, Artificial Sequence
  Description of Artificial Sequence: Synthetic oligonucleotide
cugcugcaucugggcaauc

SEQ ID NO: 2243371 - RNA, 19 nt, Artificial Sequence
  Description of Artificial Sequence: Synthetic oligonucleotide
cuauggcguugccugccuu

SEQ ID NO: 2243372 - RNA, 19 nt, Artificial Sequence
  Description of Artificial Sequence: Synthetic oligonucleotide
ccaccuagggauucaucuu

SEQ ID NO: 2243373 - RNA, 19 nt, Artificial Sequence
  Description of Artificial Sequence: Synthetic oligonucleotide
ccgggcuacguggguugcc

SEQ ID NO: 2243374 - RNA, 19 nt, Artificial Sequence
  Description of Artificial Sequence: Synthetic oligonucleotide
cuccgcggcccugacacuu

SEQ ID NO: 2243375 - RNA, 19 nt, Artificial Sequence
  Description of Artificial Sequence: Synthetic oligonucleotide
gggguuccccugccuucaa

SEQ ID NO: 2243376 - RNA, 19 nt, Artificial Sequence
  Description of Artificial Sequence: Synthetic oligonucleotide
gugcuccggcucucauccu

SEQ ID NO: 2243377 - RNA, 19 nt, Artificial Sequence
  Description of Artificial Sequence: Synthetic oligonucleotide
cggcccugacacuugcaaa

SEQ ID NO: 2243378 - RNA, 19 nt, Artificial Sequence
  Description of Artificial Sequence: Synthetic oligonucleotide
ggguuccccugccuucaau

SEQ ID NO: 2243379 - RNA, 19 nt, Artificial Sequence
  Description of Artificial Sequence: Synthetic oligonucleotide
cgccaaggccugggaaagc

SEQ ID NO: 2243380 - RNA, 19 nt, Artificial Sequence
  Description of Artificial Sequence: Synthetic oligonucleotide
cuccggcucucauccucuu

SEQ ID NO: 2243381 - RNA, 19 nt, Artificial Sequence
  Description of Artificial Sequence: Synthetic oligonucleotide
cccggcccacuucauuucu

SEQ ID NO: 2243382 - RNA, 19 nt, Artificial Sequence
  Description of Artificial Sequence: Synthetic oligonucleotide
cugccgccuucuccucaau

SEQ ID NO: 2243383 - RNA, 19 nt, Artificial Sequence
  Description of Artificial Sequence: Synthetic oligonucleotide
gcuccgcggcccugacacu

SEQ ID NO: 2243384 - RNA, 19 nt, Artificial Sequence
  Description of Artificial Sequence: Synthetic oligonucleotide
ccacccggcccacuucauu

SEQ ID NO: 2243385 - RNA, 19 nt, Artificial Sequence
  Description of Artificial Sequence: Synthetic oligonucleotide
cgcgguccuggcggaucug

SEQ ID NO: 2243386 - RNA, 19 nt, Artificial Sequence
  Description of Artificial Sequence: Synthetic oligonucleotide
ccccugccuucaauauuuu

SEQ ID NO: 2243387 - RNA, 19 nt, Artificial Sequence
  Description of Artificial Sequence: Synthetic oligonucleotide
gcucgcgguccuggcggau

SEQ ID NO: 2243388 - RNA, 19 nt, Artificial Sequence
  Description of Artificial Sequence: Synthetic oligonucleotide
guagcaaugacccuggugg

SEQ ID NO: 2243389 - RNA, 19 nt, Artificial Sequence
  Description of Artificial Sequence: Synthetic oligonucleotide
aacagugagaucguggucc

SEQ ID NO: 2243390 - RNA, 19 nt, Artificial Sequence
  Description of Artificial Sequence: Synthetic oligonucleotide
guagucaacagugagaucg

SEQ ID NO: 2243391 - RNA, 19 nt, Artificial Sequence
  Description of Artificial Sequence: Synthetic oligonucleotide
aagagugacauccuucccg

SEQ ID NO: 2243392 - RNA, 19 nt, Artificial Sequence
  Description of Artificial Sequence: Synthetic oligonucleotide
uuauuaaacagcccugucc

SEQ ID NO: 2243393 - RNA, 19 nt, Artificial Sequence
  Description of Artificial Sequence: Synthetic oligonucleotide
ucuacauaguguagaaugg

SEQ ID NO: 2243394 - RNA, 19 nt, Artificial Sequence
  Description of Artificial Sequence: Synthetic oligonucleotide
cucaguaugucuuuagugg

SEQ ID NO: 2243395 - RNA, 19 nt, Artificial Sequence
  Description of Artificial Sequence: Synthetic oligonucleotide
uauuaaacagcccuguccu

SEQ ID NO: 2243396 - RNA, 19 nt, Artificial Sequence
  Description of Artificial Sequence: Synthetic oligonucleotide
uguagaauggcccugugcu

SEQ ID NO: 2243397 - RNA, 19 nt, Artificial Sequence
  Description of Artificial Sequence: Synthetic oligonucleotide
agcuugaagagugacaucc

SEQ ID NO: 2243398 - RNA, 19 nt, Artificial Sequence
  Description of Artificial Sequence: Synthetic oligonucleotide
ugugaucuuauuaaacagc

SEQ ID NO: 2243399 - RNA, 19 nt, Artificial Sequence
  Description of Artificial Sequence: Synthetic oligonucleotide
uccaccacaauuaaaucca

SEQ ID NO: 2243400 - RNA, 19 nt, Artificial Sequence
  Description of Artificial Sequence: Synthetic oligonucleotide
acugugguauaucucaagg

SEQ ID NO: 2243401 - RNA, 19 nt, Artificial Sequence
  Description of Artificial Sequence: Synthetic oligonucleotide
gaacauuggaauccaagcc

SEQ ID NO: 2243402 - RNA, 19 nt, Artificial Sequence
  Description of Artificial Sequence: Synthetic oligonucleotide
cucaccaggucauauaucc

SEQ ID NO: 2243403 - RNA, 19 nt, Artificial Sequence
  Description of Artificial Sequence: Synthetic oligonucleotide
uaaauccacgagaacauug

SEQ ID NO: 2243404 - RNA, 19 nt, Artificial Sequence
  Description of Artificial Sequence: Synthetic oligonucleotide
cauggcauauucgagaucc

SEQ ID NO: 2243405 - RNA, 19 nt, Artificial Sequence
  Description of Artificial Sequence: Synthetic oligonucleotide
uuccaccacaauuaaaucc

SEQ ID NO: 2243406 - RNA, 19 nt, Artificial Sequence
  Description of Artificial Sequence: Synthetic oligonucleotide
ucacaacugaccuuggacc

SEQ ID NO: 2243407 - RNA, 19 nt, Artificial Sequence
  Description of Artificial Sequence: Synthetic oligonucleotide
ucauggacagcucccauag

SEQ ID NO: 2243408 - RNA, 19 nt, Artificial Sequence
  Description of Artificial Sequence: Synthetic oligonucleotide
agugacauccuucccggcc

SEQ ID NO: 2243409 - RNA, 19 nt, Artificial Sequence
  Description of Artificial Sequence: Synthetic oligonucleotide
uacauaguguagaauggcc

SEQ ID NO: 2243410 - RNA, 19 nt, Artificial Sequence
  Description of Artificial Sequence: Synthetic oligonucleotide
aacaaccuggcagucaugg

SEQ ID NO: 2243411 - RNA, 19 nt, Artificial Sequence
  Description of Artificial Sequence: Synthetic oligonucleotide
agcagcugagucuacauag

SEQ ID NO: 2243412 - RNA, 19 nt, Artificial Sequence
  Description of Artificial Sequence: Synthetic oligonucleotide
auucgagauccgcauagcc

SEQ ID NO: 2243413 - RNA, 19 nt, Artificial Sequence
  Description of Artificial Sequence: Synthetic oligonucleotide
aaauccacgagaacauugg

SEQ ID NO: 2243414 - RNA, 19 nt, Artificial Sequence
  Description of Artificial Sequence: Synthetic oligonucleotide
accacaauuaaauccacga

SEQ ID NO: 2243415 - RNA, 19 nt, Artificial Sequence
  Description of Artificial Sequence: Synthetic oligonucleotide
gaggacacagcucuucugg

SEQ ID NO: 2243416 - RNA, 19 nt, Artificial Sequence
  Description of Artificial Sequence: Synthetic oligonucleotide
auauucgagauccgcauag

SEQ ID NO: 2243417 - RNA, 19 nt, Artificial Sequence
  Description of Artificial Sequence: Synthetic oligonucleotide
aguacugggauuuucguaa

SEQ ID NO: 2243418 - RNA, 19 nt, Artificial Sequence
  Description of Artificial Sequence: Synthetic oligonucleotide
uuucguaagcaucucacaa

SEQ ID NO: 2243419 - RNA, 19 nt, Artificial Sequence
  Description of Artificial Sequence: Synthetic oligonucleotide
ucaguaugucuuuaguggc

SEQ ID NO: 2243420 - RNA, 19 nt, Artificial Sequence
  Description of Artificial Sequence: Synthetic oligonucleotide
acauaguguagaauggccc

SEQ ID NO: 2243421 - RNA, 19 nt, Artificial Sequence
  Description of Artificial Sequence: Synthetic oligonucleotide
cuuuucucgcucacgaagg

SEQ ID NO: 2243422 - RNA, 19 nt, Artificial Sequence
  Description of Artificial Sequence: Synthetic oligonucleotide
uggacaauggugacaacug

SEQ ID NO: 2243423 - RNA, 19 nt, Artificial Sequence
  Description of Artificial Sequence: Synthetic oligonucleotide
auuuucguaagcaucucac

SEQ ID NO: 2243424 - RNA, 19 nt, Artificial Sequence
  Description of Artificial Sequence: Synthetic oligonucleotide
agggaugucaacaaccugg

SEQ ID NO: 2243425 - RNA, 19 nt, Artificial Sequence
  Description of Artificial Sequence: Synthetic oligonucleotide
agugagaucgugguccucc

SEQ ID NO: 2243426 - RNA, 19 nt, Artificial Sequence
  Description of Artificial Sequence: Synthetic oligonucleotide
cuccagaagagccucaggg

SEQ ID NO: 2243427 - RNA, 19 nt, Artificial Sequence
  Description of Artificial Sequence: Synthetic oligonucleotide
ucguaagcaucucacaacu

SEQ ID NO: 2243428 - RNA, 19 nt, Artificial Sequence
  Description of Artificial Sequence: Synthetic oligonucleotide
agagugacauccuucccgg

SEQ ID NO: 2243429 - RNA, 19 nt, Artificial Sequence
  Description of Artificial Sequence: Synthetic oligonucleotide
auauaucccucugaugccc

SEQ ID NO: 2243430 - RNA, 19 nt, Artificial Sequence
  Description of Artificial Sequence: Synthetic oligonucleotide
uccacgagaacauuggaau

SEQ ID NO: 2243431 - RNA, 19 nt, Artificial Sequence
  Description of Artificial Sequence: Synthetic oligonucleotide
ugaugauguagucaacagu

SEQ ID NO: 2243432 - RNA, 19 nt, Artificial Sequence
  Description of Artificial Sequence: Synthetic oligonucleotide
gugaucuuauuaaacagcc

SEQ ID NO: 2243433 - RNA, 19 nt, Artificial Sequence
  Description of Artificial Sequence: Synthetic oligonucleotide
acaccaucauggcauauuc

SEQ ID NO: 2243434 - RNA, 19 nt, Artificial Sequence
  Description of Artificial Sequence: Synthetic oligonucleotide
cugaguacugggauuuucg

SEQ ID NO: 2243435 - RNA, 19 nt, Artificial Sequence
  Description of Artificial Sequence: Synthetic oligonucleotide
cacaauuaaauccacgaga

SEQ ID NO: 2243436 - RNA, 19 nt, Artificial Sequence
  Description of Artificial Sequence: Synthetic oligonucleotide
aauucgccagccuuucuca

SEQ ID NO: 2243437 - RNA, 19 nt, Artificial Sequence
  Description of Artificial Sequence: Synthetic oligonucleotide
ucuuggagggcucucuuca

SEQ ID NO: 2243438 - RNA, 19 nt, Artificial Sequence
  Description of Artificial Sequence: Synthetic oligonucleotide
uauaucucaaggucuccug

SEQ ID NO: 2243439 - RNA, 19 nt, Artificial Sequence
  Description of Artificial Sequence: Synthetic oligonucleotide
ugaucuuauuaaacagccc

SEQ ID NO: 2243440 - RNA, 19 nt, Artificial Sequence
  Description of Artificial Sequence: Synthetic oligonucleotide
uaagcaucucacaacugac

SEQ ID NO: 2243441 - RNA, 19 nt, Artificial Sequence
  Description of Artificial Sequence: Synthetic oligonucleotide
acagccuguagcaaugacc

SEQ ID NO: 2243442 - RNA, 19 nt, Artificial Sequence
  Description of Artificial Sequence: Synthetic oligonucleotide
ugggauuuucguaagcauc

SEQ ID NO: 2243443 - RNA, 19 nt, Artificial Sequence
  Description of Artificial Sequence: Synthetic oligonucleotide
acggagaggacacagcucu

SEQ ID NO: 2243444 - RNA, 19 nt, Artificial Sequence
  Description of Artificial Sequence: Synthetic oligonucleotide
gagaacauuggaauccaag

SEQ ID NO: 2243445 - RNA, 19 nt, Artificial Sequence
  Description of Artificial Sequence: Synthetic oligonucleotide
uucgagauccgcauagccu

SEQ ID NO: 2243446 - RNA, 19 nt, Artificial Sequence
  Description of Artificial Sequence: Synthetic oligonucleotide
agcaucucacaacugaccu

SEQ ID NO: 2243447 - RNA, 19 nt, Artificial Sequence
  Description of Artificial Sequence: Synthetic oligonucleotide
uccugauagugcuuggagc

SEQ ID NO: 2243448 - RNA, 19 nt, Artificial Sequence
  Description of Artificial Sequence: Synthetic oligonucleotide
uacggaaccuguuugugac

SEQ ID NO: 2243449 - RNA, 19 nt, Artificial Sequence
  Description of Artificial Sequence: Synthetic oligonucleotide
uucucagacacagcaacag

SEQ ID NO: 2243450 - RNA, 19 nt, Artificial Sequence
  Description of Artificial Sequence: Synthetic oligonucleotide
gaccagaugaucccuguug

SEQ ID NO: 2243451 - RNA, 19 nt, Artificial Sequence
  Description of Artificial Sequence: Synthetic oligonucleotide
ucuuauuaaacagcccugu

SEQ ID NO: 2243452 - RNA, 19 nt, Artificial Sequence
  Description of Artificial Sequence: Synthetic oligonucleotide
ugagucgugguguugggac

SEQ ID NO: 2243453 - RNA, 19 nt, Artificial Sequence
  Description of Artificial Sequence: Synthetic oligonucleotide
uucguaagcaucucacaac

SEQ ID NO: 2243454 - RNA, 19 nt, Artificial Sequence
  Description of Artificial Sequence: Synthetic oligonucleotide
uggcuuugggcgcacacag

SEQ ID NO: 2243455 - RNA, 19 nt, Artificial Sequence
  Description of Artificial Sequence: Synthetic oligonucleotide
ucaaggucuccugauagug

SEQ ID NO: 2243456 - RNA, 19 nt, Artificial Sequence
  Description of Artificial Sequence: Synthetic oligonucleotide
uggugugaucuuauuaaac

SEQ ID NO: 2243457 - RNA, 19 nt, Artificial Sequence
  Description of Artificial Sequence: Synthetic oligonucleotide
ucucccuucccaauucgcc

SEQ ID NO: 2243458 - RNA, 19 nt, Artificial Sequence
  Description of Artificial Sequence: Synthetic oligonucleotide
cacgagaacauuggaaucc

SEQ ID NO: 2243459 - RNA, 19 nt, Artificial Sequence
  Description of Artificial Sequence: Synthetic oligonucleotide
cucacaacugaccuuggac

SEQ ID NO: 2243460 - RNA, 19 nt, Artificial Sequence
  Description of Artificial Sequence: Synthetic oligonucleotide
aauccaagcccaaagggau

SEQ ID NO: 2243461 - RNA, 19 nt, Artificial Sequence
  Description of Artificial Sequence: Synthetic oligonucleotide
ggugugaucuuauuaaaca

SEQ ID NO: 2243462 - RNA, 19 nt, Artificial Sequence
  Description of Artificial Sequence: Synthetic oligonucleotide
agacacagcaacagauucc

SEQ ID NO: 2243463 - RNA, 19 nt, Artificial Sequence
  Description of Artificial Sequence: Synthetic oligonucleotide
accuuggaccagaugaucc

SEQ ID NO: 2243464 - RNA, 19 nt, Artificial Sequence
  Description of Artificial Sequence: Synthetic oligonucleotide
ugguauaucucaaggucuc

SEQ ID NO: 2243465 - RNA, 19 nt, Artificial Sequence
  Description of Artificial Sequence: Synthetic oligonucleotide
ucacacgagcacuguaggg

SEQ ID NO: 2243466 - RNA, 19 nt, Artificial Sequence
  Description of Artificial Sequence: Synthetic oligonucleotide
ucccauagacaccaucaug

SEQ ID NO: 2243467 - RNA, 19 nt, Artificial Sequence
  Description of Artificial Sequence: Synthetic oligonucleotide
aguaugucuuuaguggcuc

SEQ ID NO: 2243468 - RNA, 19 nt, Artificial Sequence
  Description of Artificial Sequence: Synthetic oligonucleotide
agucauggacaauggugac

SEQ ID NO: 2243469 - RNA, 19 nt, Artificial Sequence
  Description of Artificial Sequence: Synthetic oligonucleotide
auguagucaacagugagau

SEQ ID NO: 2243470 - RNA, 19 nt, Artificial Sequence
  Description of Artificial Sequence: Synthetic oligonucleotide
aauccacgagaacauugga

SEQ ID NO: 2243471 - RNA, 19 nt, Artificial Sequence
  Description of Artificial Sequence: Synthetic oligonucleotide
gaugcugaaguuccgcaca

SEQ ID NO: 2243472 - RNA, 19 nt, Artificial Sequence
  Description of Artificial Sequence: Synthetic oligonucleotide
gauuccaccacaauuaaau

SEQ ID NO: 2243473 - RNA, 19 nt, Artificial Sequence
  Description of Artificial Sequence: Synthetic oligonucleotide
ucacaugccagaggcaucc

SEQ ID NO: 2243474 - RNA, 19 nt, Artificial Sequence
  Description of Artificial Sequence: Synthetic oligonucleotide
gauuuucguaagcaucuca

SEQ ID NO: 2243475 - RNA, 19 nt, Artificial Sequence
  Description of Artificial Sequence: Synthetic oligonucleotide
cuacauaguguagaauggc

SEQ ID NO: 2243476 - RNA, 19 nt, Artificial Sequence
  Description of Artificial Sequence: Synthetic oligonucleotide
caaccuggcagucauggac

SEQ ID NO: 2243477 - RNA, 19 nt, Artificial Sequence
  Description of Artificial Sequence: Synthetic oligonucleotide
aaacugucacaugccagag

SEQ ID NO: 2243478 - RNA, 19 nt, Artificial Sequence
  Description of Artificial Sequence: Synthetic oligonucleotide
uccugagucgugguguugg

SEQ ID NO: 2243479 - RNA, 19 nt, Artificial Sequence
  Description of Artificial Sequence: Synthetic oligonucleotide
ugauagugcuuggagcuag

SEQ ID NO: 2243480 - RNA, 19 nt, Artificial Sequence
  Description of Artificial Sequence: Synthetic oligonucleotide
cagucauggacaaugguga

SEQ ID NO: 2243481 - RNA, 19 nt, Artificial Sequence
  Description of Artificial Sequence: Synthetic oligonucleotide
gauguagucaacagugaga

SEQ ID NO: 2243482 - RNA, 19 nt, Artificial Sequence
  Description of Artificial Sequence: Synthetic oligonucleotide
uagugcuuggagcuaggug

SEQ ID NO: 2243483 - RNA, 19 nt, Artificial Sequence
  Description of Artificial Sequence: Synthetic oligonucleotide
ucaacggagaggacacagc

SEQ ID NO: 2243484 - RNA, 19 nt, Artificial Sequence
  Description of Artificial Sequence: Synthetic oligonucleotide
uggagcuaggugcuggcug

SEQ ID NO: 2243485 - RNA, 19 nt, Artificial Sequence
  Description of Artificial Sequence: Synthetic oligonucleotide
ugcucaccaggucauauau

SEQ ID NO: 2243486 - RNA, 19 nt, Artificial Sequence
  Description of Artificial Sequence: Synthetic oligonucleotide
auaucucaaggucuccuga

SEQ ID NO: 2243487 - RNA, 19 nt, Artificial Sequence
  Description of Artificial Sequence: Synthetic oligonucleotide
aucccaucaacggagagga

SEQ ID NO: 2243488 - RNA, 19 nt, Artificial Sequence
  Description of Artificial Sequence: Synthetic oligonucleotide
caaacugucacaugccaga

SEQ ID NO: 2243489 - RNA, 19 nt, Artificial Sequence
  Description of Artificial Sequence: Synthetic oligonucleotide
ucucagacacagcaacaga

SEQ ID NO: 2243490 - RNA, 19 nt, Artificial Sequence
  Description of Artificial Sequence: Synthetic oligonucleotide
ucgagauccgcauagccuu

SEQ ID NO: 2243491 - RNA, 19 nt, Artificial Sequence
  Description of Artificial Sequence: Synthetic oligonucleotide
auggacaauggugacaacu

SEQ ID NO: 2243492 - RNA, 19 nt, Artificial Sequence
  Description of Artificial Sequence: Synthetic oligonucleotide
uauaucccucugaugcccc

SEQ ID NO: 2243493 - RNA, 19 nt, Artificial Sequence
  Description of Artificial Sequence: Synthetic oligonucleotide
cuggcagucauggacaaug

SEQ ID NO: 2243494 - RNA, 19 nt, Artificial Sequence
  Description of Artificial Sequence: Synthetic oligonucleotide
ugaguacugggauuuucgu

SEQ ID NO: 2243495 - RNA, 19 nt, Artificial Sequence
  Description of Artificial Sequence: Synthetic oligonucleotide
caucauggcauauucgaga

SEQ ID NO: 2243496 - RNA, 19 nt, Artificial Sequence
  Description of Artificial Sequence: Synthetic oligonucleotide
uccucaguaugucuuuagu

SEQ ID NO: 2243497 - RNA, 19 nt, Artificial Sequence
  Description of Artificial Sequence: Synthetic oligonucleotide
gagccuaaggggcacugcc

SEQ ID NO: 2243498 - RNA, 19 nt, Artificial Sequence
  Description of Artificial Sequence: Synthetic oligonucleotide
uagggcagguuucccacag

SEQ ID NO: 2243499 - RNA, 19 nt, Artificial Sequence
  Description of Artificial Sequence: Synthetic oligonucleotide
agcucacucacacgagcac

SEQ ID NO: 2243500 - RNA, 19 nt, Artificial Sequence
  Description of Artificial Sequence: Synthetic oligonucleotide
cucacacgagcacuguagg

SEQ ID NO: 2243501 - RNA, 19 nt, Artificial Sequence
  Description of Artificial Sequence: Synthetic oligonucleotide
uggcagucauggacaaugg

SEQ ID NO: 2243502 - RNA, 19 nt, Artificial Sequence
  Description of Artificial Sequence: Synthetic oligonucleotide
guuccgcacacccugggag

SEQ ID NO: 2243503 - RNA, 19 nt, Artificial Sequence
  Description of Artificial Sequence: Synthetic oligonucleotide
ggagugaugauguagucaa

SEQ ID NO: 2243504 - RNA, 19 nt, Artificial Sequence
  Description of Artificial Sequence: Synthetic oligonucleotide
acaauggugacaacuggug

SEQ ID NO: 2243505 - RNA, 19 nt, Artificial Sequence
  Description of Artificial Sequence: Synthetic oligonucleotide
cuuauuaaacagcccuguc

SEQ ID NO: 2243506 - RNA, 19 nt, Artificial Sequence
  Description of Artificial Sequence: Synthetic oligonucleotide
uucagcucacucacacgag

SEQ ID NO: 2243507 - RNA, 19 nt, Artificial Sequence
  Description of Artificial Sequence: Synthetic oligonucleotide
aucaacggagaggacacag

SEQ ID NO: 2243508 - RNA, 19 nt, Artificial Sequence
  Description of Artificial Sequence: Synthetic oligonucleotide
accuguuugugacuguggu

SEQ ID NO: 2243509 - RNA, 19 nt, Artificial Sequence
  Description of Artificial Sequence: Synthetic oligonucleotide
acugggauuuucguaagca

SEQ ID NO: 2243510 - RNA, 19 nt, Artificial Sequence
  Description of Artificial Sequence: Synthetic oligonucleotide
gcuuuucucgcucacgaag

SEQ ID NO: 2243511 - RNA, 19 nt, Artificial Sequence
  Description of Artificial Sequence: Synthetic oligonucleotide
caucccaucaacggagagg

SEQ ID NO: 2243512 - RNA, 19 nt, Artificial Sequence
  Description of Artificial Sequence: Synthetic oligonucleotide
uagaauggcccugugcugu

SEQ ID NO: 2243513 - RNA, 19 nt, Artificial Sequence
  Description of Artificial Sequence: Synthetic oligonucleotide
ucaagguguuggcacccag

SEQ ID NO: 2243514 - RNA, 19 nt, Artificial Sequence
  Description of Artificial Sequence: Synthetic oligonucleotide
ucaccaggucauauauccc

SEQ ID NO: 2243515 - RNA, 19 nt, Artificial Sequence
  Description of Artificial Sequence: Synthetic oligonucleotide
uuuucucgcucacgaaggu

SEQ ID NO: 2243516 - RNA, 19 nt, Artificial Sequence
  Description of Artificial Sequence: Synthetic oligonucleotide
uccaagcccaaagggaugc

SEQ ID NO: 2243517 - RNA, 19 nt, Artificial Sequence
  Description of Artificial Sequence: Synthetic oligonucleotide
ucgugguccuccagaagag

SEQ ID NO: 2243518 - RNA, 19 nt, Artificial Sequence
  Description of Artificial Sequence: Synthetic oligonucleotide
gauccgcauagccuucucc

SEQ ID NO: 2243519 - RNA, 19 nt, Artificial Sequence
  Description of Artificial Sequence: Synthetic oligonucleotide
guguccacgcccugcaggg

SEQ ID NO: 2243520 - RNA, 19 nt, Artificial Sequence
  Description of Artificial Sequence: Synthetic oligonucleotide
gucauauaucccucugaug

SEQ ID NO: 2243521 - RNA, 19 nt, Artificial Sequence
  Description of Artificial Sequence: Synthetic oligonucleotide
cagccuuucucagacacag

SEQ ID NO: 2243522 - RNA, 19 nt, Artificial Sequence
  Description of Artificial Sequence: Synthetic oligonucleotide
cuaugggccccuccuacgg

SEQ ID NO: 2243523 - RNA, 19 nt, Artificial Sequence
  Description of Artificial Sequence: Synthetic oligonucleotide
gguggugugaucuuauuaa

SEQ ID NO: 2243524 - RNA, 19 nt, Artificial Sequence
  Description of Artificial Sequence: Synthetic oligonucleotide
auuaaacagcccuguccug

SEQ ID NO: 2243525 - RNA, 19 nt, Artificial Sequence
  Description of Artificial Sequence: Synthetic oligonucleotide
agggaugcugaaguuccgc

SEQ ID NO: 2243526 - RNA, 19 nt, Artificial Sequence
  Description of Artificial Sequence: Synthetic oligonucleotide
acucacacgagcacuguag

SEQ ID NO: 2243527 - RNA, 19 nt, Artificial Sequence
  Description of Artificial Sequence: Synthetic oligonucleotide
ucccuucccaauucgccag

SEQ ID NO: 2243528 - RNA, 19 nt, Artificial Sequence
  Description of Artificial Sequence: Synthetic oligonucleotide
uucucccuucccaauucgc

SEQ ID NO: 2243529 - RNA, 19 nt, Artificial Sequence
  Description of Artificial Sequence: Synthetic oligonucleotide
ucgccagccuuucucagac

SEQ ID NO: 2243530 - RNA, 19 nt, Artificial Sequence
  Description of Artificial Sequence: Synthetic oligonucleotide
acauuuccucaguaugucu

SEQ ID NO: 2243531 - RNA, 19 nt, Artificial Sequence
  Description of Artificial Sequence: Synthetic oligonucleotide
aucuuauuaaacagcccug

SEQ ID NO: 2243532 - RNA, 19 nt, Artificial Sequence
  Description of Artificial Sequence: Synthetic oligonucleotide
aaccuguuugugacugugg

SEQ ID NO: 2243533 - RNA, 19 nt, Artificial Sequence
  Description of Artificial Sequence: Synthetic oligonucleotide
uggugagagcugcucacca

SEQ ID NO: 2243534 - RNA, 19 nt, Artificial Sequence
  Description of Artificial Sequence: Synthetic oligonucleotide
cucacucacacgagcacug

SEQ ID NO: 2243535 - RNA, 19 nt, Artificial Sequence
  Description of Artificial Sequence: Synthetic oligonucleotide
uacugggauuuucguaagc

SEQ ID NO: 2243536 - RNA, 19 nt, Artificial Sequence
  Description of Artificial Sequence: Synthetic oligonucleotide
caccaucauggcauauucg

SEQ ID NO: 2243537 - RNA, 19 nt, Artificial Sequence
  Description of Artificial Sequence: Synthetic oligonucleotide
aggucauauaucccucuga

SEQ ID NO: 2243538 - RNA, 19 nt, Artificial Sequence
  Description of Artificial Sequence: Synthetic oligonucleotide
gugacauccuucccggccc

SEQ ID NO: 2243539 - RNA, 19 nt, Artificial Sequence
  Description of Artificial Sequence: Synthetic oligonucleotide
uguugggaccagcaguguc

SEQ ID NO: 2243540 - RNA, 19 nt, Artificial Sequence
  Description of Artificial Sequence: Synthetic oligonucleotide
ggacaauggugacaacugg

SEQ ID NO: 2243541 - RNA, 19 nt, Artificial Sequence
  Description of Artificial Sequence: Synthetic oligonucleotide
gagaucgugguccuccaga

SEQ ID NO: 2243542 - RNA, 19 nt, Artificial Sequence
  Description of Artificial Sequence: Synthetic oligonucleotide
ucucacaacugaccuugga

SEQ ID NO: 2243543 - RNA, 19 nt, Artificial Sequence
  Description of Artificial Sequence: Synthetic oligonucleotide
ugccagaggcaucccauca

SEQ ID NO: 2243544 - RNA, 19 nt, Artificial Sequence
  Description of Artificial Sequence: Synthetic oligonucleotide
uucccaauucgccagccuu

SEQ ID NO: 2243545 - RNA, 19 nt, Artificial Sequence
  Description of Artificial Sequence: Synthetic oligonucleotide
uaucucaaggucuccugau

SEQ ID NO: 2243546 - RNA, 19 nt, Artificial Sequence
  Description of Artificial Sequence: Synthetic oligonucleotide
gaaccuguuugugacugug

SEQ ID NO: 2243547 - RNA, 19 nt, Artificial Sequence
  Description of Artificial Sequence: Synthetic oligonucleotide
caauucgccagccuuucuc

SEQ ID NO: 2243548 - RNA, 19 nt, Artificial Sequence
  Description of Artificial Sequence: Synthetic oligonucleotide
uucccacagccacaguggc

SEQ ID NO: 2243549 - RNA, 19 nt, Artificial Sequence
  Description of Artificial Sequence: Synthetic oligonucleotide
gucuuuaguggcuccagga

SEQ ID NO: 2243550 - RNA, 19 nt, Artificial Sequence
  Description of Artificial Sequence: Synthetic oligonucleotide
acacgagcacuguagggca

SEQ ID NO: 2243551 - RNA, 19 nt, Artificial Sequence
  Description of Artificial Sequence: Synthetic oligonucleotide
cugagucuacauaguguag

SEQ ID NO: 2243552 - RNA, 19 nt, Artificial Sequence
  Description of Artificial Sequence: Synthetic oligonucleotide
ugguguccccucauggaca

SEQ ID NO: 2243553 - RNA, 19 nt, Artificial Sequence
  Description of Artificial Sequence: Synthetic oligonucleotide
uguccccucauggacagcu

SEQ ID NO: 2243554 - RNA, 19 nt, Artificial Sequence
  Description of Artificial Sequence: Synthetic oligonucleotide
gcagucauggacaauggug

SEQ ID NO: 2243555 - RNA, 19 nt, Artificial Sequence
  Description of Artificial Sequence: Synthetic oligonucleotide
ugacauccuucccggcccg

SEQ ID NO: 2243556 - RNA, 19 nt, Artificial Sequence
  Description of Artificial Sequence: Synthetic oligonucleotide
guagaauggcccugugcug

SEQ ID NO: 2243557 - RNA, 19 nt, Artificial Sequence
  Description of Artificial Sequence: Synthetic oligonucleotide
uccuacggaaccuguuugu

SEQ ID NO: 2243558 - RNA, 19 nt, Artificial Sequence
  Description of Artificial Sequence: Synthetic oligonucleotide
agcuagguggguguccacg

SEQ ID NO: 2243559 - RNA, 19 nt, Artificial Sequence
  Description of Artificial Sequence: Synthetic oligonucleotide
agaggacacagcucuucug

SEQ ID NO: 2243560 - RNA, 19 nt, Artificial Sequence
  Description of Artificial Sequence: Synthetic oligonucleotide
acauuggaauccaagccca

SEQ ID NO: 2243561 - RNA, 19 nt, Artificial Sequence
  Description of Artificial Sequence: Synthetic oligonucleotide
uauucgagauccgcauagc

SEQ ID NO: 2243562 - RNA, 19 nt, Artificial Sequence
  Description of Artificial Sequence: Synthetic oligonucleotide
aagcccaaagggaugcuga

SEQ ID NO: 2243563 - RNA, 19 nt, Artificial Sequence
  Description of Artificial Sequence: Synthetic oligonucleotide
ugagaucgugguccuccag

SEQ ID NO: 2243564 - RNA, 19 nt, Artificial Sequence
  Description of Artificial Sequence: Synthetic oligonucleotide
cacaacugaccuuggacca

SEQ ID NO: 2243565 - RNA, 19 nt, Artificial Sequence
  Description of Artificial Sequence: Synthetic oligonucleotide
cugguguccccucauggac

SEQ ID NO: 2243566 - RNA, 19 nt, Artificial Sequence
  Description of Artificial Sequence: Synthetic oligonucleotide
gguguuggcacccaggugu

SEQ ID NO: 2243567 - RNA, 19 nt, Artificial Sequence
  Description of Artificial Sequence: Synthetic oligonucleotide
gagucgugguguugggacc

SEQ ID NO: 2243568 - RNA, 19 nt, Artificial Sequence
  Description of Artificial Sequence: Synthetic oligonucleotide
gauagugcuuggagcuagg

SEQ ID NO: 2243569 - RNA, 19 nt, Artificial Sequence
  Description of Artificial Sequence: Synthetic oligonucleotide
cauagacaccaucauggca

SEQ ID NO: 2243570 - RNA, 19 nt, Artificial Sequence
  Description of Artificial Sequence: Synthetic oligonucleotide
gaaguuccgcacacccugg

SEQ ID NO: 2243571 - RNA, 19 nt, Artificial Sequence
  Description of Artificial Sequence: Synthetic oligonucleotide
agaucgugguccuccagaa

SEQ ID NO: 2243572 - RNA, 19 nt, Artificial Sequence
  Description of Artificial Sequence: Synthetic oligonucleotide
auaguguagaauggcccug

SEQ ID NO: 2243573 - RNA, 19 nt, Artificial Sequence
  Description of Artificial Sequence: Synthetic oligonucleotide
gaucgugguccuccagaag

SEQ ID NO: 2243574 - RNA, 19 nt, Artificial Sequence
  Description of Artificial Sequence: Synthetic oligonucleotide
ccucaguaugucuuuagug

SEQ ID NO: 2243575 - RNA, 19 nt, Artificial Sequence
  Description of Artificial Sequence: Synthetic oligonucleotide
acgaagguuccugaguacu

SEQ ID NO: 2243576 - RNA, 19 nt, Artificial Sequence
  Description of Artificial Sequence: Synthetic oligonucleotide
aggcaucccaucaacggag

SEQ ID NO: 2243577 - RNA, 19 nt, Artificial Sequence
  Description of Artificial Sequence: Synthetic oligonucleotide
cuccuacggaaccuguuug

SEQ ID NO: 2243578 - RNA, 19 nt, Artificial Sequence
  Description of Artificial Sequence: Synthetic oligonucleotide
auucgccagccuuucucag

SEQ ID NO: 2243579 - RNA, 19 nt, Artificial Sequence
  Description of Artificial Sequence: Synthetic oligonucleotide
ucucagcuugaagagugac

SEQ ID NO: 2243580 - RNA, 19 nt, Artificial Sequence
  Description of Artificial Sequence: Synthetic oligonucleotide
agguggugugaucuuauua

SEQ ID NO: 2243581 - RNA, 19 nt, Artificial Sequence
  Description of Artificial Sequence: Synthetic oligonucleotide
ccacaauuaaauccacgag

SEQ ID NO: 2243582 - RNA, 19 nt, Artificial Sequence
  Description of Artificial Sequence: Synthetic oligonucleotide
uucgccagccuuucucaga

SEQ ID NO: 2243583 - RNA, 19 nt, Artificial Sequence
  Description of Artificial Sequence: Synthetic oligonucleotide
agccuaaggggcacugccc

SEQ ID NO: 2243584 - RNA, 19 nt, Artificial Sequence
  Description of Artificial Sequence: Synthetic oligonucleotide
aagggaugcugaaguuccg

SEQ ID NO: 2243585 - RNA, 19 nt, Artificial Sequence
  Description of Artificial Sequence: Synthetic oligonucleotide
cauaguguagaauggcccu

SEQ ID NO: 2243586 - RNA, 19 nt, Artificial Sequence
  Description of Artificial Sequence: Synthetic oligonucleotide
gaguacugggauuuucgua

SEQ ID NO: 2243587 - RNA, 19 nt, Artificial Sequence
  Description of Artificial Sequence: Synthetic oligonucleotide
ggagcuaggugcuggcugc

SEQ ID NO: 2243588 - RNA, 19 nt, Artificial Sequence
  Description of Artificial Sequence: Synthetic oligonucleotide
uggcacauuuccucaguau

SEQ ID NO: 2243589 - RNA, 19 nt, Artificial Sequence
  Description of Artificial Sequence: Synthetic oligonucleotide
aguguagaauggcccugug

SEQ ID NO: 2243590 - RNA, 19 nt, Artificial Sequence
  Description of Artificial Sequence: Synthetic oligonucleotide
uuggcuuugggcgcacaca

SEQ ID NO: 2243591 - RNA, 19 nt, Artificial Sequence
  Description of Artificial Sequence: Synthetic oligonucleotide
caggucauauaucccucug

SEQ ID NO: 2243592 - RNA, 19 nt, Artificial Sequence
  Description of Artificial Sequence: Synthetic oligonucleotide
ccaucaacggagaggacac

SEQ ID NO: 2243593 - RNA, 19 nt, Artificial Sequence
  Description of Artificial Sequence: Synthetic oligonucleotide
agauccgcauagccuucuc

SEQ ID NO: 2243594 - RNA, 19 nt, Artificial Sequence
  Description of Artificial Sequence: Synthetic oligonucleotide
cuacggaaccuguuuguga

SEQ ID NO: 2243595 - RNA, 19 nt, Artificial Sequence
  Description of Artificial Sequence: Synthetic oligonucleotide
acaacugaccuuggaccag

SEQ ID NO: 2243596 - RNA, 19 nt, Artificial Sequence
  Description of Artificial Sequence: Synthetic oligonucleotide
ucauggcauauucgagauc

SEQ ID NO: 2243597 - RNA, 19 nt, Artificial Sequence
  Description of Artificial Sequence: Synthetic oligonucleotide
cuagguggguguccacgcc

SEQ ID NO: 2243598 - RNA, 19 nt, Artificial Sequence
  Description of Artificial Sequence: Synthetic oligonucleotide
acugaccuuggaccagaug

SEQ ID NO: 2243599 - RNA, 19 nt, Artificial Sequence
  Description of Artificial Sequence: Synthetic oligonucleotide
guuggcuuugggcgcacac

SEQ ID NO: 2243600 - RNA, 19 nt, Artificial Sequence
  Description of Artificial Sequence: Synthetic oligonucleotide
gacaauggugacaacuggu

SEQ ID NO: 2243601 - RNA, 19 nt, Artificial Sequence
  Description of Artificial Sequence: Synthetic oligonucleotide
uagccuucucccuucccaa

SEQ ID NO: 2243602 - RNA, 19 nt, Artificial Sequence
  Description of Artificial Sequence: Synthetic oligonucleotide
gggcagguuucccacagcc

SEQ ID NO: 2243603 - RNA, 19 nt, Artificial Sequence
  Description of Artificial Sequence: Synthetic oligonucleotide
gacaacugguguccccuca

SEQ ID NO: 2243604 - RNA, 19 nt, Artificial Sequence
  Description of Artificial Sequence: Synthetic oligonucleotide
uguagucaacagugagauc

SEQ ID NO: 2243605 - RNA, 19 nt, Artificial Sequence
  Description of Artificial Sequence: Synthetic oligonucleotide
agaauggcccugugcugug

SEQ ID NO: 2243606 - RNA, 19 nt, Artificial Sequence
  Description of Artificial Sequence: Synthetic oligonucleotide
ggcccugaaggagagaggc

SEQ ID NO: 2243607 - RNA, 19 nt, Artificial Sequence
  Description of Artificial Sequence: Synthetic oligonucleotide
guggugugaucuuauuaaa

SEQ ID NO: 2243608 - RNA, 19 nt, Artificial Sequence
  Description of Artificial Sequence: Synthetic oligonucleotide
augauguagucaacaguga

SEQ ID NO: 2243609 - RNA, 19 nt, Artificial Sequence
  Description of Artificial Sequence: Synthetic oligonucleotide
aguuccgcacacccuggga

SEQ ID NO: 2243610 - RNA, 19 nt, Artificial Sequence
  Description of Artificial Sequence: Synthetic oligonucleotide
ucgcucacgaagguuccug

SEQ ID NO: 2243611 - RNA, 19 nt, Artificial Sequence
  Description of Artificial Sequence: Synthetic oligonucleotide
cacgaagguuccugaguac

SEQ ID NO: 2243612 - RNA, 19 nt, Artificial Sequence
  Description of Artificial Sequence: Synthetic oligonucleotide
ccaucauggcauauucgag

SEQ ID NO: 2243613 - RNA, 19 nt, Artificial Sequence
  Description of Artificial Sequence: Synthetic oligonucleotide
cacuguagggcagguuucc

SEQ ID NO: 2243614 - RNA, 19 nt, Artificial Sequence
  Description of Artificial Sequence: Synthetic oligonucleotide
acgagcacuguagggcagg

SEQ ID NO: 2243615 - RNA, 19 nt, Artificial Sequence
  Description of Artificial Sequence: Synthetic oligonucleotide
auccacgagaacauuggaa

SEQ ID NO: 2243616 - RNA, 19 nt, Artificial Sequence
  Description of Artificial Sequence: Synthetic oligonucleotide
cucccuucccaauucgcca

SEQ ID NO: 2243617 - RNA, 19 nt, Artificial Sequence
  Description of Artificial Sequence: Synthetic oligonucleotide
ugagccuaaggggcacugc

SEQ ID NO: 2243618 - RNA, 19 nt, Artificial Sequence
  Description of Artificial Sequence: Synthetic oligonucleotide
acaaccuggcagucaugga

SEQ ID NO: 2243619 - RNA, 19 nt, Artificial Sequence
  Description of Artificial Sequence: Synthetic oligonucleotide
gcaaacugucacaugccag

SEQ ID NO: 2243620 - RNA, 19 nt, Artificial Sequence
  Description of Artificial Sequence: Synthetic oligonucleotide
uguuugugacugugguaua

SEQ ID NO: 2243621 - RNA, 19 nt, Artificial Sequence
  Description of Artificial Sequence: Synthetic oligonucleotide
gcaaugacccuggugggag

SEQ ID NO: 2243622 - RNA, 19 nt, Artificial Sequence
  Description of Artificial Sequence: Synthetic oligonucleotide
agguguuggcacccaggug

SEQ ID NO: 2243623 - RNA, 19 nt, Artificial Sequence
  Description of Artificial Sequence: Synthetic oligonucleotide
gaauggcccugugcugugg

SEQ ID NO: 2243624 - RNA, 19 nt, Artificial Sequence
  Description of Artificial Sequence: Synthetic oligonucleotide
ggcacccagguguaggccc

SEQ ID NO: 2243625 - RNA, 19 nt, Artificial Sequence
  Description of Artificial Sequence: Synthetic oligonucleotide
ugaucccuguuggcuuugg

SEQ ID NO: 2243626 - RNA, 19 nt, Artificial Sequence
  Description of Artificial Sequence: Synthetic oligonucleotide
gcuaugggccccuccuacg

SEQ ID NO: 2243627 - RNA, 19 nt, Artificial Sequence
  Description of Artificial Sequence: Synthetic oligonucleotide
cagggaugucaacaaccug

SEQ ID NO: 2243628 - RNA, 19 nt, Artificial Sequence
  Description of Artificial Sequence: Synthetic oligonucleotide
gcuagguggguguccacgc

SEQ ID NO: 2243629 - RNA, 19 nt, Artificial Sequence
  Description of Artificial Sequence: Synthetic oligonucleotide
agucgugguguugggacca

SEQ ID NO: 2243630 - RNA, 19 nt, Artificial Sequence
  Description of Artificial Sequence: Synthetic oligonucleotide
cuggugagagcugcucacc

SEQ ID NO: 2243631 - RNA, 19 nt, Artificial Sequence
  Description of Artificial Sequence: Synthetic oligonucleotide
cagcucacucacacgagca

SEQ ID NO: 2243632 - RNA, 19 nt, Artificial Sequence
  Description of Artificial Sequence: Synthetic oligonucleotide
aggugagccuaaggggcac

SEQ ID NO: 2243633 - RNA, 19 nt, Artificial Sequence
  Description of Artificial Sequence: Synthetic oligonucleotide
gucauggacaauggugaca

SEQ ID NO: 2243634 - RNA, 19 nt, Artificial Sequence
  Description of Artificial Sequence: Synthetic oligonucleotide
agucuacauaguguagaau

SEQ ID NO: 2243635 - RNA, 19 nt, Artificial Sequence
  Description of Artificial Sequence: Synthetic oligonucleotide
agucaacagugagaucgug

SEQ ID NO: 2243636 - RNA, 19 nt, Artificial Sequence
  Description of Artificial Sequence: Synthetic oligonucleotide
agcaaugacccugguggga

SEQ ID NO: 2243637 - RNA, 19 nt, Artificial Sequence
  Description of Artificial Sequence: Synthetic oligonucleotide
ggugacaacuggugucccc

SEQ ID NO: 2243638 - RNA, 19 nt, Artificial Sequence
  Description of Artificial Sequence: Synthetic oligonucleotide
caacggagaggacacagcu

SEQ ID NO: 2243639 - RNA, 19 nt, Artificial Sequence
  Description of Artificial Sequence: Synthetic oligonucleotide
ggcauauucgagauccgca

SEQ ID NO: 2243640 - RNA, 19 nt, Artificial Sequence
  Description of Artificial Sequence: Synthetic oligonucleotide
acggaaccuguuugugacu

SEQ ID NO: 2243641 - RNA, 19 nt, Artificial Sequence
  Description of Artificial Sequence: Synthetic oligonucleotide
gguauaucucaaggucucc

SEQ ID NO: 2243642 - RNA, 19 nt, Artificial Sequence
  Description of Artificial Sequence: Synthetic oligonucleotide
cacgagcacuguagggcag

SEQ ID NO: 2243643 - RNA, 19 nt, Artificial Sequence
  Description of Artificial Sequence: Synthetic oligonucleotide
cagauuccaccacaauuaa

SEQ ID NO: 2243644 - RNA, 19 nt, Artificial Sequence
  Description of Artificial Sequence: Synthetic oligonucleotide
guauaucucaaggucuccu

SEQ ID NO: 2243645 - RNA, 19 nt, Artificial Sequence
  Description of Artificial Sequence: Synthetic oligonucleotide
ggucauauaucccucugau

SEQ ID NO: 2243646 - RNA, 19 nt, Artificial Sequence
  Description of Artificial Sequence: Synthetic oligonucleotide
gggauuuucguaagcaucu

SEQ ID NO: 2243647 - RNA, 19 nt, Artificial Sequence
  Description of Artificial Sequence: Synthetic oligonucleotide
ccugauagugcuuggagcu

SEQ ID NO: 2243648 - RNA, 19 nt, Artificial Sequence
  Description of Artificial Sequence: Synthetic oligonucleotide
uguccacgcccugcagggg

SEQ ID NO: 2243649 - RNA, 19 nt, Artificial Sequence
  Description of Artificial Sequence: Synthetic oligonucleotide
augggccccuccuacggaa

SEQ ID NO: 2243650 - RNA, 19 nt, Artificial Sequence
  Description of Artificial Sequence: Synthetic oligonucleotide
uuggagcuaggugcuggcu

SEQ ID NO: 2243651 - RNA, 19 nt, Artificial Sequence
  Description of Artificial Sequence: Synthetic oligonucleotide
uggugacaacugguguccc

SEQ ID NO: 2243652 - RNA, 19 nt, Artificial Sequence
  Description of Artificial Sequence: Synthetic oligonucleotide
uucccggcccgcuuuucuc

SEQ ID NO: 2243653 - RNA, 19 nt, Artificial Sequence
  Description of Artificial Sequence: Synthetic oligonucleotide
auccaagcccaaagggaug

SEQ ID NO: 2243654 - RNA, 19 nt, Artificial Sequence
  Description of Artificial Sequence: Synthetic oligonucleotide
gggagugaugauguaguca

SEQ ID NO: 2243655 - RNA, 19 nt, Artificial Sequence
  Description of Artificial Sequence: Synthetic oligonucleotide
gucaacaaccuggcaguca

SEQ ID NO: 2243656 - RNA, 19 nt, Artificial Sequence
  Description of Artificial Sequence: Synthetic oligonucleotide
ccagaugaucccuguuggc

SEQ ID NO: 2243657 - RNA, 19 nt, Artificial Sequence
  Description of Artificial Sequence: Synthetic oligonucleotide
agauuccaccacaauuaaa

SEQ ID NO: 2243658 - RNA, 19 nt, Artificial Sequence
  Description of Artificial Sequence: Synthetic oligonucleotide
ggcuaugggccccuccuac

SEQ ID NO: 2243659 - RNA, 19 nt, Artificial Sequence
  Description of Artificial Sequence: Synthetic oligonucleotide
uccgcacacccugggaggu

SEQ ID NO: 2243660 - RNA, 19 nt, Artificial Sequence
  Description of Artificial Sequence: Synthetic oligonucleotide
caggugagccuaaggggca

SEQ ID NO: 2243661 - RNA, 19 nt, Artificial Sequence
  Description of Artificial Sequence: Synthetic oligonucleotide
caacaaccuggcagucaug

SEQ ID NO: 2243662 - RNA, 19 nt, Artificial Sequence
  Description of Artificial Sequence: Synthetic oligonucleotide
gaugaucccuguuggcuuu

SEQ ID NO: 2243663 - RNA, 19 nt, Artificial Sequence
  Description of Artificial Sequence: Synthetic oligonucleotide
ccacgagaacauuggaauc

SEQ ID NO: 2243664 - RNA, 19 nt, Artificial Sequence
  Description of Artificial Sequence: Synthetic oligonucleotide
cagcuugaagagugacauc

SEQ ID NO: 2243665 - RNA, 19 nt, Artificial Sequence
  Description of Artificial Sequence: Synthetic oligonucleotide
cauggacaauggugacaac

SEQ ID NO: 2243666 - RNA, 19 nt, Artificial Sequence
  Description of Artificial Sequence: Synthetic oligonucleotide
gugagaucgugguccucca

SEQ ID NO: 2243667 - RNA, 19 nt, Artificial Sequence
  Description of Artificial Sequence: Synthetic oligonucleotide
cccucaagguguuggcacc

SEQ ID NO: 2243668 - RNA, 19 nt, Artificial Sequence
  Description of Artificial Sequence: Synthetic oligonucleotide
gugagccuaaggggcacug

SEQ ID NO: 2243669 - RNA, 19 nt, Artificial Sequence
  Description of Artificial Sequence: Synthetic oligonucleotide
uugggaccagcagugucuu

SEQ ID NO: 2243670 - RNA, 19 nt, Artificial Sequence
  Description of Artificial Sequence: Synthetic oligonucleotide
ggcuccugccaggugagcc

SEQ ID NO: 2243671 - RNA, 19 nt, Artificial Sequence
  Description of Artificial Sequence: Synthetic oligonucleotide
gcauauucgagauccgcau

SEQ ID NO: 2243672 - RNA, 19 nt, Artificial Sequence
  Description of Artificial Sequence: Synthetic oligonucleotide
guggcuccugccaggugag

SEQ ID NO: 2243673 - RNA, 19 nt, Artificial Sequence
  Description of Artificial Sequence: Synthetic oligonucleotide
ggagaggacacagcucuuc

SEQ ID NO: 2243674 - RNA, 19 nt, Artificial Sequence
  Description of Artificial Sequence: Synthetic oligonucleotide
cugaugccccagugccacc

SEQ ID NO: 2243675 - RNA, 19 nt, Artificial Sequence
  Description of Artificial Sequence: Synthetic oligonucleotide
ucccaucaacggagaggac

SEQ ID NO: 2243676 - RNA, 19 nt, Artificial Sequence
  Description of Artificial Sequence: Synthetic oligonucleotide
guuugugacugugguauau

SEQ ID NO: 2243677 - RNA, 19 nt, Artificial Sequence
  Description of Artificial Sequence: Synthetic oligonucleotide
caacugaccuuggaccaga

SEQ ID NO: 2243678 - RNA, 19 nt, Artificial Sequence
  Description of Artificial Sequence: Synthetic oligonucleotide
ggcccugugcuguggcucc

SEQ ID NO: 2243679 - RNA, 19 nt, Artificial Sequence
  Description of Artificial Sequence: Synthetic oligonucleotide
gacaccaucauggcauauu

SEQ ID NO: 2243680 - RNA, 19 nt, Artificial Sequence
  Description of Artificial Sequence: Synthetic oligonucleotide
ucgugguguugggaccagc

SEQ ID NO: 2243681 - RNA, 19 nt, Artificial Sequence
  Description of Artificial Sequence: Synthetic oligonucleotide
aggagguggugugaucuua

SEQ ID NO: 2243682 - RNA, 19 nt, Artificial Sequence
  Description of Artificial Sequence: Synthetic oligonucleotide
ccugagucgugguguuggg

SEQ ID NO: 2243683 - RNA, 19 nt, Artificial Sequence
  Description of Artificial Sequence: Synthetic oligonucleotide
ccaccacaauuaaauccac

SEQ ID NO: 2243684 - RNA, 19 nt, Artificial Sequence
  Description of Artificial Sequence: Synthetic oligonucleotide
acauccuucccggcccgcu

SEQ ID NO: 2243685 - RNA, 19 nt, Artificial Sequence
  Description of Artificial Sequence: Synthetic oligonucleotide
ccuacggaaccuguuugug

SEQ ID NO: 2243686 - RNA, 19 nt, Artificial Sequence
  Description of Artificial Sequence: Synthetic oligonucleotide
auccuucccggcccgcuuu

SEQ ID NO: 2243687 - RNA, 19 nt, Artificial Sequence
  Description of Artificial Sequence: Synthetic oligonucleotide
gucacaugccagaggcauc

SEQ ID NO: 2243688 - RNA, 19 nt, Artificial Sequence
  Description of Artificial Sequence: Synthetic oligonucleotide
aacugaccuuggaccagau

SEQ ID NO: 2243689 - RNA, 19 nt, Artificial Sequence
  Description of Artificial Sequence: Synthetic oligonucleotide
ccccucauggacagcuccc

SEQ ID NO: 2243690 - RNA, 19 nt, Artificial Sequence
  Description of Artificial Sequence: Synthetic oligonucleotide
ggauuuucguaagcaucuc

SEQ ID NO: 2243691 - RNA, 19 nt, Artificial Sequence
  Description of Artificial Sequence: Synthetic oligonucleotide
uguuggcuuugggcgcaca

SEQ ID NO: 2243692 - RNA, 19 nt, Artificial Sequence
  Description of Artificial Sequence: Synthetic oligonucleotide
ccacccucaagguguuggc

SEQ ID NO: 2243693 - RNA, 19 nt, Artificial Sequence
  Description of Artificial Sequence: Synthetic oligonucleotide
gccucagggaugucaacaa

SEQ ID NO: 2243694 - RNA, 19 nt, Artificial Sequence
  Description of Artificial Sequence: Synthetic oligonucleotide
gcacauuuccucaguaugu

SEQ ID NO: 2243695 - RNA, 19 nt, Artificial Sequence
  Description of Artificial Sequence: Synthetic oligonucleotide
gacauccuucccggcccgc

SEQ ID NO: 2243696 - RNA, 19 nt, Artificial Sequence
  Description of Artificial Sequence: Synthetic oligonucleotide
cguaagcaucucacaacug

SEQ ID NO: 2243697 - RNA, 19 nt, Artificial Sequence
  Description of Artificial Sequence: Synthetic oligonucleotide
cuuggaccagaugaucccu

SEQ ID NO: 2243698 - RNA, 19 nt, Artificial Sequence
  Description of Artificial Sequence: Synthetic oligonucleotide
cauggacagcucccauaga

SEQ ID NO: 2243699 - RNA, 19 nt, Artificial Sequence
  Description of Artificial Sequence: Synthetic oligonucleotide
ccucaagguguuggcaccc

SEQ ID NO: 2243700 - RNA, 19 nt, Artificial Sequence
  Description of Artificial Sequence: Synthetic oligonucleotide
uccugccaggugagccuaa

SEQ ID NO: 2243701 - RNA, 19 nt, Artificial Sequence
  Description of Artificial Sequence: Synthetic oligonucleotide
uccuucccggcccgcuuuu

SEQ ID NO: 2243702 - RNA, 19 nt, Artificial Sequence
  Description of Artificial Sequence: Synthetic oligonucleotide
cugagucgugguguuggga

SEQ ID NO: 2243703 - RNA, 19 nt, Artificial Sequence
  Description of Artificial Sequence: Synthetic oligonucleotide
cuuugggcgcacacagccu

SEQ ID NO: 2243704 - RNA, 19 nt, Artificial Sequence
  Description of Artificial Sequence: Synthetic oligonucleotide
ccgcuuuucucgcucacga

SEQ ID NO: 2243705 - RNA, 19 nt, Artificial Sequence
  Description of Artificial Sequence: Synthetic oligonucleotide
cacucacacgagcacugua

SEQ ID NO: 2243706 - RNA, 19 nt, Artificial Sequence
  Description of Artificial Sequence: Synthetic oligonucleotide
ggcagcuaggugggugucc

SEQ ID NO: 2243707 - RNA, 19 nt, Artificial Sequence
  Description of Artificial Sequence: Synthetic oligonucleotide
gucgugguguugggaccag

SEQ ID NO: 2243708 - RNA, 19 nt, Artificial Sequence
  Description of Artificial Sequence: Synthetic oligonucleotide
ugccgggcagcagcugagu

SEQ ID NO: 2243709 - RNA, 19 nt, Artificial Sequence
  Description of Artificial Sequence: Synthetic oligonucleotide
gagauccgcauagccuucu

SEQ ID NO: 2243710 - RNA, 19 nt, Artificial Sequence
  Description of Artificial Sequence: Synthetic oligonucleotide
gagguggugugaucuuauu

SEQ ID NO: 2243711 - RNA, 19 nt, Artificial Sequence
  Description of Artificial Sequence: Synthetic oligonucleotide
gguggcacauuuccucagu

SEQ ID NO: 2243712 - RNA, 19 nt, Artificial Sequence
  Description of Artificial Sequence: Synthetic oligonucleotide
ccuucccaauucgccagcc

SEQ ID NO: 2243713 - RNA, 19 nt, Artificial Sequence
  Description of Artificial Sequence: Synthetic oligonucleotide
ggggcuaugggccccuccu

SEQ ID NO: 2243714 - RNA, 19 nt, Artificial Sequence
  Description of Artificial Sequence: Synthetic oligonucleotide
gaugccccagugccacccu

SEQ ID NO: 2243715 - RNA, 19 nt, Artificial Sequence
  Description of Artificial Sequence: Synthetic oligonucleotide
ccacaguggcagcuaggug

SEQ ID NO: 2243716 - RNA, 19 nt, Artificial Sequence
  Description of Artificial Sequence: Synthetic oligonucleotide
cuucccaauucgccagccu

SEQ ID NO: 2243717 - RNA, 19 nt, Artificial Sequence
  Description of Artificial Sequence: Synthetic oligonucleotide
caucaacggagaggacaca

SEQ ID NO: 2243718 - RNA, 19 nt, Artificial Sequence
  Description of Artificial Sequence: Synthetic oligonucleotide
ggcuuugggcgcacacagc

SEQ ID NO: 2243719 - RNA, 19 nt, Artificial Sequence
  Description of Artificial Sequence: Synthetic oligonucleotide
ccuguuugugacuguggua

SEQ ID NO: 2243720 - RNA, 19 nt, Artificial Sequence
  Description of Artificial Sequence: Synthetic oligonucleotide
gguggguguccacgcccug

SEQ ID NO: 2243721 - RNA, 19 nt, Artificial Sequence
  Description of Artificial Sequence: Synthetic oligonucleotide
cccaauucgccagccuuuc

SEQ ID NO: 2243722 - RNA, 19 nt, Artificial Sequence
  Description of Artificial Sequence: Synthetic oligonucleotide
cccuucccaauucgccagc

SEQ ID NO: 2243723 - RNA, 19 nt, Artificial Sequence
  Description of Artificial Sequence: Synthetic oligonucleotide
gccacaguggcagcuaggu

SEQ ID NO: 2243724 - RNA, 19 nt, Artificial Sequence
  Description of Artificial Sequence: Synthetic oligonucleotide
ugggaccagcagugucuuu

SEQ ID NO: 2243725 - RNA, 19 nt, Artificial Sequence
  Description of Artificial Sequence: Synthetic oligonucleotide
ugccacccucaagguguug

SEQ ID NO: 2243726 - RNA, 19 nt, Artificial Sequence
  Description of Artificial Sequence: Synthetic oligonucleotide
cuucccggcccgcuuuucu

SEQ ID NO: 2243727 - RNA, 19 nt, Artificial Sequence
  Description of Artificial Sequence: Synthetic oligonucleotide
gcucacucacacgagcacu

SEQ ID NO: 2243728 - RNA, 19 nt, Artificial Sequence
  Description of Artificial Sequence: Synthetic oligonucleotide
cagucucagcuugaagagu

SEQ ID NO: 2243729 - RNA, 19 nt, Artificial Sequence
  Description of Artificial Sequence: Synthetic oligonucleotide
gggaccagcagugucuuuu

SEQ ID NO: 2243730 - RNA, 19 nt, Artificial Sequence
  Description of Artificial Sequence: Synthetic oligonucleotide
cagugagaucgugguccuc

SEQ ID NO: 2243731 - RNA, 19 nt, Artificial Sequence
  Description of Artificial Sequence: Synthetic oligonucleotide
gccgggcagcagcugaguc

SEQ ID NO: 2243732 - RNA, 19 nt, Artificial Sequence
  Description of Artificial Sequence: Synthetic oligonucleotide
ccugccaggugagccuaag

SEQ ID NO: 2243733 - RNA, 19 nt, Artificial Sequence
  Description of Artificial Sequence: Synthetic oligonucleotide
guaggcccugaaggagaga

SEQ ID NO: 2243734 - RNA, 19 nt, Artificial Sequence
  Description of Artificial Sequence: Synthetic oligonucleotide
ggcccgcuuuucucgcuca

SEQ ID NO: 2243735 - RNA, 19 nt, Artificial Sequence
  Description of Artificial Sequence: Synthetic oligonucleotide
cgagauccgcauagccuuc

SEQ ID NO: 2243736 - RNA, 19 nt, Artificial Sequence
  Description of Artificial Sequence: Synthetic oligonucleotide
gcaucucacaacugaccuu

SEQ ID NO: 2243737 - RNA, 19 nt, Artificial Sequence
  Description of Artificial Sequence: Synthetic oligonucleotide
cacccagguguaggcccug

SEQ ID NO: 2243738 - RNA, 19 nt, Artificial Sequence
  Description of Artificial Sequence: Synthetic oligonucleotide
ccaggucauauaucccucu

SEQ ID NO: 2243739 - RNA, 19 nt, Artificial Sequence
  Description of Artificial Sequence: Synthetic oligonucleotide
ggagguggugugaucuuau

SEQ ID NO: 2243740 - RNA, 19 nt, Artificial Sequence
  Description of Artificial Sequence: Synthetic oligonucleotide
cuccugccaggugagccua

SEQ ID NO: 2243741 - RNA, 19 nt, Artificial Sequence
  Description of Artificial Sequence: Synthetic oligonucleotide
gcccgcuuuucucgcucac

SEQ ID NO: 2243742 - RNA, 19 nt, Artificial Sequence
  Description of Artificial Sequence: Synthetic oligonucleotide
ccugggagguggcacauuu

SEQ ID NO: 2243743 - RNA, 19 nt, Artificial Sequence
  Description of Artificial Sequence: Synthetic oligonucleotide
cgcucacgaagguuccuga

SEQ ID NO: 2243744 - RNA, 19 nt, Artificial Sequence
  Description of Artificial Sequence: Synthetic oligonucleotide
cagcccuguccugagucgu

SEQ ID NO: 2243745 - RNA, 19 nt, Artificial Sequence
  Description of Artificial Sequence: Synthetic oligonucleotide
gggcuaugggccccuccua

SEQ ID NO: 2243746 - RNA, 19 nt, Artificial Sequence
  Description of Artificial Sequence: Synthetic oligonucleotide
ccuccuacggaaccuguuu

SEQ ID NO: 2243747 - RNA, 19 nt, Artificial Sequence
  Description of Artificial Sequence: Synthetic oligonucleotide
cauccuucccggcccgcuu

SEQ ID NO: 2243748 - RNA, 19 nt, Artificial Sequence
  Description of Artificial Sequence: Synthetic oligonucleotide
cucgcucacgaagguuccu

SEQ ID NO: 2243749 - RNA, 19 nt, Artificial Sequence
  Description of Artificial Sequence: Synthetic oligonucleotide
gagcacuguagggcagguu

SEQ ID NO: 2243750 - RNA, 19 nt, Artificial Sequence
  Description of Artificial Sequence: Synthetic oligonucleotide
ggugagccuaaggggcacu

SEQ ID NO: 2243751 - RNA, 19 nt, Artificial Sequence
  Description of Artificial Sequence: Synthetic oligonucleotide
ccaauucgccagccuuucu

SEQ ID NO: 2243752 - RNA, 19 nt, Artificial Sequence
  Description of Artificial Sequence: Synthetic oligonucleotide
ccuucccggcccgcuuuuc

SEQ ID NO: 2243753 - RNA, 19 nt, Artificial Sequence
  Description of Artificial Sequence: Synthetic oligonucleotide
cgcacacagccuguagcaa

SEQ ID NO: 2243754 - RNA, 19 nt, Artificial Sequence
  Description of Artificial Sequence: Synthetic oligonucleotide
gugccacccucaagguguu

SEQ ID NO: 2243755 - RNA, 19 nt, Artificial Sequence
  Description of Artificial Sequence: Synthetic oligonucleotide
ccaagcccaaagggaugcu

SEQ ID NO: 2243756 - RNA, 19 nt, Artificial Sequence
  Description of Artificial Sequence: Synthetic oligonucleotide
cgagcacuguagggcaggu

SEQ ID NO: 2243757 - RNA, 19 nt, Artificial Sequence
  Description of Artificial Sequence: Synthetic oligonucleotide
cccugggagguggcacauu

SEQ ID NO: 2243758 - RNA, 19 nt, Artificial Sequence
  Description of Artificial Sequence: Synthetic oligonucleotide
uacaugaucacacccacgg

SEQ ID NO: 2243759 - RNA, 19 nt, Artificial Sequence
  Description of Artificial Sequence: Synthetic oligonucleotide
uuucaagucacaguggacg

SEQ ID NO: 2243760 - RNA, 19 nt, Artificial Sequence
  Description of Artificial Sequence: Synthetic oligonucleotide
gaugaugcgagcaaagccg

SEQ ID NO: 2243761 - RNA, 19 nt, Artificial Sequence
  Description of Artificial Sequence: Synthetic oligonucleotide
ugcgugaugaggaauuugg

SEQ ID NO: 2243762 - RNA, 19 nt, Artificial Sequence
  Description of Artificial Sequence: Synthetic oligonucleotide
ugauauaucgcucacccau

SEQ ID NO: 2243763 - RNA, 19 nt, Artificial Sequence
  Description of Artificial Sequence: Synthetic oligonucleotide
ucacaaacugaucccagcg

SEQ ID NO: 2243764 - RNA, 19 nt, Artificial Sequence
  Description of Artificial Sequence: Synthetic oligonucleotide
ucucgugcgugauauaucg

SEQ ID NO: 2243765 - RNA, 19 nt, Artificial Sequence
  Description of Artificial Sequence: Synthetic oligonucleotide
aaaugggucggcugaugcc

SEQ ID NO: 2243766 - RNA, 19 nt, Artificial Sequence
  Description of Artificial Sequence: Synthetic oligonucleotide
accacgaauaccuuucggg

SEQ ID NO: 2243767 - RNA, 19 nt, Artificial Sequence
  Description of Artificial Sequence: Synthetic oligonucleotide
uucuccaucaccacgaaua

SEQ ID NO: 2243768 - RNA, 19 nt, Artificial Sequence
  Description of Artificial Sequence: Synthetic oligonucleotide
auaucgcucacccaucuuc

SEQ ID NO: 2243769 - RNA, 19 nt, Artificial Sequence
  Description of Artificial Sequence: Synthetic oligonucleotide
agaacaguucgcuucgggg

SEQ ID NO: 2243770 - RNA, 19 nt, Artificial Sequence
  Description of Artificial Sequence: Synthetic oligonucleotide
ucgaacaugcauucgaggu

SEQ ID NO: 2243771 - RNA, 19 nt, Artificial Sequence
  Description of Artificial Sequence: Synthetic oligonucleotide
aauuuggugaggcgcucgg

SEQ ID NO: 2243772 - RNA, 19 nt, Artificial Sequence
  Description of Artificial Sequence: Synthetic oligonucleotide
ucgagguucacgaucccgg

SEQ ID NO: 2243773 - RNA, 19 nt, Artificial Sequence
  Description of Artificial Sequence: Synthetic oligonucleotide
cauucgagguucacgaucc

SEQ ID NO: 2243774 - RNA, 19 nt, Artificial Sequence
  Description of Artificial Sequence: Synthetic oligonucleotide
aguuuguguaggaagcugc

SEQ ID NO: 2243775 - RNA, 19 nt, Artificial Sequence
  Description of Artificial Sequence: Synthetic oligonucleotide
caucccuccagccuuaucc

SEQ ID NO: 2243776 - RNA, 19 nt, Artificial Sequence
  Description of Artificial Sequence: Synthetic oligonucleotide
gaugcugauccguucggcg

SEQ ID NO: 2243777 - RNA, 19 nt, Artificial Sequence
  Description of Artificial Sequence: Synthetic oligonucleotide
uccucauugaaggggaacg

SEQ ID NO: 2243778 - RNA, 19 nt, Artificial Sequence
  Description of Artificial Sequence: Synthetic oligonucleotide
uucggggucucgaacaugc

SEQ ID NO: 2243779 - RNA, 19 nt, Artificial Sequence
  Description of Artificial Sequence: Synthetic oligonucleotide
cugacguacaugaucacac

SEQ ID NO: 2243780 - RNA, 19 nt, Artificial Sequence
  Description of Artificial Sequence: Synthetic oligonucleotide
acgaauaccuuucgggguc

SEQ ID NO: 2243781 - RNA, 19 nt, Artificial Sequence
  Description of Artificial Sequence: Synthetic oligonucleotide
uacuccuguaaccaggggu

SEQ ID NO: 2243782 - RNA, 19 nt, Artificial Sequence
  Description of Artificial Sequence: Synthetic oligonucleotide
ucucgaacaugcauucgag

SEQ ID NO: 2243783 - RNA, 19 nt, Artificial Sequence
  Description of Artificial Sequence: Synthetic oligonucleotide
gaaaugggucggcugaugc

SEQ ID NO: 2243784 - RNA, 19 nt, Artificial Sequence
  Description of Artificial Sequence: Synthetic oligonucleotide
gacguacaugaucacaccc

SEQ ID NO: 2243785 - RNA, 19 nt, Artificial Sequence
  Description of Artificial Sequence: Synthetic oligonucleotide
augagauguggcuccaggg

SEQ ID NO: 2243786 - RNA, 19 nt, Artificial Sequence
  Description of Artificial Sequence: Synthetic oligonucleotide
gaggaauuuggugaggcgc

SEQ ID NO: 2243787 - RNA, 19 nt, Artificial Sequence
  Description of Artificial Sequence: Synthetic oligonucleotide
uucgcuucggggauagugc

SEQ ID NO: 2243788 - RNA, 19 nt, Artificial Sequence
  Description of Artificial Sequence: Synthetic oligonucleotide
ucacaguggacgauguucu

SEQ ID NO: 2243789 - RNA, 19 nt, Artificial Sequence
  Description of Artificial Sequence: Synthetic oligonucleotide
aaagccgaagucacacagc

SEQ ID NO: 2243790 - RNA, 19 nt, Artificial Sequence
  Description of Artificial Sequence: Synthetic oligonucleotide
uccaacauguccccgugca

SEQ ID NO: 2243791 - RNA, 19 nt, Artificial Sequence
  Description of Artificial Sequence: Synthetic oligonucleotide
ucugguacuccuguaacca

SEQ ID NO: 2243792 - RNA, 19 nt, Artificial Sequence
  Description of Artificial Sequence: Synthetic oligonucleotide
caaagccgaagucacacag

SEQ ID NO: 2243793 - RNA, 19 nt, Artificial Sequence
  Description of Artificial Sequence: Synthetic oligonucleotide
augcauucgagguucacga

SEQ ID NO: 2243794 - RNA, 19 nt, Artificial Sequence
  Description of Artificial Sequence: Synthetic oligonucleotide
uucucaccgaugaugcgag

SEQ ID NO: 2243795 - RNA, 19 nt, Artificial Sequence
  Description of Artificial Sequence: Synthetic oligonucleotide
uguaggaagcugcuucccc

SEQ ID NO: 2243796 - RNA, 19 nt, Artificial Sequence
  Description of Artificial Sequence: Synthetic oligonucleotide
uacauaaaggcugcguucu

SEQ ID NO: 2243797 - RNA, 19 nt, Artificial Sequence
  Description of Artificial Sequence: Synthetic oligonucleotide
augaucacacccacggacc

SEQ ID NO: 2243798 - RNA, 19 nt, Artificial Sequence
  Description of Artificial Sequence: Synthetic oligonucleotide
agcguuuccgcaucuucac

SEQ ID NO: 2243799 - RNA, 19 nt, Artificial Sequence
  Description of Artificial Sequence: Synthetic oligonucleotide
uaucgcucacccaucuucc

SEQ ID NO: 2243800 - RNA, 19 nt, Artificial Sequence
  Description of Artificial Sequence: Synthetic oligonucleotide
ugguugagcagcaccucgg

SEQ ID NO: 2243801 - RNA, 19 nt, Artificial Sequence
  Description of Artificial Sequence: Synthetic oligonucleotide
gaacaguucgcuucgggga

SEQ ID NO: 2243802 - RNA, 19 nt, Artificial Sequence
  Description of Artificial Sequence: Synthetic oligonucleotide
uccaaaggaagcagcucag

SEQ ID NO: 2243803 - RNA, 19 nt, Artificial Sequence
  Description of Artificial Sequence: Synthetic oligonucleotide
uucaccuguaacagguugu

SEQ ID NO: 2243804 - RNA, 19 nt, Artificial Sequence
  Description of Artificial Sequence: Synthetic oligonucleotide
ucgggcgccagguaggcgg

SEQ ID NO: 2243805 - RNA, 19 nt, Artificial Sequence
  Description of Artificial Sequence: Synthetic oligonucleotide
uucaagucacaguggacga

SEQ ID NO: 2243806 - RNA, 19 nt, Artificial Sequence
  Description of Artificial Sequence: Synthetic oligonucleotide
aucaccacgaauaccuuuc

SEQ ID NO: 2243807 - RNA, 19 nt, Artificial Sequence
  Description of Artificial Sequence: Synthetic oligonucleotide
uuguaacccugguugagca

SEQ ID NO: 2243808 - RNA, 19 nt, Artificial Sequence
  Description of Artificial Sequence: Synthetic oligonucleotide
ucaccacgaauaccuuucg

SEQ ID NO: 2243809 - RNA, 19 nt, Artificial Sequence
  Description of Artificial Sequence: Synthetic oligonucleotide
caugcauucgagguucacg

SEQ ID NO: 2243810 - RNA, 19 nt, Artificial Sequence
  Description of Artificial Sequence: Synthetic oligonucleotide
acccugguugagcagcacc

SEQ ID NO: 2243811 - RNA, 19 nt, Artificial Sequence
  Description of Artificial Sequence: Synthetic oligonucleotide
gauccguucggcgaguccc

SEQ ID NO: 2243812 - RNA, 19 nt, Artificial Sequence
  Description of Artificial Sequence: Synthetic oligonucleotide
aacaguucgcuucggggau

SEQ ID NO: 2243813 - RNA, 19 nt, Artificial Sequence
  Description of Artificial Sequence: Synthetic oligonucleotide
auaaaggcugcguucugga

SEQ ID NO: 2243814 - RNA, 19 nt, Artificial Sequence
  Description of Artificial Sequence: Synthetic oligonucleotide
cucgaacaugcauucgagg

SEQ ID NO: 2243815 - RNA, 19 nt, Artificial Sequence
  Description of Artificial Sequence: Synthetic oligonucleotide
agccuuauccaguuugugu

SEQ ID NO: 2243816 - RNA, 19 nt, Artificial Sequence
  Description of Artificial Sequence: Synthetic oligonucleotide
aauaccuuucggggucucg

SEQ ID NO: 2243817 - RNA, 19 nt, Artificial Sequence
  Description of Artificial Sequence: Synthetic oligonucleotide
ugcaggugucucaaggcca

SEQ ID NO: 2243818 - RNA, 19 nt, Artificial Sequence
  Description of Artificial Sequence: Synthetic oligonucleotide
cuggucauugauguccucg

SEQ ID NO: 2243819 - RNA, 19 nt, Artificial Sequence
  Description of Artificial Sequence: Synthetic oligonucleotide
gaugcgagcaaagccgaag

SEQ ID NO: 2243820 - RNA, 19 nt, Artificial Sequence
  Description of Artificial Sequence: Synthetic oligonucleotide
gcgguuguaacccugguug

SEQ ID NO: 2243821 - RNA, 19 nt, Artificial Sequence
  Description of Artificial Sequence: Synthetic oligonucleotide
caggaugcugauccguucg

SEQ ID NO: 2243822 - RNA, 19 nt, Artificial Sequence
  Description of Artificial Sequence: Synthetic oligonucleotide
caucucgugguccugcggc

SEQ ID NO: 2243823 - RNA, 19 nt, Artificial Sequence
  Description of Artificial Sequence: Synthetic oligonucleotide
uuauccaguuuguguagga

SEQ ID NO: 2243824 - RNA, 19 nt, Artificial Sequence
  Description of Artificial Sequence: Synthetic oligonucleotide
auauaucgcucacccaucu

SEQ ID NO: 2243825 - RNA, 19 nt, Artificial Sequence
  Description of Artificial Sequence: Synthetic oligonucleotide
gagagacuuguccacgcug

SEQ ID NO: 2243826 - RNA, 19 nt, Artificial Sequence
  Description of Artificial Sequence: Synthetic oligonucleotide
ucgcuucggggauagugcg

SEQ ID NO: 2243827 - RNA, 19 nt, Artificial Sequence
  Description of Artificial Sequence: Synthetic oligonucleotide
ugacguacaugaucacacc

SEQ ID NO: 2243828 - RNA, 19 nt, Artificial Sequence
  Description of Artificial Sequence: Synthetic oligonucleotide
aagccggcccuucucacug

SEQ ID NO: 2243829 - RNA, 19 nt, Artificial Sequence
  Description of Artificial Sequence: Synthetic oligonucleotide
cacgcuguagcguuuccgc

SEQ ID NO: 2243830 - RNA, 19 nt, Artificial Sequence
  Description of Artificial Sequence: Synthetic oligonucleotide
guacauaaaggcugcguuc

SEQ ID NO: 2243831 - RNA, 19 nt, Artificial Sequence
  Description of Artificial Sequence: Synthetic oligonucleotide
cuucaccuguaacagguug

SEQ ID NO: 2243832 - RNA, 19 nt, Artificial Sequence
  Description of Artificial Sequence: Synthetic oligonucleotide
cacaaacugaucccagcgc

SEQ ID NO: 2243833 - RNA, 19 nt, Artificial Sequence
  Description of Artificial Sequence: Synthetic oligonucleotide
uucgagguucacgaucccg

SEQ ID NO: 2243834 - RNA, 19 nt, Artificial Sequence
  Description of Artificial Sequence: Synthetic oligonucleotide
ccucacaggaugcugaucc

SEQ ID NO: 2243835 - RNA, 19 nt, Artificial Sequence
  Description of Artificial Sequence: Synthetic oligonucleotide
agagucaucccuccagccu

SEQ ID NO: 2243836 - RNA, 19 nt, Artificial Sequence
  Description of Artificial Sequence: Synthetic oligonucleotide
cuuauccaguuuguguagg

SEQ ID NO: 2243837 - RNA, 19 nt, Artificial Sequence
  Description of Artificial Sequence: Synthetic oligonucleotide
gagucccugcaucucgugg

SEQ ID NO: 2243838 - RNA, 19 nt, Artificial Sequence
  Description of Artificial Sequence: Synthetic oligonucleotide
agguucacgaucccggggu

SEQ ID NO: 2243839 - RNA, 19 nt, Artificial Sequence
  Description of Artificial Sequence: Synthetic oligonucleotide
aggggaacgugccacugag

SEQ ID NO: 2243840 - RNA, 19 nt, Artificial Sequence
  Description of Artificial Sequence: Synthetic oligonucleotide
gucacaaacugaucccagc

SEQ ID NO: 2243841 - RNA, 19 nt, Artificial Sequence
  Description of Artificial Sequence: Synthetic oligonucleotide
cugguugagcagcaccucg

SEQ ID NO: 2243842 - RNA, 19 nt, Artificial Sequence
  Description of Artificial Sequence: Synthetic oligonucleotide
acggaccacauguccagcg

SEQ ID NO: 2243843 - RNA, 19 nt, Artificial Sequence
  Description of Artificial Sequence: Synthetic oligonucleotide
aucgcucacccaucuuccc

SEQ ID NO: 2243844 - RNA, 19 nt, Artificial Sequence
  Description of Artificial Sequence: Synthetic oligonucleotide
gugcgcaggaguccaaagg

SEQ ID NO: 2243845 - RNA, 19 nt, Artificial Sequence
  Description of Artificial Sequence: Synthetic oligonucleotide
guaacccugguugagcagc

SEQ ID NO: 2243846 - RNA, 19 nt, Artificial Sequence
  Description of Artificial Sequence: Synthetic oligonucleotide
aggucgauggcuccagaug

SEQ ID NO: 2243847 - RNA, 19 nt, Artificial Sequence
  Description of Artificial Sequence: Synthetic oligonucleotide
gagguucacgaucccgggg

SEQ ID NO: 2243848 - RNA, 19 nt, Artificial Sequence
  Description of Artificial Sequence: Synthetic oligonucleotide
uggucauugauguccucgu

SEQ ID NO: 2243849 - RNA, 19 nt, Artificial Sequence
  Description of Artificial Sequence: Synthetic oligonucleotide
aaacugaucccagcgcgca

SEQ ID NO: 2243850 - RNA, 19 nt, Artificial Sequence
  Description of Artificial Sequence: Synthetic oligonucleotide
cgugauauaucgcucaccc

SEQ ID NO: 2243851 - RNA, 19 nt, Artificial Sequence
  Description of Artificial Sequence: Synthetic oligonucleotide
agaggaucaucuccaacau

SEQ ID NO: 2243852 - RNA, 19 nt, Artificial Sequence
  Description of Artificial Sequence: Synthetic oligonucleotide
aaagccggcccuucucacu

SEQ ID NO: 2243853 - RNA, 19 nt, Artificial Sequence
  Description of Artificial Sequence: Synthetic oligonucleotide
ccacgaauaccuuucgggg

SEQ ID NO: 2243854 - RNA, 19 nt, Artificial Sequence
  Description of Artificial Sequence: Synthetic oligonucleotide
gguuucaagucacagugga

SEQ ID NO: 2243855 - RNA, 19 nt, Artificial Sequence
  Description of Artificial Sequence: Synthetic oligonucleotide
gucucgaacaugcauucga

SEQ ID NO: 2243856 - RNA, 19 nt, Artificial Sequence
  Description of Artificial Sequence: Synthetic oligonucleotide
aggaugcugauccguucgg

SEQ ID NO: 2243857 - RNA, 19 nt, Artificial Sequence
  Description of Artificial Sequence: Synthetic oligonucleotide
gucugguacuccuguaacc

SEQ ID NO: 2243858 - RNA, 19 nt, Artificial Sequence
  Description of Artificial Sequence: Synthetic oligonucleotide
guuguaacccugguugagc

SEQ ID NO: 2243859 - RNA, 19 nt, Artificial Sequence
  Description of Artificial Sequence: Synthetic oligonucleotide
ucucggaggucaagccacg

SEQ ID NO: 2243860 - RNA, 19 nt, Artificial Sequence
  Description of Artificial Sequence: Synthetic oligonucleotide
aacauguccccgugcaguu

SEQ ID NO: 2243861 - RNA, 19 nt, Artificial Sequence
  Description of Artificial Sequence: Synthetic oligonucleotide
auucgagguucacgauccc

SEQ ID NO: 2243862 - RNA, 19 nt, Artificial Sequence
  Description of Artificial Sequence: Synthetic oligonucleotide
ugcaucucgugguccugcg

SEQ ID NO: 2243863 - RNA, 19 nt, Artificial Sequence
  Description of Artificial Sequence: Synthetic oligonucleotide
ugccggagcaugugguggg

SEQ ID NO: 2243864 - RNA, 19 nt, Artificial Sequence
  Description of Artificial Sequence: Synthetic oligonucleotide
aguccaaaggaagcagcuc

SEQ ID NO: 2243865 - RNA, 19 nt, Artificial Sequence
  Description of Artificial Sequence: Synthetic oligonucleotide
aaggggaacgugccacuga

SEQ ID NO: 2243866 - RNA, 19 nt, Artificial Sequence
  Description of Artificial Sequence: Synthetic oligonucleotide
gauagugcgcaggagucca

SEQ ID NO: 2243867 - RNA, 19 nt, Artificial Sequence
  Description of Artificial Sequence: Synthetic oligonucleotide
augcgagcaaagccgaagu

SEQ ID NO: 2243868 - RNA, 19 nt, Artificial Sequence
  Description of Artificial Sequence: Synthetic oligonucleotide
ucaccgaugaugcgagcaa

SEQ ID NO: 2243869 - RNA, 19 nt, Artificial Sequence
  Description of Artificial Sequence: Synthetic oligonucleotide
ugccgcagccgucuccugg

SEQ ID NO: 2243870 - RNA, 19 nt, Artificial Sequence
  Description of Artificial Sequence: Synthetic oligonucleotide
caagucacaguggacgaug

SEQ ID NO: 2243871 - RNA, 19 nt, Artificial Sequence
  Description of Artificial Sequence: Synthetic oligonucleotide
guucgcuucggggauagug

SEQ ID NO: 2243872 - RNA, 19 nt, Artificial Sequence
  Description of Artificial Sequence: Synthetic oligonucleotide
agugcgcaggaguccaaag

SEQ ID NO: 2243873 - RNA, 19 nt, Artificial Sequence
  Description of Artificial Sequence: Synthetic oligonucleotide
uccccgugcaguuucucca

SEQ ID NO: 2243874 - RNA, 19 nt, Artificial Sequence
  Description of Artificial Sequence: Synthetic oligonucleotide
gauauaucgcucacccauc

SEQ ID NO: 2243875 - RNA, 19 nt, Artificial Sequence
  Description of Artificial Sequence: Synthetic oligonucleotide
guucuugaagugcaggugu

SEQ ID NO: 2243876 - RNA, 19 nt, Artificial Sequence
  Description of Artificial Sequence: Synthetic oligonucleotide
uucggggauagugcgcagg

SEQ ID NO: 2243877 - RNA, 19 nt, Artificial Sequence
  Description of Artificial Sequence: Synthetic oligonucleotide
ucacucucgugcgugauau

SEQ ID NO: 2243878 - RNA, 19 nt, Artificial Sequence
  Description of Artificial Sequence: Synthetic oligonucleotide
gcaucuucaccuguaacag

SEQ ID NO: 2243879 - RNA, 19 nt, Artificial Sequence
  Description of Artificial Sequence: Synthetic oligonucleotide
cuucucacuggagaggauc

SEQ ID NO: 2243880 - RNA, 19 nt, Artificial Sequence
  Description of Artificial Sequence: Synthetic oligonucleotide
augcugauccguucggcga

SEQ ID NO: 2243881 - RNA, 19 nt, Artificial Sequence
  Description of Artificial Sequence: Synthetic oligonucleotide
gaucccagcgcgcaucguc

SEQ ID NO: 2243882 - RNA, 19 nt, Artificial Sequence
  Description of Artificial Sequence: Synthetic oligonucleotide
gugcccaccaccgagcgcc

SEQ ID NO: 2243883 - RNA, 19 nt, Artificial Sequence
  Description of Artificial Sequence: Synthetic oligonucleotide
acugaucccagcgcgcauc

SEQ ID NO: 2243884 - RNA, 19 nt, Artificial Sequence
  Description of Artificial Sequence: Synthetic oligonucleotide
ucagagcggggaaucucug

SEQ ID NO: 2243885 - RNA, 19 nt, Artificial Sequence
  Description of Artificial Sequence: Synthetic oligonucleotide
ucaagccacgucugguacu

SEQ ID NO: 2243886 - RNA, 19 nt, Artificial Sequence
  Description of Artificial Sequence: Synthetic oligonucleotide
uuguccacgcuguagcguu

SEQ ID NO: 2243887 - RNA, 19 nt, Artificial Sequence
  Description of Artificial Sequence: Synthetic oligonucleotide
ugaaggggaacgugccacu

SEQ ID NO: 2243888 - RNA, 19 nt, Artificial Sequence
  Description of Artificial Sequence: Synthetic oligonucleotide
uuuccgcaucuucaccugu

SEQ ID NO: 2243889 - RNA, 19 nt, Artificial Sequence
  Description of Artificial Sequence: Synthetic oligonucleotide
guuuccgcaucuucaccug

SEQ ID NO: 2243890 - RNA, 19 nt, Artificial Sequence
  Description of Artificial Sequence: Synthetic oligonucleotide
agcggggaaucucuggccu

SEQ ID NO: 2243891 - RNA, 19 nt, Artificial Sequence
  Description of Artificial Sequence: Synthetic oligonucleotide
uaacccugguugagcagca

SEQ ID NO: 2243892 - RNA, 19 nt, Artificial Sequence
  Description of Artificial Sequence: Synthetic oligonucleotide
uucacgaucccggggugcc

SEQ ID NO: 2243893 - RNA, 19 nt, Artificial Sequence
  Description of Artificial Sequence: Synthetic oligonucleotide
cugguacuccuguaaccag

SEQ ID NO: 2243894 - RNA, 19 nt, Artificial Sequence
  Description of Artificial Sequence: Synthetic oligonucleotide
agaagggcgccacccaggu

SEQ ID NO: 2243895 - RNA, 19 nt, Artificial Sequence
  Description of Artificial Sequence: Synthetic oligonucleotide
uucggcgagucccugcauc

SEQ ID NO: 2243896 - RNA, 19 nt, Artificial Sequence
  Description of Artificial Sequence: Synthetic oligonucleotide
cagaagggcgccacccagg

SEQ ID NO: 2243897 - RNA, 19 nt, Artificial Sequence
  Description of Artificial Sequence: Synthetic oligonucleotide
uauccaguuuguguaggaa

SEQ ID NO: 2243898 - RNA, 19 nt, Artificial Sequence
  Description of Artificial Sequence: Synthetic oligonucleotide
cagagcggggaaucucugg

SEQ ID NO: 2243899 - RNA, 19 nt, Artificial Sequence
  Description of Artificial Sequence: Synthetic oligonucleotide
agacuuguccacgcuguag

SEQ ID NO: 2243900 - RNA, 19 nt, Artificial Sequence
  Description of Artificial Sequence: Synthetic oligonucleotide
ugauccguucggcgagucc

SEQ ID NO: 2243901 - RNA, 19 nt, Artificial Sequence
  Description of Artificial Sequence: Synthetic oligonucleotide
gaagugcaggugucucaag

SEQ ID NO: 2243902 - RNA, 19 nt, Artificial Sequence
  Description of Artificial Sequence: Synthetic oligonucleotide
caguggacgauguucuuga

SEQ ID NO: 2243903 - RNA, 19 nt, Artificial Sequence
  Description of Artificial Sequence: Synthetic oligonucleotide
acauaaaggcugcguucug

SEQ ID NO: 2243904 - RNA, 19 nt, Artificial Sequence
  Description of Artificial Sequence: Synthetic oligonucleotide
ugcgagcaaagccgaaguc

SEQ ID NO: 2243905 - RNA, 19 nt, Artificial Sequence
  Description of Artificial Sequence: Synthetic oligonucleotide
acucucgugcgugauauau

SEQ ID NO: 2243906 - RNA, 19 nt, Artificial Sequence
  Description of Artificial Sequence: Synthetic oligonucleotide
cugaucccagcgcgcaucg

SEQ ID NO: 2243907 - RNA, 19 nt, Artificial Sequence
  Description of Artificial Sequence: Synthetic oligonucleotide
gagcggggaaucucuggcc

SEQ ID NO: 2243908 - RNA, 19 nt, Artificial Sequence
  Description of Artificial Sequence: Synthetic oligonucleotide
gaggcgcucgggaaagccg

SEQ ID NO: 2243909 - RNA, 19 nt, Artificial Sequence
  Description of Artificial Sequence: Synthetic oligonucleotide
uccagcgagcgguuguaac

SEQ ID NO: 2243910 - RNA, 19 nt, Artificial Sequence
  Description of Artificial Sequence: Synthetic oligonucleotide
ucggcgagucccugcaucu

SEQ ID NO: 2243911 - RNA, 19 nt, Artificial Sequence
  Description of Artificial Sequence: Synthetic oligonucleotide
acaugaucacacccacgga

SEQ ID NO: 2243912 - RNA, 19 nt, Artificial Sequence
  Description of Artificial Sequence: Synthetic oligonucleotide
gcaucgucacucucgugcg

SEQ ID NO: 2243913 - RNA, 19 nt, Artificial Sequence
  Description of Artificial Sequence: Synthetic oligonucleotide
cauguccccgugcaguuuc

SEQ ID NO: 2243914 - RNA, 19 nt, Artificial Sequence
  Description of Artificial Sequence: Synthetic oligonucleotide
gaaagccggcccuucucac

SEQ ID NO: 2243915 - RNA, 19 nt, Artificial Sequence
  Description of Artificial Sequence: Synthetic oligonucleotide
gugcgugauauaucgcuca

SEQ ID NO: 2243916 - RNA, 19 nt, Artificial Sequence
  Description of Artificial Sequence: Synthetic oligonucleotide
ugaggcgcucgggaaagcc

SEQ ID NO: 2243917 - RNA, 19 nt, Artificial Sequence
  Description of Artificial Sequence: Synthetic oligonucleotide
uccgcaucuucaccuguaa

SEQ ID NO: 2243918 - RNA, 19 nt, Artificial Sequence
  Description of Artificial Sequence: Synthetic oligonucleotide
uggcgcucugucacaaacu

SEQ ID NO: 2243919 - RNA, 19 nt, Artificial Sequence
  Description of Artificial Sequence: Synthetic oligonucleotide
ucuccgguuucaagucaca

SEQ ID NO: 2243920 - RNA, 19 nt, Artificial Sequence
  Description of Artificial Sequence: Synthetic oligonucleotide
cagcgagcgguuguaaccc

SEQ ID NO: 2243921 - RNA, 19 nt, Artificial Sequence
  Description of Artificial Sequence: Synthetic oligonucleotide
auaccuuucggggucucga

SEQ ID NO: 2243922 - RNA, 19 nt, Artificial Sequence
  Description of Artificial Sequence: Synthetic oligonucleotide
ucggaggucaagccacguc

SEQ ID NO: 2243923 - RNA, 19 nt, Artificial Sequence
  Description of Artificial Sequence: Synthetic oligonucleotide
uaaaggcugcguucuggau

SEQ ID NO: 2243924 - RNA, 19 nt, Artificial Sequence
  Description of Artificial Sequence: Synthetic oligonucleotide
cacguucuccgguuucaag

SEQ ID NO: 2243925 - RNA, 19 nt, Artificial Sequence
  Description of Artificial Sequence: Synthetic oligonucleotide
uguccucguccucauugaa

SEQ ID NO: 2243926 - RNA, 19 nt, Artificial Sequence
  Description of Artificial Sequence: Synthetic oligonucleotide
aucgucacucucgugcgug

SEQ ID NO: 2243927 - RNA, 19 nt, Artificial Sequence
  Description of Artificial Sequence: Synthetic oligonucleotide
uauaucgcucacccaucuu

SEQ ID NO: 2243928 - RNA, 19 nt, Artificial Sequence
  Description of Artificial Sequence: Synthetic oligonucleotide
gaagcagcucagagcgggg

SEQ ID NO: 2243929 - RNA, 19 nt, Artificial Sequence
  Description of Artificial Sequence: Synthetic oligonucleotide
ggcgagucccugcaucucg

SEQ ID NO: 2243930 - RNA, 19 nt, Artificial Sequence
  Description of Artificial Sequence: Synthetic oligonucleotide
guaaccagggguggcugag

SEQ ID NO: 2243931 - RNA, 19 nt, Artificial Sequence
  Description of Artificial Sequence: Synthetic oligonucleotide
ccagcgagcgguuguaacc

SEQ ID NO: 2243932 - RNA, 19 nt, Artificial Sequence
  Description of Artificial Sequence: Synthetic oligonucleotide
acaugcauucgagguucac

SEQ ID NO: 2243933 - RNA, 19 nt, Artificial Sequence
  Description of Artificial Sequence: Synthetic oligonucleotide
auguccagcgagcgguugu

SEQ ID NO: 2243934 - RNA, 19 nt, Artificial Sequence
  Description of Artificial Sequence: Synthetic oligonucleotide
cgaugaugcgagcaaagcc

SEQ ID NO: 2243935 - RNA, 19 nt, Artificial Sequence
  Description of Artificial Sequence: Synthetic oligonucleotide
cucgugcgugauauaucgc

SEQ ID NO: 2243936 - RNA, 19 nt, Artificial Sequence
  Description of Artificial Sequence: Synthetic oligonucleotide
accgaugaugcgagcaaag

SEQ ID NO: 2243937 - RNA, 19 nt, Artificial Sequence
  Description of Artificial Sequence: Synthetic oligonucleotide
cucucgugcgugauauauc

SEQ ID NO: 2243938 - RNA, 19 nt, Artificial Sequence
  Description of Artificial Sequence: Synthetic oligonucleotide
gaucccggggugccggagc

SEQ ID NO: 2243939 - RNA, 19 nt, Artificial Sequence
  Description of Artificial Sequence: Synthetic oligonucleotide
gugccggagcauguggugg

SEQ ID NO: 2243940 - RNA, 19 nt, Artificial Sequence
  Description of Artificial Sequence: Synthetic oligonucleotide
ccuuauccaguuuguguag

SEQ ID NO: 2243941 - RNA, 19 nt, Artificial Sequence
  Description of Artificial Sequence: Synthetic oligonucleotide
aacccugguugagcagcac

SEQ ID NO: 2243942 - RNA, 19 nt, Artificial Sequence
  Description of Artificial Sequence: Synthetic oligonucleotide
gugauauaucgcucaccca

SEQ ID NO: 2243943 - RNA, 19 nt, Artificial Sequence
  Description of Artificial Sequence: Synthetic oligonucleotide
guccccgugcaguuucucc

SEQ ID NO: 2243944 - RNA, 19 nt, Artificial Sequence
  Description of Artificial Sequence: Synthetic oligonucleotide
uuccgcaucuucaccugua

SEQ ID NO: 2243945 - RNA, 19 nt, Artificial Sequence
  Description of Artificial Sequence: Synthetic oligonucleotide
gcauucgagguucacgauc

SEQ ID NO: 2243946 - RNA, 19 nt, Artificial Sequence
  Description of Artificial Sequence: Synthetic oligonucleotide
cuccgguuucaagucacag

SEQ ID NO: 2243947 - RNA, 19 nt, Artificial Sequence
  Description of Artificial Sequence: Synthetic oligonucleotide
ucuucaccuguaacagguu

SEQ ID NO: 2243948 - RNA, 19 nt, Artificial Sequence
  Description of Artificial Sequence: Synthetic oligonucleotide
aacugaucccagcgcgcau

SEQ ID NO: 2243949 - RNA, 19 nt, Artificial Sequence
  Description of Artificial Sequence: Synthetic oligonucleotide
caagccacgucugguacuc

SEQ ID NO: 2243950 - RNA, 19 nt, Artificial Sequence
  Description of Artificial Sequence: Synthetic oligonucleotide
ggaguccaaaggaagcagc

SEQ ID NO: 2243951 - RNA, 19 nt, Artificial Sequence
  Description of Artificial Sequence: Synthetic oligonucleotide
ucaccuguaacagguuguu

SEQ ID NO: 2243952 - RNA, 19 nt, Artificial Sequence
  Description of Artificial Sequence: Synthetic oligonucleotide
ugaggucgauggcuccaga

SEQ ID NO: 2243953 - RNA, 19 nt, Artificial Sequence
  Description of Artificial Sequence: Synthetic oligonucleotide
ugcauucgagguucacgau

SEQ ID NO: 2243954 - RNA, 19 nt, Artificial Sequence
  Description of Artificial Sequence: Synthetic oligonucleotide
augaugcgagcaaagccga

SEQ ID NO: 2243955 - RNA, 19 nt, Artificial Sequence
  Description of Artificial Sequence: Synthetic oligonucleotide
ggacgauguucuugaagug

SEQ ID NO: 2243956 - RNA, 19 nt, Artificial Sequence
  Description of Artificial Sequence: Synthetic oligonucleotide
ugaggcugacguacaugau

SEQ ID NO: 2243957 - RNA, 19 nt, Artificial Sequence
  Description of Artificial Sequence: Synthetic oligonucleotide
gguuguaacccugguugag

SEQ ID NO: 2243958 - RNA, 19 nt, Artificial Sequence
  Description of Artificial Sequence: Synthetic oligonucleotide
ucaagucacaguggacgau

SEQ ID NO: 2243959 - RNA, 19 nt, Artificial Sequence
  Description of Artificial Sequence: Synthetic oligonucleotide
uaggcgggugugcccacca

SEQ ID NO: 2243960 - RNA, 19 nt, Artificial Sequence
  Description of Artificial Sequence: Synthetic oligonucleotide
ugugcccaccaccgagcgc

SEQ ID NO: 2243961 - RNA, 19 nt, Artificial Sequence
  Description of Artificial Sequence: Synthetic oligonucleotide
acgcuguagcguuuccgca

SEQ ID NO: 2243962 - RNA, 19 nt, Artificial Sequence
  Description of Artificial Sequence: Synthetic oligonucleotide
uaccuuucggggucucgaa

SEQ ID NO: 2243963 - RNA, 19 nt, Artificial Sequence
  Description of Artificial Sequence: Synthetic oligonucleotide
cucaccgaugaugcgagca

SEQ ID NO: 2243964 - RNA, 19 nt, Artificial Sequence
  Description of Artificial Sequence: Synthetic oligonucleotide
ugaugcgagcaaagccgaa

SEQ ID NO: 2243965 - RNA, 19 nt, Artificial Sequence
  Description of Artificial Sequence: Synthetic oligonucleotide
agcgcgcaucgucacucuc

SEQ ID NO: 2243966 - RNA, 19 nt, Artificial Sequence
  Description of Artificial Sequence: Synthetic oligonucleotide
agguuguugaugaggucga

SEQ ID NO: 2243967 - RNA, 19 nt, Artificial Sequence
  Description of Artificial Sequence: Synthetic oligonucleotide
gguccugcggcagaagggc

SEQ ID NO: 2243968 - RNA, 19 nt, Artificial Sequence
  Description of Artificial Sequence: Synthetic oligonucleotide
uuucggggucucgaacaug

SEQ ID NO: 2243969 - RNA, 19 nt, Artificial Sequence
  Description of Artificial Sequence: Synthetic oligonucleotide
agcagcacguucuccgguu

SEQ ID NO: 2243970 - RNA, 19 nt, Artificial Sequence
  Description of Artificial Sequence: Synthetic oligonucleotide
cuccaacauguccccgugc

SEQ ID NO: 2243971 - RNA, 19 nt, Artificial Sequence
  Description of Artificial Sequence: Synthetic oligonucleotide
aucugcgugaugaggaauu

SEQ ID NO: 2243972 - RNA, 19 nt, Artificial Sequence
  Description of Artificial Sequence: Synthetic oligonucleotide
gggugugcccaccaccgag

SEQ ID NO: 2243973 - RNA, 19 nt, Artificial Sequence
  Description of Artificial Sequence: Synthetic oligonucleotide
guguaggaagcugcuuccc

SEQ ID NO: 2243974 - RNA, 19 nt, Artificial Sequence
  Description of Artificial Sequence: Synthetic oligonucleotide
gaguccaaaggaagcagcu

SEQ ID NO: 2243975 - RNA, 19 nt, Artificial Sequence
  Description of Artificial Sequence: Synthetic oligonucleotide
ggaaagccggcccuucuca

SEQ ID NO: 2243976 - RNA, 19 nt, Artificial Sequence
  Description of Artificial Sequence: Synthetic oligonucleotide
caucuccaacauguccccg

SEQ ID NO: 2243977 - RNA, 19 nt, Artificial Sequence
  Description of Artificial Sequence: Synthetic oligonucleotide
ggagaggaucaucuccaac

SEQ ID NO: 2243978 - RNA, 19 nt, Artificial Sequence
  Description of Artificial Sequence: Synthetic oligonucleotide
aggugucucaaggccacca

SEQ ID NO: 2243979 - RNA, 19 nt, Artificial Sequence
  Description of Artificial Sequence: Synthetic oligonucleotide
agcacguucuccgguuuca

SEQ ID NO: 2243980 - RNA, 19 nt, Artificial Sequence
  Description of Artificial Sequence: Synthetic oligonucleotide
aacaugcauucgagguuca

SEQ ID NO: 2243981 - RNA, 19 nt, Artificial Sequence
  Description of Artificial Sequence: Synthetic oligonucleotide
cacgaauaccuuucggggu

SEQ ID NO: 2243982 - RNA, 19 nt, Artificial Sequence
  Description of Artificial Sequence: Synthetic oligonucleotide
gggucucgaacaugcauuc

SEQ ID NO: 2243983 - RNA, 19 nt, Artificial Sequence
  Description of Artificial Sequence: Synthetic oligonucleotide
agguaggcgggugugccca

SEQ ID NO: 2243984 - RNA, 19 nt, Artificial Sequence
  Description of Artificial Sequence: Synthetic oligonucleotide
ucucaccgaugaugcgagc

SEQ ID NO: 2243985 - RNA, 19 nt, Artificial Sequence
  Description of Artificial Sequence: Synthetic oligonucleotide
cacgaucccggggugccgg

SEQ ID NO: 2243986 - RNA, 19 nt, Artificial Sequence
  Description of Artificial Sequence: Synthetic oligonucleotide
cacccagguccccugccgc

SEQ ID NO: 2243987 - RNA, 19 nt, Artificial Sequence
  Description of Artificial Sequence: Synthetic oligonucleotide
guucacgaucccggggugc

SEQ ID NO: 2243988 - RNA, 19 nt, Artificial Sequence
  Description of Artificial Sequence: Synthetic oligonucleotide
ucugcgugaugaggaauuu

SEQ ID NO: 2243989 - RNA, 19 nt, Artificial Sequence
  Description of Artificial Sequence: Synthetic oligonucleotide
gcgagcaaagccgaaguca

SEQ ID NO: 2243990 - RNA, 19 nt, Artificial Sequence
  Description of Artificial Sequence: Synthetic oligonucleotide
ucggggucucgaacaugca

SEQ ID NO: 2243991 - RNA, 19 nt, Artificial Sequence
  Description of Artificial Sequence: Synthetic oligonucleotide
cucagagcggggaaucucu

SEQ ID NO: 2243992 - RNA, 19 nt, Artificial Sequence
  Description of Artificial Sequence: Synthetic oligonucleotide
cugcgugaugaggaauuug

SEQ ID NO: 2243993 - RNA, 19 nt, Artificial Sequence
  Description of Artificial Sequence: Synthetic oligonucleotide
ucacgaucccggggugccg

SEQ ID NO: 2243994 - RNA, 19 nt, Artificial Sequence
  Description of Artificial Sequence: Synthetic oligonucleotide
ggauagugcgcaggagucc

SEQ ID NO: 2243995 - RNA, 19 nt, Artificial Sequence
  Description of Artificial Sequence: Synthetic oligonucleotide
ggugccggagcauguggug

SEQ ID NO: 2243996 - RNA, 19 nt, Artificial Sequence
  Description of Artificial Sequence: Synthetic oligonucleotide
caguucgcuucggggauag

SEQ ID NO: 2243997 - RNA, 19 nt, Artificial Sequence
  Description of Artificial Sequence: Synthetic oligonucleotide
aggcgggugugcccaccac

SEQ ID NO: 2243998 - RNA, 19 nt, Artificial Sequence
  Description of Artificial Sequence: Synthetic oligonucleotide
gggauagugcgcaggaguc

SEQ ID NO: 2243999 - RNA, 19 nt, Artificial Sequence
  Description of Artificial Sequence: Synthetic oligonucleotide
accucgggcgccagguagg

SEQ ID NO: 2244000 - RNA, 19 nt, Artificial Sequence
  Description of Artificial Sequence: Synthetic oligonucleotide
ucaucccuccagccuuauc

SEQ ID NO: 2244001 - RNA, 19 nt, Artificial Sequence
  Description of Artificial Sequence: Synthetic oligonucleotide
ggucucgaacaugcauucg

SEQ ID NO: 2244002 - RNA, 19 nt, Artificial Sequence
  Description of Artificial Sequence: Synthetic oligonucleotide
agcgagcgguuguaacccu

SEQ ID NO: 2244003 - RNA, 19 nt, Artificial Sequence
  Description of Artificial Sequence: Synthetic oligonucleotide
gcgggugugcccaccaccg

SEQ ID NO: 2244004 - RNA, 19 nt, Artificial Sequence
  Description of Artificial Sequence: Synthetic oligonucleotide
ggggauagugcgcaggagu

SEQ ID NO: 2244005 - RNA, 19 nt, Artificial Sequence
  Description of Artificial Sequence: Synthetic oligonucleotide
ugggucggcugaugccagc

SEQ ID NO: 2244006 - RNA, 19 nt, Artificial Sequence
  Description of Artificial Sequence: Synthetic oligonucleotide
ugcccaccaccgagcgccg

SEQ ID NO: 2244007 - RNA, 19 nt, Artificial Sequence
  Description of Artificial Sequence: Synthetic oligonucleotide
aucccagcgcgcaucguca

SEQ ID NO: 2244008 - RNA, 19 nt, Artificial Sequence
  Description of Artificial Sequence: Synthetic oligonucleotide
ugcggcagaagggcgccac

SEQ ID NO: 2244009 - RNA, 19 nt, Artificial Sequence
  Description of Artificial Sequence: Synthetic oligonucleotide
cuggccucacaggaugcug

SEQ ID NO: 2244010 - RNA, 19 nt, Artificial Sequence
  Description of Artificial Sequence: Synthetic oligonucleotide
uagugcgcaggaguccaaa

SEQ ID NO: 2244011 - RNA, 19 nt, Artificial Sequence
  Description of Artificial Sequence: Synthetic oligonucleotide
gcugacguacaugaucaca

SEQ ID NO: 2244012 - RNA, 19 nt, Artificial Sequence
  Description of Artificial Sequence: Synthetic oligonucleotide
uguagcguuuccgcaucuu

SEQ ID NO: 2244013 - RNA, 19 nt, Artificial Sequence
  Description of Artificial Sequence: Synthetic oligonucleotide
accagggguggcugagaga

SEQ ID NO: 2244014 - RNA, 19 nt, Artificial Sequence
  Description of Artificial Sequence: Synthetic oligonucleotide
guuuguguaggaagcugcu

SEQ ID NO: 2244015 - RNA, 19 nt, Artificial Sequence
  Description of Artificial Sequence: Synthetic oligonucleotide
caccuguaacagguuguug

SEQ ID NO: 2244016 - RNA, 19 nt, Artificial Sequence
  Description of Artificial Sequence: Synthetic oligonucleotide
ggcgggugugcccaccacc

SEQ ID NO: 2244017 - RNA, 19 nt, Artificial Sequence
  Description of Artificial Sequence: Synthetic oligonucleotide
gaggucgauggcuccagau

SEQ ID NO: 2244018 - RNA, 19 nt, Artificial Sequence
  Description of Artificial Sequence: Synthetic oligonucleotide
uguccagcgagcgguugua

SEQ ID NO: 2244019 - RNA, 19 nt, Artificial Sequence
  Description of Artificial Sequence: Synthetic oligonucleotide
guccugcggcagaagggcg

SEQ ID NO: 2244020 - RNA, 19 nt, Artificial Sequence
  Description of Artificial Sequence: Synthetic oligonucleotide
ggucauugauguccucguc

SEQ ID NO: 2244021 - RNA, 19 nt, Artificial Sequence
  Description of Artificial Sequence: Synthetic oligonucleotide
gcuguagcguuuccgcauc

SEQ ID NO: 2244022 - RNA, 19 nt, Artificial Sequence
  Description of Artificial Sequence: Synthetic oligonucleotide
ggaugcugauccguucggc

SEQ ID NO: 2244023 - RNA, 19 nt, Artificial Sequence
  Description of Artificial Sequence: Synthetic oligonucleotide
ucccagcgcgcaucgucac

SEQ ID NO: 2244024 - RNA, 19 nt, Artificial Sequence
  Description of Artificial Sequence: Synthetic oligonucleotide
ugauguccucguccucauu

SEQ ID NO: 2244025 - RNA, 19 nt, Artificial Sequence
  Description of Artificial Sequence: Synthetic oligonucleotide
ggaaaugggucggcugaug

SEQ ID NO: 2244026 - RNA, 19 nt, Artificial Sequence
  Description of Artificial Sequence: Synthetic oligonucleotide
caacauguccccgugcagu

SEQ ID NO: 2244027 - RNA, 19 nt, Artificial Sequence
  Description of Artificial Sequence: Synthetic oligonucleotide
cauguccagcgagcgguug

SEQ ID NO: 2244028 - RNA, 19 nt, Artificial Sequence
  Description of Artificial Sequence: Synthetic oligonucleotide
ccucguccucauugaaggg

SEQ ID NO: 2244029 - RNA, 19 nt, Artificial Sequence
  Description of Artificial Sequence: Synthetic oligonucleotide
cagguccccugccgcagcc

SEQ ID NO: 2244030 - RNA, 19 nt, Artificial Sequence
  Description of Artificial Sequence: Synthetic oligonucleotide
cgagcgguuguaacccugg

SEQ ID NO: 2244031 - RNA, 19 nt, Artificial Sequence
  Description of Artificial Sequence: Synthetic oligonucleotide
agcgccggaaggacuucuc

SEQ ID NO: 2244032 - RNA, 19 nt, Artificial Sequence
  Description of Artificial Sequence: Synthetic oligonucleotide
gcgcgcaucgucacucucg

SEQ ID NO: 2244033 - RNA, 19 nt, Artificial Sequence
  Description of Artificial Sequence: Synthetic oligonucleotide
uguccacgcuguagcguuu

SEQ ID NO: 2244034 - RNA, 19 nt, Artificial Sequence
  Description of Artificial Sequence: Synthetic oligonucleotide
ggaucuggucauugauguc

SEQ ID NO: 2244035 - RNA, 19 nt, Artificial Sequence
  Description of Artificial Sequence: Synthetic oligonucleotide
gcuucggggauagugcgca

SEQ ID NO: 2244036 - RNA, 19 nt, Artificial Sequence
  Description of Artificial Sequence: Synthetic oligonucleotide
ggccaccaggaucugcgug

SEQ ID NO: 2244037 - RNA, 19 nt, Artificial Sequence
  Description of Artificial Sequence: Synthetic oligonucleotide
gcguuuccgcaucuucacc

SEQ ID NO: 2244038 - RNA, 19 nt, Artificial Sequence
  Description of Artificial Sequence: Synthetic oligonucleotide
ggcugcguucuggaucugg

SEQ ID NO: 2244039 - RNA, 19 nt, Artificial Sequence
  Description of Artificial Sequence: Synthetic oligonucleotide
augggucggcugaugccag

SEQ ID NO: 2244040 - RNA, 19 nt, Artificial Sequence
  Description of Artificial Sequence: Synthetic oligonucleotide
gcaaagccgaagucacaca

SEQ ID NO: 2244041 - RNA, 19 nt, Artificial Sequence
  Description of Artificial Sequence: Synthetic oligonucleotide
gaauaccuuucggggucuc

SEQ ID NO: 2244042 - RNA, 19 nt, Artificial Sequence
  Description of Artificial Sequence: Synthetic oligonucleotide
ggucggcugaugccagcag

SEQ ID NO: 2244043 - RNA, 19 nt, Artificial Sequence
  Description of Artificial Sequence: Synthetic oligonucleotide
cgagguucacgaucccggg

SEQ ID NO: 2244044 - RNA, 19 nt, Artificial Sequence
  Description of Artificial Sequence: Synthetic oligonucleotide
gcccuucucacuggagagg

SEQ ID NO: 2244045 - RNA, 19 nt, Artificial Sequence
  Description of Artificial Sequence: Synthetic oligonucleotide
ucgugguccugcggcagaa

SEQ ID NO: 2244046 - RNA, 19 nt, Artificial Sequence
  Description of Artificial Sequence: Synthetic oligonucleotide
gcgugauauaucgcucacc

SEQ ID NO: 2244047 - RNA, 19 nt, Artificial Sequence
  Description of Artificial Sequence: Synthetic oligonucleotide
ggaucugcgugaugaggaa

SEQ ID NO: 2244048 - RNA, 19 nt, Artificial Sequence
  Description of Artificial Sequence: Synthetic oligonucleotide
aacgugccacugaggcuga

SEQ ID NO: 2244049 - RNA, 19 nt, Artificial Sequence
  Description of Artificial Sequence: Synthetic oligonucleotide
gcaggugucucaaggccac

SEQ ID NO: 2244050 - RNA, 19 nt, Artificial Sequence
  Description of Artificial Sequence: Synthetic oligonucleotide
gaagggcgccacccagguc

SEQ ID NO: 2244051 - RNA, 19 nt, Artificial Sequence
  Description of Artificial Sequence: Synthetic oligonucleotide
gccgcagccgucuccuggc

SEQ ID NO: 2244052 - RNA, 19 nt, Artificial Sequence
  Description of Artificial Sequence: Synthetic oligonucleotide
uccguucggcgagucccug

SEQ ID NO: 2244053 - RNA, 19 nt, Artificial Sequence
  Description of Artificial Sequence: Synthetic oligonucleotide
ucgggaaagccggcccuuc

SEQ ID NO: 2244054 - RNA, 19 nt, Artificial Sequence
  Description of Artificial Sequence: Synthetic oligonucleotide
gaucugcgugaugaggaau

SEQ ID NO: 2244055 - RNA, 19 nt, Artificial Sequence
  Description of Artificial Sequence: Synthetic oligonucleotide
agguccccugccgcagccg

SEQ ID NO: 2244056 - RNA, 19 nt, Artificial Sequence
  Description of Artificial Sequence: Synthetic oligonucleotide
guaggcgggugugcccacc

SEQ ID NO: 2244057 - RNA, 19 nt, Artificial Sequence
  Description of Artificial Sequence: Synthetic oligonucleotide
uguccccgugcaguuucuc

SEQ ID NO: 2244058 - RNA, 19 nt, Artificial Sequence
  Description of Artificial Sequence: Synthetic oligonucleotide
auccguucggcgagucccu

SEQ ID NO: 2244059 - RNA, 19 nt, Artificial Sequence
  Description of Artificial Sequence: Synthetic oligonucleotide
cacaggaugcugauccguu

SEQ ID NO: 2244060 - RNA, 19 nt, Artificial Sequence
  Description of Artificial Sequence: Synthetic oligonucleotide
cuuucggggucucgaacau

SEQ ID NO: 2244061 - RNA, 19 nt, Artificial Sequence
  Description of Artificial Sequence: Synthetic oligonucleotide
guccacgcuguagcguuuc

SEQ ID NO: 2244062 - RNA, 19 nt, Artificial Sequence
  Description of Artificial Sequence: Synthetic oligonucleotide
cagaugagauguggcucca

SEQ ID NO: 2244063 - RNA, 19 nt, Artificial Sequence
  Description of Artificial Sequence: Synthetic oligonucleotide
cugauccguucggcgaguc

SEQ ID NO: 2244064 - RNA, 19 nt, Artificial Sequence
  Description of Artificial Sequence: Synthetic oligonucleotide
ugaucccagcgcgcaucgu

SEQ ID NO: 2244065 - RNA, 19 nt, Artificial Sequence
  Description of Artificial Sequence: Synthetic oligonucleotide
ccgcaucuucaccuguaac

SEQ ID NO: 2244066 - RNA, 19 nt, Artificial Sequence
  Description of Artificial Sequence: Synthetic oligonucleotide
acgaucccggggugccgga

SEQ ID NO: 2244067 - RNA, 19 nt, Artificial Sequence
  Description of Artificial Sequence: Synthetic oligonucleotide
caccgaugaugcgagcaaa

SEQ ID NO: 2244068 - RNA, 19 nt, Artificial Sequence
  Description of Artificial Sequence: Synthetic oligonucleotide
ggcuggguacauaaaggcu

SEQ ID NO: 2244069 - RNA, 19 nt, Artificial Sequence
  Description of Artificial Sequence: Synthetic oligonucleotide
acaguucgcuucggggaua

SEQ ID NO: 2244070 - RNA, 19 nt, Artificial Sequence
  Description of Artificial Sequence: Synthetic oligonucleotide
cucgggcgccagguaggcg

SEQ ID NO: 2244071 - RNA, 19 nt, Artificial Sequence
  Description of Artificial Sequence: Synthetic oligonucleotide
gggaaucucuggccucaca

SEQ ID NO: 2244072 - RNA, 19 nt, Artificial Sequence
  Description of Artificial Sequence: Synthetic oligonucleotide
acauguccccgugcaguuu

SEQ ID NO: 2244073 - RNA, 19 nt, Artificial Sequence
  Description of Artificial Sequence: Synthetic oligonucleotide
cacgucugguacuccugua

SEQ ID NO: 2244074 - RNA, 19 nt, Artificial Sequence
  Description of Artificial Sequence: Synthetic oligonucleotide
ggguacauaaaggcugcgu

SEQ ID NO: 2244075 - RNA, 19 nt, Artificial Sequence
  Description of Artificial Sequence: Synthetic oligonucleotide
ccagcgcgcaucgucacuc

SEQ ID NO: 2244076 - RNA, 19 nt, Artificial Sequence
  Description of Artificial Sequence: Synthetic oligonucleotide
cccuucucacuggagagga

SEQ ID NO: 2244077 - RNA, 19 nt, Artificial Sequence
  Description of Artificial Sequence: Synthetic oligonucleotide
ccagaacaguucgcuucgg

SEQ ID NO: 2244078 - RNA, 19 nt, Artificial Sequence
  Description of Artificial Sequence: Synthetic oligonucleotide
ccugcggcagaagggcgcc

SEQ ID NO: 2244079 - RNA, 19 nt, Artificial Sequence
  Description of Artificial Sequence: Synthetic oligonucleotide
auagugcgcaggaguccaa

SEQ ID NO: 2244080 - RNA, 19 nt, Artificial Sequence
  Description of Artificial Sequence: Synthetic oligonucleotide
gugaggcgcucgggaaagc

SEQ ID NO: 2244081 - RNA, 19 nt, Artificial Sequence
  Description of Artificial Sequence: Synthetic oligonucleotide
acgugccacugaggcugac

SEQ ID NO: 2244082 - RNA, 19 nt, Artificial Sequence
  Description of Artificial Sequence: Synthetic oligonucleotide
cguuuccgcaucuucaccu

SEQ ID NO: 2244083 - RNA, 19 nt, Artificial Sequence
  Description of Artificial Sequence: Synthetic oligonucleotide
gcgagcgguuguaacccug

SEQ ID NO: 2244084 - RNA, 19 nt, Artificial Sequence
  Description of Artificial Sequence: Synthetic oligonucleotide
ccguucggcgagucccugc

SEQ ID NO: 2244085 - RNA, 19 nt, Artificial Sequence
  Description of Artificial Sequence: Synthetic oligonucleotide
gcucugucacaaacugauc

SEQ ID NO: 2244086 - RNA, 19 nt, Artificial Sequence
  Description of Artificial Sequence: Synthetic oligonucleotide
gcagccgucuccuggcgcu

SEQ ID NO: 2244087 - RNA, 19 nt, Artificial Sequence
  Description of Artificial Sequence: Synthetic oligonucleotide
acauguccagcgagcgguu

SEQ ID NO: 2244088 - RNA, 19 nt, Artificial Sequence
  Description of Artificial Sequence: Synthetic oligonucleotide
gccagguaggcgggugugc

SEQ ID NO: 2244089 - RNA, 19 nt, Artificial Sequence
  Description of Artificial Sequence: Synthetic oligonucleotide
gggucggcugaugccagca

SEQ ID NO: 2244090 - RNA, 19 nt, Artificial Sequence
  Description of Artificial Sequence: Synthetic oligonucleotide
auguccccgugcaguuucu

SEQ ID NO: 2244091 - RNA, 19 nt, Artificial Sequence
  Description of Artificial Sequence: Synthetic oligonucleotide
agccgucuccuggcgcucu

SEQ ID NO: 2244092 - RNA, 19 nt, Artificial Sequence
  Description of Artificial Sequence: Synthetic oligonucleotide
gcggggaaucucuggccuc

SEQ ID NO: 2244093 - RNA, 19 nt, Artificial Sequence
  Description of Artificial Sequence: Synthetic oligonucleotide
cgcucgggaaagccggccc

SEQ ID NO: 2244094 - RNA, 19 nt, Artificial Sequence
  Description of Artificial Sequence: Synthetic oligonucleotide
gcggcagaagggcgccacc

SEQ ID NO: 2244095 - RNA, 19 nt, Artificial Sequence
  Description of Artificial Sequence: Synthetic oligonucleotide
cgcuucggggauagugcgc

SEQ ID NO: 2244096 - RNA, 19 nt, Artificial Sequence
  Description of Artificial Sequence: Synthetic oligonucleotide
gguaggcgggugugcccac

SEQ ID NO: 2244097 - RNA, 19 nt, Artificial Sequence
  Description of Artificial Sequence: Synthetic oligonucleotide
ccagcucucggaggucaag

SEQ ID NO: 2244098 - RNA, 19 nt, Artificial Sequence
  Description of Artificial Sequence: Synthetic oligonucleotide
cggaggucaagccacgucu

SEQ ID NO: 2244099 - RNA, 19 nt, Artificial Sequence
  Description of Artificial Sequence: Synthetic oligonucleotide
ggcgccagguaggcgggug

SEQ ID NO: 2244100 - RNA, 19 nt, Artificial Sequence
  Description of Artificial Sequence: Synthetic oligonucleotide
ccagccuuauccaguuugu

SEQ ID NO: 2244101 - RNA, 19 nt, Artificial Sequence
  Description of Artificial Sequence: Synthetic oligonucleotide
gcguucuggaucuggucau

SEQ ID NO: 2244102 - RNA, 19 nt, Artificial Sequence
  Description of Artificial Sequence: Synthetic oligonucleotide
caucgucacucucgugcgu

SEQ ID NO: 2244103 - RNA, 19 nt, Artificial Sequence
  Description of Artificial Sequence: Synthetic oligonucleotide
cuguagcguuuccgcaucu

SEQ ID NO: 2244104 - RNA, 19 nt, Artificial Sequence
  Description of Artificial Sequence: Synthetic oligonucleotide
ccacugaggcugacguaca

SEQ ID NO: 2244105 - RNA, 19 nt, Artificial Sequence
  Description of Artificial Sequence: Synthetic oligonucleotide
gcugcguucuggaucuggu

SEQ ID NO: 2244106 - RNA, 19 nt, Artificial Sequence
  Description of Artificial Sequence: Synthetic oligonucleotide
gagcgccggaaggacuucu

SEQ ID NO: 2244107 - RNA, 19 nt, Artificial Sequence
  Description of Artificial Sequence: Synthetic oligonucleotide
cagcagcacguucuccggu

SEQ ID NO: 2244108 - RNA, 19 nt, Artificial Sequence
  Description of Artificial Sequence: Synthetic oligonucleotide
cguucggcgagucccugca

SEQ ID NO: 2244109 - RNA, 19 nt, Artificial Sequence
  Description of Artificial Sequence: Synthetic oligonucleotide
guccagcgagcgguuguaa

SEQ ID NO: 2244110 - RNA, 19 nt, Artificial Sequence
  Description of Artificial Sequence: Synthetic oligonucleotide
ggguggcugagagacuugu

SEQ ID NO: 2244111 - RNA, 19 nt, Artificial Sequence
  Description of Artificial Sequence: Synthetic oligonucleotide
gcgugaugaggaauuuggu

SEQ ID NO: 2244112 - RNA, 19 nt, Artificial Sequence
  Description of Artificial Sequence: Synthetic oligonucleotide
gcucgggaaagccggcccu

SEQ ID NO: 2244113 - RNA, 19 nt, Artificial Sequence
  Description of Artificial Sequence: Synthetic oligonucleotide
gcgcucgggaaagccggcc

SEQ ID NO: 2244114 - RNA, 19 nt, Artificial Sequence
  Description of Artificial Sequence: Synthetic oligonucleotide
cacucucgugcgugauaua

SEQ ID NO: 2244115 - RNA, 19 nt, Artificial Sequence
  Description of Artificial Sequence: Synthetic oligonucleotide
cgagucccugcaucucgug

SEQ ID NO: 2244116 - RNA, 19 nt, Artificial Sequence
  Description of Artificial Sequence: Synthetic oligonucleotide
ggggaaucucuggccucac

SEQ ID NO: 2244117 - RNA, 19 nt, Artificial Sequence
  Description of Artificial Sequence: Synthetic oligonucleotide
gguccccugccgcagccgu

SEQ ID NO: 2244118 - RNA, 19 nt, Artificial Sequence
  Description of Artificial Sequence: Synthetic oligonucleotide
gccggcccuucucacugga

SEQ ID NO: 2244119 - RNA, 19 nt, Artificial Sequence
  Description of Artificial Sequence: Synthetic oligonucleotide
ccgcagccgucuccuggcg

SEQ ID NO: 2244120 - RNA, 19 nt, Artificial Sequence
  Description of Artificial Sequence: Synthetic oligonucleotide
cagccgucuccuggcgcuc

SEQ ID NO: 2244121 - RNA, 19 nt, Artificial Sequence
  Description of Artificial Sequence: Synthetic oligonucleotide
gccucacaggaugcugauc

SEQ ID NO: 2244122 - RNA, 19 nt, Artificial Sequence
  Description of Artificial Sequence: Synthetic oligonucleotide
gcgccacccagguccccug

SEQ ID NO: 2244123 - RNA, 19 nt, Artificial Sequence
  Description of Artificial Sequence: Synthetic oligonucleotide
cggaaggacuucucaccga

SEQ ID NO: 2244124 - RNA, 19 nt, Artificial Sequence
  Description of Artificial Sequence: Synthetic oligonucleotide
cggaccacauguccagcga

SEQ ID NO: 2244125 - RNA, 19 nt, Artificial Sequence
  Description of Artificial Sequence: Synthetic oligonucleotide
cgggcgccagguaggcggg

SEQ ID NO: 2244126 - RNA, 19 nt, Artificial Sequence
  Description of Artificial Sequence: Synthetic oligonucleotide
cgaacaugcauucgagguu

SEQ ID NO: 2244127 - RNA, 19 nt, Artificial Sequence
  Description of Artificial Sequence: Synthetic oligonucleotide
ccucauugaaggggaacgu

SEQ ID NO: 2244128 - RNA, 19 nt, Artificial Sequence
  Description of Artificial Sequence: Synthetic oligonucleotide
ggccucacaggaugcugau

SEQ ID NO: 2244129 - RNA, 19 nt, Artificial Sequence
  Description of Artificial Sequence: Synthetic oligonucleotide
guucggcgagucccugcau

SEQ ID NO: 2244130 - RNA, 19 nt, Artificial Sequence
  Description of Artificial Sequence: Synthetic oligonucleotide
ccacgucugguacuccugu

SEQ ID NO: 2244131 - RNA, 19 nt, Artificial Sequence
  Description of Artificial Sequence: Synthetic oligonucleotide
gcacguucuccgguuucaa

SEQ ID NO: 2244132 - RNA, 19 nt, Artificial Sequence
  Description of Artificial Sequence: Synthetic oligonucleotide
cccaccaccgagcgccgga

SEQ ID NO: 2244133 - RNA, 19 nt, Artificial Sequence
  Description of Artificial Sequence: Synthetic oligonucleotide
cagcgcgcaucgucacucu

SEQ ID NO: 2244134 - RNA, 19 nt, Artificial Sequence
  Description of Artificial Sequence: Synthetic oligonucleotide
ccuccagccuuauccaguu

SEQ ID NO: 2244135 - RNA, 19 nt, Artificial Sequence
  Description of Artificial Sequence: Synthetic oligonucleotide
gccggagcaugugguggga

SEQ ID NO: 2244136 - RNA, 19 nt, Artificial Sequence
  Description of Artificial Sequence: Synthetic oligonucleotide
cggggaaucucuggccuca

SEQ ID NO: 2244137 - RNA, 19 nt, Artificial Sequence
  Description of Artificial Sequence: Synthetic oligonucleotide
cgcuguagcguuuccgcau

SEQ ID NO: 2244138 - RNA, 19 nt, Artificial Sequence
  Description of Artificial Sequence: Synthetic oligonucleotide
cugcggcagaagggcgcca

SEQ ID NO: 2244139 - RNA, 19 nt, Artificial Sequence
  Description of Artificial Sequence: Synthetic oligonucleotide
ccccagagucaucccucca

SEQ ID NO: 2244140 - RNA, 19 nt, Artificial Sequence
  Description of Artificial Sequence: Synthetic oligonucleotide
cucgggaaagccggcccuu

SEQ ID NO: 2244141 - RNA, 19 nt, Artificial Sequence
  Description of Artificial Sequence: Synthetic oligonucleotide
gcgagucccugcaucucgu

SEQ ID NO: 2244142 - RNA, 19 nt, Artificial Sequence
  Description of Artificial Sequence: Synthetic oligonucleotide
ggcgccacccagguccccu

SEQ ID NO: 2244143 - RNA, 19 nt, Artificial Sequence
  Description of Artificial Sequence: Synthetic oligonucleotide
ggggcuggcuggguacaua

SEQ ID NO: 2244144 - RNA, 19 nt, Artificial Sequence
  Description of Artificial Sequence: Synthetic oligonucleotide
ccgagcgccggaaggacuu

SEQ ID NO: 2244145 - RNA, 19 nt, Artificial Sequence
  Description of Artificial Sequence: Synthetic oligonucleotide
gcugauccguucggcgagu

SEQ ID NO: 2244146 - RNA, 19 nt, Artificial Sequence
  Description of Artificial Sequence: Synthetic oligonucleotide
cgcgcaucgucacucucgu

SEQ ID NO: 2244147 - RNA, 19 nt, Artificial Sequence
  Description of Artificial Sequence: Synthetic oligonucleotide
cggggucucgaacaugcau

SEQ ID NO: 2244148 - RNA, 19 nt, Artificial Sequence
  Description of Artificial Sequence: Synthetic oligonucleotide
ccccgugcaguuucuccau

SEQ ID NO: 2244149 - RNA, 19 nt, Artificial Sequence
  Description of Artificial Sequence: Synthetic oligonucleotide
cgaauaccuuucggggucu

SEQ ID NO: 2244150 - RNA, 19 nt, Artificial Sequence
  Description of Artificial Sequence: Synthetic oligonucleotide
cgagcgccggaaggacuuc

SEQ ID NO: 2244151 - RNA, 19 nt, Artificial Sequence
  Description of Artificial Sequence: Synthetic oligonucleotide
ccggggugccggagcaugu

SEQ ID NO: 2244152 - RNA, 19 nt, Artificial Sequence
  Description of Artificial Sequence: Synthetic oligonucleotide
cccagcgcgcaucgucacu

SEQ ID NO: 2244153 - RNA, 19 nt, Artificial Sequence
  Description of Artificial Sequence: Synthetic oligonucleotide
ccggagcauguggugggau

SEQ ID NO: 2244154 - RNA, 19 nt, Artificial Sequence
  Description of Artificial Sequence: Synthetic oligonucleotide
cgucacucucgugcgugau

SEQ ID NO: 2244155 - RNA, 19 nt, Artificial Sequence
  Description of Artificial Sequence: Synthetic oligonucleotide
gggcgccagguaggcgggu

SEQ ID NO: 2244156 - RNA, 19 nt, Artificial Sequence
  Description of Artificial Sequence: Synthetic oligonucleotide
aagaagaauaaucaucagc

SEQ ID NO: 2244157 - RNA, 19 nt, Artificial Sequence
  Description of Artificial Sequence: Synthetic oligonucleotide
aauuucaagcugcucaugc

SEQ ID NO: 2244158 - RNA, 19 nt, Artificial Sequence
  Description of Artificial Sequence: Synthetic oligonucleotide
aauaauggagcccacaaug

SEQ ID NO: 2244159 - RNA, 19 nt, Artificial Sequence
  Description of Artificial Sequence: Synthetic oligonucleotide
uaagagaaagccaaaaugc

SEQ ID NO: 2244160 - RNA, 19 nt, Artificial Sequence
  Description of Artificial Sequence: Synthetic oligonucleotide
aaugcugucauucaggccu

SEQ ID NO: 2244161 - RNA, 19 nt, Artificial Sequence
  Description of Artificial Sequence: Synthetic oligonucleotide
aguacuaccaauaaggugg

SEQ ID NO: 2244162 - RNA, 19 nt, Artificial Sequence
  Description of Artificial Sequence: Synthetic oligonucleotide
aagucuuuuaagcucaggg

SEQ ID NO: 2244163 - RNA, 19 nt, Artificial Sequence
  Description of Artificial Sequence: Synthetic oligonucleotide
accuguaucacacauacac

SEQ ID NO: 2244164 - RNA, 19 nt, Artificial Sequence
  Description of Artificial Sequence: Synthetic oligonucleotide
ugagugauaauguugaaug

SEQ ID NO: 2244165 - RNA, 19 nt, Artificial Sequence
  Description of Artificial Sequence: Synthetic oligonucleotide
uuuuggaccaggaagaaga

SEQ ID NO: 2244166 - RNA, 19 nt, Artificial Sequence
  Description of Artificial Sequence: Synthetic oligonucleotide
aaguucauggcaaauauuc

SEQ ID NO: 2244167 - RNA, 19 nt, Artificial Sequence
  Description of Artificial Sequence: Synthetic oligonucleotide
uuuguuauaacaacccuga

SEQ ID NO: 2244168 - RNA, 19 nt, Artificial Sequence
  Description of Artificial Sequence: Synthetic oligonucleotide
aaaaguuggaaugaaacca

SEQ ID NO: 2244169 - RNA, 19 nt, Artificial Sequence
  Description of Artificial Sequence: Synthetic oligonucleotide
agucuuuuaagcucagggc

SEQ ID NO: 2244170 - RNA, 19 nt, Artificial Sequence
  Description of Artificial Sequence: Synthetic oligonucleotide
uuuucuuaacccauguaug

SEQ ID NO: 2244171 - RNA, 19 nt, Artificial Sequence
  Description of Artificial Sequence: Synthetic oligonucleotide
aaucacuugagcuguucac

SEQ ID NO: 2244172 - RNA, 19 nt, Artificial Sequence
  Description of Artificial Sequence: Synthetic oligonucleotide
auaccaaagcccaaaaugc

SEQ ID NO: 2244173 - RNA, 19 nt, Artificial Sequence
  Description of Artificial Sequence: Synthetic oligonucleotide
cagguaauuguuuagggcc

SEQ ID NO: 2244174 - RNA, 19 nt, Artificial Sequence
  Description of Artificial Sequence: Synthetic oligonucleotide
ucuaccaucuuuaagggau

SEQ ID NO: 2244175 - RNA, 19 nt, Artificial Sequence
  Description of Artificial Sequence: Synthetic oligonucleotide
uguuauaacaacccugaac

SEQ ID NO: 2244176 - RNA, 19 nt, Artificial Sequence
  Description of Artificial Sequence: Synthetic oligonucleotide
aaaggacauccccagcacc

SEQ ID NO: 2244177 - RNA, 19 nt, Artificial Sequence
  Description of Artificial Sequence: Synthetic oligonucleotide
uuggauguauaacaggggc

SEQ ID NO: 2244178 - RNA, 19 nt, Artificial Sequence
  Description of Artificial Sequence: Synthetic oligonucleotide
aagaacgacauaagcaggc

SEQ ID NO: 2244179 - RNA, 19 nt, Artificial Sequence
  Description of Artificial Sequence: Synthetic oligonucleotide
aacaacccugaacaucugc

SEQ ID NO: 2244180 - RNA, 19 nt, Artificial Sequence
  Description of Artificial Sequence: Synthetic oligonucleotide
aaaguuggaaugaaaccac

SEQ ID NO: 2244181 - RNA, 19 nt, Artificial Sequence
  Description of Artificial Sequence: Synthetic oligonucleotide
aagucacagcccuaaggcc

SEQ ID NO: 2244182 - RNA, 19 nt, Artificial Sequence
  Description of Artificial Sequence: Synthetic oligonucleotide
aacacugcagaugugacug

SEQ ID NO: 2244183 - RNA, 19 nt, Artificial Sequence
  Description of Artificial Sequence: Synthetic oligonucleotide
uuugcuuuguuauaacaac

SEQ ID NO: 2244184 - RNA, 19 nt, Artificial Sequence
  Description of Artificial Sequence: Synthetic oligonucleotide
agaacaaagaacgacauaa

SEQ ID NO: 2244185 - RNA, 19 nt, Artificial Sequence
  Description of Artificial Sequence: Synthetic oligonucleotide
uuguucauacacaaagagc

SEQ ID NO: 2244186 - RNA, 19 nt, Artificial Sequence
  Description of Artificial Sequence: Synthetic oligonucleotide
ugugacuggaugaaguccc

SEQ ID NO: 2244187 - RNA, 19 nt, Artificial Sequence
  Description of Artificial Sequence: Synthetic oligonucleotide
ugcuuuguuauaacaaccc

SEQ ID NO: 2244188 - RNA, 19 nt, Artificial Sequence
  Description of Artificial Sequence: Synthetic oligonucleotide
cuguaucacacauacacag

SEQ ID NO: 2244189 - RNA, 19 nt, Artificial Sequence
  Description of Artificial Sequence: Synthetic oligonucleotide
uuaagcucagggcaguugc

SEQ ID NO: 2244190 - RNA, 19 nt, Artificial Sequence
  Description of Artificial Sequence: Synthetic oligonucleotide
aacccauguauguuucuac

SEQ ID NO: 2244191 - RNA, 19 nt, Artificial Sequence
  Description of Artificial Sequence: Synthetic oligonucleotide
auuucaagcugcucaugcc

SEQ ID NO: 2244192 - RNA, 19 nt, Artificial Sequence
  Description of Artificial Sequence: Synthetic oligonucleotide
cacaaugacgagaacauug

SEQ ID NO: 2244193 - RNA, 19 nt, Artificial Sequence
  Description of Artificial Sequence: Synthetic oligonucleotide
uucauggcaaauauucucu

SEQ ID NO: 2244194 - RNA, 19 nt, Artificial Sequence
  Description of Artificial Sequence: Synthetic oligonucleotide
caagucacagcccuaaggc

SEQ ID NO: 2244195 - RNA, 19 nt, Artificial Sequence
  Description of Artificial Sequence: Synthetic oligonucleotide
ucauacacaaagagcaaga

SEQ ID NO: 2244196 - RNA, 19 nt, Artificial Sequence
  Description of Artificial Sequence: Synthetic oligonucleotide
uuacggaagaguacuacca

SEQ ID NO: 2244197 - RNA, 19 nt, Artificial Sequence
  Description of Artificial Sequence: Synthetic oligonucleotide
cucagcaagaagaauaauc

SEQ ID NO: 2244198 - RNA, 19 nt, Artificial Sequence
  Description of Artificial Sequence: Synthetic oligonucleotide
agcaagaagaauaaucauc

SEQ ID NO: 2244199 - RNA, 19 nt, Artificial Sequence
  Description of Artificial Sequence: Synthetic oligonucleotide
gaagaguacuaccaauaag

SEQ ID NO: 2244200 - RNA, 19 nt, Artificial Sequence
  Description of Artificial Sequence: Synthetic oligonucleotide
uugucaaucuggcaguuga

SEQ ID NO: 2244201 - RNA, 19 nt, Artificial Sequence
  Description of Artificial Sequence: Synthetic oligonucleotide
ugauugaucccaugcagcc

SEQ ID NO: 2244202 - RNA, 19 nt, Artificial Sequence
  Description of Artificial Sequence: Synthetic oligonucleotide
ugucugagugauaauguug

SEQ ID NO: 2244203 - RNA, 19 nt, Artificial Sequence
  Description of Artificial Sequence: Synthetic oligonucleotide
uuucuuaacccauguaugu

SEQ ID NO: 2244204 - RNA, 19 nt, Artificial Sequence
  Description of Artificial Sequence: Synthetic oligonucleotide
aaggcaacuaccauaauaa

SEQ ID NO: 2244205 - RNA, 19 nt, Artificial Sequence
  Description of Artificial Sequence: Synthetic oligonucleotide
uccuugauugaucccaugc

SEQ ID NO: 2244206 - RNA, 19 nt, Artificial Sequence
  Description of Artificial Sequence: Synthetic oligonucleotide
aaagccaaaaugccaggca

SEQ ID NO: 2244207 - RNA, 19 nt, Artificial Sequence
  Description of Artificial Sequence: Synthetic oligonucleotide
ugagugucagugcaaagga

SEQ ID NO: 2244208 - RNA, 19 nt, Artificial Sequence
  Description of Artificial Sequence: Synthetic oligonucleotide
augcaacagccacagaccc

SEQ ID NO: 2244209 - RNA, 19 nt, Artificial Sequence
  Description of Artificial Sequence: Synthetic oligonucleotide
gagaacauugcccaguguc

SEQ ID NO: 2244210 - RNA, 19 nt, Artificial Sequence
  Description of Artificial Sequence: Synthetic oligonucleotide
augacgagaacauugccca

SEQ ID NO: 2244211 - RNA, 19 nt, Artificial Sequence
  Description of Artificial Sequence: Synthetic oligonucleotide
gaaugaaaccacaauuuug

SEQ ID NO: 2244212 - RNA, 19 nt, Artificial Sequence
  Description of Artificial Sequence: Synthetic oligonucleotide
aaagaacgacauaagcagg

SEQ ID NO: 2244213 - RNA, 19 nt, Artificial Sequence
  Description of Artificial Sequence: Synthetic oligonucleotide
acaaugacgagaacauugc

SEQ ID NO: 2244214 - RNA, 19 nt, Artificial Sequence
  Description of Artificial Sequence: Synthetic oligonucleotide
acccauguauguuucuacc

SEQ ID NO: 2244215 - RNA, 19 nt, Artificial Sequence
  Description of Artificial Sequence: Synthetic oligonucleotide
cuugauugaucccaugcag

SEQ ID NO: 2244216 - RNA, 19 nt, Artificial Sequence
  Description of Artificial Sequence: Synthetic oligonucleotide
aaucuggcaguugaguguc

SEQ ID NO: 2244217 - RNA, 19 nt, Artificial Sequence
  Description of Artificial Sequence: Synthetic oligonucleotide
aauuguuuagggccucaug

SEQ ID NO: 2244218 - RNA, 19 nt, Artificial Sequence
  Description of Artificial Sequence: Synthetic oligonucleotide
ugcucaugccccaugcugg

SEQ ID NO: 2244219 - RNA, 19 nt, Artificial Sequence
  Description of Artificial Sequence: Synthetic oligonucleotide
aagguuacggaagaguacu

SEQ ID NO: 2244220 - RNA, 19 nt, Artificial Sequence
  Description of Artificial Sequence: Synthetic oligonucleotide
cuaccauaauaauggagcc

SEQ ID NO: 2244221 - RNA, 19 nt, Artificial Sequence
  Description of Artificial Sequence: Synthetic oligonucleotide
auaacaacccugaacaucu

SEQ ID NO: 2244222 - RNA, 19 nt, Artificial Sequence
  Description of Artificial Sequence: Synthetic oligonucleotide
uggauguauaacaggggcc

SEQ ID NO: 2244223 - RNA, 19 nt, Artificial Sequence
  Description of Artificial Sequence: Synthetic oligonucleotide
agcccaaaaugcaacagcc

SEQ ID NO: 2244224 - RNA, 19 nt, Artificial Sequence
  Description of Artificial Sequence: Synthetic oligonucleotide
ugauaauguugaaugcugu

SEQ ID NO: 2244225 - RNA, 19 nt, Artificial Sequence
  Description of Artificial Sequence: Synthetic oligonucleotide
auacacaaagagcaagaug

SEQ ID NO: 2244226 - RNA, 19 nt, Artificial Sequence
  Description of Artificial Sequence: Synthetic oligonucleotide
cuuggauguauaacagggg

SEQ ID NO: 2244227 - RNA, 19 nt, Artificial Sequence
  Description of Artificial Sequence: Synthetic oligonucleotide
cuuuaagggauauggcuac

SEQ ID NO: 2244228 - RNA, 19 nt, Artificial Sequence
  Description of Artificial Sequence: Synthetic oligonucleotide
uaagggauauggcuacugc

SEQ ID NO: 2244229 - RNA, 19 nt, Artificial Sequence
  Description of Artificial Sequence: Synthetic oligonucleotide
cuaaggucaccucagcaag

SEQ ID NO: 2244230 - RNA, 19 nt, Artificial Sequence
  Description of Artificial Sequence: Synthetic oligonucleotide
ugguccaaucacuugagcu

SEQ ID NO: 2244231 - RNA, 19 nt, Artificial Sequence
  Description of Artificial Sequence: Synthetic oligonucleotide
gcaguugcaagucacagcc

SEQ ID NO: 2244232 - RNA, 19 nt, Artificial Sequence
  Description of Artificial Sequence: Synthetic oligonucleotide
ccuuggauguauaacaggg

SEQ ID NO: 2244233 - RNA, 19 nt, Artificial Sequence
  Description of Artificial Sequence: Synthetic oligonucleotide
accauaauaauggagccca

SEQ ID NO: 2244234 - RNA, 19 nt, Artificial Sequence
  Description of Artificial Sequence: Synthetic oligonucleotide
guuacggaagaguacuacc

SEQ ID NO: 2244235 - RNA, 19 nt, Artificial Sequence
  Description of Artificial Sequence: Synthetic oligonucleotide
ucccaugcagcccaagaag

SEQ ID NO: 2244236 - RNA, 19 nt, Artificial Sequence
  Description of Artificial Sequence: Synthetic oligonucleotide
guugaaugcugucauucag

SEQ ID NO: 2244237 - RNA, 19 nt, Artificial Sequence
  Description of Artificial Sequence: Synthetic oligonucleotide
gagugauaauguugaaugc

SEQ ID NO: 2244238 - RNA, 19 nt, Artificial Sequence
  Description of Artificial Sequence: Synthetic oligonucleotide
agcccaagaaggcaacuac

SEQ ID NO: 2244239 - RNA, 19 nt, Artificial Sequence
  Description of Artificial Sequence: Synthetic oligonucleotide
agugauaauguugaaugcu

SEQ ID NO: 2244240 - RNA, 19 nt, Artificial Sequence
  Description of Artificial Sequence: Synthetic oligonucleotide
uguaucacacauacacaga

SEQ ID NO: 2244241 - RNA, 19 nt, Artificial Sequence
  Description of Artificial Sequence: Synthetic oligonucleotide
cugguuuugucaaucuggc

SEQ ID NO: 2244242 - RNA, 19 nt, Artificial Sequence
  Description of Artificial Sequence: Synthetic oligonucleotide
aaagcccaaaaugcaacag

SEQ ID NO: 2244243 - RNA, 19 nt, Artificial Sequence
  Description of Artificial Sequence: Synthetic oligonucleotide
aguugcaagucacagcccu

SEQ ID NO: 2244244 - RNA, 19 nt, Artificial Sequence
  Description of Artificial Sequence: Synthetic oligonucleotide
uugcccagugucaggaagg

SEQ ID NO: 2244245 - RNA, 19 nt, Artificial Sequence
  Description of Artificial Sequence: Synthetic oligonucleotide
gaugguaaugauuccaaua

SEQ ID NO: 2244246 - RNA, 19 nt, Artificial Sequence
  Description of Artificial Sequence: Synthetic oligonucleotide
uaccaaagcccaaaaugca

SEQ ID NO: 2244247 - RNA, 19 nt, Artificial Sequence
  Description of Artificial Sequence: Synthetic oligonucleotide
gguaaugauuccaauauac

SEQ ID NO: 2244248 - RNA, 19 nt, Artificial Sequence
  Description of Artificial Sequence: Synthetic oligonucleotide
aagggaagguuacggaaga

SEQ ID NO: 2244249 - RNA, 19 nt, Artificial Sequence
  Description of Artificial Sequence: Synthetic oligonucleotide
aacgacauaagcaggcacu

SEQ ID NO: 2244250 - RNA, 19 nt, Artificial Sequence
  Description of Artificial Sequence: Synthetic oligonucleotide
caucuuuaagggauauggc

SEQ ID NO: 2244251 - RNA, 19 nt, Artificial Sequence
  Description of Artificial Sequence: Synthetic oligonucleotide
ccaucuuuaagggauaugg

SEQ ID NO: 2244252 - RNA, 19 nt, Artificial Sequence
  Description of Artificial Sequence: Synthetic oligonucleotide
uucaagcugcucaugcccc

SEQ ID NO: 2244253 - RNA, 19 nt, Artificial Sequence
  Description of Artificial Sequence: Synthetic oligonucleotide
auaacaggggccgaugaag

SEQ ID NO: 2244254 - RNA, 19 nt, Artificial Sequence
  Description of Artificial Sequence: Synthetic oligonucleotide
gauggcuaaggucaccuca

SEQ ID NO: 2244255 - RNA, 19 nt, Artificial Sequence
  Description of Artificial Sequence: Synthetic oligonucleotide
ggauguauaacaggggccg

SEQ ID NO: 2244256 - RNA, 19 nt, Artificial Sequence
  Description of Artificial Sequence: Synthetic oligonucleotide
uuggugaaugauuuucuuc

SEQ ID NO: 2244257 - RNA, 19 nt, Artificial Sequence
  Description of Artificial Sequence: Synthetic oligonucleotide
aaagucuuuuaagcucagg

SEQ ID NO: 2244258 - RNA, 19 nt, Artificial Sequence
  Description of Artificial Sequence: Synthetic oligonucleotide
ucuuaacccauguauguuu

SEQ ID NO: 2244259 - RNA, 19 nt, Artificial Sequence
  Description of Artificial Sequence: Synthetic oligonucleotide
gaugugacuggaugaaguc

SEQ ID NO: 2244260 - RNA, 19 nt, Artificial Sequence
  Description of Artificial Sequence: Synthetic oligonucleotide
auugcccagugucaggaag

SEQ ID NO: 2244261 - RNA, 19 nt, Artificial Sequence
  Description of Artificial Sequence: Synthetic oligonucleotide
agagcaagauggcuaaggu

SEQ ID NO: 2244262 - RNA, 19 nt, Artificial Sequence
  Description of Artificial Sequence: Synthetic oligonucleotide
uaauaauggagcccacaau

SEQ ID NO: 2244263 - RNA, 19 nt, Artificial Sequence
  Description of Artificial Sequence: Synthetic oligonucleotide
aagauggcuaaggucaccu

SEQ ID NO: 2244264 - RNA, 19 nt, Artificial Sequence
  Description of Artificial Sequence: Synthetic oligonucleotide
gugauaauguugaaugcug

SEQ ID NO: 2244265 - RNA, 19 nt, Artificial Sequence
  Description of Artificial Sequence: Synthetic oligonucleotide
uguuuuggauuuccagaga

SEQ ID NO: 2244266 - RNA, 19 nt, Artificial Sequence
  Description of Artificial Sequence: Synthetic oligonucleotide
uaaucaucagcagaacaaa

SEQ ID NO: 2244267 - RNA, 19 nt, Artificial Sequence
  Description of Artificial Sequence: Synthetic oligonucleotide
cuuaacccauguauguuuc

SEQ ID NO: 2244268 - RNA, 19 nt, Artificial Sequence
  Description of Artificial Sequence: Synthetic oligonucleotide
agcagaacaaagaacgaca

SEQ ID NO: 2244269 - RNA, 19 nt, Artificial Sequence
  Description of Artificial Sequence: Synthetic oligonucleotide
ugagcuguucacaccacaa

SEQ ID NO: 2244270 - RNA, 19 nt, Artificial Sequence
  Description of Artificial Sequence: Synthetic oligonucleotide
agcccuaaggccugacugg

SEQ ID NO: 2244271 - RNA, 19 nt, Artificial Sequence
  Description of Artificial Sequence: Synthetic oligonucleotide
ugucaaucuggcaguugag

SEQ ID NO: 2244272 - RNA, 19 nt, Artificial Sequence
  Description of Artificial Sequence: Synthetic oligonucleotide
aagagguaagagaaagcca

SEQ ID NO: 2244273 - RNA, 19 nt, Artificial Sequence
  Description of Artificial Sequence: Synthetic oligonucleotide
ugucaggaagggaagguua

SEQ ID NO: 2244274 - RNA, 19 nt, Artificial Sequence
  Description of Artificial Sequence: Synthetic oligonucleotide
uauaacaggggccgaugaa

SEQ ID NO: 2244275 - RNA, 19 nt, Artificial Sequence
  Description of Artificial Sequence: Synthetic oligonucleotide
gucauucaggccuucugcc

SEQ ID NO: 2244276 - RNA, 19 nt, Artificial Sequence
  Description of Artificial Sequence: Synthetic oligonucleotide
uaccauaauaauggagccc

SEQ ID NO: 2244277 - RNA, 19 nt, Artificial Sequence
  Description of Artificial Sequence: Synthetic oligonucleotide
agugucagugcaaaggaca

SEQ ID NO: 2244278 - RNA, 19 nt, Artificial Sequence
  Description of Artificial Sequence: Synthetic oligonucleotide
uguuuagggccucaugcua

SEQ ID NO: 2244279 - RNA, 19 nt, Artificial Sequence
  Description of Artificial Sequence: Synthetic oligonucleotide
gaacauugcccagugucag

SEQ ID NO: 2244280 - RNA, 19 nt, Artificial Sequence
  Description of Artificial Sequence: Synthetic oligonucleotide
ugaagucccaugcugccau

SEQ ID NO: 2244281 - RNA, 19 nt, Artificial Sequence
  Description of Artificial Sequence: Synthetic oligonucleotide
uuaagggauauggcuacug

SEQ ID NO: 2244282 - RNA, 19 nt, Artificial Sequence
  Description of Artificial Sequence: Synthetic oligonucleotide
uucacaccacaacacugca

SEQ ID NO: 2244283 - RNA, 19 nt, Artificial Sequence
  Description of Artificial Sequence: Synthetic oligonucleotide
gacugguuuugucaaucug

SEQ ID NO: 2244284 - RNA, 19 nt, Artificial Sequence
  Description of Artificial Sequence: Synthetic oligonucleotide
auaagcaggcacuuauuuu

SEQ ID NO: 2244285 - RNA, 19 nt, Artificial Sequence
  Description of Artificial Sequence: Synthetic oligonucleotide
uacggaagaguacuaccaa

SEQ ID NO: 2244286 - RNA, 19 nt, Artificial Sequence
  Description of Artificial Sequence: Synthetic oligonucleotide
guucacaccacaacacugc

SEQ ID NO: 2244287 - RNA, 19 nt, Artificial Sequence
  Description of Artificial Sequence: Synthetic oligonucleotide
acccugaacaucugcaccu

SEQ ID NO: 2244288 - RNA, 19 nt, Artificial Sequence
  Description of Artificial Sequence: Synthetic oligonucleotide
aucaucagcagaacaaaga

SEQ ID NO: 2244289 - RNA, 19 nt, Artificial Sequence
  Description of Artificial Sequence: Synthetic oligonucleotide
guaaugauuccaauauaca

SEQ ID NO: 2244290 - RNA, 19 nt, Artificial Sequence
  Description of Artificial Sequence: Synthetic oligonucleotide
uuauaacaacccugaacau

SEQ ID NO: 2244291 - RNA, 19 nt, Artificial Sequence
  Description of Artificial Sequence: Synthetic oligonucleotide
caggaagggaagguuacgg

SEQ ID NO: 2244292 - RNA, 19 nt, Artificial Sequence
  Description of Artificial Sequence: Synthetic oligonucleotide
acuaccaauaaggugguuu

SEQ ID NO: 2244293 - RNA, 19 nt, Artificial Sequence
  Description of Artificial Sequence: Synthetic oligonucleotide
uaaggucaccucagcaaga

SEQ ID NO: 2244294 - RNA, 19 nt, Artificial Sequence
  Description of Artificial Sequence: Synthetic oligonucleotide
caaugacgagaacauugcc

SEQ ID NO: 2244295 - RNA, 19 nt, Artificial Sequence
  Description of Artificial Sequence: Synthetic oligonucleotide
gcaagucacagcccuaagg

SEQ ID NO: 2244296 - RNA, 19 nt, Artificial Sequence
  Description of Artificial Sequence: Synthetic oligonucleotide
uggcaaauauucucuuccu

SEQ ID NO: 2244297 - RNA, 19 nt, Artificial Sequence
  Description of Artificial Sequence: Synthetic oligonucleotide
ucaggaagggaagguuacg

SEQ ID NO: 2244298 - RNA, 19 nt, Artificial Sequence
  Description of Artificial Sequence: Synthetic oligonucleotide
ggcaacuaccauaauaaug

SEQ ID NO: 2244299 - RNA, 19 nt, Artificial Sequence
  Description of Artificial Sequence: Synthetic oligonucleotide
ugguaaugauuccaauaua

SEQ ID NO: 2244300 - RNA, 19 nt, Artificial Sequence
  Description of Artificial Sequence: Synthetic oligonucleotide
gaagguuacggaagaguac

SEQ ID NO: 2244301 - RNA, 19 nt, Artificial Sequence
  Description of Artificial Sequence: Synthetic oligonucleotide
aagucccaugcugccaugg

SEQ ID NO: 2244302 - RNA, 19 nt, Artificial Sequence
  Description of Artificial Sequence: Synthetic oligonucleotide
cauucaggccuucugccac

SEQ ID NO: 2244303 - RNA, 19 nt, Artificial Sequence
  Description of Artificial Sequence: Synthetic oligonucleotide
agaugugacuggaugaagu

SEQ ID NO: 2244304 - RNA, 19 nt, Artificial Sequence
  Description of Artificial Sequence: Synthetic oligonucleotide
aaaagucuuuuaagcucag

SEQ ID NO: 2244305 - RNA, 19 nt, Artificial Sequence
  Description of Artificial Sequence: Synthetic oligonucleotide
gcaccuguaucacacauac

SEQ ID NO: 2244306 - RNA, 19 nt, Artificial Sequence
  Description of Artificial Sequence: Synthetic oligonucleotide
agccacagacccaaaagag

SEQ ID NO: 2244307 - RNA, 19 nt, Artificial Sequence
  Description of Artificial Sequence: Synthetic oligonucleotide
uugagaugggaaguucaug

SEQ ID NO: 2244308 - RNA, 19 nt, Artificial Sequence
  Description of Artificial Sequence: Synthetic oligonucleotide
auaauggagcccacaauga

SEQ ID NO: 2244309 - RNA, 19 nt, Artificial Sequence
  Description of Artificial Sequence: Synthetic oligonucleotide
agauaccaaagcccaaaau

SEQ ID NO: 2244310 - RNA, 19 nt, Artificial Sequence
  Description of Artificial Sequence: Synthetic oligonucleotide
gacauaagcaggcacuuau

SEQ ID NO: 2244311 - RNA, 19 nt, Artificial Sequence
  Description of Artificial Sequence: Synthetic oligonucleotide
gaugggaaguucauggcaa

SEQ ID NO: 2244312 - RNA, 19 nt, Artificial Sequence
  Description of Artificial Sequence: Synthetic oligonucleotide
ugacugguuuugucaaucu

SEQ ID NO: 2244313 - RNA, 19 nt, Artificial Sequence
  Description of Artificial Sequence: Synthetic oligonucleotide
agaguacuaccaauaaggu

SEQ ID NO: 2244314 - RNA, 19 nt, Artificial Sequence
  Description of Artificial Sequence: Synthetic oligonucleotide
agucacagcccuaaggccu

SEQ ID NO: 2244315 - RNA, 19 nt, Artificial Sequence
  Description of Artificial Sequence: Synthetic oligonucleotide
acaucugcaccuggugggc

SEQ ID NO: 2244316 - RNA, 19 nt, Artificial Sequence
  Description of Artificial Sequence: Synthetic oligonucleotide
ugcuaucaguuggugaaug

SEQ ID NO: 2244317 - RNA, 19 nt, Artificial Sequence
  Description of Artificial Sequence: Synthetic oligonucleotide
gauugaucccaugcagccc

SEQ ID NO: 2244318 - RNA, 19 nt, Artificial Sequence
  Description of Artificial Sequence: Synthetic oligonucleotide
ugcuauggguguuuuggau

SEQ ID NO: 2244319 - RNA, 19 nt, Artificial Sequence
  Description of Artificial Sequence: Synthetic oligonucleotide
agaacauugcccaguguca

SEQ ID NO: 2244320 - RNA, 19 nt, Artificial Sequence
  Description of Artificial Sequence: Synthetic oligonucleotide
uuaacccauguauguuucu

SEQ ID NO: 2244321 - RNA, 19 nt, Artificial Sequence
  Description of Artificial Sequence: Synthetic oligonucleotide
caaaggacauccccagcac

SEQ ID NO: 2244322 - RNA, 19 nt, Artificial Sequence
  Description of Artificial Sequence: Synthetic oligonucleotide
caacccugaacaucugcac

SEQ ID NO: 2244323 - RNA, 19 nt, Artificial Sequence
  Description of Artificial Sequence: Synthetic oligonucleotide
guucagcuuuuguucauac

SEQ ID NO: 2244324 - RNA, 19 nt, Artificial Sequence
  Description of Artificial Sequence: Synthetic oligonucleotide
guaucacacauacacagau

SEQ ID NO: 2244325 - RNA, 19 nt, Artificial Sequence
  Description of Artificial Sequence: Synthetic oligonucleotide
cagcccuaaggccugacug

SEQ ID NO: 2244326 - RNA, 19 nt, Artificial Sequence
  Description of Artificial Sequence: Synthetic oligonucleotide
uaagcucagggcaguugca

SEQ ID NO: 2244327 - RNA, 19 nt, Artificial Sequence
  Description of Artificial Sequence: Synthetic oligonucleotide
ugcaagucacagcccuaag

SEQ ID NO: 2244328 - RNA, 19 nt, Artificial Sequence
  Description of Artificial Sequence: Synthetic oligonucleotide
agauggcuaaggucaccuc

SEQ ID NO: 2244329 - RNA, 19 nt, Artificial Sequence
  Description of Artificial Sequence: Synthetic oligonucleotide
gacccaaaagagcaaguua

SEQ ID NO: 2244330 - RNA, 19 nt, Artificial Sequence
  Description of Artificial Sequence: Synthetic oligonucleotide
ugcuggggauaguaugacc

SEQ ID NO: 2244331 - RNA, 19 nt, Artificial Sequence
  Description of Artificial Sequence: Synthetic oligonucleotide
cugcucaugccccaugcug

SEQ ID NO: 2244332 - RNA, 19 nt, Artificial Sequence
  Description of Artificial Sequence: Synthetic oligonucleotide
ugguuuugucaaucuggca

SEQ ID NO: 2244333 - RNA, 19 nt, Artificial Sequence
  Description of Artificial Sequence: Synthetic oligonucleotide
agaugguaaugauuccaau

SEQ ID NO: 2244334 - RNA, 19 nt, Artificial Sequence
  Description of Artificial Sequence: Synthetic oligonucleotide
aguucauggcaaauauucu

SEQ ID NO: 2244335 - RNA, 19 nt, Artificial Sequence
  Description of Artificial Sequence: Synthetic oligonucleotide
acaacccugaacaucugca

SEQ ID NO: 2244336 - RNA, 19 nt, Artificial Sequence
  Description of Artificial Sequence: Synthetic oligonucleotide
uguauguuucuaccaucuu

SEQ ID NO: 2244337 - RNA, 19 nt, Artificial Sequence
  Description of Artificial Sequence: Synthetic oligonucleotide
uuugucaaucuggcaguug

SEQ ID NO: 2244338 - RNA, 19 nt, Artificial Sequence
  Description of Artificial Sequence: Synthetic oligonucleotide
acggaagaguacuaccaau

SEQ ID NO: 2244339 - RNA, 19 nt, Artificial Sequence
  Description of Artificial Sequence: Synthetic oligonucleotide
caaagcccaaaaugcaaca

SEQ ID NO: 2244340 - RNA, 19 nt, Artificial Sequence
  Description of Artificial Sequence: Synthetic oligonucleotide
ugacgagaacauugcccag

SEQ ID NO: 2244341 - RNA, 19 nt, Artificial Sequence
  Description of Artificial Sequence: Synthetic oligonucleotide
uuagggccucaugcuaugg

SEQ ID NO: 2244342 - RNA, 19 nt, Artificial Sequence
  Description of Artificial Sequence: Synthetic oligonucleotide
cacuugagcuguucacacc

SEQ ID NO: 2244343 - RNA, 19 nt, Artificial Sequence
  Description of Artificial Sequence: Synthetic oligonucleotide
aucccaugcagcccaagaa

SEQ ID NO: 2244344 - RNA, 19 nt, Artificial Sequence
  Description of Artificial Sequence: Synthetic oligonucleotide
auggcuaaggucaccucag

SEQ ID NO: 2244345 - RNA, 19 nt, Artificial Sequence
  Description of Artificial Sequence: Synthetic oligonucleotide
guuuugucaaucuggcagu

SEQ ID NO: 2244346 - RNA, 19 nt, Artificial Sequence
  Description of Artificial Sequence: Synthetic oligonucleotide
gcaaaggacauccccagca

SEQ ID NO: 2244347 - RNA, 19 nt, Artificial Sequence
  Description of Artificial Sequence: Synthetic oligonucleotide
caggggccgaugaaggaag

SEQ ID NO: 2244348 - RNA, 19 nt, Artificial Sequence
  Description of Artificial Sequence: Synthetic oligonucleotide
ucugagugauaauguugaa

SEQ ID NO: 2244349 - RNA, 19 nt, Artificial Sequence
  Description of Artificial Sequence: Synthetic oligonucleotide
ggucaccucagcaagaaga

SEQ ID NO: 2244350 - RNA, 19 nt, Artificial Sequence
  Description of Artificial Sequence: Synthetic oligonucleotide
ggugaaugauuuucuucug

SEQ ID NO: 2244351 - RNA, 19 nt, Artificial Sequence
  Description of Artificial Sequence: Synthetic oligonucleotide
uucuuaacccauguauguu

SEQ ID NO: 2244352 - RNA, 19 nt, Artificial Sequence
  Description of Artificial Sequence: Synthetic oligonucleotide
cagggcaguugcaagucac

SEQ ID NO: 2244353 - RNA, 19 nt, Artificial Sequence
  Description of Artificial Sequence: Synthetic oligonucleotide
uaaggccugacugguuuug

SEQ ID NO: 2244354 - RNA, 19 nt, Artificial Sequence
  Description of Artificial Sequence: Synthetic oligonucleotide
ccaaagcccaaaaugcaac

SEQ ID NO: 2244355 - RNA, 19 nt, Artificial Sequence
  Description of Artificial Sequence: Synthetic oligonucleotide
uaacccauguauguuucua

SEQ ID NO: 2244356 - RNA, 19 nt, Artificial Sequence
  Description of Artificial Sequence: Synthetic oligonucleotide
agaacgacauaagcaggca

SEQ ID NO: 2244357 - RNA, 19 nt, Artificial Sequence
  Description of Artificial Sequence: Synthetic oligonucleotide
uggcuaaggucaccucagc

SEQ ID NO: 2244358 - RNA, 19 nt, Artificial Sequence
  Description of Artificial Sequence: Synthetic oligonucleotide
guauguuucuaccaucuuu

SEQ ID NO: 2244359 - RNA, 19 nt, Artificial Sequence
  Description of Artificial Sequence: Synthetic oligonucleotide
uuuaagggauauggcuacu

SEQ ID NO: 2244360 - RNA, 19 nt, Artificial Sequence
  Description of Artificial Sequence: Synthetic oligonucleotide
cagaugguaaugauuccaa

SEQ ID NO: 2244361 - RNA, 19 nt, Artificial Sequence
  Description of Artificial Sequence: Synthetic oligonucleotide
caaucacuugagcuguuca

SEQ ID NO: 2244362 - RNA, 19 nt, Artificial Sequence
  Description of Artificial Sequence: Synthetic oligonucleotide
ugccccaugcuggggauag

SEQ ID NO: 2244363 - RNA, 19 nt, Artificial Sequence
  Description of Artificial Sequence: Synthetic oligonucleotide
uuccuugauugaucccaug

SEQ ID NO: 2244364 - RNA, 19 nt, Artificial Sequence
  Description of Artificial Sequence: Synthetic oligonucleotide
gcaguugagugucagugca

SEQ ID NO: 2244365 - RNA, 19 nt, Artificial Sequence
  Description of Artificial Sequence: Synthetic oligonucleotide
aaaugccaggcaggcaggu

SEQ ID NO: 2244366 - RNA, 19 nt, Artificial Sequence
  Description of Artificial Sequence: Synthetic oligonucleotide
ugccauggugcuguugucu

SEQ ID NO: 2244367 - RNA, 19 nt, Artificial Sequence
  Description of Artificial Sequence: Synthetic oligonucleotide
gcuaaggucaccucagcaa

SEQ ID NO: 2244368 - RNA, 19 nt, Artificial Sequence
  Description of Artificial Sequence: Synthetic oligonucleotide
ggaagggaagguuacggaa

SEQ ID NO: 2244369 - RNA, 19 nt, Artificial Sequence
  Description of Artificial Sequence: Synthetic oligonucleotide
aagcugcucaugccccaug

SEQ ID NO: 2244370 - RNA, 19 nt, Artificial Sequence
  Description of Artificial Sequence: Synthetic oligonucleotide
cuugagcuguucacaccac

SEQ ID NO: 2244371 - RNA, 19 nt, Artificial Sequence
  Description of Artificial Sequence: Synthetic oligonucleotide
caccacaacacugcagaug

SEQ ID NO: 2244372 - RNA, 19 nt, Artificial Sequence
  Description of Artificial Sequence: Synthetic oligonucleotide
gagcccacaaugacgagaa

SEQ ID NO: 2244373 - RNA, 19 nt, Artificial Sequence
  Description of Artificial Sequence: Synthetic oligonucleotide
gucaggaagggaagguuac

SEQ ID NO: 2244374 - RNA, 19 nt, Artificial Sequence
  Description of Artificial Sequence: Synthetic oligonucleotide
ggaagagguaagagaaagc

SEQ ID NO: 2244375 - RNA, 19 nt, Artificial Sequence
  Description of Artificial Sequence: Synthetic oligonucleotide
aggcaacuaccauaauaau

SEQ ID NO: 2244376 - RNA, 19 nt, Artificial Sequence
  Description of Artificial Sequence: Synthetic oligonucleotide
agacccaaaagagcaaguu

SEQ ID NO: 2244377 - RNA, 19 nt, Artificial Sequence
  Description of Artificial Sequence: Synthetic oligonucleotide
gagugucagugcaaaggac

SEQ ID NO: 2244378 - RNA, 19 nt, Artificial Sequence
  Description of Artificial Sequence: Synthetic oligonucleotide
agggauauggcuacugcua

SEQ ID NO: 2244379 - RNA, 19 nt, Artificial Sequence
  Description of Artificial Sequence: Synthetic oligonucleotide
caguugcaagucacagccc

SEQ ID NO: 2244380 - RNA, 19 nt, Artificial Sequence
  Description of Artificial Sequence: Synthetic oligonucleotide
cagaugugacuggaugaag

SEQ ID NO: 2244381 - RNA, 19 nt, Artificial Sequence
  Description of Artificial Sequence: Synthetic oligonucleotide
augguggaccacuggucca

SEQ ID NO: 2244382 - RNA, 19 nt, Artificial Sequence
  Description of Artificial Sequence: Synthetic oligonucleotide
acagcccuaaggccugacu

SEQ ID NO: 2244383 - RNA, 19 nt, Artificial Sequence
  Description of Artificial Sequence: Synthetic oligonucleotide
ggaaguucauggcaaauau

SEQ ID NO: 2244384 - RNA, 19 nt, Artificial Sequence
  Description of Artificial Sequence: Synthetic oligonucleotide
ugcuugagaugggaaguuc

SEQ ID NO: 2244385 - RNA, 19 nt, Artificial Sequence
  Description of Artificial Sequence: Synthetic oligonucleotide
caaucuggcaguugagugu

SEQ ID NO: 2244386 - RNA, 19 nt, Artificial Sequence
  Description of Artificial Sequence: Synthetic oligonucleotide
cauauguguucagcuuuug

SEQ ID NO: 2244387 - RNA, 19 nt, Artificial Sequence
  Description of Artificial Sequence: Synthetic oligonucleotide
uuuugucaaucuggcaguu

SEQ ID NO: 2244388 - RNA, 19 nt, Artificial Sequence
  Description of Artificial Sequence: Synthetic oligonucleotide
ccaugcuggggauaguaug

SEQ ID NO: 2244389 - RNA, 19 nt, Artificial Sequence
  Description of Artificial Sequence: Synthetic oligonucleotide
accaucuuuaagggauaug

SEQ ID NO: 2244390 - RNA, 19 nt, Artificial Sequence
  Description of Artificial Sequence: Synthetic oligonucleotide
gcuguucacaccacaacac

SEQ ID NO: 2244391 - RNA, 19 nt, Artificial Sequence
  Description of Artificial Sequence: Synthetic oligonucleotide
caauuucaagcugcucaug

SEQ ID NO: 2244392 - RNA, 19 nt, Artificial Sequence
  Description of Artificial Sequence: Synthetic oligonucleotide
gguaagagaaagccaaaau

SEQ ID NO: 2244393 - RNA, 19 nt, Artificial Sequence
  Description of Artificial Sequence: Synthetic oligonucleotide
gguuacggaagaguacuac

SEQ ID NO: 2244394 - RNA, 19 nt, Artificial Sequence
  Description of Artificial Sequence: Synthetic oligonucleotide
gauguauaacaggggccga

SEQ ID NO: 2244395 - RNA, 19 nt, Artificial Sequence
  Description of Artificial Sequence: Synthetic oligonucleotide
uggggauaguaugaccuuu

SEQ ID NO: 2244396 - RNA, 19 nt, Artificial Sequence
  Description of Artificial Sequence: Synthetic oligonucleotide
gaagucccaugcugccaug

SEQ ID NO: 2244397 - RNA, 19 nt, Artificial Sequence
  Description of Artificial Sequence: Synthetic oligonucleotide
uaccaucuuuaagggauau

SEQ ID NO: 2244398 - RNA, 19 nt, Artificial Sequence
  Description of Artificial Sequence: Synthetic oligonucleotide
ugggaaguucauggcaaau

SEQ ID NO: 2244399 - RNA, 19 nt, Artificial Sequence
  Description of Artificial Sequence: Synthetic oligonucleotide
uuuuaagcucagggcaguu

SEQ ID NO: 2244400 - RNA, 19 nt, Artificial Sequence
  Description of Artificial Sequence: Synthetic oligonucleotide
ggccugacugguuuuguca

SEQ ID NO: 2244401 - RNA, 19 nt, Artificial Sequence
  Description of Artificial Sequence: Synthetic oligonucleotide
cuauggguguuuuggauuu

SEQ ID NO: 2244402 - RNA, 19 nt, Artificial Sequence
  Description of Artificial Sequence: Synthetic oligonucleotide
gcucaugccccaugcuggg

SEQ ID NO: 2244403 - RNA, 19 nt, Artificial Sequence
  Description of Artificial Sequence: Synthetic oligonucleotide
cuacugcuaucaguuggug

SEQ ID NO: 2244404 - RNA, 19 nt, Artificial Sequence
  Description of Artificial Sequence: Synthetic oligonucleotide
acgacauaagcaggcacuu

SEQ ID NO: 2244405 - RNA, 19 nt, Artificial Sequence
  Description of Artificial Sequence: Synthetic oligonucleotide
ggcuaaggucaccucagca

SEQ ID NO: 2244406 - RNA, 19 nt, Artificial Sequence
  Description of Artificial Sequence: Synthetic oligonucleotide
gcuaucaguuggugaauga

SEQ ID NO: 2244407 - RNA, 19 nt, Artificial Sequence
  Description of Artificial Sequence: Synthetic oligonucleotide
ugguggaccacugguccaa

SEQ ID NO: 2244408 - RNA, 19 nt, Artificial Sequence
  Description of Artificial Sequence: Synthetic oligonucleotide
gacgagaacauugcccagu

SEQ ID NO: 2244409 - RNA, 19 nt, Artificial Sequence
  Description of Artificial Sequence: Synthetic oligonucleotide
gucacagcccuaaggccug

SEQ ID NO: 2244410 - RNA, 19 nt, Artificial Sequence
  Description of Artificial Sequence: Synthetic oligonucleotide
uggagcccacaaugacgag

SEQ ID NO: 2244411 - RNA, 19 nt, Artificial Sequence
  Description of Artificial Sequence: Synthetic oligonucleotide
gggcaguugcaagucacag

SEQ ID NO: 2244412 - RNA, 19 nt, Artificial Sequence
  Description of Artificial Sequence: Synthetic oligonucleotide
ccuugauugaucccaugca

SEQ ID NO: 2244413 - RNA, 19 nt, Artificial Sequence
  Description of Artificial Sequence: Synthetic oligonucleotide
agaagauaccaaagcccaa

SEQ ID NO: 2244414 - RNA, 19 nt, Artificial Sequence
  Description of Artificial Sequence: Synthetic oligonucleotide
gcuuuguuauaacaacccu

SEQ ID NO: 2244415 - RNA, 19 nt, Artificial Sequence
  Description of Artificial Sequence: Synthetic oligonucleotide
ccuguaucacacauacaca

SEQ ID NO: 2244416 - RNA, 19 nt, Artificial Sequence
  Description of Artificial Sequence: Synthetic oligonucleotide
aggacauauuucagcaauu

SEQ ID NO: 2244417 - RNA, 19 nt, Artificial Sequence
  Description of Artificial Sequence: Synthetic oligonucleotide
cuguucacaccacaacacu

SEQ ID NO: 2244418 - RNA, 19 nt, Artificial Sequence
  Description of Artificial Sequence: Synthetic oligonucleotide
caggccuucugccacauau

SEQ ID NO: 2244419 - RNA, 19 nt, Artificial Sequence
  Description of Artificial Sequence: Synthetic oligonucleotide
caggcaggcagguaauugu

SEQ ID NO: 2244420 - RNA, 19 nt, Artificial Sequence
  Description of Artificial Sequence: Synthetic oligonucleotide
ugacuggaugaagucccau

SEQ ID NO: 2244421 - RNA, 19 nt, Artificial Sequence
  Description of Artificial Sequence: Synthetic oligonucleotide
uauggguguuuuggauuuc

SEQ ID NO: 2244422 - RNA, 19 nt, Artificial Sequence
  Description of Artificial Sequence: Synthetic oligonucleotide
acauaagcaggcacuuauu

SEQ ID NO: 2244423 - RNA, 19 nt, Artificial Sequence
  Description of Artificial Sequence: Synthetic oligonucleotide
cagaacaaagaacgacaua

SEQ ID NO: 2244424 - RNA, 19 nt, Artificial Sequence
  Description of Artificial Sequence: Synthetic oligonucleotide
cccauguauguuucuacca

SEQ ID NO: 2244425 - RNA, 19 nt, Artificial Sequence
  Description of Artificial Sequence: Synthetic oligonucleotide
gcuggggauaguaugaccu

SEQ ID NO: 2244426 - RNA, 19 nt, Artificial Sequence
  Description of Artificial Sequence: Synthetic oligonucleotide
agaaggcaacuaccauaau

SEQ ID NO: 2244427 - RNA, 19 nt, Artificial Sequence
  Description of Artificial Sequence: Synthetic oligonucleotide
cuaccaucuuuaagggaua

SEQ ID NO: 2244428 - RNA, 19 nt, Artificial Sequence
  Description of Artificial Sequence: Synthetic oligonucleotide
cagcaagaagaauaaucau

SEQ ID NO: 2244429 - RNA, 19 nt, Artificial Sequence
  Description of Artificial Sequence: Synthetic oligonucleotide
cugagugauaauguugaau

SEQ ID NO: 2244430 - RNA, 19 nt, Artificial Sequence
  Description of Artificial Sequence: Synthetic oligonucleotide
cuaucaguuggugaaugau

SEQ ID NO: 2244431 - RNA, 19 nt, Artificial Sequence
  Description of Artificial Sequence: Synthetic oligonucleotide
ggaccaggaagaagauacc

SEQ ID NO: 2244432 - RNA, 19 nt, Artificial Sequence
  Description of Artificial Sequence: Synthetic oligonucleotide
gguaauuguuuagggccuc

SEQ ID NO: 2244433 - RNA, 19 nt, Artificial Sequence
  Description of Artificial Sequence: Synthetic oligonucleotide
guuuagggccucaugcuau

SEQ ID NO: 2244434 - RNA, 19 nt, Artificial Sequence
  Description of Artificial Sequence: Synthetic oligonucleotide
agggcaguugcaagucaca

SEQ ID NO: 2244435 - RNA, 19 nt, Artificial Sequence
  Description of Artificial Sequence: Synthetic oligonucleotide
cauacacaaagagcaagau

SEQ ID NO: 2244436 - RNA, 19 nt, Artificial Sequence
  Description of Artificial Sequence: Synthetic oligonucleotide
acugcagaugugacuggau

SEQ ID NO: 2244437 - RNA, 19 nt, Artificial Sequence
  Description of Artificial Sequence: Synthetic oligonucleotide
gaccacugguccaaucacu

SEQ ID NO: 2244438 - RNA, 19 nt, Artificial Sequence
  Description of Artificial Sequence: Synthetic oligonucleotide
cacugcagaugugacugga

SEQ ID NO: 2244439 - RNA, 19 nt, Artificial Sequence
  Description of Artificial Sequence: Synthetic oligonucleotide
ccgaugaaggaagagguaa

SEQ ID NO: 2244440 - RNA, 19 nt, Artificial Sequence
  Description of Artificial Sequence: Synthetic oligonucleotide
ccauaauaauggagcccac

SEQ ID NO: 2244441 - RNA, 19 nt, Artificial Sequence
  Description of Artificial Sequence: Synthetic oligonucleotide
gccugacugguuuugucaa

SEQ ID NO: 2244442 - RNA, 19 nt, Artificial Sequence
  Description of Artificial Sequence: Synthetic oligonucleotide
agcaccuguaucacacaua

SEQ ID NO: 2244443 - RNA, 19 nt, Artificial Sequence
  Description of Artificial Sequence: Synthetic oligonucleotide
ggccuucugccacauaugu

SEQ ID NO: 2244444 - RNA, 19 nt, Artificial Sequence
  Description of Artificial Sequence: Synthetic oligonucleotide
gcuauggguguuuuggauu

SEQ ID NO: 2244445 - RNA, 19 nt, Artificial Sequence
  Description of Artificial Sequence: Synthetic oligonucleotide
aggcaggcagguaauuguu

SEQ ID NO: 2244446 - RNA, 19 nt, Artificial Sequence
  Description of Artificial Sequence: Synthetic oligonucleotide
gggauauggcuacugcuau

SEQ ID NO: 2244447 - RNA, 19 nt, Artificial Sequence
  Description of Artificial Sequence: Synthetic oligonucleotide
caccuguaucacacauaca

SEQ ID NO: 2244448 - RNA, 19 nt, Artificial Sequence
  Description of Artificial Sequence: Synthetic oligonucleotide
ccaggcaggcagguaauug

SEQ ID NO: 2244449 - RNA, 19 nt, Artificial Sequence
  Description of Artificial Sequence: Synthetic oligonucleotide
cccacaaugacgagaacau

SEQ ID NO: 2244450 - RNA, 19 nt, Artificial Sequence
  Description of Artificial Sequence: Synthetic oligonucleotide
ggacauauuucagcaauuu

SEQ ID NO: 2244451 - RNA, 19 nt, Artificial Sequence
  Description of Artificial Sequence: Synthetic oligonucleotide
ggggccgaugaaggaagag

SEQ ID NO: 2244452 - RNA, 19 nt, Artificial Sequence
  Description of Artificial Sequence: Synthetic oligonucleotide
cauugcccagugucaggaa

SEQ ID NO: 2244453 - RNA, 19 nt, Artificial Sequence
  Description of Artificial Sequence: Synthetic oligonucleotide
guugcaagucacagcccua

SEQ ID NO: 2244454 - RNA, 19 nt, Artificial Sequence
  Description of Artificial Sequence: Synthetic oligonucleotide
cggaagaguacuaccaaua

SEQ ID NO: 2244455 - RNA, 19 nt, Artificial Sequence
  Description of Artificial Sequence: Synthetic oligonucleotide
agguuacggaagaguacua

SEQ ID NO: 2244456 - RNA, 19 nt, Artificial Sequence
  Description of Artificial Sequence: Synthetic oligonucleotide
ccaaucacuugagcuguuc

SEQ ID NO: 2244457 - RNA, 19 nt, Artificial Sequence
  Description of Artificial Sequence: Synthetic oligonucleotide
gcuacugcuaucaguuggu

SEQ ID NO: 2244458 - RNA, 19 nt, Artificial Sequence
  Description of Artificial Sequence: Synthetic oligonucleotide
ggccucaugcuaugggugu

SEQ ID NO: 2244459 - RNA, 19 nt, Artificial Sequence
  Description of Artificial Sequence: Synthetic oligonucleotide
gcccaaaaugcaacagcca

SEQ ID NO: 2244460 - RNA, 19 nt, Artificial Sequence
  Description of Artificial Sequence: Synthetic oligonucleotide
cagcaccuguaucacacau

SEQ ID NO: 2244461 - RNA, 19 nt, Artificial Sequence
  Description of Artificial Sequence: Synthetic oligonucleotide
uacuaccaauaaggugguu

SEQ ID NO: 2244462 - RNA, 19 nt, Artificial Sequence
  Description of Artificial Sequence: Synthetic oligonucleotide
caucugcaccuggugggca

SEQ ID NO: 2244463 - RNA, 19 nt, Artificial Sequence
  Description of Artificial Sequence: Synthetic oligonucleotide
cuggggauaguaugaccuu

SEQ ID NO: 2244464 - RNA, 19 nt, Artificial Sequence
  Description of Artificial Sequence: Synthetic oligonucleotide
cuaaggccugacugguuuu

SEQ ID NO: 2244465 - RNA, 19 nt, Artificial Sequence
  Description of Artificial Sequence: Synthetic oligonucleotide
gcaggcacuuauuuuccuu

SEQ ID NO: 2244466 - RNA, 19 nt, Artificial Sequence
  Description of Artificial Sequence: Synthetic oligonucleotide
cccugaacaucugcaccug

SEQ ID NO: 2244467 - RNA, 19 nt, Artificial Sequence
  Description of Artificial Sequence: Synthetic oligonucleotide
ggacauccccagcaccugu

SEQ ID NO: 2244468 - RNA, 19 nt, Artificial Sequence
  Description of Artificial Sequence: Synthetic oligonucleotide
ccauggugcuguugucuga

SEQ ID NO: 2244469 - RNA, 19 nt, Artificial Sequence
  Description of Artificial Sequence: Synthetic oligonucleotide
caugccccaugcuggggau

SEQ ID NO: 2244470 - RNA, 19 nt, Artificial Sequence
  Description of Artificial Sequence: Synthetic oligonucleotide
caacagccacagacccaaa

SEQ ID NO: 2244471 - RNA, 19 nt, Artificial Sequence
  Description of Artificial Sequence: Synthetic oligonucleotide
cugcuugagaugggaaguu

SEQ ID NO: 2244472 - RNA, 19 nt, Artificial Sequence
  Description of Artificial Sequence: Synthetic oligonucleotide
gccgaugaaggaagaggua

SEQ ID NO: 2244473 - RNA, 19 nt, Artificial Sequence
  Description of Artificial Sequence: Synthetic oligonucleotide
ggggauaguaugaccuuuu

SEQ ID NO: 2244474 - RNA, 19 nt, Artificial Sequence
  Description of Artificial Sequence: Synthetic oligonucleotide
cugcaccuggugggcagga

SEQ ID NO: 2244475 - RNA, 19 nt, Artificial Sequence
  Description of Artificial Sequence: Synthetic oligonucleotide
cugcuaucaguuggugaau

SEQ ID NO: 2244476 - RNA, 19 nt, Artificial Sequence
  Description of Artificial Sequence: Synthetic oligonucleotide
cucaugcuauggguguuuu

SEQ ID NO: 2244477 - RNA, 19 nt, Artificial Sequence
  Description of Artificial Sequence: Synthetic oligonucleotide
augccccaugcuggggaua

SEQ ID NO: 2244478 - RNA, 19 nt, Artificial Sequence
  Description of Artificial Sequence: Synthetic oligonucleotide
augcugccauggugcuguu

SEQ ID NO: 2244479 - RNA, 19 nt, Artificial Sequence
  Description of Artificial Sequence: Synthetic oligonucleotide
gcccuaaggccugacuggu

SEQ ID NO: 2244480 - RNA, 19 nt, Artificial Sequence
  Description of Artificial Sequence: Synthetic oligonucleotide
ggcaggcagguaauuguuu

SEQ ID NO: 2244481 - RNA, 19 nt, Artificial Sequence
  Description of Artificial Sequence: Synthetic oligonucleotide
gcagcccaagaaggcaacu

SEQ ID NO: 2244482 - RNA, 19 nt, Artificial Sequence
  Description of Artificial Sequence: Synthetic oligonucleotide
cccaugcuggggauaguau

SEQ ID NO: 2244483 - RNA, 19 nt, Artificial Sequence
  Description of Artificial Sequence: Synthetic oligonucleotide
ccugacugguuuugucaau

SEQ ID NO: 2244484 - RNA, 19 nt, Artificial Sequence
  Description of Artificial Sequence: Synthetic oligonucleotide
gguggaccacugguccaau

SEQ ID NO: 2244485 - RNA, 19 nt, Artificial Sequence
  Description of Artificial Sequence: Synthetic oligonucleotide
gccucaugcuauggguguu

SEQ ID NO: 2244486 - RNA, 19 nt, Artificial Sequence
  Description of Artificial Sequence: Synthetic oligonucleotide
cgagaacauugcccagugu

SEQ ID NO: 2244487 - RNA, 19 nt, Artificial Sequence
  Description of Artificial Sequence: Synthetic oligonucleotide
ccucaugcuauggguguuu

SEQ ID NO: 2244488 - RNA, 19 nt, Artificial Sequence
  Description of Artificial Sequence: Synthetic oligonucleotide
cccuaaggccugacugguu

SEQ ID NO: 2244489 - RNA, 19 nt, Artificial Sequence
  Description of Artificial Sequence: Synthetic oligonucleotide
uugacaucggcaaugauac

SEQ ID NO: 2244490 - RNA, 19 nt, Artificial Sequence
  Description of Artificial Sequence: Synthetic oligonucleotide
acuacagagauguucacag

SEQ ID NO: 2244491 - RNA, 19 nt, Artificial Sequence
  Description of Artificial Sequence: Synthetic oligonucleotide
uuuggcaugagcauccuug

SEQ ID NO: 2244492 - RNA, 19 nt, Artificial Sequence
  Description of Artificial Sequence: Synthetic oligonucleotide
acauucaugagcuccuggc

SEQ ID NO: 2244493 - RNA, 19 nt, Artificial Sequence
  Description of Artificial Sequence: Synthetic oligonucleotide
ucauuaagggucuugagaa

SEQ ID NO: 2244494 - RNA, 19 nt, Artificial Sequence
  Description of Artificial Sequence: Synthetic oligonucleotide
ucuucagcaacacaaacuc

SEQ ID NO: 2244495 - RNA, 19 nt, Artificial Sequence
  Description of Artificial Sequence: Synthetic oligonucleotide
cauguugucaaucucggcc

SEQ ID NO: 2244496 - RNA, 19 nt, Artificial Sequence
  Description of Artificial Sequence: Synthetic oligonucleotide
ucauacuuauucuugaaau

SEQ ID NO: 2244497 - RNA, 19 nt, Artificial Sequence
  Description of Artificial Sequence: Synthetic oligonucleotide
aaagcugaucucaucauuc

SEQ ID NO: 2244498 - RNA, 19 nt, Artificial Sequence
  Description of Artificial Sequence: Synthetic oligonucleotide
uccauggacaguaccacgg

SEQ ID NO: 2244499 - RNA, 19 nt, Artificial Sequence
  Description of Artificial Sequence: Synthetic oligonucleotide
cuuauucuugaaaucuucc

SEQ ID NO: 2244500 - RNA, 19 nt, Artificial Sequence
  Description of Artificial Sequence: Synthetic oligonucleotide
uccgcaaucucauuccggg

SEQ ID NO: 2244501 - RNA, 19 nt, Artificial Sequence
  Description of Artificial Sequence: Synthetic oligonucleotide
aagaugagccugcugccac

SEQ ID NO: 2244502 - RNA, 19 nt, Artificial Sequence
  Description of Artificial Sequence: Synthetic oligonucleotide
agacuauccaccuuggccu

SEQ ID NO: 2244503 - RNA, 19 nt, Artificial Sequence
  Description of Artificial Sequence: Synthetic oligonucleotide
aacuuggucugguaccagg

SEQ ID NO: 2244504 - RNA, 19 nt, Artificial Sequence
  Description of Artificial Sequence: Synthetic oligonucleotide
aucuccgcaaucucauucc

SEQ ID NO: 2244505 - RNA, 19 nt, Artificial Sequence
  Description of Artificial Sequence: Synthetic oligonucleotide
uccaguggaauucacuaca

SEQ ID NO: 2244506 - RNA, 19 nt, Artificial Sequence
  Description of Artificial Sequence: Synthetic oligonucleotide
cuugacauucaugagcucc

SEQ ID NO: 2244507 - RNA, 19 nt, Artificial Sequence
  Description of Artificial Sequence: Synthetic oligonucleotide
ucaaucucggccugcagcc

SEQ ID NO: 2244508 - RNA, 19 nt, Artificial Sequence
  Description of Artificial Sequence: Synthetic oligonucleotide
ucggccucagcaaugcugg

SEQ ID NO: 2244509 - RNA, 19 nt, Artificial Sequence
  Description of Artificial Sequence: Synthetic oligonucleotide
cagacuauccaccuuggcc

SEQ ID NO: 2244510 - RNA, 19 nt, Artificial Sequence
  Description of Artificial Sequence: Synthetic oligonucleotide
agggucucaaacuuggucu

SEQ ID NO: 2244511 - RNA, 19 nt, Artificial Sequence
  Description of Artificial Sequence: Synthetic oligonucleotide
gaauucacuacagagaugu

SEQ ID NO: 2244512 - RNA, 19 nt, Artificial Sequence
  Description of Artificial Sequence: Synthetic oligonucleotide
acaaccuacucuccucgcc

SEQ ID NO: 2244513 - RNA, 19 nt, Artificial Sequence
  Description of Artificial Sequence: Synthetic oligonucleotide
ucuccagacaaccuacucu

SEQ ID NO: 2244514 - RNA, 19 nt, Artificial Sequence
  Description of Artificial Sequence: Synthetic oligonucleotide
uggauauuucgguucaucu

SEQ ID NO: 2244515 - RNA, 19 nt, Artificial Sequence
  Description of Artificial Sequence: Synthetic oligonucleotide
uguugcgcaggucaucucc

SEQ ID NO: 2244516 - RNA, 19 nt, Artificial Sequence
  Description of Artificial Sequence: Synthetic oligonucleotide
agacaaccuacucuccucg

SEQ ID NO: 2244517 - RNA, 19 nt, Artificial Sequence
  Description of Artificial Sequence: Synthetic oligonucleotide
aaagauccggggaagccgg

SEQ ID NO: 2244518 - RNA, 19 nt, Artificial Sequence
  Description of Artificial Sequence: Synthetic oligonucleotide
aucggcaaugauaccaucc

SEQ ID NO: 2244519 - RNA, 19 nt, Artificial Sequence
  Description of Artificial Sequence: Synthetic oligonucleotide
agcaaugcuggccuccaac

SEQ ID NO: 2244520 - RNA, 19 nt, Artificial Sequence
  Description of Artificial Sequence: Synthetic oligonucleotide
uggacaguaccacggaugu

SEQ ID NO: 2244521 - RNA, 19 nt, Artificial Sequence
  Description of Artificial Sequence: Synthetic oligonucleotide
ucggcaaugauaccaucca

SEQ ID NO: 2244522 - RNA, 19 nt, Artificial Sequence
  Description of Artificial Sequence: Synthetic oligonucleotide
acggaugugucugagaucu

SEQ ID NO: 2244523 - RNA, 19 nt, Artificial Sequence
  Description of Artificial Sequence: Synthetic oligonucleotide
aaucucggccugcagccuc

SEQ ID NO: 2244524 - RNA, 19 nt, Artificial Sequence
  Description of Artificial Sequence: Synthetic oligonucleotide
acagagauguucacagggc

SEQ ID NO: 2244525 - RNA, 19 nt, Artificial Sequence
  Description of Artificial Sequence: Synthetic oligonucleotide
agagauguucacagggccc

SEQ ID NO: 2244526 - RNA, 19 nt, Artificial Sequence
  Description of Artificial Sequence: Synthetic oligonucleotide
aguaccacggaugugucug

SEQ ID NO: 2244527 - RNA, 19 nt, Artificial Sequence
  Description of Artificial Sequence: Synthetic oligonucleotide
cucaaacuuggucugguac

SEQ ID NO: 2244528 - RNA, 19 nt, Artificial Sequence
  Description of Artificial Sequence: Synthetic oligonucleotide
gacauucaugagcuccugg

SEQ ID NO: 2244529 - RNA, 19 nt, Artificial Sequence
  Description of Artificial Sequence: Synthetic oligonucleotide
cuaacuccgucucauuaag

SEQ ID NO: 2244530 - RNA, 19 nt, Artificial Sequence
  Description of Artificial Sequence: Synthetic oligonucleotide
gacaucggcaaugauacca

SEQ ID NO: 2244531 - RNA, 19 nt, Artificial Sequence
  Description of Artificial Sequence: Synthetic oligonucleotide
ucauucagacuauccaccu

SEQ ID NO: 2244532 - RNA, 19 nt, Artificial Sequence
  Description of Artificial Sequence: Synthetic oligonucleotide
uaacuccgucucauuaagg

SEQ ID NO: 2244533 - RNA, 19 nt, Artificial Sequence
  Description of Artificial Sequence: Synthetic oligonucleotide
agugccucaagcugcuguc

SEQ ID NO: 2244534 - RNA, 19 nt, Artificial Sequence
  Description of Artificial Sequence: Synthetic oligonucleotide
ucucauuccggguguugcg

SEQ ID NO: 2244535 - RNA, 19 nt, Artificial Sequence
  Description of Artificial Sequence: Synthetic oligonucleotide
cagagauguucacagggcc

SEQ ID NO: 2244536 - RNA, 19 nt, Artificial Sequence
  Description of Artificial Sequence: Synthetic oligonucleotide
cuccagacaaccuacucuc

SEQ ID NO: 2244537 - RNA, 19 nt, Artificial Sequence
  Description of Artificial Sequence: Synthetic oligonucleotide
auacugggccuugacaucg

SEQ ID NO: 2244538 - RNA, 19 nt, Artificial Sequence
  Description of Artificial Sequence: Synthetic oligonucleotide
ucuccgcaaucucauuccg

SEQ ID NO: 2244539 - RNA, 19 nt, Artificial Sequence
  Description of Artificial Sequence: Synthetic oligonucleotide
uguuuggccugcugcagag

SEQ ID NO: 2244540 - RNA, 19 nt, Artificial Sequence
  Description of Artificial Sequence: Synthetic oligonucleotide
gaugugucugagaucuggg

SEQ ID NO: 2244541 - RNA, 19 nt, Artificial Sequence
  Description of Artificial Sequence: Synthetic oligonucleotide
cuugacaucggcaaugaua

SEQ ID NO: 2244542 - RNA, 19 nt, Artificial Sequence
  Description of Artificial Sequence: Synthetic oligonucleotide
ugagugcuagcuccccacg

SEQ ID NO: 2244543 - RNA, 19 nt, Artificial Sequence
  Description of Artificial Sequence: Synthetic oligonucleotide
agcaaccuccagcucuucc

SEQ ID NO: 2244544 - RNA, 19 nt, Artificial Sequence
  Description of Artificial Sequence: Synthetic oligonucleotide
aaucugggccucaaagauc

SEQ ID NO: 2244545 - RNA, 19 nt, Artificial Sequence
  Description of Artificial Sequence: Synthetic oligonucleotide
acugguuccccgaagauga

SEQ ID NO: 2244546 - RNA, 19 nt, Artificial Sequence
  Description of Artificial Sequence: Synthetic oligonucleotide
cuccgucucauuaaggguc

SEQ ID NO: 2244547 - RNA, 19 nt, Artificial Sequence
  Description of Artificial Sequence: Synthetic oligonucleotide
aaccuacucuccucgccuc

SEQ ID NO: 2244548 - RNA, 19 nt, Artificial Sequence
  Description of Artificial Sequence: Synthetic oligonucleotide
caaagauccggggaagccg

SEQ ID NO: 2244549 - RNA, 19 nt, Artificial Sequence
  Description of Artificial Sequence: Synthetic oligonucleotide
ucaaagauccggggaagcc

SEQ ID NO: 2244550 - RNA, 19 nt, Artificial Sequence
  Description of Artificial Sequence: Synthetic oligonucleotide
ucgcaguuccaccuccagg

SEQ ID NO: 2244551 - RNA, 19 nt, Artificial Sequence
  Description of Artificial Sequence: Synthetic oligonucleotide
cuugagaaagcugaucuca

SEQ ID NO: 2244552 - RNA, 19 nt, Artificial Sequence
  Description of Artificial Sequence: Synthetic oligonucleotide
augagcauccuugagugcu

SEQ ID NO: 2244553 - RNA, 19 nt, Artificial Sequence
  Description of Artificial Sequence: Synthetic oligonucleotide
gcaugagcauccuugagug

SEQ ID NO: 2244554 - RNA, 19 nt, Artificial Sequence
  Description of Artificial Sequence: Synthetic oligonucleotide
ccgaagaugagccugcugc

SEQ ID NO: 2244555 - RNA, 19 nt, Artificial Sequence
  Description of Artificial Sequence: Synthetic oligonucleotide
auggcuagccaucuccuca

SEQ ID NO: 2244556 - RNA, 19 nt, Artificial Sequence
  Description of Artificial Sequence: Synthetic oligonucleotide
auuucgguucaucuccgca

SEQ ID NO: 2244557 - RNA, 19 nt, Artificial Sequence
  Description of Artificial Sequence: Synthetic oligonucleotide
cuacagagauguucacagg

SEQ ID NO: 2244558 - RNA, 19 nt, Artificial Sequence
  Description of Artificial Sequence: Synthetic oligonucleotide
uucaugagcuccuggcacu

SEQ ID NO: 2244559 - RNA, 19 nt, Artificial Sequence
  Description of Artificial Sequence: Synthetic oligonucleotide
cuuccuguuuggcaugagc

SEQ ID NO: 2244560 - RNA, 19 nt, Artificial Sequence
  Description of Artificial Sequence: Synthetic oligonucleotide
cauuccaucuccagacaac

SEQ ID NO: 2244561 - RNA, 19 nt, Artificial Sequence
  Description of Artificial Sequence: Synthetic oligonucleotide
auucuccgcagcugugcgc

SEQ ID NO: 2244562 - RNA, 19 nt, Artificial Sequence
  Description of Artificial Sequence: Synthetic oligonucleotide
uugagaaagcugaucucau

SEQ ID NO: 2244563 - RNA, 19 nt, Artificial Sequence
  Description of Artificial Sequence: Synthetic oligonucleotide
uaagggucuugagaaagcu

SEQ ID NO: 2244564 - RNA, 19 nt, Artificial Sequence
  Description of Artificial Sequence: Synthetic oligonucleotide
gagggucucaaacuugguc

SEQ ID NO: 2244565 - RNA, 19 nt, Artificial Sequence
  Description of Artificial Sequence: Synthetic oligonucleotide
cagcccugcaaucugggcc

SEQ ID NO: 2244566 - RNA, 19 nt, Artificial Sequence
  Description of Artificial Sequence: Synthetic oligonucleotide
guuguccauggacaguacc

SEQ ID NO: 2244567 - RNA, 19 nt, Artificial Sequence
  Description of Artificial Sequence: Synthetic oligonucleotide
ucagacuauccaccuuggc

SEQ ID NO: 2244568 - RNA, 19 nt, Artificial Sequence
  Description of Artificial Sequence: Synthetic oligonucleotide
aacuuggcacgcugguucu

SEQ ID NO: 2244569 - RNA, 19 nt, Artificial Sequence
  Description of Artificial Sequence: Synthetic oligonucleotide
gcuauggcuagccaucucc

SEQ ID NO: 2244570 - RNA, 19 nt, Artificial Sequence
  Description of Artificial Sequence: Synthetic oligonucleotide
uuggcaugagcauccuuga

SEQ ID NO: 2244571 - RNA, 19 nt, Artificial Sequence
  Description of Artificial Sequence: Synthetic oligonucleotide
uugagugcuagcuccccac

SEQ ID NO: 2244572 - RNA, 19 nt, Artificial Sequence
  Description of Artificial Sequence: Synthetic oligonucleotide
cauugcugccacugguucc

SEQ ID NO: 2244573 - RNA, 19 nt, Artificial Sequence
  Description of Artificial Sequence: Synthetic oligonucleotide
ucauguugucaaucucggc

SEQ ID NO: 2244574 - RNA, 19 nt, Artificial Sequence
  Description of Artificial Sequence: Synthetic oligonucleotide
uccaacuuggcacgcuggu

SEQ ID NO: 2244575 - RNA, 19 nt, Artificial Sequence
  Description of Artificial Sequence: Synthetic oligonucleotide
uguugucaaucucggccug

SEQ ID NO: 2244576 - RNA, 19 nt, Artificial Sequence
  Description of Artificial Sequence: Synthetic oligonucleotide
gacaguaccacggaugugu

SEQ ID NO: 2244577 - RNA, 19 nt, Artificial Sequence
  Description of Artificial Sequence: Synthetic oligonucleotide
cauucuccgcagcugugcg

SEQ ID NO: 2244578 - RNA, 19 nt, Artificial Sequence
  Description of Artificial Sequence: Synthetic oligonucleotide
uacucuccucgccucagca

SEQ ID NO: 2244579 - RNA, 19 nt, Artificial Sequence
  Description of Artificial Sequence: Synthetic oligonucleotide
acuccgucucauuaagggu

SEQ ID NO: 2244580 - RNA, 19 nt, Artificial Sequence
  Description of Artificial Sequence: Synthetic oligonucleotide
cucuacgccagcugccgcg

SEQ ID NO: 2244581 - RNA, 19 nt, Artificial Sequence
  Description of Artificial Sequence: Synthetic oligonucleotide
cagccucuggauauuucgg

SEQ ID NO: 2244582 - RNA, 19 nt, Artificial Sequence
  Description of Artificial Sequence: Synthetic oligonucleotide
ucauucuccgcagcugugc

SEQ ID NO: 2244583 - RNA, 19 nt, Artificial Sequence
  Description of Artificial Sequence: Synthetic oligonucleotide
caaacucauucuccgcagc

SEQ ID NO: 2244584 - RNA, 19 nt, Artificial Sequence
  Description of Artificial Sequence: Synthetic oligonucleotide
ugcuccaguggaauucacu

SEQ ID NO: 2244585 - RNA, 19 nt, Artificial Sequence
  Description of Artificial Sequence: Synthetic oligonucleotide
uccgucucauuaagggucu

SEQ ID NO: 2244586 - RNA, 19 nt, Artificial Sequence
  Description of Artificial Sequence: Synthetic oligonucleotide
auauuucgguucaucuccg

SEQ ID NO: 2244587 - RNA, 19 nt, Artificial Sequence
  Description of Artificial Sequence: Synthetic oligonucleotide
uguucauguaggcggcauc

SEQ ID NO: 2244588 - RNA, 19 nt, Artificial Sequence
  Description of Artificial Sequence: Synthetic oligonucleotide
uauuucgguucaucuccgc

SEQ ID NO: 2244589 - RNA, 19 nt, Artificial Sequence
  Description of Artificial Sequence: Synthetic oligonucleotide
ggaugugucugagaucugg

SEQ ID NO: 2244590 - RNA, 19 nt, Artificial Sequence
  Description of Artificial Sequence: Synthetic oligonucleotide
cucggccucagcaaugcug

SEQ ID NO: 2244591 - RNA, 19 nt, Artificial Sequence
  Description of Artificial Sequence: Synthetic oligonucleotide
uggucugguaccaggcuuc

SEQ ID NO: 2244592 - RNA, 19 nt, Artificial Sequence
  Description of Artificial Sequence: Synthetic oligonucleotide
gauccggggaagccgguug

SEQ ID NO: 2244593 - RNA, 19 nt, Artificial Sequence
  Description of Artificial Sequence: Synthetic oligonucleotide
uccagacaaccuacucucc

SEQ ID NO: 2244594 - RNA, 19 nt, Artificial Sequence
  Description of Artificial Sequence: Synthetic oligonucleotide
ugccucaagcugcugucgc

SEQ ID NO: 2244595 - RNA, 19 nt, Artificial Sequence
  Description of Artificial Sequence: Synthetic oligonucleotide
cacgcuucgcaguuccacc

SEQ ID NO: 2244596 - RNA, 19 nt, Artificial Sequence
  Description of Artificial Sequence: Synthetic oligonucleotide
ugcuagcuccccacgcucc

SEQ ID NO: 2244597 - RNA, 19 nt, Artificial Sequence
  Description of Artificial Sequence: Synthetic oligonucleotide
auggacaguaccacggaug

SEQ ID NO: 2244598 - RNA, 19 nt, Artificial Sequence
  Description of Artificial Sequence: Synthetic oligonucleotide
uauccuguuuggccugcug

SEQ ID NO: 2244599 - RNA, 19 nt, Artificial Sequence
  Description of Artificial Sequence: Synthetic oligonucleotide
acucuacgccagcugccgc

SEQ ID NO: 2244600 - RNA, 19 nt, Artificial Sequence
  Description of Artificial Sequence: Synthetic oligonucleotide
aaucucauuccggguguug

SEQ ID NO: 2244601 - RNA, 19 nt, Artificial Sequence
  Description of Artificial Sequence: Synthetic oligonucleotide
cuccaguggaauucacuac

SEQ ID NO: 2244602 - RNA, 19 nt, Artificial Sequence
  Description of Artificial Sequence: Synthetic oligonucleotide
uggcaugagcauccuugag

SEQ ID NO: 2244603 - RNA, 19 nt, Artificial Sequence
  Description of Artificial Sequence: Synthetic oligonucleotide
agccucuggauauuucggu

SEQ ID NO: 2244604 - RNA, 19 nt, Artificial Sequence
  Description of Artificial Sequence: Synthetic oligonucleotide
ucagccucagcccggcuau

SEQ ID NO: 2244605 - RNA, 19 nt, Artificial Sequence
  Description of Artificial Sequence: Synthetic oligonucleotide
ugucaaucucggccugcag

SEQ ID NO: 2244606 - RNA, 19 nt, Artificial Sequence
  Description of Artificial Sequence: Synthetic oligonucleotide
ucgcagcccugcaaucugg

SEQ ID NO: 2244607 - RNA, 19 nt, Artificial Sequence
  Description of Artificial Sequence: Synthetic oligonucleotide
gagugcuagcuccccacgc

SEQ ID NO: 2244608 - RNA, 19 nt, Artificial Sequence
  Description of Artificial Sequence: Synthetic oligonucleotide
gacaaccuacucuccucgc

SEQ ID NO: 2244609 - RNA, 19 nt, Artificial Sequence
  Description of Artificial Sequence: Synthetic oligonucleotide
cuccgcaaucucauuccgg

SEQ ID NO: 2244610 - RNA, 19 nt, Artificial Sequence
  Description of Artificial Sequence: Synthetic oligonucleotide
uuccccgaagaugagccug

SEQ ID NO: 2244611 - RNA, 19 nt, Artificial Sequence
  Description of Artificial Sequence: Synthetic oligonucleotide
cuccaacuuggcacgcugg

SEQ ID NO: 2244612 - RNA, 19 nt, Artificial Sequence
  Description of Artificial Sequence: Synthetic oligonucleotide
ugugcgccuguugauuucc

SEQ ID NO: 2244613 - RNA, 19 nt, Artificial Sequence
  Description of Artificial Sequence: Synthetic oligonucleotide
ucauuccggguguugcgca

SEQ ID NO: 2244614 - RNA, 19 nt, Artificial Sequence
  Description of Artificial Sequence: Synthetic oligonucleotide
acgcugguucuucauguug

SEQ ID NO: 2244615 - RNA, 19 nt, Artificial Sequence
  Description of Artificial Sequence: Synthetic oligonucleotide
cagacaaccuacucuccuc

SEQ ID NO: 2244616 - RNA, 19 nt, Artificial Sequence
  Description of Artificial Sequence: Synthetic oligonucleotide
gcaacacaaacucauucuc

SEQ ID NO: 2244617 - RNA, 19 nt, Artificial Sequence
  Description of Artificial Sequence: Synthetic oligonucleotide
auguaggcggcauccacau

SEQ ID NO: 2244618 - RNA, 19 nt, Artificial Sequence
  Description of Artificial Sequence: Synthetic oligonucleotide
gguaccaggcuucagccuc

SEQ ID NO: 2244619 - RNA, 19 nt, Artificial Sequence
  Description of Artificial Sequence: Synthetic oligonucleotide
aaacuuggucugguaccag

SEQ ID NO: 2244620 - RNA, 19 nt, Artificial Sequence
  Description of Artificial Sequence: Synthetic oligonucleotide
gguuccccgaagaugagcc

SEQ ID NO: 2244621 - RNA, 19 nt, Artificial Sequence
  Description of Artificial Sequence: Synthetic oligonucleotide
caugagcauccuugagugc

SEQ ID NO: 2244622 - RNA, 19 nt, Artificial Sequence
  Description of Artificial Sequence: Synthetic oligonucleotide
cauguaggcggcauccaca

SEQ ID NO: 2244623 - RNA, 19 nt, Artificial Sequence
  Description of Artificial Sequence: Synthetic oligonucleotide
ggcacucuacgccagcugc

SEQ ID NO: 2244624 - RNA, 19 nt, Artificial Sequence
  Description of Artificial Sequence: Synthetic oligonucleotide
cauccuugagugcuagcuc

SEQ ID NO: 2244625 - RNA, 19 nt, Artificial Sequence
  Description of Artificial Sequence: Synthetic oligonucleotide
uauggcuagccaucuccuc

SEQ ID NO: 2244626 - RNA, 19 nt, Artificial Sequence
  Description of Artificial Sequence: Synthetic oligonucleotide
gucucauuaagggucuuga

SEQ ID NO: 2244627 - RNA, 19 nt, Artificial Sequence
  Description of Artificial Sequence: Synthetic oligonucleotide
ucacuacagagauguucac

SEQ ID NO: 2244628 - RNA, 19 nt, Artificial Sequence
  Description of Artificial Sequence: Synthetic oligonucleotide
gcuccuggcacucuacgcc

SEQ ID NO: 2244629 - RNA, 19 nt, Artificial Sequence
  Description of Artificial Sequence: Synthetic oligonucleotide
cagggagcggcuguugucc

SEQ ID NO: 2244630 - RNA, 19 nt, Artificial Sequence
  Description of Artificial Sequence: Synthetic oligonucleotide
cucauuccggguguugcgc

SEQ ID NO: 2244631 - RNA, 19 nt, Artificial Sequence
  Description of Artificial Sequence: Synthetic oligonucleotide
gcccauuccaucuccagac

SEQ ID NO: 2244632 - RNA, 19 nt, Artificial Sequence
  Description of Artificial Sequence: Synthetic oligonucleotide
uugucaaucucggccugca

SEQ ID NO: 2244633 - RNA, 19 nt, Artificial Sequence
  Description of Artificial Sequence: Synthetic oligonucleotide
cugcacgcuucgcaguucc

SEQ ID NO: 2244634 - RNA, 19 nt, Artificial Sequence
  Description of Artificial Sequence: Synthetic oligonucleotide
gcgcaggucaucuccaugc

SEQ ID NO: 2244635 - RNA, 19 nt, Artificial Sequence
  Description of Artificial Sequence: Synthetic oligonucleotide
ugcccacuuggucuccagc

SEQ ID NO: 2244636 - RNA, 19 nt, Artificial Sequence
  Description of Artificial Sequence: Synthetic oligonucleotide
ugucgcagcccugcaaucu

SEQ ID NO: 2244637 - RNA, 19 nt, Artificial Sequence
  Description of Artificial Sequence: Synthetic oligonucleotide
cacucuacgccagcugccg

SEQ ID NO: 2244638 - RNA, 19 nt, Artificial Sequence
  Description of Artificial Sequence: Synthetic oligonucleotide
gaugagccugcugccacug

SEQ ID NO: 2244639 - RNA, 19 nt, Artificial Sequence
  Description of Artificial Sequence: Synthetic oligonucleotide
caaccuccagcucuuccug

SEQ ID NO: 2244640 - RNA, 19 nt, Artificial Sequence
  Description of Artificial Sequence: Synthetic oligonucleotide
cuccccacgcuccucggcc

SEQ ID NO: 2244641 - RNA, 19 nt, Artificial Sequence
  Description of Artificial Sequence: Synthetic oligonucleotide
acgcuucgcaguuccaccu

SEQ ID NO: 2244642 - RNA, 19 nt, Artificial Sequence
  Description of Artificial Sequence: Synthetic oligonucleotide
agcccggcuauggcuagcc

SEQ ID NO: 2244643 - RNA, 19 nt, Artificial Sequence
  Description of Artificial Sequence: Synthetic oligonucleotide
ugagcauccuugagugcua

SEQ ID NO: 2244644 - RNA, 19 nt, Artificial Sequence
  Description of Artificial Sequence: Synthetic oligonucleotide
cacugguuccccgaagaug

SEQ ID NO: 2244645 - RNA, 19 nt, Artificial Sequence
  Description of Artificial Sequence: Synthetic oligonucleotide
ugacaucggcaaugauacc

SEQ ID NO: 2244646 - RNA, 19 nt, Artificial Sequence
  Description of Artificial Sequence: Synthetic oligonucleotide
cauuccggguguugcgcag

SEQ ID NO: 2244647 - RNA, 19 nt, Artificial Sequence
  Description of Artificial Sequence: Synthetic oligonucleotide
gaaagcugaucucaucauu

SEQ ID NO: 2244648 - RNA, 19 nt, Artificial Sequence
  Description of Artificial Sequence: Synthetic oligonucleotide
gggacugcagcucugcuaa

SEQ ID NO: 2244649 - RNA, 19 nt, Artificial Sequence
  Description of Artificial Sequence: Synthetic oligonucleotide
ugguuccccgaagaugagc

SEQ ID NO: 2244650 - RNA, 19 nt, Artificial Sequence
  Description of Artificial Sequence: Synthetic oligonucleotide
acugcuccaguggaauuca

SEQ ID NO: 2244651 - RNA, 19 nt, Artificial Sequence
  Description of Artificial Sequence: Synthetic oligonucleotide
accacguccugcacgcuuc

SEQ ID NO: 2244652 - RNA, 19 nt, Artificial Sequence
  Description of Artificial Sequence: Synthetic oligonucleotide
uggcuagccaucuccucau

SEQ ID NO: 2244653 - RNA, 19 nt, Artificial Sequence
  Description of Artificial Sequence: Synthetic oligonucleotide
uccucgccucagcagcuug

SEQ ID NO: 2244654 - RNA, 19 nt, Artificial Sequence
  Description of Artificial Sequence: Synthetic oligonucleotide
acaguaccacggauguguc

SEQ ID NO: 2244655 - RNA, 19 nt, Artificial Sequence
  Description of Artificial Sequence: Synthetic oligonucleotide
gucgcagcccugcaaucug

SEQ ID NO: 2244656 - RNA, 19 nt, Artificial Sequence
  Description of Artificial Sequence: Synthetic oligonucleotide
cauuaagggucuugagaaa

SEQ ID NO: 2244657 - RNA, 19 nt, Artificial Sequence
  Description of Artificial Sequence: Synthetic oligonucleotide
acgcuccucggccucagca

SEQ ID NO: 2244658 - RNA, 19 nt, Artificial Sequence
  Description of Artificial Sequence: Synthetic oligonucleotide
uuggcacgcugguucuuca

SEQ ID NO: 2244659 - RNA, 19 nt, Artificial Sequence
  Description of Artificial Sequence: Synthetic oligonucleotide
uugcgguagguggcgaucu

SEQ ID NO: 2244660 - RNA, 19 nt, Artificial Sequence
  Description of Artificial Sequence: Synthetic oligonucleotide
caaucugggccucaaagau

SEQ ID NO: 2244661 - RNA, 19 nt, Artificial Sequence
  Description of Artificial Sequence: Synthetic oligonucleotide
ucuacgccagcugccgcgc

SEQ ID NO: 2244662 - RNA, 19 nt, Artificial Sequence
  Description of Artificial Sequence: Synthetic oligonucleotide
auuccggguguugcgcagg

SEQ ID NO: 2244663 - RNA, 19 nt, Artificial Sequence
  Description of Artificial Sequence: Synthetic oligonucleotide
uacgccagcugccgcgcca

SEQ ID NO: 2244664 - RNA, 19 nt, Artificial Sequence
  Description of Artificial Sequence: Synthetic oligonucleotide
uccugcacgcuucgcaguu

SEQ ID NO: 2244665 - RNA, 19 nt, Artificial Sequence
  Description of Artificial Sequence: Synthetic oligonucleotide
cauauccuguuuggccugc

SEQ ID NO: 2244666 - RNA, 19 nt, Artificial Sequence
  Description of Artificial Sequence: Synthetic oligonucleotide
uuguucauguaggcggcau

SEQ ID NO: 2244667 - RNA, 19 nt, Artificial Sequence
  Description of Artificial Sequence: Synthetic oligonucleotide
ccaguggaauucacuacag

SEQ ID NO: 2244668 - RNA, 19 nt, Artificial Sequence
  Description of Artificial Sequence: Synthetic oligonucleotide
cucgccucagcagcuugcg

SEQ ID NO: 2244669 - RNA, 19 nt, Artificial Sequence
  Description of Artificial Sequence: Synthetic oligonucleotide
uaccacggaugugucugag

SEQ ID NO: 2244670 - RNA, 19 nt, Artificial Sequence
  Description of Artificial Sequence: Synthetic oligonucleotide
accacggaugugucugaga

SEQ ID NO: 2244671 - RNA, 19 nt, Artificial Sequence
  Description of Artificial Sequence: Synthetic oligonucleotide
agccugugcuuggaggguc

SEQ ID NO: 2244672 - RNA, 19 nt, Artificial Sequence
  Description of Artificial Sequence: Synthetic oligonucleotide
cacuacagagauguucaca

SEQ ID NO: 2244673 - RNA, 19 nt, Artificial Sequence
  Description of Artificial Sequence: Synthetic oligonucleotide
cuacucuccucgccucagc

SEQ ID NO: 2244674 - RNA, 19 nt, Artificial Sequence
  Description of Artificial Sequence: Synthetic oligonucleotide
ugcugucgcagcccugcaa

SEQ ID NO: 2244675 - RNA, 19 nt, Artificial Sequence
  Description of Artificial Sequence: Synthetic oligonucleotide
gaucugggacugcagcucu

SEQ ID NO: 2244676 - RNA, 19 nt, Artificial Sequence
  Description of Artificial Sequence: Synthetic oligonucleotide
cuugagugcuagcucccca

SEQ ID NO: 2244677 - RNA, 19 nt, Artificial Sequence
  Description of Artificial Sequence: Synthetic oligonucleotide
ucgguucaucuccgcaauc

SEQ ID NO: 2244678 - RNA, 19 nt, Artificial Sequence
  Description of Artificial Sequence: Synthetic oligonucleotide
ugcgccuguugauuuccuc

SEQ ID NO: 2244679 - RNA, 19 nt, Artificial Sequence
  Description of Artificial Sequence: Synthetic oligonucleotide
uuccggguguugcgcaggu

SEQ ID NO: 2244680 - RNA, 19 nt, Artificial Sequence
  Description of Artificial Sequence: Synthetic oligonucleotide
gugccucaagcugcugucg

SEQ ID NO: 2244681 - RNA, 19 nt, Artificial Sequence
  Description of Artificial Sequence: Synthetic oligonucleotide
gcuagccaucuccucauac

SEQ ID NO: 2244682 - RNA, 19 nt, Artificial Sequence
  Description of Artificial Sequence: Synthetic oligonucleotide
gggccucaaagauccgggg

SEQ ID NO: 2244683 - RNA, 19 nt, Artificial Sequence
  Description of Artificial Sequence: Synthetic oligonucleotide
cgccauauccuguuuggcc

SEQ ID NO: 2244684 - RNA, 19 nt, Artificial Sequence
  Description of Artificial Sequence: Synthetic oligonucleotide
uguuuggcaugagcauccu

SEQ ID NO: 2244685 - RNA, 19 nt, Artificial Sequence
  Description of Artificial Sequence: Synthetic oligonucleotide
augagcuccuggcacucua

SEQ ID NO: 2244686 - RNA, 19 nt, Artificial Sequence
  Description of Artificial Sequence: Synthetic oligonucleotide
ggcacgcugguucuucaug

SEQ ID NO: 2244687 - RNA, 19 nt, Artificial Sequence
  Description of Artificial Sequence: Synthetic oligonucleotide
gcugccgcgccauauccug

SEQ ID NO: 2244688 - RNA, 19 nt, Artificial Sequence
  Description of Artificial Sequence: Synthetic oligonucleotide
caguggaauucacuacaga

SEQ ID NO: 2244689 - RNA, 19 nt, Artificial Sequence
  Description of Artificial Sequence: Synthetic oligonucleotide
gcuucgcaguuccaccucc

SEQ ID NO: 2244690 - RNA, 19 nt, Artificial Sequence
  Description of Artificial Sequence: Synthetic oligonucleotide
gccauauccuguuuggccu

SEQ ID NO: 2244691 - RNA, 19 nt, Artificial Sequence
  Description of Artificial Sequence: Synthetic oligonucleotide
cccagccugugcuuggagg

SEQ ID NO: 2244692 - RNA, 19 nt, Artificial Sequence
  Description of Artificial Sequence: Synthetic oligonucleotide
cuugcgguagguggcgauc

SEQ ID NO: 2244693 - RNA, 19 nt, Artificial Sequence
  Description of Artificial Sequence: Synthetic oligonucleotide
ucaucuccgcaaucucauu

SEQ ID NO: 2244694 - RNA, 19 nt, Artificial Sequence
  Description of Artificial Sequence: Synthetic oligonucleotide
uguaggcggcauccacauc

SEQ ID NO: 2244695 - RNA, 19 nt, Artificial Sequence
  Description of Artificial Sequence: Synthetic oligonucleotide
cugguuccccgaagaugag

SEQ ID NO: 2244696 - RNA, 19 nt, Artificial Sequence
  Description of Artificial Sequence: Synthetic oligonucleotide
uccucauacugggccuuga

SEQ ID NO: 2244697 - RNA, 19 nt, Artificial Sequence
  Description of Artificial Sequence: Synthetic oligonucleotide
ucuggauauuucgguucau

SEQ ID NO: 2244698 - RNA, 19 nt, Artificial Sequence
  Description of Artificial Sequence: Synthetic oligonucleotide
cuauggcuagccaucuccu

SEQ ID NO: 2244699 - RNA, 19 nt, Artificial Sequence
  Description of Artificial Sequence: Synthetic oligonucleotide
guugcgcaggucaucucca

SEQ ID NO: 2244700 - RNA, 19 nt, Artificial Sequence
  Description of Artificial Sequence: Synthetic oligonucleotide
agcuccccacgcuccucgg

SEQ ID NO: 2244701 - RNA, 19 nt, Artificial Sequence
  Description of Artificial Sequence: Synthetic oligonucleotide
ugguggacuucugcuccug

SEQ ID NO: 2244702 - RNA, 19 nt, Artificial Sequence
  Description of Artificial Sequence: Synthetic oligonucleotide
ggccucaaagauccgggga

SEQ ID NO: 2244703 - RNA, 19 nt, Artificial Sequence
  Description of Artificial Sequence: Synthetic oligonucleotide
ccuguuuggcaugagcauc

SEQ ID NO: 2244704 - RNA, 19 nt, Artificial Sequence
  Description of Artificial Sequence: Synthetic oligonucleotide
ggucuugagaaagcugauc

SEQ ID NO: 2244705 - RNA, 19 nt, Artificial Sequence
  Description of Artificial Sequence: Synthetic oligonucleotide
cucagcccggcuauggcua

SEQ ID NO: 2244706 - RNA, 19 nt, Artificial Sequence
  Description of Artificial Sequence: Synthetic oligonucleotide
cugugcgccuguugauuuc

SEQ ID NO: 2244707 - RNA, 19 nt, Artificial Sequence
  Description of Artificial Sequence: Synthetic oligonucleotide
caaccuacucuccucgccu

SEQ ID NO: 2244708 - RNA, 19 nt, Artificial Sequence
  Description of Artificial Sequence: Synthetic oligonucleotide
agcauugcugccacugguu

SEQ ID NO: 2244709 - RNA, 19 nt, Artificial Sequence
  Description of Artificial Sequence: Synthetic oligonucleotide
cugucgcagcccugcaauc

SEQ ID NO: 2244710 - RNA, 19 nt, Artificial Sequence
  Description of Artificial Sequence: Synthetic oligonucleotide
ugcgguagguggcgaucuc

SEQ ID NO: 2244711 - RNA, 19 nt, Artificial Sequence
  Description of Artificial Sequence: Synthetic oligonucleotide
accuccaggcggccccguc

SEQ ID NO: 2244712 - RNA, 19 nt, Artificial Sequence
  Description of Artificial Sequence: Synthetic oligonucleotide
cuucgcaguuccaccucca

SEQ ID NO: 2244713 - RNA, 19 nt, Artificial Sequence
  Description of Artificial Sequence: Synthetic oligonucleotide
gcuuggagggucucaaacu

SEQ ID NO: 2244714 - RNA, 19 nt, Artificial Sequence
  Description of Artificial Sequence: Synthetic oligonucleotide
uccggggaagccgguugcc

SEQ ID NO: 2244715 - RNA, 19 nt, Artificial Sequence
  Description of Artificial Sequence: Synthetic oligonucleotide
ccauauccuguuuggccug

SEQ ID NO: 2244716 - RNA, 19 nt, Artificial Sequence
  Description of Artificial Sequence: Synthetic oligonucleotide
gccccguccagcugcagug

SEQ ID NO: 2244717 - RNA, 19 nt, Artificial Sequence
  Description of Artificial Sequence: Synthetic oligonucleotide
ggcccauuccaucuccaga

SEQ ID NO: 2244718 - RNA, 19 nt, Artificial Sequence
  Description of Artificial Sequence: Synthetic oligonucleotide
guaccacggaugugucuga

SEQ ID NO: 2244719 - RNA, 19 nt, Artificial Sequence
  Description of Artificial Sequence: Synthetic oligonucleotide
ggcggccccguccagcugc

SEQ ID NO: 2244720 - RNA, 19 nt, Artificial Sequence
  Description of Artificial Sequence: Synthetic oligonucleotide
ccggcuauggcuagccauc

SEQ ID NO: 2244721 - RNA, 19 nt, Artificial Sequence
  Description of Artificial Sequence: Synthetic oligonucleotide
ugccgcgccauauccuguu

SEQ ID NO: 2244722 - RNA, 19 nt, Artificial Sequence
  Description of Artificial Sequence: Synthetic oligonucleotide
cugcuccaguggaauucac

SEQ ID NO: 2244723 - RNA, 19 nt, Artificial Sequence
  Description of Artificial Sequence: Synthetic oligonucleotide
uggcacgcugguucuucau

SEQ ID NO: 2244724 - RNA, 19 nt, Artificial Sequence
  Description of Artificial Sequence: Synthetic oligonucleotide
agcugugcgccuguugauu

SEQ ID NO: 2244725 - RNA, 19 nt, Artificial Sequence
  Description of Artificial Sequence: Synthetic oligonucleotide
gcauccuugagugcuagcu

SEQ ID NO: 2244726 - RNA, 19 nt, Artificial Sequence
  Description of Artificial Sequence: Synthetic oligonucleotide
ccuccaacuuggcacgcug

SEQ ID NO: 2244727 - RNA, 19 nt, Artificial Sequence
  Description of Artificial Sequence: Synthetic oligonucleotide
ggagcggcuguuguccaug

SEQ ID NO: 2244728 - RNA, 19 nt, Artificial Sequence
  Description of Artificial Sequence: Synthetic oligonucleotide
aagauccggggaagccggu

SEQ ID NO: 2244729 - RNA, 19 nt, Artificial Sequence
  Description of Artificial Sequence: Synthetic oligonucleotide
auauccuguuuggccugcu

SEQ ID NO: 2244730 - RNA, 19 nt, Artificial Sequence
  Description of Artificial Sequence: Synthetic oligonucleotide
gcaaucucauuccgggugu

SEQ ID NO: 2244731 - RNA, 19 nt, Artificial Sequence
  Description of Artificial Sequence: Synthetic oligonucleotide
ccggguguugcgcagguca

SEQ ID NO: 2244732 - RNA, 19 nt, Artificial Sequence
  Description of Artificial Sequence: Synthetic oligonucleotide
ccacuuggucuccagcauc

SEQ ID NO: 2244733 - RNA, 19 nt, Artificial Sequence
  Description of Artificial Sequence: Synthetic oligonucleotide
gguguugcgcaggucaucu

SEQ ID NO: 2244734 - RNA, 19 nt, Artificial Sequence
  Description of Artificial Sequence: Synthetic oligonucleotide
ccucauacugggccuugac

SEQ ID NO: 2244735 - RNA, 19 nt, Artificial Sequence
  Description of Artificial Sequence: Synthetic oligonucleotide
ggaagccgguugcccuugg

SEQ ID NO: 2244736 - RNA, 19 nt, Artificial Sequence
  Description of Artificial Sequence: Synthetic oligonucleotide
guaccaggcuucagccuca

SEQ ID NO: 2244737 - RNA, 19 nt, Artificial Sequence
  Description of Artificial Sequence: Synthetic oligonucleotide
cuacgccagcugccgcgcc

SEQ ID NO: 2244738 - RNA, 19 nt, Artificial Sequence
  Description of Artificial Sequence: Synthetic oligonucleotide
gcacgcugguucuucaugu

SEQ ID NO: 2244739 - RNA, 19 nt, Artificial Sequence
  Description of Artificial Sequence: Synthetic oligonucleotide
cuccaggcggccccgucca

SEQ ID NO: 2244740 - RNA, 19 nt, Artificial Sequence
  Description of Artificial Sequence: Synthetic oligonucleotide
gcacucuacgccagcugcc

SEQ ID NO: 2244741 - RNA, 19 nt, Artificial Sequence
  Description of Artificial Sequence: Synthetic oligonucleotide
gcacgcuucgcaguuccac

SEQ ID NO: 2244742 - RNA, 19 nt, Artificial Sequence
  Description of Artificial Sequence: Synthetic oligonucleotide
guguugcgcaggucaucuc

SEQ ID NO: 2244743 - RNA, 19 nt, Artificial Sequence
  Description of Artificial Sequence: Synthetic oligonucleotide
ggccuccaacuccaccuug

SEQ ID NO: 2244744 - RNA, 19 nt, Artificial Sequence
  Description of Artificial Sequence: Synthetic oligonucleotide
gcgccuguugauuuccucu

SEQ ID NO: 2244745 - RNA, 19 nt, Artificial Sequence
  Description of Artificial Sequence: Synthetic oligonucleotide
ccauuccaucuccagacaa

SEQ ID NO: 2244746 - RNA, 19 nt, Artificial Sequence
  Description of Artificial Sequence: Synthetic oligonucleotide
ccuccaggcggccccgucc

SEQ ID NO: 2244747 - RNA, 19 nt, Artificial Sequence
  Description of Artificial Sequence: Synthetic oligonucleotide
cuagcuccccacgcuccuc

SEQ ID NO: 2244748 - RNA, 19 nt, Artificial Sequence
  Description of Artificial Sequence: Synthetic oligonucleotide
ccuugagugcuagcucccc

SEQ ID NO: 2244749 - RNA, 19 nt, Artificial Sequence
  Description of Artificial Sequence: Synthetic oligonucleotide
gcugucgcagcccugcaau

SEQ ID NO: 2244750 - RNA, 19 nt, Artificial Sequence
  Description of Artificial Sequence: Synthetic oligonucleotide
agauccggggaagccgguu

SEQ ID NO: 2244751 - RNA, 19 nt, Artificial Sequence
  Description of Artificial Sequence: Synthetic oligonucleotide
gccgguugcccuuggugga

SEQ ID NO: 2244752 - RNA, 19 nt, Artificial Sequence
  Description of Artificial Sequence: Synthetic oligonucleotide
cacguccugcacgcuucgc

SEQ ID NO: 2244753 - RNA, 19 nt, Artificial Sequence
  Description of Artificial Sequence: Synthetic oligonucleotide
guuccccgaagaugagccu

SEQ ID NO: 2244754 - RNA, 19 nt, Artificial Sequence
  Description of Artificial Sequence: Synthetic oligonucleotide
cuccgcagcugugcgccug

SEQ ID NO: 2244755 - RNA, 19 nt, Artificial Sequence
  Description of Artificial Sequence: Synthetic oligonucleotide
cauucagacuauccaccuu

SEQ ID NO: 2244756 - RNA, 19 nt, Artificial Sequence
  Description of Artificial Sequence: Synthetic oligonucleotide
ccuacucuccucgccucag

SEQ ID NO: 2244757 - RNA, 19 nt, Artificial Sequence
  Description of Artificial Sequence: Synthetic oligonucleotide
gcgccauauccuguuuggc

SEQ ID NO: 2244758 - RNA, 19 nt, Artificial Sequence
  Description of Artificial Sequence: Synthetic oligonucleotide
agcuugcgguagguggcga

SEQ ID NO: 2244759 - RNA, 19 nt, Artificial Sequence
  Description of Artificial Sequence: Synthetic oligonucleotide
ccacggaugugucugagau

SEQ ID NO: 2244760 - RNA, 19 nt, Artificial Sequence
  Description of Artificial Sequence: Synthetic oligonucleotide
ccuggcacucuacgccagc

SEQ ID NO: 2244761 - RNA, 19 nt, Artificial Sequence
  Description of Artificial Sequence: Synthetic oligonucleotide
guuccaccuccaggcggcc

SEQ ID NO: 2244762 - RNA, 19 nt, Artificial Sequence
  Description of Artificial Sequence: Synthetic oligonucleotide
cgcagcccugcaaucuggg

SEQ ID NO: 2244763 - RNA, 19 nt, Artificial Sequence
  Description of Artificial Sequence: Synthetic oligonucleotide
ccauggacaguaccacgga

SEQ ID NO: 2244764 - RNA, 19 nt, Artificial Sequence
  Description of Artificial Sequence: Synthetic oligonucleotide
ggcuauggcuagccaucuc

SEQ ID NO: 2244765 - RNA, 19 nt, Artificial Sequence
  Description of Artificial Sequence: Synthetic oligonucleotide
caaugcuggccuccaacuu

SEQ ID NO: 2244766 - RNA, 19 nt, Artificial Sequence
  Description of Artificial Sequence: Synthetic oligonucleotide
ccgcgccauauccuguuug

SEQ ID NO: 2244767 - RNA, 19 nt, Artificial Sequence
  Description of Artificial Sequence: Synthetic oligonucleotide
caguaccacggaugugucu

SEQ ID NO: 2244768 - RNA, 19 nt, Artificial Sequence
  Description of Artificial Sequence: Synthetic oligonucleotide
ccacguccugcacgcuucg

SEQ ID NO: 2244769 - RNA, 19 nt, Artificial Sequence
  Description of Artificial Sequence: Synthetic oligonucleotide
guccugcacgcuucgcagu

SEQ ID NO: 2244770 - RNA, 19 nt, Artificial Sequence
  Description of Artificial Sequence: Synthetic oligonucleotide
gauguucacagggcccauu

SEQ ID NO: 2244771 - RNA, 19 nt, Artificial Sequence
  Description of Artificial Sequence: Synthetic oligonucleotide
gcuccccacgcuccucggc

SEQ ID NO: 2244772 - RNA, 19 nt, Artificial Sequence
  Description of Artificial Sequence: Synthetic oligonucleotide
guuuggcaugagcauccuu

SEQ ID NO: 2244773 - RNA, 19 nt, Artificial Sequence
  Description of Artificial Sequence: Synthetic oligonucleotide
uccggguguugcgcagguc

SEQ ID NO: 2244774 - RNA, 19 nt, Artificial Sequence
  Description of Artificial Sequence: Synthetic oligonucleotide
gcgguagguggcgaucuca

SEQ ID NO: 2244775 - RNA, 19 nt, Artificial Sequence
  Description of Artificial Sequence: Synthetic oligonucleotide
gggaagccgguugcccuug

SEQ ID NO: 2244776 - RNA, 19 nt, Artificial Sequence
  Description of Artificial Sequence: Synthetic oligonucleotide
cugccacugguuccccgaa

SEQ ID NO: 2244777 - RNA, 19 nt, Artificial Sequence
  Description of Artificial Sequence: Synthetic oligonucleotide
ggucugguaccaggcuuca

SEQ ID NO: 2244778 - RNA, 19 nt, Artificial Sequence
  Description of Artificial Sequence: Synthetic oligonucleotide
ggacugcagcucugcuaac

SEQ ID NO: 2244779 - RNA, 19 nt, Artificial Sequence
  Description of Artificial Sequence: Synthetic oligonucleotide
aggcggcauccacauccuu

SEQ ID NO: 2244780 - RNA, 19 nt, Artificial Sequence
  Description of Artificial Sequence: Synthetic oligonucleotide
cccauuccaucuccagaca

SEQ ID NO: 2244781 - RNA, 19 nt, Artificial Sequence
  Description of Artificial Sequence: Synthetic oligonucleotide
cuggcacucuacgccagcu

SEQ ID NO: 2244782 - RNA, 19 nt, Artificial Sequence
  Description of Artificial Sequence: Synthetic oligonucleotide
gcugugcgccuguugauuu

SEQ ID NO: 2244783 - RNA, 19 nt, Artificial Sequence
  Description of Artificial Sequence: Synthetic oligonucleotide
caggcggccccguccagcu

SEQ ID NO: 2244784 - RNA, 19 nt, Artificial Sequence
  Description of Artificial Sequence: Synthetic oligonucleotide
ccggggaagccgguugccc

SEQ ID NO: 2244785 - RNA, 19 nt, Artificial Sequence
  Description of Artificial Sequence: Synthetic oligonucleotide
cacgcugguucuucauguu

SEQ ID NO: 2244786 - RNA, 19 nt, Artificial Sequence
  Description of Artificial Sequence: Synthetic oligonucleotide
gcuagcuccccacgcuccu

SEQ ID NO: 2244787 - RNA, 19 nt, Artificial Sequence
  Description of Artificial Sequence: Synthetic oligonucleotide
cagcaaugcuggccuccaa

SEQ ID NO: 2244788 - RNA, 19 nt, Artificial Sequence
  Description of Artificial Sequence: Synthetic oligonucleotide
gcuccucggccucagcaau

SEQ ID NO: 2244789 - RNA, 19 nt, Artificial Sequence
  Description of Artificial Sequence: Synthetic oligonucleotide
ggccuccaacuuggcacgc

SEQ ID NO: 2244790 - RNA, 19 nt, Artificial Sequence
  Description of Artificial Sequence: Synthetic oligonucleotide
cagcugugcgccuguugau

SEQ ID NO: 2244791 - RNA, 19 nt, Artificial Sequence
  Description of Artificial Sequence: Synthetic oligonucleotide
caaucucggccugcagccu

SEQ ID NO: 2244792 - RNA, 19 nt, Artificial Sequence
  Description of Artificial Sequence: Synthetic oligonucleotide
ccgguugcccuugguggac

SEQ ID NO: 2244793 - RNA, 19 nt, Artificial Sequence
  Description of Artificial Sequence: Synthetic oligonucleotide
cugccgcgccauauccugu

SEQ ID NO: 2244794 - RNA, 19 nt, Artificial Sequence
  Description of Artificial Sequence: Synthetic oligonucleotide
ccccguccagcugcagugc

SEQ ID NO: 2244795 - RNA, 19 nt, Artificial Sequence
  Description of Artificial Sequence: Synthetic oligonucleotide
cccggcuauggcuagccau

SEQ ID NO: 2244796 - RNA, 19 nt, Artificial Sequence
  Description of Artificial Sequence: Synthetic oligonucleotide
cgcuucgcaguuccaccuc

SEQ ID NO: 2244797 - RNA, 19 nt, Artificial Sequence
  Description of Artificial Sequence: Synthetic oligonucleotide
ggcuagccaucuccucaua

SEQ ID NO: 2244798 - RNA, 19 nt, Artificial Sequence
  Description of Artificial Sequence: Synthetic oligonucleotide
ccugcaaucugggccucaa

SEQ ID NO: 2244799 - RNA, 19 nt, Artificial Sequence
  Description of Artificial Sequence: Synthetic oligonucleotide
ccugcacgcuucgcaguuc

SEQ ID NO: 2244800 - RNA, 19 nt, Artificial Sequence
  Description of Artificial Sequence: Synthetic oligonucleotide
gcuugcgguagguggcgau

SEQ ID NO: 2244801 - RNA, 19 nt, Artificial Sequence
  Description of Artificial Sequence: Synthetic oligonucleotide
ccaccuccaggcggccccg

SEQ ID NO: 2244802 - RNA, 19 nt, Artificial Sequence
  Description of Artificial Sequence: Synthetic oligonucleotide
cgguucaucuccgcaaucu

SEQ ID NO: 2244803 - RNA, 19 nt, Artificial Sequence
  Description of Artificial Sequence: Synthetic oligonucleotide
cggaugugucugagaucug

SEQ ID NO: 2244804 - RNA, 19 nt, Artificial Sequence
  Description of Artificial Sequence: Synthetic oligonucleotide
cgcuccucggccucagcaa

SEQ ID NO: 2244805 - RNA, 19 nt, Artificial Sequence
  Description of Artificial Sequence: Synthetic oligonucleotide
gugcgccuguugauuuccu

SEQ ID NO: 2244806 - RNA, 19 nt, Artificial Sequence
  Description of Artificial Sequence: Synthetic oligonucleotide
gcccggcuauggcuagcca

SEQ ID NO: 2244807 - RNA, 19 nt, Artificial Sequence
  Description of Artificial Sequence: Synthetic oligonucleotide
ccgcaaucucauuccgggu

SEQ ID NO: 2244808 - RNA, 19 nt, Artificial Sequence
  Description of Artificial Sequence: Synthetic oligonucleotide
gggagcggcuguuguccau

SEQ ID NO: 2244809 - RNA, 19 nt, Artificial Sequence
  Description of Artificial Sequence: Synthetic oligonucleotide
gccugugcuuggagggucu

SEQ ID NO: 2244810 - RNA, 19 nt, Artificial Sequence
  Description of Artificial Sequence: Synthetic oligonucleotide
ccaacuuggcacgcugguu

SEQ ID NO: 2244811 - RNA, 19 nt, Artificial Sequence
  Description of Artificial Sequence: Synthetic oligonucleotide
ccacugcuccaguggaauu

SEQ ID NO: 2244812 - RNA, 19 nt, Artificial Sequence
  Description of Artificial Sequence: Synthetic oligonucleotide
cuccucgccucagcagcuu

SEQ ID NO: 2244813 - RNA, 19 nt, Artificial Sequence
  Description of Artificial Sequence: Synthetic oligonucleotide
cccugcaaucugggccuca

SEQ ID NO: 2244814 - RNA, 19 nt, Artificial Sequence
  Description of Artificial Sequence: Synthetic oligonucleotide
gccgcgccauauccuguuu

SEQ ID NO: 2244815 - RNA, 19 nt, Artificial Sequence
  Description of Artificial Sequence: Synthetic oligonucleotide
gcggccccguccagcugca

SEQ ID NO: 2244816 - RNA, 19 nt, Artificial Sequence
  Description of Artificial Sequence: Synthetic oligonucleotide
cggguguugcgcaggucau

SEQ ID NO: 2244817 - RNA, 19 nt, Artificial Sequence
  Description of Artificial Sequence: Synthetic oligonucleotide
ccucggccucagcaaugcu

SEQ ID NO: 2244818 - RNA, 19 nt, Artificial Sequence
  Description of Artificial Sequence: Synthetic oligonucleotide
cggcuauggcuagccaucu

SEQ ID NO: 2244819 - RNA, 19 nt, Artificial Sequence
  Description of Artificial Sequence: Synthetic oligonucleotide
caccuccaggcggccccgu

SEQ ID NO: 2244820 - RNA, 19 nt, Artificial Sequence
  Description of Artificial Sequence: Synthetic oligonucleotide
ccccgaagaugagccugcu

SEQ ID NO: 2244821 - RNA, 19 nt, Artificial Sequence
  Description of Artificial Sequence: Synthetic oligonucleotide
cgguugcccuugguggacu

SEQ ID NO: 2244822 - RNA, 19 nt, Artificial Sequence
  Description of Artificial Sequence: Synthetic oligonucleotide
ccgucucauuaagggucuu

SEQ ID NO: 2244823 - RNA, 19 nt, Artificial Sequence
  Description of Artificial Sequence: Synthetic oligonucleotide
aauaauuaacuuuaaauac

SEQ ID NO: 2244824 - RNA, 19 nt, Artificial Sequence
  Description of Artificial Sequence: Synthetic oligonucleotide
auuacuuacacuuuaaagc

SEQ ID NO: 2244825 - RNA, 19 nt, Artificial Sequence
  Description of Artificial Sequence: Synthetic oligonucleotide
aauuacuuacacuuuaaag

SEQ ID NO: 2244826 - RNA, 19 nt, Artificial Sequence
  Description of Artificial Sequence: Synthetic oligonucleotide
aaacauuucaauuuuacua

SEQ ID NO: 2244827 - RNA, 19 nt, Artificial Sequence
  Description of Artificial Sequence: Synthetic oligonucleotide
acaaauaaccucuaagcac

SEQ ID NO: 2244828 - RNA, 19 nt, Artificial Sequence
  Description of Artificial Sequence: Synthetic oligonucleotide
ugaauaauuaacuuuaaau

SEQ ID NO: 2244829 - RNA, 19 nt, Artificial Sequence
  Description of Artificial Sequence: Synthetic oligonucleotide
ugagucucaacaaauaacc

SEQ ID NO: 2244830 - RNA, 19 nt, Artificial Sequence
  Description of Artificial Sequence: Synthetic oligonucleotide
uuaaauacguaguuacugg

SEQ ID NO: 2244831 - RNA, 19 nt, Artificial Sequence
  Description of Artificial Sequence: Synthetic oligonucleotide
cauaguauauaccaaagag

SEQ ID NO: 2244832 - RNA, 19 nt, Artificial Sequence
  Description of Artificial Sequence: Synthetic oligonucleotide
uuaacuuuaaauacguagu

SEQ ID NO: 2244833 - RNA, 19 nt, Artificial Sequence
  Description of Artificial Sequence: Synthetic oligonucleotide
ucaacaaauaaccucuaag

SEQ ID NO: 2244834 - RNA, 19 nt, Artificial Sequence
  Description of Artificial Sequence: Synthetic oligonucleotide
aacaguuugugggaaaugc

SEQ ID NO: 2244835 - RNA, 19 nt, Artificial Sequence
  Description of Artificial Sequence: Synthetic oligonucleotide
aacaaauaaccucuaagca

SEQ ID NO: 2244836 - RNA, 19 nt, Artificial Sequence
  Description of Artificial Sequence: Synthetic oligonucleotide
cuauaugccaucuggaucc

SEQ ID NO: 2244837 - RNA, 19 nt, Artificial Sequence
  Description of Artificial Sequence: Synthetic oligonucleotide
gaauaauuaacuuuaaaua

SEQ ID NO: 2244838 - RNA, 19 nt, Artificial Sequence
  Description of Artificial Sequence: Synthetic oligonucleotide
uuacuuacacuuuaaagca

SEQ ID NO: 2244839 - RNA, 19 nt, Artificial Sequence
  Description of Artificial Sequence: Synthetic oligonucleotide
uuuauauaagcucuuuugu

SEQ ID NO: 2244840 - RNA, 19 nt, Artificial Sequence
  Description of Artificial Sequence: Synthetic oligonucleotide
caacaaauaaccucuaagc

SEQ ID NO: 2244841 - RNA, 19 nt, Artificial Sequence
  Description of Artificial Sequence: Synthetic oligonucleotide
aauguguuuacauuuuccu

SEQ ID NO: 2244842 - RNA, 19 nt, Artificial Sequence
  Description of Artificial Sequence: Synthetic oligonucleotide
uguacauucuuuauauaag

SEQ ID NO: 2244843 - RNA, 19 nt, Artificial Sequence
  Description of Artificial Sequence: Synthetic oligonucleotide
uuuugacgaaacuauaugc

SEQ ID NO: 2244844 - RNA, 19 nt, Artificial Sequence
  Description of Artificial Sequence: Synthetic oligonucleotide
ucucuuauagaacuuaacu

SEQ ID NO: 2244845 - RNA, 19 nt, Artificial Sequence
  Description of Artificial Sequence: Synthetic oligonucleotide
ucaaauaugccccuguaac

SEQ ID NO: 2244846 - RNA, 19 nt, Artificial Sequence
  Description of Artificial Sequence: Synthetic oligonucleotide
uuugacgaaacuauaugcc

SEQ ID NO: 2244847 - RNA, 19 nt, Artificial Sequence
  Description of Artificial Sequence: Synthetic oligonucleotide
auaauuaacuuuaaauacg

SEQ ID NO: 2244848 - RNA, 19 nt, Artificial Sequence
  Description of Artificial Sequence: Synthetic oligonucleotide
ucgaacaccacucaaauau

SEQ ID NO: 2244849 - RNA, 19 nt, Artificial Sequence
  Description of Artificial Sequence: Synthetic oligonucleotide
cuaauuuugaauuucagaa

SEQ ID NO: 2244850 - RNA, 19 nt, Artificial Sequence
  Description of Artificial Sequence: Synthetic oligonucleotide
acauucuuuauauaagcuc

SEQ ID NO: 2244851 - RNA, 19 nt, Artificial Sequence
  Description of Artificial Sequence: Synthetic oligonucleotide
aacaagcuaauuuugaauu

SEQ ID NO: 2244852 - RNA, 19 nt, Artificial Sequence
  Description of Artificial Sequence: Synthetic oligonucleotide
ucuuauagaacuuaacuuu

SEQ ID NO: 2244853 - RNA, 19 nt, Artificial Sequence
  Description of Artificial Sequence: Synthetic oligonucleotide
cuaaauaacuuaaggacug

SEQ ID NO: 2244854 - RNA, 19 nt, Artificial Sequence
  Description of Artificial Sequence: Synthetic oligonucleotide
cagaaauaaagcauaagug

SEQ ID NO: 2244855 - RNA, 19 nt, Artificial Sequence
  Description of Artificial Sequence: Synthetic oligonucleotide
uuaucaguaccaaugaguc

SEQ ID NO: 2244856 - RNA, 19 nt, Artificial Sequence
  Description of Artificial Sequence: Synthetic oligonucleotide
auaacuuaaggacugaaau

SEQ ID NO: 2244857 - RNA, 19 nt, Artificial Sequence
  Description of Artificial Sequence: Synthetic oligonucleotide
agaaauaccugauauuuca

SEQ ID NO: 2244858 - RNA, 19 nt, Artificial Sequence
  Description of Artificial Sequence: Synthetic oligonucleotide
aauaccugauauuucaaaa

SEQ ID NO: 2244859 - RNA, 19 nt, Artificial Sequence
  Description of Artificial Sequence: Synthetic oligonucleotide
aaaagauaguucuuuguau

SEQ ID NO: 2244860 - RNA, 19 nt, Artificial Sequence
  Description of Artificial Sequence: Synthetic oligonucleotide
acaccacucaaauaugccc

SEQ ID NO: 2244861 - RNA, 19 nt, Artificial Sequence
  Description of Artificial Sequence: Synthetic oligonucleotide
uaucacuucacacacacua

SEQ ID NO: 2244862 - RNA, 19 nt, Artificial Sequence
  Description of Artificial Sequence: Synthetic oligonucleotide
aaauaugccccuguaacag

SEQ ID NO: 2244863 - RNA, 19 nt, Artificial Sequence
  Description of Artificial Sequence: Synthetic oligonucleotide
uuuuacuauacagaguccc

SEQ ID NO: 2244864 - RNA, 19 nt, Artificial Sequence
  Description of Artificial Sequence: Synthetic oligonucleotide
aacgcucaugcacugcugc

SEQ ID NO: 2244865 - RNA, 19 nt, Artificial Sequence
  Description of Artificial Sequence: Synthetic oligonucleotide
uuaaaaggcugcaaucuug

SEQ ID NO: 2244866 - RNA, 19 nt, Artificial Sequence
  Description of Artificial Sequence: Synthetic oligonucleotide
acuuccaaauguuuugacg

SEQ ID NO: 2244867 - RNA, 19 nt, Artificial Sequence
  Description of Artificial Sequence: Synthetic oligonucleotide
acuauaugccaucuggauc

SEQ ID NO: 2244868 - RNA, 19 nt, Artificial Sequence
  Description of Artificial Sequence: Synthetic oligonucleotide
uguguuuacauuuuccuau

SEQ ID NO: 2244869 - RNA, 19 nt, Artificial Sequence
  Description of Artificial Sequence: Synthetic oligonucleotide
uguuaacaagcuaauuuug

SEQ ID NO: 2244870 - RNA, 19 nt, Artificial Sequence
  Description of Artificial Sequence: Synthetic oligonucleotide
uagaaacuaaauaacuuaa

SEQ ID NO: 2244871 - RNA, 19 nt, Artificial Sequence
  Description of Artificial Sequence: Synthetic oligonucleotide
uuuuaaaaggcugcaaucu

SEQ ID NO: 2244872 - RNA, 19 nt, Artificial Sequence
  Description of Artificial Sequence: Synthetic oligonucleotide
uauagaacuuaacuuugug

SEQ ID NO: 2244873 - RNA, 19 nt, Artificial Sequence
  Description of Artificial Sequence: Synthetic oligonucleotide
cuuuaaagcagaauacuuc

SEQ ID NO: 2244874 - RNA, 19 nt, Artificial Sequence
  Description of Artificial Sequence: Synthetic oligonucleotide
uuuccuaucaccacagaaa

SEQ ID NO: 2244875 - RNA, 19 nt, Artificial Sequence
  Description of Artificial Sequence: Synthetic oligonucleotide
aacuuaaggacugaaauuu

SEQ ID NO: 2244876 - RNA, 19 nt, Artificial Sequence
  Description of Artificial Sequence: Synthetic oligonucleotide
cuuauagaacuuaacuuug

SEQ ID NO: 2244877 - RNA, 19 nt, Artificial Sequence
  Description of Artificial Sequence: Synthetic oligonucleotide
uagaacuuaacuuuguguu

SEQ ID NO: 2244878 - RNA, 19 nt, Artificial Sequence
  Description of Artificial Sequence: Synthetic oligonucleotide
aagcauaagugccuagaag

SEQ ID NO: 2244879 - RNA, 19 nt, Artificial Sequence
  Description of Artificial Sequence: Synthetic oligonucleotide
agcacagugaauaauuaac

SEQ ID NO: 2244880 - RNA, 19 nt, Artificial Sequence
  Description of Artificial Sequence: Synthetic oligonucleotide
aauacuuggugggaucugg

SEQ ID NO: 2244881 - RNA, 19 nt, Artificial Sequence
  Description of Artificial Sequence: Synthetic oligonucleotide
uaaauacguaguuacuggc

SEQ ID NO: 2244882 - RNA, 19 nt, Artificial Sequence
  Description of Artificial Sequence: Synthetic oligonucleotide
agaaacauuucaauuuuac

SEQ ID NO: 2244883 - RNA, 19 nt, Artificial Sequence
  Description of Artificial Sequence: Synthetic oligonucleotide
ucauaguauauaccaaaga

SEQ ID NO: 2244884 - RNA, 19 nt, Artificial Sequence
  Description of Artificial Sequence: Synthetic oligonucleotide
aacauuuuaauuacuuaca

SEQ ID NO: 2244885 - RNA, 19 nt, Artificial Sequence
  Description of Artificial Sequence: Synthetic oligonucleotide
auagaacuuaacuuugugu

SEQ ID NO: 2244886 - RNA, 19 nt, Artificial Sequence
  Description of Artificial Sequence: Synthetic oligonucleotide
guaccaaugagucucaaca

SEQ ID NO: 2244887 - RNA, 19 nt, Artificial Sequence
  Description of Artificial Sequence: Synthetic oligonucleotide
uuguauuucuucagcaaug

SEQ ID NO: 2244888 - RNA, 19 nt, Artificial Sequence
  Description of Artificial Sequence: Synthetic oligonucleotide
uuccauuugggacacagaa

SEQ ID NO: 2244889 - RNA, 19 nt, Artificial Sequence
  Description of Artificial Sequence: Synthetic oligonucleotide
gaauagcucccgaagaacg

SEQ ID NO: 2244890 - RNA, 19 nt, Artificial Sequence
  Description of Artificial Sequence: Synthetic oligonucleotide
aacaccacucaaauaugcc

SEQ ID NO: 2244891 - RNA, 19 nt, Artificial Sequence
  Description of Artificial Sequence: Synthetic oligonucleotide
aaauaccugauauuucaaa

SEQ ID NO: 2244892 - RNA, 19 nt, Artificial Sequence
  Description of Artificial Sequence: Synthetic oligonucleotide
aauagcucccgaagaacgc

SEQ ID NO: 2244893 - RNA, 19 nt, Artificial Sequence
  Description of Artificial Sequence: Synthetic oligonucleotide
auuucagaagaaugaaaug

SEQ ID NO: 2244894 - RNA, 19 nt, Artificial Sequence
  Description of Artificial Sequence: Synthetic oligonucleotide
uuaacaagcuaauuuugaa

SEQ ID NO: 2244895 - RNA, 19 nt, Artificial Sequence
  Description of Artificial Sequence: Synthetic oligonucleotide
uguuuugacgaaacuauau

SEQ ID NO: 2244896 - RNA, 19 nt, Artificial Sequence
  Description of Artificial Sequence: Synthetic oligonucleotide
uugacgaaacuauaugcca

SEQ ID NO: 2244897 - RNA, 19 nt, Artificial Sequence
  Description of Artificial Sequence: Synthetic oligonucleotide
guuuugacgaaacuauaug

SEQ ID NO: 2244898 - RNA, 19 nt, Artificial Sequence
  Description of Artificial Sequence: Synthetic oligonucleotide
aaugccuguuuguugccuc

SEQ ID NO: 2244899 - RNA, 19 nt, Artificial Sequence
  Description of Artificial Sequence: Synthetic oligonucleotide
aauacguaguuacuggcuu

SEQ ID NO: 2244900 - RNA, 19 nt, Artificial Sequence
  Description of Artificial Sequence: Synthetic oligonucleotide
ucuuaucaguaccaaugag

SEQ ID NO: 2244901 - RNA, 19 nt, Artificial Sequence
  Description of Artificial Sequence: Synthetic oligonucleotide
cuuccaaauguuuugacga

SEQ ID NO: 2244902 - RNA, 19 nt, Artificial Sequence
  Description of Artificial Sequence: Synthetic oligonucleotide
aacuauaugccaucuggau

SEQ ID NO: 2244903 - RNA, 19 nt, Artificial Sequence
  Description of Artificial Sequence: Synthetic oligonucleotide
ugcuugucauccauggucc

SEQ ID NO: 2244904 - RNA, 19 nt, Artificial Sequence
  Description of Artificial Sequence: Synthetic oligonucleotide
uuuuccauuugggacacag

SEQ ID NO: 2244905 - RNA, 19 nt, Artificial Sequence
  Description of Artificial Sequence: Synthetic oligonucleotide
aaauaaagcauaagugccu

SEQ ID NO: 2244906 - RNA, 19 nt, Artificial Sequence
  Description of Artificial Sequence: Synthetic oligonucleotide
uccaugucauaguauauac

SEQ ID NO: 2244907 - RNA, 19 nt, Artificial Sequence
  Description of Artificial Sequence: Synthetic oligonucleotide
aagcucuuuuguuaacaag

SEQ ID NO: 2244908 - RNA, 19 nt, Artificial Sequence
  Description of Artificial Sequence: Synthetic oligonucleotide
agaagaaugaaauguguuu

SEQ ID NO: 2244909 - RNA, 19 nt, Artificial Sequence
  Description of Artificial Sequence: Synthetic oligonucleotide
ucccgaagaacgcucaugc

SEQ ID NO: 2244910 - RNA, 19 nt, Artificial Sequence
  Description of Artificial Sequence: Synthetic oligonucleotide
uacuucucuuaucaguacc

SEQ ID NO: 2244911 - RNA, 19 nt, Artificial Sequence
  Description of Artificial Sequence: Synthetic oligonucleotide
cauuucaauuuuacuauac

SEQ ID NO: 2244912 - RNA, 19 nt, Artificial Sequence
  Description of Artificial Sequence: Synthetic oligonucleotide
aaagcauaagugccuagaa

SEQ ID NO: 2244913 - RNA, 19 nt, Artificial Sequence
  Description of Artificial Sequence: Synthetic oligonucleotide
agugauuucagaagaauga

SEQ ID NO: 2244914 - RNA, 19 nt, Artificial Sequence
  Description of Artificial Sequence: Synthetic oligonucleotide
aaaauacuuggugggaucu

SEQ ID NO: 2244915 - RNA, 19 nt, Artificial Sequence
  Description of Artificial Sequence: Synthetic oligonucleotide
aauacuucucuuaucagua

SEQ ID NO: 2244916 - RNA, 19 nt, Artificial Sequence
  Description of Artificial Sequence: Synthetic oligonucleotide
ugccuagaaacuaaauaac

SEQ ID NO: 2244917 - RNA, 19 nt, Artificial Sequence
  Description of Artificial Sequence: Synthetic oligonucleotide
uaaaguccuuuguagcucc

SEQ ID NO: 2244918 - RNA, 19 nt, Artificial Sequence
  Description of Artificial Sequence: Synthetic oligonucleotide
acugucuagagcucacuuc

SEQ ID NO: 2244919 - RNA, 19 nt, Artificial Sequence
  Description of Artificial Sequence: Synthetic oligonucleotide
augagucucaacaaauaac

SEQ ID NO: 2244920 - RNA, 19 nt, Artificial Sequence
  Description of Artificial Sequence: Synthetic oligonucleotide
uuauagaacuuaacuuugu

SEQ ID NO: 2244921 - RNA, 19 nt, Artificial Sequence
  Description of Artificial Sequence: Synthetic oligonucleotide
cucacuucacuguacauuc

SEQ ID NO: 2244922 - RNA, 19 nt, Artificial Sequence
  Description of Artificial Sequence: Synthetic oligonucleotide
uacuuacacuuuaaagcag

SEQ ID NO: 2244923 - RNA, 19 nt, Artificial Sequence
  Description of Artificial Sequence: Synthetic oligonucleotide
ugauuucagaagaaugaaa

SEQ ID NO: 2244924 - RNA, 19 nt, Artificial Sequence
  Description of Artificial Sequence: Synthetic oligonucleotide
gaaagcuagguccagacgu

SEQ ID NO: 2244925 - RNA, 19 nt, Artificial Sequence
  Description of Artificial Sequence: Synthetic oligonucleotide
gugccuagaaacuaaauaa

SEQ ID NO: 2244926 - RNA, 19 nt, Artificial Sequence
  Description of Artificial Sequence: Synthetic oligonucleotide
ggaaaugccuguuuguugc

SEQ ID NO: 2244927 - RNA, 19 nt, Artificial Sequence
  Description of Artificial Sequence: Synthetic oligonucleotide
uugaauagcucccgaagaa

SEQ ID NO: 2244928 - RNA, 19 nt, Artificial Sequence
  Description of Artificial Sequence: Synthetic oligonucleotide
ugucauaggccucaccacu

SEQ ID NO: 2244929 - RNA, 19 nt, Artificial Sequence
  Description of Artificial Sequence: Synthetic oligonucleotide
uaacuuuguguuucaaacu

SEQ ID NO: 2244930 - RNA, 19 nt, Artificial Sequence
  Description of Artificial Sequence: Synthetic oligonucleotide
acauuuuccuaucaccaca

SEQ ID NO: 2244931 - RNA, 19 nt, Artificial Sequence
  Description of Artificial Sequence: Synthetic oligonucleotide
aguauauaccaaagagccc

SEQ ID NO: 2244932 - RNA, 19 nt, Artificial Sequence
  Description of Artificial Sequence: Synthetic oligonucleotide
agugccuagaaacuaaaua

SEQ ID NO: 2244933 - RNA, 19 nt, Artificial Sequence
  Description of Artificial Sequence: Synthetic oligonucleotide
uaucaccacagaaacauuu

SEQ ID NO: 2244934 - RNA, 19 nt, Artificial Sequence
  Description of Artificial Sequence: Synthetic oligonucleotide
gcuuuaaaguccuuuguag

SEQ ID NO: 2244935 - RNA, 19 nt, Artificial Sequence
  Description of Artificial Sequence: Synthetic oligonucleotide
uuuaaaaggcugcaaucuu

SEQ ID NO: 2244936 - RNA, 19 nt, Artificial Sequence
  Description of Artificial Sequence: Synthetic oligonucleotide
uguauuucuucagcaauga

SEQ ID NO: 2244937 - RNA, 19 nt, Artificial Sequence
  Description of Artificial Sequence: Synthetic oligonucleotide
auacuucucuuaucaguac

SEQ ID NO: 2244938 - RNA, 19 nt, Artificial Sequence
  Description of Artificial Sequence: Synthetic oligonucleotide
ucuuuauauaagcucuuuu

SEQ ID NO: 2244939 - RNA, 19 nt, Artificial Sequence
  Description of Artificial Sequence: Synthetic oligonucleotide
agaauacuucucuuaucag

SEQ ID NO: 2244940 - RNA, 19 nt, Artificial Sequence
  Description of Artificial Sequence: Synthetic oligonucleotide
cuuguaucagacuuugaca

SEQ ID NO: 2244941 - RNA, 19 nt, Artificial Sequence
  Description of Artificial Sequence: Synthetic oligonucleotide
uaaagcauaagugccuaga

SEQ ID NO: 2244942 - RNA, 19 nt, Artificial Sequence
  Description of Artificial Sequence: Synthetic oligonucleotide
cauuuugucauuuaucacu

SEQ ID NO: 2244943 - RNA, 19 nt, Artificial Sequence
  Description of Artificial Sequence: Synthetic oligonucleotide
agaaagcuagguccagacg

SEQ ID NO: 2244944 - RNA, 19 nt, Artificial Sequence
  Description of Artificial Sequence: Synthetic oligonucleotide
aaccucuaagcacagugaa

SEQ ID NO: 2244945 - RNA, 19 nt, Artificial Sequence
  Description of Artificial Sequence: Synthetic oligonucleotide
agggaaggugucuacacug

SEQ ID NO: 2244946 - RNA, 19 nt, Artificial Sequence
  Description of Artificial Sequence: Synthetic oligonucleotide
ugaaauguguuuacauuuu

SEQ ID NO: 2244947 - RNA, 19 nt, Artificial Sequence
  Description of Artificial Sequence: Synthetic oligonucleotide
cauucuuuauauaagcucu

SEQ ID NO: 2244948 - RNA, 19 nt, Artificial Sequence
  Description of Artificial Sequence: Synthetic oligonucleotide
aaauacguaguuacuggcu

SEQ ID NO: 2244949 - RNA, 19 nt, Artificial Sequence
  Description of Artificial Sequence: Synthetic oligonucleotide
uaacuuaaggacugaaauu

SEQ ID NO: 2244950 - RNA, 19 nt, Artificial Sequence
  Description of Artificial Sequence: Synthetic oligonucleotide
ucuugcuugcuucucgaac

SEQ ID NO: 2244951 - RNA, 19 nt, Artificial Sequence
  Description of Artificial Sequence: Synthetic oligonucleotide
agaaacuaaauaacuuaag

SEQ ID NO: 2244952 - RNA, 19 nt, Artificial Sequence
  Description of Artificial Sequence: Synthetic oligonucleotide
uguuuacauuuuccuauca

SEQ ID NO: 2244953 - RNA, 19 nt, Artificial Sequence
  Description of Artificial Sequence: Synthetic oligonucleotide
uaaccucuaagcacaguga

SEQ ID NO: 2244954 - RNA, 19 nt, Artificial Sequence
  Description of Artificial Sequence: Synthetic oligonucleotide
uaguuacuggcuuguauca

SEQ ID NO: 2244955 - RNA, 19 nt, Artificial Sequence
  Description of Artificial Sequence: Synthetic oligonucleotide
ucaagugccuagaaacuaa

SEQ ID NO: 2244956 - RNA, 19 nt, Artificial Sequence
  Description of Artificial Sequence: Synthetic oligonucleotide
aagcacagugaauaauuaa

SEQ ID NO: 2244957 - RNA, 19 nt, Artificial Sequence
  Description of Artificial Sequence: Synthetic oligonucleotide
ucucgaacaccacucaaau

SEQ ID NO: 2244958 - RNA, 19 nt, Artificial Sequence
  Description of Artificial Sequence: Synthetic oligonucleotide
auuuuacuauacagagucc

SEQ ID NO: 2244959 - RNA, 19 nt, Artificial Sequence
  Description of Artificial Sequence: Synthetic oligonucleotide
uucacacacacuaaacauu

SEQ ID NO: 2244960 - RNA, 19 nt, Artificial Sequence
  Description of Artificial Sequence: Synthetic oligonucleotide
ugacgaaacuauaugccau

SEQ ID NO: 2244961 - RNA, 19 nt, Artificial Sequence
  Description of Artificial Sequence: Synthetic oligonucleotide
gaugcaacugccuccccug

SEQ ID NO: 2244962 - RNA, 19 nt, Artificial Sequence
  Description of Artificial Sequence: Synthetic oligonucleotide
aauaaagcauaagugccua

SEQ ID NO: 2244963 - RNA, 19 nt, Artificial Sequence
  Description of Artificial Sequence: Synthetic oligonucleotide
ugcuccuugaauagcuccc

SEQ ID NO: 2244964 - RNA, 19 nt, Artificial Sequence
  Description of Artificial Sequence: Synthetic oligonucleotide
uacauuuuccuaucaccac

SEQ ID NO: 2244965 - RNA, 19 nt, Artificial Sequence
  Description of Artificial Sequence: Synthetic oligonucleotide
acaguuugugggaaaugcc

SEQ ID NO: 2244966 - RNA, 19 nt, Artificial Sequence
  Description of Artificial Sequence: Synthetic oligonucleotide
gucauaguauauaccaaag

SEQ ID NO: 2244967 - RNA, 19 nt, Artificial Sequence
  Description of Artificial Sequence: Synthetic oligonucleotide
gauuucagaagaaugaaau

SEQ ID NO: 2244968 - RNA, 19 nt, Artificial Sequence
  Description of Artificial Sequence: Synthetic oligonucleotide
uuacuggcuuguaucagac

SEQ ID NO: 2244969 - RNA, 19 nt, Artificial Sequence
  Description of Artificial Sequence: Synthetic oligonucleotide
ugggauuuccugcuccuug

SEQ ID NO: 2244970 - RNA, 19 nt, Artificial Sequence
  Description of Artificial Sequence: Synthetic oligonucleotide
agcagaauacuucucuuau

SEQ ID NO: 2244971 - RNA, 19 nt, Artificial Sequence
  Description of Artificial Sequence: Synthetic oligonucleotide
cagugaauaauuaacuuua

SEQ ID NO: 2244972 - RNA, 19 nt, Artificial Sequence
  Description of Artificial Sequence: Synthetic oligonucleotide
aaacuauaugccaucugga

SEQ ID NO: 2244973 - RNA, 19 nt, Artificial Sequence
  Description of Artificial Sequence: Synthetic oligonucleotide
uucucgaacaccacucaaa

SEQ ID NO: 2244974 - RNA, 19 nt, Artificial Sequence
  Description of Artificial Sequence: Synthetic oligonucleotide
uccugagggaugcaacugc

SEQ ID NO: 2244975 - RNA, 19 nt, Artificial Sequence
  Description of Artificial Sequence: Synthetic oligonucleotide
cgugugacaaaauacuugg

SEQ ID NO: 2244976 - RNA, 19 nt, Artificial Sequence
  Description of Artificial Sequence: Synthetic oligonucleotide
cuuaucaguaccaaugagu

SEQ ID NO: 2244977 - RNA, 19 nt, Artificial Sequence
  Description of Artificial Sequence: Synthetic oligonucleotide
ucacuguacauucuuuaua

SEQ ID NO: 2244978 - RNA, 19 nt, Artificial Sequence
  Description of Artificial Sequence: Synthetic oligonucleotide
aacuuaacuuuguguuuca

SEQ ID NO: 2244979 - RNA, 19 nt, Artificial Sequence
  Description of Artificial Sequence: Synthetic oligonucleotide
gucuacacugucuagagcu

SEQ ID NO: 2244980 - RNA, 19 nt, Artificial Sequence
  Description of Artificial Sequence: Synthetic oligonucleotide
aucacggacaucagcacac

SEQ ID NO: 2244981 - RNA, 19 nt, Artificial Sequence
  Description of Artificial Sequence: Synthetic oligonucleotide
guauauaccaaagagcccu

SEQ ID NO: 2244982 - RNA, 19 nt, Artificial Sequence
  Description of Artificial Sequence: Synthetic oligonucleotide
uaagcacagugaauaauua

SEQ ID NO: 2244983 - RNA, 19 nt, Artificial Sequence
  Description of Artificial Sequence: Synthetic oligonucleotide
ucucucuuauagaacuuaa

SEQ ID NO: 2244984 - RNA, 19 nt, Artificial Sequence
  Description of Artificial Sequence: Synthetic oligonucleotide
cuugcuugcuucucgaaca

SEQ ID NO: 2244985 - RNA, 19 nt, Artificial Sequence
  Description of Artificial Sequence: Synthetic oligonucleotide
aaagagcccucgcuggcug

SEQ ID NO: 2244986 - RNA, 19 nt, Artificial Sequence
  Description of Artificial Sequence: Synthetic oligonucleotide
aaaguggcuuuaaaguccu

SEQ ID NO: 2244987 - RNA, 19 nt, Artificial Sequence
  Description of Artificial Sequence: Synthetic oligonucleotide
aagaacgcucaugcacugc

SEQ ID NO: 2244988 - RNA, 19 nt, Artificial Sequence
  Description of Artificial Sequence: Synthetic oligonucleotide
auaccaaagagcccucgcu

SEQ ID NO: 2244989 - RNA, 19 nt, Artificial Sequence
  Description of Artificial Sequence: Synthetic oligonucleotide
uccaccgugugacaaaaua

SEQ ID NO: 2244990 - RNA, 19 nt, Artificial Sequence
  Description of Artificial Sequence: Synthetic oligonucleotide
uuacuauacagaguccccu

SEQ ID NO: 2244991 - RNA, 19 nt, Artificial Sequence
  Description of Artificial Sequence: Synthetic oligonucleotide
agaacgcucaugcacugcu

SEQ ID NO: 2244992 - RNA, 19 nt, Artificial Sequence
  Description of Artificial Sequence: Synthetic oligonucleotide
uuaaaguccuuuguagcuc

SEQ ID NO: 2244993 - RNA, 19 nt, Artificial Sequence
  Description of Artificial Sequence: Synthetic oligonucleotide
caaaauacuuggugggauc

SEQ ID NO: 2244994 - RNA, 19 nt, Artificial Sequence
  Description of Artificial Sequence: Synthetic oligonucleotide
auaaagcauaagugccuag

SEQ ID NO: 2244995 - RNA, 19 nt, Artificial Sequence
  Description of Artificial Sequence: Synthetic oligonucleotide
aagcuaauuuugaauuuca

SEQ ID NO: 2244996 - RNA, 19 nt, Artificial Sequence
  Description of Artificial Sequence: Synthetic oligonucleotide
uguugccucaccagcaaaa

SEQ ID NO: 2244997 - RNA, 19 nt, Artificial Sequence
  Description of Artificial Sequence: Synthetic oligonucleotide
guuaacaagcuaauuuuga

SEQ ID NO: 2244998 - RNA, 19 nt, Artificial Sequence
  Description of Artificial Sequence: Synthetic oligonucleotide
gcuaauuuugaauuucaga

SEQ ID NO: 2244999 - RNA, 19 nt, Artificial Sequence
  Description of Artificial Sequence: Synthetic oligonucleotide
gcagaaauaaagcauaagu

SEQ ID NO: 2245000 - RNA, 19 nt, Artificial Sequence
  Description of Artificial Sequence: Synthetic oligonucleotide
agggaugcaacugccuccc

SEQ ID NO: 2245001 - RNA, 19 nt, Artificial Sequence
  Description of Artificial Sequence: Synthetic oligonucleotide
cuugaauagcucccgaaga

SEQ ID NO: 2245002 - RNA, 19 nt, Artificial Sequence
  Description of Artificial Sequence: Synthetic oligonucleotide
gacgaaacuauaugccauc

SEQ ID NO: 2245003 - RNA, 19 nt, Artificial Sequence
  Description of Artificial Sequence: Synthetic oligonucleotide
aaaaggcugcaaucuugcu

SEQ ID NO: 2245004 - RNA, 19 nt, Artificial Sequence
  Description of Artificial Sequence: Synthetic oligonucleotide
agugccuagaaggauuuug

SEQ ID NO: 2245005 - RNA, 19 nt, Artificial Sequence
  Description of Artificial Sequence: Synthetic oligonucleotide
agaacuuaacuuuguguuu

SEQ ID NO: 2245006 - RNA, 19 nt, Artificial Sequence
  Description of Artificial Sequence: Synthetic oligonucleotide
acuauacagaguccccucu

SEQ ID NO: 2245007 - RNA, 19 nt, Artificial Sequence
  Description of Artificial Sequence: Synthetic oligonucleotide
cucucuuauagaacuuaac

SEQ ID NO: 2245008 - RNA, 19 nt, Artificial Sequence
  Description of Artificial Sequence: Synthetic oligonucleotide
caagcuaauuuugaauuuc

SEQ ID NO: 2245009 - RNA, 19 nt, Artificial Sequence
  Description of Artificial Sequence: Synthetic oligonucleotide
uuuguugccucaccagcaa

SEQ ID NO: 2245010 - RNA, 19 nt, Artificial Sequence
  Description of Artificial Sequence: Synthetic oligonucleotide
ugaauagcucccgaagaac

SEQ ID NO: 2245011 - RNA, 19 nt, Artificial Sequence
  Description of Artificial Sequence: Synthetic oligonucleotide
uccccucucucuuauagaa

SEQ ID NO: 2245012 - RNA, 19 nt, Artificial Sequence
  Description of Artificial Sequence: Synthetic oligonucleotide
auacguaguuacuggcuug

SEQ ID NO: 2245013 - RNA, 19 nt, Artificial Sequence
  Description of Artificial Sequence: Synthetic oligonucleotide
agaaugaaauguguuuaca

SEQ ID NO: 2245014 - RNA, 19 nt, Artificial Sequence
  Description of Artificial Sequence: Synthetic oligonucleotide
aagacucaagugccuagaa

SEQ ID NO: 2245015 - RNA, 19 nt, Artificial Sequence
  Description of Artificial Sequence: Synthetic oligonucleotide
uacagaguccccucucucu

SEQ ID NO: 2245016 - RNA, 19 nt, Artificial Sequence
  Description of Artificial Sequence: Synthetic oligonucleotide
acaagcuaauuuugaauuu

SEQ ID NO: 2245017 - RNA, 19 nt, Artificial Sequence
  Description of Artificial Sequence: Synthetic oligonucleotide
caaauaugccccuguaaca

SEQ ID NO: 2245018 - RNA, 19 nt, Artificial Sequence
  Description of Artificial Sequence: Synthetic oligonucleotide
gugaucacggacaucagca

SEQ ID NO: 2245019 - RNA, 19 nt, Artificial Sequence
  Description of Artificial Sequence: Synthetic oligonucleotide
acuuacacuuuaaagcaga

SEQ ID NO: 2245020 - RNA, 19 nt, Artificial Sequence
  Description of Artificial Sequence: Synthetic oligonucleotide
uaucaguaccaaugagucu

SEQ ID NO: 2245021 - RNA, 19 nt, Artificial Sequence
  Description of Artificial Sequence: Synthetic oligonucleotide
uaccaaugagucucaacaa

SEQ ID NO: 2245022 - RNA, 19 nt, Artificial Sequence
  Description of Artificial Sequence: Synthetic oligonucleotide
aaauaaccucuaagcacag

SEQ ID NO: 2245023 - RNA, 19 nt, Artificial Sequence
  Description of Artificial Sequence: Synthetic oligonucleotide
gaagaacgcucaugcacug

SEQ ID NO: 2245024 - RNA, 19 nt, Artificial Sequence
  Description of Artificial Sequence: Synthetic oligonucleotide
agcagaaauaaagcauaag

SEQ ID NO: 2245025 - RNA, 19 nt, Artificial Sequence
  Description of Artificial Sequence: Synthetic oligonucleotide
uguaacaguuugugggaaa

SEQ ID NO: 2245026 - RNA, 19 nt, Artificial Sequence
  Description of Artificial Sequence: Synthetic oligonucleotide
cuguuuguugccucaccag

SEQ ID NO: 2245027 - RNA, 19 nt, Artificial Sequence
  Description of Artificial Sequence: Synthetic oligonucleotide
cugaggguccaugucauag

SEQ ID NO: 2245028 - RNA, 19 nt, Artificial Sequence
  Description of Artificial Sequence: Synthetic oligonucleotide
gaucacggacaucagcaca

SEQ ID NO: 2245029 - RNA, 19 nt, Artificial Sequence
  Description of Artificial Sequence: Synthetic oligonucleotide
gaaaugccuguuuguugcc

SEQ ID NO: 2245030 - RNA, 19 nt, Artificial Sequence
  Description of Artificial Sequence: Synthetic oligonucleotide
aaaguccuuuguagcuccc

SEQ ID NO: 2245031 - RNA, 19 nt, Artificial Sequence
  Description of Artificial Sequence: Synthetic oligonucleotide
aaauacuuggugggaucug

SEQ ID NO: 2245032 - RNA, 19 nt, Artificial Sequence
  Description of Artificial Sequence: Synthetic oligonucleotide
uauauaccaaagagcccuc

SEQ ID NO: 2245033 - RNA, 19 nt, Artificial Sequence
  Description of Artificial Sequence: Synthetic oligonucleotide
uacuauacagaguccccuc

SEQ ID NO: 2245034 - RNA, 19 nt, Artificial Sequence
  Description of Artificial Sequence: Synthetic oligonucleotide
acuuuaaagcagaauacuu

SEQ ID NO: 2245035 - RNA, 19 nt, Artificial Sequence
  Description of Artificial Sequence: Synthetic oligonucleotide
uccuaucaccacagaaaca

SEQ ID NO: 2245036 - RNA, 19 nt, Artificial Sequence
  Description of Artificial Sequence: Synthetic oligonucleotide
uuccaaauguuuugacgaa

SEQ ID NO: 2245037 - RNA, 19 nt, Artificial Sequence
  Description of Artificial Sequence: Synthetic oligonucleotide
gugaauaauuaacuuuaaa

SEQ ID NO: 2245038 - RNA, 19 nt, Artificial Sequence
  Description of Artificial Sequence: Synthetic oligonucleotide
gggucagugauuucagaag

SEQ ID NO: 2245039 - RNA, 19 nt, Artificial Sequence
  Description of Artificial Sequence: Synthetic oligonucleotide
uagaaggauuuugaggguc

SEQ ID NO: 2245040 - RNA, 19 nt, Artificial Sequence
  Description of Artificial Sequence: Synthetic oligonucleotide
aucagcacacucugcugag

SEQ ID NO: 2245041 - RNA, 19 nt, Artificial Sequence
  Description of Artificial Sequence: Synthetic oligonucleotide
auauaccaaagagcccucg

SEQ ID NO: 2245042 - RNA, 19 nt, Artificial Sequence
  Description of Artificial Sequence: Synthetic oligonucleotide
aagcuagguccagacguuc

SEQ ID NO: 2245043 - RNA, 19 nt, Artificial Sequence
  Description of Artificial Sequence: Synthetic oligonucleotide
ucuacacugucuagagcuc

SEQ ID NO: 2245044 - RNA, 19 nt, Artificial Sequence
  Description of Artificial Sequence: Synthetic oligonucleotide
uuugacagggaaggugucu

SEQ ID NO: 2245045 - RNA, 19 nt, Artificial Sequence
  Description of Artificial Sequence: Synthetic oligonucleotide
aguuugugggaaaugccug

SEQ ID NO: 2245046 - RNA, 19 nt, Artificial Sequence
  Description of Artificial Sequence: Synthetic oligonucleotide
ugaucacggacaucagcac

SEQ ID NO: 2245047 - RNA, 19 nt, Artificial Sequence
  Description of Artificial Sequence: Synthetic oligonucleotide
uagagcucacuucacugua

SEQ ID NO: 2245048 - RNA, 19 nt, Artificial Sequence
  Description of Artificial Sequence: Synthetic oligonucleotide
ccauuugggacacagaaga

SEQ ID NO: 2245049 - RNA, 19 nt, Artificial Sequence
  Description of Artificial Sequence: Synthetic oligonucleotide
uccaugguccugagggaug

SEQ ID NO: 2245050 - RNA, 19 nt, Artificial Sequence
  Description of Artificial Sequence: Synthetic oligonucleotide
aaaugccuguuuguugccu

SEQ ID NO: 2245051 - RNA, 19 nt, Artificial Sequence
  Description of Artificial Sequence: Synthetic oligonucleotide
aucagacuuugacagggaa

SEQ ID NO: 2245052 - RNA, 19 nt, Artificial Sequence
  Description of Artificial Sequence: Synthetic oligonucleotide
uccuugaauagcucccgaa

SEQ ID NO: 2245053 - RNA, 19 nt, Artificial Sequence
  Description of Artificial Sequence: Synthetic oligonucleotide
uccaaauguuuugacgaaa

SEQ ID NO: 2245054 - RNA, 19 nt, Artificial Sequence
  Description of Artificial Sequence: Synthetic oligonucleotide
acuucucuuaucaguacca

SEQ ID NO: 2245055 - RNA, 19 nt, Artificial Sequence
  Description of Artificial Sequence: Synthetic oligonucleotide
cucuuauagaacuuaacuu

SEQ ID NO: 2245056 - RNA, 19 nt, Artificial Sequence
  Description of Artificial Sequence: Synthetic oligonucleotide
aauuaacuuuaaauacgua

SEQ ID NO: 2245057 - RNA, 19 nt, Artificial Sequence
  Description of Artificial Sequence: Synthetic oligonucleotide
gaaggauuuugagggucag

SEQ ID NO: 2245058 - RNA, 19 nt, Artificial Sequence
  Description of Artificial Sequence: Synthetic oligonucleotide
uaacaguuugugggaaaug

SEQ ID NO: 2245059 - RNA, 19 nt, Artificial Sequence
  Description of Artificial Sequence: Synthetic oligonucleotide
aguuacuggcuuguaucag

SEQ ID NO: 2245060 - RNA, 19 nt, Artificial Sequence
  Description of Artificial Sequence: Synthetic oligonucleotide
cauaggccucaccacuucc

SEQ ID NO: 2245061 - RNA, 19 nt, Artificial Sequence
  Description of Artificial Sequence: Synthetic oligonucleotide
uuacacuuuaaagcagaau

SEQ ID NO: 2245062 - RNA, 19 nt, Artificial Sequence
  Description of Artificial Sequence: Synthetic oligonucleotide
uugcuugcuucucgaacac

SEQ ID NO: 2245063 - RNA, 19 nt, Artificial Sequence
  Description of Artificial Sequence: Synthetic oligonucleotide
uacguaguuacuggcuugu

SEQ ID NO: 2245064 - RNA, 19 nt, Artificial Sequence
  Description of Artificial Sequence: Synthetic oligonucleotide
auaagugccuagaaggauu

SEQ ID NO: 2245065 - RNA, 19 nt, Artificial Sequence
  Description of Artificial Sequence: Synthetic oligonucleotide
ugucuagagcucacuucac

SEQ ID NO: 2245066 - RNA, 19 nt, Artificial Sequence
  Description of Artificial Sequence: Synthetic oligonucleotide
ugguccugagggaugcaac

SEQ ID NO: 2245067 - RNA, 19 nt, Artificial Sequence
  Description of Artificial Sequence: Synthetic oligonucleotide
cuaagcacagugaauaauu

SEQ ID NO: 2245068 - RNA, 19 nt, Artificial Sequence
  Description of Artificial Sequence: Synthetic oligonucleotide
cuauacagaguccccucuc

SEQ ID NO: 2245069 - RNA, 19 nt, Artificial Sequence
  Description of Artificial Sequence: Synthetic oligonucleotide
ucccuuuuaaaagcagaaa

SEQ ID NO: 2245070 - RNA, 19 nt, Artificial Sequence
  Description of Artificial Sequence: Synthetic oligonucleotide
cuucacacacacuaaacau

SEQ ID NO: 2245071 - RNA, 19 nt, Artificial Sequence
  Description of Artificial Sequence: Synthetic oligonucleotide
cacuuccaaauguuuugac

SEQ ID NO: 2245072 - RNA, 19 nt, Artificial Sequence
  Description of Artificial Sequence: Synthetic oligonucleotide
agaaggauuuugaggguca

SEQ ID NO: 2245073 - RNA, 19 nt, Artificial Sequence
  Description of Artificial Sequence: Synthetic oligonucleotide
ugcugaggguccaugucau

SEQ ID NO: 2245074 - RNA, 19 nt, Artificial Sequence
  Description of Artificial Sequence: Synthetic oligonucleotide
gaagaaagcuagguccaga

SEQ ID NO: 2245075 - RNA, 19 nt, Artificial Sequence
  Description of Artificial Sequence: Synthetic oligonucleotide
acucaagugccuagaaacu

SEQ ID NO: 2245076 - RNA, 19 nt, Artificial Sequence
  Description of Artificial Sequence: Synthetic oligonucleotide
ccgaagaacgcucaugcac

SEQ ID NO: 2245077 - RNA, 19 nt, Artificial Sequence
  Description of Artificial Sequence: Synthetic oligonucleotide
acggacaucagcacacucu

SEQ ID NO: 2245078 - RNA, 19 nt, Artificial Sequence
  Description of Artificial Sequence: Synthetic oligonucleotide
uggauccauggcucugugc

SEQ ID NO: 2245079 - RNA, 19 nt, Artificial Sequence
  Description of Artificial Sequence: Synthetic oligonucleotide
acgaaacuauaugccaucu

SEQ ID NO: 2245080 - RNA, 19 nt, Artificial Sequence
  Description of Artificial Sequence: Synthetic oligonucleotide
caaugagucucaacaaaua

SEQ ID NO: 2245081 - RNA, 19 nt, Artificial Sequence
  Description of Artificial Sequence: Synthetic oligonucleotide
aguggcuuuaaaguccuuu

SEQ ID NO: 2245082 - RNA, 19 nt, Artificial Sequence
  Description of Artificial Sequence: Synthetic oligonucleotide
ccaugucauaguauauacc

SEQ ID NO: 2245083 - RNA, 19 nt, Artificial Sequence
  Description of Artificial Sequence: Synthetic oligonucleotide
guuuguugccucaccagca

SEQ ID NO: 2245084 - RNA, 19 nt, Artificial Sequence
  Description of Artificial Sequence: Synthetic oligonucleotide
cuuacacuuuaaagcagaa

SEQ ID NO: 2245085 - RNA, 19 nt, Artificial Sequence
  Description of Artificial Sequence: Synthetic oligonucleotide
aggugucuacacugucuag

SEQ ID NO: 2245086 - RNA, 19 nt, Artificial Sequence
  Description of Artificial Sequence: Synthetic oligonucleotide
aaagcuagguccagacguu

SEQ ID NO: 2245087 - RNA, 19 nt, Artificial Sequence
  Description of Artificial Sequence: Synthetic oligonucleotide
aaguccuuuguagcucccu

SEQ ID NO: 2245088 - RNA, 19 nt, Artificial Sequence
  Description of Artificial Sequence: Synthetic oligonucleotide
aggcugcaaucuugcuugc

SEQ ID NO: 2245089 - RNA, 19 nt, Artificial Sequence
  Description of Artificial Sequence: Synthetic oligonucleotide
ugacagggaaggugucuac

SEQ ID NO: 2245090 - RNA, 19 nt, Artificial Sequence
  Description of Artificial Sequence: Synthetic oligonucleotide
caguuugugggaaaugccu

SEQ ID NO: 2245091 - RNA, 19 nt, Artificial Sequence
  Description of Artificial Sequence: Synthetic oligonucleotide
uuguugccucaccagcaaa

SEQ ID NO: 2245092 - RNA, 19 nt, Artificial Sequence
  Description of Artificial Sequence: Synthetic oligonucleotide
ccaccgugugacaaaauac

SEQ ID NO: 2245093 - RNA, 19 nt, Artificial Sequence
  Description of Artificial Sequence: Synthetic oligonucleotide
caauuuuacuauacagagu

SEQ ID NO: 2245094 - RNA, 19 nt, Artificial Sequence
  Description of Artificial Sequence: Synthetic oligonucleotide
ccgugugacaaaauacuug

SEQ ID NO: 2245095 - RNA, 19 nt, Artificial Sequence
  Description of Artificial Sequence: Synthetic oligonucleotide
uugugggaaaugccuguuu

SEQ ID NO: 2245096 - RNA, 19 nt, Artificial Sequence
  Description of Artificial Sequence: Synthetic oligonucleotide
aguccuuuguagcucccuu

SEQ ID NO: 2245097 - RNA, 19 nt, Artificial Sequence
  Description of Artificial Sequence: Synthetic oligonucleotide
cugcugaggguccauguca

SEQ ID NO: 2245098 - RNA, 19 nt, Artificial Sequence
  Description of Artificial Sequence: Synthetic oligonucleotide
caccgugugacaaaauacu

SEQ ID NO: 2245099 - RNA, 19 nt, Artificial Sequence
  Description of Artificial Sequence: Synthetic oligonucleotide
cuccccugugaucacggac

SEQ ID NO: 2245100 - RNA, 19 nt, Artificial Sequence
  Description of Artificial Sequence: Synthetic oligonucleotide
ugccccuguaacaguuugu

SEQ ID NO: 2245101 - RNA, 19 nt, Artificial Sequence
  Description of Artificial Sequence: Synthetic oligonucleotide
augcacugcugcaacaccu

SEQ ID NO: 2245102 - RNA, 19 nt, Artificial Sequence
  Description of Artificial Sequence: Synthetic oligonucleotide
uagguccagacguucuuuu

SEQ ID NO: 2245103 - RNA, 19 nt, Artificial Sequence
  Description of Artificial Sequence: Synthetic oligonucleotide
ggugucuacacugucuaga

SEQ ID NO: 2245104 - RNA, 19 nt, Artificial Sequence
  Description of Artificial Sequence: Synthetic oligonucleotide
augccuguuuguugccuca

SEQ ID NO: 2245105 - RNA, 19 nt, Artificial Sequence
  Description of Artificial Sequence: Synthetic oligonucleotide
augucauaguauauaccaa

SEQ ID NO: 2245106 - RNA, 19 nt, Artificial Sequence
  Description of Artificial Sequence: Synthetic oligonucleotide
agaguccccucucucuuau

SEQ ID NO: 2245107 - RNA, 19 nt, Artificial Sequence
  Description of Artificial Sequence: Synthetic oligonucleotide
guuugugggaaaugccugu

SEQ ID NO: 2245108 - RNA, 19 nt, Artificial Sequence
  Description of Artificial Sequence: Synthetic oligonucleotide
uauaugccaucuggaucca

SEQ ID NO: 2245109 - RNA, 19 nt, Artificial Sequence
  Description of Artificial Sequence: Synthetic oligonucleotide
cuagagcucacuucacugu

SEQ ID NO: 2245110 - RNA, 19 nt, Artificial Sequence
  Description of Artificial Sequence: Synthetic oligonucleotide
gaucugggauuuccugcuc

SEQ ID NO: 2245111 - RNA, 19 nt, Artificial Sequence
  Description of Artificial Sequence: Synthetic oligonucleotide
caagugccuagaaacuaaa

SEQ ID NO: 2245112 - RNA, 19 nt, Artificial Sequence
  Description of Artificial Sequence: Synthetic oligonucleotide
cagaagaaugaaauguguu

SEQ ID NO: 2245113 - RNA, 19 nt, Artificial Sequence
  Description of Artificial Sequence: Synthetic oligonucleotide
cucuaagcacagugaauaa

SEQ ID NO: 2245114 - RNA, 19 nt, Artificial Sequence
  Description of Artificial Sequence: Synthetic oligonucleotide
ccugagggaugcaacugcc

SEQ ID NO: 2245115 - RNA, 19 nt, Artificial Sequence
  Description of Artificial Sequence: Synthetic oligonucleotide
auaggccucaccacuucca

SEQ ID NO: 2245116 - RNA, 19 nt, Artificial Sequence
  Description of Artificial Sequence: Synthetic oligonucleotide
ugcuccaccgugugacaaa

SEQ ID NO: 2245117 - RNA, 19 nt, Artificial Sequence
  Description of Artificial Sequence: Synthetic oligonucleotide
acuuaaggacugaaauuuu

SEQ ID NO: 2245118 - RNA, 19 nt, Artificial Sequence
  Description of Artificial Sequence: Synthetic oligonucleotide
gcagaauacuucucuuauc

SEQ ID NO: 2245119 - RNA, 19 nt, Artificial Sequence
  Description of Artificial Sequence: Synthetic oligonucleotide
cauuugggacacagaagaa

SEQ ID NO: 2245120 - RNA, 19 nt, Artificial Sequence
  Description of Artificial Sequence: Synthetic oligonucleotide
gaacgcucaugcacugcug

SEQ ID NO: 2245121 - RNA, 19 nt, Artificial Sequence
  Description of Artificial Sequence: Synthetic oligonucleotide
cucuuuuguuaacaagcua

SEQ ID NO: 2245122 - RNA, 19 nt, Artificial Sequence
  Description of Artificial Sequence: Synthetic oligonucleotide
acgcucaugcacugcugca

SEQ ID NO: 2245123 - RNA, 19 nt, Artificial Sequence
  Description of Artificial Sequence: Synthetic oligonucleotide
guccaugucauaguauaua

SEQ ID NO: 2245124 - RNA, 19 nt, Artificial Sequence
  Description of Artificial Sequence: Synthetic oligonucleotide
aucuugcuugcuucucgaa

SEQ ID NO: 2245125 - RNA, 19 nt, Artificial Sequence
  Description of Artificial Sequence: Synthetic oligonucleotide
auguuuugacgaaacuaua

SEQ ID NO: 2245126 - RNA, 19 nt, Artificial Sequence
  Description of Artificial Sequence: Synthetic oligonucleotide
cuacacugucuagagcuca

SEQ ID NO: 2245127 - RNA, 19 nt, Artificial Sequence
  Description of Artificial Sequence: Synthetic oligonucleotide
ugccuccccugugaucacg

SEQ ID NO: 2245128 - RNA, 19 nt, Artificial Sequence
  Description of Artificial Sequence: Synthetic oligonucleotide
gcauaagugccuagaagga

SEQ ID NO: 2245129 - RNA, 19 nt, Artificial Sequence
  Description of Artificial Sequence: Synthetic oligonucleotide
cucaagugccuagaaacua

SEQ ID NO: 2245130 - RNA, 19 nt, Artificial Sequence
  Description of Artificial Sequence: Synthetic oligonucleotide
accgugugacaaaauacuu

SEQ ID NO: 2245131 - RNA, 19 nt, Artificial Sequence
  Description of Artificial Sequence: Synthetic oligonucleotide
cucccgaagaacgcucaug

SEQ ID NO: 2245132 - RNA, 19 nt, Artificial Sequence
  Description of Artificial Sequence: Synthetic oligonucleotide
gucuagagcucacuucacu

SEQ ID NO: 2245133 - RNA, 19 nt, Artificial Sequence
  Description of Artificial Sequence: Synthetic oligonucleotide
cuucucgaacaccacucaa

SEQ ID NO: 2245134 - RNA, 19 nt, Artificial Sequence
  Description of Artificial Sequence: Synthetic oligonucleotide
guaacaguuugugggaaau

SEQ ID NO: 2245135 - RNA, 19 nt, Artificial Sequence
  Description of Artificial Sequence: Synthetic oligonucleotide
cucaugcacugcugcaaca

SEQ ID NO: 2245136 - RNA, 19 nt, Artificial Sequence
  Description of Artificial Sequence: Synthetic oligonucleotide
agacuuugacagggaaggu

SEQ ID NO: 2245137 - RNA, 19 nt, Artificial Sequence
  Description of Artificial Sequence: Synthetic oligonucleotide
cacggacaucagcacacuc

SEQ ID NO: 2245138 - RNA, 19 nt, Artificial Sequence
  Description of Artificial Sequence: Synthetic oligonucleotide
cuagaaggauuuugagggu

SEQ ID NO: 2245139 - RNA, 19 nt, Artificial Sequence
  Description of Artificial Sequence: Synthetic oligonucleotide
ucacggacaucagcacacu

SEQ ID NO: 2245140 - RNA, 19 nt, Artificial Sequence
  Description of Artificial Sequence: Synthetic oligonucleotide
cuggauccauggcucugug

SEQ ID NO: 2245141 - RNA, 19 nt, Artificial Sequence
  Description of Artificial Sequence: Synthetic oligonucleotide
gccccuguaacaguuugug

SEQ ID NO: 2245142 - RNA, 19 nt, Artificial Sequence
  Description of Artificial Sequence: Synthetic oligonucleotide
ccccuguaacaguuugugg

SEQ ID NO: 2245143 - RNA, 19 nt, Artificial Sequence
  Description of Artificial Sequence: Synthetic oligonucleotide
agcuagguccagacguucu

SEQ ID NO: 2245144 - RNA, 19 nt, Artificial Sequence
  Description of Artificial Sequence: Synthetic oligonucleotide
ccucuaagcacagugaaua

SEQ ID NO: 2245145 - RNA, 19 nt, Artificial Sequence
  Description of Artificial Sequence: Synthetic oligonucleotide
ccuagaaacuaaauaacuu

SEQ ID NO: 2245146 - RNA, 19 nt, Artificial Sequence
  Description of Artificial Sequence: Synthetic oligonucleotide
ccuguuuguugccucacca

SEQ ID NO: 2245147 - RNA, 19 nt, Artificial Sequence
  Description of Artificial Sequence: Synthetic oligonucleotide
accucuaagcacagugaau

SEQ ID NO: 2245148 - RNA, 19 nt, Artificial Sequence
  Description of Artificial Sequence: Synthetic oligonucleotide
gccuagaaacuaaauaacu

SEQ ID NO: 2245149 - RNA, 19 nt, Artificial Sequence
  Description of Artificial Sequence: Synthetic oligonucleotide
cucaccacuuccaaauguu

SEQ ID NO: 2245150 - RNA, 19 nt, Artificial Sequence
  Description of Artificial Sequence: Synthetic oligonucleotide
cucgaacaccacucaaaua

SEQ ID NO: 2245151 - RNA, 19 nt, Artificial Sequence
  Description of Artificial Sequence: Synthetic oligonucleotide
cgaacaccacucaaauaug

SEQ ID NO: 2245152 - RNA, 19 nt, Artificial Sequence
  Description of Artificial Sequence: Synthetic oligonucleotide
aggccucaccacuuccaaa

SEQ ID NO: 2245153 - RNA, 19 nt, Artificial Sequence
  Description of Artificial Sequence: Synthetic oligonucleotide
cauaagugccuagaaggau

SEQ ID NO: 2245154 - RNA, 19 nt, Artificial Sequence
  Description of Artificial Sequence: Synthetic oligonucleotide
gccuguuuguugccucacc

SEQ ID NO: 2245155 - RNA, 19 nt, Artificial Sequence
  Description of Artificial Sequence: Synthetic oligonucleotide
cgaaacuauaugccaucug

SEQ ID NO: 2245156 - RNA, 19 nt, Artificial Sequence
  Description of Artificial Sequence: Synthetic oligonucleotide
ccaugguccugagggaugc

SEQ ID NO: 2245157 - RNA, 19 nt, Artificial Sequence
  Description of Artificial Sequence: Synthetic oligonucleotide
ccaaugagucucaacaaau

SEQ ID NO: 2245158 - RNA, 19 nt, Artificial Sequence
  Description of Artificial Sequence: Synthetic oligonucleotide
gcucuuuuguuaacaagcu

SEQ ID NO: 2245159 - RNA, 19 nt, Artificial Sequence
  Description of Artificial Sequence: Synthetic oligonucleotide
cugcaacaccugcuuguca

SEQ ID NO: 2245160 - RNA, 19 nt, Artificial Sequence
  Description of Artificial Sequence: Synthetic oligonucleotide
ggaugcaacugccuccccu

SEQ ID NO: 2245161 - RNA, 19 nt, Artificial Sequence
  Description of Artificial Sequence: Synthetic oligonucleotide
gcaacaccugcuugucauc

SEQ ID NO: 2245162 - RNA, 19 nt, Artificial Sequence
  Description of Artificial Sequence: Synthetic oligonucleotide
cagggaaggugucuacacu

SEQ ID NO: 2245163 - RNA, 19 nt, Artificial Sequence
  Description of Artificial Sequence: Synthetic oligonucleotide
ggauuuccugcuccuugaa

SEQ ID NO: 2245164 - RNA, 19 nt, Artificial Sequence
  Description of Artificial Sequence: Synthetic oligonucleotide
ccccucucucuuauagaac

SEQ ID NO: 2245165 - RNA, 19 nt, Artificial Sequence
  Description of Artificial Sequence: Synthetic oligonucleotide
cgaagaacgcucaugcacu

SEQ ID NO: 2245166 - RNA, 19 nt, Artificial Sequence
  Description of Artificial Sequence: Synthetic oligonucleotide
gccuccccugugaucacgg

SEQ ID NO: 2245167 - RNA, 19 nt, Artificial Sequence
  Description of Artificial Sequence: Synthetic oligonucleotide
gugugacaaaauacuuggu

SEQ ID NO: 2245168 - RNA, 19 nt, Artificial Sequence
  Description of Artificial Sequence: Synthetic oligonucleotide
ccacagaaacauuucaauu

SEQ ID NO: 2245169 - RNA, 19 nt, Artificial Sequence
  Description of Artificial Sequence: Synthetic oligonucleotide
auaugccaucuggauccau

SEQ ID NO: 2245170 - RNA, 19 nt, Artificial Sequence
  Description of Artificial Sequence: Synthetic oligonucleotide
cuaucaccacagaaacauu

SEQ ID NO: 2245171 - RNA, 19 nt, Artificial Sequence
  Description of Artificial Sequence: Synthetic oligonucleotide
ccacuuccaaauguuuuga

SEQ ID NO: 2245172 - RNA, 19 nt, Artificial Sequence
  Description of Artificial Sequence: Synthetic oligonucleotide
cagaguccccucucucuua

SEQ ID NO: 2245173 - RNA, 19 nt, Artificial Sequence
  Description of Artificial Sequence: Synthetic oligonucleotide
cugccuccccugugaucac

SEQ ID NO: 2245174 - RNA, 19 nt, Artificial Sequence
  Description of Artificial Sequence: Synthetic oligonucleotide
gcucacuucacuguacauu

SEQ ID NO: 2245175 - RNA, 19 nt, Artificial Sequence
  Description of Artificial Sequence: Synthetic oligonucleotide
aaguggcuuuaaaguccuu

SEQ ID NO: 2245176 - RNA, 19 nt, Artificial Sequence
  Description of Artificial Sequence: Synthetic oligonucleotide
ccacucaaauaugccccug

SEQ ID NO: 2245177 - RNA, 19 nt, Artificial Sequence
  Description of Artificial Sequence: Synthetic oligonucleotide
gggaugcaacugccucccc

SEQ ID NO: 2245178 - RNA, 19 nt, Artificial Sequence
  Description of Artificial Sequence: Synthetic oligonucleotide
cccgaagaacgcucaugca

SEQ ID NO: 2245179 - RNA, 19 nt, Artificial Sequence
  Description of Artificial Sequence: Synthetic oligonucleotide
gguccaugucauaguauau

SEQ ID NO: 2245180 - RNA, 19 nt, Artificial Sequence
  Description of Artificial Sequence: Synthetic oligonucleotide
uggugggaucugggauuuc

SEQ ID NO: 2245181 - RNA, 19 nt, Artificial Sequence
  Description of Artificial Sequence: Synthetic oligonucleotide
gcuagguccagacguucuu

SEQ ID NO: 2245182 - RNA, 19 nt, Artificial Sequence
  Description of Artificial Sequence: Synthetic oligonucleotide
caugguccugagggaugca

SEQ ID NO: 2245183 - RNA, 19 nt, Artificial Sequence
  Description of Artificial Sequence: Synthetic oligonucleotide
gcuugucauccaugguccu

SEQ ID NO: 2245184 - RNA, 19 nt, Artificial Sequence
  Description of Artificial Sequence: Synthetic oligonucleotide
caguaccaaugagucucaa

SEQ ID NO: 2245185 - RNA, 19 nt, Artificial Sequence
  Description of Artificial Sequence: Synthetic oligonucleotide
cguaguuacuggcuuguau

SEQ ID NO: 2245186 - RNA, 19 nt, Artificial Sequence
  Description of Artificial Sequence: Synthetic oligonucleotide
cuccaccgugugacaaaau

SEQ ID NO: 2245187 - RNA, 19 nt, Artificial Sequence
  Description of Artificial Sequence: Synthetic oligonucleotide
ggcugcaaucuugcuugcu

SEQ ID NO: 2245188 - RNA, 19 nt, Artificial Sequence
  Description of Artificial Sequence: Synthetic oligonucleotide
ccuccccugugaucacgga

SEQ ID NO: 2245189 - RNA, 19 nt, Artificial Sequence
  Description of Artificial Sequence: Synthetic oligonucleotide
cgcucaugcacugcugcaa

SEQ ID NO: 2245190 - RNA, 19 nt, Artificial Sequence
  Description of Artificial Sequence: Synthetic oligonucleotide
gcucccgaagaacgcucau

SEQ ID NO: 2245191 - RNA, 19 nt, Artificial Sequence
  Description of Artificial Sequence: Synthetic oligonucleotide
ccccugugaucacggacau

SEQ ID NO: 2245192 - RNA, 19 nt, Artificial Sequence
  Description of Artificial Sequence: Synthetic oligonucleotide
uuagaaaucagacaaaagu

SEQ ID NO: 2245193 - RNA, 19 nt, Artificial Sequence
  Description of Artificial Sequence: Synthetic oligonucleotide
aggagaaacaucuugaccg

SEQ ID NO: 2245194 - RNA, 19 nt, Artificial Sequence
  Description of Artificial Sequence: Synthetic oligonucleotide
aaauuggcauuauaaaugg

SEQ ID NO: 2245195 - RNA, 19 nt, Artificial Sequence
  Description of Artificial Sequence: Synthetic oligonucleotide
aacauaguuucuuuuggcc

SEQ ID NO: 2245196 - RNA, 19 nt, Artificial Sequence
  Description of Artificial Sequence: Synthetic oligonucleotide
accguuuucaccuuugucc

SEQ ID NO: 2245197 - RNA, 19 nt, Artificial Sequence
  Description of Artificial Sequence: Synthetic oligonucleotide
aaacaccacauucaggagg

SEQ ID NO: 2245198 - RNA, 19 nt, Artificial Sequence
  Description of Artificial Sequence: Synthetic oligonucleotide
aaggcugcguguaagaucc

SEQ ID NO: 2245199 - RNA, 19 nt, Artificial Sequence
  Description of Artificial Sequence: Synthetic oligonucleotide
aaauaagauuaugaggacg

SEQ ID NO: 2245200 - RNA, 19 nt, Artificial Sequence
  Description of Artificial Sequence: Synthetic oligonucleotide
gguaaaauaagauuaugag

SEQ ID NO: 2245201 - RNA, 19 nt, Artificial Sequence
  Description of Artificial Sequence: Synthetic oligonucleotide
aaaugagucauagauggag

SEQ ID NO: 2245202 - RNA, 19 nt, Artificial Sequence
  Description of Artificial Sequence: Synthetic oligonucleotide
agagcuaaaggauacccac

SEQ ID NO: 2245203 - RNA, 19 nt, Artificial Sequence
  Description of Artificial Sequence: Synthetic oligonucleotide
ugguaaaauaagauuauga

SEQ ID NO: 2245204 - RNA, 19 nt, Artificial Sequence
  Description of Artificial Sequence: Synthetic oligonucleotide
aagcggucuaugcagaugg

SEQ ID NO: 2245205 - RNA, 19 nt, Artificial Sequence
  Description of Artificial Sequence: Synthetic oligonucleotide
aagauuaugaggacggagg

SEQ ID NO: 2245206 - RNA, 19 nt, Artificial Sequence
  Description of Artificial Sequence: Synthetic oligonucleotide
uuccgaaaugccaacauag

SEQ ID NO: 2245207 - RNA, 19 nt, Artificial Sequence
  Description of Artificial Sequence: Synthetic oligonucleotide
uguagucuugcucaugcgg

SEQ ID NO: 2245208 - RNA, 19 nt, Artificial Sequence
  Description of Artificial Sequence: Synthetic oligonucleotide
uacuuuaugaccuucuggu

SEQ ID NO: 2245209 - RNA, 19 nt, Artificial Sequence
  Description of Artificial Sequence: Synthetic oligonucleotide
acaauguucaucguccucc

SEQ ID NO: 2245210 - RNA, 19 nt, Artificial Sequence
  Description of Artificial Sequence: Synthetic oligonucleotide
uagacgacgguguagaagc

SEQ ID NO: 2245211 - RNA, 19 nt, Artificial Sequence
  Description of Artificial Sequence: Synthetic oligonucleotide
ugaaggaauucuuagaaau

SEQ ID NO: 2245212 - RNA, 19 nt, Artificial Sequence
  Description of Artificial Sequence: Synthetic oligonucleotide
aaauggaguagagaguggg

SEQ ID NO: 2245213 - RNA, 19 nt, Artificial Sequence
  Description of Artificial Sequence: Synthetic oligonucleotide
aaucagacaaaaguguuug

SEQ ID NO: 2245214 - RNA, 19 nt, Artificial Sequence
  Description of Artificial Sequence: Synthetic oligonucleotide
aaaggauacccacgugacc

SEQ ID NO: 2245215 - RNA, 19 nt, Artificial Sequence
  Description of Artificial Sequence: Synthetic oligonucleotide
auaaauggaguagagagug

SEQ ID NO: 2245216 - RNA, 19 nt, Artificial Sequence
  Description of Artificial Sequence: Synthetic oligonucleotide
uguaagauccaggaggcgg

SEQ ID NO: 2245217 - RNA, 19 nt, Artificial Sequence
  Description of Artificial Sequence: Synthetic oligonucleotide
ugagguacuggaaguagcg

SEQ ID NO: 2245218 - RNA, 19 nt, Artificial Sequence
  Description of Artificial Sequence: Synthetic oligonucleotide
aucgaggacaugcagaaag

SEQ ID NO: 2245219 - RNA, 19 nt, Artificial Sequence
  Description of Artificial Sequence: Synthetic oligonucleotide
uagagaguggguuucgagg

SEQ ID NO: 2245220 - RNA, 19 nt, Artificial Sequence
  Description of Artificial Sequence: Synthetic oligonucleotide
cuggggacaauguucaucg

SEQ ID NO: 2245221 - RNA, 19 nt, Artificial Sequence
  Description of Artificial Sequence: Synthetic oligonucleotide
gguggguuugaauugaugg

SEQ ID NO: 2245222 - RNA, 19 nt, Artificial Sequence
  Description of Artificial Sequence: Synthetic oligonucleotide
auacuuuaugaccuucugg

SEQ ID NO: 2245223 - RNA, 19 nt, Artificial Sequence
  Description of Artificial Sequence: Synthetic oligonucleotide
guuaucguccugcucaugg

SEQ ID NO: 2245224 - RNA, 19 nt, Artificial Sequence
  Description of Artificial Sequence: Synthetic oligonucleotide
uauaaauggaguagagagu

SEQ ID NO: 2245225 - RNA, 19 nt, Artificial Sequence
  Description of Artificial Sequence: Synthetic oligonucleotide
acaacaaagggugugcugg

SEQ ID NO: 2245226 - RNA, 19 nt, Artificial Sequence
  Description of Artificial Sequence: Synthetic oligonucleotide
aggaaguaguuacaauggc

SEQ ID NO: 2245227 - RNA, 19 nt, Artificial Sequence
  Description of Artificial Sequence: Synthetic oligonucleotide
auuggcauuauaaauggag

SEQ ID NO: 2245228 - RNA, 19 nt, Artificial Sequence
  Description of Artificial Sequence: Synthetic oligonucleotide
aagcucaggggauagacga

SEQ ID NO: 2245229 - RNA, 19 nt, Artificial Sequence
  Description of Artificial Sequence: Synthetic oligonucleotide
uaacacuucaucgaggaca

SEQ ID NO: 2245230 - RNA, 19 nt, Artificial Sequence
  Description of Artificial Sequence: Synthetic oligonucleotide
agauuaugaggacggaggg

SEQ ID NO: 2245231 - RNA, 19 nt, Artificial Sequence
  Description of Artificial Sequence: Synthetic oligonucleotide
uggguuucgaggcugaaga

SEQ ID NO: 2245232 - RNA, 19 nt, Artificial Sequence
  Description of Artificial Sequence: Synthetic oligonucleotide
acagugaaggaauucuuag

SEQ ID NO: 2245233 - RNA, 19 nt, Artificial Sequence
  Description of Artificial Sequence: Synthetic oligonucleotide
cuuguagucuugcucaugc

SEQ ID NO: 2245234 - RNA, 19 nt, Artificial Sequence
  Description of Artificial Sequence: Synthetic oligonucleotide
guagaagcggucuaugcag

SEQ ID NO: 2245235 - RNA, 19 nt, Artificial Sequence
  Description of Artificial Sequence: Synthetic oligonucleotide
uuggcauuauaaauggagu

SEQ ID NO: 2245236 - RNA, 19 nt, Artificial Sequence
  Description of Artificial Sequence: Synthetic oligonucleotide
aucuugaccguuuucaccu

SEQ ID NO: 2245237 - RNA, 19 nt, Artificial Sequence
  Description of Artificial Sequence: Synthetic oligonucleotide
uaaaggauacccacgugac

SEQ ID NO: 2245238 - RNA, 19 nt, Artificial Sequence
  Description of Artificial Sequence: Synthetic oligonucleotide
uguuugguggguuugaauu

SEQ ID NO: 2245239 - RNA, 19 nt, Artificial Sequence
  Description of Artificial Sequence: Synthetic oligonucleotide
gagucuuugguuaucgucc

SEQ ID NO: 2245240 - RNA, 19 nt, Artificial Sequence
  Description of Artificial Sequence: Synthetic oligonucleotide
ugaacugcagcacaacaaa

SEQ ID NO: 2245241 - RNA, 19 nt, Artificial Sequence
  Description of Artificial Sequence: Synthetic oligonucleotide
guuacaauggcugucccag

SEQ ID NO: 2245242 - RNA, 19 nt, Artificial Sequence
  Description of Artificial Sequence: Synthetic oligonucleotide
ggaggaaguaguuacaaug

SEQ ID NO: 2245243 - RNA, 19 nt, Artificial Sequence
  Description of Artificial Sequence: Synthetic oligonucleotide
gaauugaugggccaggcaa

SEQ ID NO: 2245244 - RNA, 19 nt, Artificial Sequence
  Description of Artificial Sequence: Synthetic oligonucleotide
uaagauuaugaggacggag

SEQ ID NO: 2245245 - RNA, 19 nt, Artificial Sequence
  Description of Artificial Sequence: Synthetic oligonucleotide
uuacacauggcgcugccga

SEQ ID NO: 2245246 - RNA, 19 nt, Artificial Sequence
  Description of Artificial Sequence: Synthetic oligonucleotide
aggcugaagagcuaaagga

SEQ ID NO: 2245247 - RNA, 19 nt, Artificial Sequence
  Description of Artificial Sequence: Synthetic oligonucleotide
ccagauauacuuuaugacc

SEQ ID NO: 2245248 - RNA, 19 nt, Artificial Sequence
  Description of Artificial Sequence: Synthetic oligonucleotide
uucaucgaggacaugcaga

SEQ ID NO: 2245249 - RNA, 19 nt, Artificial Sequence
  Description of Artificial Sequence: Synthetic oligonucleotide
gaagagcuaaaggauaccc

SEQ ID NO: 2245250 - RNA, 19 nt, Artificial Sequence
  Description of Artificial Sequence: Synthetic oligonucleotide
auaacagugaaggaauucu

SEQ ID NO: 2245251 - RNA, 19 nt, Artificial Sequence
  Description of Artificial Sequence: Synthetic oligonucleotide
uuugaauugaugggccagg

SEQ ID NO: 2245252 - RNA, 19 nt, Artificial Sequence
  Description of Artificial Sequence: Synthetic oligonucleotide
ucuaugcagauggagagca

SEQ ID NO: 2245253 - RNA, 19 nt, Artificial Sequence
  Description of Artificial Sequence: Synthetic oligonucleotide
uuggccuucucucuggaca

SEQ ID NO: 2245254 - RNA, 19 nt, Artificial Sequence
  Description of Artificial Sequence: Synthetic oligonucleotide
gcguguaagauccaggagg

SEQ ID NO: 2245255 - RNA, 19 nt, Artificial Sequence
  Description of Artificial Sequence: Synthetic oligonucleotide
guggguuugaauugauggg

SEQ ID NO: 2245256 - RNA, 19 nt, Artificial Sequence
  Description of Artificial Sequence: Synthetic oligonucleotide
agguacuggaaguagcgag

SEQ ID NO: 2245257 - RNA, 19 nt, Artificial Sequence
  Description of Artificial Sequence: Synthetic oligonucleotide
aguggaugaccguguaggc

SEQ ID NO: 2245258 - RNA, 19 nt, Artificial Sequence
  Description of Artificial Sequence: Synthetic oligonucleotide
gaggagaaacaucuugacc

SEQ ID NO: 2245259 - RNA, 19 nt, Artificial Sequence
  Description of Artificial Sequence: Synthetic oligonucleotide
ucuuucaucccucuccgaa

SEQ ID NO: 2245260 - RNA, 19 nt, Artificial Sequence
  Description of Artificial Sequence: Synthetic oligonucleotide
aaguaguuacaauggcugu

SEQ ID NO: 2245261 - RNA, 19 nt, Artificial Sequence
  Description of Artificial Sequence: Synthetic oligonucleotide
caggagaacagaaacacca

SEQ ID NO: 2245262 - RNA, 19 nt, Artificial Sequence
  Description of Artificial Sequence: Synthetic oligonucleotide
acaucuugaccguuuucac

SEQ ID NO: 2245263 - RNA, 19 nt, Artificial Sequence
  Description of Artificial Sequence: Synthetic oligonucleotide
uggguuugaauugaugggc

SEQ ID NO: 2245264 - RNA, 19 nt, Artificial Sequence
  Description of Artificial Sequence: Synthetic oligonucleotide
gacggagggaaugacaaag

SEQ ID NO: 2245265 - RNA, 19 nt, Artificial Sequence
  Description of Artificial Sequence: Synthetic oligonucleotide
cuaaaggauacccacguga

SEQ ID NO: 2245266 - RNA, 19 nt, Artificial Sequence
  Description of Artificial Sequence: Synthetic oligonucleotide
ugcgguaacacuucaucga

SEQ ID NO: 2245267 - RNA, 19 nt, Artificial Sequence
  Description of Artificial Sequence: Synthetic oligonucleotide
auuauaaauggaguagaga

SEQ ID NO: 2245268 - RNA, 19 nt, Artificial Sequence
  Description of Artificial Sequence: Synthetic oligonucleotide
ucagacaaaaguguuuggu

SEQ ID NO: 2245269 - RNA, 19 nt, Artificial Sequence
  Description of Artificial Sequence: Synthetic oligonucleotide
aaucucuggcacauaacag

SEQ ID NO: 2245270 - RNA, 19 nt, Artificial Sequence
  Description of Artificial Sequence: Synthetic oligonucleotide
aacaaagggugugcuggcc

SEQ ID NO: 2245271 - RNA, 19 nt, Artificial Sequence
  Description of Artificial Sequence: Synthetic oligonucleotide
gaugguguaggcauugcug

SEQ ID NO: 2245272 - RNA, 19 nt, Artificial Sequence
  Description of Artificial Sequence: Synthetic oligonucleotide
agcacaacaaagggugugc

SEQ ID NO: 2245273 - RNA, 19 nt, Artificial Sequence
  Description of Artificial Sequence: Synthetic oligonucleotide
aguaguuacaauggcuguc

SEQ ID NO: 2245274 - RNA, 19 nt, Artificial Sequence
  Description of Artificial Sequence: Synthetic oligonucleotide
ucaucgaggacaugcagaa

SEQ ID NO: 2245275 - RNA, 19 nt, Artificial Sequence
  Description of Artificial Sequence: Synthetic oligonucleotide
agcuaaaggauacccacgu

SEQ ID NO: 2245276 - RNA, 19 nt, Artificial Sequence
  Description of Artificial Sequence: Synthetic oligonucleotide
ugaccguguaggcaguucc

SEQ ID NO: 2245277 - RNA, 19 nt, Artificial Sequence
  Description of Artificial Sequence: Synthetic oligonucleotide
uuaucguccugcucauggg

SEQ ID NO: 2245278 - RNA, 19 nt, Artificial Sequence
  Description of Artificial Sequence: Synthetic oligonucleotide
auuaugaggacggagggaa

SEQ ID NO: 2245279 - RNA, 19 nt, Artificial Sequence
  Description of Artificial Sequence: Synthetic oligonucleotide
aaugagucauagauggagu

SEQ ID NO: 2245280 - RNA, 19 nt, Artificial Sequence
  Description of Artificial Sequence: Synthetic oligonucleotide
ucaugcgggugccagagcu

SEQ ID NO: 2245281 - RNA, 19 nt, Artificial Sequence
  Description of Artificial Sequence: Synthetic oligonucleotide
cugcgguaacacuucaucg

SEQ ID NO: 2245282 - RNA, 19 nt, Artificial Sequence
  Description of Artificial Sequence: Synthetic oligonucleotide
uggccucucggucaaauga

SEQ ID NO: 2245283 - RNA, 19 nt, Artificial Sequence
  Description of Artificial Sequence: Synthetic oligonucleotide
aaagcccaccaagaagugg

SEQ ID NO: 2245284 - RNA, 19 nt, Artificial Sequence
  Description of Artificial Sequence: Synthetic oligonucleotide
gacaagggagcucuucuug

SEQ ID NO: 2245285 - RNA, 19 nt, Artificial Sequence
  Description of Artificial Sequence: Synthetic oligonucleotide
agccuuuuaaucucuggca

SEQ ID NO: 2245286 - RNA, 19 nt, Artificial Sequence
  Description of Artificial Sequence: Synthetic oligonucleotide
aaaaguguuugguggguuu

SEQ ID NO: 2245287 - RNA, 19 nt, Artificial Sequence
  Description of Artificial Sequence: Synthetic oligonucleotide
aauugaugggccaggcaag

SEQ ID NO: 2245288 - RNA, 19 nt, Artificial Sequence
  Description of Artificial Sequence: Synthetic oligonucleotide
uguucaucguccuccucag

SEQ ID NO: 2245289 - RNA, 19 nt, Artificial Sequence
  Description of Artificial Sequence: Synthetic oligonucleotide
aacaccacauucaggagga

SEQ ID NO: 2245290 - RNA, 19 nt, Artificial Sequence
  Description of Artificial Sequence: Synthetic oligonucleotide
ucggucaaaugagucauag

SEQ ID NO: 2245291 - RNA, 19 nt, Artificial Sequence
  Description of Artificial Sequence: Synthetic oligonucleotide
auugaugggccaggcaagc

SEQ ID NO: 2245292 - RNA, 19 nt, Artificial Sequence
  Description of Artificial Sequence: Synthetic oligonucleotide
uggcauuauaaauggagua

SEQ ID NO: 2245293 - RNA, 19 nt, Artificial Sequence
  Description of Artificial Sequence: Synthetic oligonucleotide
guuugguggguuugaauug

SEQ ID NO: 2245294 - RNA, 19 nt, Artificial Sequence
  Description of Artificial Sequence: Synthetic oligonucleotide
aauguucaucguccuccuc

SEQ ID NO: 2245295 - RNA, 19 nt, Artificial Sequence
  Description of Artificial Sequence: Synthetic oligonucleotide
aucagacaaaaguguuugg

SEQ ID NO: 2245296 - RNA, 19 nt, Artificial Sequence
  Description of Artificial Sequence: Synthetic oligonucleotide
caauggcugucccaguugg

SEQ ID NO: 2245297 - RNA, 19 nt, Artificial Sequence
  Description of Artificial Sequence: Synthetic oligonucleotide
gcggcgaucaucuucuugg

SEQ ID NO: 2245298 - RNA, 19 nt, Artificial Sequence
  Description of Artificial Sequence: Synthetic oligonucleotide
ugcguguaagauccaggag

SEQ ID NO: 2245299 - RNA, 19 nt, Artificial Sequence
  Description of Artificial Sequence: Synthetic oligonucleotide
ugaauugaugggccaggca

SEQ ID NO: 2245300 - RNA, 19 nt, Artificial Sequence
  Description of Artificial Sequence: Synthetic oligonucleotide
ugaagcucaggggauagac

SEQ ID NO: 2245301 - RNA, 19 nt, Artificial Sequence
  Description of Artificial Sequence: Synthetic oligonucleotide
cuuuaugaccuucugguaa

SEQ ID NO: 2245302 - RNA, 19 nt, Artificial Sequence
  Description of Artificial Sequence: Synthetic oligonucleotide
gucaaaugagucauagaug

SEQ ID NO: 2245303 - RNA, 19 nt, Artificial Sequence
  Description of Artificial Sequence: Synthetic oligonucleotide
aagggugugcuggccacgc

SEQ ID NO: 2245304 - RNA, 19 nt, Artificial Sequence
  Description of Artificial Sequence: Synthetic oligonucleotide
uucuuagaaaucagacaaa

SEQ ID NO: 2245305 - RNA, 19 nt, Artificial Sequence
  Description of Artificial Sequence: Synthetic oligonucleotide
ucccucuccgaaaauuggc

SEQ ID NO: 2245306 - RNA, 19 nt, Artificial Sequence
  Description of Artificial Sequence: Synthetic oligonucleotide
ucaggguccgcccaucagu

SEQ ID NO: 2245307 - RNA, 19 nt, Artificial Sequence
  Description of Artificial Sequence: Synthetic oligonucleotide
uaucguccugcucauggga

SEQ ID NO: 2245308 - RNA, 19 nt, Artificial Sequence
  Description of Artificial Sequence: Synthetic oligonucleotide
uccgaaaugccaacauagu

SEQ ID NO: 2245309 - RNA, 19 nt, Artificial Sequence
  Description of Artificial Sequence: Synthetic oligonucleotide
caagaaguggaugaccgug

SEQ ID NO: 2245310 - RNA, 19 nt, Artificial Sequence
  Description of Artificial Sequence: Synthetic oligonucleotide
uuguagucuugcucaugcg

SEQ ID NO: 2245311 - RNA, 19 nt, Artificial Sequence
  Description of Artificial Sequence: Synthetic oligonucleotide
gaaguggaugaccguguag

SEQ ID NO: 2245312 - RNA, 19 nt, Artificial Sequence
  Description of Artificial Sequence: Synthetic oligonucleotide
guagcgagccaccuuacac

SEQ ID NO: 2245313 - RNA, 19 nt, Artificial Sequence
  Description of Artificial Sequence: Synthetic oligonucleotide
caggaggagaaacaucuug

SEQ ID NO: 2245314 - RNA, 19 nt, Artificial Sequence
  Description of Artificial Sequence: Synthetic oligonucleotide
guagagaguggguuucgag

SEQ ID NO: 2245315 - RNA, 19 nt, Artificial Sequence
  Description of Artificial Sequence: Synthetic oligonucleotide
aaaucagacaaaaguguuu

SEQ ID NO: 2245316 - RNA, 19 nt, Artificial Sequence
  Description of Artificial Sequence: Synthetic oligonucleotide
uuuccgaaaugccaacaua

SEQ ID NO: 2245317 - RNA, 19 nt, Artificial Sequence
  Description of Artificial Sequence: Synthetic oligonucleotide
gaagcucaggggauagacg

SEQ ID NO: 2245318 - RNA, 19 nt, Artificial Sequence
  Description of Artificial Sequence: Synthetic oligonucleotide
accgcugugaagacaaggg

SEQ ID NO: 2245319 - RNA, 19 nt, Artificial Sequence
  Description of Artificial Sequence: Synthetic oligonucleotide
auagacgacgguguagaag

SEQ ID NO: 2245320 - RNA, 19 nt, Artificial Sequence
  Description of Artificial Sequence: Synthetic oligonucleotide
gagcuaaaggauacccacg

SEQ ID NO: 2245321 - RNA, 19 nt, Artificial Sequence
  Description of Artificial Sequence: Synthetic oligonucleotide
caucccucuccgaaaauug

SEQ ID NO: 2245322 - RNA, 19 nt, Artificial Sequence
  Description of Artificial Sequence: Synthetic oligonucleotide
cagcacguacaucuggacg

SEQ ID NO: 2245323 - RNA, 19 nt, Artificial Sequence
  Description of Artificial Sequence: Synthetic oligonucleotide
gguaacacuucaucgagga

SEQ ID NO: 2245324 - RNA, 19 nt, Artificial Sequence
  Description of Artificial Sequence: Synthetic oligonucleotide
ggagggaggaaguaguuac

SEQ ID NO: 2245325 - RNA, 19 nt, Artificial Sequence
  Description of Artificial Sequence: Synthetic oligonucleotide
aagagcuaaaggauaccca

SEQ ID NO: 2245326 - RNA, 19 nt, Artificial Sequence
  Description of Artificial Sequence: Synthetic oligonucleotide
caucuggacgccuggagug

SEQ ID NO: 2245327 - RNA, 19 nt, Artificial Sequence
  Description of Artificial Sequence: Synthetic oligonucleotide
gacgccuggagugagguac

SEQ ID NO: 2245328 - RNA, 19 nt, Artificial Sequence
  Description of Artificial Sequence: Synthetic oligonucleotide
gauauacuuuaugaccuuc

SEQ ID NO: 2245329 - RNA, 19 nt, Artificial Sequence
  Description of Artificial Sequence: Synthetic oligonucleotide
ccaacauaguuucuuuugg

SEQ ID NO: 2245330 - RNA, 19 nt, Artificial Sequence
  Description of Artificial Sequence: Synthetic oligonucleotide
gaaggcugcguguaagauc

SEQ ID NO: 2245331 - RNA, 19 nt, Artificial Sequence
  Description of Artificial Sequence: Synthetic oligonucleotide
uugaccguuuucaccuuug

SEQ ID NO: 2245332 - RNA, 19 nt, Artificial Sequence
  Description of Artificial Sequence: Synthetic oligonucleotide
uaacagugaaggaauucuu

SEQ ID NO: 2245333 - RNA, 19 nt, Artificial Sequence
  Description of Artificial Sequence: Synthetic oligonucleotide
aguuacaauggcuguccca

SEQ ID NO: 2245334 - RNA, 19 nt, Artificial Sequence
  Description of Artificial Sequence: Synthetic oligonucleotide
uucuuuuggccauccuuga

SEQ ID NO: 2245335 - RNA, 19 nt, Artificial Sequence
  Description of Artificial Sequence: Synthetic oligonucleotide
ucuuuucccuggccucucg

SEQ ID NO: 2245336 - RNA, 19 nt, Artificial Sequence
  Description of Artificial Sequence: Synthetic oligonucleotide
ggagggauuuccgaaaugc

SEQ ID NO: 2245337 - RNA, 19 nt, Artificial Sequence
  Description of Artificial Sequence: Synthetic oligonucleotide
ucaugggagggauuuccga

SEQ ID NO: 2245338 - RNA, 19 nt, Artificial Sequence
  Description of Artificial Sequence: Synthetic oligonucleotide
acaaagggugugcuggcca

SEQ ID NO: 2245339 - RNA, 19 nt, Artificial Sequence
  Description of Artificial Sequence: Synthetic oligonucleotide
uagaagcggucuaugcaga

SEQ ID NO: 2245340 - RNA, 19 nt, Artificial Sequence
  Description of Artificial Sequence: Synthetic oligonucleotide
cucaugggagggauuuccg

SEQ ID NO: 2245341 - RNA, 19 nt, Artificial Sequence
  Description of Artificial Sequence: Synthetic oligonucleotide
auugcugcgguaacacuuc

SEQ ID NO: 2245342 - RNA, 19 nt, Artificial Sequence
  Description of Artificial Sequence: Synthetic oligonucleotide
gggacaauguucaucgucc

SEQ ID NO: 2245343 - RNA, 19 nt, Artificial Sequence
  Description of Artificial Sequence: Synthetic oligonucleotide
cuucaucgaggacaugcag

SEQ ID NO: 2245344 - RNA, 19 nt, Artificial Sequence
  Description of Artificial Sequence: Synthetic oligonucleotide
cacguggaaaggcagccag

SEQ ID NO: 2245345 - RNA, 19 nt, Artificial Sequence
  Description of Artificial Sequence: Synthetic oligonucleotide
ucucggucaaaugagucau

SEQ ID NO: 2245346 - RNA, 19 nt, Artificial Sequence
  Description of Artificial Sequence: Synthetic oligonucleotide
guugugaugguguaggcau

SEQ ID NO: 2245347 - RNA, 19 nt, Artificial Sequence
  Description of Artificial Sequence: Synthetic oligonucleotide
ucguccugcucaugggagg

SEQ ID NO: 2245348 - RNA, 19 nt, Artificial Sequence
  Description of Artificial Sequence: Synthetic oligonucleotide
aacagugaaggaauucuua

SEQ ID NO: 2245349 - RNA, 19 nt, Artificial Sequence
  Description of Artificial Sequence: Synthetic oligonucleotide
uaguuacaauggcuguccc

SEQ ID NO: 2245350 - RNA, 19 nt, Artificial Sequence
  Description of Artificial Sequence: Synthetic oligonucleotide
cauaacagugaaggaauuc

SEQ ID NO: 2245351 - RNA, 19 nt, Artificial Sequence
  Description of Artificial Sequence: Synthetic oligonucleotide
ucuccgaaaauuggcauua

SEQ ID NO: 2245352 - RNA, 19 nt, Artificial Sequence
  Description of Artificial Sequence: Synthetic oligonucleotide
cucaggggauagacgacgg

SEQ ID NO: 2245353 - RNA, 19 nt, Artificial Sequence
  Description of Artificial Sequence: Synthetic oligonucleotide
guaagauccaggaggcggc

SEQ ID NO: 2245354 - RNA, 19 nt, Artificial Sequence
  Description of Artificial Sequence: Synthetic oligonucleotide
agucuuugguuaucguccu

SEQ ID NO: 2245355 - RNA, 19 nt, Artificial Sequence
  Description of Artificial Sequence: Synthetic oligonucleotide
cuauucuccagauauacuu

SEQ ID NO: 2245356 - RNA, 19 nt, Artificial Sequence
  Description of Artificial Sequence: Synthetic oligonucleotide
gaccgcugugaagacaagg

SEQ ID NO: 2245357 - RNA, 19 nt, Artificial Sequence
  Description of Artificial Sequence: Synthetic oligonucleotide
uuuucaccuuuguccuggg

SEQ ID NO: 2245358 - RNA, 19 nt, Artificial Sequence
  Description of Artificial Sequence: Synthetic oligonucleotide
uucccucccaggagggagg

SEQ ID NO: 2245359 - RNA, 19 nt, Artificial Sequence
  Description of Artificial Sequence: Synthetic oligonucleotide
aggaggagaaacaucuuga

SEQ ID NO: 2245360 - RNA, 19 nt, Artificial Sequence
  Description of Artificial Sequence: Synthetic oligonucleotide
gacgacgguguagaagcgg

SEQ ID NO: 2245361 - RNA, 19 nt, Artificial Sequence
  Description of Artificial Sequence: Synthetic oligonucleotide
uccgaaaauuggcauuaua

SEQ ID NO: 2245362 - RNA, 19 nt, Artificial Sequence
  Description of Artificial Sequence: Synthetic oligonucleotide
ucaucguccuccucagggu

SEQ ID NO: 2245363 - RNA, 19 nt, Artificial Sequence
  Description of Artificial Sequence: Synthetic oligonucleotide
uaagauccaggaggcggcg

SEQ ID NO: 2245364 - RNA, 19 nt, Artificial Sequence
  Description of Artificial Sequence: Synthetic oligonucleotide
cuggacaccuugaagcuca

SEQ ID NO: 2245365 - RNA, 19 nt, Artificial Sequence
  Description of Artificial Sequence: Synthetic oligonucleotide
aauuggcauuauaaaugga

SEQ ID NO: 2245366 - RNA, 19 nt, Artificial Sequence
  Description of Artificial Sequence: Synthetic oligonucleotide
uucuccagauauacuuuau

SEQ ID NO: 2245367 - RNA, 19 nt, Artificial Sequence
  Description of Artificial Sequence: Synthetic oligonucleotide
caacaaagggugugcuggc

SEQ ID NO: 2245368 - RNA, 19 nt, Artificial Sequence
  Description of Artificial Sequence: Synthetic oligonucleotide
uacacauggcgcugccgag

SEQ ID NO: 2245369 - RNA, 19 nt, Artificial Sequence
  Description of Artificial Sequence: Synthetic oligonucleotide
uggaguagagaguggguuu

SEQ ID NO: 2245370 - RNA, 19 nt, Artificial Sequence
  Description of Artificial Sequence: Synthetic oligonucleotide
guaggcaguucccucccag

SEQ ID NO: 2245371 - RNA, 19 nt, Artificial Sequence
  Description of Artificial Sequence: Synthetic oligonucleotide
cuugaagcucaggggauag

SEQ ID NO: 2245372 - RNA, 19 nt, Artificial Sequence
  Description of Artificial Sequence: Synthetic oligonucleotide
ggagucuuugguuaucguc

SEQ ID NO: 2245373 - RNA, 19 nt, Artificial Sequence
  Description of Artificial Sequence: Synthetic oligonucleotide
gugccuauucuccagauau

SEQ ID NO: 2245374 - RNA, 19 nt, Artificial Sequence
  Description of Artificial Sequence: Synthetic oligonucleotide
guacuggaaguagcgagcc

SEQ ID NO: 2245375 - RNA, 19 nt, Artificial Sequence
  Description of Artificial Sequence: Synthetic oligonucleotide
gacaauguucaucguccuc

SEQ ID NO: 2245376 - RNA, 19 nt, Artificial Sequence
  Description of Artificial Sequence: Synthetic oligonucleotide
cugcguguaagauccagga

SEQ ID NO: 2245377 - RNA, 19 nt, Artificial Sequence
  Description of Artificial Sequence: Synthetic oligonucleotide
aacugguugugauggugua

SEQ ID NO: 2245378 - RNA, 19 nt, Artificial Sequence
  Description of Artificial Sequence: Synthetic oligonucleotide
acuuuaugaccuucuggua

SEQ ID NO: 2245379 - RNA, 19 nt, Artificial Sequence
  Description of Artificial Sequence: Synthetic oligonucleotide
gauuaugaggacggaggga

SEQ ID NO: 2245380 - RNA, 19 nt, Artificial Sequence
  Description of Artificial Sequence: Synthetic oligonucleotide
cugccgaggguccaccucc

SEQ ID NO: 2245381 - RNA, 19 nt, Artificial Sequence
  Description of Artificial Sequence: Synthetic oligonucleotide
uucgaggcugaagagcuaa

SEQ ID NO: 2245382 - RNA, 19 nt, Artificial Sequence
  Description of Artificial Sequence: Synthetic oligonucleotide
cacgugaccgcugugaaga

SEQ ID NO: 2245383 - RNA, 19 nt, Artificial Sequence
  Description of Artificial Sequence: Synthetic oligonucleotide
ugaccguuuucaccuuugu

SEQ ID NO: 2245384 - RNA, 19 nt, Artificial Sequence
  Description of Artificial Sequence: Synthetic oligonucleotide
cucucggucaaaugaguca

SEQ ID NO: 2245385 - RNA, 19 nt, Artificial Sequence
  Description of Artificial Sequence: Synthetic oligonucleotide
aaguagcgagccaccuuac

SEQ ID NO: 2245386 - RNA, 19 nt, Artificial Sequence
  Description of Artificial Sequence: Synthetic oligonucleotide
caggggauagacgacggug

SEQ ID NO: 2245387 - RNA, 19 nt, Artificial Sequence
  Description of Artificial Sequence: Synthetic oligonucleotide
gaguagagaguggguuucg

SEQ ID NO: 2245388 - RNA, 19 nt, Artificial Sequence
  Description of Artificial Sequence: Synthetic oligonucleotide
cagugaaggaauucuuaga

SEQ ID NO: 2245389 - RNA, 19 nt, Artificial Sequence
  Description of Artificial Sequence: Synthetic oligonucleotide
gcugugaagacaagggagc

SEQ ID NO: 2245390 - RNA, 19 nt, Artificial Sequence
  Description of Artificial Sequence: Synthetic oligonucleotide
gaccguuuucaccuuuguc

SEQ ID NO: 2245391 - RNA, 19 nt, Artificial Sequence
  Description of Artificial Sequence: Synthetic oligonucleotide
auacccacgugaccgcugu

SEQ ID NO: 2245392 - RNA, 19 nt, Artificial Sequence
  Description of Artificial Sequence: Synthetic oligonucleotide
agcgagccaccuuacacau

SEQ ID NO: 2245393 - RNA, 19 nt, Artificial Sequence
  Description of Artificial Sequence: Synthetic oligonucleotide
gcgguaacacuucaucgag

SEQ ID NO: 2245394 - RNA, 19 nt, Artificial Sequence
  Description of Artificial Sequence: Synthetic oligonucleotide
gaagcggucuaugcagaug

SEQ ID NO: 2245395 - RNA, 19 nt, Artificial Sequence
  Description of Artificial Sequence: Synthetic oligonucleotide
gaaaucagacaaaaguguu

SEQ ID NO: 2245396 - RNA, 19 nt, Artificial Sequence
  Description of Artificial Sequence: Synthetic oligonucleotide
auaagauuaugaggacgga

SEQ ID NO: 2245397 - RNA, 19 nt, Artificial Sequence
  Description of Artificial Sequence: Synthetic oligonucleotide
agauggagucuuugguuau

SEQ ID NO: 2245398 - RNA, 19 nt, Artificial Sequence
  Description of Artificial Sequence: Synthetic oligonucleotide
aggcaguucccucccagga

SEQ ID NO: 2245399 - RNA, 19 nt, Artificial Sequence
  Description of Artificial Sequence: Synthetic oligonucleotide
ugugaagacaagggagcuc

SEQ ID NO: 2245400 - RNA, 19 nt, Artificial Sequence
  Description of Artificial Sequence: Synthetic oligonucleotide
aguagcgagccaccuuaca

SEQ ID NO: 2245401 - RNA, 19 nt, Artificial Sequence
  Description of Artificial Sequence: Synthetic oligonucleotide
gcauuauaaauggaguaga

SEQ ID NO: 2245402 - RNA, 19 nt, Artificial Sequence
  Description of Artificial Sequence: Synthetic oligonucleotide
cuuacacauggcgcugccg

SEQ ID NO: 2245403 - RNA, 19 nt, Artificial Sequence
  Description of Artificial Sequence: Synthetic oligonucleotide
auggaguagagaguggguu

SEQ ID NO: 2245404 - RNA, 19 nt, Artificial Sequence
  Description of Artificial Sequence: Synthetic oligonucleotide
gguguaggcauugcugcgg

SEQ ID NO: 2245405 - RNA, 19 nt, Artificial Sequence
  Description of Artificial Sequence: Synthetic oligonucleotide
gccaggagaacagaaacac

SEQ ID NO: 2245406 - RNA, 19 nt, Artificial Sequence
  Description of Artificial Sequence: Synthetic oligonucleotide
aggcaagcuucuuuucccu

SEQ ID NO: 2245407 - RNA, 19 nt, Artificial Sequence
  Description of Artificial Sequence: Synthetic oligonucleotide
caaagcccaccaagaagug

SEQ ID NO: 2245408 - RNA, 19 nt, Artificial Sequence
  Description of Artificial Sequence: Synthetic oligonucleotide
guuucgaggcugaagagcu

SEQ ID NO: 2245409 - RNA, 19 nt, Artificial Sequence
  Description of Artificial Sequence: Synthetic oligonucleotide
aggacggagggaaugacaa

SEQ ID NO: 2245410 - RNA, 19 nt, Artificial Sequence
  Description of Artificial Sequence: Synthetic oligonucleotide
ucaggggauagacgacggu

SEQ ID NO: 2245411 - RNA, 19 nt, Artificial Sequence
  Description of Artificial Sequence: Synthetic oligonucleotide
ucaucccucuccgaaaauu

SEQ ID NO: 2245412 - RNA, 19 nt, Artificial Sequence
  Description of Artificial Sequence: Synthetic oligonucleotide
uugcucaugcgggugccag

SEQ ID NO: 2245413 - RNA, 19 nt, Artificial Sequence
  Description of Artificial Sequence: Synthetic oligonucleotide
caugggagggauuuccgaa

SEQ ID NO: 2245414 - RNA, 19 nt, Artificial Sequence
  Description of Artificial Sequence: Synthetic oligonucleotide
aggguccgcccaucagugc

SEQ ID NO: 2245415 - RNA, 19 nt, Artificial Sequence
  Description of Artificial Sequence: Synthetic oligonucleotide
caggguccgcccaucagug

SEQ ID NO: 2245416 - RNA, 19 nt, Artificial Sequence
  Description of Artificial Sequence: Synthetic oligonucleotide
gaggguccaccucccagug

SEQ ID NO: 2245417 - RNA, 19 nt, Artificial Sequence
  Description of Artificial Sequence: Synthetic oligonucleotide
uuaugaggacggagggaau

SEQ ID NO: 2245418 - RNA, 19 nt, Artificial Sequence
  Description of Artificial Sequence: Synthetic oligonucleotide
agaaacaucuugaccguuu

SEQ ID NO: 2245419 - RNA, 19 nt, Artificial Sequence
  Description of Artificial Sequence: Synthetic oligonucleotide
cuggccacgcugaugagaa

SEQ ID NO: 2245420 - RNA, 19 nt, Artificial Sequence
  Description of Artificial Sequence: Synthetic oligonucleotide
agauccaggaggcggcgau

SEQ ID NO: 2245421 - RNA, 19 nt, Artificial Sequence
  Description of Artificial Sequence: Synthetic oligonucleotide
gcugcgguaacacuucauc

SEQ ID NO: 2245422 - RNA, 19 nt, Artificial Sequence
  Description of Artificial Sequence: Synthetic oligonucleotide
aucguccugcucaugggag

SEQ ID NO: 2245423 - RNA, 19 nt, Artificial Sequence
  Description of Artificial Sequence: Synthetic oligonucleotide
aggggauagacgacggugu

SEQ ID NO: 2245424 - RNA, 19 nt, Artificial Sequence
  Description of Artificial Sequence: Synthetic oligonucleotide
agaaguggaugaccgugua

SEQ ID NO: 2245425 - RNA, 19 nt, Artificial Sequence
  Description of Artificial Sequence: Synthetic oligonucleotide
ggauagacgacgguguaga

SEQ ID NO: 2245426 - RNA, 19 nt, Artificial Sequence
  Description of Artificial Sequence: Synthetic oligonucleotide
guguaggcaguucccuccc

SEQ ID NO: 2245427 - RNA, 19 nt, Artificial Sequence
  Description of Artificial Sequence: Synthetic oligonucleotide
cauaguuucuuuuggccau

SEQ ID NO: 2245428 - RNA, 19 nt, Artificial Sequence
  Description of Artificial Sequence: Synthetic oligonucleotide
gugaacugcagcacaacaa

SEQ ID NO: 2245429 - RNA, 19 nt, Artificial Sequence
  Description of Artificial Sequence: Synthetic oligonucleotide
cgcugugaagacaagggag

SEQ ID NO: 2245430 - RNA, 19 nt, Artificial Sequence
  Description of Artificial Sequence: Synthetic oligonucleotide
guaggcauugcugcgguaa

SEQ ID NO: 2245431 - RNA, 19 nt, Artificial Sequence
  Description of Artificial Sequence: Synthetic oligonucleotide
ucuggacgccuggagugag

SEQ ID NO: 2245432 - RNA, 19 nt, Artificial Sequence
  Description of Artificial Sequence: Synthetic oligonucleotide
ggugccagagcugagccac

SEQ ID NO: 2245433 - RNA, 19 nt, Artificial Sequence
  Description of Artificial Sequence: Synthetic oligonucleotide
agaagcggucuaugcagau

SEQ ID NO: 2245434 - RNA, 19 nt, Artificial Sequence
  Description of Artificial Sequence: Synthetic oligonucleotide
gcucaggggauagacgacg

SEQ ID NO: 2245435 - RNA, 19 nt, Artificial Sequence
  Description of Artificial Sequence: Synthetic oligonucleotide
ugccuauucuccagauaua

SEQ ID NO: 2245436 - RNA, 19 nt, Artificial Sequence
  Description of Artificial Sequence: Synthetic oligonucleotide
acgugaccgcugugaagac

SEQ ID NO: 2245437 - RNA, 19 nt, Artificial Sequence
  Description of Artificial Sequence: Synthetic oligonucleotide
uugcugcgguaacacuuca

SEQ ID NO: 2245438 - RNA, 19 nt, Artificial Sequence
  Description of Artificial Sequence: Synthetic oligonucleotide
augaggacggagggaauga

SEQ ID NO: 2245439 - RNA, 19 nt, Artificial Sequence
  Description of Artificial Sequence: Synthetic oligonucleotide
guucaucguccuccucagg

SEQ ID NO: 2245440 - RNA, 19 nt, Artificial Sequence
  Description of Artificial Sequence: Synthetic oligonucleotide
ggggacaauguucaucguc

SEQ ID NO: 2245441 - RNA, 19 nt, Artificial Sequence
  Description of Artificial Sequence: Synthetic oligonucleotide
augaccguguaggcaguuc

SEQ ID NO: 2245442 - RNA, 19 nt, Artificial Sequence
  Description of Artificial Sequence: Synthetic oligonucleotide
cucccaguggugaacugca

SEQ ID NO: 2245443 - RNA, 19 nt, Artificial Sequence
  Description of Artificial Sequence: Synthetic oligonucleotide
gucccaguuggagccauag

SEQ ID NO: 2245444 - RNA, 19 nt, Artificial Sequence
  Description of Artificial Sequence: Synthetic oligonucleotide
agagcugagccacguggaa

SEQ ID NO: 2245445 - RNA, 19 nt, Artificial Sequence
  Description of Artificial Sequence: Synthetic oligonucleotide
gugaccgcugugaagacaa

SEQ ID NO: 2245446 - RNA, 19 nt, Artificial Sequence
  Description of Artificial Sequence: Synthetic oligonucleotide
gccaccuuacacauggcgc

SEQ ID NO: 2245447 - RNA, 19 nt, Artificial Sequence
  Description of Artificial Sequence: Synthetic oligonucleotide
cagcacaacaaagggugug

SEQ ID NO: 2245448 - RNA, 19 nt, Artificial Sequence
  Description of Artificial Sequence: Synthetic oligonucleotide
uugguggguuugaauugau

SEQ ID NO: 2245449 - RNA, 19 nt, Artificial Sequence
  Description of Artificial Sequence: Synthetic oligonucleotide
agcagcacguacaucugga

SEQ ID NO: 2245450 - RNA, 19 nt, Artificial Sequence
  Description of Artificial Sequence: Synthetic oligonucleotide
gauacccacgugaccgcug

SEQ ID NO: 2245451 - RNA, 19 nt, Artificial Sequence
  Description of Artificial Sequence: Synthetic oligonucleotide
aguagagaguggguuucga

SEQ ID NO: 2245452 - RNA, 19 nt, Artificial Sequence
  Description of Artificial Sequence: Synthetic oligonucleotide
gaccguguaggcaguuccc

SEQ ID NO: 2245453 - RNA, 19 nt, Artificial Sequence
  Description of Artificial Sequence: Synthetic oligonucleotide
guggguuucgaggcugaag

SEQ ID NO: 2245454 - RNA, 19 nt, Artificial Sequence
  Description of Artificial Sequence: Synthetic oligonucleotide
gaacugguugugauggugu

SEQ ID NO: 2245455 - RNA, 19 nt, Artificial Sequence
  Description of Artificial Sequence: Synthetic oligonucleotide
ugaggacggagggaaugac

SEQ ID NO: 2245456 - RNA, 19 nt, Artificial Sequence
  Description of Artificial Sequence: Synthetic oligonucleotide
agcucaggggauagacgac

SEQ ID NO: 2245457 - RNA, 19 nt, Artificial Sequence
  Description of Artificial Sequence: Synthetic oligonucleotide
uggacaccuugaagcucag

SEQ ID NO: 2245458 - RNA, 19 nt, Artificial Sequence
  Description of Artificial Sequence: Synthetic oligonucleotide
gauagacgacgguguagaa

SEQ ID NO: 2245459 - RNA, 19 nt, Artificial Sequence
  Description of Artificial Sequence: Synthetic oligonucleotide
acgacgguguagaagcggu

SEQ ID NO: 2245460 - RNA, 19 nt, Artificial Sequence
  Description of Artificial Sequence: Synthetic oligonucleotide
ggauuuccgaaaugccaac

SEQ ID NO: 2245461 - RNA, 19 nt, Artificial Sequence
  Description of Artificial Sequence: Synthetic oligonucleotide
ggguccgcccaucagugcc

SEQ ID NO: 2245462 - RNA, 19 nt, Artificial Sequence
  Description of Artificial Sequence: Synthetic oligonucleotide
gcugcguguaagauccagg

SEQ ID NO: 2245463 - RNA, 19 nt, Artificial Sequence
  Description of Artificial Sequence: Synthetic oligonucleotide
gcuaaaggauacccacgug

SEQ ID NO: 2245464 - RNA, 19 nt, Artificial Sequence
  Description of Artificial Sequence: Synthetic oligonucleotide
caugcgggugccagagcug

SEQ ID NO: 2245465 - RNA, 19 nt, Artificial Sequence
  Description of Artificial Sequence: Synthetic oligonucleotide
gaggacggagggaaugaca

SEQ ID NO: 2245466 - RNA, 19 nt, Artificial Sequence
  Description of Artificial Sequence: Synthetic oligonucleotide
agggaaugacaaagcccac

SEQ ID NO: 2245467 - RNA, 19 nt, Artificial Sequence
  Description of Artificial Sequence: Synthetic oligonucleotide
ugcugcgguaacacuucau

SEQ ID NO: 2245468 - RNA, 19 nt, Artificial Sequence
  Description of Artificial Sequence: Synthetic oligonucleotide
gcucaugggagggauuucc

SEQ ID NO: 2245469 - RNA, 19 nt, Artificial Sequence
  Description of Artificial Sequence: Synthetic oligonucleotide
ugcucaugcgggugccaga

SEQ ID NO: 2245470 - RNA, 19 nt, Artificial Sequence
  Description of Artificial Sequence: Synthetic oligonucleotide
cuggacgccuggagugagg

SEQ ID NO: 2245471 - RNA, 19 nt, Artificial Sequence
  Description of Artificial Sequence: Synthetic oligonucleotide
gggauuuccgaaaugccaa

SEQ ID NO: 2245472 - RNA, 19 nt, Artificial Sequence
  Description of Artificial Sequence: Synthetic oligonucleotide
cuggccucucggucaaaug

SEQ ID NO: 2245473 - RNA, 19 nt, Artificial Sequence
  Description of Artificial Sequence: Synthetic oligonucleotide
acguggaaaggcagccagg

SEQ ID NO: 2245474 - RNA, 19 nt, Artificial Sequence
  Description of Artificial Sequence: Synthetic oligonucleotide
cagagcugagccacgugga

SEQ ID NO: 2245475 - RNA, 19 nt, Artificial Sequence
  Description of Artificial Sequence: Synthetic oligonucleotide
uugaagcucaggggauaga

SEQ ID NO: 2245476 - RNA, 19 nt, Artificial Sequence
  Description of Artificial Sequence: Synthetic oligonucleotide
gacgguguagaagcggucu

SEQ ID NO: 2245477 - RNA, 19 nt, Artificial Sequence
  Description of Artificial Sequence: Synthetic oligonucleotide
uuucgaggcugaagagcua

SEQ ID NO: 2245478 - RNA, 19 nt, Artificial Sequence
  Description of Artificial Sequence: Synthetic oligonucleotide
ggguuucgaggcugaagag

SEQ ID NO: 2245479 - RNA, 19 nt, Artificial Sequence
  Description of Artificial Sequence: Synthetic oligonucleotide
ucgaggcugaagagcuaaa

SEQ ID NO: 2245480 - RNA, 19 nt, Artificial Sequence
  Description of Artificial Sequence: Synthetic oligonucleotide
auccuugaacugguuguga

SEQ ID NO: 2245481 - RNA, 19 nt, Artificial Sequence
  Description of Artificial Sequence: Synthetic oligonucleotide
gucuuugguuaucguccug

SEQ ID NO: 2245482 - RNA, 19 nt, Artificial Sequence
  Description of Artificial Sequence: Synthetic oligonucleotide
uugaugggccaggcaagcu

SEQ ID NO: 2245483 - RNA, 19 nt, Artificial Sequence
  Description of Artificial Sequence: Synthetic oligonucleotide
accguguaggcaguucccu

SEQ ID NO: 2245484 - RNA, 19 nt, Artificial Sequence
  Description of Artificial Sequence: Synthetic oligonucleotide
ccuggagugagguacugga

SEQ ID NO: 2245485 - RNA, 19 nt, Artificial Sequence
  Description of Artificial Sequence: Synthetic oligonucleotide
ggaggcggcgaucaucuuc

SEQ ID NO: 2245486 - RNA, 19 nt, Artificial Sequence
  Description of Artificial Sequence: Synthetic oligonucleotide
gagucauagauggagucuu

SEQ ID NO: 2245487 - RNA, 19 nt, Artificial Sequence
  Description of Artificial Sequence: Synthetic oligonucleotide
ggaguagagaguggguuuc

SEQ ID NO: 2245488 - RNA, 19 nt, Artificial Sequence
  Description of Artificial Sequence: Synthetic oligonucleotide
aggagucaggaaggcugcg

SEQ ID NO: 2245489 - RNA, 19 nt, Artificial Sequence
  Description of Artificial Sequence: Synthetic oligonucleotide
acguacaucuggacgccug

SEQ ID NO: 2245490 - RNA, 19 nt, Artificial Sequence
  Description of Artificial Sequence: Synthetic oligonucleotide
aguguuugguggguuugaa

SEQ ID NO: 2245491 - RNA, 19 nt, Artificial Sequence
  Description of Artificial Sequence: Synthetic oligonucleotide
gaggcggcgaucaucuucu

SEQ ID NO: 2245492 - RNA, 19 nt, Artificial Sequence
  Description of Artificial Sequence: Synthetic oligonucleotide
agacgacgguguagaagcg

SEQ ID NO: 2245493 - RNA, 19 nt, Artificial Sequence
  Description of Artificial Sequence: Synthetic oligonucleotide
gggauagacgacgguguag

SEQ ID NO: 2245494 - RNA, 19 nt, Artificial Sequence
  Description of Artificial Sequence: Synthetic oligonucleotide
gggugugcuggccacgcug

SEQ ID NO: 2245495 - RNA, 19 nt, Artificial Sequence
  Description of Artificial Sequence: Synthetic oligonucleotide
ugccgaggguccaccuccc

SEQ ID NO: 2245496 - RNA, 19 nt, Artificial Sequence
  Description of Artificial Sequence: Synthetic oligonucleotide
acccacgugaccgcuguga

SEQ ID NO: 2245497 - RNA, 19 nt, Artificial Sequence
  Description of Artificial Sequence: Synthetic oligonucleotide
gguugugaugguguaggca

SEQ ID NO: 2245498 - RNA, 19 nt, Artificial Sequence
  Description of Artificial Sequence: Synthetic oligonucleotide
ucuugaccguuuucaccuu

SEQ ID NO: 2245499 - RNA, 19 nt, Artificial Sequence
  Description of Artificial Sequence: Synthetic oligonucleotide
ggccucucggucaaaugag

SEQ ID NO: 2245500 - RNA, 19 nt, Artificial Sequence
  Description of Artificial Sequence: Synthetic oligonucleotide
cucuggacaccuugaagcu

SEQ ID NO: 2245501 - RNA, 19 nt, Artificial Sequence
  Description of Artificial Sequence: Synthetic oligonucleotide
acauaacagugaaggaauu

SEQ ID NO: 2245502 - RNA, 19 nt, Artificial Sequence
  Description of Artificial Sequence: Synthetic oligonucleotide
gcucaugcgggugccagag

SEQ ID NO: 2245503 - RNA, 19 nt, Artificial Sequence
  Description of Artificial Sequence: Synthetic oligonucleotide
acgguguagaagcggucua

SEQ ID NO: 2245504 - RNA, 19 nt, Artificial Sequence
  Description of Artificial Sequence: Synthetic oligonucleotide
ugcgggugccagagcugag

SEQ ID NO: 2245505 - RNA, 19 nt, Artificial Sequence
  Description of Artificial Sequence: Synthetic oligonucleotide
uggggacaauguucaucgu

SEQ ID NO: 2245506 - RNA, 19 nt, Artificial Sequence
  Description of Artificial Sequence: Synthetic oligonucleotide
gagugagguacuggaagua

SEQ ID NO: 2245507 - RNA, 19 nt, Artificial Sequence
  Description of Artificial Sequence: Synthetic oligonucleotide
gggagcucuucuuguaguc

SEQ ID NO: 2245508 - RNA, 19 nt, Artificial Sequence
  Description of Artificial Sequence: Synthetic oligonucleotide
cauucaggaggagaaacau

SEQ ID NO: 2245509 - RNA, 19 nt, Artificial Sequence
  Description of Artificial Sequence: Synthetic oligonucleotide
ggagaaacaucuugaccgu

SEQ ID NO: 2245510 - RNA, 19 nt, Artificial Sequence
  Description of Artificial Sequence: Synthetic oligonucleotide
ccucucggucaaaugaguc

SEQ ID NO: 2245511 - RNA, 19 nt, Artificial Sequence
  Description of Artificial Sequence: Synthetic oligonucleotide
aucuggacgccuggaguga

SEQ ID NO: 2245512 - RNA, 19 nt, Artificial Sequence
  Description of Artificial Sequence: Synthetic oligonucleotide
gcggucuaugcagauggag

SEQ ID NO: 2245513 - RNA, 19 nt, Artificial Sequence
  Description of Artificial Sequence: Synthetic oligonucleotide
cuggagugagguacuggaa

SEQ ID NO: 2245514 - RNA, 19 nt, Artificial Sequence
  Description of Artificial Sequence: Synthetic oligonucleotide
caccuuacacauggcgcug

SEQ ID NO: 2245515 - RNA, 19 nt, Artificial Sequence
  Description of Artificial Sequence: Synthetic oligonucleotide
ccuucugguaaaauaagau

SEQ ID NO: 2245516 - RNA, 19 nt, Artificial Sequence
  Description of Artificial Sequence: Synthetic oligonucleotide
cguacaucuggacgccugg

SEQ ID NO: 2245517 - RNA, 19 nt, Artificial Sequence
  Description of Artificial Sequence: Synthetic oligonucleotide
cuuugguuaucguccugcu

SEQ ID NO: 2245518 - RNA, 19 nt, Artificial Sequence
  Description of Artificial Sequence: Synthetic oligonucleotide
ucccuggccucucggucaa

SEQ ID NO: 2245519 - RNA, 19 nt, Artificial Sequence
  Description of Artificial Sequence: Synthetic oligonucleotide
cucaugcgggugccagagc

SEQ ID NO: 2245520 - RNA, 19 nt, Artificial Sequence
  Description of Artificial Sequence: Synthetic oligonucleotide
accuugaagcucaggggau

SEQ ID NO: 2245521 - RNA, 19 nt, Artificial Sequence
  Description of Artificial Sequence: Synthetic oligonucleotide
accucccaguggugaacug

SEQ ID NO: 2245522 - RNA, 19 nt, Artificial Sequence
  Description of Artificial Sequence: Synthetic oligonucleotide
gcagcacguacaucuggac

SEQ ID NO: 2245523 - RNA, 19 nt, Artificial Sequence
  Description of Artificial Sequence: Synthetic oligonucleotide
gucaggaaggcugcgugua

SEQ ID NO: 2245524 - RNA, 19 nt, Artificial Sequence
  Description of Artificial Sequence: Synthetic oligonucleotide
ggcugcguguaagauccag

SEQ ID NO: 2245525 - RNA, 19 nt, Artificial Sequence
  Description of Artificial Sequence: Synthetic oligonucleotide
cgguaacacuucaucgagg

SEQ ID NO: 2245526 - RNA, 19 nt, Artificial Sequence
  Description of Artificial Sequence: Synthetic oligonucleotide
uacccacgugaccgcugug

SEQ ID NO: 2245527 - RNA, 19 nt, Artificial Sequence
  Description of Artificial Sequence: Synthetic oligonucleotide
agauggagagcagcacgua

SEQ ID NO: 2245528 - RNA, 19 nt, Artificial Sequence
  Description of Artificial Sequence: Synthetic oligonucleotide
ccucccaguggugaacugc

SEQ ID NO: 2245529 - RNA, 19 nt, Artificial Sequence
  Description of Artificial Sequence: Synthetic oligonucleotide
ccuuacacauggcgcugcc

SEQ ID NO: 2245530 - RNA, 19 nt, Artificial Sequence
  Description of Artificial Sequence: Synthetic oligonucleotide
cccucuccgaaaauuggca

SEQ ID NO: 2245531 - RNA, 19 nt, Artificial Sequence
  Description of Artificial Sequence: Synthetic oligonucleotide
gaguggguuucgaggcuga

SEQ ID NO: 2245532 - RNA, 19 nt, Artificial Sequence
  Description of Artificial Sequence: Synthetic oligonucleotide
cucuccgaaaauuggcauu

SEQ ID NO: 2245533 - RNA, 19 nt, Artificial Sequence
  Description of Artificial Sequence: Synthetic oligonucleotide
guguaggcauugcugcggu

SEQ ID NO: 2245534 - RNA, 19 nt, Artificial Sequence
  Description of Artificial Sequence: Synthetic oligonucleotide
ugucccaguuggagccaua

SEQ ID NO: 2245535 - RNA, 19 nt, Artificial Sequence
  Description of Artificial Sequence: Synthetic oligonucleotide
gccuggagugagguacugg

SEQ ID NO: 2245536 - RNA, 19 nt, Artificial Sequence
  Description of Artificial Sequence: Synthetic oligonucleotide
agggugugcuggccacgcu

SEQ ID NO: 2245537 - RNA, 19 nt, Artificial Sequence
  Description of Artificial Sequence: Synthetic oligonucleotide
cugugaagacaagggagcu

SEQ ID NO: 2245538 - RNA, 19 nt, Artificial Sequence
  Description of Artificial Sequence: Synthetic oligonucleotide
gagccaccuuacacauggc

SEQ ID NO: 2245539 - RNA, 19 nt, Artificial Sequence
  Description of Artificial Sequence: Synthetic oligonucleotide
ggacaauguucaucguccu

SEQ ID NO: 2245540 - RNA, 19 nt, Artificial Sequence
  Description of Artificial Sequence: Synthetic oligonucleotide
ccacgugaccgcugugaag

SEQ ID NO: 2245541 - RNA, 19 nt, Artificial Sequence
  Description of Artificial Sequence: Synthetic oligonucleotide
ccguuuucaccuuuguccu

SEQ ID NO: 2245542 - RNA, 19 nt, Artificial Sequence
  Description of Artificial Sequence: Synthetic oligonucleotide
ccaccuuacacauggcgcu

SEQ ID NO: 2245543 - RNA, 19 nt, Artificial Sequence
  Description of Artificial Sequence: Synthetic oligonucleotide
agggagggaggaaguaguu

SEQ ID NO: 2245544 - RNA, 19 nt, Artificial Sequence
  Description of Artificial Sequence: Synthetic oligonucleotide
aguggguuucgaggcugaa

SEQ ID NO: 2245545 - RNA, 19 nt, Artificial Sequence
  Description of Artificial Sequence: Synthetic oligonucleotide
gccaggcaagcuucuuuuc

SEQ ID NO: 2245546 - RNA, 19 nt, Artificial Sequence
  Description of Artificial Sequence: Synthetic oligonucleotide
cucggucaaaugagucaua

SEQ ID NO: 2245547 - RNA, 19 nt, Artificial Sequence
  Description of Artificial Sequence: Synthetic oligonucleotide
agcggucuaugcagaugga

SEQ ID NO: 2245548 - RNA, 19 nt, Artificial Sequence
  Description of Artificial Sequence: Synthetic oligonucleotide
ccguguaggcaguucccuc

SEQ ID NO: 2245549 - RNA, 19 nt, Artificial Sequence
  Description of Artificial Sequence: Synthetic oligonucleotide
ccuauucuccagauauacu

SEQ ID NO: 2245550 - RNA, 19 nt, Artificial Sequence
  Description of Artificial Sequence: Synthetic oligonucleotide
ggggauagacgacggugua

SEQ ID NO: 2245551 - RNA, 19 nt, Artificial Sequence
  Description of Artificial Sequence: Synthetic oligonucleotide
acgccuggagugagguacu

SEQ ID NO: 2245552 - RNA, 19 nt, Artificial Sequence
  Description of Artificial Sequence: Synthetic oligonucleotide
gggaggaaguaguuacaau

SEQ ID NO: 2245553 - RNA, 19 nt, Artificial Sequence
  Description of Artificial Sequence: Synthetic oligonucleotide
ggagcucuucuuguagucu

SEQ ID NO: 2245554 - RNA, 19 nt, Artificial Sequence
  Description of Artificial Sequence: Synthetic oligonucleotide
cuugcucaugcgggugcca

SEQ ID NO: 2245555 - RNA, 19 nt, Artificial Sequence
  Description of Artificial Sequence: Synthetic oligonucleotide
cguggaaaggcagccagga

SEQ ID NO: 2245556 - RNA, 19 nt, Artificial Sequence
  Description of Artificial Sequence: Synthetic oligonucleotide
gcccaccaagaaguggaug

SEQ ID NO: 2245557 - RNA, 19 nt, Artificial Sequence
  Description of Artificial Sequence: Synthetic oligonucleotide
ggacaugcagaaagucucu

SEQ ID NO: 2245558 - RNA, 19 nt, Artificial Sequence
  Description of Artificial Sequence: Synthetic oligonucleotide
ccgaaaugccaacauaguu

SEQ ID NO: 2245559 - RNA, 19 nt, Artificial Sequence
  Description of Artificial Sequence: Synthetic oligonucleotide
caucgaggacaugcagaaa

SEQ ID NO: 2245560 - RNA, 19 nt, Artificial Sequence
  Description of Artificial Sequence: Synthetic oligonucleotide
ggagucaggaaggcugcgu

SEQ ID NO: 2245561 - RNA, 19 nt, Artificial Sequence
  Description of Artificial Sequence: Synthetic oligonucleotide
gaugaccguguaggcaguu

SEQ ID NO: 2245562 - RNA, 19 nt, Artificial Sequence
  Description of Artificial Sequence: Synthetic oligonucleotide
aggaggcggcgaucaucuu

SEQ ID NO: 2245563 - RNA, 19 nt, Artificial Sequence
  Description of Artificial Sequence: Synthetic oligonucleotide
ccaagaaguggaugaccgu

SEQ ID NO: 2245564 - RNA, 19 nt, Artificial Sequence
  Description of Artificial Sequence: Synthetic oligonucleotide
ccucuccgaaaauuggcau

SEQ ID NO: 2245565 - RNA, 19 nt, Artificial Sequence
  Description of Artificial Sequence: Synthetic oligonucleotide
cccacgugaccgcugugaa

SEQ ID NO: 2245566 - RNA, 19 nt, Artificial Sequence
  Description of Artificial Sequence: Synthetic oligonucleotide
ggauacccacgugaccgcu

SEQ ID NO: 2245567 - RNA, 19 nt, Artificial Sequence
  Description of Artificial Sequence: Synthetic oligonucleotide
cgacgguguagaagcgguc

SEQ ID NO: 2245568 - RNA, 19 nt, Artificial Sequence
  Description of Artificial Sequence: Synthetic oligonucleotide
gcccaucagugccuauucu

SEQ ID NO: 2245569 - RNA, 19 nt, Artificial Sequence
  Description of Artificial Sequence: Synthetic oligonucleotide
ccuugaagcucaggggaua

SEQ ID NO: 2245570 - RNA, 19 nt, Artificial Sequence
  Description of Artificial Sequence: Synthetic oligonucleotide
ccucaggguccgcccauca

SEQ ID NO: 2245571 - RNA, 19 nt, Artificial Sequence
  Description of Artificial Sequence: Synthetic oligonucleotide
ccacauucaggaggagaaa

SEQ ID NO: 2245572 - RNA, 19 nt, Artificial Sequence
  Description of Artificial Sequence: Synthetic oligonucleotide
gccucucggucaaaugagu

SEQ ID NO: 2245573 - RNA, 19 nt, Artificial Sequence
  Description of Artificial Sequence: Synthetic oligonucleotide
cacguacaucuggacgccu

SEQ ID NO: 2245574 - RNA, 19 nt, Artificial Sequence
  Description of Artificial Sequence: Synthetic oligonucleotide
cuccgaaaauuggcauuau

SEQ ID NO: 2245575 - RNA, 19 nt, Artificial Sequence
  Description of Artificial Sequence: Synthetic oligonucleotide
aggcugcguguaagaucca

SEQ ID NO: 2245576 - RNA, 19 nt, Artificial Sequence
  Description of Artificial Sequence: Synthetic oligonucleotide
cgaggguccaccucccagu

SEQ ID NO: 2245577 - RNA, 19 nt, Artificial Sequence
  Description of Artificial Sequence: Synthetic oligonucleotide
ggacgccuggagugaggua

SEQ ID NO: 2245578 - RNA, 19 nt, Artificial Sequence
  Description of Artificial Sequence: Synthetic oligonucleotide
ggaugaccguguaggcagu

SEQ ID NO: 2245579 - RNA, 19 nt, Artificial Sequence
  Description of Artificial Sequence: Synthetic oligonucleotide
guccgcccaucagugccua

SEQ ID NO: 2245580 - RNA, 19 nt, Artificial Sequence
  Description of Artificial Sequence: Synthetic oligonucleotide
gguccgcccaucagugccu

SEQ ID NO: 2245581 - RNA, 19 nt, Artificial Sequence
  Description of Artificial Sequence: Synthetic oligonucleotide
gcgcugccgaggguccacc

SEQ ID NO: 2245582 - RNA, 19 nt, Artificial Sequence
  Description of Artificial Sequence: Synthetic oligonucleotide
cgugaccgcugugaagaca

SEQ ID NO: 2245583 - RNA, 19 nt, Artificial Sequence
  Description of Artificial Sequence: Synthetic oligonucleotide
ccugcucaugggagggauu

SEQ ID NO: 2245584 - RNA, 19 nt, Artificial Sequence
  Description of Artificial Sequence: Synthetic oligonucleotide
ccuggccucucggucaaau

SEQ ID NO: 2245585 - RNA, 19 nt, Artificial Sequence
  Description of Artificial Sequence: Synthetic oligonucleotide
cgguguagaagcggucuau

SEQ ID NO: 2245586 - RNA, 19 nt, Artificial Sequence
  Description of Artificial Sequence: Synthetic oligonucleotide
ccgcccaucagugccuauu

SEQ ID NO: 2245587 - RNA, 19 nt, Artificial Sequence
  Description of Artificial Sequence: Synthetic oligonucleotide
cgcugccgaggguccaccu

SEQ ID NO: 2245588 - RNA, 19 nt, Artificial Sequence
  Description of Artificial Sequence: Synthetic oligonucleotide
cccuggccucucggucaaa

SEQ ID NO: 2245589 - RNA, 19 nt, Artificial Sequence
  Description of Artificial Sequence: Synthetic oligonucleotide
aauagcuuggcucacgugg

SEQ ID NO: 2245590 - RNA, 19 nt, Artificial Sequence
  Description of Artificial Sequence: Synthetic oligonucleotide
guagcuggaaaacacagag

SEQ ID NO: 2245591 - RNA, 19 nt, Artificial Sequence
  Description of Artificial Sequence: Synthetic oligonucleotide
aaguguaacaguugguugu

SEQ ID NO: 2245592 - RNA, 19 nt, Artificial Sequence
  Description of Artificial Sequence: Synthetic oligonucleotide
ucagcguucagcaaccagc

SEQ ID NO: 2245593 - RNA, 19 nt, Artificial Sequence
  Description of Artificial Sequence: Synthetic oligonucleotide
agggcuaccauccugggag

SEQ ID NO: 2245594 - RNA, 19 nt, Artificial Sequence
  Description of Artificial Sequence: Synthetic oligonucleotide
ucaaacauggccccagggc

SEQ ID NO: 2245595 - RNA, 19 nt, Artificial Sequence
  Description of Artificial Sequence: Synthetic oligonucleotide
aaguucuugguggaggugg

SEQ ID NO: 2245596 - RNA, 19 nt, Artificial Sequence
  Description of Artificial Sequence: Synthetic oligonucleotide
uguaacaguugguuguucc

SEQ ID NO: 2245597 - RNA, 19 nt, Artificial Sequence
  Description of Artificial Sequence: Synthetic oligonucleotide
agcaaucucagguagggug

SEQ ID NO: 2245598 - RNA, 19 nt, Artificial Sequence
  Description of Artificial Sequence: Synthetic oligonucleotide
gucaauugcagcaucacag

SEQ ID NO: 2245599 - RNA, 19 nt, Artificial Sequence
  Description of Artificial Sequence: Synthetic oligonucleotide
uacacggugaggcacagcu

SEQ ID NO: 2245600 - RNA, 19 nt, Artificial Sequence
  Description of Artificial Sequence: Synthetic oligonucleotide
gagguaaauagcuuggcuc

SEQ ID NO: 2245601 - RNA, 19 nt, Artificial Sequence
  Description of Artificial Sequence: Synthetic oligonucleotide
uucaaguucacauccgccu

SEQ ID NO: 2245602 - RNA, 19 nt, Artificial Sequence
  Description of Artificial Sequence: Synthetic oligonucleotide
gaaguguaacaguugguug

SEQ ID NO: 2245603 - RNA, 19 nt, Artificial Sequence
  Description of Artificial Sequence: Synthetic oligonucleotide
guaguagucuagcaggugc

SEQ ID NO: 2245604 - RNA, 19 nt, Artificial Sequence
  Description of Artificial Sequence: Synthetic oligonucleotide
uuugguaggucccucugug

SEQ ID NO: 2245605 - RNA, 19 nt, Artificial Sequence
  Description of Artificial Sequence: Synthetic oligonucleotide
gagagugaagcggagagag

SEQ ID NO: 2245606 - RNA, 19 nt, Artificial Sequence
  Description of Artificial Sequence: Synthetic oligonucleotide
auggcucaccucuaggcgc

SEQ ID NO: 2245607 - RNA, 19 nt, Artificial Sequence
  Description of Artificial Sequence: Synthetic oligonucleotide
uuguaguuuccauugcuug

SEQ ID NO: 2245608 - RNA, 19 nt, Artificial Sequence
  Description of Artificial Sequence: Synthetic oligonucleotide
ucuccuguuugguaggucc

SEQ ID NO: 2245609 - RNA, 19 nt, Artificial Sequence
  Description of Artificial Sequence: Synthetic oligonucleotide
aacaguugguuguuccgag

SEQ ID NO: 2245610 - RNA, 19 nt, Artificial Sequence
  Description of Artificial Sequence: Synthetic oligonucleotide
ucuagcaggugcuugcuca

SEQ ID NO: 2245611 - RNA, 19 nt, Artificial Sequence
  Description of Artificial Sequence: Synthetic oligonucleotide
ucugcuccugucuugaacu

SEQ ID NO: 2245612 - RNA, 19 nt, Artificial Sequence
  Description of Artificial Sequence: Synthetic oligonucleotide
uguuguaguuuccauugcu

SEQ ID NO: 2245613 - RNA, 19 nt, Artificial Sequence
  Description of Artificial Sequence: Synthetic oligonucleotide
uccaguagcuggaaaacac

SEQ ID NO: 2245614 - RNA, 19 nt, Artificial Sequence
  Description of Artificial Sequence: Synthetic oligonucleotide
aggguaggugcaaacaucc

SEQ ID NO: 2245615 - RNA, 19 nt, Artificial Sequence
  Description of Artificial Sequence: Synthetic oligonucleotide
guaacaguugguuguuccg

SEQ ID NO: 2245616 - RNA, 19 nt, Artificial Sequence
  Description of Artificial Sequence: Synthetic oligonucleotide
guaggugcaaacauccgcg

SEQ ID NO: 2245617 - RNA, 19 nt, Artificial Sequence
  Description of Artificial Sequence: Synthetic oligonucleotide
uaaauagcuuggcucacgu

SEQ ID NO: 2245618 - RNA, 19 nt, Artificial Sequence
  Description of Artificial Sequence: Synthetic oligonucleotide
ucuggcucuggucaauugc

SEQ ID NO: 2245619 - RNA, 19 nt, Artificial Sequence
  Description of Artificial Sequence: Synthetic oligonucleotide
cacuacaagggguaugugc

SEQ ID NO: 2245620 - RNA, 19 nt, Artificial Sequence
  Description of Artificial Sequence: Synthetic oligonucleotide
uguaguuuccauugcuugu

SEQ ID NO: 2245621 - RNA, 19 nt, Artificial Sequence
  Description of Artificial Sequence: Synthetic oligonucleotide
gagugaagcggagagaggc

SEQ ID NO: 2245622 - RNA, 19 nt, Artificial Sequence
  Description of Artificial Sequence: Synthetic oligonucleotide
uccugucuugaacugguag

SEQ ID NO: 2245623 - RNA, 19 nt, Artificial Sequence
  Description of Artificial Sequence: Synthetic oligonucleotide
ucuaccuuguguacauggc

SEQ ID NO: 2245624 - RNA, 19 nt, Artificial Sequence
  Description of Artificial Sequence: Synthetic oligonucleotide
uuguguacauggcucaccu

SEQ ID NO: 2245625 - RNA, 19 nt, Artificial Sequence
  Description of Artificial Sequence: Synthetic oligonucleotide
uucacauccgccuggcuga

SEQ ID NO: 2245626 - RNA, 19 nt, Artificial Sequence
  Description of Artificial Sequence: Synthetic oligonucleotide
gaucacgcauucuaccuug

SEQ ID NO: 2245627 - RNA, 19 nt, Artificial Sequence
  Description of Artificial Sequence: Synthetic oligonucleotide
ucucaucccgguuugccag

SEQ ID NO: 2245628 - RNA, 19 nt, Artificial Sequence
  Description of Artificial Sequence: Synthetic oligonucleotide
acauccgccuggcugaggg

SEQ ID NO: 2245629 - RNA, 19 nt, Artificial Sequence
  Description of Artificial Sequence: Synthetic oligonucleotide
guaugugcuggggagaggg

SEQ ID NO: 2245630 - RNA, 19 nt, Artificial Sequence
  Description of Artificial Sequence: Synthetic oligonucleotide
ugccaggagguaaauagcu

SEQ ID NO: 2245631 - RNA, 19 nt, Artificial Sequence
  Description of Artificial Sequence: Synthetic oligonucleotide
uuccgaggcaucuucaagu

SEQ ID NO: 2245632 - RNA, 19 nt, Artificial Sequence
  Description of Artificial Sequence: Synthetic oligonucleotide
cuucaaguucacauccgcc

SEQ ID NO: 2245633 - RNA, 19 nt, Artificial Sequence
  Description of Artificial Sequence: Synthetic oligonucleotide
caggagguaaauagcuugg

SEQ ID NO: 2245634 - RNA, 19 nt, Artificial Sequence
  Description of Artificial Sequence: Synthetic oligonucleotide
agcuugaggaccucugcuc

SEQ ID NO: 2245635 - RNA, 19 nt, Artificial Sequence
  Description of Artificial Sequence: Synthetic oligonucleotide
ugaggcacagcuuguugag

SEQ ID NO: 2245636 - RNA, 19 nt, Artificial Sequence
  Description of Artificial Sequence: Synthetic oligonucleotide
uacaagggguaugugcugg

SEQ ID NO: 2245637 - RNA, 19 nt, Artificial Sequence
  Description of Artificial Sequence: Synthetic oligonucleotide
ggcgaaguguaacaguugg

SEQ ID NO: 2245638 - RNA, 19 nt, Artificial Sequence
  Description of Artificial Sequence: Synthetic oligonucleotide
ugcagggagacagugaagu

SEQ ID NO: 2245639 - RNA, 19 nt, Artificial Sequence
  Description of Artificial Sequence: Synthetic oligonucleotide
acuacaagggguaugugcu

SEQ ID NO: 2245640 - RNA, 19 nt, Artificial Sequence
  Description of Artificial Sequence: Synthetic oligonucleotide
caaacauccgcgugaggcc

SEQ ID NO: 2245641 - RNA, 19 nt, Artificial Sequence
  Description of Artificial Sequence: Synthetic oligonucleotide
gagagaggccuccuugagg

SEQ ID NO: 2245642 - RNA, 19 nt, Artificial Sequence
  Description of Artificial Sequence: Synthetic oligonucleotide
aguucuccuguuugguagg

SEQ ID NO: 2245643 - RNA, 19 nt, Artificial Sequence
  Description of Artificial Sequence: Synthetic oligonucleotide
aucacagcauccaugagcu

SEQ ID NO: 2245644 - RNA, 19 nt, Artificial Sequence
  Description of Artificial Sequence: Synthetic oligonucleotide
cauggcucaccucuaggcg

SEQ ID NO: 2245645 - RNA, 19 nt, Artificial Sequence
  Description of Artificial Sequence: Synthetic oligonucleotide
uaccuuguguacauggcuc

SEQ ID NO: 2245646 - RNA, 19 nt, Artificial Sequence
  Description of Artificial Sequence: Synthetic oligonucleotide
uucagcaaccagcggaacu

SEQ ID NO: 2245647 - RNA, 19 nt, Artificial Sequence
  Description of Artificial Sequence: Synthetic oligonucleotide
uagucuagcaggugcuugc

SEQ ID NO: 2245648 - RNA, 19 nt, Artificial Sequence
  Description of Artificial Sequence: Synthetic oligonucleotide
uguuugguaggucccucug

SEQ ID NO: 2245649 - RNA, 19 nt, Artificial Sequence
  Description of Artificial Sequence: Synthetic oligonucleotide
agagucagcacacccuuca

SEQ ID NO: 2245650 - RNA, 19 nt, Artificial Sequence
  Description of Artificial Sequence: Synthetic oligonucleotide
accagcggaacucuuccuc

SEQ ID NO: 2245651 - RNA, 19 nt, Artificial Sequence
  Description of Artificial Sequence: Synthetic oligonucleotide
ugguaggucccucugugcu

SEQ ID NO: 2245652 - RNA, 19 nt, Artificial Sequence
  Description of Artificial Sequence: Synthetic oligonucleotide
agggguaugugcuggggag

SEQ ID NO: 2245653 - RNA, 19 nt, Artificial Sequence
  Description of Artificial Sequence: Synthetic oligonucleotide
uugcagagucagcacaccc

SEQ ID NO: 2245654 - RNA, 19 nt, Artificial Sequence
  Description of Artificial Sequence: Synthetic oligonucleotide
uuguugagguugauguaga

SEQ ID NO: 2245655 - RNA, 19 nt, Artificial Sequence
  Description of Artificial Sequence: Synthetic oligonucleotide
uccauugcuuguccucccg

SEQ ID NO: 2245656 - RNA, 19 nt, Artificial Sequence
  Description of Artificial Sequence: Synthetic oligonucleotide
uccugggagagugaagcgg

SEQ ID NO: 2245657 - RNA, 19 nt, Artificial Sequence
  Description of Artificial Sequence: Synthetic oligonucleotide
accucuaggcgcugugagc

SEQ ID NO: 2245658 - RNA, 19 nt, Artificial Sequence
  Description of Artificial Sequence: Synthetic oligonucleotide
cuaggaugaaguucuccug

SEQ ID NO: 2245659 - RNA, 19 nt, Artificial Sequence
  Description of Artificial Sequence: Synthetic oligonucleotide
cagcguucagcaaccagcg

SEQ ID NO: 2245660 - RNA, 19 nt, Artificial Sequence
  Description of Artificial Sequence: Synthetic oligonucleotide
agaucuuauccuugagcug

SEQ ID NO: 2245661 - RNA, 19 nt, Artificial Sequence
  Description of Artificial Sequence: Synthetic oligonucleotide
aucccgguuugccaggagg

SEQ ID NO: 2245662 - RNA, 19 nt, Artificial Sequence
  Description of Artificial Sequence: Synthetic oligonucleotide
aagggguaugugcugggga

SEQ ID NO: 2245663 - RNA, 19 nt, Artificial Sequence
  Description of Artificial Sequence: Synthetic oligonucleotide
caguugguuguuccgaggc

SEQ ID NO: 2245664 - RNA, 19 nt, Artificial Sequence
  Description of Artificial Sequence: Synthetic oligonucleotide
uaguagucuagcaggugcu

SEQ ID NO: 2245665 - RNA, 19 nt, Artificial Sequence
  Description of Artificial Sequence: Synthetic oligonucleotide
ugugccacagcugccuagg

SEQ ID NO: 2245666 - RNA, 19 nt, Artificial Sequence
  Description of Artificial Sequence: Synthetic oligonucleotide
acaguugguuguuccgagg

SEQ ID NO: 2245667 - RNA, 19 nt, Artificial Sequence
  Description of Artificial Sequence: Synthetic oligonucleotide
aggagguaaauagcuuggc

SEQ ID NO: 2245668 - RNA, 19 nt, Artificial Sequence
  Description of Artificial Sequence: Synthetic oligonucleotide
gggaguaguagucuagcag

SEQ ID NO: 2245669 - RNA, 19 nt, Artificial Sequence
  Description of Artificial Sequence: Synthetic oligonucleotide
aauugcagcaucacagcau

SEQ ID NO: 2245670 - RNA, 19 nt, Artificial Sequence
  Description of Artificial Sequence: Synthetic oligonucleotide
cacggugaggcacagcuug

SEQ ID NO: 2245671 - RNA, 19 nt, Artificial Sequence
  Description of Artificial Sequence: Synthetic oligonucleotide
guaaauagcuuggcucacg

SEQ ID NO: 2245672 - RNA, 19 nt, Artificial Sequence
  Description of Artificial Sequence: Synthetic oligonucleotide
uaggguaggugcaaacauc

SEQ ID NO: 2245673 - RNA, 19 nt, Artificial Sequence
  Description of Artificial Sequence: Synthetic oligonucleotide
uaacaguugguuguuccga

SEQ ID NO: 2245674 - RNA, 19 nt, Artificial Sequence
  Description of Artificial Sequence: Synthetic oligonucleotide
aaggcgaaguguaacaguu

SEQ ID NO: 2245675 - RNA, 19 nt, Artificial Sequence
  Description of Artificial Sequence: Synthetic oligonucleotide
ucagcaaccagcggaacuc

SEQ ID NO: 2245676 - RNA, 19 nt, Artificial Sequence
  Description of Artificial Sequence: Synthetic oligonucleotide
caaccagcggaacucuucc

SEQ ID NO: 2245677 - RNA, 19 nt, Artificial Sequence
  Description of Artificial Sequence: Synthetic oligonucleotide
acauugaccagcaggucag

SEQ ID NO: 2245678 - RNA, 19 nt, Artificial Sequence
  Description of Artificial Sequence: Synthetic oligonucleotide
uugagccaggggaucacgc

SEQ ID NO: 2245679 - RNA, 19 nt, Artificial Sequence
  Description of Artificial Sequence: Synthetic oligonucleotide
cacggcgugcaccucagcg

SEQ ID NO: 2245680 - RNA, 19 nt, Artificial Sequence
  Description of Artificial Sequence: Synthetic oligonucleotide
acugcaccuccagaggggc

SEQ ID NO: 2245681 - RNA, 19 nt, Artificial Sequence
  Description of Artificial Sequence: Synthetic oligonucleotide
acgcauucuaccuugugua

SEQ ID NO: 2245682 - RNA, 19 nt, Artificial Sequence
  Description of Artificial Sequence: Synthetic oligonucleotide
ugucuuagcacggcgugca

SEQ ID NO: 2245683 - RNA, 19 nt, Artificial Sequence
  Description of Artificial Sequence: Synthetic oligonucleotide
agugaagcggagagaggcc

SEQ ID NO: 2245684 - RNA, 19 nt, Artificial Sequence
  Description of Artificial Sequence: Synthetic oligonucleotide
aggcacagcuuguugaggu

SEQ ID NO: 2245685 - RNA, 19 nt, Artificial Sequence
  Description of Artificial Sequence: Synthetic oligonucleotide
cuggaucuguuguaguuuc

SEQ ID NO: 2245686 - RNA, 19 nt, Artificial Sequence
  Description of Artificial Sequence: Synthetic oligonucleotide
gggagagugaagcggagag

SEQ ID NO: 2245687 - RNA, 19 nt, Artificial Sequence
  Description of Artificial Sequence: Synthetic oligonucleotide
uguagacauugaccagcag

SEQ ID NO: 2245688 - RNA, 19 nt, Artificial Sequence
  Description of Artificial Sequence: Synthetic oligonucleotide
gagccccacucaaacaugg

SEQ ID NO: 2245689 - RNA, 19 nt, Artificial Sequence
  Description of Artificial Sequence: Synthetic oligonucleotide
ugggaguaguagucuagca

SEQ ID NO: 2245690 - RNA, 19 nt, Artificial Sequence
  Description of Artificial Sequence: Synthetic oligonucleotide
acaagggguaugugcuggg

SEQ ID NO: 2245691 - RNA, 19 nt, Artificial Sequence
  Description of Artificial Sequence: Synthetic oligonucleotide
uccgcgugaggccacuggc

SEQ ID NO: 2245692 - RNA, 19 nt, Artificial Sequence
  Description of Artificial Sequence: Synthetic oligonucleotide
cagggcgucauugagccag

SEQ ID NO: 2245693 - RNA, 19 nt, Artificial Sequence
  Description of Artificial Sequence: Synthetic oligonucleotide
gguugauguagacauugac

SEQ ID NO: 2245694 - RNA, 19 nt, Artificial Sequence
  Description of Artificial Sequence: Synthetic oligonucleotide
guuccgaggcaucuucaag

SEQ ID NO: 2245695 - RNA, 19 nt, Artificial Sequence
  Description of Artificial Sequence: Synthetic oligonucleotide
cagggagacagugaaguac

SEQ ID NO: 2245696 - RNA, 19 nt, Artificial Sequence
  Description of Artificial Sequence: Synthetic oligonucleotide
guuguuccgaggcaucuuc

SEQ ID NO: 2245697 - RNA, 19 nt, Artificial Sequence
  Description of Artificial Sequence: Synthetic oligonucleotide
ccugucuugaacugguagc

SEQ ID NO: 2245698 - RNA, 19 nt, Artificial Sequence
  Description of Artificial Sequence: Synthetic oligonucleotide
guaggucccucugugcugg

SEQ ID NO: 2245699 - RNA, 19 nt, Artificial Sequence
  Description of Artificial Sequence: Synthetic oligonucleotide
ucauugagccaggggauca

SEQ ID NO: 2245700 - RNA, 19 nt, Artificial Sequence
  Description of Artificial Sequence: Synthetic oligonucleotide
accuuguguacauggcuca

SEQ ID NO: 2245701 - RNA, 19 nt, Artificial Sequence
  Description of Artificial Sequence: Synthetic oligonucleotide
cugugagccccacucaaac

SEQ ID NO: 2245702 - RNA, 19 nt, Artificial Sequence
  Description of Artificial Sequence: Synthetic oligonucleotide
ugguacacggugaggcaca

SEQ ID NO: 2245703 - RNA, 19 nt, Artificial Sequence
  Description of Artificial Sequence: Synthetic oligonucleotide
ucccgguuugccaggaggu

SEQ ID NO: 2245704 - RNA, 19 nt, Artificial Sequence
  Description of Artificial Sequence: Synthetic oligonucleotide
uggaucuguuguaguuucc

SEQ ID NO: 2245705 - RNA, 19 nt, Artificial Sequence
  Description of Artificial Sequence: Synthetic oligonucleotide
ucuuagcacggcgugcacc

SEQ ID NO: 2245706 - RNA, 19 nt, Artificial Sequence
  Description of Artificial Sequence: Synthetic oligonucleotide
aaucucagguagggugagg

SEQ ID NO: 2245707 - RNA, 19 nt, Artificial Sequence
  Description of Artificial Sequence: Synthetic oligonucleotide
cucgcagccaucgcagucg

SEQ ID NO: 2245708 - RNA, 19 nt, Artificial Sequence
  Description of Artificial Sequence: Synthetic oligonucleotide
guagggugaggguggcugg

SEQ ID NO: 2245709 - RNA, 19 nt, Artificial Sequence
  Description of Artificial Sequence: Synthetic oligonucleotide
aucuucaaguucacauccg

SEQ ID NO: 2245710 - RNA, 19 nt, Artificial Sequence
  Description of Artificial Sequence: Synthetic oligonucleotide
ccaggagguaaauagcuug

SEQ ID NO: 2245711 - RNA, 19 nt, Artificial Sequence
  Description of Artificial Sequence: Synthetic oligonucleotide
ucacgcauucuaccuugug

SEQ ID NO: 2245712 - RNA, 19 nt, Artificial Sequence
  Description of Artificial Sequence: Synthetic oligonucleotide
gguccugggagagugaagc

SEQ ID NO: 2245713 - RNA, 19 nt, Artificial Sequence
  Description of Artificial Sequence: Synthetic oligonucleotide
acagcugccuaggaugaag

SEQ ID NO: 2245714 - RNA, 19 nt, Artificial Sequence
  Description of Artificial Sequence: Synthetic oligonucleotide
aguugguuguuccgaggca

SEQ ID NO: 2245715 - RNA, 19 nt, Artificial Sequence
  Description of Artificial Sequence: Synthetic oligonucleotide
uguacauggcucaccucua

SEQ ID NO: 2245716 - RNA, 19 nt, Artificial Sequence
  Description of Artificial Sequence: Synthetic oligonucleotide
cauccuggaucuguuguag

SEQ ID NO: 2245717 - RNA, 19 nt, Artificial Sequence
  Description of Artificial Sequence: Synthetic oligonucleotide
ugaaguacaccagggcguc

SEQ ID NO: 2245718 - RNA, 19 nt, Artificial Sequence
  Description of Artificial Sequence: Synthetic oligonucleotide
cuguuguaguuuccauugc

SEQ ID NO: 2245719 - RNA, 19 nt, Artificial Sequence
  Description of Artificial Sequence: Synthetic oligonucleotide
gcgucauugagccagggga

SEQ ID NO: 2245720 - RNA, 19 nt, Artificial Sequence
  Description of Artificial Sequence: Synthetic oligonucleotide
uguuccgaggcaucuucaa

SEQ ID NO: 2245721 - RNA, 19 nt, Artificial Sequence
  Description of Artificial Sequence: Synthetic oligonucleotide
guacauggcucaccucuag

SEQ ID NO: 2245722 - RNA, 19 nt, Artificial Sequence
  Description of Artificial Sequence: Synthetic oligonucleotide
guugagguugauguagaca

SEQ ID NO: 2245723 - RNA, 19 nt, Artificial Sequence
  Description of Artificial Sequence: Synthetic oligonucleotide
cacugcaccuccagagggg

SEQ ID NO: 2245724 - RNA, 19 nt, Artificial Sequence
  Description of Artificial Sequence: Synthetic oligonucleotide
uagcucucaucccgguuug

SEQ ID NO: 2245725 - RNA, 19 nt, Artificial Sequence
  Description of Artificial Sequence: Synthetic oligonucleotide
uucaccuggucugugccac

SEQ ID NO: 2245726 - RNA, 19 nt, Artificial Sequence
  Description of Artificial Sequence: Synthetic oligonucleotide
aggggaucacgcauucuac

SEQ ID NO: 2245727 - RNA, 19 nt, Artificial Sequence
  Description of Artificial Sequence: Synthetic oligonucleotide
auugagccaggggaucacg

SEQ ID NO: 2245728 - RNA, 19 nt, Artificial Sequence
  Description of Artificial Sequence: Synthetic oligonucleotide
aggugcaaacauccgcgug

SEQ ID NO: 2245729 - RNA, 19 nt, Artificial Sequence
  Description of Artificial Sequence: Synthetic oligonucleotide
cagagcgugcagcugguac

SEQ ID NO: 2245730 - RNA, 19 nt, Artificial Sequence
  Description of Artificial Sequence: Synthetic oligonucleotide
ucccggaaggcgaagugua

SEQ ID NO: 2245731 - RNA, 19 nt, Artificial Sequence
  Description of Artificial Sequence: Synthetic oligonucleotide
cuacaagggguaugugcug

SEQ ID NO: 2245732 - RNA, 19 nt, Artificial Sequence
  Description of Artificial Sequence: Synthetic oligonucleotide
ccccacucaaacauggccc

SEQ ID NO: 2245733 - RNA, 19 nt, Artificial Sequence
  Description of Artificial Sequence: Synthetic oligonucleotide
uaggugcaaacauccgcgu

SEQ ID NO: 2245734 - RNA, 19 nt, Artificial Sequence
  Description of Artificial Sequence: Synthetic oligonucleotide
cagagaucuuauccuugag

SEQ ID NO: 2245735 - RNA, 19 nt, Artificial Sequence
  Description of Artificial Sequence: Synthetic oligonucleotide
auccgcgugaggccacugg

SEQ ID NO: 2245736 - RNA, 19 nt, Artificial Sequence
  Description of Artificial Sequence: Synthetic oligonucleotide
gcuugaggaccucugcucc

SEQ ID NO: 2245737 - RNA, 19 nt, Artificial Sequence
  Description of Artificial Sequence: Synthetic oligonucleotide
gaagcggagagaggccucc

SEQ ID NO: 2245738 - RNA, 19 nt, Artificial Sequence
  Description of Artificial Sequence: Synthetic oligonucleotide
guagucuagcaggugcuug

SEQ ID NO: 2245739 - RNA, 19 nt, Artificial Sequence
  Description of Artificial Sequence: Synthetic oligonucleotide
gaggcacagcuuguugagg

SEQ ID NO: 2245740 - RNA, 19 nt, Artificial Sequence
  Description of Artificial Sequence: Synthetic oligonucleotide
aggugcuugcucagaaggg

SEQ ID NO: 2245741 - RNA, 19 nt, Artificial Sequence
  Description of Artificial Sequence: Synthetic oligonucleotide
uggucaauugcagcaucac

SEQ ID NO: 2245742 - RNA, 19 nt, Artificial Sequence
  Description of Artificial Sequence: Synthetic oligonucleotide
ucuaggcgcugugagcccc

SEQ ID NO: 2245743 - RNA, 19 nt, Artificial Sequence
  Description of Artificial Sequence: Synthetic oligonucleotide
cucagcguucagcaaccag

SEQ ID NO: 2245744 - RNA, 19 nt, Artificial Sequence
  Description of Artificial Sequence: Synthetic oligonucleotide
agacauugaccagcagguc

SEQ ID NO: 2245745 - RNA, 19 nt, Artificial Sequence
  Description of Artificial Sequence: Synthetic oligonucleotide
caccucuaggcgcugugag

SEQ ID NO: 2245746 - RNA, 19 nt, Artificial Sequence
  Description of Artificial Sequence: Synthetic oligonucleotide
gucuugaacugguagcucu

SEQ ID NO: 2245747 - RNA, 19 nt, Artificial Sequence
  Description of Artificial Sequence: Synthetic oligonucleotide
uugguuguuccgaggcauc

SEQ ID NO: 2245748 - RNA, 19 nt, Artificial Sequence
  Description of Artificial Sequence: Synthetic oligonucleotide
uggcucaccucuaggcgcu

SEQ ID NO: 2245749 - RNA, 19 nt, Artificial Sequence
  Description of Artificial Sequence: Synthetic oligonucleotide
uccgaggcaucuucaaguu

SEQ ID NO: 2245750 - RNA, 19 nt, Artificial Sequence
  Description of Artificial Sequence: Synthetic oligonucleotide
gaaggcgaaguguaacagu

SEQ ID NO: 2245751 - RNA, 19 nt, Artificial Sequence
  Description of Artificial Sequence: Synthetic oligonucleotide
agcguucagcaaccagcgg

SEQ ID NO: 2245752 - RNA, 19 nt, Artificial Sequence
  Description of Artificial Sequence: Synthetic oligonucleotide
cucaucccgguuugccagg

SEQ ID NO: 2245753 - RNA, 19 nt, Artificial Sequence
  Description of Artificial Sequence: Synthetic oligonucleotide
gugaggguggcugggguag

SEQ ID NO: 2245754 - RNA, 19 nt, Artificial Sequence
  Description of Artificial Sequence: Synthetic oligonucleotide
gcucuggucaauugcagca

SEQ ID NO: 2245755 - RNA, 19 nt, Artificial Sequence
  Description of Artificial Sequence: Synthetic oligonucleotide
ugagccgguuucuggcucu

SEQ ID NO: 2245756 - RNA, 19 nt, Artificial Sequence
  Description of Artificial Sequence: Synthetic oligonucleotide
gcgugcagcugguacacgg

SEQ ID NO: 2245757 - RNA, 19 nt, Artificial Sequence
  Description of Artificial Sequence: Synthetic oligonucleotide
ggggaucacgcauucuacc

SEQ ID NO: 2245758 - RNA, 19 nt, Artificial Sequence
  Description of Artificial Sequence: Synthetic oligonucleotide
aacauggccccagggcugu

SEQ ID NO: 2245759 - RNA, 19 nt, Artificial Sequence
  Description of Artificial Sequence: Synthetic oligonucleotide
acggcgugcaccucagcgu

SEQ ID NO: 2245760 - RNA, 19 nt, Artificial Sequence
  Description of Artificial Sequence: Synthetic oligonucleotide
ugaagcggagagaggccuc

SEQ ID NO: 2245761 - RNA, 19 nt, Artificial Sequence
  Description of Artificial Sequence: Synthetic oligonucleotide
aacauccgcgugaggccac

SEQ ID NO: 2245762 - RNA, 19 nt, Artificial Sequence
  Description of Artificial Sequence: Synthetic oligonucleotide
cugguacacggugaggcac

SEQ ID NO: 2245763 - RNA, 19 nt, Artificial Sequence
  Description of Artificial Sequence: Synthetic oligonucleotide
auagcuuggcucacguggu

SEQ ID NO: 2245764 - RNA, 19 nt, Artificial Sequence
  Description of Artificial Sequence: Synthetic oligonucleotide
ugguuguuccgaggcaucu

SEQ ID NO: 2245765 - RNA, 19 nt, Artificial Sequence
  Description of Artificial Sequence: Synthetic oligonucleotide
agagugaagcggagagagg

SEQ ID NO: 2245766 - RNA, 19 nt, Artificial Sequence
  Description of Artificial Sequence: Synthetic oligonucleotide
aagggucgggagcuccagu

SEQ ID NO: 2245767 - RNA, 19 nt, Artificial Sequence
  Description of Artificial Sequence: Synthetic oligonucleotide
gugcaaacauccgcgugag

SEQ ID NO: 2245768 - RNA, 19 nt, Artificial Sequence
  Description of Artificial Sequence: Synthetic oligonucleotide
cagugacaggcacuacaag

SEQ ID NO: 2245769 - RNA, 19 nt, Artificial Sequence
  Description of Artificial Sequence: Synthetic oligonucleotide
gcguucagcaaccagcgga

SEQ ID NO: 2245770 - RNA, 19 nt, Artificial Sequence
  Description of Artificial Sequence: Synthetic oligonucleotide
ggucaauugcagcaucaca

SEQ ID NO: 2245771 - RNA, 19 nt, Artificial Sequence
  Description of Artificial Sequence: Synthetic oligonucleotide
ugggguagugagccgguuu

SEQ ID NO: 2245772 - RNA, 19 nt, Artificial Sequence
  Description of Artificial Sequence: Synthetic oligonucleotide
ccucuaggcgcugugagcc

SEQ ID NO: 2245773 - RNA, 19 nt, Artificial Sequence
  Description of Artificial Sequence: Synthetic oligonucleotide
uguguacauggcucaccuc

SEQ ID NO: 2245774 - RNA, 19 nt, Artificial Sequence
  Description of Artificial Sequence: Synthetic oligonucleotide
gcugucuuagcacggcgug

SEQ ID NO: 2245775 - RNA, 19 nt, Artificial Sequence
  Description of Artificial Sequence: Synthetic oligonucleotide
uccagaggggcggaaguuc

SEQ ID NO: 2245776 - RNA, 19 nt, Artificial Sequence
  Description of Artificial Sequence: Synthetic oligonucleotide
cauugcuuguccucccgga

SEQ ID NO: 2245777 - RNA, 19 nt, Artificial Sequence
  Description of Artificial Sequence: Synthetic oligonucleotide
ugggagagugaagcggaga

SEQ ID NO: 2245778 - RNA, 19 nt, Artificial Sequence
  Description of Artificial Sequence: Synthetic oligonucleotide
ggcgucauugagccagggg

SEQ ID NO: 2245779 - RNA, 19 nt, Artificial Sequence
  Description of Artificial Sequence: Synthetic oligonucleotide
ggugaggcacagcuuguug

SEQ ID NO: 2245780 - RNA, 19 nt, Artificial Sequence
  Description of Artificial Sequence: Synthetic oligonucleotide
cuuagcacggcgugcaccu

SEQ ID NO: 2245781 - RNA, 19 nt, Artificial Sequence
  Description of Artificial Sequence: Synthetic oligonucleotide
ugucuugaacugguagcuc

SEQ ID NO: 2245782 - RNA, 19 nt, Artificial Sequence
  Description of Artificial Sequence: Synthetic oligonucleotide
aguguaacaguugguuguu

SEQ ID NO: 2245783 - RNA, 19 nt, Artificial Sequence
  Description of Artificial Sequence: Synthetic oligonucleotide
cacgugguuccuggcaucc

SEQ ID NO: 2245784 - RNA, 19 nt, Artificial Sequence
  Description of Artificial Sequence: Synthetic oligonucleotide
caaucucagguagggugag

SEQ ID NO: 2245785 - RNA, 19 nt, Artificial Sequence
  Description of Artificial Sequence: Synthetic oligonucleotide
gcucagaagggucgggagc

SEQ ID NO: 2245786 - RNA, 19 nt, Artificial Sequence
  Description of Artificial Sequence: Synthetic oligonucleotide
cucucaucccgguuugcca

SEQ ID NO: 2245787 - RNA, 19 nt, Artificial Sequence
  Description of Artificial Sequence: Synthetic oligonucleotide
gaagggucgggagcuccag

SEQ ID NO: 2245788 - RNA, 19 nt, Artificial Sequence
  Description of Artificial Sequence: Synthetic oligonucleotide
cuggucugugccacagcug

SEQ ID NO: 2245789 - RNA, 19 nt, Artificial Sequence
  Description of Artificial Sequence: Synthetic oligonucleotide
cugggagagugaagcggag

SEQ ID NO: 2245790 - RNA, 19 nt, Artificial Sequence
  Description of Artificial Sequence: Synthetic oligonucleotide
uguccucccggaaggcgaa

SEQ ID NO: 2245791 - RNA, 19 nt, Artificial Sequence
  Description of Artificial Sequence: Synthetic oligonucleotide
ucaccucuaggcgcuguga

SEQ ID NO: 2245792 - RNA, 19 nt, Artificial Sequence
  Description of Artificial Sequence: Synthetic oligonucleotide
cugugccacagcugccuag

SEQ ID NO: 2245793 - RNA, 19 nt, Artificial Sequence
  Description of Artificial Sequence: Synthetic oligonucleotide
ggucgggagcuccaguagc

SEQ ID NO: 2245794 - RNA, 19 nt, Artificial Sequence
  Description of Artificial Sequence: Synthetic oligonucleotide
aggcagggcuaccauccug

SEQ ID NO: 2245795 - RNA, 19 nt, Artificial Sequence
  Description of Artificial Sequence: Synthetic oligonucleotide
gugagccccacucaaacau

SEQ ID NO: 2245796 - RNA, 19 nt, Artificial Sequence
  Description of Artificial Sequence: Synthetic oligonucleotide
caggggaucacgcauucua

SEQ ID NO: 2245797 - RNA, 19 nt, Artificial Sequence
  Description of Artificial Sequence: Synthetic oligonucleotide
ccagcggaacucuuccucc

SEQ ID NO: 2245798 - RNA, 19 nt, Artificial Sequence
  Description of Artificial Sequence: Synthetic oligonucleotide
gcuuggcucacgugguucc

SEQ ID NO: 2245799 - RNA, 19 nt, Artificial Sequence
  Description of Artificial Sequence: Synthetic oligonucleotide
gaggccacuggcagcaauc

SEQ ID NO: 2245800 - RNA, 19 nt, Artificial Sequence
  Description of Artificial Sequence: Synthetic oligonucleotide
guagcucucaucccgguuu

SEQ ID NO: 2245801 - RNA, 19 nt, Artificial Sequence
  Description of Artificial Sequence: Synthetic oligonucleotide
cuaccuuguguacauggcu

SEQ ID NO: 2245802 - RNA, 19 nt, Artificial Sequence
  Description of Artificial Sequence: Synthetic oligonucleotide
gaucuguuguaguuuccau

SEQ ID NO: 2245803 - RNA, 19 nt, Artificial Sequence
  Description of Artificial Sequence: Synthetic oligonucleotide
cauucuaccuuguguacau

SEQ ID NO: 2245804 - RNA, 19 nt, Artificial Sequence
  Description of Artificial Sequence: Synthetic oligonucleotide
cgaggcaucuucaaguuca

SEQ ID NO: 2245805 - RNA, 19 nt, Artificial Sequence
  Description of Artificial Sequence: Synthetic oligonucleotide
cacgcauucuaccuugugu

SEQ ID NO: 2245806 - RNA, 19 nt, Artificial Sequence
  Description of Artificial Sequence: Synthetic oligonucleotide
cugcuccugucuugaacug

SEQ ID NO: 2245807 - RNA, 19 nt, Artificial Sequence
  Description of Artificial Sequence: Synthetic oligonucleotide
cucuaggcgcugugagccc

SEQ ID NO: 2245808 - RNA, 19 nt, Artificial Sequence
  Description of Artificial Sequence: Synthetic oligonucleotide
ggggcggaaguucuuggug

SEQ ID NO: 2245809 - RNA, 19 nt, Artificial Sequence
  Description of Artificial Sequence: Synthetic oligonucleotide
gguaggguaggugcaaaca

SEQ ID NO: 2245810 - RNA, 19 nt, Artificial Sequence
  Description of Artificial Sequence: Synthetic oligonucleotide
gggguagugagccgguuuc

SEQ ID NO: 2245811 - RNA, 19 nt, Artificial Sequence
  Description of Artificial Sequence: Synthetic oligonucleotide
ucacgugguuccuggcauc

SEQ ID NO: 2245812 - RNA, 19 nt, Artificial Sequence
  Description of Artificial Sequence: Synthetic oligonucleotide
ccugggaguaguagucuag

SEQ ID NO: 2245813 - RNA, 19 nt, Artificial Sequence
  Description of Artificial Sequence: Synthetic oligonucleotide
cucaccucuaggcgcugug

SEQ ID NO: 2245814 - RNA, 19 nt, Artificial Sequence
  Description of Artificial Sequence: Synthetic oligonucleotide
agccccacucaaacauggc

SEQ ID NO: 2245815 - RNA, 19 nt, Artificial Sequence
  Description of Artificial Sequence: Synthetic oligonucleotide
uuggcucacgugguuccug

SEQ ID NO: 2245816 - RNA, 19 nt, Artificial Sequence
  Description of Artificial Sequence: Synthetic oligonucleotide
ugguagcucucaucccggu

SEQ ID NO: 2245817 - RNA, 19 nt, Artificial Sequence
  Description of Artificial Sequence: Synthetic oligonucleotide
aggugggcugcagagcgug

SEQ ID NO: 2245818 - RNA, 19 nt, Artificial Sequence
  Description of Artificial Sequence: Synthetic oligonucleotide
gcugccuaggaugaaguuc

SEQ ID NO: 2245819 - RNA, 19 nt, Artificial Sequence
  Description of Artificial Sequence: Synthetic oligonucleotide
ggaucuguuguaguuucca

SEQ ID NO: 2245820 - RNA, 19 nt, Artificial Sequence
  Description of Artificial Sequence: Synthetic oligonucleotide
uggguccugggagagugaa

SEQ ID NO: 2245821 - RNA, 19 nt, Artificial Sequence
  Description of Artificial Sequence: Synthetic oligonucleotide
agcugucuuagcacggcgu

SEQ ID NO: 2245822 - RNA, 19 nt, Artificial Sequence
  Description of Artificial Sequence: Synthetic oligonucleotide
cagcuuguugagguugaug

SEQ ID NO: 2245823 - RNA, 19 nt, Artificial Sequence
  Description of Artificial Sequence: Synthetic oligonucleotide
ccuucaccuggucugugcc

SEQ ID NO: 2245824 - RNA, 19 nt, Artificial Sequence
  Description of Artificial Sequence: Synthetic oligonucleotide
agucuagcaggugcuugcu

SEQ ID NO: 2245825 - RNA, 19 nt, Artificial Sequence
  Description of Artificial Sequence: Synthetic oligonucleotide
ggagguaaauagcuuggcu

SEQ ID NO: 2245826 - RNA, 19 nt, Artificial Sequence
  Description of Artificial Sequence: Synthetic oligonucleotide
gaguaguagucuagcaggu

SEQ ID NO: 2245827 - RNA, 19 nt, Artificial Sequence
  Description of Artificial Sequence: Synthetic oligonucleotide
auucuaccuuguguacaug

SEQ ID NO: 2245828 - RNA, 19 nt, Artificial Sequence
  Description of Artificial Sequence: Synthetic oligonucleotide
auccccuugcagagucagc

SEQ ID NO: 2245829 - RNA, 19 nt, Artificial Sequence
  Description of Artificial Sequence: Synthetic oligonucleotide
gguaaauagcuuggcucac

SEQ ID NO: 2245830 - RNA, 19 nt, Artificial Sequence
  Description of Artificial Sequence: Synthetic oligonucleotide
cauugagccaggggaucac

SEQ ID NO: 2245831 - RNA, 19 nt, Artificial Sequence
  Description of Artificial Sequence: Synthetic oligonucleotide
guuugguaggucccucugu

SEQ ID NO: 2245832 - RNA, 19 nt, Artificial Sequence
  Description of Artificial Sequence: Synthetic oligonucleotide
ucaucccgguuugccagga

SEQ ID NO: 2245833 - RNA, 19 nt, Artificial Sequence
  Description of Artificial Sequence: Synthetic oligonucleotide
gcggagagaggccuccuug

SEQ ID NO: 2245834 - RNA, 19 nt, Artificial Sequence
  Description of Artificial Sequence: Synthetic oligonucleotide
cagagucagcacacccuuc

SEQ ID NO: 2245835 - RNA, 19 nt, Artificial Sequence
  Description of Artificial Sequence: Synthetic oligonucleotide
aggcacuacaagggguaug

SEQ ID NO: 2245836 - RNA, 19 nt, Artificial Sequence
  Description of Artificial Sequence: Synthetic oligonucleotide
cugucuugaacugguagcu

SEQ ID NO: 2245837 - RNA, 19 nt, Artificial Sequence
  Description of Artificial Sequence: Synthetic oligonucleotide
agcugccuaggaugaaguu

SEQ ID NO: 2245838 - RNA, 19 nt, Artificial Sequence
  Description of Artificial Sequence: Synthetic oligonucleotide
uaccauccugggaguagua

SEQ ID NO: 2245839 - RNA, 19 nt, Artificial Sequence
  Description of Artificial Sequence: Synthetic oligonucleotide
aggcgaaguguaacaguug

SEQ ID NO: 2245840 - RNA, 19 nt, Artificial Sequence
  Description of Artificial Sequence: Synthetic oligonucleotide
aguagucuagcaggugcuu

SEQ ID NO: 2245841 - RNA, 19 nt, Artificial Sequence
  Description of Artificial Sequence: Synthetic oligonucleotide
gaggaccucugcuccuguc

SEQ ID NO: 2245842 - RNA, 19 nt, Artificial Sequence
  Description of Artificial Sequence: Synthetic oligonucleotide
ucacauccgccuggcugag

SEQ ID NO: 2245843 - RNA, 19 nt, Artificial Sequence
  Description of Artificial Sequence: Synthetic oligonucleotide
gggaucacgcauucuaccu

SEQ ID NO: 2245844 - RNA, 19 nt, Artificial Sequence
  Description of Artificial Sequence: Synthetic oligonucleotide
gugagccgguuucuggcuc

SEQ ID NO: 2245845 - RNA, 19 nt, Artificial Sequence
  Description of Artificial Sequence: Synthetic oligonucleotide
gcauucuaccuuguguaca

SEQ ID NO: 2245846 - RNA, 19 nt, Artificial Sequence
  Description of Artificial Sequence: Synthetic oligonucleotide
guugguuguuccgaggcau

SEQ ID NO: 2245847 - RNA, 19 nt, Artificial Sequence
  Description of Artificial Sequence: Synthetic oligonucleotide
uucuccuguuugguagguc

SEQ ID NO: 2245848 - RNA, 19 nt, Artificial Sequence
  Description of Artificial Sequence: Synthetic oligonucleotide
cucagaagggucgggagcu

SEQ ID NO: 2245849 - RNA, 19 nt, Artificial Sequence
  Description of Artificial Sequence: Synthetic oligonucleotide
cauccgccuggcugagggc

SEQ ID NO: 2245850 - RNA, 19 nt, Artificial Sequence
  Description of Artificial Sequence: Synthetic oligonucleotide
uagcuuggcucacgugguu

SEQ ID NO: 2245851 - RNA, 19 nt, Artificial Sequence
  Description of Artificial Sequence: Synthetic oligonucleotide
ugccuaggaugaaguucuc

SEQ ID NO: 2245852 - RNA, 19 nt, Artificial Sequence
  Description of Artificial Sequence: Synthetic oligonucleotide
gguaugugcuggggagagg

SEQ ID NO: 2245853 - RNA, 19 nt, Artificial Sequence
  Description of Artificial Sequence: Synthetic oligonucleotide
ugacagugacaggcacuac

SEQ ID NO: 2245854 - RNA, 19 nt, Artificial Sequence
  Description of Artificial Sequence: Synthetic oligonucleotide
ggcacuacaagggguaugu

SEQ ID NO: 2245855 - RNA, 19 nt, Artificial Sequence
  Description of Artificial Sequence: Synthetic oligonucleotide
gccuaggaugaaguucucc

SEQ ID NO: 2245856 - RNA, 19 nt, Artificial Sequence
  Description of Artificial Sequence: Synthetic oligonucleotide
gcucacgugguuccuggca

SEQ ID NO: 2245857 - RNA, 19 nt, Artificial Sequence
  Description of Artificial Sequence: Synthetic oligonucleotide
ggagcacugcaccuccaga

SEQ ID NO: 2245858 - RNA, 19 nt, Artificial Sequence
  Description of Artificial Sequence: Synthetic oligonucleotide
gucuuagcacggcgugcac

SEQ ID NO: 2245859 - RNA, 19 nt, Artificial Sequence
  Description of Artificial Sequence: Synthetic oligonucleotide
cagcggaacucuuccucca

SEQ ID NO: 2245860 - RNA, 19 nt, Artificial Sequence
  Description of Artificial Sequence: Synthetic oligonucleotide
ggcgcucgcagccaucgca

SEQ ID NO: 2245861 - RNA, 19 nt, Artificial Sequence
  Description of Artificial Sequence: Synthetic oligonucleotide
gugaagcggagagaggccu

SEQ ID NO: 2245862 - RNA, 19 nt, Artificial Sequence
  Description of Artificial Sequence: Synthetic oligonucleotide
ucagaagggucgggagcuc

SEQ ID NO: 2245863 - RNA, 19 nt, Artificial Sequence
  Description of Artificial Sequence: Synthetic oligonucleotide
agcacggcgugcaccucag

SEQ ID NO: 2245864 - RNA, 19 nt, Artificial Sequence
  Description of Artificial Sequence: Synthetic oligonucleotide
agcggagagaggccuccuu

SEQ ID NO: 2245865 - RNA, 19 nt, Artificial Sequence
  Description of Artificial Sequence: Synthetic oligonucleotide
gcugguacacggugaggca

SEQ ID NO: 2245866 - RNA, 19 nt, Artificial Sequence
  Description of Artificial Sequence: Synthetic oligonucleotide
caucccgguuugccaggag

SEQ ID NO: 2245867 - RNA, 19 nt, Artificial Sequence
  Description of Artificial Sequence: Synthetic oligonucleotide
cagguagggugaggguggc

SEQ ID NO: 2245868 - RNA, 19 nt, Artificial Sequence
  Description of Artificial Sequence: Synthetic oligonucleotide
aucacgcauucuaccuugu

SEQ ID NO: 2245869 - RNA, 19 nt, Artificial Sequence
  Description of Artificial Sequence: Synthetic oligonucleotide
gguacacggugaggcacag

SEQ ID NO: 2245870 - RNA, 19 nt, Artificial Sequence
  Description of Artificial Sequence: Synthetic oligonucleotide
gcaaccagcggaacucuuc

SEQ ID NO: 2245871 - RNA, 19 nt, Artificial Sequence
  Description of Artificial Sequence: Synthetic oligonucleotide
cgggagcuccaguagcugg

SEQ ID NO: 2245872 - RNA, 19 nt, Artificial Sequence
  Description of Artificial Sequence: Synthetic oligonucleotide
cuugaggaccucugcuccu

SEQ ID NO: 2245873 - RNA, 19 nt, Artificial Sequence
  Description of Artificial Sequence: Synthetic oligonucleotide
cucacgugguuccuggcau

SEQ ID NO: 2245874 - RNA, 19 nt, Artificial Sequence
  Description of Artificial Sequence: Synthetic oligonucleotide
cuguuugguaggucccucu

SEQ ID NO: 2245875 - RNA, 19 nt, Artificial Sequence
  Description of Artificial Sequence: Synthetic oligonucleotide
ggugcuugcucagaagggu

SEQ ID NO: 2245876 - RNA, 19 nt, Artificial Sequence
  Description of Artificial Sequence: Synthetic oligonucleotide
aggguaggguaggugcaaa

SEQ ID NO: 2245877 - RNA, 19 nt, Artificial Sequence
  Description of Artificial Sequence: Synthetic oligonucleotide
agccgguuucuggcucugg

SEQ ID NO: 2245878 - RNA, 19 nt, Artificial Sequence
  Description of Artificial Sequence: Synthetic oligonucleotide
gcuuguugagguugaugua

SEQ ID NO: 2245879 - RNA, 19 nt, Artificial Sequence
  Description of Artificial Sequence: Synthetic oligonucleotide
cagcugccuaggaugaagu

SEQ ID NO: 2245880 - RNA, 19 nt, Artificial Sequence
  Description of Artificial Sequence: Synthetic oligonucleotide
gcggcgcucgcagccaucg

SEQ ID NO: 2245881 - RNA, 19 nt, Artificial Sequence
  Description of Artificial Sequence: Synthetic oligonucleotide
cuaccauccugggaguagu

SEQ ID NO: 2245882 - RNA, 19 nt, Artificial Sequence
  Description of Artificial Sequence: Synthetic oligonucleotide
cccuugcagagucagcaca

SEQ ID NO: 2245883 - RNA, 19 nt, Artificial Sequence
  Description of Artificial Sequence: Synthetic oligonucleotide
cuggggagaggggccuaag

SEQ ID NO: 2245884 - RNA, 19 nt, Artificial Sequence
  Description of Artificial Sequence: Synthetic oligonucleotide
acggugaggcacagcuugu

SEQ ID NO: 2245885 - RNA, 19 nt, Artificial Sequence
  Description of Artificial Sequence: Synthetic oligonucleotide
cgcgugaggccacuggcag

SEQ ID NO: 2245886 - RNA, 19 nt, Artificial Sequence
  Description of Artificial Sequence: Synthetic oligonucleotide
ccggaaggcgaaguguaac

SEQ ID NO: 2245887 - RNA, 19 nt, Artificial Sequence
  Description of Artificial Sequence: Synthetic oligonucleotide
cacugcccgcuccgcggcg

SEQ ID NO: 2245888 - RNA, 19 nt, Artificial Sequence
  Description of Artificial Sequence: Synthetic oligonucleotide
gagccgguuucuggcucug

SEQ ID NO: 2245889 - RNA, 19 nt, Artificial Sequence
  Description of Artificial Sequence: Synthetic oligonucleotide
cuaggcgcugugagcccca

SEQ ID NO: 2245890 - RNA, 19 nt, Artificial Sequence
  Description of Artificial Sequence: Synthetic oligonucleotide
guacacggugaggcacagc

SEQ ID NO: 2245891 - RNA, 19 nt, Artificial Sequence
  Description of Artificial Sequence: Synthetic oligonucleotide
ggcucacgugguuccuggc

SEQ ID NO: 2245892 - RNA, 19 nt, Artificial Sequence
  Description of Artificial Sequence: Synthetic oligonucleotide
gucgggagcuccaguagcu

SEQ ID NO: 2245893 - RNA, 19 nt, Artificial Sequence
  Description of Artificial Sequence: Synthetic oligonucleotide
gcgugaggccacuggcagc

SEQ ID NO: 2245894 - RNA, 19 nt, Artificial Sequence
  Description of Artificial Sequence: Synthetic oligonucleotide
gcgcucgcagccaucgcag

SEQ ID NO: 2245895 - RNA, 19 nt, Artificial Sequence
  Description of Artificial Sequence: Synthetic oligonucleotide
gcggaaguucuugguggag

SEQ ID NO: 2245896 - RNA, 19 nt, Artificial Sequence
  Description of Artificial Sequence: Synthetic oligonucleotide
agccaggggaucacgcauu

SEQ ID NO: 2245897 - RNA, 19 nt, Artificial Sequence
  Description of Artificial Sequence: Synthetic oligonucleotide
gccaggggaucacgcauuc

SEQ ID NO: 2245898 - RNA, 19 nt, Artificial Sequence
  Description of Artificial Sequence: Synthetic oligonucleotide
acauccgcgugaggccacu

SEQ ID NO: 2245899 - RNA, 19 nt, Artificial Sequence
  Description of Artificial Sequence: Synthetic oligonucleotide
cggaaggcgaaguguaaca

SEQ ID NO: 2245900 - RNA, 19 nt, Artificial Sequence
  Description of Artificial Sequence: Synthetic oligonucleotide
cacauccgccuggcugagg

SEQ ID NO: 2245901 - RNA, 19 nt, Artificial Sequence
  Description of Artificial Sequence: Synthetic oligonucleotide
cauugaccagcaggucaga

SEQ ID NO: 2245902 - RNA, 19 nt, Artificial Sequence
  Description of Artificial Sequence: Synthetic oligonucleotide
ccucccggaaggcgaagug

SEQ ID NO: 2245903 - RNA, 19 nt, Artificial Sequence
  Description of Artificial Sequence: Synthetic oligonucleotide
acgugguuccuggcauccu

SEQ ID NO: 2245904 - RNA, 19 nt, Artificial Sequence
  Description of Artificial Sequence: Synthetic oligonucleotide
ggaucacgcauucuaccuu

SEQ ID NO: 2245905 - RNA, 19 nt, Artificial Sequence
  Description of Artificial Sequence: Synthetic oligonucleotide
ggguccugggagagugaag

SEQ ID NO: 2245906 - RNA, 19 nt, Artificial Sequence
  Description of Artificial Sequence: Synthetic oligonucleotide
ccgaggcaucuucaaguuc

SEQ ID NO: 2245907 - RNA, 19 nt, Artificial Sequence
  Description of Artificial Sequence: Synthetic oligonucleotide
guucuccuguuugguaggu

SEQ ID NO: 2245908 - RNA, 19 nt, Artificial Sequence
  Description of Artificial Sequence: Synthetic oligonucleotide
agcaaccagcggaacucuu

SEQ ID NO: 2245909 - RNA, 19 nt, Artificial Sequence
  Description of Artificial Sequence: Synthetic oligonucleotide
cucccggaaggcgaagugu

SEQ ID NO: 2245910 - RNA, 19 nt, Artificial Sequence
  Description of Artificial Sequence: Synthetic oligonucleotide
gcacuacaagggguaugug

SEQ ID NO: 2245911 - RNA, 19 nt, Artificial Sequence
  Description of Artificial Sequence: Synthetic oligonucleotide
gcuccugucuugaacuggu

SEQ ID NO: 2245912 - RNA, 19 nt, Artificial Sequence
  Description of Artificial Sequence: Synthetic oligonucleotide
cauccgcgugaggccacug

SEQ ID NO: 2245913 - RNA, 19 nt, Artificial Sequence
  Description of Artificial Sequence: Synthetic oligonucleotide
gggcgucauugagccaggg

SEQ ID NO: 2245914 - RNA, 19 nt, Artificial Sequence
  Description of Artificial Sequence: Synthetic oligonucleotide
ggugggcugcagagcgugc

SEQ ID NO: 2245915 - RNA, 19 nt, Artificial Sequence
  Description of Artificial Sequence: Synthetic oligonucleotide
gcgugcaccucagcguuca

SEQ ID NO: 2245916 - RNA, 19 nt, Artificial Sequence
  Description of Artificial Sequence: Synthetic oligonucleotide
cgaaguguaacaguugguu

SEQ ID NO: 2245917 - RNA, 19 nt, Artificial Sequence
  Description of Artificial Sequence: Synthetic oligonucleotide
ggagcuccaguagcuggaa

SEQ ID NO: 2245918 - RNA, 19 nt, Artificial Sequence
  Description of Artificial Sequence: Synthetic oligonucleotide
ccgguuugccaggagguaa

SEQ ID NO: 2245919 - RNA, 19 nt, Artificial Sequence
  Description of Artificial Sequence: Synthetic oligonucleotide
gcgaaguguaacaguuggu

SEQ ID NO: 2245920 - RNA, 19 nt, Artificial Sequence
  Description of Artificial Sequence: Synthetic oligonucleotide
cuuggcucacgugguuccu

SEQ ID NO: 2245921 - RNA, 19 nt, Artificial Sequence
  Description of Artificial Sequence: Synthetic oligonucleotide
acauggccccagggcugug

SEQ ID NO: 2245922 - RNA, 19 nt, Artificial Sequence
  Description of Artificial Sequence: Synthetic oligonucleotide
ccgcgugaggccacuggca

SEQ ID NO: 2245923 - RNA, 19 nt, Artificial Sequence
  Description of Artificial Sequence: Synthetic oligonucleotide
cagcaaccagcggaacucu

SEQ ID NO: 2245924 - RNA, 19 nt, Artificial Sequence
  Description of Artificial Sequence: Synthetic oligonucleotide
cagcaaucucagguagggu

SEQ ID NO: 2245925 - RNA, 19 nt, Artificial Sequence
  Description of Artificial Sequence: Synthetic oligonucleotide
cgguuugccaggagguaaa

SEQ ID NO: 2245926 - RNA, 19 nt, Artificial Sequence
  Description of Artificial Sequence: Synthetic oligonucleotide
cacccuucaccuggucugu

SEQ ID NO: 2245927 - RNA, 19 nt, Artificial Sequence
  Description of Artificial Sequence: Synthetic oligonucleotide
cccggaaggcgaaguguaa

SEQ ID NO: 2245928 - RNA, 19 nt, Artificial Sequence
  Description of Artificial Sequence: Synthetic oligonucleotide
gcacggcgugcaccucagc

SEQ ID NO: 2245929 - RNA, 19 nt, Artificial Sequence
  Description of Artificial Sequence: Synthetic oligonucleotide
ggguagugagccgguuucu

SEQ ID NO: 2245930 - RNA, 19 nt, Artificial Sequence
  Description of Artificial Sequence: Synthetic oligonucleotide
ccuggaucuguuguaguuu

SEQ ID NO: 2245931 - RNA, 19 nt, Artificial Sequence
  Description of Artificial Sequence: Synthetic oligonucleotide
gggcuaccauccugggagu

SEQ ID NO: 2245932 - RNA, 19 nt, Artificial Sequence
  Description of Artificial Sequence: Synthetic oligonucleotide
ggcuaccauccugggagua

SEQ ID NO: 2245933 - RNA, 19 nt, Artificial Sequence
  Description of Artificial Sequence: Synthetic oligonucleotide
cuccagaggggcggaaguu

SEQ ID NO: 2245934 - RNA, 19 nt, Artificial Sequence
  Description of Artificial Sequence: Synthetic oligonucleotide
caggcacuacaagggguau

SEQ ID NO: 2245935 - RNA, 19 nt, Artificial Sequence
  Description of Artificial Sequence: Synthetic oligonucleotide
gguuugccaggagguaaau

SEQ ID NO: 2245936 - RNA, 19 nt, Artificial Sequence
  Description of Artificial Sequence: Synthetic oligonucleotide
ggcgugcaccucagcguuc

SEQ ID NO: 2245937 - RNA, 19 nt, Artificial Sequence
  Description of Artificial Sequence: Synthetic oligonucleotide
cagaggggcggaaguucuu

SEQ ID NO: 2245938 - RNA, 19 nt, Artificial Sequence
  Description of Artificial Sequence: Synthetic oligonucleotide
gcuggggagaggggccuaa

SEQ ID NO: 2245939 - RNA, 19 nt, Artificial Sequence
  Description of Artificial Sequence: Synthetic oligonucleotide
ggcucaccucuaggcgcug

SEQ ID NO: 2245940 - RNA, 19 nt, Artificial Sequence
  Description of Artificial Sequence: Synthetic oligonucleotide
cgugcagcugguacacggu

SEQ ID NO: 2245941 - RNA, 19 nt, Artificial Sequence
  Description of Artificial Sequence: Synthetic oligonucleotide
gcugggguagugagccggu

SEQ ID NO: 2245942 - RNA, 19 nt, Artificial Sequence
  Description of Artificial Sequence: Synthetic oligonucleotide
caccuccagaggggcggaa

SEQ ID NO: 2245943 - RNA, 19 nt, Artificial Sequence
  Description of Artificial Sequence: Synthetic oligonucleotide
ccucagcguucagcaacca

SEQ ID NO: 2245944 - RNA, 19 nt, Artificial Sequence
  Description of Artificial Sequence: Synthetic oligonucleotide
cccgguuugccaggaggua

SEQ ID NO: 2245945 - RNA, 19 nt, Artificial Sequence
  Description of Artificial Sequence: Synthetic oligonucleotide
gcucaccucuaggcgcugu

SEQ ID NO: 2245946 - RNA, 19 nt, Artificial Sequence
  Description of Artificial Sequence: Synthetic oligonucleotide
cugggguagugagccgguu

SEQ ID NO: 2245947 - RNA, 19 nt, Artificial Sequence
  Description of Artificial Sequence: Synthetic oligonucleotide
cccgcuccgcggcgcucgc

SEQ ID NO: 2245948 - RNA, 19 nt, Artificial Sequence
  Description of Artificial Sequence: Synthetic oligonucleotide
cugcccgcuccgcggcgcu

SEQ ID NO: 2245949 - RNA, 19 nt, Artificial Sequence
  Description of Artificial Sequence: Synthetic oligonucleotide
gggcauccccuugcagagu

SEQ ID NO: 2245950 - RNA, 19 nt, Artificial Sequence
  Description of Artificial Sequence: Synthetic oligonucleotide
cggcgcucgcagccaucgc

SEQ ID NO: 2245951 - RNA, 19 nt, Artificial Sequence
  Description of Artificial Sequence: Synthetic oligonucleotide
ccaggggaucacgcauucu

SEQ ID NO: 2245952 - RNA, 19 nt, Artificial Sequence
  Description of Artificial Sequence: Synthetic oligonucleotide
cggcgugcaccucagcguu

SEQ ID NO: 2245953 - RNA, 19 nt, Artificial Sequence
  Description of Artificial Sequence: Synthetic oligonucleotide
ccgcuccgcggcgcucgca

SEQ ID NO: 2245954 - RNA, 19 nt, Artificial Sequence
  Description of Artificial Sequence: Synthetic oligonucleotide
aaugccaucuucuaaaugc

SEQ ID NO: 2245955 - RNA, 19 nt, Artificial Sequence
  Description of Artificial Sequence: Synthetic oligonucleotide
aaauauuucgcguaagaac

SEQ ID NO: 2245956 - RNA, 19 nt, Artificial Sequence
  Description of Artificial Sequence: Synthetic oligonucleotide
auuucaugaguuuauaugc

SEQ ID NO: 2245957 - RNA, 19 nt, Artificial Sequence
  Description of Artificial Sequence: Synthetic oligonucleotide
aaccauuuccacuagagac

SEQ ID NO: 2245958 - RNA, 19 nt, Artificial Sequence
  Description of Artificial Sequence: Synthetic oligonucleotide
aaaucuuuaggauuaauca

SEQ ID NO: 2245959 - RNA, 19 nt, Artificial Sequence
  Description of Artificial Sequence: Synthetic oligonucleotide
aaucuuuaggauuaaucac

SEQ ID NO: 2245960 - RNA, 19 nt, Artificial Sequence
  Description of Artificial Sequence: Synthetic oligonucleotide
uuaaucaccaguuuaaucu

SEQ ID NO: 2245961 - RNA, 19 nt, Artificial Sequence
  Description of Artificial Sequence: Synthetic oligonucleotide
uuauagcacauuaacauag

SEQ ID NO: 2245962 - RNA, 19 nt, Artificial Sequence
  Description of Artificial Sequence: Synthetic oligonucleotide
ucacuuacuaaauauuucg

SEQ ID NO: 2245963 - RNA, 19 nt, Artificial Sequence
  Description of Artificial Sequence: Synthetic oligonucleotide
uuaacauagauauuucugc

SEQ ID NO: 2245964 - RNA, 19 nt, Artificial Sequence
  Description of Artificial Sequence: Synthetic oligonucleotide
aauucucaaaucuuuagga

SEQ ID NO: 2245965 - RNA, 19 nt, Artificial Sequence
  Description of Artificial Sequence: Synthetic oligonucleotide
aagaugaacaauccgaaca

SEQ ID NO: 2245966 - RNA, 19 nt, Artificial Sequence
  Description of Artificial Sequence: Synthetic oligonucleotide
aauauuucgcguaagaaca

SEQ ID NO: 2245967 - RNA, 19 nt, Artificial Sequence
  Description of Artificial Sequence: Synthetic oligonucleotide
agaugcaugcuguauagcc

SEQ ID NO: 2245968 - RNA, 19 nt, Artificial Sequence
  Description of Artificial Sequence: Synthetic oligonucleotide
uaucaugucauccaguaga

SEQ ID NO: 2245969 - RNA, 19 nt, Artificial Sequence
  Description of Artificial Sequence: Synthetic oligonucleotide
ucuaaaugcagcauacugc

SEQ ID NO: 2245970 - RNA, 19 nt, Artificial Sequence
  Description of Artificial Sequence: Synthetic oligonucleotide
uuuaguuccaaccuggauc

SEQ ID NO: 2245971 - RNA, 19 nt, Artificial Sequence
  Description of Artificial Sequence: Synthetic oligonucleotide
uuuaggauuaaucaccagu

SEQ ID NO: 2245972 - RNA, 19 nt, Artificial Sequence
  Description of Artificial Sequence: Synthetic oligonucleotide
acuuacuaaauauuucgcg

SEQ ID NO: 2245973 - RNA, 19 nt, Artificial Sequence
  Description of Artificial Sequence: Synthetic oligonucleotide
guuuauaugcuucuggacc

SEQ ID NO: 2245974 - RNA, 19 nt, Artificial Sequence
  Description of Artificial Sequence: Synthetic oligonucleotide
uuaguaucaauucucaaau

SEQ ID NO: 2245975 - RNA, 19 nt, Artificial Sequence
  Description of Artificial Sequence: Synthetic oligonucleotide
aguaucaauucucaaaucu

SEQ ID NO: 2245976 - RNA, 19 nt, Artificial Sequence
  Description of Artificial Sequence: Synthetic oligonucleotide
ugugguauuuacaugcugc

SEQ ID NO: 2245977 - RNA, 19 nt, Artificial Sequence
  Description of Artificial Sequence: Synthetic oligonucleotide
uauuucucaagacaauacc

SEQ ID NO: 2245978 - RNA, 19 nt, Artificial Sequence
  Description of Artificial Sequence: Synthetic oligonucleotide
aauugucuuccuuuguguc

SEQ ID NO: 2245979 - RNA, 19 nt, Artificial Sequence
  Description of Artificial Sequence: Synthetic oligonucleotide
uucuuuauagcacauuaac

SEQ ID NO: 2245980 - RNA, 19 nt, Artificial Sequence
  Description of Artificial Sequence: Synthetic oligonucleotide
uucuaaaugcagcauacug

SEQ ID NO: 2245981 - RNA, 19 nt, Artificial Sequence
  Description of Artificial Sequence: Synthetic oligonucleotide
aucuuuaggauuaaucacc

SEQ ID NO: 2245982 - RNA, 19 nt, Artificial Sequence
  Description of Artificial Sequence: Synthetic oligonucleotide
ucuuuauagcacauuaaca

SEQ ID NO: 2245983 - RNA, 19 nt, Artificial Sequence
  Description of Artificial Sequence: Synthetic oligonucleotide
auuaaucaccaguuuaauc

SEQ ID NO: 2245984 - RNA, 19 nt, Artificial Sequence
  Description of Artificial Sequence: Synthetic oligonucleotide
aaugcuagcugaggcaugc

SEQ ID NO: 2245985 - RNA, 19 nt, Artificial Sequence
  Description of Artificial Sequence: Synthetic oligonucleotide
gacaauaccaguuaagucu

SEQ ID NO: 2245986 - RNA, 19 nt, Artificial Sequence
  Description of Artificial Sequence: Synthetic oligonucleotide
acuagagacucauaauccg

SEQ ID NO: 2245987 - RNA, 19 nt, Artificial Sequence
  Description of Artificial Sequence: Synthetic oligonucleotide
uaauuccacugucagaugc

SEQ ID NO: 2245988 - RNA, 19 nt, Artificial Sequence
  Description of Artificial Sequence: Synthetic oligonucleotide
aacuguuaacuccuauuuc

SEQ ID NO: 2245989 - RNA, 19 nt, Artificial Sequence
  Description of Artificial Sequence: Synthetic oligonucleotide
ucugcuuaguauuugaaau

SEQ ID NO: 2245990 - RNA, 19 nt, Artificial Sequence
  Description of Artificial Sequence: Synthetic oligonucleotide
aaucucagugggcugcggc

SEQ ID NO: 2245991 - RNA, 19 nt, Artificial Sequence
  Description of Artificial Sequence: Synthetic oligonucleotide
uguggaaaguuguaugucc

SEQ ID NO: 2245992 - RNA, 19 nt, Artificial Sequence
  Description of Artificial Sequence: Synthetic oligonucleotide
agaugaacaauccgaacag

SEQ ID NO: 2245993 - RNA, 19 nt, Artificial Sequence
  Description of Artificial Sequence: Synthetic oligonucleotide
aagagcuuuaugcagcacu

SEQ ID NO: 2245994 - RNA, 19 nt, Artificial Sequence
  Description of Artificial Sequence: Synthetic oligonucleotide
uccuuuaguuccaaccugg

SEQ ID NO: 2245995 - RNA, 19 nt, Artificial Sequence
  Description of Artificial Sequence: Synthetic oligonucleotide
auuuuccuagucuauguag

SEQ ID NO: 2245996 - RNA, 19 nt, Artificial Sequence
  Description of Artificial Sequence: Synthetic oligonucleotide
uagaaagagcuuuaugcag

SEQ ID NO: 2245997 - RNA, 19 nt, Artificial Sequence
  Description of Artificial Sequence: Synthetic oligonucleotide
uuaguuccaaccuggaucu

SEQ ID NO: 2245998 - RNA, 19 nt, Artificial Sequence
  Description of Artificial Sequence: Synthetic oligonucleotide
uuuauaugcuucuggaccu

SEQ ID NO: 2245999 - RNA, 19 nt, Artificial Sequence
  Description of Artificial Sequence: Synthetic oligonucleotide
aaacuguuaacuccuauuu

SEQ ID NO: 2246000 - RNA, 19 nt, Artificial Sequence
  Description of Artificial Sequence: Synthetic oligonucleotide
uagucuauguagaaagagc

SEQ ID NO: 2246001 - RNA, 19 nt, Artificial Sequence
  Description of Artificial Sequence: Synthetic oligonucleotide
auaccaguuaagucugugc

SEQ ID NO: 2246002 - RNA, 19 nt, Artificial Sequence
  Description of Artificial Sequence: Synthetic oligonucleotide
aagacaauaccaguuaagu

SEQ ID NO: 2246003 - RNA, 19 nt, Artificial Sequence
  Description of Artificial Sequence: Synthetic oligonucleotide
agaaagagcuuuaugcagc

SEQ ID NO: 2246004 - RNA, 19 nt, Artificial Sequence
  Description of Artificial Sequence: Synthetic oligonucleotide
caauucucaaaucuuuagg

SEQ ID NO: 2246005 - RNA, 19 nt, Artificial Sequence
  Description of Artificial Sequence: Synthetic oligonucleotide
uuuuccuagucuauguaga

SEQ ID NO: 2246006 - RNA, 19 nt, Artificial Sequence
  Description of Artificial Sequence: Synthetic oligonucleotide
auuaacauagauauuucug

SEQ ID NO: 2246007 - RNA, 19 nt, Artificial Sequence
  Description of Artificial Sequence: Synthetic oligonucleotide
uuaggauuaaucaccaguu

SEQ ID NO: 2246008 - RNA, 19 nt, Artificial Sequence
  Description of Artificial Sequence: Synthetic oligonucleotide
guaagaacaauugucuucc

SEQ ID NO: 2246009 - RNA, 19 nt, Artificial Sequence
  Description of Artificial Sequence: Synthetic oligonucleotide
uuucgcguaagaacaauug

SEQ ID NO: 2246010 - RNA, 19 nt, Artificial Sequence
  Description of Artificial Sequence: Synthetic oligonucleotide
aaauuucaugaguuuauau

SEQ ID NO: 2246011 - RNA, 19 nt, Artificial Sequence
  Description of Artificial Sequence: Synthetic oligonucleotide
ucuucuagaugcaugcugu

SEQ ID NO: 2246012 - RNA, 19 nt, Artificial Sequence
  Description of Artificial Sequence: Synthetic oligonucleotide
ucuuuaggauuaaucacca

SEQ ID NO: 2246013 - RNA, 19 nt, Artificial Sequence
  Description of Artificial Sequence: Synthetic oligonucleotide
agacaauaccaguuaaguc

SEQ ID NO: 2246014 - RNA, 19 nt, Artificial Sequence
  Description of Artificial Sequence: Synthetic oligonucleotide
aaacaacaccuguaggaag

SEQ ID NO: 2246015 - RNA, 19 nt, Artificial Sequence
  Description of Artificial Sequence: Synthetic oligonucleotide
aguguuucaaaaugccauc

SEQ ID NO: 2246016 - RNA, 19 nt, Artificial Sequence
  Description of Artificial Sequence: Synthetic oligonucleotide
uugaucacuuacuaaauau

SEQ ID NO: 2246017 - RNA, 19 nt, Artificial Sequence
  Description of Artificial Sequence: Synthetic oligonucleotide
uaccaguuaagucugugca

SEQ ID NO: 2246018 - RNA, 19 nt, Artificial Sequence
  Description of Artificial Sequence: Synthetic oligonucleotide
cacgcaauggauuugcuug

SEQ ID NO: 2246019 - RNA, 19 nt, Artificial Sequence
  Description of Artificial Sequence: Synthetic oligonucleotide
cuuuaugcagcacuuaguc

SEQ ID NO: 2246020 - RNA, 19 nt, Artificial Sequence
  Description of Artificial Sequence: Synthetic oligonucleotide
ucucuuaguaucaauucuc

SEQ ID NO: 2246021 - RNA, 19 nt, Artificial Sequence
  Description of Artificial Sequence: Synthetic oligonucleotide
uagacagucuccuugcaug

SEQ ID NO: 2246022 - RNA, 19 nt, Artificial Sequence
  Description of Artificial Sequence: Synthetic oligonucleotide
uauucuguggucugugacc

SEQ ID NO: 2246023 - RNA, 19 nt, Artificial Sequence
  Description of Artificial Sequence: Synthetic oligonucleotide
aacaccuguaggaagauga

SEQ ID NO: 2246024 - RNA, 19 nt, Artificial Sequence
  Description of Artificial Sequence: Synthetic oligonucleotide
aaauauuccaguguuucaa

SEQ ID NO: 2246025 - RNA, 19 nt, Artificial Sequence
  Description of Artificial Sequence: Synthetic oligonucleotide
uucuucuagaugcaugcug

SEQ ID NO: 2246026 - RNA, 19 nt, Artificial Sequence
  Description of Artificial Sequence: Synthetic oligonucleotide
cacuagagacucauaaucc

SEQ ID NO: 2246027 - RNA, 19 nt, Artificial Sequence
  Description of Artificial Sequence: Synthetic oligonucleotide
ugacuuguuuauucugugg

SEQ ID NO: 2246028 - RNA, 19 nt, Artificial Sequence
  Description of Artificial Sequence: Synthetic oligonucleotide
uuuaaucucagugggcugc

SEQ ID NO: 2246029 - RNA, 19 nt, Artificial Sequence
  Description of Artificial Sequence: Synthetic oligonucleotide
uuaacuccuauuucucaag

SEQ ID NO: 2246030 - RNA, 19 nt, Artificial Sequence
  Description of Artificial Sequence: Synthetic oligonucleotide
acaauugucuuccuuugug

SEQ ID NO: 2246031 - RNA, 19 nt, Artificial Sequence
  Description of Artificial Sequence: Synthetic oligonucleotide
cuauuucucaagacaauac

SEQ ID NO: 2246032 - RNA, 19 nt, Artificial Sequence
  Description of Artificial Sequence: Synthetic oligonucleotide
ucuguggaaaguuguaugu

SEQ ID NO: 2246033 - RNA, 19 nt, Artificial Sequence
  Description of Artificial Sequence: Synthetic oligonucleotide
uuuauagcacauuaacaua

SEQ ID NO: 2246034 - RNA, 19 nt, Artificial Sequence
  Description of Artificial Sequence: Synthetic oligonucleotide
agaacaauugucuuccuuu

SEQ ID NO: 2246035 - RNA, 19 nt, Artificial Sequence
  Description of Artificial Sequence: Synthetic oligonucleotide
uguaucaugucauccagua

SEQ ID NO: 2246036 - RNA, 19 nt, Artificial Sequence
  Description of Artificial Sequence: Synthetic oligonucleotide
agcuuuaugcagcacuuag

SEQ ID NO: 2246037 - RNA, 19 nt, Artificial Sequence
  Description of Artificial Sequence: Synthetic oligonucleotide
cuagcguuguaucuuuugg

SEQ ID NO: 2246038 - RNA, 19 nt, Artificial Sequence
  Description of Artificial Sequence: Synthetic oligonucleotide
acuuguuuauucugugguc

SEQ ID NO: 2246039 - RNA, 19 nt, Artificial Sequence
  Description of Artificial Sequence: Synthetic oligonucleotide
cuuaguaucaauucucaaa

SEQ ID NO: 2246040 - RNA, 19 nt, Artificial Sequence
  Description of Artificial Sequence: Synthetic oligonucleotide
ucagcugagaucucucuug

SEQ ID NO: 2246041 - RNA, 19 nt, Artificial Sequence
  Description of Artificial Sequence: Synthetic oligonucleotide
acuguaucaugucauccag

SEQ ID NO: 2246042 - RNA, 19 nt, Artificial Sequence
  Description of Artificial Sequence: Synthetic oligonucleotide
cuagaugcaugcuguauag

SEQ ID NO: 2246043 - RNA, 19 nt, Artificial Sequence
  Description of Artificial Sequence: Synthetic oligonucleotide
guagaaagagcuuuaugca

SEQ ID NO: 2246044 - RNA, 19 nt, Artificial Sequence
  Description of Artificial Sequence: Synthetic oligonucleotide
uccgcauaguccuucagug

SEQ ID NO: 2246045 - RNA, 19 nt, Artificial Sequence
  Description of Artificial Sequence: Synthetic oligonucleotide
aucuuucuagcguuguauc

SEQ ID NO: 2246046 - RNA, 19 nt, Artificial Sequence
  Description of Artificial Sequence: Synthetic oligonucleotide
aguuuaaucucagugggcu

SEQ ID NO: 2246047 - RNA, 19 nt, Artificial Sequence
  Description of Artificial Sequence: Synthetic oligonucleotide
cugagaucucucuugcugg

SEQ ID NO: 2246048 - RNA, 19 nt, Artificial Sequence
  Description of Artificial Sequence: Synthetic oligonucleotide
aaccuggaucuuucuagcg

SEQ ID NO: 2246049 - RNA, 19 nt, Artificial Sequence
  Description of Artificial Sequence: Synthetic oligonucleotide
ucuggaaaccauuuccacu

SEQ ID NO: 2246050 - RNA, 19 nt, Artificial Sequence
  Description of Artificial Sequence: Synthetic oligonucleotide
uuacuaaauauuucgcgua

SEQ ID NO: 2246051 - RNA, 19 nt, Artificial Sequence
  Description of Artificial Sequence: Synthetic oligonucleotide
ucucuguacucuauguaca

SEQ ID NO: 2246052 - RNA, 19 nt, Artificial Sequence
  Description of Artificial Sequence: Synthetic oligonucleotide
ucauguagugacuuguuua

SEQ ID NO: 2246053 - RNA, 19 nt, Artificial Sequence
  Description of Artificial Sequence: Synthetic oligonucleotide
ucuagaugcaugcuguaua

SEQ ID NO: 2246054 - RNA, 19 nt, Artificial Sequence
  Description of Artificial Sequence: Synthetic oligonucleotide
aguuguauguccuuauuuu

SEQ ID NO: 2246055 - RNA, 19 nt, Artificial Sequence
  Description of Artificial Sequence: Synthetic oligonucleotide
guuaguuucuucuucuaga

SEQ ID NO: 2246056 - RNA, 19 nt, Artificial Sequence
  Description of Artificial Sequence: Synthetic oligonucleotide
ugcuguuucuuuauagcac

SEQ ID NO: 2246057 - RNA, 19 nt, Artificial Sequence
  Description of Artificial Sequence: Synthetic oligonucleotide
uuaguuucuucuucuagau

SEQ ID NO: 2246058 - RNA, 19 nt, Artificial Sequence
  Description of Artificial Sequence: Synthetic oligonucleotide
cacuuacuaaauauuucgc

SEQ ID NO: 2246059 - RNA, 19 nt, Artificial Sequence
  Description of Artificial Sequence: Synthetic oligonucleotide
uguauagccuugcacguaa

SEQ ID NO: 2246060 - RNA, 19 nt, Artificial Sequence
  Description of Artificial Sequence: Synthetic oligonucleotide
agucuauguagaaagagcu

SEQ ID NO: 2246061 - RNA, 19 nt, Artificial Sequence
  Description of Artificial Sequence: Synthetic oligonucleotide
uccuucaaauuucaugagu

SEQ ID NO: 2246062 - RNA, 19 nt, Artificial Sequence
  Description of Artificial Sequence: Synthetic oligonucleotide
accaguuaagucugugcac

SEQ ID NO: 2246063 - RNA, 19 nt, Artificial Sequence
  Description of Artificial Sequence: Synthetic oligonucleotide
uuugaucacuuacuaaaua

SEQ ID NO: 2246064 - RNA, 19 nt, Artificial Sequence
  Description of Artificial Sequence: Synthetic oligonucleotide
uuacaugcugcccuccagc

SEQ ID NO: 2246065 - RNA, 19 nt, Artificial Sequence
  Description of Artificial Sequence: Synthetic oligonucleotide
caagacaauaccaguuaag

SEQ ID NO: 2246066 - RNA, 19 nt, Artificial Sequence
  Description of Artificial Sequence: Synthetic oligonucleotide
ucgcguaagaacaauuguc

SEQ ID NO: 2246067 - RNA, 19 nt, Artificial Sequence
  Description of Artificial Sequence: Synthetic oligonucleotide
acauagauauuucugcuua

SEQ ID NO: 2246068 - RNA, 19 nt, Artificial Sequence
  Description of Artificial Sequence: Synthetic oligonucleotide
uucgcguaagaacaauugu

SEQ ID NO: 2246069 - RNA, 19 nt, Artificial Sequence
  Description of Artificial Sequence: Synthetic oligonucleotide
uacuaaauauuucgcguaa

SEQ ID NO: 2246070 - RNA, 19 nt, Artificial Sequence
  Description of Artificial Sequence: Synthetic oligonucleotide
uuuacaugcugcccuccag

SEQ ID NO: 2246071 - RNA, 19 nt, Artificial Sequence
  Description of Artificial Sequence: Synthetic oligonucleotide
ugaggauuuuccuagucua

SEQ ID NO: 2246072 - RNA, 19 nt, Artificial Sequence
  Description of Artificial Sequence: Synthetic oligonucleotide
aucacuuacuaaauauuuc

SEQ ID NO: 2246073 - RNA, 19 nt, Artificial Sequence
  Description of Artificial Sequence: Synthetic oligonucleotide
aacaacaccuguaggaaga

SEQ ID NO: 2246074 - RNA, 19 nt, Artificial Sequence
  Description of Artificial Sequence: Synthetic oligonucleotide
uuuaugcagcacuuagucu

SEQ ID NO: 2246075 - RNA, 19 nt, Artificial Sequence
  Description of Artificial Sequence: Synthetic oligonucleotide
acugucauggugcuagugu

SEQ ID NO: 2246076 - RNA, 19 nt, Artificial Sequence
  Description of Artificial Sequence: Synthetic oligonucleotide
guggauacggccuugcuuc

SEQ ID NO: 2246077 - RNA, 19 nt, Artificial Sequence
  Description of Artificial Sequence: Synthetic oligonucleotide
uagcacauuaacauagaua

SEQ ID NO: 2246078 - RNA, 19 nt, Artificial Sequence
  Description of Artificial Sequence: Synthetic oligonucleotide
uccacuugcucucuuagua

SEQ ID NO: 2246079 - RNA, 19 nt, Artificial Sequence
  Description of Artificial Sequence: Synthetic oligonucleotide
caccaguuuaaucucagug

SEQ ID NO: 2246080 - RNA, 19 nt, Artificial Sequence
  Description of Artificial Sequence: Synthetic oligonucleotide
uguuaauuccacugucaga

SEQ ID NO: 2246081 - RNA, 19 nt, Artificial Sequence
  Description of Artificial Sequence: Synthetic oligonucleotide
uagauauuucugcuuagua

SEQ ID NO: 2246082 - RNA, 19 nt, Artificial Sequence
  Description of Artificial Sequence: Synthetic oligonucleotide
ucuuucuagcguuguaucu

SEQ ID NO: 2246083 - RNA, 19 nt, Artificial Sequence
  Description of Artificial Sequence: Synthetic oligonucleotide
gaguccaagaaacuguuaa

SEQ ID NO: 2246084 - RNA, 19 nt, Artificial Sequence
  Description of Artificial Sequence: Synthetic oligonucleotide
auuucucaagacaauacca

SEQ ID NO: 2246085 - RNA, 19 nt, Artificial Sequence
  Description of Artificial Sequence: Synthetic oligonucleotide
uuccuuuaguuccaaccug

SEQ ID NO: 2246086 - RNA, 19 nt, Artificial Sequence
  Description of Artificial Sequence: Synthetic oligonucleotide
aauaccaguuaagucugug

SEQ ID NO: 2246087 - RNA, 19 nt, Artificial Sequence
  Description of Artificial Sequence: Synthetic oligonucleotide
uucucaagacaauaccagu

SEQ ID NO: 2246088 - RNA, 19 nt, Artificial Sequence
  Description of Artificial Sequence: Synthetic oligonucleotide
aacaauccgaacagcacug

SEQ ID NO: 2246089 - RNA, 19 nt, Artificial Sequence
  Description of Artificial Sequence: Synthetic oligonucleotide
aggauuaaucaccaguuua

SEQ ID NO: 2246090 - RNA, 19 nt, Artificial Sequence
  Description of Artificial Sequence: Synthetic oligonucleotide
uguauguccuuauuuucuc

SEQ ID NO: 2246091 - RNA, 19 nt, Artificial Sequence
  Description of Artificial Sequence: Synthetic oligonucleotide
ucuagcguuguaucuuuug

SEQ ID NO: 2246092 - RNA, 19 nt, Artificial Sequence
  Description of Artificial Sequence: Synthetic oligonucleotide
aauccgaacagcacugucu

SEQ ID NO: 2246093 - RNA, 19 nt, Artificial Sequence
  Description of Artificial Sequence: Synthetic oligonucleotide
gaagaugaacaauccgaac

SEQ ID NO: 2246094 - RNA, 19 nt, Artificial Sequence
  Description of Artificial Sequence: Synthetic oligonucleotide
ccaagaaacuguuaacucc

SEQ ID NO: 2246095 - RNA, 19 nt, Artificial Sequence
  Description of Artificial Sequence: Synthetic oligonucleotide
uucugcuuaguauuugaaa

SEQ ID NO: 2246096 - RNA, 19 nt, Artificial Sequence
  Description of Artificial Sequence: Synthetic oligonucleotide
auggugcuaguguggauac

SEQ ID NO: 2246097 - RNA, 19 nt, Artificial Sequence
  Description of Artificial Sequence: Synthetic oligonucleotide
uacucuauguacaccuccu

SEQ ID NO: 2246098 - RNA, 19 nt, Artificial Sequence
  Description of Artificial Sequence: Synthetic oligonucleotide
uuagucuuuucuggaaacc

SEQ ID NO: 2246099 - RNA, 19 nt, Artificial Sequence
  Description of Artificial Sequence: Synthetic oligonucleotide
uaaucaccaguuuaaucuc

SEQ ID NO: 2246100 - RNA, 19 nt, Artificial Sequence
  Description of Artificial Sequence: Synthetic oligonucleotide
ucuuuucuggaaaccauuu

SEQ ID NO: 2246101 - RNA, 19 nt, Artificial Sequence
  Description of Artificial Sequence: Synthetic oligonucleotide
cuuacuaaauauuucgcgu

SEQ ID NO: 2246102 - RNA, 19 nt, Artificial Sequence
  Description of Artificial Sequence: Synthetic oligonucleotide
cauagauauuucugcuuag

SEQ ID NO: 2246103 - RNA, 19 nt, Artificial Sequence
  Description of Artificial Sequence: Synthetic oligonucleotide
aaggucauguagugacuug

SEQ ID NO: 2246104 - RNA, 19 nt, Artificial Sequence
  Description of Artificial Sequence: Synthetic oligonucleotide
ugcuaguguggauacggcc

SEQ ID NO: 2246105 - RNA, 19 nt, Artificial Sequence
  Description of Artificial Sequence: Synthetic oligonucleotide
uggcauucagaaacaacac

SEQ ID NO: 2246106 - RNA, 19 nt, Artificial Sequence
  Description of Artificial Sequence: Synthetic oligonucleotide
guuaauuccacugucagau

SEQ ID NO: 2246107 - RNA, 19 nt, Artificial Sequence
  Description of Artificial Sequence: Synthetic oligonucleotide
ugcucucuuaguaucaauu

SEQ ID NO: 2246108 - RNA, 19 nt, Artificial Sequence
  Description of Artificial Sequence: Synthetic oligonucleotide
aaaguuguauguccuuauu

SEQ ID NO: 2246109 - RNA, 19 nt, Artificial Sequence
  Description of Artificial Sequence: Synthetic oligonucleotide
ccaguuuaaucucaguggg

SEQ ID NO: 2246110 - RNA, 19 nt, Artificial Sequence
  Description of Artificial Sequence: Synthetic oligonucleotide
accuguaggaagaugaaca

SEQ ID NO: 2246111 - RNA, 19 nt, Artificial Sequence
  Description of Artificial Sequence: Synthetic oligonucleotide
auccgaacagcacugucug

SEQ ID NO: 2246112 - RNA, 19 nt, Artificial Sequence
  Description of Artificial Sequence: Synthetic oligonucleotide
gugguauuuacaugcugcc

SEQ ID NO: 2246113 - RNA, 19 nt, Artificial Sequence
  Description of Artificial Sequence: Synthetic oligonucleotide
guacucuauguacaccucc

SEQ ID NO: 2246114 - RNA, 19 nt, Artificial Sequence
  Description of Artificial Sequence: Synthetic oligonucleotide
caugccucaggccaccuag

SEQ ID NO: 2246115 - RNA, 19 nt, Artificial Sequence
  Description of Artificial Sequence: Synthetic oligonucleotide
uagucuuuucuggaaacca

SEQ ID NO: 2246116 - RNA, 19 nt, Artificial Sequence
  Description of Artificial Sequence: Synthetic oligonucleotide
cuuguuaauuccacuguca

SEQ ID NO: 2246117 - RNA, 19 nt, Artificial Sequence
  Description of Artificial Sequence: Synthetic oligonucleotide
gaaagagcuuuaugcagca

SEQ ID NO: 2246118 - RNA, 19 nt, Artificial Sequence
  Description of Artificial Sequence: Synthetic oligonucleotide
cuaaaugcagcauacugcu

SEQ ID NO: 2246119 - RNA, 19 nt, Artificial Sequence
  Description of Artificial Sequence: Synthetic oligonucleotide
guaggaagaugaacaaucc

SEQ ID NO: 2246120 - RNA, 19 nt, Artificial Sequence
  Description of Artificial Sequence: Synthetic oligonucleotide
cauccaguagacagucucc

SEQ ID NO: 2246121 - RNA, 19 nt, Artificial Sequence
  Description of Artificial Sequence: Synthetic oligonucleotide
uucauagccagcucccuau

SEQ ID NO: 2246122 - RNA, 19 nt, Artificial Sequence
  Description of Artificial Sequence: Synthetic oligonucleotide
acuaaauauuucgcguaag

SEQ ID NO: 2246123 - RNA, 19 nt, Artificial Sequence
  Description of Artificial Sequence: Synthetic oligonucleotide
acuuagucuuuucuggaaa

SEQ ID NO: 2246124 - RNA, 19 nt, Artificial Sequence
  Description of Artificial Sequence: Synthetic oligonucleotide
cuccaaugcuagcugaggc

SEQ ID NO: 2246125 - RNA, 19 nt, Artificial Sequence
  Description of Artificial Sequence: Synthetic oligonucleotide
aucuucuaaaugcagcaua

SEQ ID NO: 2246126 - RNA, 19 nt, Artificial Sequence
  Description of Artificial Sequence: Synthetic oligonucleotide
gaaacaacaccuguaggaa

SEQ ID NO: 2246127 - RNA, 19 nt, Artificial Sequence
  Description of Artificial Sequence: Synthetic oligonucleotide
ucuuaguaucaauucucaa

SEQ ID NO: 2246128 - RNA, 19 nt, Artificial Sequence
  Description of Artificial Sequence: Synthetic oligonucleotide
gacuuguuuauucuguggu

SEQ ID NO: 2246129 - RNA, 19 nt, Artificial Sequence
  Description of Artificial Sequence: Synthetic oligonucleotide
ugcuucucugucuucggca

SEQ ID NO: 2246130 - RNA, 19 nt, Artificial Sequence
  Description of Artificial Sequence: Synthetic oligonucleotide
auagcacauuaacauagau

SEQ ID NO: 2246131 - RNA, 19 nt, Artificial Sequence
  Description of Artificial Sequence: Synthetic oligonucleotide
caaccuggaucuuucuagc

SEQ ID NO: 2246132 - RNA, 19 nt, Artificial Sequence
  Description of Artificial Sequence: Synthetic oligonucleotide
cugucauggugcuagugug

SEQ ID NO: 2246133 - RNA, 19 nt, Artificial Sequence
  Description of Artificial Sequence: Synthetic oligonucleotide
ugagaucucucuugcuggc

SEQ ID NO: 2246134 - RNA, 19 nt, Artificial Sequence
  Description of Artificial Sequence: Synthetic oligonucleotide
auaauccgcauaguccuuc

SEQ ID NO: 2246135 - RNA, 19 nt, Artificial Sequence
  Description of Artificial Sequence: Synthetic oligonucleotide
augaacaauccgaacagca

SEQ ID NO: 2246136 - RNA, 19 nt, Artificial Sequence
  Description of Artificial Sequence: Synthetic oligonucleotide
aaagagcuuuaugcagcac

SEQ ID NO: 2246137 - RNA, 19 nt, Artificial Sequence
  Description of Artificial Sequence: Synthetic oligonucleotide
uguggauacggccuugcuu

SEQ ID NO: 2246138 - RNA, 19 nt, Artificial Sequence
  Description of Artificial Sequence: Synthetic oligonucleotide
ggugcuaguguggauacgg

SEQ ID NO: 2246139 - RNA, 19 nt, Artificial Sequence
  Description of Artificial Sequence: Synthetic oligonucleotide
uuaauuccacugucagaug

SEQ ID NO: 2246140 - RNA, 19 nt, Artificial Sequence
  Description of Artificial Sequence: Synthetic oligonucleotide
aauccgcauaguccuucag

SEQ ID NO: 2246141 - RNA, 19 nt, Artificial Sequence
  Description of Artificial Sequence: Synthetic oligonucleotide
uagcguuguaucuuuuggu

SEQ ID NO: 2246142 - RNA, 19 nt, Artificial Sequence
  Description of Artificial Sequence: Synthetic oligonucleotide
uaaaugcagcauacugcug

SEQ ID NO: 2246143 - RNA, 19 nt, Artificial Sequence
  Description of Artificial Sequence: Synthetic oligonucleotide
uggaccuccaaugcuagcu

SEQ ID NO: 2246144 - RNA, 19 nt, Artificial Sequence
  Description of Artificial Sequence: Synthetic oligonucleotide
uguucuguggaaaguugua

SEQ ID NO: 2246145 - RNA, 19 nt, Artificial Sequence
  Description of Artificial Sequence: Synthetic oligonucleotide
gacccuguucuguggaaag

SEQ ID NO: 2246146 - RNA, 19 nt, Artificial Sequence
  Description of Artificial Sequence: Synthetic oligonucleotide
auagauauuucugcuuagu

SEQ ID NO: 2246147 - RNA, 19 nt, Artificial Sequence
  Description of Artificial Sequence: Synthetic oligonucleotide
guaucaugucauccaguag

SEQ ID NO: 2246148 - RNA, 19 nt, Artificial Sequence
  Description of Artificial Sequence: Synthetic oligonucleotide
gugacuuguuuauucugug

SEQ ID NO: 2246149 - RNA, 19 nt, Artificial Sequence
  Description of Artificial Sequence: Synthetic oligonucleotide
cuggaaaccauuuccacua

SEQ ID NO: 2246150 - RNA, 19 nt, Artificial Sequence
  Description of Artificial Sequence: Synthetic oligonucleotide
agugacuuguuuauucugu

SEQ ID NO: 2246151 - RNA, 19 nt, Artificial Sequence
  Description of Artificial Sequence: Synthetic oligonucleotide
uccacuagagacucauaau

SEQ ID NO: 2246152 - RNA, 19 nt, Artificial Sequence
  Description of Artificial Sequence: Synthetic oligonucleotide
agcguuguaucuuuugguu

SEQ ID NO: 2246153 - RNA, 19 nt, Artificial Sequence
  Description of Artificial Sequence: Synthetic oligonucleotide
ucaaggucauguagugacu

SEQ ID NO: 2246154 - RNA, 19 nt, Artificial Sequence
  Description of Artificial Sequence: Synthetic oligonucleotide
agucugugcacgcaaugga

SEQ ID NO: 2246155 - RNA, 19 nt, Artificial Sequence
  Description of Artificial Sequence: Synthetic oligonucleotide
uggaaaccauuuccacuag

SEQ ID NO: 2246156 - RNA, 19 nt, Artificial Sequence
  Description of Artificial Sequence: Synthetic oligonucleotide
cuguuaacuccuauuucuc

SEQ ID NO: 2246157 - RNA, 19 nt, Artificial Sequence
  Description of Artificial Sequence: Synthetic oligonucleotide
caguuuaaucucagugggc

SEQ ID NO: 2246158 - RNA, 19 nt, Artificial Sequence
  Description of Artificial Sequence: Synthetic oligonucleotide
ucuguacucuauguacacc

SEQ ID NO: 2246159 - RNA, 19 nt, Artificial Sequence
  Description of Artificial Sequence: Synthetic oligonucleotide
aagaagaguccaagaaacu

SEQ ID NO: 2246160 - RNA, 19 nt, Artificial Sequence
  Description of Artificial Sequence: Synthetic oligonucleotide
uuaagucugugcacgcaau

SEQ ID NO: 2246161 - RNA, 19 nt, Artificial Sequence
  Description of Artificial Sequence: Synthetic oligonucleotide
cucuguacucuauguacac

SEQ ID NO: 2246162 - RNA, 19 nt, Artificial Sequence
  Description of Artificial Sequence: Synthetic oligonucleotide
ugguauuuacaugcugccc

SEQ ID NO: 2246163 - RNA, 19 nt, Artificial Sequence
  Description of Artificial Sequence: Synthetic oligonucleotide
cucuuaguaucaauucuca

SEQ ID NO: 2246164 - RNA, 19 nt, Artificial Sequence
  Description of Artificial Sequence: Synthetic oligonucleotide
guuuaaucucagugggcug

SEQ ID NO: 2246165 - RNA, 19 nt, Artificial Sequence
  Description of Artificial Sequence: Synthetic oligonucleotide
ucuuuugguuaguuucuuc

SEQ ID NO: 2246166 - RNA, 19 nt, Artificial Sequence
  Description of Artificial Sequence: Synthetic oligonucleotide
accuggaucuuucuagcgu

SEQ ID NO: 2246167 - RNA, 19 nt, Artificial Sequence
  Description of Artificial Sequence: Synthetic oligonucleotide
auuuacaugcugcccucca

SEQ ID NO: 2246168 - RNA, 19 nt, Artificial Sequence
  Description of Artificial Sequence: Synthetic oligonucleotide
aauuccacugucagaugcu

SEQ ID NO: 2246169 - RNA, 19 nt, Artificial Sequence
  Description of Artificial Sequence: Synthetic oligonucleotide
ugcuagcugaggcaugccu

SEQ ID NO: 2246170 - RNA, 19 nt, Artificial Sequence
  Description of Artificial Sequence: Synthetic oligonucleotide
gcugagaucucucuugcug

SEQ ID NO: 2246171 - RNA, 19 nt, Artificial Sequence
  Description of Artificial Sequence: Synthetic oligonucleotide
uguacucuauguacaccuc

SEQ ID NO: 2246172 - RNA, 19 nt, Artificial Sequence
  Description of Artificial Sequence: Synthetic oligonucleotide
uaguaucaauucucaaauc

SEQ ID NO: 2246173 - RNA, 19 nt, Artificial Sequence
  Description of Artificial Sequence: Synthetic oligonucleotide
cagcacuuagucuuuucug

SEQ ID NO: 2246174 - RNA, 19 nt, Artificial Sequence
  Description of Artificial Sequence: Synthetic oligonucleotide
aguguggauacggccuugc

SEQ ID NO: 2246175 - RNA, 19 nt, Artificial Sequence
  Description of Artificial Sequence: Synthetic oligonucleotide
cuuuaggauuaaucaccag

SEQ ID NO: 2246176 - RNA, 19 nt, Artificial Sequence
  Description of Artificial Sequence: Synthetic oligonucleotide
ccaaccuggaucuuucuag

SEQ ID NO: 2246177 - RNA, 19 nt, Artificial Sequence
  Description of Artificial Sequence: Synthetic oligonucleotide
ucccuauucuucagcugag

SEQ ID NO: 2246178 - RNA, 19 nt, Artificial Sequence
  Description of Artificial Sequence: Synthetic oligonucleotide
cuuuugguuaguuucuucu

SEQ ID NO: 2246179 - RNA, 19 nt, Artificial Sequence
  Description of Artificial Sequence: Synthetic oligonucleotide
aacagcacugucuguggua

SEQ ID NO: 2246180 - RNA, 19 nt, Artificial Sequence
  Description of Artificial Sequence: Synthetic oligonucleotide
agaaacuguuaacuccuau

SEQ ID NO: 2246181 - RNA, 19 nt, Artificial Sequence
  Description of Artificial Sequence: Synthetic oligonucleotide
uaggauuaaucaccaguuu

SEQ ID NO: 2246182 - RNA, 19 nt, Artificial Sequence
  Description of Artificial Sequence: Synthetic oligonucleotide
acggccuugcuucucuguc

SEQ ID NO: 2246183 - RNA, 19 nt, Artificial Sequence
  Description of Artificial Sequence: Synthetic oligonucleotide
aggauuuuccuagucuaug

SEQ ID NO: 2246184 - RNA, 19 nt, Artificial Sequence
  Description of Artificial Sequence: Synthetic oligonucleotide
ugucauccaguagacaguc

SEQ ID NO: 2246185 - RNA, 19 nt, Artificial Sequence
  Description of Artificial Sequence: Synthetic oligonucleotide
uuucauagccagcucccua

SEQ ID NO: 2246186 - RNA, 19 nt, Artificial Sequence
  Description of Artificial Sequence: Synthetic oligonucleotide
uagccuugcacguaacuuu

SEQ ID NO: 2246187 - RNA, 19 nt, Artificial Sequence
  Description of Artificial Sequence: Synthetic oligonucleotide
auccgcauaguccuucagu

SEQ ID NO: 2246188 - RNA, 19 nt, Artificial Sequence
  Description of Artificial Sequence: Synthetic oligonucleotide
uauaugcuucuggaccucc

SEQ ID NO: 2246189 - RNA, 19 nt, Artificial Sequence
  Description of Artificial Sequence: Synthetic oligonucleotide
uuucuagcguuguaucuuu

SEQ ID NO: 2246190 - RNA, 19 nt, Artificial Sequence
  Description of Artificial Sequence: Synthetic oligonucleotide
cuccuucaaauuucaugag

SEQ ID NO: 2246191 - RNA, 19 nt, Artificial Sequence
  Description of Artificial Sequence: Synthetic oligonucleotide
cugucuucggcacucucug

SEQ ID NO: 2246192 - RNA, 19 nt, Artificial Sequence
  Description of Artificial Sequence: Synthetic oligonucleotide
ccacuagagacucauaauc

SEQ ID NO: 2246193 - RNA, 19 nt, Artificial Sequence
  Description of Artificial Sequence: Synthetic oligonucleotide
ucuucggcacucucuguac

SEQ ID NO: 2246194 - RNA, 19 nt, Artificial Sequence
  Description of Artificial Sequence: Synthetic oligonucleotide
cacuugcucucuuaguauc

SEQ ID NO: 2246195 - RNA, 19 nt, Artificial Sequence
  Description of Artificial Sequence: Synthetic oligonucleotide
guuaagucugugcacgcaa

SEQ ID NO: 2246196 - RNA, 19 nt, Artificial Sequence
  Description of Artificial Sequence: Synthetic oligonucleotide
ccaguuaagucugugcacg

SEQ ID NO: 2246197 - RNA, 19 nt, Artificial Sequence
  Description of Artificial Sequence: Synthetic oligonucleotide
guauuuacaugcugcccuc

SEQ ID NO: 2246198 - RNA, 19 nt, Artificial Sequence
  Description of Artificial Sequence: Synthetic oligonucleotide
uauuuacaugcugcccucc

SEQ ID NO: 2246199 - RNA, 19 nt, Artificial Sequence
  Description of Artificial Sequence: Synthetic oligonucleotide
aucucucuugcuggcauuc

SEQ ID NO: 2246200 - RNA, 19 nt, Artificial Sequence
  Description of Artificial Sequence: Synthetic oligonucleotide
uaauccgcauaguccuuca

SEQ ID NO: 2246201 - RNA, 19 nt, Artificial Sequence
  Description of Artificial Sequence: Synthetic oligonucleotide
augcaugcuguauagccuu

SEQ ID NO: 2246202 - RNA, 19 nt, Artificial Sequence
  Description of Artificial Sequence: Synthetic oligonucleotide
agaucucucuugcuggcau

SEQ ID NO: 2246203 - RNA, 19 nt, Artificial Sequence
  Description of Artificial Sequence: Synthetic oligonucleotide
caguuaagucugugcacgc

SEQ ID NO: 2246204 - RNA, 19 nt, Artificial Sequence
  Description of Artificial Sequence: Synthetic oligonucleotide
uccaaccuggaucuuucua

SEQ ID NO: 2246205 - RNA, 19 nt, Artificial Sequence
  Description of Artificial Sequence: Synthetic oligonucleotide
cucucuugcuggcauucag

SEQ ID NO: 2246206 - RNA, 19 nt, Artificial Sequence
  Description of Artificial Sequence: Synthetic oligonucleotide
aggucauguagugacuugu

SEQ ID NO: 2246207 - RNA, 19 nt, Artificial Sequence
  Description of Artificial Sequence: Synthetic oligonucleotide
acgcaauggauuugcuuga

SEQ ID NO: 2246208 - RNA, 19 nt, Artificial Sequence
  Description of Artificial Sequence: Synthetic oligonucleotide
aucaccaguuuaaucucag

SEQ ID NO: 2246209 - RNA, 19 nt, Artificial Sequence
  Description of Artificial Sequence: Synthetic oligonucleotide
cucaagacaauaccaguua

SEQ ID NO: 2246210 - RNA, 19 nt, Artificial Sequence
  Description of Artificial Sequence: Synthetic oligonucleotide
uaagaacaauugucuuccu

SEQ ID NO: 2246211 - RNA, 19 nt, Artificial Sequence
  Description of Artificial Sequence: Synthetic oligonucleotide
agagacucauaauccgcau

SEQ ID NO: 2246212 - RNA, 19 nt, Artificial Sequence
  Description of Artificial Sequence: Synthetic oligonucleotide
uucuagaugcaugcuguau

SEQ ID NO: 2246213 - RNA, 19 nt, Artificial Sequence
  Description of Artificial Sequence: Synthetic oligonucleotide
gccacugucauggugcuag

SEQ ID NO: 2246214 - RNA, 19 nt, Artificial Sequence
  Description of Artificial Sequence: Synthetic oligonucleotide
ugcaugcuguauagccuug

SEQ ID NO: 2246215 - RNA, 19 nt, Artificial Sequence
  Description of Artificial Sequence: Synthetic oligonucleotide
guccuuauuuucucugauc

SEQ ID NO: 2246216 - RNA, 19 nt, Artificial Sequence
  Description of Artificial Sequence: Synthetic oligonucleotide
cuuccuuuaguuccaaccu

SEQ ID NO: 2246217 - RNA, 19 nt, Artificial Sequence
  Description of Artificial Sequence: Synthetic oligonucleotide
acucucuguacucuaugua

SEQ ID NO: 2246218 - RNA, 19 nt, Artificial Sequence
  Description of Artificial Sequence: Synthetic oligonucleotide
uauuucgcguaagaacaau

SEQ ID NO: 2246219 - RNA, 19 nt, Artificial Sequence
  Description of Artificial Sequence: Synthetic oligonucleotide
gaaaguuguauguccuuau

SEQ ID NO: 2246220 - RNA, 19 nt, Artificial Sequence
  Description of Artificial Sequence: Synthetic oligonucleotide
uuccuagucuauguagaaa

SEQ ID NO: 2246221 - RNA, 19 nt, Artificial Sequence
  Description of Artificial Sequence: Synthetic oligonucleotide
ggauuaaucaccaguuuaa

SEQ ID NO: 2246222 - RNA, 19 nt, Artificial Sequence
  Description of Artificial Sequence: Synthetic oligonucleotide
uucggcacucucuguacuc

SEQ ID NO: 2246223 - RNA, 19 nt, Artificial Sequence
  Description of Artificial Sequence: Synthetic oligonucleotide
cguaagaacaauugucuuc

SEQ ID NO: 2246224 - RNA, 19 nt, Artificial Sequence
  Description of Artificial Sequence: Synthetic oligonucleotide
uagaugcaugcuguauagc

SEQ ID NO: 2246225 - RNA, 19 nt, Artificial Sequence
  Description of Artificial Sequence: Synthetic oligonucleotide
cuuguuuauucuguggucu

SEQ ID NO: 2246226 - RNA, 19 nt, Artificial Sequence
  Description of Artificial Sequence: Synthetic oligonucleotide
caugaguuuauaugcuucu

SEQ ID NO: 2246227 - RNA, 19 nt, Artificial Sequence
  Description of Artificial Sequence: Synthetic oligonucleotide
uggaaaguuguauguccuu

SEQ ID NO: 2246228 - RNA, 19 nt, Artificial Sequence
  Description of Artificial Sequence: Synthetic oligonucleotide
aguuaagucugugcacgca

SEQ ID NO: 2246229 - RNA, 19 nt, Artificial Sequence
  Description of Artificial Sequence: Synthetic oligonucleotide
uucucugucuucggcacuc

SEQ ID NO: 2246230 - RNA, 19 nt, Artificial Sequence
  Description of Artificial Sequence: Synthetic oligonucleotide
cuauguagaaagagcuuua

SEQ ID NO: 2246231 - RNA, 19 nt, Artificial Sequence
  Description of Artificial Sequence: Synthetic oligonucleotide
gcugaggcaugccucaggc

SEQ ID NO: 2246232 - RNA, 19 nt, Artificial Sequence
  Description of Artificial Sequence: Synthetic oligonucleotide
cuggaucuuucuagcguug

SEQ ID NO: 2246233 - RNA, 19 nt, Artificial Sequence
  Description of Artificial Sequence: Synthetic oligonucleotide
cauguagugacuuguuuau

SEQ ID NO: 2246234 - RNA, 19 nt, Artificial Sequence
  Description of Artificial Sequence: Synthetic oligonucleotide
ggccaccuaguucacuugg

SEQ ID NO: 2246235 - RNA, 19 nt, Artificial Sequence
  Description of Artificial Sequence: Synthetic oligonucleotide
uggaucuuucuagcguugu

SEQ ID NO: 2246236 - RNA, 19 nt, Artificial Sequence
  Description of Artificial Sequence: Synthetic oligonucleotide
gucuccuugcaugaaguuc

SEQ ID NO: 2246237 - RNA, 19 nt, Artificial Sequence
  Description of Artificial Sequence: Synthetic oligonucleotide
gaucuuucuagcguuguau

SEQ ID NO: 2246238 - RNA, 19 nt, Artificial Sequence
  Description of Artificial Sequence: Synthetic oligonucleotide
cucucuuaguaucaauucu

SEQ ID NO: 2246239 - RNA, 19 nt, Artificial Sequence
  Description of Artificial Sequence: Synthetic oligonucleotide
ucaugucauccaguagaca

SEQ ID NO: 2246240 - RNA, 19 nt, Artificial Sequence
  Description of Artificial Sequence: Synthetic oligonucleotide
caauccgaacagcacuguc

SEQ ID NO: 2246241 - RNA, 19 nt, Artificial Sequence
  Description of Artificial Sequence: Synthetic oligonucleotide
gauacggccuugcuucucu

SEQ ID NO: 2246242 - RNA, 19 nt, Artificial Sequence
  Description of Artificial Sequence: Synthetic oligonucleotide
ccucaggccaccuaguuca

SEQ ID NO: 2246243 - RNA, 19 nt, Artificial Sequence
  Description of Artificial Sequence: Synthetic oligonucleotide
uaaucucagugggcugcgg

SEQ ID NO: 2246244 - RNA, 19 nt, Artificial Sequence
  Description of Artificial Sequence: Synthetic oligonucleotide
auauuucugcuuaguauuu

SEQ ID NO: 2246245 - RNA, 19 nt, Artificial Sequence
  Description of Artificial Sequence: Synthetic oligonucleotide
uuauaugcuucuggaccuc

SEQ ID NO: 2246246 - RNA, 19 nt, Artificial Sequence
  Description of Artificial Sequence: Synthetic oligonucleotide
gugcacgcaauggauuugc

SEQ ID NO: 2246247 - RNA, 19 nt, Artificial Sequence
  Description of Artificial Sequence: Synthetic oligonucleotide
ggaagaugaacaauccgaa

SEQ ID NO: 2246248 - RNA, 19 nt, Artificial Sequence
  Description of Artificial Sequence: Synthetic oligonucleotide
cugaggcaugccucaggcc

SEQ ID NO: 2246249 - RNA, 19 nt, Artificial Sequence
  Description of Artificial Sequence: Synthetic oligonucleotide
ugcacgcaauggauuugcu

SEQ ID NO: 2246250 - RNA, 19 nt, Artificial Sequence
  Description of Artificial Sequence: Synthetic oligonucleotide
caaugcuagcugaggcaug

SEQ ID NO: 2246251 - RNA, 19 nt, Artificial Sequence
  Description of Artificial Sequence: Synthetic oligonucleotide
caccuguaggaagaugaac

SEQ ID NO: 2246252 - RNA, 19 nt, Artificial Sequence
  Description of Artificial Sequence: Synthetic oligonucleotide
guuccaaccuggaucuuuc

SEQ ID NO: 2246253 - RNA, 19 nt, Artificial Sequence
  Description of Artificial Sequence: Synthetic oligonucleotide
acucuauguacaccuccuu

SEQ ID NO: 2246254 - RNA, 19 nt, Artificial Sequence
  Description of Artificial Sequence: Synthetic oligonucleotide
auuucgcguaagaacaauu

SEQ ID NO: 2246255 - RNA, 19 nt, Artificial Sequence
  Description of Artificial Sequence: Synthetic oligonucleotide
cacuuagucuuuucuggaa

SEQ ID NO: 2246256 - RNA, 19 nt, Artificial Sequence
  Description of Artificial Sequence: Synthetic oligonucleotide
caccuaguucacuugggaa

SEQ ID NO: 2246257 - RNA, 19 nt, Artificial Sequence
  Description of Artificial Sequence: Synthetic oligonucleotide
cauggugcuaguguggaua

SEQ ID NO: 2246258 - RNA, 19 nt, Artificial Sequence
  Description of Artificial Sequence: Synthetic oligonucleotide
uggugcuaguguggauacg

SEQ ID NO: 2246259 - RNA, 19 nt, Artificial Sequence
  Description of Artificial Sequence: Synthetic oligonucleotide
uggauacggccuugcuucu

SEQ ID NO: 2246260 - RNA, 19 nt, Artificial Sequence
  Description of Artificial Sequence: Synthetic oligonucleotide
auauuucgcguaagaacaa

SEQ ID NO: 2246261 - RNA, 19 nt, Artificial Sequence
  Description of Artificial Sequence: Synthetic oligonucleotide
ugucuucggcacucucugu

SEQ ID NO: 2246262 - RNA, 19 nt, Artificial Sequence
  Description of Artificial Sequence: Synthetic oligonucleotide
cgcauaguccuucagugac

SEQ ID NO: 2246263 - RNA, 19 nt, Artificial Sequence
  Description of Artificial Sequence: Synthetic oligonucleotide
aggccaccuaguucacuug

SEQ ID NO: 2246264 - RNA, 19 nt, Artificial Sequence
  Description of Artificial Sequence: Synthetic oligonucleotide
guauguccuuauuuucucu

SEQ ID NO: 2246265 - RNA, 19 nt, Artificial Sequence
  Description of Artificial Sequence: Synthetic oligonucleotide
augcuagcugaggcaugcc

SEQ ID NO: 2246266 - RNA, 19 nt, Artificial Sequence
  Description of Artificial Sequence: Synthetic oligonucleotide
gucuucggcacucucugua

SEQ ID NO: 2246267 - RNA, 19 nt, Artificial Sequence
  Description of Artificial Sequence: Synthetic oligonucleotide
uccaguagacagucuccuu

SEQ ID NO: 2246268 - RNA, 19 nt, Artificial Sequence
  Description of Artificial Sequence: Synthetic oligonucleotide
aggcaugccucaggccacc

SEQ ID NO: 2246269 - RNA, 19 nt, Artificial Sequence
  Description of Artificial Sequence: Synthetic oligonucleotide
acaauccgaacagcacugu

SEQ ID NO: 2246270 - RNA, 19 nt, Artificial Sequence
  Description of Artificial Sequence: Synthetic oligonucleotide
ugccucaggccaccuaguu

SEQ ID NO: 2246271 - RNA, 19 nt, Artificial Sequence
  Description of Artificial Sequence: Synthetic oligonucleotide
auaguccuucagugacugu

SEQ ID NO: 2246272 - RNA, 19 nt, Artificial Sequence
  Description of Artificial Sequence: Synthetic oligonucleotide
uucuagcguuguaucuuuu

SEQ ID NO: 2246273 - RNA, 19 nt, Artificial Sequence
  Description of Artificial Sequence: Synthetic oligonucleotide
gcacuuagucuuuucugga

SEQ ID NO: 2246274 - RNA, 19 nt, Artificial Sequence
  Description of Artificial Sequence: Synthetic oligonucleotide
guguuucaaaaugccaucu

SEQ ID NO: 2246275 - RNA, 19 nt, Artificial Sequence
  Description of Artificial Sequence: Synthetic oligonucleotide
auacggccuugcuucucug

SEQ ID NO: 2246276 - RNA, 19 nt, Artificial Sequence
  Description of Artificial Sequence: Synthetic oligonucleotide
ucauggugcuaguguggau

SEQ ID NO: 2246277 - RNA, 19 nt, Artificial Sequence
  Description of Artificial Sequence: Synthetic oligonucleotide
ggaaaccauuuccacuaga

SEQ ID NO: 2246278 - RNA, 19 nt, Artificial Sequence
  Description of Artificial Sequence: Synthetic oligonucleotide
agcauacugcugguacaug

SEQ ID NO: 2246279 - RNA, 19 nt, Artificial Sequence
  Description of Artificial Sequence: Synthetic oligonucleotide
gugcuaguguggauacggc

SEQ ID NO: 2246280 - RNA, 19 nt, Artificial Sequence
  Description of Artificial Sequence: Synthetic oligonucleotide
ggaaaguuguauguccuua

SEQ ID NO: 2246281 - RNA, 19 nt, Artificial Sequence
  Description of Artificial Sequence: Synthetic oligonucleotide
uaguguggauacggccuug

SEQ ID NO: 2246282 - RNA, 19 nt, Artificial Sequence
  Description of Artificial Sequence: Synthetic oligonucleotide
ccgaacagcacugucugug

SEQ ID NO: 2246283 - RNA, 19 nt, Artificial Sequence
  Description of Artificial Sequence: Synthetic oligonucleotide
aucuuuugguuaguuucuu

SEQ ID NO: 2246284 - RNA, 19 nt, Artificial Sequence
  Description of Artificial Sequence: Synthetic oligonucleotide
guggaaaguuguauguccu

SEQ ID NO: 2246285 - RNA, 19 nt, Artificial Sequence
  Description of Artificial Sequence: Synthetic oligonucleotide
auaugcuucuggaccucca

SEQ ID NO: 2246286 - RNA, 19 nt, Artificial Sequence
  Description of Artificial Sequence: Synthetic oligonucleotide
gaggcaugccucaggccac

SEQ ID NO: 2246287 - RNA, 19 nt, Artificial Sequence
  Description of Artificial Sequence: Synthetic oligonucleotide
agcuccacuugcucucuua

SEQ ID NO: 2246288 - RNA, 19 nt, Artificial Sequence
  Description of Artificial Sequence: Synthetic oligonucleotide
guagacagucuccuugcau

SEQ ID NO: 2246289 - RNA, 19 nt, Artificial Sequence
  Description of Artificial Sequence: Synthetic oligonucleotide
ggcagaacugccacuguca

SEQ ID NO: 2246290 - RNA, 19 nt, Artificial Sequence
  Description of Artificial Sequence: Synthetic oligonucleotide
ccuucaaauuucaugaguu

SEQ ID NO: 2246291 - RNA, 19 nt, Artificial Sequence
  Description of Artificial Sequence: Synthetic oligonucleotide
gucauguagugacuuguuu

SEQ ID NO: 2246292 - RNA, 19 nt, Artificial Sequence
  Description of Artificial Sequence: Synthetic oligonucleotide
cagucuccuugcaugaagu

SEQ ID NO: 2246293 - RNA, 19 nt, Artificial Sequence
  Description of Artificial Sequence: Synthetic oligonucleotide
cuuuaguuccaaccuggau

SEQ ID NO: 2246294 - RNA, 19 nt, Artificial Sequence
  Description of Artificial Sequence: Synthetic oligonucleotide
ccuagucuauguagaaaga

SEQ ID NO: 2246295 - RNA, 19 nt, Artificial Sequence
  Description of Artificial Sequence: Synthetic oligonucleotide
guucuguggaaaguuguau

SEQ ID NO: 2246296 - RNA, 19 nt, Artificial Sequence
  Description of Artificial Sequence: Synthetic oligonucleotide
gcuagcugaggcaugccuc

SEQ ID NO: 2246297 - RNA, 19 nt, Artificial Sequence
  Description of Artificial Sequence: Synthetic oligonucleotide
cuucuagaugcaugcugua

SEQ ID NO: 2246298 - RNA, 19 nt, Artificial Sequence
  Description of Artificial Sequence: Synthetic oligonucleotide
ccuguaggaagaugaacaa

SEQ ID NO: 2246299 - RNA, 19 nt, Artificial Sequence
  Description of Artificial Sequence: Synthetic oligonucleotide
acaccuguaggaagaugaa

SEQ ID NO: 2246300 - RNA, 19 nt, Artificial Sequence
  Description of Artificial Sequence: Synthetic oligonucleotide
gcuaguguggauacggccu

SEQ ID NO: 2246301 - RNA, 19 nt, Artificial Sequence
  Description of Artificial Sequence: Synthetic oligonucleotide
gccaccuaguucacuuggg

SEQ ID NO: 2246302 - RNA, 19 nt, Artificial Sequence
  Description of Artificial Sequence: Synthetic oligonucleotide
agccuugcacguaacuuuu

SEQ ID NO: 2246303 - RNA, 19 nt, Artificial Sequence
  Description of Artificial Sequence: Synthetic oligonucleotide
guauagccuugcacguaac

SEQ ID NO: 2246304 - RNA, 19 nt, Artificial Sequence
  Description of Artificial Sequence: Synthetic oligonucleotide
cuguaucaugucauccagu

SEQ ID NO: 2246305 - RNA, 19 nt, Artificial Sequence
  Description of Artificial Sequence: Synthetic oligonucleotide
ccuauuucucaagacaaua

SEQ ID NO: 2246306 - RNA, 19 nt, Artificial Sequence
  Description of Artificial Sequence: Synthetic oligonucleotide
gcguuguaucuuuugguua

SEQ ID NO: 2246307 - RNA, 19 nt, Artificial Sequence
  Description of Artificial Sequence: Synthetic oligonucleotide
gacucauaauccgcauagu

SEQ ID NO: 2246308 - RNA, 19 nt, Artificial Sequence
  Description of Artificial Sequence: Synthetic oligonucleotide
gacagucuccuugcaugaa

SEQ ID NO: 2246309 - RNA, 19 nt, Artificial Sequence
  Description of Artificial Sequence: Synthetic oligonucleotide
agaguccaagaaacuguua

SEQ ID NO: 2246310 - RNA, 19 nt, Artificial Sequence
  Description of Artificial Sequence: Synthetic oligonucleotide
cgcguaagaacaauugucu

SEQ ID NO: 2246311 - RNA, 19 nt, Artificial Sequence
  Description of Artificial Sequence: Synthetic oligonucleotide
ggaucuuucuagcguugua

SEQ ID NO: 2246312 - RNA, 19 nt, Artificial Sequence
  Description of Artificial Sequence: Synthetic oligonucleotide
gccucaggccaccuaguuc

SEQ ID NO: 2246313 - RNA, 19 nt, Artificial Sequence
  Description of Artificial Sequence: Synthetic oligonucleotide
ccuuuaguuccaaccugga

SEQ ID NO: 2246314 - RNA, 19 nt, Artificial Sequence
  Description of Artificial Sequence: Synthetic oligonucleotide
gaucucucuugcuggcauu

SEQ ID NO: 2246315 - RNA, 19 nt, Artificial Sequence
  Description of Artificial Sequence: Synthetic oligonucleotide
ccaccuaguucacuuggga

SEQ ID NO: 2246316 - RNA, 19 nt, Artificial Sequence
  Description of Artificial Sequence: Synthetic oligonucleotide
cuaguguggauacggccuu

SEQ ID NO: 2246317 - RNA, 19 nt, Artificial Sequence
  Description of Artificial Sequence: Synthetic oligonucleotide
cuucggcacucucuguacu

SEQ ID NO: 2246318 - RNA, 19 nt, Artificial Sequence
  Description of Artificial Sequence: Synthetic oligonucleotide
caaggucauguagugacuu

SEQ ID NO: 2246319 - RNA, 19 nt, Artificial Sequence
  Description of Artificial Sequence: Synthetic oligonucleotide
cuguauagccuugcacgua

SEQ ID NO: 2246320 - RNA, 19 nt, Artificial Sequence
  Description of Artificial Sequence: Synthetic oligonucleotide
caucuucuaaaugcagcau

SEQ ID NO: 2246321 - RNA, 19 nt, Artificial Sequence
  Description of Artificial Sequence: Synthetic oligonucleotide
augccucaggccaccuagu

SEQ ID NO: 2246322 - RNA, 19 nt, Artificial Sequence
  Description of Artificial Sequence: Synthetic oligonucleotide
cauaauccgcauaguccuu

SEQ ID NO: 2246323 - RNA, 19 nt, Artificial Sequence
  Description of Artificial Sequence: Synthetic oligonucleotide
cuaguucacuugggaaaua

SEQ ID NO: 2246324 - RNA, 19 nt, Artificial Sequence
  Description of Artificial Sequence: Synthetic oligonucleotide
gcguaagaacaauugucuu

SEQ ID NO: 2246325 - RNA, 19 nt, Artificial Sequence
  Description of Artificial Sequence: Synthetic oligonucleotide
ccgcauaguccuucaguga

SEQ ID NO: 2246326 - RNA, 19 nt, Artificial Sequence
  Description of Artificial Sequence: Synthetic oligonucleotide
ccuggaucuuucuagcguu

SEQ ID NO: 2246327 - RNA, 19 nt, Artificial Sequence
  Description of Artificial Sequence: Synthetic oligonucleotide
cagugggcugcggcagaac

SEQ ID NO: 2246328 - RNA, 19 nt, Artificial Sequence
  Description of Artificial Sequence: Synthetic oligonucleotide
cgcaauggauuugcuugag

SEQ ID NO: 2246329 - RNA, 19 nt, Artificial Sequence
  Description of Artificial Sequence: Synthetic oligonucleotide
ggauacggccuugcuucuc

SEQ ID NO: 2246330 - RNA, 19 nt, Artificial Sequence
  Description of Artificial Sequence: Synthetic oligonucleotide
cggcagaacugccacuguc

SEQ ID NO: 2246331 - RNA, 19 nt, Artificial Sequence
  Description of Artificial Sequence: Synthetic oligonucleotide
gcacgcaauggauuugcuu

SEQ ID NO: 2246332 - RNA, 19 nt, Artificial Sequence
  Description of Artificial Sequence: Synthetic oligonucleotide
gcuuaguauuugaaauuuu

SEQ ID NO: 2246333 - RNA, 19 nt, Artificial Sequence
  Description of Artificial Sequence: Synthetic oligonucleotide
ccuaguucacuugggaaau

SEQ ID NO: 2246334 - RNA, 19 nt, Artificial Sequence
  Description of Artificial Sequence: Synthetic oligonucleotide
gcauaguccuucagugacu

SEQ ID NO: 2246335 - RNA, 19 nt, Artificial Sequence
  Description of Artificial Sequence: Synthetic oligonucleotide
ccacuugcucucuuaguau

SEQ ID NO: 2246336 - RNA, 19 nt, Artificial Sequence
  Description of Artificial Sequence: Synthetic oligonucleotide
ggucauguagugacuuguu

SEQ ID NO: 2246337 - RNA, 19 nt, Artificial Sequence
  Description of Artificial Sequence: Synthetic oligonucleotide
cccuauucuucagcugaga

SEQ ID NO: 2246338 - RNA, 19 nt, Artificial Sequence
  Description of Artificial Sequence: Synthetic oligonucleotide
gcacugucugugguauuua

SEQ ID NO: 2246339 - RNA, 19 nt, Artificial Sequence
  Description of Artificial Sequence: Synthetic oligonucleotide
ggcacucucuguacucuau

SEQ ID NO: 2246340 - RNA, 19 nt, Artificial Sequence
  Description of Artificial Sequence: Synthetic oligonucleotide
cccuguucuguggaaaguu

SEQ ID NO: 2246341 - RNA, 19 nt, Artificial Sequence
  Description of Artificial Sequence: Synthetic oligonucleotide
gcggcagaacugccacugu

SEQ ID NO: 2246342 - RNA, 19 nt, Artificial Sequence
  Description of Artificial Sequence: Synthetic oligonucleotide
cggcacucucuguacucua

SEQ ID NO: 2246343 - RNA, 19 nt, Artificial Sequence
  Description of Artificial Sequence: Synthetic oligonucleotide
ggcaugccucaggccaccu

SEQ ID NO: 2246344 - RNA, 19 nt, Artificial Sequence
  Description of Artificial Sequence: Synthetic oligonucleotide
aauauaagauaacaugaac

SEQ ID NO: 2246345 - RNA, 19 nt, Artificial Sequence
  Description of Artificial Sequence: Synthetic oligonucleotide
ugaaauauaagauaacaug

SEQ ID NO: 2246346 - RNA, 19 nt, Artificial Sequence
  Description of Artificial Sequence: Synthetic oligonucleotide
aaugcugccagauucaaug

SEQ ID NO: 2246347 - RNA, 19 nt, Artificial Sequence
  Description of Artificial Sequence: Synthetic oligonucleotide
auucuuuugauccagguca

SEQ ID NO: 2246348 - RNA, 19 nt, Artificial Sequence
  Description of Artificial Sequence: Synthetic oligonucleotide
uuuaucuaugcccucagcc

SEQ ID NO: 2246349 - RNA, 19 nt, Artificial Sequence
  Description of Artificial Sequence: Synthetic oligonucleotide
aagaucuggccuuaaaauc

SEQ ID NO: 2246350 - RNA, 19 nt, Artificial Sequence
  Description of Artificial Sequence: Synthetic oligonucleotide
uguucucgaacucugagag

SEQ ID NO: 2246351 - RNA, 19 nt, Artificial Sequence
  Description of Artificial Sequence: Synthetic oligonucleotide
auccacaaauaucaggucc

SEQ ID NO: 2246352 - RNA, 19 nt, Artificial Sequence
  Description of Artificial Sequence: Synthetic oligonucleotide
acuuucuugauaucaaauc

SEQ ID NO: 2246353 - RNA, 19 nt, Artificial Sequence
  Description of Artificial Sequence: Synthetic oligonucleotide
aaauccacaaauaucaggu

SEQ ID NO: 2246354 - RNA, 19 nt, Artificial Sequence
  Description of Artificial Sequence: Synthetic oligonucleotide
aguuaucaaagaugguucc

SEQ ID NO: 2246355 - RNA, 19 nt, Artificial Sequence
  Description of Artificial Sequence: Synthetic oligonucleotide
aaagaucuggccuuaaaau

SEQ ID NO: 2246356 - RNA, 19 nt, Artificial Sequence
  Description of Artificial Sequence: Synthetic oligonucleotide
aagccaucgaccuugcauc

SEQ ID NO: 2246357 - RNA, 19 nt, Artificial Sequence
  Description of Artificial Sequence: Synthetic oligonucleotide
aaaagugcuuuucccaauc

SEQ ID NO: 2246358 - RNA, 19 nt, Artificial Sequence
  Description of Artificial Sequence: Synthetic oligonucleotide
caugauguaguacugagac

SEQ ID NO: 2246359 - RNA, 19 nt, Artificial Sequence
  Description of Artificial Sequence: Synthetic oligonucleotide
aaacuucccuaccagcagc

SEQ ID NO: 2246360 - RNA, 19 nt, Artificial Sequence
  Description of Artificial Sequence: Synthetic oligonucleotide
uauaagauaacaugaacuu

SEQ ID NO: 2246361 - RNA, 19 nt, Artificial Sequence
  Description of Artificial Sequence: Synthetic oligonucleotide
aaagugcuuuucccaaucc

SEQ ID NO: 2246362 - RNA, 19 nt, Artificial Sequence
  Description of Artificial Sequence: Synthetic oligonucleotide
auuugaaugauacugguuu

SEQ ID NO: 2246363 - RNA, 19 nt, Artificial Sequence
  Description of Artificial Sequence: Synthetic oligonucleotide
aaguuaucaaagaugguuc

SEQ ID NO: 2246364 - RNA, 19 nt, Artificial Sequence
  Description of Artificial Sequence: Synthetic oligonucleotide
aucaaauccacaaauauca

SEQ ID NO: 2246365 - RNA, 19 nt, Artificial Sequence
  Description of Artificial Sequence: Synthetic oligonucleotide
uuuucaccucguaagaaag

SEQ ID NO: 2246366 - RNA, 19 nt, Artificial Sequence
  Description of Artificial Sequence: Synthetic oligonucleotide
uuguauggcauccaucucc

SEQ ID NO: 2246367 - RNA, 19 nt, Artificial Sequence
  Description of Artificial Sequence: Synthetic oligonucleotide
gucguacugagucagauag

SEQ ID NO: 2246368 - RNA, 19 nt, Artificial Sequence
  Description of Artificial Sequence: Synthetic oligonucleotide
aaucgcuuggcuugcuggc

SEQ ID NO: 2246369 - RNA, 19 nt, Artificial Sequence
  Description of Artificial Sequence: Synthetic oligonucleotide
agauucaauggacuggccg

SEQ ID NO: 2246370 - RNA, 19 nt, Artificial Sequence
  Description of Artificial Sequence: Synthetic oligonucleotide
ugaaacuucccuaccagca

SEQ ID NO: 2246371 - RNA, 19 nt, Artificial Sequence
  Description of Artificial Sequence: Synthetic oligonucleotide
auauaagauaacaugaacu

SEQ ID NO: 2246372 - RNA, 19 nt, Artificial Sequence
  Description of Artificial Sequence: Synthetic oligonucleotide
uaucaaauccacaaauauc

SEQ ID NO: 2246373 - RNA, 19 nt, Artificial Sequence
  Description of Artificial Sequence: Synthetic oligonucleotide
ugagaggucguacugaguc

SEQ ID NO: 2246374 - RNA, 19 nt, Artificial Sequence
  Description of Artificial Sequence: Synthetic oligonucleotide
cuugauaucaaauccacaa

SEQ ID NO: 2246375 - RNA, 19 nt, Artificial Sequence
  Description of Artificial Sequence: Synthetic oligonucleotide
aauccacaaauaucagguc

SEQ ID NO: 2246376 - RNA, 19 nt, Artificial Sequence
  Description of Artificial Sequence: Synthetic oligonucleotide
uuuugaaauauaagauaac

SEQ ID NO: 2246377 - RNA, 19 nt, Artificial Sequence
  Description of Artificial Sequence: Synthetic oligonucleotide
acaugaacuuucuugauau

SEQ ID NO: 2246378 - RNA, 19 nt, Artificial Sequence
  Description of Artificial Sequence: Synthetic oligonucleotide
aauaucagguccaaacaug

SEQ ID NO: 2246379 - RNA, 19 nt, Artificial Sequence
  Description of Artificial Sequence: Synthetic oligonucleotide
uguggaaucugcugaaaug

SEQ ID NO: 2246380 - RNA, 19 nt, Artificial Sequence
  Description of Artificial Sequence: Synthetic oligonucleotide
uguaguacugagacuuucc

SEQ ID NO: 2246381 - RNA, 19 nt, Artificial Sequence
  Description of Artificial Sequence: Synthetic oligonucleotide
uuauuugaaugauacuggu

SEQ ID NO: 2246382 - RNA, 19 nt, Artificial Sequence
  Description of Artificial Sequence: Synthetic oligonucleotide
aggggaacaccuuugaugu

SEQ ID NO: 2246383 - RNA, 19 nt, Artificial Sequence
  Description of Artificial Sequence: Synthetic oligonucleotide
gauggcuugaagcucgcag

SEQ ID NO: 2246384 - RNA, 19 nt, Artificial Sequence
  Description of Artificial Sequence: Synthetic oligonucleotide
aaucaggguguagaggugg

SEQ ID NO: 2246385 - RNA, 19 nt, Artificial Sequence
  Description of Artificial Sequence: Synthetic oligonucleotide
aaauauaagauaacaugaa

SEQ ID NO: 2246386 - RNA, 19 nt, Artificial Sequence
  Description of Artificial Sequence: Synthetic oligonucleotide
uuaucuaugcccucagccu

SEQ ID NO: 2246387 - RNA, 19 nt, Artificial Sequence
  Description of Artificial Sequence: Synthetic oligonucleotide
gaggggaacaccuuugaug

SEQ ID NO: 2246388 - RNA, 19 nt, Artificial Sequence
  Description of Artificial Sequence: Synthetic oligonucleotide
gaucaggaaguuaucaaag

SEQ ID NO: 2246389 - RNA, 19 nt, Artificial Sequence
  Description of Artificial Sequence: Synthetic oligonucleotide
agucccuagacucagcuga

SEQ ID NO: 2246390 - RNA, 19 nt, Artificial Sequence
  Description of Artificial Sequence: Synthetic oligonucleotide
agucagauaguuggcaggc

SEQ ID NO: 2246391 - RNA, 19 nt, Artificial Sequence
  Description of Artificial Sequence: Synthetic oligonucleotide
ucaggaaguuaucaaagau

SEQ ID NO: 2246392 - RNA, 19 nt, Artificial Sequence
  Description of Artificial Sequence: Synthetic oligonucleotide
ugagucagauaguuggcag

SEQ ID NO: 2246393 - RNA, 19 nt, Artificial Sequence
  Description of Artificial Sequence: Synthetic oligonucleotide
guaguacugagacuuuccg

SEQ ID NO: 2246394 - RNA, 19 nt, Artificial Sequence
  Description of Artificial Sequence: Synthetic oligonucleotide
aguacugagacuuuccguu

SEQ ID NO: 2246395 - RNA, 19 nt, Artificial Sequence
  Description of Artificial Sequence: Synthetic oligonucleotide
uucuguucgugcuucacug

SEQ ID NO: 2246396 - RNA, 19 nt, Artificial Sequence
  Description of Artificial Sequence: Synthetic oligonucleotide
agucauacucaaugcugcc

SEQ ID NO: 2246397 - RNA, 19 nt, Artificial Sequence
  Description of Artificial Sequence: Synthetic oligonucleotide
uauucuuuugauccagguc

SEQ ID NO: 2246398 - RNA, 19 nt, Artificial Sequence
  Description of Artificial Sequence: Synthetic oligonucleotide
ugaucaggaaguuaucaaa

SEQ ID NO: 2246399 - RNA, 19 nt, Artificial Sequence
  Description of Artificial Sequence: Synthetic oligonucleotide
aacaugaacuuucuugaua

SEQ ID NO: 2246400 - RNA, 19 nt, Artificial Sequence
  Description of Artificial Sequence: Synthetic oligonucleotide
ugauguagccaccaccaca

SEQ ID NO: 2246401 - RNA, 19 nt, Artificial Sequence
  Description of Artificial Sequence: Synthetic oligonucleotide
acacaucuuuaucuaugcc

SEQ ID NO: 2246402 - RNA, 19 nt, Artificial Sequence
  Description of Artificial Sequence: Synthetic oligonucleotide
guuccaaucgcuuggcuug

SEQ ID NO: 2246403 - RNA, 19 nt, Artificial Sequence
  Description of Artificial Sequence: Synthetic oligonucleotide
gagucagauaguuggcagg

SEQ ID NO: 2246404 - RNA, 19 nt, Artificial Sequence
  Description of Artificial Sequence: Synthetic oligonucleotide
cucguaagaaagaucuggc

SEQ ID NO: 2246405 - RNA, 19 nt, Artificial Sequence
  Description of Artificial Sequence: Synthetic oligonucleotide
cuuaaaaucaggguguaga

SEQ ID NO: 2246406 - RNA, 19 nt, Artificial Sequence
  Description of Artificial Sequence: Synthetic oligonucleotide
gaaacuucccuaccagcag

SEQ ID NO: 2246407 - RNA, 19 nt, Artificial Sequence
  Description of Artificial Sequence: Synthetic oligonucleotide
cuugcuggcgccugcaucc

SEQ ID NO: 2246408 - RNA, 19 nt, Artificial Sequence
  Description of Artificial Sequence: Synthetic oligonucleotide
uguguacuggaucaccaga

SEQ ID NO: 2246409 - RNA, 19 nt, Artificial Sequence
  Description of Artificial Sequence: Synthetic oligonucleotide
gacggcaccaauguucucg

SEQ ID NO: 2246410 - RNA, 19 nt, Artificial Sequence
  Description of Artificial Sequence: Synthetic oligonucleotide
uugauaucaaauccacaaa

SEQ ID NO: 2246411 - RNA, 19 nt, Artificial Sequence
  Description of Artificial Sequence: Synthetic oligonucleotide
guagaaucggcuguucugg

SEQ ID NO: 2246412 - RNA, 19 nt, Artificial Sequence
  Description of Artificial Sequence: Synthetic oligonucleotide
cagucauacucaaugcugc

SEQ ID NO: 2246413 - RNA, 19 nt, Artificial Sequence
  Description of Artificial Sequence: Synthetic oligonucleotide
ucguaagaaagaucuggcc

SEQ ID NO: 2246414 - RNA, 19 nt, Artificial Sequence
  Description of Artificial Sequence: Synthetic oligonucleotide
ugugaucaggaaguuauca

SEQ ID NO: 2246415 - RNA, 19 nt, Artificial Sequence
  Description of Artificial Sequence: Synthetic oligonucleotide
uaguuggcaggcuucaucu

SEQ ID NO: 2246416 - RNA, 19 nt, Artificial Sequence
  Description of Artificial Sequence: Synthetic oligonucleotide
acuauaguucaccuugccu

SEQ ID NO: 2246417 - RNA, 19 nt, Artificial Sequence
  Description of Artificial Sequence: Synthetic oligonucleotide
uccaccugaucccaguccc

SEQ ID NO: 2246418 - RNA, 19 nt, Artificial Sequence
  Description of Artificial Sequence: Synthetic oligonucleotide
ucuugauaucaaauccaca

SEQ ID NO: 2246419 - RNA, 19 nt, Artificial Sequence
  Description of Artificial Sequence: Synthetic oligonucleotide
uucuuuugauccaggucag

SEQ ID NO: 2246420 - RNA, 19 nt, Artificial Sequence
  Description of Artificial Sequence: Synthetic oligonucleotide
cacagcuccagaccgacgg

SEQ ID NO: 2246421 - RNA, 19 nt, Artificial Sequence
  Description of Artificial Sequence: Synthetic oligonucleotide
ugagacuuuccguucauau

SEQ ID NO: 2246422 - RNA, 19 nt, Artificial Sequence
  Description of Artificial Sequence: Synthetic oligonucleotide
aagugcuuuucccaauccu

SEQ ID NO: 2246423 - RNA, 19 nt, Artificial Sequence
  Description of Artificial Sequence: Synthetic oligonucleotide
gaagcucgcagagauggcg

SEQ ID NO: 2246424 - RNA, 19 nt, Artificial Sequence
  Description of Artificial Sequence: Synthetic oligonucleotide
cauauucuuuugauccagg

SEQ ID NO: 2246425 - RNA, 19 nt, Artificial Sequence
  Description of Artificial Sequence: Synthetic oligonucleotide
auauucuuuugauccaggu

SEQ ID NO: 2246426 - RNA, 19 nt, Artificial Sequence
  Description of Artificial Sequence: Synthetic oligonucleotide
aacaccuuugauguagcca

SEQ ID NO: 2246427 - RNA, 19 nt, Artificial Sequence
  Description of Artificial Sequence: Synthetic oligonucleotide
agcucacuguuccaaucgc

SEQ ID NO: 2246428 - RNA, 19 nt, Artificial Sequence
  Description of Artificial Sequence: Synthetic oligonucleotide
uugcugauggcuugaagcu

SEQ ID NO: 2246429 - RNA, 19 nt, Artificial Sequence
  Description of Artificial Sequence: Synthetic oligonucleotide
caaucgcuuggcuugcugg

SEQ ID NO: 2246430 - RNA, 19 nt, Artificial Sequence
  Description of Artificial Sequence: Synthetic oligonucleotide
gcagagauggcguagaauc

SEQ ID NO: 2246431 - RNA, 19 nt, Artificial Sequence
  Description of Artificial Sequence: Synthetic oligonucleotide
uccguucauauucuuuuga

SEQ ID NO: 2246432 - RNA, 19 nt, Artificial Sequence
  Description of Artificial Sequence: Synthetic oligonucleotide
ugggcuuugucacuuucca

SEQ ID NO: 2246433 - RNA, 19 nt, Artificial Sequence
  Description of Artificial Sequence: Synthetic oligonucleotide
agagauggcguagaaucgg

SEQ ID NO: 2246434 - RNA, 19 nt, Artificial Sequence
  Description of Artificial Sequence: Synthetic oligonucleotide
acaucuuuaucuaugcccu

SEQ ID NO: 2246435 - RNA, 19 nt, Artificial Sequence
  Description of Artificial Sequence: Synthetic oligonucleotide
uggaaucugcugaaauggc

SEQ ID NO: 2246436 - RNA, 19 nt, Artificial Sequence
  Description of Artificial Sequence: Synthetic oligonucleotide
uuucuggacccuuagucuc

SEQ ID NO: 2246437 - RNA, 19 nt, Artificial Sequence
  Description of Artificial Sequence: Synthetic oligonucleotide
agaucuggccuuaaaauca

SEQ ID NO: 2246438 - RNA, 19 nt, Artificial Sequence
  Description of Artificial Sequence: Synthetic oligonucleotide
ucagaggggaacaccuuug

SEQ ID NO: 2246439 - RNA, 19 nt, Artificial Sequence
  Description of Artificial Sequence: Synthetic oligonucleotide
gcgacuauaguucaccuug

SEQ ID NO: 2246440 - RNA, 19 nt, Artificial Sequence
  Description of Artificial Sequence: Synthetic oligonucleotide
aauuuucaccucguaagaa

SEQ ID NO: 2246441 - RNA, 19 nt, Artificial Sequence
  Description of Artificial Sequence: Synthetic oligonucleotide
cacuguuccaaucgcuugg

SEQ ID NO: 2246442 - RNA, 19 nt, Artificial Sequence
  Description of Artificial Sequence: Synthetic oligonucleotide
acaguccaucuucuguucg

SEQ ID NO: 2246443 - RNA, 19 nt, Artificial Sequence
  Description of Artificial Sequence: Synthetic oligonucleotide
ugccagauucaauggacug

SEQ ID NO: 2246444 - RNA, 19 nt, Artificial Sequence
  Description of Artificial Sequence: Synthetic oligonucleotide
aagauaacaugaacuuucu

SEQ ID NO: 2246445 - RNA, 19 nt, Artificial Sequence
  Description of Artificial Sequence: Synthetic oligonucleotide
ugugacugugaaacuuccc

SEQ ID NO: 2246446 - RNA, 19 nt, Artificial Sequence
  Description of Artificial Sequence: Synthetic oligonucleotide
ugggugaagccaucgaccu

SEQ ID NO: 2246447 - RNA, 19 nt, Artificial Sequence
  Description of Artificial Sequence: Synthetic oligonucleotide
ucagauaguuggcaggcuu

SEQ ID NO: 2246448 - RNA, 19 nt, Artificial Sequence
  Description of Artificial Sequence: Synthetic oligonucleotide
ucacuguuccaaucgcuug

SEQ ID NO: 2246449 - RNA, 19 nt, Artificial Sequence
  Description of Artificial Sequence: Synthetic oligonucleotide
augguuccagaucucaccu

SEQ ID NO: 2246450 - RNA, 19 nt, Artificial Sequence
  Description of Artificial Sequence: Synthetic oligonucleotide
gacuauaguucaccuugcc

SEQ ID NO: 2246451 - RNA, 19 nt, Artificial Sequence
  Description of Artificial Sequence: Synthetic oligonucleotide
uacugagacuuuccguuca

SEQ ID NO: 2246452 - RNA, 19 nt, Artificial Sequence
  Description of Artificial Sequence: Synthetic oligonucleotide
ucgugcuucacuguguacu

SEQ ID NO: 2246453 - RNA, 19 nt, Artificial Sequence
  Description of Artificial Sequence: Synthetic oligonucleotide
gauucaauggacuggccgu

SEQ ID NO: 2246454 - RNA, 19 nt, Artificial Sequence
  Description of Artificial Sequence: Synthetic oligonucleotide
uaucuaugcccucagccuu

SEQ ID NO: 2246455 - RNA, 19 nt, Artificial Sequence
  Description of Artificial Sequence: Synthetic oligonucleotide
aagaugguuccagaucuca

SEQ ID NO: 2246456 - RNA, 19 nt, Artificial Sequence
  Description of Artificial Sequence: Synthetic oligonucleotide
ugaaauggcugcugugacu

SEQ ID NO: 2246457 - RNA, 19 nt, Artificial Sequence
  Description of Artificial Sequence: Synthetic oligonucleotide
cuucccuaccagcagcucc

SEQ ID NO: 2246458 - RNA, 19 nt, Artificial Sequence
  Description of Artificial Sequence: Synthetic oligonucleotide
uagaaucggcuguucuggg

SEQ ID NO: 2246459 - RNA, 19 nt, Artificial Sequence
  Description of Artificial Sequence: Synthetic oligonucleotide
cagcucacuguuccaaucg

SEQ ID NO: 2246460 - RNA, 19 nt, Artificial Sequence
  Description of Artificial Sequence: Synthetic oligonucleotide
uaguacugagacuuuccgu

SEQ ID NO: 2246461 - RNA, 19 nt, Artificial Sequence
  Description of Artificial Sequence: Synthetic oligonucleotide
cucgaacucugagaggucg

SEQ ID NO: 2246462 - RNA, 19 nt, Artificial Sequence
  Description of Artificial Sequence: Synthetic oligonucleotide
auguucucgaacucugaga

SEQ ID NO: 2246463 - RNA, 19 nt, Artificial Sequence
  Description of Artificial Sequence: Synthetic oligonucleotide
gugacaucagguuccaguc

SEQ ID NO: 2246464 - RNA, 19 nt, Artificial Sequence
  Description of Artificial Sequence: Synthetic oligonucleotide
accgacggcaccaauguuc

SEQ ID NO: 2246465 - RNA, 19 nt, Artificial Sequence
  Description of Artificial Sequence: Synthetic oligonucleotide
aaagaugguuccagaucuc

SEQ ID NO: 2246466 - RNA, 19 nt, Artificial Sequence
  Description of Artificial Sequence: Synthetic oligonucleotide
agaccgacggcaccaaugu

SEQ ID NO: 2246467 - RNA, 19 nt, Artificial Sequence
  Description of Artificial Sequence: Synthetic oligonucleotide
uucccuaccagcagcuccu

SEQ ID NO: 2246468 - RNA, 19 nt, Artificial Sequence
  Description of Artificial Sequence: Synthetic oligonucleotide
uucaccucguaagaaagau

SEQ ID NO: 2246469 - RNA, 19 nt, Artificial Sequence
  Description of Artificial Sequence: Synthetic oligonucleotide
cuugcaucugauugucuuc

SEQ ID NO: 2246470 - RNA, 19 nt, Artificial Sequence
  Description of Artificial Sequence: Synthetic oligonucleotide
gaucucaccugccacagcu

SEQ ID NO: 2246471 - RNA, 19 nt, Artificial Sequence
  Description of Artificial Sequence: Synthetic oligonucleotide
cucagcugaugucuuuucc

SEQ ID NO: 2246472 - RNA, 19 nt, Artificial Sequence
  Description of Artificial Sequence: Synthetic oligonucleotide
caccucguaagaaagaucu

SEQ ID NO: 2246473 - RNA, 19 nt, Artificial Sequence
  Description of Artificial Sequence: Synthetic oligonucleotide
uguucgugcuucacugugu

SEQ ID NO: 2246474 - RNA, 19 nt, Artificial Sequence
  Description of Artificial Sequence: Synthetic oligonucleotide
auguaguacugagacuuuc

SEQ ID NO: 2246475 - RNA, 19 nt, Artificial Sequence
  Description of Artificial Sequence: Synthetic oligonucleotide
aauccugggcuuugucacu

SEQ ID NO: 2246476 - RNA, 19 nt, Artificial Sequence
  Description of Artificial Sequence: Synthetic oligonucleotide
guguacuggaucaccagag

SEQ ID NO: 2246477 - RNA, 19 nt, Artificial Sequence
  Description of Artificial Sequence: Synthetic oligonucleotide
gguuccagaucucaccugc

SEQ ID NO: 2246478 - RNA, 19 nt, Artificial Sequence
  Description of Artificial Sequence: Synthetic oligonucleotide
agaggucguacugagucag

SEQ ID NO: 2246479 - RNA, 19 nt, Artificial Sequence
  Description of Artificial Sequence: Synthetic oligonucleotide
guacuggaucaccagaguc

SEQ ID NO: 2246480 - RNA, 19 nt, Artificial Sequence
  Description of Artificial Sequence: Synthetic oligonucleotide
auaagauaacaugaacuuu

SEQ ID NO: 2246481 - RNA, 19 nt, Artificial Sequence
  Description of Artificial Sequence: Synthetic oligonucleotide
ugacugugaaacuucccua

SEQ ID NO: 2246482 - RNA, 19 nt, Artificial Sequence
  Description of Artificial Sequence: Synthetic oligonucleotide
cuuuaucuaugcccucagc

SEQ ID NO: 2246483 - RNA, 19 nt, Artificial Sequence
  Description of Artificial Sequence: Synthetic oligonucleotide
uccaucuccuuuucuggac

SEQ ID NO: 2246484 - RNA, 19 nt, Artificial Sequence
  Description of Artificial Sequence: Synthetic oligonucleotide
caauuuucaccucguaaga

SEQ ID NO: 2246485 - RNA, 19 nt, Artificial Sequence
  Description of Artificial Sequence: Synthetic oligonucleotide
cugaaauggcugcugugac

SEQ ID NO: 2246486 - RNA, 19 nt, Artificial Sequence
  Description of Artificial Sequence: Synthetic oligonucleotide
caucuccuuuucuggaccc

SEQ ID NO: 2246487 - RNA, 19 nt, Artificial Sequence
  Description of Artificial Sequence: Synthetic oligonucleotide
ccucguaagaaagaucugg

SEQ ID NO: 2246488 - RNA, 19 nt, Artificial Sequence
  Description of Artificial Sequence: Synthetic oligonucleotide
ggugaagccaucgaccuug

SEQ ID NO: 2246489 - RNA, 19 nt, Artificial Sequence
  Description of Artificial Sequence: Synthetic oligonucleotide
cugggcuuugucacuuucc

SEQ ID NO: 2246490 - RNA, 19 nt, Artificial Sequence
  Description of Artificial Sequence: Synthetic oligonucleotide
gaagccaucgaccuugcau

SEQ ID NO: 2246491 - RNA, 19 nt, Artificial Sequence
  Description of Artificial Sequence: Synthetic oligonucleotide
cuguguacuggaucaccag

SEQ ID NO: 2246492 - RNA, 19 nt, Artificial Sequence
  Description of Artificial Sequence: Synthetic oligonucleotide
aucaccagagucuucccuu

SEQ ID NO: 2246493 - RNA, 19 nt, Artificial Sequence
  Description of Artificial Sequence: Synthetic oligonucleotide
ucaccucguaagaaagauc

SEQ ID NO: 2246494 - RNA, 19 nt, Artificial Sequence
  Description of Artificial Sequence: Synthetic oligonucleotide
agaaagaucuggccuuaaa

SEQ ID NO: 2246495 - RNA, 19 nt, Artificial Sequence
  Description of Artificial Sequence: Synthetic oligonucleotide
cagauaguuggcaggcuuc

SEQ ID NO: 2246496 - RNA, 19 nt, Artificial Sequence
  Description of Artificial Sequence: Synthetic oligonucleotide
ugaucccagucccuagacu

SEQ ID NO: 2246497 - RNA, 19 nt, Artificial Sequence
  Description of Artificial Sequence: Synthetic oligonucleotide
gggaacaccuuugauguag

SEQ ID NO: 2246498 - RNA, 19 nt, Artificial Sequence
  Description of Artificial Sequence: Synthetic oligonucleotide
gugacugugaaacuucccu

SEQ ID NO: 2246499 - RNA, 19 nt, Artificial Sequence
  Description of Artificial Sequence: Synthetic oligonucleotide
aaaucaggguguagaggug

SEQ ID NO: 2246500 - RNA, 19 nt, Artificial Sequence
  Description of Artificial Sequence: Synthetic oligonucleotide
gccgucaauuuucaccucg

SEQ ID NO: 2246501 - RNA, 19 nt, Artificial Sequence
  Description of Artificial Sequence: Synthetic oligonucleotide
gugaucaggaaguuaucaa

SEQ ID NO: 2246502 - RNA, 19 nt, Artificial Sequence
  Description of Artificial Sequence: Synthetic oligonucleotide
agguggccuugccaaaccg

SEQ ID NO: 2246503 - RNA, 19 nt, Artificial Sequence
  Description of Artificial Sequence: Synthetic oligonucleotide
cuguucgugcuucacugug

SEQ ID NO: 2246504 - RNA, 19 nt, Artificial Sequence
  Description of Artificial Sequence: Synthetic oligonucleotide
cagaccgacggcaccaaug

SEQ ID NO: 2246505 - RNA, 19 nt, Artificial Sequence
  Description of Artificial Sequence: Synthetic oligonucleotide
gugggugaagccaucgacc

SEQ ID NO: 2246506 - RNA, 19 nt, Artificial Sequence
  Description of Artificial Sequence: Synthetic oligonucleotide
ucuguucgugcuucacugu

SEQ ID NO: 2246507 - RNA, 19 nt, Artificial Sequence
  Description of Artificial Sequence: Synthetic oligonucleotide
guaagaaagaucuggccuu

SEQ ID NO: 2246508 - RNA, 19 nt, Artificial Sequence
  Description of Artificial Sequence: Synthetic oligonucleotide
uaucagguccaaacaugau

SEQ ID NO: 2246509 - RNA, 19 nt, Artificial Sequence
  Description of Artificial Sequence: Synthetic oligonucleotide
gaggugggugaagccaucg

SEQ ID NO: 2246510 - RNA, 19 nt, Artificial Sequence
  Description of Artificial Sequence: Synthetic oligonucleotide
guagaggugggugaagcca

SEQ ID NO: 2246511 - RNA, 19 nt, Artificial Sequence
  Description of Artificial Sequence: Synthetic oligonucleotide
ucgcuuggcuugcuggcgc

SEQ ID NO: 2246512 - RNA, 19 nt, Artificial Sequence
  Description of Artificial Sequence: Synthetic oligonucleotide
gagauggcguagaaucggc

SEQ ID NO: 2246513 - RNA, 19 nt, Artificial Sequence
  Description of Artificial Sequence: Synthetic oligonucleotide
guuaucaaagaugguucca

SEQ ID NO: 2246514 - RNA, 19 nt, Artificial Sequence
  Description of Artificial Sequence: Synthetic oligonucleotide
uagccaccaccacagucca

SEQ ID NO: 2246515 - RNA, 19 nt, Artificial Sequence
  Description of Artificial Sequence: Synthetic oligonucleotide
acuguguacuggaucacca

SEQ ID NO: 2246516 - RNA, 19 nt, Artificial Sequence
  Description of Artificial Sequence: Synthetic oligonucleotide
ucgaacucugagaggucgu

SEQ ID NO: 2246517 - RNA, 19 nt, Artificial Sequence
  Description of Artificial Sequence: Synthetic oligonucleotide
ggcaccaauguucucgaac

SEQ ID NO: 2246518 - RNA, 19 nt, Artificial Sequence
  Description of Artificial Sequence: Synthetic oligonucleotide
gagaggucguacugaguca

SEQ ID NO: 2246519 - RNA, 19 nt, Artificial Sequence
  Description of Artificial Sequence: Synthetic oligonucleotide
uacucaaugcugccagauu

SEQ ID NO: 2246520 - RNA, 19 nt, Artificial Sequence
  Description of Artificial Sequence: Synthetic oligonucleotide
auccugguaugguggcuuc

SEQ ID NO: 2246521 - RNA, 19 nt, Artificial Sequence
  Description of Artificial Sequence: Synthetic oligonucleotide
uaagaaagaucuggccuua

SEQ ID NO: 2246522 - RNA, 19 nt, Artificial Sequence
  Description of Artificial Sequence: Synthetic oligonucleotide
ucguacugagucagauagu

SEQ ID NO: 2246523 - RNA, 19 nt, Artificial Sequence
  Description of Artificial Sequence: Synthetic oligonucleotide
gacaucagguuccagucau

SEQ ID NO: 2246524 - RNA, 19 nt, Artificial Sequence
  Description of Artificial Sequence: Synthetic oligonucleotide
cucugcgugcacagugggg

SEQ ID NO: 2246525 - RNA, 19 nt, Artificial Sequence
  Description of Artificial Sequence: Synthetic oligonucleotide
agauaacaugaacuuucuu

SEQ ID NO: 2246526 - RNA, 19 nt, Artificial Sequence
  Description of Artificial Sequence: Synthetic oligonucleotide
auacucaaugcugccagau

SEQ ID NO: 2246527 - RNA, 19 nt, Artificial Sequence
  Description of Artificial Sequence: Synthetic oligonucleotide
ugguuccagaucucaccug

SEQ ID NO: 2246528 - RNA, 19 nt, Artificial Sequence
  Description of Artificial Sequence: Synthetic oligonucleotide
cuuguauggcauccaucuc

SEQ ID NO: 2246529 - RNA, 19 nt, Artificial Sequence
  Description of Artificial Sequence: Synthetic oligonucleotide
cacuguguacuggaucacc

SEQ ID NO: 2246530 - RNA, 19 nt, Artificial Sequence
  Description of Artificial Sequence: Synthetic oligonucleotide
cagauucaauggacuggcc

SEQ ID NO: 2246531 - RNA, 19 nt, Artificial Sequence
  Description of Artificial Sequence: Synthetic oligonucleotide
gaacucugagaggucguac

SEQ ID NO: 2246532 - RNA, 19 nt, Artificial Sequence
  Description of Artificial Sequence: Synthetic oligonucleotide
ucaggccauccugguaugg

SEQ ID NO: 2246533 - RNA, 19 nt, Artificial Sequence
  Description of Artificial Sequence: Synthetic oligonucleotide
aguccaucuucuguucgug

SEQ ID NO: 2246534 - RNA, 19 nt, Artificial Sequence
  Description of Artificial Sequence: Synthetic oligonucleotide
uagacucagcugaugucuu

SEQ ID NO: 2246535 - RNA, 19 nt, Artificial Sequence
  Description of Artificial Sequence: Synthetic oligonucleotide
aagcucgcagagauggcgu

SEQ ID NO: 2246536 - RNA, 19 nt, Artificial Sequence
  Description of Artificial Sequence: Synthetic oligonucleotide
accugaucccagucccuag

SEQ ID NO: 2246537 - RNA, 19 nt, Artificial Sequence
  Description of Artificial Sequence: Synthetic oligonucleotide
accagagucuucccuuuau

SEQ ID NO: 2246538 - RNA, 19 nt, Artificial Sequence
  Description of Artificial Sequence: Synthetic oligonucleotide
aucuaugcccucagccuuc

SEQ ID NO: 2246539 - RNA, 19 nt, Artificial Sequence
  Description of Artificial Sequence: Synthetic oligonucleotide
agaggggaacaccuuugau

SEQ ID NO: 2246540 - RNA, 19 nt, Artificial Sequence
  Description of Artificial Sequence: Synthetic oligonucleotide
cuagacucagcugaugucu

SEQ ID NO: 2246541 - RNA, 19 nt, Artificial Sequence
  Description of Artificial Sequence: Synthetic oligonucleotide
gaccuugcaucugauuguc

SEQ ID NO: 2246542 - RNA, 19 nt, Artificial Sequence
  Description of Artificial Sequence: Synthetic oligonucleotide
uuggcuugcuggcgccugc

SEQ ID NO: 2246543 - RNA, 19 nt, Artificial Sequence
  Description of Artificial Sequence: Synthetic oligonucleotide
caucuuuaucuaugcccuc

SEQ ID NO: 2246544 - RNA, 19 nt, Artificial Sequence
  Description of Artificial Sequence: Synthetic oligonucleotide
acggcaccaauguucucga

SEQ ID NO: 2246545 - RNA, 19 nt, Artificial Sequence
  Description of Artificial Sequence: Synthetic oligonucleotide
uuuucccaauccugggcuu

SEQ ID NO: 2246546 - RNA, 19 nt, Artificial Sequence
  Description of Artificial Sequence: Synthetic oligonucleotide
ucuuuugauccaggucaga

SEQ ID NO: 2246547 - RNA, 19 nt, Artificial Sequence
  Description of Artificial Sequence: Synthetic oligonucleotide
gucauacucaaugcugcca

SEQ ID NO: 2246548 - RNA, 19 nt, Artificial Sequence
  Description of Artificial Sequence: Synthetic oligonucleotide
agccaucgaccuugcaucu

SEQ ID NO: 2246549 - RNA, 19 nt, Artificial Sequence
  Description of Artificial Sequence: Synthetic oligonucleotide
cuucaggccauccugguau

SEQ ID NO: 2246550 - RNA, 19 nt, Artificial Sequence
  Description of Artificial Sequence: Synthetic oligonucleotide
ggagccacacaucuuuauc

SEQ ID NO: 2246551 - RNA, 19 nt, Artificial Sequence
  Description of Artificial Sequence: Synthetic oligonucleotide
caucugauugucuucuuau

SEQ ID NO: 2246552 - RNA, 19 nt, Artificial Sequence
  Description of Artificial Sequence: Synthetic oligonucleotide
ucaccagagucuucccuuu

SEQ ID NO: 2246553 - RNA, 19 nt, Artificial Sequence
  Description of Artificial Sequence: Synthetic oligonucleotide
uuccaaucgcuuggcuugc

SEQ ID NO: 2246554 - RNA, 19 nt, Artificial Sequence
  Description of Artificial Sequence: Synthetic oligonucleotide
uucgugcuucacuguguac

SEQ ID NO: 2246555 - RNA, 19 nt, Artificial Sequence
  Description of Artificial Sequence: Synthetic oligonucleotide
uuauugcugauggcuugaa

SEQ ID NO: 2246556 - RNA, 19 nt, Artificial Sequence
  Description of Artificial Sequence: Synthetic oligonucleotide
cugagucagauaguuggca

SEQ ID NO: 2246557 - RNA, 19 nt, Artificial Sequence
  Description of Artificial Sequence: Synthetic oligonucleotide
auggacuggccgucaauuu

SEQ ID NO: 2246558 - RNA, 19 nt, Artificial Sequence
  Description of Artificial Sequence: Synthetic oligonucleotide
gcaccaauguucucgaacu

SEQ ID NO: 2246559 - RNA, 19 nt, Artificial Sequence
  Description of Artificial Sequence: Synthetic oligonucleotide
aagaaagaucuggccuuaa

SEQ ID NO: 2246560 - RNA, 19 nt, Artificial Sequence
  Description of Artificial Sequence: Synthetic oligonucleotide
uugucacuuuccaccugau

SEQ ID NO: 2246561 - RNA, 19 nt, Artificial Sequence
  Description of Artificial Sequence: Synthetic oligonucleotide
cugauggcuugaagcucgc

SEQ ID NO: 2246562 - RNA, 19 nt, Artificial Sequence
  Description of Artificial Sequence: Synthetic oligonucleotide
cagucccuagacucagcug

SEQ ID NO: 2246563 - RNA, 19 nt, Artificial Sequence
  Description of Artificial Sequence: Synthetic oligonucleotide
uucccaauccugggcuuug

SEQ ID NO: 2246564 - RNA, 19 nt, Artificial Sequence
  Description of Artificial Sequence: Synthetic oligonucleotide
cguucauauucuuuugauc

SEQ ID NO: 2246565 - RNA, 19 nt, Artificial Sequence
  Description of Artificial Sequence: Synthetic oligonucleotide
gagacuuuccguucauauu

SEQ ID NO: 2246566 - RNA, 19 nt, Artificial Sequence
  Description of Artificial Sequence: Synthetic oligonucleotide
auaguucaccuugccugug

SEQ ID NO: 2246567 - RNA, 19 nt, Artificial Sequence
  Description of Artificial Sequence: Synthetic oligonucleotide
cauacucaaugcugccaga

SEQ ID NO: 2246568 - RNA, 19 nt, Artificial Sequence
  Description of Artificial Sequence: Synthetic oligonucleotide
guucgugcuucacugugua

SEQ ID NO: 2246569 - RNA, 19 nt, Artificial Sequence
  Description of Artificial Sequence: Synthetic oligonucleotide
aggucguacugagucagau

SEQ ID NO: 2246570 - RNA, 19 nt, Artificial Sequence
  Description of Artificial Sequence: Synthetic oligonucleotide
ggggcgacuauaguucacc

SEQ ID NO: 2246571 - RNA, 19 nt, Artificial Sequence
  Description of Artificial Sequence: Synthetic oligonucleotide
uuucccaauccugggcuuu

SEQ ID NO: 2246572 - RNA, 19 nt, Artificial Sequence
  Description of Artificial Sequence: Synthetic oligonucleotide
acuucccuaccagcagcuc

SEQ ID NO: 2246573 - RNA, 19 nt, Artificial Sequence
  Description of Artificial Sequence: Synthetic oligonucleotide
aucgaccuugcaucugauu

SEQ ID NO: 2246574 - RNA, 19 nt, Artificial Sequence
  Description of Artificial Sequence: Synthetic oligonucleotide
ucccuagacucagcugaug

SEQ ID NO: 2246575 - RNA, 19 nt, Artificial Sequence
  Description of Artificial Sequence: Synthetic oligonucleotide
cagaggggaacaccuuuga

SEQ ID NO: 2246576 - RNA, 19 nt, Artificial Sequence
  Description of Artificial Sequence: Synthetic oligonucleotide
gcugaugucuuuuccauuu

SEQ ID NO: 2246577 - RNA, 19 nt, Artificial Sequence
  Description of Artificial Sequence: Synthetic oligonucleotide
cucugagaggucguacuga

SEQ ID NO: 2246578 - RNA, 19 nt, Artificial Sequence
  Description of Artificial Sequence: Synthetic oligonucleotide
gcugugacugugaaacuuc

SEQ ID NO: 2246579 - RNA, 19 nt, Artificial Sequence
  Description of Artificial Sequence: Synthetic oligonucleotide
ccuagacucagcugauguc

SEQ ID NO: 2246580 - RNA, 19 nt, Artificial Sequence
  Description of Artificial Sequence: Synthetic oligonucleotide
ugcaucugauugucuucuu

SEQ ID NO: 2246581 - RNA, 19 nt, Artificial Sequence
  Description of Artificial Sequence: Synthetic oligonucleotide
cguaagaaagaucuggccu

SEQ ID NO: 2246582 - RNA, 19 nt, Artificial Sequence
  Description of Artificial Sequence: Synthetic oligonucleotide
accucguaagaaagaucug

SEQ ID NO: 2246583 - RNA, 19 nt, Artificial Sequence
  Description of Artificial Sequence: Synthetic oligonucleotide
gguggagccacacaucuuu

SEQ ID NO: 2246584 - RNA, 19 nt, Artificial Sequence
  Description of Artificial Sequence: Synthetic oligonucleotide
cuuggcuugcuggcgccug

SEQ ID NO: 2246585 - RNA, 19 nt, Artificial Sequence
  Description of Artificial Sequence: Synthetic oligonucleotide
gacuuuccguucauauucu

SEQ ID NO: 2246586 - RNA, 19 nt, Artificial Sequence
  Description of Artificial Sequence: Synthetic oligonucleotide
gccauccugguaugguggc

SEQ ID NO: 2246587 - RNA, 19 nt, Artificial Sequence
  Description of Artificial Sequence: Synthetic oligonucleotide
cuuuccaccugaucccagu

SEQ ID NO: 2246588 - RNA, 19 nt, Artificial Sequence
  Description of Artificial Sequence: Synthetic oligonucleotide
ccuugccuguggaaucugc

SEQ ID NO: 2246589 - RNA, 19 nt, Artificial Sequence
  Description of Artificial Sequence: Synthetic oligonucleotide
ggccuuaaaaucagggugu

SEQ ID NO: 2246590 - RNA, 19 nt, Artificial Sequence
  Description of Artificial Sequence: Synthetic oligonucleotide
agcucgcagagauggcgua

SEQ ID NO: 2246591 - RNA, 19 nt, Artificial Sequence
  Description of Artificial Sequence: Synthetic oligonucleotide
gucuucuuauuugaaugau

SEQ ID NO: 2246592 - RNA, 19 nt, Artificial Sequence
  Description of Artificial Sequence: Synthetic oligonucleotide
gucagaggggaacaccuuu

SEQ ID NO: 2246593 - RNA, 19 nt, Artificial Sequence
  Description of Artificial Sequence: Synthetic oligonucleotide
ccagcucacuguuccaauc

SEQ ID NO: 2246594 - RNA, 19 nt, Artificial Sequence
  Description of Artificial Sequence: Synthetic oligonucleotide
ccuuaaaaucaggguguag

SEQ ID NO: 2246595 - RNA, 19 nt, Artificial Sequence
  Description of Artificial Sequence: Synthetic oligonucleotide
caucucccgguggagccac

SEQ ID NO: 2246596 - RNA, 19 nt, Artificial Sequence
  Description of Artificial Sequence: Synthetic oligonucleotide
cuguggaaucugcugaaau

SEQ ID NO: 2246597 - RNA, 19 nt, Artificial Sequence
  Description of Artificial Sequence: Synthetic oligonucleotide
cucgcagagauggcguaga

SEQ ID NO: 2246598 - RNA, 19 nt, Artificial Sequence
  Description of Artificial Sequence: Synthetic oligonucleotide
ccuuugauguagccaccac

SEQ ID NO: 2246599 - RNA, 19 nt, Artificial Sequence
  Description of Artificial Sequence: Synthetic oligonucleotide
cuccagaccgacggcacca

SEQ ID NO: 2246600 - RNA, 19 nt, Artificial Sequence
  Description of Artificial Sequence: Synthetic oligonucleotide
gcaucugauugucuucuua

SEQ ID NO: 2246601 - RNA, 19 nt, Artificial Sequence
  Description of Artificial Sequence: Synthetic oligonucleotide
uggcguagaaucggcuguu

SEQ ID NO: 2246602 - RNA, 19 nt, Artificial Sequence
  Description of Artificial Sequence: Synthetic oligonucleotide
cacuuuccaccugauccca

SEQ ID NO: 2246603 - RNA, 19 nt, Artificial Sequence
  Description of Artificial Sequence: Synthetic oligonucleotide
ccaucgaccuugcaucuga

SEQ ID NO: 2246604 - RNA, 19 nt, Artificial Sequence
  Description of Artificial Sequence: Synthetic oligonucleotide
uggcuugcuggcgccugca

SEQ ID NO: 2246605 - RNA, 19 nt, Artificial Sequence
  Description of Artificial Sequence: Synthetic oligonucleotide
caguccaucuucuguucgu

SEQ ID NO: 2246606 - RNA, 19 nt, Artificial Sequence
  Description of Artificial Sequence: Synthetic oligonucleotide
gcuccagaccgacggcacc

SEQ ID NO: 2246607 - RNA, 19 nt, Artificial Sequence
  Description of Artificial Sequence: Synthetic oligonucleotide
ggucguacugagucagaua

SEQ ID NO: 2246608 - RNA, 19 nt, Artificial Sequence
  Description of Artificial Sequence: Synthetic oligonucleotide
gauguaguacugagacuuu

SEQ ID NO: 2246609 - RNA, 19 nt, Artificial Sequence
  Description of Artificial Sequence: Synthetic oligonucleotide
ccugguaugguggcuucug

SEQ ID NO: 2246610 - RNA, 19 nt, Artificial Sequence
  Description of Artificial Sequence: Synthetic oligonucleotide
uccagaccgacggcaccaa

SEQ ID NO: 2246611 - RNA, 19 nt, Artificial Sequence
  Description of Artificial Sequence: Synthetic oligonucleotide
cuaugcccucagccuucag

SEQ ID NO: 2246612 - RNA, 19 nt, Artificial Sequence
  Description of Artificial Sequence: Synthetic oligonucleotide
gaggucguacugagucaga

SEQ ID NO: 2246613 - RNA, 19 nt, Artificial Sequence
  Description of Artificial Sequence: Synthetic oligonucleotide
gcucgcagagauggcguag

SEQ ID NO: 2246614 - RNA, 19 nt, Artificial Sequence
  Description of Artificial Sequence: Synthetic oligonucleotide
ccuugccaaaccgcucugc

SEQ ID NO: 2246615 - RNA, 19 nt, Artificial Sequence
  Description of Artificial Sequence: Synthetic oligonucleotide
ccugaucccagucccuaga

SEQ ID NO: 2246616 - RNA, 19 nt, Artificial Sequence
  Description of Artificial Sequence: Synthetic oligonucleotide
ccacagcuccagaccgacg

SEQ ID NO: 2246617 - RNA, 19 nt, Artificial Sequence
  Description of Artificial Sequence: Synthetic oligonucleotide
caaugcugccagauucaau

SEQ ID NO: 2246618 - RNA, 19 nt, Artificial Sequence
  Description of Artificial Sequence: Synthetic oligonucleotide
acaucagguuccagucaua

SEQ ID NO: 2246619 - RNA, 19 nt, Artificial Sequence
  Description of Artificial Sequence: Synthetic oligonucleotide
cugagaggucguacugagu

SEQ ID NO: 2246620 - RNA, 19 nt, Artificial Sequence
  Description of Artificial Sequence: Synthetic oligonucleotide
ccuugcaucugauugucuu

SEQ ID NO: 2246621 - RNA, 19 nt, Artificial Sequence
  Description of Artificial Sequence: Synthetic oligonucleotide
gcguagaaucggcuguucu

SEQ ID NO: 2246622 - RNA, 19 nt, Artificial Sequence
  Description of Artificial Sequence: Synthetic oligonucleotide
cccuagacucagcugaugu

SEQ ID NO: 2246623 - RNA, 19 nt, Artificial Sequence
  Description of Artificial Sequence: Synthetic oligonucleotide
cucccgguggagccacaca

SEQ ID NO: 2246624 - RNA, 19 nt, Artificial Sequence
  Description of Artificial Sequence: Synthetic oligonucleotide
cugagacuuuccguucaua

SEQ ID NO: 2246625 - RNA, 19 nt, Artificial Sequence
  Description of Artificial Sequence: Synthetic oligonucleotide
ucccuaccagcagcuccuc

SEQ ID NO: 2246626 - RNA, 19 nt, Artificial Sequence
  Description of Artificial Sequence: Synthetic oligonucleotide
ccccagguggccuugccaa

SEQ ID NO: 2246627 - RNA, 19 nt, Artificial Sequence
  Description of Artificial Sequence: Synthetic oligonucleotide
ccguucauauucuuuugau

SEQ ID NO: 2246628 - RNA, 19 nt, Artificial Sequence
  Description of Artificial Sequence: Synthetic oligonucleotide
gccacacaucuuuaucuau

SEQ ID NO: 2246629 - RNA, 19 nt, Artificial Sequence
  Description of Artificial Sequence: Synthetic oligonucleotide
cauccugguaugguggcuu

SEQ ID NO: 2246630 - RNA, 19 nt, Artificial Sequence
  Description of Artificial Sequence: Synthetic oligonucleotide
gggcgacuauaguucaccu

SEQ ID NO: 2246631 - RNA, 19 nt, Artificial Sequence
  Description of Artificial Sequence: Synthetic oligonucleotide
ccuaccagcagcuccucau

SEQ ID NO: 2246632 - RNA, 19 nt, Artificial Sequence
  Description of Artificial Sequence: Synthetic oligonucleotide
cccgguggagccacacauc

SEQ ID NO: 2246633 - RNA, 19 nt, Artificial Sequence
  Description of Artificial Sequence: Synthetic oligonucleotide
gccaucgaccuugcaucug

SEQ ID NO: 2246634 - RNA, 19 nt, Artificial Sequence
  Description of Artificial Sequence: Synthetic oligonucleotide
ggcgacuauaguucaccuu

SEQ ID NO: 2246635 - RNA, 19 nt, Artificial Sequence
  Description of Artificial Sequence: Synthetic oligonucleotide
caccagagucuucccuuua

SEQ ID NO: 2246636 - RNA, 19 nt, Artificial Sequence
  Description of Artificial Sequence: Synthetic oligonucleotide
caccuugccuguggaaucu

SEQ ID NO: 2246637 - RNA, 19 nt, Artificial Sequence
  Description of Artificial Sequence: Synthetic oligonucleotide
ggcguagaaucggcuguuc

SEQ ID NO: 2246638 - RNA, 19 nt, Artificial Sequence
  Description of Artificial Sequence: Synthetic oligonucleotide
gccuuaaaaucagggugua

SEQ ID NO: 2246639 - RNA, 19 nt, Artificial Sequence
  Description of Artificial Sequence: Synthetic oligonucleotide
ccacaguccaucuucuguu

SEQ ID NO: 2246640 - RNA, 19 nt, Artificial Sequence
  Description of Artificial Sequence: Synthetic oligonucleotide
ccgacggcaccaauguucu

SEQ ID NO: 2246641 - RNA, 19 nt, Artificial Sequence
  Description of Artificial Sequence: Synthetic oligonucleotide
ccagucccuagacucagcu

SEQ ID NO: 2246642 - RNA, 19 nt, Artificial Sequence
  Description of Artificial Sequence: Synthetic oligonucleotide
ggccgucaauuuucaccuc

SEQ ID NO: 2246643 - RNA, 19 nt, Artificial Sequence
  Description of Artificial Sequence: Synthetic oligonucleotide
ccgguggagccacacaucu

SEQ ID NO: 2246644 - RNA, 19 nt, Artificial Sequence
  Description of Artificial Sequence: Synthetic oligonucleotide
gcucacuguuccaaucgcu

SEQ ID NO: 2246645 - RNA, 19 nt, Artificial Sequence
  Description of Artificial Sequence: Synthetic oligonucleotide
gccaaaccgcucugcauau

SEQ ID NO: 2246646 - RNA, 19 nt, Artificial Sequence
  Description of Artificial Sequence: Synthetic oligonucleotide
caucgaccuugcaucugau

SEQ ID NO: 2246647 - RNA, 19 nt, Artificial Sequence
  Description of Artificial Sequence: Synthetic oligonucleotide
cguacugagucagauaguu

SEQ ID NO: 2246648 - RNA, 19 nt, Artificial Sequence
  Description of Artificial Sequence: Synthetic oligonucleotide
gaccgacggcaccaauguu

SEQ ID NO: 2246649 - RNA, 19 nt, Artificial Sequence
  Description of Artificial Sequence: Synthetic oligonucleotide
gcuggcgccugcauccaaa

SEQ ID NO: 2246650 - RNA, 19 nt, Artificial Sequence
  Description of Artificial Sequence: Synthetic oligonucleotide
ccgucaauuuucaccucgu

SEQ ID NO: 2246651 - RNA, 19 nt, Artificial Sequence
  Description of Artificial Sequence: Synthetic oligonucleotide
cgaccuugcaucugauugu

SEQ ID NO: 2246652 - RNA, 19 nt, Artificial Sequence
  Description of Artificial Sequence: Synthetic oligonucleotide
caucugugaucaggaaguu

SEQ ID NO: 2246653 - RNA, 19 nt, Artificial Sequence
  Description of Artificial Sequence: Synthetic oligonucleotide
ccuguggaaucugcugaaa

SEQ ID NO: 2246654 - RNA, 19 nt, Artificial Sequence
  Description of Artificial Sequence: Synthetic oligonucleotide
aucucccgguggagccaca

SEQ ID NO: 2246655 - RNA, 19 nt, Artificial Sequence
  Description of Artificial Sequence: Synthetic oligonucleotide
agccaccaccacaguccau

SEQ ID NO: 2246656 - RNA, 19 nt, Artificial Sequence
  Description of Artificial Sequence: Synthetic oligonucleotide
caccaccacaguccaucuu

SEQ ID NO: 2246657 - RNA, 19 nt, Artificial Sequence
  Description of Artificial Sequence: Synthetic oligonucleotide
gggugaagccaucgaccuu

SEQ ID NO: 2246658 - RNA, 19 nt, Artificial Sequence
  Description of Artificial Sequence: Synthetic oligonucleotide
cccagguggccuugccaaa

SEQ ID NO: 2246659 - RNA, 19 nt, Artificial Sequence
  Description of Artificial Sequence: Synthetic oligonucleotide
ggucagaggggaacaccuu

SEQ ID NO: 2246660 - RNA, 19 nt, Artificial Sequence
  Description of Artificial Sequence: Synthetic oligonucleotide
ccaccaccacaguccaucu

SEQ ID NO: 2246661 - RNA, 19 nt, Artificial Sequence
  Description of Artificial Sequence: Synthetic oligonucleotide
cgaacucugagaggucgua

SEQ ID NO: 2246662 - RNA, 19 nt, Artificial Sequence
  Description of Artificial Sequence: Synthetic oligonucleotide
ggcuugcuggcgccugcau

SEQ ID NO: 2246663 - RNA, 19 nt, Artificial Sequence
  Description of Artificial Sequence: Synthetic oligonucleotide
cgacggcaccaauguucuc

SEQ ID NO: 2246664 - RNA, 19 nt, Artificial Sequence
  Description of Artificial Sequence: Synthetic oligonucleotide
ccauccugguaugguggcu

SEQ ID NO: 2246665 - RNA, 19 nt, Artificial Sequence
  Description of Artificial Sequence: Synthetic oligonucleotide
ccagaccgacggcaccaau

SEQ ID NO: 2246666 - RNA, 19 nt, Artificial Sequence
  Description of Artificial Sequence: Synthetic oligonucleotide
cggcaccaauguucucgaa

SEQ ID NO: 2246667 - RNA, 19 nt, Artificial Sequence
  Description of Artificial Sequence: Synthetic oligonucleotide
ccaaaccgcucugcauauu

SEQ ID NO: 2246668 - RNA, 19 nt, Artificial Sequence
  Description of Artificial Sequence: Synthetic oligonucleotide
cgguggagccacacaucuu

SEQ ID NO: 2246669 - RNA, 19 nt, Artificial Sequence
  Description of Artificial Sequence: Synthetic oligonucleotide
aaugagauaggcauagucc

SEQ ID NO: 2246670 - RNA, 19 nt, Artificial Sequence
  Description of Artificial Sequence: Synthetic oligonucleotide
cuuguaauaagcucgaaag

SEQ ID NO: 2246671 - RNA, 19 nt, Artificial Sequence
  Description of Artificial Sequence: Synthetic oligonucleotide
uguaauaagcucgaaagcc

SEQ ID NO: 2246672 - RNA, 19 nt, Artificial Sequence
  Description of Artificial Sequence: Synthetic oligonucleotide
augauuacuucauucacug

SEQ ID NO: 2246673 - RNA, 19 nt, Artificial Sequence
  Description of Artificial Sequence: Synthetic oligonucleotide
aguguaugcaaaugucccc

SEQ ID NO: 2246674 - RNA, 19 nt, Artificial Sequence
  Description of Artificial Sequence: Synthetic oligonucleotide
acaguguugucuugguucc

SEQ ID NO: 2246675 - RNA, 19 nt, Artificial Sequence
  Description of Artificial Sequence: Synthetic oligonucleotide
uggacuuuggaccucguug

SEQ ID NO: 2246676 - RNA, 19 nt, Artificial Sequence
  Description of Artificial Sequence: Synthetic oligonucleotide
uuguaauaagcucgaaagc

SEQ ID NO: 2246677 - RNA, 19 nt, Artificial Sequence
  Description of Artificial Sequence: Synthetic oligonucleotide
ucugcaagcaguugcauac

SEQ ID NO: 2246678 - RNA, 19 nt, Artificial Sequence
  Description of Artificial Sequence: Synthetic oligonucleotide
uugagugcacgcauugugg

SEQ ID NO: 2246679 - RNA, 19 nt, Artificial Sequence
  Description of Artificial Sequence: Synthetic oligonucleotide
caggaucucaaugagauag

SEQ ID NO: 2246680 - RNA, 19 nt, Artificial Sequence
  Description of Artificial Sequence: Synthetic oligonucleotide
auaagcucgaaagccaucg

SEQ ID NO: 2246681 - RNA, 19 nt, Artificial Sequence
  Description of Artificial Sequence: Synthetic oligonucleotide
uuugauguccggcuggaga

SEQ ID NO: 2246682 - RNA, 19 nt, Artificial Sequence
  Description of Artificial Sequence: Synthetic oligonucleotide
cagauugggaacaauuccc

SEQ ID NO: 2246683 - RNA, 19 nt, Artificial Sequence
  Description of Artificial Sequence: Synthetic oligonucleotide
augagauaggcauagucca

SEQ ID NO: 2246684 - RNA, 19 nt, Artificial Sequence
  Description of Artificial Sequence: Synthetic oligonucleotide
aaguccgcagauugggaac

SEQ ID NO: 2246685 - RNA, 19 nt, Artificial Sequence
  Description of Artificial Sequence: Synthetic oligonucleotide
gacaguguugucuugguuc

SEQ ID NO: 2246686 - RNA, 19 nt, Artificial Sequence
  Description of Artificial Sequence: Synthetic oligonucleotide
uuuguaccggucaaaggug

SEQ ID NO: 2246687 - RNA, 19 nt, Artificial Sequence
  Description of Artificial Sequence: Synthetic oligonucleotide
uauugggcuacccuccucc

SEQ ID NO: 2246688 - RNA, 19 nt, Artificial Sequence
  Description of Artificial Sequence: Synthetic oligonucleotide
uugcauaccaucucugggc

SEQ ID NO: 2246689 - RNA, 19 nt, Artificial Sequence
  Description of Artificial Sequence: Synthetic oligonucleotide
aguugcauaccaucucugg

SEQ ID NO: 2246690 - RNA, 19 nt, Artificial Sequence
  Description of Artificial Sequence: Synthetic oligonucleotide
acuacaguuggggagagag

SEQ ID NO: 2246691 - RNA, 19 nt, Artificial Sequence
  Description of Artificial Sequence: Synthetic oligonucleotide
uuugcucccucccaggucu

SEQ ID NO: 2246692 - RNA, 19 nt, Artificial Sequence
  Description of Artificial Sequence: Synthetic oligonucleotide
gaacaauucccuucuuugc

SEQ ID NO: 2246693 - RNA, 19 nt, Artificial Sequence
  Description of Artificial Sequence: Synthetic oligonucleotide
auugagugcacgcauugug

SEQ ID NO: 2246694 - RNA, 19 nt, Artificial Sequence
  Description of Artificial Sequence: Synthetic oligonucleotide
uuccuaaucagcguguuga

SEQ ID NO: 2246695 - RNA, 19 nt, Artificial Sequence
  Description of Artificial Sequence: Synthetic oligonucleotide
guugcauaccaucucuggg

SEQ ID NO: 2246696 - RNA, 19 nt, Artificial Sequence
  Description of Artificial Sequence: Synthetic oligonucleotide
uuguaccggucaaaggugg

SEQ ID NO: 2246697 - RNA, 19 nt, Artificial Sequence
  Description of Artificial Sequence: Synthetic oligonucleotide
auguucugccaucuugccc

SEQ ID NO: 2246698 - RNA, 19 nt, Artificial Sequence
  Description of Artificial Sequence: Synthetic oligonucleotide
aagauggucagcagugagg

SEQ ID NO: 2246699 - RNA, 19 nt, Artificial Sequence
  Description of Artificial Sequence: Synthetic oligonucleotide
uugggaacaauucccuucu

SEQ ID NO: 2246700 - RNA, 19 nt, Artificial Sequence
  Description of Artificial Sequence: Synthetic oligonucleotide
aucaaggccagccuaucag

SEQ ID NO: 2246701 - RNA, 19 nt, Artificial Sequence
  Description of Artificial Sequence: Synthetic oligonucleotide
aaaguccgcagauugggaa

SEQ ID NO: 2246702 - RNA, 19 nt, Artificial Sequence
  Description of Artificial Sequence: Synthetic oligonucleotide
uugaugagagugcuguaga

SEQ ID NO: 2246703 - RNA, 19 nt, Artificial Sequence
  Description of Artificial Sequence: Synthetic oligonucleotide
auugaugagagugcuguag

SEQ ID NO: 2246704 - RNA, 19 nt, Artificial Sequence
  Description of Artificial Sequence: Synthetic oligonucleotide
ugagauaggcauaguccag

SEQ ID NO: 2246705 - RNA, 19 nt, Artificial Sequence
  Description of Artificial Sequence: Synthetic oligonucleotide
ugcauaccaucucugggcc

SEQ ID NO: 2246706 - RNA, 19 nt, Artificial Sequence
  Description of Artificial Sequence: Synthetic oligonucleotide
uugauguccggcuggagac

SEQ ID NO: 2246707 - RNA, 19 nt, Artificial Sequence
  Description of Artificial Sequence: Synthetic oligonucleotide
ugauuacuucauucacugg

SEQ ID NO: 2246708 - RNA, 19 nt, Artificial Sequence
  Description of Artificial Sequence: Synthetic oligonucleotide
agcaaacucuagcuggcgg

SEQ ID NO: 2246709 - RNA, 19 nt, Artificial Sequence
  Description of Artificial Sequence: Synthetic oligonucleotide
uaauaagcucgaaagccau

SEQ ID NO: 2246710 - RNA, 19 nt, Artificial Sequence
  Description of Artificial Sequence: Synthetic oligonucleotide
uggaauuccugccaggguu

SEQ ID NO: 2246711 - RNA, 19 nt, Artificial Sequence
  Description of Artificial Sequence: Synthetic oligonucleotide
uuggcuccugccuuauugg

SEQ ID NO: 2246712 - RNA, 19 nt, Artificial Sequence
  Description of Artificial Sequence: Synthetic oligonucleotide
aguguugucuugguucccc

SEQ ID NO: 2246713 - RNA, 19 nt, Artificial Sequence
  Description of Artificial Sequence: Synthetic oligonucleotide
ucuacaggugacaguguug

SEQ ID NO: 2246714 - RNA, 19 nt, Artificial Sequence
  Description of Artificial Sequence: Synthetic oligonucleotide
uuaggcuucgucuggaauu

SEQ ID NO: 2246715 - RNA, 19 nt, Artificial Sequence
  Description of Artificial Sequence: Synthetic oligonucleotide
agaagagacccagagggag

SEQ ID NO: 2246716 - RNA, 19 nt, Artificial Sequence
  Description of Artificial Sequence: Synthetic oligonucleotide
aucggccucuaccucauac

SEQ ID NO: 2246717 - RNA, 19 nt, Artificial Sequence
  Description of Artificial Sequence: Synthetic oligonucleotide
agggucgcaucauugagug

SEQ ID NO: 2246718 - RNA, 19 nt, Artificial Sequence
  Description of Artificial Sequence: Synthetic oligonucleotide
acacuguuuugcuucaugu

SEQ ID NO: 2246719 - RNA, 19 nt, Artificial Sequence
  Description of Artificial Sequence: Synthetic oligonucleotide
ggacuuuggaccucguugg

SEQ ID NO: 2246720 - RNA, 19 nt, Artificial Sequence
  Description of Artificial Sequence: Synthetic oligonucleotide
uuugccaguacuggcaaca

SEQ ID NO: 2246721 - RNA, 19 nt, Artificial Sequence
  Description of Artificial Sequence: Synthetic oligonucleotide
gaugagagugcuguagaug

SEQ ID NO: 2246722 - RNA, 19 nt, Artificial Sequence
  Description of Artificial Sequence: Synthetic oligonucleotide
ucuagcuggcggaugauua

SEQ ID NO: 2246723 - RNA, 19 nt, Artificial Sequence
  Description of Artificial Sequence: Synthetic oligonucleotide
uuagccacugcuuguaaua

SEQ ID NO: 2246724 - RNA, 19 nt, Artificial Sequence
  Description of Artificial Sequence: Synthetic oligonucleotide
aauaagcucgaaagccauc

SEQ ID NO: 2246725 - RNA, 19 nt, Artificial Sequence
  Description of Artificial Sequence: Synthetic oligonucleotide
ccagguugcagaaaguccg

SEQ ID NO: 2246726 - RNA, 19 nt, Artificial Sequence
  Description of Artificial Sequence: Synthetic oligonucleotide
uacuucauucacugggaca

SEQ ID NO: 2246727 - RNA, 19 nt, Artificial Sequence
  Description of Artificial Sequence: Synthetic oligonucleotide
gugccuagagaagagaccc

SEQ ID NO: 2246728 - RNA, 19 nt, Artificial Sequence
  Description of Artificial Sequence: Synthetic oligonucleotide
aaggugggaggguacucag

SEQ ID NO: 2246729 - RNA, 19 nt, Artificial Sequence
  Description of Artificial Sequence: Synthetic oligonucleotide
uguagauguggguguuagg

SEQ ID NO: 2246730 - RNA, 19 nt, Artificial Sequence
  Description of Artificial Sequence: Synthetic oligonucleotide
cuucgucuggaauuccugc

SEQ ID NO: 2246731 - RNA, 19 nt, Artificial Sequence
  Description of Artificial Sequence: Synthetic oligonucleotide
uguaccggucaaagguggg

SEQ ID NO: 2246732 - RNA, 19 nt, Artificial Sequence
  Description of Artificial Sequence: Synthetic oligonucleotide
caggucugcaagcaguugc

SEQ ID NO: 2246733 - RNA, 19 nt, Artificial Sequence
  Description of Artificial Sequence: Synthetic oligonucleotide
uuacuucauucacugggac

SEQ ID NO: 2246734 - RNA, 19 nt, Artificial Sequence
  Description of Artificial Sequence: Synthetic oligonucleotide
ucuguuacagggucgcauc

SEQ ID NO: 2246735 - RNA, 19 nt, Artificial Sequence
  Description of Artificial Sequence: Synthetic oligonucleotide
cuuuguaccggucaaaggu

SEQ ID NO: 2246736 - RNA, 19 nt, Artificial Sequence
  Description of Artificial Sequence: Synthetic oligonucleotide
ggagacuacaguuggggag

SEQ ID NO: 2246737 - RNA, 19 nt, Artificial Sequence
  Description of Artificial Sequence: Synthetic oligonucleotide
ucgaaagccaucgaucuuc

SEQ ID NO: 2246738 - RNA, 19 nt, Artificial Sequence
  Description of Artificial Sequence: Synthetic oligonucleotide
aaaggagacuacaguuggg

SEQ ID NO: 2246739 - RNA, 19 nt, Artificial Sequence
  Description of Artificial Sequence: Synthetic oligonucleotide
uaaucagcguguugaagaa

SEQ ID NO: 2246740 - RNA, 19 nt, Artificial Sequence
  Description of Artificial Sequence: Synthetic oligonucleotide
cacccaauggccagguugc

SEQ ID NO: 2246741 - RNA, 19 nt, Artificial Sequence
  Description of Artificial Sequence: Synthetic oligonucleotide
aagcucgaaagccaucgau

SEQ ID NO: 2246742 - RNA, 19 nt, Artificial Sequence
  Description of Artificial Sequence: Synthetic oligonucleotide
cuuuggaccucguuggcuc

SEQ ID NO: 2246743 - RNA, 19 nt, Artificial Sequence
  Description of Artificial Sequence: Synthetic oligonucleotide
cagaaaguccgcagauugg

SEQ ID NO: 2246744 - RNA, 19 nt, Artificial Sequence
  Description of Artificial Sequence: Synthetic oligonucleotide
uguagcaguguaugcaaau

SEQ ID NO: 2246745 - RNA, 19 nt, Artificial Sequence
  Description of Artificial Sequence: Synthetic oligonucleotide
accaucucugggccuaugg

SEQ ID NO: 2246746 - RNA, 19 nt, Artificial Sequence
  Description of Artificial Sequence: Synthetic oligonucleotide
agcaguguaugcaaauguc

SEQ ID NO: 2246747 - RNA, 19 nt, Artificial Sequence
  Description of Artificial Sequence: Synthetic oligonucleotide
acagggucgcaucauugag

SEQ ID NO: 2246748 - RNA, 19 nt, Artificial Sequence
  Description of Artificial Sequence: Synthetic oligonucleotide
gcagaaaguccgcagauug

SEQ ID NO: 2246749 - RNA, 19 nt, Artificial Sequence
  Description of Artificial Sequence: Synthetic oligonucleotide
uugucuugguuccccuuag

SEQ ID NO: 2246750 - RNA, 19 nt, Artificial Sequence
  Description of Artificial Sequence: Synthetic oligonucleotide
ugcaagcaguugcauacca

SEQ ID NO: 2246751 - RNA, 19 nt, Artificial Sequence
  Description of Artificial Sequence: Synthetic oligonucleotide
ugaaggagcucuucucaga

SEQ ID NO: 2246752 - RNA, 19 nt, Artificial Sequence
  Description of Artificial Sequence: Synthetic oligonucleotide
uacagggucgcaucauuga

SEQ ID NO: 2246753 - RNA, 19 nt, Artificial Sequence
  Description of Artificial Sequence: Synthetic oligonucleotide
cagccuaucagcaggugug

SEQ ID NO: 2246754 - RNA, 19 nt, Artificial Sequence
  Description of Artificial Sequence: Synthetic oligonucleotide
gcagauugggaacaauucc

SEQ ID NO: 2246755 - RNA, 19 nt, Artificial Sequence
  Description of Artificial Sequence: Synthetic oligonucleotide
uggguguuagggaccaucu

SEQ ID NO: 2246756 - RNA, 19 nt, Artificial Sequence
  Description of Artificial Sequence: Synthetic oligonucleotide
gucuugguuccccuuaggc

SEQ ID NO: 2246757 - RNA, 19 nt, Artificial Sequence
  Description of Artificial Sequence: Synthetic oligonucleotide
guaauaagcucgaaagcca

SEQ ID NO: 2246758 - RNA, 19 nt, Artificial Sequence
  Description of Artificial Sequence: Synthetic oligonucleotide
gcuacccuccuccugaagg

SEQ ID NO: 2246759 - RNA, 19 nt, Artificial Sequence
  Description of Artificial Sequence: Synthetic oligonucleotide
uucucuuuguaccggucaa

SEQ ID NO: 2246760 - RNA, 19 nt, Artificial Sequence
  Description of Artificial Sequence: Synthetic oligonucleotide
cucagaguggugccuagag

SEQ ID NO: 2246761 - RNA, 19 nt, Artificial Sequence
  Description of Artificial Sequence: Synthetic oligonucleotide
ugucuugguuccccuuagg

SEQ ID NO: 2246762 - RNA, 19 nt, Artificial Sequence
  Description of Artificial Sequence: Synthetic oligonucleotide
ugcaaauguccccauccuc

SEQ ID NO: 2246763 - RNA, 19 nt, Artificial Sequence
  Description of Artificial Sequence: Synthetic oligonucleotide
agcucgaaagccaucgauc

SEQ ID NO: 2246764 - RNA, 19 nt, Artificial Sequence
  Description of Artificial Sequence: Synthetic oligonucleotide
uucuuccuaaucagcgugu

SEQ ID NO: 2246765 - RNA, 19 nt, Artificial Sequence
  Description of Artificial Sequence: Synthetic oligonucleotide
cagaguggugccuagagaa

SEQ ID NO: 2246766 - RNA, 19 nt, Artificial Sequence
  Description of Artificial Sequence: Synthetic oligonucleotide
guugcagaaaguccgcaga

SEQ ID NO: 2246767 - RNA, 19 nt, Artificial Sequence
  Description of Artificial Sequence: Synthetic oligonucleotide
gguuuugauguccggcugg

SEQ ID NO: 2246768 - RNA, 19 nt, Artificial Sequence
  Description of Artificial Sequence: Synthetic oligonucleotide
ucccaggucucccaccuug

SEQ ID NO: 2246769 - RNA, 19 nt, Artificial Sequence
  Description of Artificial Sequence: Synthetic oligonucleotide
ggagcaugggcucuacagg

SEQ ID NO: 2246770 - RNA, 19 nt, Artificial Sequence
  Description of Artificial Sequence: Synthetic oligonucleotide
aaucagcguguugaagaag

SEQ ID NO: 2246771 - RNA, 19 nt, Artificial Sequence
  Description of Artificial Sequence: Synthetic oligonucleotide
cuucuugagggccgcauug

SEQ ID NO: 2246772 - RNA, 19 nt, Artificial Sequence
  Description of Artificial Sequence: Synthetic oligonucleotide
aagcaguugcauaccaucu

SEQ ID NO: 2246773 - RNA, 19 nt, Artificial Sequence
  Description of Artificial Sequence: Synthetic oligonucleotide
uuuagccacugcuuguaau

SEQ ID NO: 2246774 - RNA, 19 nt, Artificial Sequence
  Description of Artificial Sequence: Synthetic oligonucleotide
ugccuuauugggcuacccu

SEQ ID NO: 2246775 - RNA, 19 nt, Artificial Sequence
  Description of Artificial Sequence: Synthetic oligonucleotide
cacugcuuguaauaagcuc

SEQ ID NO: 2246776 - RNA, 19 nt, Artificial Sequence
  Description of Artificial Sequence: Synthetic oligonucleotide
ggaugauuacuucauucac

SEQ ID NO: 2246777 - RNA, 19 nt, Artificial Sequence
  Description of Artificial Sequence: Synthetic oligonucleotide
ugccuuugcucccucccag

SEQ ID NO: 2246778 - RNA, 19 nt, Artificial Sequence
  Description of Artificial Sequence: Synthetic oligonucleotide
uugcagaaaguccgcagau

SEQ ID NO: 2246779 - RNA, 19 nt, Artificial Sequence
  Description of Artificial Sequence: Synthetic oligonucleotide
ucucaaugagauaggcaua

SEQ ID NO: 2246780 - RNA, 19 nt, Artificial Sequence
  Description of Artificial Sequence: Synthetic oligonucleotide
uggcuccugccuuauuggg

SEQ ID NO: 2246781 - RNA, 19 nt, Artificial Sequence
  Description of Artificial Sequence: Synthetic oligonucleotide
uaccucauacuuguccaag

SEQ ID NO: 2246782 - RNA, 19 nt, Artificial Sequence
  Description of Artificial Sequence: Synthetic oligonucleotide
cacgcauuguggcugccgg

SEQ ID NO: 2246783 - RNA, 19 nt, Artificial Sequence
  Description of Artificial Sequence: Synthetic oligonucleotide
gaugauuacuucauucacu

SEQ ID NO: 2246784 - RNA, 19 nt, Artificial Sequence
  Description of Artificial Sequence: Synthetic oligonucleotide
ggucacaucggccucuacc

SEQ ID NO: 2246785 - RNA, 19 nt, Artificial Sequence
  Description of Artificial Sequence: Synthetic oligonucleotide
ugagagugcuguagaugug

SEQ ID NO: 2246786 - RNA, 19 nt, Artificial Sequence
  Description of Artificial Sequence: Synthetic oligonucleotide
gagacuacaguuggggaga

SEQ ID NO: 2246787 - RNA, 19 nt, Artificial Sequence
  Description of Artificial Sequence: Synthetic oligonucleotide
ugaugagagugcuguagau

SEQ ID NO: 2246788 - RNA, 19 nt, Artificial Sequence
  Description of Artificial Sequence: Synthetic oligonucleotide
aggguacucagcagcaaac

SEQ ID NO: 2246789 - RNA, 19 nt, Artificial Sequence
  Description of Artificial Sequence: Synthetic oligonucleotide
ggcucuacaggugacagug

SEQ ID NO: 2246790 - RNA, 19 nt, Artificial Sequence
  Description of Artificial Sequence: Synthetic oligonucleotide
agugcacgcauuguggcug

SEQ ID NO: 2246791 - RNA, 19 nt, Artificial Sequence
  Description of Artificial Sequence: Synthetic oligonucleotide
uguuagggaccaucuggga

SEQ ID NO: 2246792 - RNA, 19 nt, Artificial Sequence
  Description of Artificial Sequence: Synthetic oligonucleotide
uccucuguuacagggucgc

SEQ ID NO: 2246793 - RNA, 19 nt, Artificial Sequence
  Description of Artificial Sequence: Synthetic oligonucleotide
uaccggucaaaggugggag

SEQ ID NO: 2246794 - RNA, 19 nt, Artificial Sequence
  Description of Artificial Sequence: Synthetic oligonucleotide
gauguggguguuagggacc

SEQ ID NO: 2246795 - RNA, 19 nt, Artificial Sequence
  Description of Artificial Sequence: Synthetic oligonucleotide
aaggagcucuucucagagu

SEQ ID NO: 2246796 - RNA, 19 nt, Artificial Sequence
  Description of Artificial Sequence: Synthetic oligonucleotide
aauucccuucuuugccagu

SEQ ID NO: 2246797 - RNA, 19 nt, Artificial Sequence
  Description of Artificial Sequence: Synthetic oligonucleotide
ugggcucuacaggugacag

SEQ ID NO: 2246798 - RNA, 19 nt, Artificial Sequence
  Description of Artificial Sequence: Synthetic oligonucleotide
gaucucaaugagauaggca

SEQ ID NO: 2246799 - RNA, 19 nt, Artificial Sequence
  Description of Artificial Sequence: Synthetic oligonucleotide
uuuggaccucguuggcucc

SEQ ID NO: 2246800 - RNA, 19 nt, Artificial Sequence
  Description of Artificial Sequence: Synthetic oligonucleotide
uaagcucgaaagccaucga

SEQ ID NO: 2246801 - RNA, 19 nt, Artificial Sequence
  Description of Artificial Sequence: Synthetic oligonucleotide
cuagcuggcggaugauuac

SEQ ID NO: 2246802 - RNA, 19 nt, Artificial Sequence
  Description of Artificial Sequence: Synthetic oligonucleotide
aggagacuacaguugggga

SEQ ID NO: 2246803 - RNA, 19 nt, Artificial Sequence
  Description of Artificial Sequence: Synthetic oligonucleotide
ccuauggcacccaauggcc

SEQ ID NO: 2246804 - RNA, 19 nt, Artificial Sequence
  Description of Artificial Sequence: Synthetic oligonucleotide
agauugggaacaauucccu

SEQ ID NO: 2246805 - RNA, 19 nt, Artificial Sequence
  Description of Artificial Sequence: Synthetic oligonucleotide
gccuauggcacccaauggc

SEQ ID NO: 2246806 - RNA, 19 nt, Artificial Sequence
  Description of Artificial Sequence: Synthetic oligonucleotide
cuggcaacagugccuuugc

SEQ ID NO: 2246807 - RNA, 19 nt, Artificial Sequence
  Description of Artificial Sequence: Synthetic oligonucleotide
ccauguucugccaucuugc

SEQ ID NO: 2246808 - RNA, 19 nt, Artificial Sequence
  Description of Artificial Sequence: Synthetic oligonucleotide
gccaguacuggcaacagug

SEQ ID NO: 2246809 - RNA, 19 nt, Artificial Sequence
  Description of Artificial Sequence: Synthetic oligonucleotide
gugaggguuuugauguccg

SEQ ID NO: 2246810 - RNA, 19 nt, Artificial Sequence
  Description of Artificial Sequence: Synthetic oligonucleotide
uggcggaugauuacuucau

SEQ ID NO: 2246811 - RNA, 19 nt, Artificial Sequence
  Description of Artificial Sequence: Synthetic oligonucleotide
caggaaccccuccaggccc

SEQ ID NO: 2246812 - RNA, 19 nt, Artificial Sequence
  Description of Artificial Sequence: Synthetic oligonucleotide
gguugcagaaaguccgcag

SEQ ID NO: 2246813 - RNA, 19 nt, Artificial Sequence
  Description of Artificial Sequence: Synthetic oligonucleotide
ggucgcaucauugagugca

SEQ ID NO: 2246814 - RNA, 19 nt, Artificial Sequence
  Description of Artificial Sequence: Synthetic oligonucleotide
gcaguguaugcaaaugucc

SEQ ID NO: 2246815 - RNA, 19 nt, Artificial Sequence
  Description of Artificial Sequence: Synthetic oligonucleotide
ucggccucuaccucauacu

SEQ ID NO: 2246816 - RNA, 19 nt, Artificial Sequence
  Description of Artificial Sequence: Synthetic oligonucleotide
aggaucucaaugagauagg

SEQ ID NO: 2246817 - RNA, 19 nt, Artificial Sequence
  Description of Artificial Sequence: Synthetic oligonucleotide
gacuuuggaccucguuggc

SEQ ID NO: 2246818 - RNA, 19 nt, Artificial Sequence
  Description of Artificial Sequence: Synthetic oligonucleotide
gcacccaauggccagguug

SEQ ID NO: 2246819 - RNA, 19 nt, Artificial Sequence
  Description of Artificial Sequence: Synthetic oligonucleotide
cagguugcagaaaguccgc

SEQ ID NO: 2246820 - RNA, 19 nt, Artificial Sequence
  Description of Artificial Sequence: Synthetic oligonucleotide
cuacauucuggacuuugga

SEQ ID NO: 2246821 - RNA, 19 nt, Artificial Sequence
  Description of Artificial Sequence: Synthetic oligonucleotide
uguaugcaaauguccccau

SEQ ID NO: 2246822 - RNA, 19 nt, Artificial Sequence
  Description of Artificial Sequence: Synthetic oligonucleotide
cuucaggaucucaaugaga

SEQ ID NO: 2246823 - RNA, 19 nt, Artificial Sequence
  Description of Artificial Sequence: Synthetic oligonucleotide
cuaucagcagguguggcca

SEQ ID NO: 2246824 - RNA, 19 nt, Artificial Sequence
  Description of Artificial Sequence: Synthetic oligonucleotide
gaguggugccuagagaaga

SEQ ID NO: 2246825 - RNA, 19 nt, Artificial Sequence
  Description of Artificial Sequence: Synthetic oligonucleotide
gucagcagugaggacuccg

SEQ ID NO: 2246826 - RNA, 19 nt, Artificial Sequence
  Description of Artificial Sequence: Synthetic oligonucleotide
cuggcggaugauuacuuca

SEQ ID NO: 2246827 - RNA, 19 nt, Artificial Sequence
  Description of Artificial Sequence: Synthetic oligonucleotide
aaacucuagcuggcggaug

SEQ ID NO: 2246828 - RNA, 19 nt, Artificial Sequence
  Description of Artificial Sequence: Synthetic oligonucleotide
gaggguacucagcagcaaa

SEQ ID NO: 2246829 - RNA, 19 nt, Artificial Sequence
  Description of Artificial Sequence: Synthetic oligonucleotide
uaggcuucgucuggaauuc

SEQ ID NO: 2246830 - RNA, 19 nt, Artificial Sequence
  Description of Artificial Sequence: Synthetic oligonucleotide
uccuaaucagcguguugaa

SEQ ID NO: 2246831 - RNA, 19 nt, Artificial Sequence
  Description of Artificial Sequence: Synthetic oligonucleotide
caguugcauaccaucucug

SEQ ID NO: 2246832 - RNA, 19 nt, Artificial Sequence
  Description of Artificial Sequence: Synthetic oligonucleotide
ggccgcauugaugagagug

SEQ ID NO: 2246833 - RNA, 19 nt, Artificial Sequence
  Description of Artificial Sequence: Synthetic oligonucleotide
gggccuauggcacccaaug

SEQ ID NO: 2246834 - RNA, 19 nt, Artificial Sequence
  Description of Artificial Sequence: Synthetic oligonucleotide
ugccuagagaagagaccca

SEQ ID NO: 2246835 - RNA, 19 nt, Artificial Sequence
  Description of Artificial Sequence: Synthetic oligonucleotide
aguggugccuagagaagag

SEQ ID NO: 2246836 - RNA, 19 nt, Artificial Sequence
  Description of Artificial Sequence: Synthetic oligonucleotide
ggaucucaaugagauaggc

SEQ ID NO: 2246837 - RNA, 19 nt, Artificial Sequence
  Description of Artificial Sequence: Synthetic oligonucleotide
ccuaucagcagguguggcc

SEQ ID NO: 2246838 - RNA, 19 nt, Artificial Sequence
  Description of Artificial Sequence: Synthetic oligonucleotide
gagacccagagggagcaug

SEQ ID NO: 2246839 - RNA, 19 nt, Artificial Sequence
  Description of Artificial Sequence: Synthetic oligonucleotide
gguacucagcagcaaacuc

SEQ ID NO: 2246840 - RNA, 19 nt, Artificial Sequence
  Description of Artificial Sequence: Synthetic oligonucleotide
uuauugggcuacccuccuc

SEQ ID NO: 2246841 - RNA, 19 nt, Artificial Sequence
  Description of Artificial Sequence: Synthetic oligonucleotide
cuugguuccccuuaggcuu

SEQ ID NO: 2246842 - RNA, 19 nt, Artificial Sequence
  Description of Artificial Sequence: Synthetic oligonucleotide
acugucccaaaggagacua

SEQ ID NO: 2246843 - RNA, 19 nt, Artificial Sequence
  Description of Artificial Sequence: Synthetic oligonucleotide
ggcaacagugccuuugcuc

SEQ ID NO: 2246844 - RNA, 19 nt, Artificial Sequence
  Description of Artificial Sequence: Synthetic oligonucleotide
gcuuguaauaagcucgaaa

SEQ ID NO: 2246845 - RNA, 19 nt, Artificial Sequence
  Description of Artificial Sequence: Synthetic oligonucleotide
gaccucguuggcuccugcc

SEQ ID NO: 2246846 - RNA, 19 nt, Artificial Sequence
  Description of Artificial Sequence: Synthetic oligonucleotide
agccuaucagcaggugugg

SEQ ID NO: 2246847 - RNA, 19 nt, Artificial Sequence
  Description of Artificial Sequence: Synthetic oligonucleotide
acgcauuguggcugccggg

SEQ ID NO: 2246848 - RNA, 19 nt, Artificial Sequence
  Description of Artificial Sequence: Synthetic oligonucleotide
ucgcaucauugagugcacg

SEQ ID NO: 2246849 - RNA, 19 nt, Artificial Sequence
  Description of Artificial Sequence: Synthetic oligonucleotide
ugacaguguugucuugguu

SEQ ID NO: 2246850 - RNA, 19 nt, Artificial Sequence
  Description of Artificial Sequence: Synthetic oligonucleotide
uugguuccccuuaggcuuc

SEQ ID NO: 2246851 - RNA, 19 nt, Artificial Sequence
  Description of Artificial Sequence: Synthetic oligonucleotide
agaguggugccuagagaag

SEQ ID NO: 2246852 - RNA, 19 nt, Artificial Sequence
  Description of Artificial Sequence: Synthetic oligonucleotide
cugggauuucuucaggucu

SEQ ID NO: 2246853 - RNA, 19 nt, Artificial Sequence
  Description of Artificial Sequence: Synthetic oligonucleotide
acuuuggaccucguuggcu

SEQ ID NO: 2246854 - RNA, 19 nt, Artificial Sequence
  Description of Artificial Sequence: Synthetic oligonucleotide
guugucuugguuccccuua

SEQ ID NO: 2246855 - RNA, 19 nt, Artificial Sequence
  Description of Artificial Sequence: Synthetic oligonucleotide
guaugcaaauguccccauc

SEQ ID NO: 2246856 - RNA, 19 nt, Artificial Sequence
  Description of Artificial Sequence: Synthetic oligonucleotide
ggccuauggcacccaaugg

SEQ ID NO: 2246857 - RNA, 19 nt, Artificial Sequence
  Description of Artificial Sequence: Synthetic oligonucleotide
ucaaugagauaggcauagu

SEQ ID NO: 2246858 - RNA, 19 nt, Artificial Sequence
  Description of Artificial Sequence: Synthetic oligonucleotide
gaaaguccgcagauuggga

SEQ ID NO: 2246859 - RNA, 19 nt, Artificial Sequence
  Description of Artificial Sequence: Synthetic oligonucleotide
gccuuauugggcuacccuc

SEQ ID NO: 2246860 - RNA, 19 nt, Artificial Sequence
  Description of Artificial Sequence: Synthetic oligonucleotide
ugauguccggcuggagacc

SEQ ID NO: 2246861 - RNA, 19 nt, Artificial Sequence
  Description of Artificial Sequence: Synthetic oligonucleotide
agaccauguucugccaucu

SEQ ID NO: 2246862 - RNA, 19 nt, Artificial Sequence
  Description of Artificial Sequence: Synthetic oligonucleotide
cuacccuccuccugaagga

SEQ ID NO: 2246863 - RNA, 19 nt, Artificial Sequence
  Description of Artificial Sequence: Synthetic oligonucleotide
guuagggaccaucugggau

SEQ ID NO: 2246864 - RNA, 19 nt, Artificial Sequence
  Description of Artificial Sequence: Synthetic oligonucleotide
auugggcuacccuccuccu

SEQ ID NO: 2246865 - RNA, 19 nt, Artificial Sequence
  Description of Artificial Sequence: Synthetic oligonucleotide
aguccgcagauugggaaca

SEQ ID NO: 2246866 - RNA, 19 nt, Artificial Sequence
  Description of Artificial Sequence: Synthetic oligonucleotide
ucucuuuguaccggucaaa

SEQ ID NO: 2246867 - RNA, 19 nt, Artificial Sequence
  Description of Artificial Sequence: Synthetic oligonucleotide
cuuugccaguacuggcaac

SEQ ID NO: 2246868 - RNA, 19 nt, Artificial Sequence
  Description of Artificial Sequence: Synthetic oligonucleotide
caugggcucuacaggugac

SEQ ID NO: 2246869 - RNA, 19 nt, Artificial Sequence
  Description of Artificial Sequence: Synthetic oligonucleotide
uagcuggcggaugauuacu

SEQ ID NO: 2246870 - RNA, 19 nt, Artificial Sequence
  Description of Artificial Sequence: Synthetic oligonucleotide
uacccuccuccugaaggag

SEQ ID NO: 2246871 - RNA, 19 nt, Artificial Sequence
  Description of Artificial Sequence: Synthetic oligonucleotide
gauguccggcuggagacca

SEQ ID NO: 2246872 - RNA, 19 nt, Artificial Sequence
  Description of Artificial Sequence: Synthetic oligonucleotide
cuuugcucccucccagguc

SEQ ID NO: 2246873 - RNA, 19 nt, Artificial Sequence
  Description of Artificial Sequence: Synthetic oligonucleotide
uguugucuugguuccccuu

SEQ ID NO: 2246874 - RNA, 19 nt, Artificial Sequence
  Description of Artificial Sequence: Synthetic oligonucleotide
uggcaacagugccuuugcu

SEQ ID NO: 2246875 - RNA, 19 nt, Artificial Sequence
  Description of Artificial Sequence: Synthetic oligonucleotide
uguccggcuggagaccaug

SEQ ID NO: 2246876 - RNA, 19 nt, Artificial Sequence
  Description of Artificial Sequence: Synthetic oligonucleotide
ugagggccgcauugaugag

SEQ ID NO: 2246877 - RNA, 19 nt, Artificial Sequence
  Description of Artificial Sequence: Synthetic oligonucleotide
cuacaggugacaguguugu

SEQ ID NO: 2246878 - RNA, 19 nt, Artificial Sequence
  Description of Artificial Sequence: Synthetic oligonucleotide
gcugacaccccucucuaca

SEQ ID NO: 2246879 - RNA, 19 nt, Artificial Sequence
  Description of Artificial Sequence: Synthetic oligonucleotide
cagcaaacucuagcuggcg

SEQ ID NO: 2246880 - RNA, 19 nt, Artificial Sequence
  Description of Artificial Sequence: Synthetic oligonucleotide
gccuagagaagagacccag

SEQ ID NO: 2246881 - RNA, 19 nt, Artificial Sequence
  Description of Artificial Sequence: Synthetic oligonucleotide
auggcacccaauggccagg

SEQ ID NO: 2246882 - RNA, 19 nt, Artificial Sequence
  Description of Artificial Sequence: Synthetic oligonucleotide
guuuugauguccggcugga

SEQ ID NO: 2246883 - RNA, 19 nt, Artificial Sequence
  Description of Artificial Sequence: Synthetic oligonucleotide
ugcagaaaguccgcagauu

SEQ ID NO: 2246884 - RNA, 19 nt, Artificial Sequence
  Description of Artificial Sequence: Synthetic oligonucleotide
aggacuccgaggggcuccc

SEQ ID NO: 2246885 - RNA, 19 nt, Artificial Sequence
  Description of Artificial Sequence: Synthetic oligonucleotide
caucaaggccagccuauca

SEQ ID NO: 2246886 - RNA, 19 nt, Artificial Sequence
  Description of Artificial Sequence: Synthetic oligonucleotide
gucaaaggugggaggguac

SEQ ID NO: 2246887 - RNA, 19 nt, Artificial Sequence
  Description of Artificial Sequence: Synthetic oligonucleotide
agacuacaguuggggagag

SEQ ID NO: 2246888 - RNA, 19 nt, Artificial Sequence
  Description of Artificial Sequence: Synthetic oligonucleotide
gcauugaugagagugcugu

SEQ ID NO: 2246889 - RNA, 19 nt, Artificial Sequence
  Description of Artificial Sequence: Synthetic oligonucleotide
gcucgaaagccaucgaucu

SEQ ID NO: 2246890 - RNA, 19 nt, Artificial Sequence
  Description of Artificial Sequence: Synthetic oligonucleotide
ugacaccccucucuacauu

SEQ ID NO: 2246891 - RNA, 19 nt, Artificial Sequence
  Description of Artificial Sequence: Synthetic oligonucleotide
ucuggacuuuggaccucgu

SEQ ID NO: 2246892 - RNA, 19 nt, Artificial Sequence
  Description of Artificial Sequence: Synthetic oligonucleotide
guggguguuagggaccauc

SEQ ID NO: 2246893 - RNA, 19 nt, Artificial Sequence
  Description of Artificial Sequence: Synthetic oligonucleotide
cgcagauugggaacaauuc

SEQ ID NO: 2246894 - RNA, 19 nt, Artificial Sequence
  Description of Artificial Sequence: Synthetic oligonucleotide
cgcaucauugagugcacgc

SEQ ID NO: 2246895 - RNA, 19 nt, Artificial Sequence
  Description of Artificial Sequence: Synthetic oligonucleotide
cccuucuuugccaguacug

SEQ ID NO: 2246896 - RNA, 19 nt, Artificial Sequence
  Description of Artificial Sequence: Synthetic oligonucleotide
uacaggugacaguguuguc

SEQ ID NO: 2246897 - RNA, 19 nt, Artificial Sequence
  Description of Artificial Sequence: Synthetic oligonucleotide
gauugggaacaauucccuu

SEQ ID NO: 2246898 - RNA, 19 nt, Artificial Sequence
  Description of Artificial Sequence: Synthetic oligonucleotide
ugggccuauggcacccaau

SEQ ID NO: 2246899 - RNA, 19 nt, Artificial Sequence
  Description of Artificial Sequence: Synthetic oligonucleotide
gccaucgaucuucuccaag

SEQ ID NO: 2246900 - RNA, 19 nt, Artificial Sequence
  Description of Artificial Sequence: Synthetic oligonucleotide
cugucccaaaggagacuac

SEQ ID NO: 2246901 - RNA, 19 nt, Artificial Sequence
  Description of Artificial Sequence: Synthetic oligonucleotide
aggucacaucggccucuac

SEQ ID NO: 2246902 - RNA, 19 nt, Artificial Sequence
  Description of Artificial Sequence: Synthetic oligonucleotide
cauaccaucucugggccua

SEQ ID NO: 2246903 - RNA, 19 nt, Artificial Sequence
  Description of Artificial Sequence: Synthetic oligonucleotide
agguugcagaaaguccgca

SEQ ID NO: 2246904 - RNA, 19 nt, Artificial Sequence
  Description of Artificial Sequence: Synthetic oligonucleotide
cugccuuauugggcuaccc

SEQ ID NO: 2246905 - RNA, 19 nt, Artificial Sequence
  Description of Artificial Sequence: Synthetic oligonucleotide
gugcacgcauuguggcugc

SEQ ID NO: 2246906 - RNA, 19 nt, Artificial Sequence
  Description of Artificial Sequence: Synthetic oligonucleotide
agcaugggcucuacaggug

SEQ ID NO: 2246907 - RNA, 19 nt, Artificial Sequence
  Description of Artificial Sequence: Synthetic oligonucleotide
gccgcauugaugagagugc

SEQ ID NO: 2246908 - RNA, 19 nt, Artificial Sequence
  Description of Artificial Sequence: Synthetic oligonucleotide
gcaaauguccccauccucu

SEQ ID NO: 2246909 - RNA, 19 nt, Artificial Sequence
  Description of Artificial Sequence: Synthetic oligonucleotide
uccggcuggagaccauguu

SEQ ID NO: 2246910 - RNA, 19 nt, Artificial Sequence
  Description of Artificial Sequence: Synthetic oligonucleotide
gcaucauugagugcacgca

SEQ ID NO: 2246911 - RNA, 19 nt, Artificial Sequence
  Description of Artificial Sequence: Synthetic oligonucleotide
gcaugggcucuacagguga

SEQ ID NO: 2246912 - RNA, 19 nt, Artificial Sequence
  Description of Artificial Sequence: Synthetic oligonucleotide
caucgaucuucuccaagua

SEQ ID NO: 2246913 - RNA, 19 nt, Artificial Sequence
  Description of Artificial Sequence: Synthetic oligonucleotide
cuaccucauacuuguccaa

SEQ ID NO: 2246914 - RNA, 19 nt, Artificial Sequence
  Description of Artificial Sequence: Synthetic oligonucleotide
gagugcacgcauuguggcu

SEQ ID NO: 2246915 - RNA, 19 nt, Artificial Sequence
  Description of Artificial Sequence: Synthetic oligonucleotide
guaccggucaaagguggga

SEQ ID NO: 2246916 - RNA, 19 nt, Artificial Sequence
  Description of Artificial Sequence: Synthetic oligonucleotide
gcaguugcauaccaucucu

SEQ ID NO: 2246917 - RNA, 19 nt, Artificial Sequence
  Description of Artificial Sequence: Synthetic oligonucleotide
ugcuuguaauaagcucgaa

SEQ ID NO: 2246918 - RNA, 19 nt, Artificial Sequence
  Description of Artificial Sequence: Synthetic oligonucleotide
cagguuccaccaccucagc

SEQ ID NO: 2246919 - RNA, 19 nt, Artificial Sequence
  Description of Artificial Sequence: Synthetic oligonucleotide
cauacuuguccaagauggu

SEQ ID NO: 2246920 - RNA, 19 nt, Artificial Sequence
  Description of Artificial Sequence: Synthetic oligonucleotide
uagggaccaucugggauuu

SEQ ID NO: 2246921 - RNA, 19 nt, Artificial Sequence
  Description of Artificial Sequence: Synthetic oligonucleotide
gagugcuguagaugugggu

SEQ ID NO: 2246922 - RNA, 19 nt, Artificial Sequence
  Description of Artificial Sequence: Synthetic oligonucleotide
ugcuguagauguggguguu

SEQ ID NO: 2246923 - RNA, 19 nt, Artificial Sequence
  Description of Artificial Sequence: Synthetic oligonucleotide
gcuucgucuggaauuccug

SEQ ID NO: 2246924 - RNA, 19 nt, Artificial Sequence
  Description of Artificial Sequence: Synthetic oligonucleotide
ugggaacaauucccuucuu

SEQ ID NO: 2246925 - RNA, 19 nt, Artificial Sequence
  Description of Artificial Sequence: Synthetic oligonucleotide
ggcuccugccuuauugggc

SEQ ID NO: 2246926 - RNA, 19 nt, Artificial Sequence
  Description of Artificial Sequence: Synthetic oligonucleotide
cauugaugagagugcugua

SEQ ID NO: 2246927 - RNA, 19 nt, Artificial Sequence
  Description of Artificial Sequence: Synthetic oligonucleotide
ccggcuggagaccauguuc

SEQ ID NO: 2246928 - RNA, 19 nt, Artificial Sequence
  Description of Artificial Sequence: Synthetic oligonucleotide
cuuauugggcuacccuccu

SEQ ID NO: 2246929 - RNA, 19 nt, Artificial Sequence
  Description of Artificial Sequence: Synthetic oligonucleotide
caguguugucuugguuccc

SEQ ID NO: 2246930 - RNA, 19 nt, Artificial Sequence
  Description of Artificial Sequence: Synthetic oligonucleotide
aaggucacaucggccucua

SEQ ID NO: 2246931 - RNA, 19 nt, Artificial Sequence
  Description of Artificial Sequence: Synthetic oligonucleotide
uggaccucguuggcuccug

SEQ ID NO: 2246932 - RNA, 19 nt, Artificial Sequence
  Description of Artificial Sequence: Synthetic oligonucleotide
uccgcagauugggaacaau

SEQ ID NO: 2246933 - RNA, 19 nt, Artificial Sequence
  Description of Artificial Sequence: Synthetic oligonucleotide
gucgcaucauugagugcac

SEQ ID NO: 2246934 - RNA, 19 nt, Artificial Sequence
  Description of Artificial Sequence: Synthetic oligonucleotide
cagggucgcaucauugagu

SEQ ID NO: 2246935 - RNA, 19 nt, Artificial Sequence
  Description of Artificial Sequence: Synthetic oligonucleotide
guggugccuagagaagaga

SEQ ID NO: 2246936 - RNA, 19 nt, Artificial Sequence
  Description of Artificial Sequence: Synthetic oligonucleotide
gguguggccacugucccaa

SEQ ID NO: 2246937 - RNA, 19 nt, Artificial Sequence
  Description of Artificial Sequence: Synthetic oligonucleotide
cuuaggcuucgucuggaau

SEQ ID NO: 2246938 - RNA, 19 nt, Artificial Sequence
  Description of Artificial Sequence: Synthetic oligonucleotide
gcuggcggaugauuacuuc

SEQ ID NO: 2246939 - RNA, 19 nt, Artificial Sequence
  Description of Artificial Sequence: Synthetic oligonucleotide
uggcacccaauggccaggu

SEQ ID NO: 2246940 - RNA, 19 nt, Artificial Sequence
  Description of Artificial Sequence: Synthetic oligonucleotide
cucuacaggugacaguguu

SEQ ID NO: 2246941 - RNA, 19 nt, Artificial Sequence
  Description of Artificial Sequence: Synthetic oligonucleotide
ccaucgaucuucuccaagu

SEQ ID NO: 2246942 - RNA, 19 nt, Artificial Sequence
  Description of Artificial Sequence: Synthetic oligonucleotide
cgcauuguggcugccgggg

SEQ ID NO: 2246943 - RNA, 19 nt, Artificial Sequence
  Description of Artificial Sequence: Synthetic oligonucleotide
uccgaggggcucccagguu

SEQ ID NO: 2246944 - RNA, 19 nt, Artificial Sequence
  Description of Artificial Sequence: Synthetic oligonucleotide
uaccaucucugggccuaug

SEQ ID NO: 2246945 - RNA, 19 nt, Artificial Sequence
  Description of Artificial Sequence: Synthetic oligonucleotide
cugccgggguugcucuggc

SEQ ID NO: 2246946 - RNA, 19 nt, Artificial Sequence
  Description of Artificial Sequence: Synthetic oligonucleotide
cccagguuccaccaccuca

SEQ ID NO: 2246947 - RNA, 19 nt, Artificial Sequence
  Description of Artificial Sequence: Synthetic oligonucleotide
cccucucuacauucuggac

SEQ ID NO: 2246948 - RNA, 19 nt, Artificial Sequence
  Description of Artificial Sequence: Synthetic oligonucleotide
ccgaggggcucccagguuc

SEQ ID NO: 2246949 - RNA, 19 nt, Artificial Sequence
  Description of Artificial Sequence: Synthetic oligonucleotide
guggcugccgggguugcuc

SEQ ID NO: 2246950 - RNA, 19 nt, Artificial Sequence
  Description of Artificial Sequence: Synthetic oligonucleotide
gcacgcauuguggcugccg

SEQ ID NO: 2246951 - RNA, 19 nt, Artificial Sequence
  Description of Artificial Sequence: Synthetic oligonucleotide
ccccuuaggcuucgucugg

SEQ ID NO: 2246952 - RNA, 19 nt, Artificial Sequence
  Description of Artificial Sequence: Synthetic oligonucleotide
acaucggccucuaccucau

SEQ ID NO: 2246953 - RNA, 19 nt, Artificial Sequence
  Description of Artificial Sequence: Synthetic oligonucleotide
cucguuggcuccugccuua

SEQ ID NO: 2246954 - RNA, 19 nt, Artificial Sequence
  Description of Artificial Sequence: Synthetic oligonucleotide
ggucaaaggugggagggua

SEQ ID NO: 2246955 - RNA, 19 nt, Artificial Sequence
  Description of Artificial Sequence: Synthetic oligonucleotide
ugcacgcauuguggcugcc

SEQ ID NO: 2246956 - RNA, 19 nt, Artificial Sequence
  Description of Artificial Sequence: Synthetic oligonucleotide
gagggagcaugggcucuac

SEQ ID NO: 2246957 - RNA, 19 nt, Artificial Sequence
  Description of Artificial Sequence: Synthetic oligonucleotide
gggaacaauucccuucuuu

SEQ ID NO: 2246958 - RNA, 19 nt, Artificial Sequence
  Description of Artificial Sequence: Synthetic oligonucleotide
ugccgggguugcucuggcu

SEQ ID NO: 2246959 - RNA, 19 nt, Artificial Sequence
  Description of Artificial Sequence: Synthetic oligonucleotide
ccuagagaagagacccaga

SEQ ID NO: 2246960 - RNA, 19 nt, Artificial Sequence
  Description of Artificial Sequence: Synthetic oligonucleotide
gggaggguacucagcagca

SEQ ID NO: 2246961 - RNA, 19 nt, Artificial Sequence
  Description of Artificial Sequence: Synthetic oligonucleotide
agagggagcaugggcucua

SEQ ID NO: 2246962 - RNA, 19 nt, Artificial Sequence
  Description of Artificial Sequence: Synthetic oligonucleotide
cucuguuacagggucgcau

SEQ ID NO: 2246963 - RNA, 19 nt, Artificial Sequence
  Description of Artificial Sequence: Synthetic oligonucleotide
gggucgcaucauugagugc

SEQ ID NO: 2246964 - RNA, 19 nt, Artificial Sequence
  Description of Artificial Sequence: Synthetic oligonucleotide
ggcugacaccccucucuac

SEQ ID NO: 2246965 - RNA, 19 nt, Artificial Sequence
  Description of Artificial Sequence: Synthetic oligonucleotide
cugacaccccucucuacau

SEQ ID NO: 2246966 - RNA, 19 nt, Artificial Sequence
  Description of Artificial Sequence: Synthetic oligonucleotide
cauugagugcacgcauugu

SEQ ID NO: 2246967 - RNA, 19 nt, Artificial Sequence
  Description of Artificial Sequence: Synthetic oligonucleotide
cccaauggccagguugcag

SEQ ID NO: 2246968 - RNA, 19 nt, Artificial Sequence
  Description of Artificial Sequence: Synthetic oligonucleotide
acucuagcuggcggaugau

SEQ ID NO: 2246969 - RNA, 19 nt, Artificial Sequence
  Description of Artificial Sequence: Synthetic oligonucleotide
gccuaucagcagguguggc

SEQ ID NO: 2246970 - RNA, 19 nt, Artificial Sequence
  Description of Artificial Sequence: Synthetic oligonucleotide
ggaccucguuggcuccugc

SEQ ID NO: 2246971 - RNA, 19 nt, Artificial Sequence
  Description of Artificial Sequence: Synthetic oligonucleotide
acccaauggccagguugca

SEQ ID NO: 2246972 - RNA, 19 nt, Artificial Sequence
  Description of Artificial Sequence: Synthetic oligonucleotide
auaccaucucugggccuau

SEQ ID NO: 2246973 - RNA, 19 nt, Artificial Sequence
  Description of Artificial Sequence: Synthetic oligonucleotide
cgcauugaugagagugcug

SEQ ID NO: 2246974 - RNA, 19 nt, Artificial Sequence
  Description of Artificial Sequence: Synthetic oligonucleotide
uacuggcaacagugccuuu

SEQ ID NO: 2246975 - RNA, 19 nt, Artificial Sequence
  Description of Artificial Sequence: Synthetic oligonucleotide
ggggcuuccucugcuggca

SEQ ID NO: 2246976 - RNA, 19 nt, Artificial Sequence
  Description of Artificial Sequence: Synthetic oligonucleotide
ggguacucagcagcaaacu

SEQ ID NO: 2246977 - RNA, 19 nt, Artificial Sequence
  Description of Artificial Sequence: Synthetic oligonucleotide
ccugccuuauugggcuacc

SEQ ID NO: 2246978 - RNA, 19 nt, Artificial Sequence
  Description of Artificial Sequence: Synthetic oligonucleotide
cuccgaggggcucccaggu

SEQ ID NO: 2246979 - RNA, 19 nt, Artificial Sequence
  Description of Artificial Sequence: Synthetic oligonucleotide
ccacugcuuguaauaagcu

SEQ ID NO: 2246980 - RNA, 19 nt, Artificial Sequence
  Description of Artificial Sequence: Synthetic oligonucleotide
cucgaaagccaucgaucuu

SEQ ID NO: 2246981 - RNA, 19 nt, Artificial Sequence
  Description of Artificial Sequence: Synthetic oligonucleotide
cugggacacuguuuugcuu

SEQ ID NO: 2246982 - RNA, 19 nt, Artificial Sequence
  Description of Artificial Sequence: Synthetic oligonucleotide
ccagccuaucagcaggugu

SEQ ID NO: 2246983 - RNA, 19 nt, Artificial Sequence
  Description of Artificial Sequence: Synthetic oligonucleotide
cuucauucacugggacacu

SEQ ID NO: 2246984 - RNA, 19 nt, Artificial Sequence
  Description of Artificial Sequence: Synthetic oligonucleotide
ggaggguacucagcagcaa

SEQ ID NO: 2246985 - RNA, 19 nt, Artificial Sequence
  Description of Artificial Sequence: Synthetic oligonucleotide
ggcuucgucuggaauuccu

SEQ ID NO: 2246986 - RNA, 19 nt, Artificial Sequence
  Description of Artificial Sequence: Synthetic oligonucleotide
cuggacuuuggaccucguu

SEQ ID NO: 2246987 - RNA, 19 nt, Artificial Sequence
  Description of Artificial Sequence: Synthetic oligonucleotide
gaggggcucccagguucca

SEQ ID NO: 2246988 - RNA, 19 nt, Artificial Sequence
  Description of Artificial Sequence: Synthetic oligonucleotide
cgaucuucuccaaguaggu

SEQ ID NO: 2246989 - RNA, 19 nt, Artificial Sequence
  Description of Artificial Sequence: Synthetic oligonucleotide
guccgcagauugggaacaa

SEQ ID NO: 2246990 - RNA, 19 nt, Artificial Sequence
  Description of Artificial Sequence: Synthetic oligonucleotide
cacugucccaaaggagacu

SEQ ID NO: 2246991 - RNA, 19 nt, Artificial Sequence
  Description of Artificial Sequence: Synthetic oligonucleotide
gccagccuaucagcaggug

SEQ ID NO: 2246992 - RNA, 19 nt, Artificial Sequence
  Description of Artificial Sequence: Synthetic oligonucleotide
ccgcagauugggaacaauu

SEQ ID NO: 2246993 - RNA, 19 nt, Artificial Sequence
  Description of Artificial Sequence: Synthetic oligonucleotide
ccuuaggcuucgucuggaa

SEQ ID NO: 2246994 - RNA, 19 nt, Artificial Sequence
  Description of Artificial Sequence: Synthetic oligonucleotide
gcauaccaucucugggccu

SEQ ID NO: 2246995 - RNA, 19 nt, Artificial Sequence
  Description of Artificial Sequence: Synthetic oligonucleotide
ggcggaugauuacuucauu

SEQ ID NO: 2246996 - RNA, 19 nt, Artificial Sequence
  Description of Artificial Sequence: Synthetic oligonucleotide
gcaagcaguugcauaccau

SEQ ID NO: 2246997 - RNA, 19 nt, Artificial Sequence
  Description of Artificial Sequence: Synthetic oligonucleotide
cucuagcuggcggaugauu

SEQ ID NO: 2246998 - RNA, 19 nt, Artificial Sequence
  Description of Artificial Sequence: Synthetic oligonucleotide
gggcucuacaggugacagu

SEQ ID NO: 2246999 - RNA, 19 nt, Artificial Sequence
  Description of Artificial Sequence: Synthetic oligonucleotide
ccccaucaaggccagccua

SEQ ID NO: 2247000 - RNA, 19 nt, Artificial Sequence
  Description of Artificial Sequence: Synthetic oligonucleotide
auguccggcuggagaccau

SEQ ID NO: 2247001 - RNA, 19 nt, Artificial Sequence
  Description of Artificial Sequence: Synthetic oligonucleotide
gggguugcucuggcugaca

SEQ ID NO: 2247002 - RNA, 19 nt, Artificial Sequence
  Description of Artificial Sequence: Synthetic oligonucleotide
cccuuaggcuucgucugga

SEQ ID NO: 2247003 - RNA, 19 nt, Artificial Sequence
  Description of Artificial Sequence: Synthetic oligonucleotide
ggucugcaagcaguugcau

SEQ ID NO: 2247004 - RNA, 19 nt, Artificial Sequence
  Description of Artificial Sequence: Synthetic oligonucleotide
ccgcauugaugagagugcu

SEQ ID NO: 2247005 - RNA, 19 nt, Artificial Sequence
  Description of Artificial Sequence: Synthetic oligonucleotide
ccuugcucuucuuccuaau

SEQ ID NO: 2247006 - RNA, 19 nt, Artificial Sequence
  Description of Artificial Sequence: Synthetic oligonucleotide
gcucuacaggugacagugu

SEQ ID NO: 2247007 - RNA, 19 nt, Artificial Sequence
  Description of Artificial Sequence: Synthetic oligonucleotide
caucggccucuaccucaua

SEQ ID NO: 2247008 - RNA, 19 nt, Artificial Sequence
  Description of Artificial Sequence: Synthetic oligonucleotide
gccagcagagugaggguuu

SEQ ID NO: 2247009 - RNA, 19 nt, Artificial Sequence
  Description of Artificial Sequence: Synthetic oligonucleotide
ccucuguuacagggucgca

SEQ ID NO: 2247010 - RNA, 19 nt, Artificial Sequence
  Description of Artificial Sequence: Synthetic oligonucleotide
ccucguuggcuccugccuu

SEQ ID NO: 2247011 - RNA, 19 nt, Artificial Sequence
  Description of Artificial Sequence: Synthetic oligonucleotide
cucccaggucucccaccuu

SEQ ID NO: 2247012 - RNA, 19 nt, Artificial Sequence
  Description of Artificial Sequence: Synthetic oligonucleotide
ggacuccgaggggcuccca

SEQ ID NO: 2247013 - RNA, 19 nt, Artificial Sequence
  Description of Artificial Sequence: Synthetic oligonucleotide
gguuccccuuaggcuucgu

SEQ ID NO: 2247014 - RNA, 19 nt, Artificial Sequence
  Description of Artificial Sequence: Synthetic oligonucleotide
gcuauuacuauuuugaugg

SEQ ID NO: 2247015 - RNA, 19 nt, Artificial Sequence
  Description of Artificial Sequence: Synthetic oligonucleotide
uaugguuaggaucugaaag

SEQ ID NO: 2247016 - RNA, 19 nt, Artificial Sequence
  Description of Artificial Sequence: Synthetic oligonucleotide
aagucuuccacaauguggc

SEQ ID NO: 2247017 - RNA, 19 nt, Artificial Sequence
  Description of Artificial Sequence: Synthetic oligonucleotide
uuuugauggccacuuaugg

SEQ ID NO: 2247018 - RNA, 19 nt, Artificial Sequence
  Description of Artificial Sequence: Synthetic oligonucleotide
gaagaauuggcccagguac

SEQ ID NO: 2247019 - RNA, 19 nt, Artificial Sequence
  Description of Artificial Sequence: Synthetic oligonucleotide
ugagcuaugguuaggaucu

SEQ ID NO: 2247020 - RNA, 19 nt, Artificial Sequence
  Description of Artificial Sequence: Synthetic oligonucleotide
augguuaggaucugaaagc

SEQ ID NO: 2247021 - RNA, 19 nt, Artificial Sequence
  Description of Artificial Sequence: Synthetic oligonucleotide
acugggaccauggagaugc

SEQ ID NO: 2247022 - RNA, 19 nt, Artificial Sequence
  Description of Artificial Sequence: Synthetic oligonucleotide
aauaggucauugcuauuac

SEQ ID NO: 2247023 - RNA, 19 nt, Artificial Sequence
  Description of Artificial Sequence: Synthetic oligonucleotide
ugauacuuggugaugaggu

SEQ ID NO: 2247024 - RNA, 19 nt, Artificial Sequence
  Description of Artificial Sequence: Synthetic oligonucleotide
aggaucugaaagcugacgg

SEQ ID NO: 2247025 - RNA, 19 nt, Artificial Sequence
  Description of Artificial Sequence: Synthetic oligonucleotide
ugugacucggcauacagac

SEQ ID NO: 2247026 - RNA, 19 nt, Artificial Sequence
  Description of Artificial Sequence: Synthetic oligonucleotide
aaugcugggacuccccuag

SEQ ID NO: 2247027 - RNA, 19 nt, Artificial Sequence
  Description of Artificial Sequence: Synthetic oligonucleotide
gaaagcugacgguacaggg

SEQ ID NO: 2247028 - RNA, 19 nt, Artificial Sequence
  Description of Artificial Sequence: Synthetic oligonucleotide
ucugccgucguucaucuag

SEQ ID NO: 2247029 - RNA, 19 nt, Artificial Sequence
  Description of Artificial Sequence: Synthetic oligonucleotide
uccggaauggccaaauuug

SEQ ID NO: 2247030 - RNA, 19 nt, Artificial Sequence
  Description of Artificial Sequence: Synthetic oligonucleotide
ugcuauuacuauuuugaug

SEQ ID NO: 2247031 - RNA, 19 nt, Artificial Sequence
  Description of Artificial Sequence: Synthetic oligonucleotide
aagaauuggcccagguacc

SEQ ID NO: 2247032 - RNA, 19 nt, Artificial Sequence
  Description of Artificial Sequence: Synthetic oligonucleotide
aaugcuugauacugccgag

SEQ ID NO: 2247033 - RNA, 19 nt, Artificial Sequence
  Description of Artificial Sequence: Synthetic oligonucleotide
ucuagacuuggcuugucag

SEQ ID NO: 2247034 - RNA, 19 nt, Artificial Sequence
  Description of Artificial Sequence: Synthetic oligonucleotide
gaagccgggacaaugcugg

SEQ ID NO: 2247035 - RNA, 19 nt, Artificial Sequence
  Description of Artificial Sequence: Synthetic oligonucleotide
agguccaaaggccaggguc

SEQ ID NO: 2247036 - RNA, 19 nt, Artificial Sequence
  Description of Artificial Sequence: Synthetic oligonucleotide
uaggucauugcuauuacua

SEQ ID NO: 2247037 - RNA, 19 nt, Artificial Sequence
  Description of Artificial Sequence: Synthetic oligonucleotide
acuacagugguuaagggca

SEQ ID NO: 2247038 - RNA, 19 nt, Artificial Sequence
  Description of Artificial Sequence: Synthetic oligonucleotide
uucucaggugcaaauaggu

SEQ ID NO: 2247039 - RNA, 19 nt, Artificial Sequence
  Description of Artificial Sequence: Synthetic oligonucleotide
agcuugcucagguuggccc

SEQ ID NO: 2247040 - RNA, 19 nt, Artificial Sequence
  Description of Artificial Sequence: Synthetic oligonucleotide
augagguccaguuugcugu

SEQ ID NO: 2247041 - RNA, 19 nt, Artificial Sequence
  Description of Artificial Sequence: Synthetic oligonucleotide
uauuacuauuuugauggcc

SEQ ID NO: 2247042 - RNA, 19 nt, Artificial Sequence
  Description of Artificial Sequence: Synthetic oligonucleotide
ugacucggcauacagacau

SEQ ID NO: 2247043 - RNA, 19 nt, Artificial Sequence
  Description of Artificial Sequence: Synthetic oligonucleotide
aauuggcccagguacccag

SEQ ID NO: 2247044 - RNA, 19 nt, Artificial Sequence
  Description of Artificial Sequence: Synthetic oligonucleotide
agggucaagggacuggcac

SEQ ID NO: 2247045 - RNA, 19 nt, Artificial Sequence
  Description of Artificial Sequence: Synthetic oligonucleotide
cuagacuuggcuugucagg

SEQ ID NO: 2247046 - RNA, 19 nt, Artificial Sequence
  Description of Artificial Sequence: Synthetic oligonucleotide
ucagguuggcccuguaggg

SEQ ID NO: 2247047 - RNA, 19 nt, Artificial Sequence
  Description of Artificial Sequence: Synthetic oligonucleotide
ucggcauacagacaucgga

SEQ ID NO: 2247048 - RNA, 19 nt, Artificial Sequence
  Description of Artificial Sequence: Synthetic oligonucleotide
gaauggccaaauuugguga

SEQ ID NO: 2247049 - RNA, 19 nt, Artificial Sequence
  Description of Artificial Sequence: Synthetic oligonucleotide
uacccgggaagacaguggg

SEQ ID NO: 2247050 - RNA, 19 nt, Artificial Sequence
  Description of Artificial Sequence: Synthetic oligonucleotide
aggaggacgagguacccgg

SEQ ID NO: 2247051 - RNA, 19 nt, Artificial Sequence
  Description of Artificial Sequence: Synthetic oligonucleotide
uucauggugggcaggaccu

SEQ ID NO: 2247052 - RNA, 19 nt, Artificial Sequence
  Description of Artificial Sequence: Synthetic oligonucleotide
uugagcuaugguuaggauc

SEQ ID NO: 2247053 - RNA, 19 nt, Artificial Sequence
  Description of Artificial Sequence: Synthetic oligonucleotide
cuugacuuggcugggagcc

SEQ ID NO: 2247054 - RNA, 19 nt, Artificial Sequence
  Description of Artificial Sequence: Synthetic oligonucleotide
ugaugauacuuggugauga

SEQ ID NO: 2247055 - RNA, 19 nt, Artificial Sequence
  Description of Artificial Sequence: Synthetic oligonucleotide
ugcuugauacugccgaggc

SEQ ID NO: 2247056 - RNA, 19 nt, Artificial Sequence
  Description of Artificial Sequence: Synthetic oligonucleotide
auacagacaucggaacucc

SEQ ID NO: 2247057 - RNA, 19 nt, Artificial Sequence
  Description of Artificial Sequence: Synthetic oligonucleotide
ugcaaauaggucauugcua

SEQ ID NO: 2247058 - RNA, 19 nt, Artificial Sequence
  Description of Artificial Sequence: Synthetic oligonucleotide
cucaggugcaaauagguca

SEQ ID NO: 2247059 - RNA, 19 nt, Artificial Sequence
  Description of Artificial Sequence: Synthetic oligonucleotide
cacuacagugguuaagggc

SEQ ID NO: 2247060 - RNA, 19 nt, Artificial Sequence
  Description of Artificial Sequence: Synthetic oligonucleotide
acaguggguccucauugcc

SEQ ID NO: 2247061 - RNA, 19 nt, Artificial Sequence
  Description of Artificial Sequence: Synthetic oligonucleotide
ugagccuggcugcaaagcc

SEQ ID NO: 2247062 - RNA, 19 nt, Artificial Sequence
  Description of Artificial Sequence: Synthetic oligonucleotide
ggugaugagguccaguuug

SEQ ID NO: 2247063 - RNA, 19 nt, Artificial Sequence
  Description of Artificial Sequence: Synthetic oligonucleotide
gagaccauuggguccaggc

SEQ ID NO: 2247064 - RNA, 19 nt, Artificial Sequence
  Description of Artificial Sequence: Synthetic oligonucleotide
agacaguggguccucauug

SEQ ID NO: 2247065 - RNA, 19 nt, Artificial Sequence
  Description of Artificial Sequence: Synthetic oligonucleotide
gucagcguuucucaggugc

SEQ ID NO: 2247066 - RNA, 19 nt, Artificial Sequence
  Description of Artificial Sequence: Synthetic oligonucleotide
guuacuggagggugaagag

SEQ ID NO: 2247067 - RNA, 19 nt, Artificial Sequence
  Description of Artificial Sequence: Synthetic oligonucleotide
gaugauacuuggugaugag

SEQ ID NO: 2247068 - RNA, 19 nt, Artificial Sequence
  Description of Artificial Sequence: Synthetic oligonucleotide
agaauuggcccagguaccc

SEQ ID NO: 2247069 - RNA, 19 nt, Artificial Sequence
  Description of Artificial Sequence: Synthetic oligonucleotide
cuagugaaguggagaaggg

SEQ ID NO: 2247070 - RNA, 19 nt, Artificial Sequence
  Description of Artificial Sequence: Synthetic oligonucleotide
gaggacugggaccauggag

SEQ ID NO: 2247071 - RNA, 19 nt, Artificial Sequence
  Description of Artificial Sequence: Synthetic oligonucleotide
guacccagcgaccucgugg

SEQ ID NO: 2247072 - RNA, 19 nt, Artificial Sequence
  Description of Artificial Sequence: Synthetic oligonucleotide
ucugaaagcugacgguaca

SEQ ID NO: 2247073 - RNA, 19 nt, Artificial Sequence
  Description of Artificial Sequence: Synthetic oligonucleotide
ggaauggccaaauuuggug

SEQ ID NO: 2247074 - RNA, 19 nt, Artificial Sequence
  Description of Artificial Sequence: Synthetic oligonucleotide
gugaaugcuugauacugcc

SEQ ID NO: 2247075 - RNA, 19 nt, Artificial Sequence
  Description of Artificial Sequence: Synthetic oligonucleotide
aggugaaugcuugauacug

SEQ ID NO: 2247076 - RNA, 19 nt, Artificial Sequence
  Description of Artificial Sequence: Synthetic oligonucleotide
uuaagggcaggagaggacu

SEQ ID NO: 2247077 - RNA, 19 nt, Artificial Sequence
  Description of Artificial Sequence: Synthetic oligonucleotide
gaccccaucaccaugucac

SEQ ID NO: 2247078 - RNA, 19 nt, Artificial Sequence
  Description of Artificial Sequence: Synthetic oligonucleotide
auacugccgaggcuguuac

SEQ ID NO: 2247079 - RNA, 19 nt, Artificial Sequence
  Description of Artificial Sequence: Synthetic oligonucleotide
ucaggugcaaauaggucau

SEQ ID NO: 2247080 - RNA, 19 nt, Artificial Sequence
  Description of Artificial Sequence: Synthetic oligonucleotide
gugguuaagggcaggagag

SEQ ID NO: 2247081 - RNA, 19 nt, Artificial Sequence
  Description of Artificial Sequence: Synthetic oligonucleotide
ugcgaacuggguuugguuc

SEQ ID NO: 2247082 - RNA, 19 nt, Artificial Sequence
  Description of Artificial Sequence: Synthetic oligonucleotide
ucugggagaccauuggguc

SEQ ID NO: 2247083 - RNA, 19 nt, Artificial Sequence
  Description of Artificial Sequence: Synthetic oligonucleotide
augauacuuggugaugagg

SEQ ID NO: 2247084 - RNA, 19 nt, Artificial Sequence
  Description of Artificial Sequence: Synthetic oligonucleotide
cagacaucggaacucccgg

SEQ ID NO: 2247085 - RNA, 19 nt, Artificial Sequence
  Description of Artificial Sequence: Synthetic oligonucleotide
auggugggcuaccagcuuc

SEQ ID NO: 2247086 - RNA, 19 nt, Artificial Sequence
  Description of Artificial Sequence: Synthetic oligonucleotide
guucugggagaccauuggg

SEQ ID NO: 2247087 - RNA, 19 nt, Artificial Sequence
  Description of Artificial Sequence: Synthetic oligonucleotide
ugucaggccuggcugaaga

SEQ ID NO: 2247088 - RNA, 19 nt, Artificial Sequence
  Description of Artificial Sequence: Synthetic oligonucleotide
caagggacuggcacuacag

SEQ ID NO: 2247089 - RNA, 19 nt, Artificial Sequence
  Description of Artificial Sequence: Synthetic oligonucleotide
acucggcauacagacaucg

SEQ ID NO: 2247090 - RNA, 19 nt, Artificial Sequence
  Description of Artificial Sequence: Synthetic oligonucleotide
agucuuccacaauguggcc

SEQ ID NO: 2247091 - RNA, 19 nt, Artificial Sequence
  Description of Artificial Sequence: Synthetic oligonucleotide
cuauuacuauuuugauggc

SEQ ID NO: 2247092 - RNA, 19 nt, Artificial Sequence
  Description of Artificial Sequence: Synthetic oligonucleotide
uuacuauuuugauggccac

SEQ ID NO: 2247093 - RNA, 19 nt, Artificial Sequence
  Description of Artificial Sequence: Synthetic oligonucleotide
uguaggguccaggaguuga

SEQ ID NO: 2247094 - RNA, 19 nt, Artificial Sequence
  Description of Artificial Sequence: Synthetic oligonucleotide
gagaggacugggaccaugg

SEQ ID NO: 2247095 - RNA, 19 nt, Artificial Sequence
  Description of Artificial Sequence: Synthetic oligonucleotide
cauacagacaucggaacuc

SEQ ID NO: 2247096 - RNA, 19 nt, Artificial Sequence
  Description of Artificial Sequence: Synthetic oligonucleotide
ccuagugaaguggagaagg

SEQ ID NO: 2247097 - RNA, 19 nt, Artificial Sequence
  Description of Artificial Sequence: Synthetic oligonucleotide
acagacaucggaacucccg

SEQ ID NO: 2247098 - RNA, 19 nt, Artificial Sequence
  Description of Artificial Sequence: Synthetic oligonucleotide
ugguuaggaucugaaagcu

SEQ ID NO: 2247099 - RNA, 19 nt, Artificial Sequence
  Description of Artificial Sequence: Synthetic oligonucleotide
uuacuggagggugaagagc

SEQ ID NO: 2247100 - RNA, 19 nt, Artificial Sequence
  Description of Artificial Sequence: Synthetic oligonucleotide
ucucaggugcaaauagguc

SEQ ID NO: 2247101 - RNA, 19 nt, Artificial Sequence
  Description of Artificial Sequence: Synthetic oligonucleotide
uuaugggaggcucccggga

SEQ ID NO: 2247102 - RNA, 19 nt, Artificial Sequence
  Description of Artificial Sequence: Synthetic oligonucleotide
gauggccacuuaugggagg

SEQ ID NO: 2247103 - RNA, 19 nt, Artificial Sequence
  Description of Artificial Sequence: Synthetic oligonucleotide
ucaagggacuggcacuaca

SEQ ID NO: 2247104 - RNA, 19 nt, Artificial Sequence
  Description of Artificial Sequence: Synthetic oligonucleotide
cuggaagccgggacaaugc

SEQ ID NO: 2247105 - RNA, 19 nt, Artificial Sequence
  Description of Artificial Sequence: Synthetic oligonucleotide
gagguacccgggaagacag

SEQ ID NO: 2247106 - RNA, 19 nt, Artificial Sequence
  Description of Artificial Sequence: Synthetic oligonucleotide
accucguggaaggaugggc

SEQ ID NO: 2247107 - RNA, 19 nt, Artificial Sequence
  Description of Artificial Sequence: Synthetic oligonucleotide
ucuugacuuggcugggagc

SEQ ID NO: 2247108 - RNA, 19 nt, Artificial Sequence
  Description of Artificial Sequence: Synthetic oligonucleotide
ugccacagaagccuuccac

SEQ ID NO: 2247109 - RNA, 19 nt, Artificial Sequence
  Description of Artificial Sequence: Synthetic oligonucleotide
aggucagcguuucucaggu

SEQ ID NO: 2247110 - RNA, 19 nt, Artificial Sequence
  Description of Artificial Sequence: Synthetic oligonucleotide
uugcuauuacuauuuugau

SEQ ID NO: 2247111 - RNA, 19 nt, Artificial Sequence
  Description of Artificial Sequence: Synthetic oligonucleotide
aguugagcuaugguuagga

SEQ ID NO: 2247112 - RNA, 19 nt, Artificial Sequence
  Description of Artificial Sequence: Synthetic oligonucleotide
ugguucugggagaccauug

SEQ ID NO: 2247113 - RNA, 19 nt, Artificial Sequence
  Description of Artificial Sequence: Synthetic oligonucleotide
ggugcaaauaggucauugc

SEQ ID NO: 2247114 - RNA, 19 nt, Artificial Sequence
  Description of Artificial Sequence: Synthetic oligonucleotide
auaggucauugcuauuacu

SEQ ID NO: 2247115 - RNA, 19 nt, Artificial Sequence
  Description of Artificial Sequence: Synthetic oligonucleotide
gacuccccuagugaagugg

SEQ ID NO: 2247116 - RNA, 19 nt, Artificial Sequence
  Description of Artificial Sequence: Synthetic oligonucleotide
ucguucaucuagacuuggc

SEQ ID NO: 2247117 - RNA, 19 nt, Artificial Sequence
  Description of Artificial Sequence: Synthetic oligonucleotide
aggacugggaccauggaga

SEQ ID NO: 2247118 - RNA, 19 nt, Artificial Sequence
  Description of Artificial Sequence: Synthetic oligonucleotide
aucugaaagcugacgguac

SEQ ID NO: 2247119 - RNA, 19 nt, Artificial Sequence
  Description of Artificial Sequence: Synthetic oligonucleotide
uugaugauacuuggugaug

SEQ ID NO: 2247120 - RNA, 19 nt, Artificial Sequence
  Description of Artificial Sequence: Synthetic oligonucleotide
gacaaggaccccaucacca

SEQ ID NO: 2247121 - RNA, 19 nt, Artificial Sequence
  Description of Artificial Sequence: Synthetic oligonucleotide
uacccagcgaccucgugga

SEQ ID NO: 2247122 - RNA, 19 nt, Artificial Sequence
  Description of Artificial Sequence: Synthetic oligonucleotide
uguggccuagagucugccg

SEQ ID NO: 2247123 - RNA, 19 nt, Artificial Sequence
  Description of Artificial Sequence: Synthetic oligonucleotide
acugccgaggcuguuacug

SEQ ID NO: 2247124 - RNA, 19 nt, Artificial Sequence
  Description of Artificial Sequence: Synthetic oligonucleotide
gguucugggagaccauugg

SEQ ID NO: 2247125 - RNA, 19 nt, Artificial Sequence
  Description of Artificial Sequence: Synthetic oligonucleotide
ugugagccuggcugcaaag

SEQ ID NO: 2247126 - RNA, 19 nt, Artificial Sequence
  Description of Artificial Sequence: Synthetic oligonucleotide
cugggagaccauugggucc

SEQ ID NO: 2247127 - RNA, 19 nt, Artificial Sequence
  Description of Artificial Sequence: Synthetic oligonucleotide
uggccaaauuuggugauga

SEQ ID NO: 2247128 - RNA, 19 nt, Artificial Sequence
  Description of Artificial Sequence: Synthetic oligonucleotide
aucuagacuuggcuuguca

SEQ ID NO: 2247129 - RNA, 19 nt, Artificial Sequence
  Description of Artificial Sequence: Synthetic oligonucleotide
cuaccagcuucaugguggg

SEQ ID NO: 2247130 - RNA, 19 nt, Artificial Sequence
  Description of Artificial Sequence: Synthetic oligonucleotide
uggaaggaugggcucuuga

SEQ ID NO: 2247131 - RNA, 19 nt, Artificial Sequence
  Description of Artificial Sequence: Synthetic oligonucleotide
uuccagguccaaaggccag

SEQ ID NO: 2247132 - RNA, 19 nt, Artificial Sequence
  Description of Artificial Sequence: Synthetic oligonucleotide
ugggagcccauucucugga

SEQ ID NO: 2247133 - RNA, 19 nt, Artificial Sequence
  Description of Artificial Sequence: Synthetic oligonucleotide
gacaucggaacucccgguc

SEQ ID NO: 2247134 - RNA, 19 nt, Artificial Sequence
  Description of Artificial Sequence: Synthetic oligonucleotide
uggguuugguucugggaga

SEQ ID NO: 2247135 - RNA, 19 nt, Artificial Sequence
  Description of Artificial Sequence: Synthetic oligonucleotide
gaacaugggagcagaggug

SEQ ID NO: 2247136 - RNA, 19 nt, Artificial Sequence
  Description of Artificial Sequence: Synthetic oligonucleotide
cucuugacuuggcugggag

SEQ ID NO: 2247137 - RNA, 19 nt, Artificial Sequence
  Description of Artificial Sequence: Synthetic oligonucleotide
agcaccaugcuggugugag

SEQ ID NO: 2247138 - RNA, 19 nt, Artificial Sequence
  Description of Artificial Sequence: Synthetic oligonucleotide
agucagccgcuucucaucu

SEQ ID NO: 2247139 - RNA, 19 nt, Artificial Sequence
  Description of Artificial Sequence: Synthetic oligonucleotide
ggaguugagcuaugguuag

SEQ ID NO: 2247140 - RNA, 19 nt, Artificial Sequence
  Description of Artificial Sequence: Synthetic oligonucleotide
ugaagagcccguagcacuu

SEQ ID NO: 2247141 - RNA, 19 nt, Artificial Sequence
  Description of Artificial Sequence: Synthetic oligonucleotide
uacuauuuugauggccacu

SEQ ID NO: 2247142 - RNA, 19 nt, Artificial Sequence
  Description of Artificial Sequence: Synthetic oligonucleotide
uacagacaucggaacuccc

SEQ ID NO: 2247143 - RNA, 19 nt, Artificial Sequence
  Description of Artificial Sequence: Synthetic oligonucleotide
acaucggaacucccgguca

SEQ ID NO: 2247144 - RNA, 19 nt, Artificial Sequence
  Description of Artificial Sequence: Synthetic oligonucleotide
uggaagccgggacaaugcu

SEQ ID NO: 2247145 - RNA, 19 nt, Artificial Sequence
  Description of Artificial Sequence: Synthetic oligonucleotide
gggacuggcacuacagugg

SEQ ID NO: 2247146 - RNA, 19 nt, Artificial Sequence
  Description of Artificial Sequence: Synthetic oligonucleotide
cuacagugguuaagggcag

SEQ ID NO: 2247147 - RNA, 19 nt, Artificial Sequence
  Description of Artificial Sequence: Synthetic oligonucleotide
gaccuggggacaaggaccc

SEQ ID NO: 2247148 - RNA, 19 nt, Artificial Sequence
  Description of Artificial Sequence: Synthetic oligonucleotide
guugaugauacuuggugau

SEQ ID NO: 2247149 - RNA, 19 nt, Artificial Sequence
  Description of Artificial Sequence: Synthetic oligonucleotide
gugcaaauaggucauugcu

SEQ ID NO: 2247150 - RNA, 19 nt, Artificial Sequence
  Description of Artificial Sequence: Synthetic oligonucleotide
cucggcauacagacaucgg

SEQ ID NO: 2247151 - RNA, 19 nt, Artificial Sequence
  Description of Artificial Sequence: Synthetic oligonucleotide
uguggcccagagucagccg

SEQ ID NO: 2247152 - RNA, 19 nt, Artificial Sequence
  Description of Artificial Sequence: Synthetic oligonucleotide
agagucagccgcuucucau

SEQ ID NO: 2247153 - RNA, 19 nt, Artificial Sequence
  Description of Artificial Sequence: Synthetic oligonucleotide
cagguacccagcgaccucg

SEQ ID NO: 2247154 - RNA, 19 nt, Artificial Sequence
  Description of Artificial Sequence: Synthetic oligonucleotide
agucugccgucguucaucu

SEQ ID NO: 2247155 - RNA, 19 nt, Artificial Sequence
  Description of Artificial Sequence: Synthetic oligonucleotide
uccggccaugcgaacuggg

SEQ ID NO: 2247156 - RNA, 19 nt, Artificial Sequence
  Description of Artificial Sequence: Synthetic oligonucleotide
uacagugguuaagggcagg

SEQ ID NO: 2247157 - RNA, 19 nt, Artificial Sequence
  Description of Artificial Sequence: Synthetic oligonucleotide
ugacuguggccuagagucu

SEQ ID NO: 2247158 - RNA, 19 nt, Artificial Sequence
  Description of Artificial Sequence: Synthetic oligonucleotide
aagccgggacaaugcuggg

SEQ ID NO: 2247159 - RNA, 19 nt, Artificial Sequence
  Description of Artificial Sequence: Synthetic oligonucleotide
acuccggccaugcgaacug

SEQ ID NO: 2247160 - RNA, 19 nt, Artificial Sequence
  Description of Artificial Sequence: Synthetic oligonucleotide
cuggagggugaagagcccg

SEQ ID NO: 2247161 - RNA, 19 nt, Artificial Sequence
  Description of Artificial Sequence: Synthetic oligonucleotide
caugggagcagaggugacc

SEQ ID NO: 2247162 - RNA, 19 nt, Artificial Sequence
  Description of Artificial Sequence: Synthetic oligonucleotide
gaguugagcuaugguuagg

SEQ ID NO: 2247163 - RNA, 19 nt, Artificial Sequence
  Description of Artificial Sequence: Synthetic oligonucleotide
auuccagguccaaaggcca

SEQ ID NO: 2247164 - RNA, 19 nt, Artificial Sequence
  Description of Artificial Sequence: Synthetic oligonucleotide
cugccgaggcuguuacugg

SEQ ID NO: 2247165 - RNA, 19 nt, Artificial Sequence
  Description of Artificial Sequence: Synthetic oligonucleotide
agccgcuucucaucugcag

SEQ ID NO: 2247166 - RNA, 19 nt, Artificial Sequence
  Description of Artificial Sequence: Synthetic oligonucleotide
agacaucggaacucccggu

SEQ ID NO: 2247167 - RNA, 19 nt, Artificial Sequence
  Description of Artificial Sequence: Synthetic oligonucleotide
ugcagacccuacuccggcc

SEQ ID NO: 2247168 - RNA, 19 nt, Artificial Sequence
  Description of Artificial Sequence: Synthetic oligonucleotide
ccggaauggccaaauuugg

SEQ ID NO: 2247169 - RNA, 19 nt, Artificial Sequence
  Description of Artificial Sequence: Synthetic oligonucleotide
cauggugggcaggaccugg

SEQ ID NO: 2247170 - RNA, 19 nt, Artificial Sequence
  Description of Artificial Sequence: Synthetic oligonucleotide
cuaugguuaggaucugaaa

SEQ ID NO: 2247171 - RNA, 19 nt, Artificial Sequence
  Description of Artificial Sequence: Synthetic oligonucleotide
cugcagacccuacuccggc

SEQ ID NO: 2247172 - RNA, 19 nt, Artificial Sequence
  Description of Artificial Sequence: Synthetic oligonucleotide
gacaaugcugggacucccc

SEQ ID NO: 2247173 - RNA, 19 nt, Artificial Sequence
  Description of Artificial Sequence: Synthetic oligonucleotide
uggagggugaagagcccgu

SEQ ID NO: 2247174 - RNA, 19 nt, Artificial Sequence
  Description of Artificial Sequence: Synthetic oligonucleotide
cuggcugcaaagccaggug

SEQ ID NO: 2247175 - RNA, 19 nt, Artificial Sequence
  Description of Artificial Sequence: Synthetic oligonucleotide
ugccgaggcuguuacugga

SEQ ID NO: 2247176 - RNA, 19 nt, Artificial Sequence
  Description of Artificial Sequence: Synthetic oligonucleotide
cuuggcugggagcccauuc

SEQ ID NO: 2247177 - RNA, 19 nt, Artificial Sequence
  Description of Artificial Sequence: Synthetic oligonucleotide
aggaugggcucuugacuug

SEQ ID NO: 2247178 - RNA, 19 nt, Artificial Sequence
  Description of Artificial Sequence: Synthetic oligonucleotide
ugaccccacugccaggguc

SEQ ID NO: 2247179 - RNA, 19 nt, Artificial Sequence
  Description of Artificial Sequence: Synthetic oligonucleotide
gcaaauaggucauugcuau

SEQ ID NO: 2247180 - RNA, 19 nt, Artificial Sequence
  Description of Artificial Sequence: Synthetic oligonucleotide
ucucuggaagccgggacaa

SEQ ID NO: 2247181 - RNA, 19 nt, Artificial Sequence
  Description of Artificial Sequence: Synthetic oligonucleotide
agcccguagcacuuggaau

SEQ ID NO: 2247182 - RNA, 19 nt, Artificial Sequence
  Description of Artificial Sequence: Synthetic oligonucleotide
uggcacuacagugguuaag

SEQ ID NO: 2247183 - RNA, 19 nt, Artificial Sequence
  Description of Artificial Sequence: Synthetic oligonucleotide
guacccgggaagacagugg

SEQ ID NO: 2247184 - RNA, 19 nt, Artificial Sequence
  Description of Artificial Sequence: Synthetic oligonucleotide
ggugaaugcuugauacugc

SEQ ID NO: 2247185 - RNA, 19 nt, Artificial Sequence
  Description of Artificial Sequence: Synthetic oligonucleotide
ggugaccccacugccaggg

SEQ ID NO: 2247186 - RNA, 19 nt, Artificial Sequence
  Description of Artificial Sequence: Synthetic oligonucleotide
gaaaaggugaaugcuugau

SEQ ID NO: 2247187 - RNA, 19 nt, Artificial Sequence
  Description of Artificial Sequence: Synthetic oligonucleotide
gcacuacagugguuaaggg

SEQ ID NO: 2247188 - RNA, 19 nt, Artificial Sequence
  Description of Artificial Sequence: Synthetic oligonucleotide
cucauugccacagaagccu

SEQ ID NO: 2247189 - RNA, 19 nt, Artificial Sequence
  Description of Artificial Sequence: Synthetic oligonucleotide
gggacaaggaccccaucac

SEQ ID NO: 2247190 - RNA, 19 nt, Artificial Sequence
  Description of Artificial Sequence: Synthetic oligonucleotide
guucaucuagacuuggcuu

SEQ ID NO: 2247191 - RNA, 19 nt, Artificial Sequence
  Description of Artificial Sequence: Synthetic oligonucleotide
ucguggaaggaugggcucu

SEQ ID NO: 2247192 - RNA, 19 nt, Artificial Sequence
  Description of Artificial Sequence: Synthetic oligonucleotide
uugcuguggcccagaguca

SEQ ID NO: 2247193 - RNA, 19 nt, Artificial Sequence
  Description of Artificial Sequence: Synthetic oligonucleotide
gacccuacuccggccaugc

SEQ ID NO: 2247194 - RNA, 19 nt, Artificial Sequence
  Description of Artificial Sequence: Synthetic oligonucleotide
gacgagguacccgggaaga

SEQ ID NO: 2247195 - RNA, 19 nt, Artificial Sequence
  Description of Artificial Sequence: Synthetic oligonucleotide
gugaugagguccaguuugc

SEQ ID NO: 2247196 - RNA, 19 nt, Artificial Sequence
  Description of Artificial Sequence: Synthetic oligonucleotide
gagucugccgucguucauc

SEQ ID NO: 2247197 - RNA, 19 nt, Artificial Sequence
  Description of Artificial Sequence: Synthetic oligonucleotide
ggggacaaggaccccauca

SEQ ID NO: 2247198 - RNA, 19 nt, Artificial Sequence
  Description of Artificial Sequence: Synthetic oligonucleotide
uacuccggccaugcgaacu

SEQ ID NO: 2247199 - RNA, 19 nt, Artificial Sequence
  Description of Artificial Sequence: Synthetic oligonucleotide
gagcccguagcacuuggaa

SEQ ID NO: 2247200 - RNA, 19 nt, Artificial Sequence
  Description of Artificial Sequence: Synthetic oligonucleotide
acgagguacccgggaagac

SEQ ID NO: 2247201 - RNA, 19 nt, Artificial Sequence
  Description of Artificial Sequence: Synthetic oligonucleotide
caggaguugagcuaugguu

SEQ ID NO: 2247202 - RNA, 19 nt, Artificial Sequence
  Description of Artificial Sequence: Synthetic oligonucleotide
aggcuguuacuggagggug

SEQ ID NO: 2247203 - RNA, 19 nt, Artificial Sequence
  Description of Artificial Sequence: Synthetic oligonucleotide
agccuggcugcaaagccag

SEQ ID NO: 2247204 - RNA, 19 nt, Artificial Sequence
  Description of Artificial Sequence: Synthetic oligonucleotide
gauacugccgaggcuguua

SEQ ID NO: 2247205 - RNA, 19 nt, Artificial Sequence
  Description of Artificial Sequence: Synthetic oligonucleotide
gucauugcuauuacuauuu

SEQ ID NO: 2247206 - RNA, 19 nt, Artificial Sequence
  Description of Artificial Sequence: Synthetic oligonucleotide
augcgaacuggguuugguu

SEQ ID NO: 2247207 - RNA, 19 nt, Artificial Sequence
  Description of Artificial Sequence: Synthetic oligonucleotide
gaccucguggaaggauggg

SEQ ID NO: 2247208 - RNA, 19 nt, Artificial Sequence
  Description of Artificial Sequence: Synthetic oligonucleotide
uggccuagagucugccguc

SEQ ID NO: 2247209 - RNA, 19 nt, Artificial Sequence
  Description of Artificial Sequence: Synthetic oligonucleotide
guggccuagagucugccgu

SEQ ID NO: 2247210 - RNA, 19 nt, Artificial Sequence
  Description of Artificial Sequence: Synthetic oligonucleotide
gaggacgagguacccggga

SEQ ID NO: 2247211 - RNA, 19 nt, Artificial Sequence
  Description of Artificial Sequence: Synthetic oligonucleotide
ugggaccauggagaugccc

SEQ ID NO: 2247212 - RNA, 19 nt, Artificial Sequence
  Description of Artificial Sequence: Synthetic oligonucleotide
auggccaaauuuggugaug

SEQ ID NO: 2247213 - RNA, 19 nt, Artificial Sequence
  Description of Artificial Sequence: Synthetic oligonucleotide
gccgggacaaugcugggac

SEQ ID NO: 2247214 - RNA, 19 nt, Artificial Sequence
  Description of Artificial Sequence: Synthetic oligonucleotide
ggacgagguacccgggaag

SEQ ID NO: 2247215 - RNA, 19 nt, Artificial Sequence
  Description of Artificial Sequence: Synthetic oligonucleotide
gugagccuggcugcaaagc

SEQ ID NO: 2247216 - RNA, 19 nt, Artificial Sequence
  Description of Artificial Sequence: Synthetic oligonucleotide
gguacccgggaagacagug

SEQ ID NO: 2247217 - RNA, 19 nt, Artificial Sequence
  Description of Artificial Sequence: Synthetic oligonucleotide
ggaugggcucuugacuugg

SEQ ID NO: 2247218 - RNA, 19 nt, Artificial Sequence
  Description of Artificial Sequence: Synthetic oligonucleotide
aggcugugacucggcauac

SEQ ID NO: 2247219 - RNA, 19 nt, Artificial Sequence
  Description of Artificial Sequence: Synthetic oligonucleotide
agcuaugguuaggaucuga

SEQ ID NO: 2247220 - RNA, 19 nt, Artificial Sequence
  Description of Artificial Sequence: Synthetic oligonucleotide
gguuaggaucugaaagcug

SEQ ID NO: 2247221 - RNA, 19 nt, Artificial Sequence
  Description of Artificial Sequence: Synthetic oligonucleotide
cuccccuagugaaguggag

SEQ ID NO: 2247222 - RNA, 19 nt, Artificial Sequence
  Description of Artificial Sequence: Synthetic oligonucleotide
acuccccuagugaagugga

SEQ ID NO: 2247223 - RNA, 19 nt, Artificial Sequence
  Description of Artificial Sequence: Synthetic oligonucleotide
gagccuggcugcaaagcca

SEQ ID NO: 2247224 - RNA, 19 nt, Artificial Sequence
  Description of Artificial Sequence: Synthetic oligonucleotide
ggggcgggaacaugggagc

SEQ ID NO: 2247225 - RNA, 19 nt, Artificial Sequence
  Description of Artificial Sequence: Synthetic oligonucleotide
gggugaagagcccguagca

SEQ ID NO: 2247226 - RNA, 19 nt, Artificial Sequence
  Description of Artificial Sequence: Synthetic oligonucleotide
cacuuaugggaggcucccg

SEQ ID NO: 2247227 - RNA, 19 nt, Artificial Sequence
  Description of Artificial Sequence: Synthetic oligonucleotide
ggugaagagcccguagcac

SEQ ID NO: 2247228 - RNA, 19 nt, Artificial Sequence
  Description of Artificial Sequence: Synthetic oligonucleotide
uuggguccaggccccucac

SEQ ID NO: 2247229 - RNA, 19 nt, Artificial Sequence
  Description of Artificial Sequence: Synthetic oligonucleotide
caggcugugacucggcaua

SEQ ID NO: 2247230 - RNA, 19 nt, Artificial Sequence
  Description of Artificial Sequence: Synthetic oligonucleotide
ugccgucguucaucuagac

SEQ ID NO: 2247231 - RNA, 19 nt, Artificial Sequence
  Description of Artificial Sequence: Synthetic oligonucleotide
uugucaggccuggcugaag

SEQ ID NO: 2247232 - RNA, 19 nt, Artificial Sequence
  Description of Artificial Sequence: Synthetic oligonucleotide
gcacuuggaauuccagguc

SEQ ID NO: 2247233 - RNA, 19 nt, Artificial Sequence
  Description of Artificial Sequence: Synthetic oligonucleotide
ggcuaccagcuucauggug

SEQ ID NO: 2247234 - RNA, 19 nt, Artificial Sequence
  Description of Artificial Sequence: Synthetic oligonucleotide
gaacucccggucaaagucu

SEQ ID NO: 2247235 - RNA, 19 nt, Artificial Sequence
  Description of Artificial Sequence: Synthetic oligonucleotide
aacucccggucaaagucuu

SEQ ID NO: 2247236 - RNA, 19 nt, Artificial Sequence
  Description of Artificial Sequence: Synthetic oligonucleotide
ggucacaggaggaggacga

SEQ ID NO: 2247237 - RNA, 19 nt, Artificial Sequence
  Description of Artificial Sequence: Synthetic oligonucleotide
guaguugaugauacuuggu

SEQ ID NO: 2247238 - RNA, 19 nt, Artificial Sequence
  Description of Artificial Sequence: Synthetic oligonucleotide
gucacaggaggaggacgag

SEQ ID NO: 2247239 - RNA, 19 nt, Artificial Sequence
  Description of Artificial Sequence: Synthetic oligonucleotide
gaggcuguuacuggagggu

SEQ ID NO: 2247240 - RNA, 19 nt, Artificial Sequence
  Description of Artificial Sequence: Synthetic oligonucleotide
gcauacagacaucggaacu

SEQ ID NO: 2247241 - RNA, 19 nt, Artificial Sequence
  Description of Artificial Sequence: Synthetic oligonucleotide
cucccgggaggccuggcuc

SEQ ID NO: 2247242 - RNA, 19 nt, Artificial Sequence
  Description of Artificial Sequence: Synthetic oligonucleotide
ccgucguucaucuagacuu

SEQ ID NO: 2247243 - RNA, 19 nt, Artificial Sequence
  Description of Artificial Sequence: Synthetic oligonucleotide
agcguuucucaggugcaaa

SEQ ID NO: 2247244 - RNA, 19 nt, Artificial Sequence
  Description of Artificial Sequence: Synthetic oligonucleotide
cuguggccuagagucugcc

SEQ ID NO: 2247245 - RNA, 19 nt, Artificial Sequence
  Description of Artificial Sequence: Synthetic oligonucleotide
ccgaggcuguuacuggagg

SEQ ID NO: 2247246 - RNA, 19 nt, Artificial Sequence
  Description of Artificial Sequence: Synthetic oligonucleotide
ccucacuccggaauggcca

SEQ ID NO: 2247247 - RNA, 19 nt, Artificial Sequence
  Description of Artificial Sequence: Synthetic oligonucleotide
uguggccccucagcugcag

SEQ ID NO: 2247248 - RNA, 19 nt, Artificial Sequence
  Description of Artificial Sequence: Synthetic oligonucleotide
cacccuguaguugaugaua

SEQ ID NO: 2247249 - RNA, 19 nt, Artificial Sequence
  Description of Artificial Sequence: Synthetic oligonucleotide
uggugugagccuggcugca

SEQ ID NO: 2247250 - RNA, 19 nt, Artificial Sequence
  Description of Artificial Sequence: Synthetic oligonucleotide
gacugggaccauggagaug

SEQ ID NO: 2247251 - RNA, 19 nt, Artificial Sequence
  Description of Artificial Sequence: Synthetic oligonucleotide
cugccgucguucaucuaga

SEQ ID NO: 2247252 - RNA, 19 nt, Artificial Sequence
  Description of Artificial Sequence: Synthetic oligonucleotide
cucacuccggaauggccaa

SEQ ID NO: 2247253 - RNA, 19 nt, Artificial Sequence
  Description of Artificial Sequence: Synthetic oligonucleotide
cauucucuggaagccggga

SEQ ID NO: 2247254 - RNA, 19 nt, Artificial Sequence
  Description of Artificial Sequence: Synthetic oligonucleotide
cagcuugcucagguuggcc

SEQ ID NO: 2247255 - RNA, 19 nt, Artificial Sequence
  Description of Artificial Sequence: Synthetic oligonucleotide
acuccggaauggccaaauu

SEQ ID NO: 2247256 - RNA, 19 nt, Artificial Sequence
  Description of Artificial Sequence: Synthetic oligonucleotide
gaagacaguggguccucau

SEQ ID NO: 2247257 - RNA, 19 nt, Artificial Sequence
  Description of Artificial Sequence: Synthetic oligonucleotide
uacugccgaggcuguuacu

SEQ ID NO: 2247258 - RNA, 19 nt, Artificial Sequence
  Description of Artificial Sequence: Synthetic oligonucleotide
ggucauugcuauuacuauu

SEQ ID NO: 2247259 - RNA, 19 nt, Artificial Sequence
  Description of Artificial Sequence: Synthetic oligonucleotide
cuguuacuggagggugaag

SEQ ID NO: 2247260 - RNA, 19 nt, Artificial Sequence
  Description of Artificial Sequence: Synthetic oligonucleotide
gccacuuaugggaggcucc

SEQ ID NO: 2247261 - RNA, 19 nt, Artificial Sequence
  Description of Artificial Sequence: Synthetic oligonucleotide
guugagcuaugguuaggau

SEQ ID NO: 2247262 - RNA, 19 nt, Artificial Sequence
  Description of Artificial Sequence: Synthetic oligonucleotide
gggacaaugcugggacucc

SEQ ID NO: 2247263 - RNA, 19 nt, Artificial Sequence
  Description of Artificial Sequence: Synthetic oligonucleotide
ggacaaugcugggacuccc

SEQ ID NO: 2247264 - RNA, 19 nt, Artificial Sequence
  Description of Artificial Sequence: Synthetic oligonucleotide
uccagcugacuguggccua

SEQ ID NO: 2247265 - RNA, 19 nt, Artificial Sequence
  Description of Artificial Sequence: Synthetic oligonucleotide
gcgaccucguggaaggaug

SEQ ID NO: 2247266 - RNA, 19 nt, Artificial Sequence
  Description of Artificial Sequence: Synthetic oligonucleotide
ggccccucacuccggaaug

SEQ ID NO: 2247267 - RNA, 19 nt, Artificial Sequence
  Description of Artificial Sequence: Synthetic oligonucleotide
cugaagaauuggcccaggu

SEQ ID NO: 2247268 - RNA, 19 nt, Artificial Sequence
  Description of Artificial Sequence: Synthetic oligonucleotide
cuccggaauggccaaauuu

SEQ ID NO: 2247269 - RNA, 19 nt, Artificial Sequence
  Description of Artificial Sequence: Synthetic oligonucleotide
ccuacuccggccaugcgaa

SEQ ID NO: 2247270 - RNA, 19 nt, Artificial Sequence
  Description of Artificial Sequence: Synthetic oligonucleotide
ggccuagagucugccgucg

SEQ ID NO: 2247271 - RNA, 19 nt, Artificial Sequence
  Description of Artificial Sequence: Synthetic oligonucleotide
ccgggaagacagugggucc

SEQ ID NO: 2247272 - RNA, 19 nt, Artificial Sequence
  Description of Artificial Sequence: Synthetic oligonucleotide
gcccauucucuggaagccg

SEQ ID NO: 2247273 - RNA, 19 nt, Artificial Sequence
  Description of Artificial Sequence: Synthetic oligonucleotide
caucggaacucccggucaa

SEQ ID NO: 2247274 - RNA, 19 nt, Artificial Sequence
  Description of Artificial Sequence: Synthetic oligonucleotide
cccucacuccggaauggcc

SEQ ID NO: 2247275 - RNA, 19 nt, Artificial Sequence
  Description of Artificial Sequence: Synthetic oligonucleotide
gagcuaugguuaggaucug

SEQ ID NO: 2247276 - RNA, 19 nt, Artificial Sequence
  Description of Artificial Sequence: Synthetic oligonucleotide
agcgaccucguggaaggau

SEQ ID NO: 2247277 - RNA, 19 nt, Artificial Sequence
  Description of Artificial Sequence: Synthetic oligonucleotide
agccgggacaaugcuggga

SEQ ID NO: 2247278 - RNA, 19 nt, Artificial Sequence
  Description of Artificial Sequence: Synthetic oligonucleotide
gcagacccuacuccggcca

SEQ ID NO: 2247279 - RNA, 19 nt, Artificial Sequence
  Description of Artificial Sequence: Synthetic oligonucleotide
gacucggcauacagacauc

SEQ ID NO: 2247280 - RNA, 19 nt, Artificial Sequence
  Description of Artificial Sequence: Synthetic oligonucleotide
ccacuuaugggaggcuccc

SEQ ID NO: 2247281 - RNA, 19 nt, Artificial Sequence
  Description of Artificial Sequence: Synthetic oligonucleotide
cugggaccauggagaugcc

SEQ ID NO: 2247282 - RNA, 19 nt, Artificial Sequence
  Description of Artificial Sequence: Synthetic oligonucleotide
agacccuacuccggccaug

SEQ ID NO: 2247283 - RNA, 19 nt, Artificial Sequence
  Description of Artificial Sequence: Synthetic oligonucleotide
cuacuccggccaugcgaac

SEQ ID NO: 2247284 - RNA, 19 nt, Artificial Sequence
  Description of Artificial Sequence: Synthetic oligonucleotide
ggagaggacugggaccaug

SEQ ID NO: 2247285 - RNA, 19 nt, Artificial Sequence
  Description of Artificial Sequence: Synthetic oligonucleotide
guccagcugacuguggccu

SEQ ID NO: 2247286 - RNA, 19 nt, Artificial Sequence
  Description of Artificial Sequence: Synthetic oligonucleotide
cuccggccaugcgaacugg

SEQ ID NO: 2247287 - RNA, 19 nt, Artificial Sequence
  Description of Artificial Sequence: Synthetic oligonucleotide
uuccacaauguggccccuc

SEQ ID NO: 2247288 - RNA, 19 nt, Artificial Sequence
  Description of Artificial Sequence: Synthetic oligonucleotide
agccccagaaaaggugaau

SEQ ID NO: 2247289 - RNA, 19 nt, Artificial Sequence
  Description of Artificial Sequence: Synthetic oligonucleotide
cgaccucguggaaggaugg

SEQ ID NO: 2247290 - RNA, 19 nt, Artificial Sequence
  Description of Artificial Sequence: Synthetic oligonucleotide
caaugcugggacuccccua

SEQ ID NO: 2247291 - RNA, 19 nt, Artificial Sequence
  Description of Artificial Sequence: Synthetic oligonucleotide
caucuagacuuggcuuguc

SEQ ID NO: 2247292 - RNA, 19 nt, Artificial Sequence
  Description of Artificial Sequence: Synthetic oligonucleotide
gccuuccacaggcugugac

SEQ ID NO: 2247293 - RNA, 19 nt, Artificial Sequence
  Description of Artificial Sequence: Synthetic oligonucleotide
guuugcuguggcccagagu

SEQ ID NO: 2247294 - RNA, 19 nt, Artificial Sequence
  Description of Artificial Sequence: Synthetic oligonucleotide
gggagcagaggugacccca

SEQ ID NO: 2247295 - RNA, 19 nt, Artificial Sequence
  Description of Artificial Sequence: Synthetic oligonucleotide
ggcgggaacaugggagcag

SEQ ID NO: 2247296 - RNA, 19 nt, Artificial Sequence
  Description of Artificial Sequence: Synthetic oligonucleotide
gcccuguaggguccaggag

SEQ ID NO: 2247297 - RNA, 19 nt, Artificial Sequence
  Description of Artificial Sequence: Synthetic oligonucleotide
gugacucggcauacagaca

SEQ ID NO: 2247298 - RNA, 19 nt, Artificial Sequence
  Description of Artificial Sequence: Synthetic oligonucleotide
ggaggacgagguacccggg

SEQ ID NO: 2247299 - RNA, 19 nt, Artificial Sequence
  Description of Artificial Sequence: Synthetic oligonucleotide
gguuggcccuguagggucc

SEQ ID NO: 2247300 - RNA, 19 nt, Artificial Sequence
  Description of Artificial Sequence: Synthetic oligonucleotide
gcccguagcacuuggaauu

SEQ ID NO: 2247301 - RNA, 19 nt, Artificial Sequence
  Description of Artificial Sequence: Synthetic oligonucleotide
ggacuccccuagugaagug

SEQ ID NO: 2247302 - RNA, 19 nt, Artificial Sequence
  Description of Artificial Sequence: Synthetic oligonucleotide
uugcucagguuggcccugu

SEQ ID NO: 2247303 - RNA, 19 nt, Artificial Sequence
  Description of Artificial Sequence: Synthetic oligonucleotide
uggccacuuaugggaggcu

SEQ ID NO: 2247304 - RNA, 19 nt, Artificial Sequence
  Description of Artificial Sequence: Synthetic oligonucleotide
agagcccguagcacuugga

SEQ ID NO: 2247305 - RNA, 19 nt, Artificial Sequence
  Description of Artificial Sequence: Synthetic oligonucleotide
gggucaagggacuggcacu

SEQ ID NO: 2247306 - RNA, 19 nt, Artificial Sequence
  Description of Artificial Sequence: Synthetic oligonucleotide
ggacuggcacuacaguggu

SEQ ID NO: 2247307 - RNA, 19 nt, Artificial Sequence
  Description of Artificial Sequence: Synthetic oligonucleotide
cgucguucaucuagacuug

SEQ ID NO: 2247308 - RNA, 19 nt, Artificial Sequence
  Description of Artificial Sequence: Synthetic oligonucleotide
gcgaacuggguuugguucu

SEQ ID NO: 2247309 - RNA, 19 nt, Artificial Sequence
  Description of Artificial Sequence: Synthetic oligonucleotide
guggaaggaugggcucuug

SEQ ID NO: 2247310 - RNA, 19 nt, Artificial Sequence
  Description of Artificial Sequence: Synthetic oligonucleotide
ggucaagggacuggcacua

SEQ ID NO: 2247311 - RNA, 19 nt, Artificial Sequence
  Description of Artificial Sequence: Synthetic oligonucleotide
cuguaggguccaggaguug

SEQ ID NO: 2247312 - RNA, 19 nt, Artificial Sequence
  Description of Artificial Sequence: Synthetic oligonucleotide
agcugacgguacagggaug

SEQ ID NO: 2247313 - RNA, 19 nt, Artificial Sequence
  Description of Artificial Sequence: Synthetic oligonucleotide
ggccacuuaugggaggcuc

SEQ ID NO: 2247314 - RNA, 19 nt, Artificial Sequence
  Description of Artificial Sequence: Synthetic oligonucleotide
ucacuccggaauggccaaa

SEQ ID NO: 2247315 - RNA, 19 nt, Artificial Sequence
  Description of Artificial Sequence: Synthetic oligonucleotide
gucaagggacuggcacuac

SEQ ID NO: 2247316 - RNA, 19 nt, Artificial Sequence
  Description of Artificial Sequence: Synthetic oligonucleotide
gccgaggcuguuacuggag

SEQ ID NO: 2247317 - RNA, 19 nt, Artificial Sequence
  Description of Artificial Sequence: Synthetic oligonucleotide
cccuacuccggccaugcga

SEQ ID NO: 2247318 - RNA, 19 nt, Artificial Sequence
  Description of Artificial Sequence: Synthetic oligonucleotide
gcuguuacuggagggugaa

SEQ ID NO: 2247319 - RNA, 19 nt, Artificial Sequence
  Description of Artificial Sequence: Synthetic oligonucleotide
ggagcagaggugaccccac

SEQ ID NO: 2247320 - RNA, 19 nt, Artificial Sequence
  Description of Artificial Sequence: Synthetic oligonucleotide
cuugucaggccuggcugaa

SEQ ID NO: 2247321 - RNA, 19 nt, Artificial Sequence
  Description of Artificial Sequence: Synthetic oligonucleotide
ggagaccauuggguccagg

SEQ ID NO: 2247322 - RNA, 19 nt, Artificial Sequence
  Description of Artificial Sequence: Synthetic oligonucleotide
cccuguaggguccaggagu

SEQ ID NO: 2247323 - RNA, 19 nt, Artificial Sequence
  Description of Artificial Sequence: Synthetic oligonucleotide
gccaugcgaacuggguuug

SEQ ID NO: 2247324 - RNA, 19 nt, Artificial Sequence
  Description of Artificial Sequence: Synthetic oligonucleotide
ggccaugcgaacuggguuu

SEQ ID NO: 2247325 - RNA, 19 nt, Artificial Sequence
  Description of Artificial Sequence: Synthetic oligonucleotide
ggcuguuacuggaggguga

SEQ ID NO: 2247326 - RNA, 19 nt, Artificial Sequence
  Description of Artificial Sequence: Synthetic oligonucleotide
caugcgaacuggguuuggu

SEQ ID NO: 2247327 - RNA, 19 nt, Artificial Sequence
  Description of Artificial Sequence: Synthetic oligonucleotide
guacagggauggugggcua

SEQ ID NO: 2247328 - RNA, 19 nt, Artificial Sequence
  Description of Artificial Sequence: Synthetic oligonucleotide
gguccaggaguugagcuau

SEQ ID NO: 2247329 - RNA, 19 nt, Artificial Sequence
  Description of Artificial Sequence: Synthetic oligonucleotide
gcuugcucagguuggcccu

SEQ ID NO: 2247330 - RNA, 19 nt, Artificial Sequence
  Description of Artificial Sequence: Synthetic oligonucleotide
gagcagaggugaccccacu

SEQ ID NO: 2247331 - RNA, 19 nt, Artificial Sequence
  Description of Artificial Sequence: Synthetic oligonucleotide
cguucaucuagacuuggcu

SEQ ID NO: 2247332 - RNA, 19 nt, Artificial Sequence
  Description of Artificial Sequence: Synthetic oligonucleotide
gccccucacuccggaaugg

SEQ ID NO: 2247333 - RNA, 19 nt, Artificial Sequence
  Description of Artificial Sequence: Synthetic oligonucleotide
ccagcugacuguggccuag

SEQ ID NO: 2247334 - RNA, 19 nt, Artificial Sequence
  Description of Artificial Sequence: Synthetic oligonucleotide
gggacuccccuagugaagu

SEQ ID NO: 2247335 - RNA, 19 nt, Artificial Sequence
  Description of Artificial Sequence: Synthetic oligonucleotide
ccucguggaaggaugggcu

SEQ ID NO: 2247336 - RNA, 19 nt, Artificial Sequence
  Description of Artificial Sequence: Synthetic oligonucleotide
gccgucguucaucuagacu

SEQ ID NO: 2247337 - RNA, 19 nt, Artificial Sequence
  Description of Artificial Sequence: Synthetic oligonucleotide
cagguuggcccuguagggu

SEQ ID NO: 2247338 - RNA, 19 nt, Artificial Sequence
  Description of Artificial Sequence: Synthetic oligonucleotide
cagggauggugggcuacca

SEQ ID NO: 2247339 - RNA, 19 nt, Artificial Sequence
  Description of Artificial Sequence: Synthetic oligonucleotide
cgggacaaugcugggacuc

SEQ ID NO: 2247340 - RNA, 19 nt, Artificial Sequence
  Description of Artificial Sequence: Synthetic oligonucleotide
ggacugggaccauggagau

SEQ ID NO: 2247341 - RNA, 19 nt, Artificial Sequence
  Description of Artificial Sequence: Synthetic oligonucleotide
ccuuccacaggcugugacu

SEQ ID NO: 2247342 - RNA, 19 nt, Artificial Sequence
  Description of Artificial Sequence: Synthetic oligonucleotide
gcguuucucaggugcaaau

SEQ ID NO: 2247343 - RNA, 19 nt, Artificial Sequence
  Description of Artificial Sequence: Synthetic oligonucleotide
cagcguuucucaggugcaa

SEQ ID NO: 2247344 - RNA, 19 nt, Artificial Sequence
  Description of Artificial Sequence: Synthetic oligonucleotide
agguacccgggaagacagu

SEQ ID NO: 2247345 - RNA, 19 nt, Artificial Sequence
  Description of Artificial Sequence: Synthetic oligonucleotide
agccuuccacaggcuguga

SEQ ID NO: 2247346 - RNA, 19 nt, Artificial Sequence
  Description of Artificial Sequence: Synthetic oligonucleotide
ccaugcgaacuggguuugg

SEQ ID NO: 2247347 - RNA, 19 nt, Artificial Sequence
  Description of Artificial Sequence: Synthetic oligonucleotide
acccagcgaccucguggaa

SEQ ID NO: 2247348 - RNA, 19 nt, Artificial Sequence
  Description of Artificial Sequence: Synthetic oligonucleotide
ccccucacuccggaauggc

SEQ ID NO: 2247349 - RNA, 19 nt, Artificial Sequence
  Description of Artificial Sequence: Synthetic oligonucleotide
cgagguacccgggaagaca

SEQ ID NO: 2247350 - RNA, 19 nt, Artificial Sequence
  Description of Artificial Sequence: Synthetic oligonucleotide
gcucuugacuuggcuggga

SEQ ID NO: 2247351 - RNA, 19 nt, Artificial Sequence
  Description of Artificial Sequence: Synthetic oligonucleotide
gggcgggaacaugggagca

SEQ ID NO: 2247352 - RNA, 19 nt, Artificial Sequence
  Description of Artificial Sequence: Synthetic oligonucleotide
ccuguaggguccaggaguu

SEQ ID NO: 2247353 - RNA, 19 nt, Artificial Sequence
  Description of Artificial Sequence: Synthetic oligonucleotide
ggcugugacucggcauaca

SEQ ID NO: 2247354 - RNA, 19 nt, Artificial Sequence
  Description of Artificial Sequence: Synthetic oligonucleotide
cggaauggccaaauuuggu

SEQ ID NO: 2247355 - RNA, 19 nt, Artificial Sequence
  Description of Artificial Sequence: Synthetic oligonucleotide
gcacccuguaguugaugau

SEQ ID NO: 2247356 - RNA, 19 nt, Artificial Sequence
  Description of Artificial Sequence: Synthetic oligonucleotide
gggcuaccagcuucauggu

SEQ ID NO: 2247357 - RNA, 19 nt, Artificial Sequence
  Description of Artificial Sequence: Synthetic oligonucleotide
cagacccuacuccggccau

SEQ ID NO: 2247358 - RNA, 19 nt, Artificial Sequence
  Description of Artificial Sequence: Synthetic oligonucleotide
gucugccgucguucaucua

SEQ ID NO: 2247359 - RNA, 19 nt, Artificial Sequence
  Description of Artificial Sequence: Synthetic oligonucleotide
ggccuggcucaggucucug

SEQ ID NO: 2247360 - RNA, 19 nt, Artificial Sequence
  Description of Artificial Sequence: Synthetic oligonucleotide
gccuagagucugccgucgu

SEQ ID NO: 2247361 - RNA, 19 nt, Artificial Sequence
  Description of Artificial Sequence: Synthetic oligonucleotide
gacuggcacuacagugguu

SEQ ID NO: 2247362 - RNA, 19 nt, Artificial Sequence
  Description of Artificial Sequence: Synthetic oligonucleotide
gggcaggaccuggggacaa

SEQ ID NO: 2247363 - RNA, 19 nt, Artificial Sequence
  Description of Artificial Sequence: Synthetic oligonucleotide
ccgggacaaugcugggacu

SEQ ID NO: 2247364 - RNA, 19 nt, Artificial Sequence
  Description of Artificial Sequence: Synthetic oligonucleotide
cggccaugcgaacuggguu

SEQ ID NO: 2247365 - RNA, 19 nt, Artificial Sequence
  Description of Artificial Sequence: Synthetic oligonucleotide
ucuaaaaucuuccugauac

SEQ ID NO: 2247366 - RNA, 19 nt, Artificial Sequence
  Description of Artificial Sequence: Synthetic oligonucleotide
aauacagaaucacagagaa

SEQ ID NO: 2247367 - RNA, 19 nt, Artificial Sequence
  Description of Artificial Sequence: Synthetic oligonucleotide
auguuuauuggcuauugcc

SEQ ID NO: 2247368 - RNA, 19 nt, Artificial Sequence
  Description of Artificial Sequence: Synthetic oligonucleotide
agaucucuagucuuuaacc

SEQ ID NO: 2247369 - RNA, 19 nt, Artificial Sequence
  Description of Artificial Sequence: Synthetic oligonucleotide
ucuuacagcaguaacagga

SEQ ID NO: 2247370 - RNA, 19 nt, Artificial Sequence
  Description of Artificial Sequence: Synthetic oligonucleotide
uuuuguugcaauaaugucu

SEQ ID NO: 2247371 - RNA, 19 nt, Artificial Sequence
  Description of Artificial Sequence: Synthetic oligonucleotide
ucagauuaauuucaaauga

SEQ ID NO: 2247372 - RNA, 19 nt, Artificial Sequence
  Description of Artificial Sequence: Synthetic oligonucleotide
aaaggugaaagacagggca

SEQ ID NO: 2247373 - RNA, 19 nt, Artificial Sequence
  Description of Artificial Sequence: Synthetic oligonucleotide
aauguuuauuggcuauugc

SEQ ID NO: 2247374 - RNA, 19 nt, Artificial Sequence
  Description of Artificial Sequence: Synthetic oligonucleotide
ugccaaaucaaccaaaaca

SEQ ID NO: 2247375 - RNA, 19 nt, Artificial Sequence
  Description of Artificial Sequence: Synthetic oligonucleotide
aacaggagcacccauucac

SEQ ID NO: 2247376 - RNA, 19 nt, Artificial Sequence
  Description of Artificial Sequence: Synthetic oligonucleotide
ucgagugugauucuuacag

SEQ ID NO: 2247377 - RNA, 19 nt, Artificial Sequence
  Description of Artificial Sequence: Synthetic oligonucleotide
aaugaugucauuucuuggu

SEQ ID NO: 2247378 - RNA, 19 nt, Artificial Sequence
  Description of Artificial Sequence: Synthetic oligonucleotide
uucaaaugugcuaauaaga

SEQ ID NO: 2247379 - RNA, 19 nt, Artificial Sequence
  Description of Artificial Sequence: Synthetic oligonucleotide
aaacucucaaacuagucca

SEQ ID NO: 2247380 - RNA, 19 nt, Artificial Sequence
  Description of Artificial Sequence: Synthetic oligonucleotide
aaaucugaaguaguguucg

SEQ ID NO: 2247381 - RNA, 19 nt, Artificial Sequence
  Description of Artificial Sequence: Synthetic oligonucleotide
uuucaaaugugcuaauaag

SEQ ID NO: 2247382 - RNA, 19 nt, Artificial Sequence
  Description of Artificial Sequence: Synthetic oligonucleotide
aaucaaaggugaaagacag

SEQ ID NO: 2247383 - RNA, 19 nt, Artificial Sequence
  Description of Artificial Sequence: Synthetic oligonucleotide
uccucuuucaacacacucg

SEQ ID NO: 2247384 - RNA, 19 nt, Artificial Sequence
  Description of Artificial Sequence: Synthetic oligonucleotide
ucaaaugugcuaauaagaa

SEQ ID NO: 2247385 - RNA, 19 nt, Artificial Sequence
  Description of Artificial Sequence: Synthetic oligonucleotide
auuggucacgagcagaugg

SEQ ID NO: 2247386 - RNA, 19 nt, Artificial Sequence
  Description of Artificial Sequence: Synthetic oligonucleotide
uuuguugcaauaaugucuc

SEQ ID NO: 2247387 - RNA, 19 nt, Artificial Sequence
  Description of Artificial Sequence: Synthetic oligonucleotide
uuuauuucuucuuggauuc

SEQ ID NO: 2247388 - RNA, 19 nt, Artificial Sequence
  Description of Artificial Sequence: Synthetic oligonucleotide
uuuucaaaugugcuaauaa

SEQ ID NO: 2247389 - RNA, 19 nt, Artificial Sequence
  Description of Artificial Sequence: Synthetic oligonucleotide
aaaucaaccaaaacacuuc

SEQ ID NO: 2247390 - RNA, 19 nt, Artificial Sequence
  Description of Artificial Sequence: Synthetic oligonucleotide
auuuauauggauucuuaga

SEQ ID NO: 2247391 - RNA, 19 nt, Artificial Sequence
  Description of Artificial Sequence: Synthetic oligonucleotide
uuuugguaaacaagacagg

SEQ ID NO: 2247392 - RNA, 19 nt, Artificial Sequence
  Description of Artificial Sequence: Synthetic oligonucleotide
aaaccccugucauaccacc

SEQ ID NO: 2247393 - RNA, 19 nt, Artificial Sequence
  Description of Artificial Sequence: Synthetic oligonucleotide
ucauaaauuuauauggauu

SEQ ID NO: 2247394 - RNA, 19 nt, Artificial Sequence
  Description of Artificial Sequence: Synthetic oligonucleotide
ucgaaguugugcaucauca

SEQ ID NO: 2247395 - RNA, 19 nt, Artificial Sequence
  Description of Artificial Sequence: Synthetic oligonucleotide
aaaaucugaaguaguguuc

SEQ ID NO: 2247396 - RNA, 19 nt, Artificial Sequence
  Description of Artificial Sequence: Synthetic oligonucleotide
gaugacagcaagugcagcc

SEQ ID NO: 2247397 - RNA, 19 nt, Artificial Sequence
  Description of Artificial Sequence: Synthetic oligonucleotide
aguuguuucaauuuucuuu

SEQ ID NO: 2247398 - RNA, 19 nt, Artificial Sequence
  Description of Artificial Sequence: Synthetic oligonucleotide
caaaugaugucauuucuug

SEQ ID NO: 2247399 - RNA, 19 nt, Artificial Sequence
  Description of Artificial Sequence: Synthetic oligonucleotide
gauccaagcauuuuauuuc

SEQ ID NO: 2247400 - RNA, 19 nt, Artificial Sequence
  Description of Artificial Sequence: Synthetic oligonucleotide
aaacaagacagguuuguau

SEQ ID NO: 2247401 - RNA, 19 nt, Artificial Sequence
  Description of Artificial Sequence: Synthetic oligonucleotide
uuuacuugauccaagcauu

SEQ ID NO: 2247402 - RNA, 19 nt, Artificial Sequence
  Description of Artificial Sequence: Synthetic oligonucleotide
gaugucauuucuugguugc

SEQ ID NO: 2247403 - RNA, 19 nt, Artificial Sequence
  Description of Artificial Sequence: Synthetic oligonucleotide
aggacaaccagccucagga

SEQ ID NO: 2247404 - RNA, 19 nt, Artificial Sequence
  Description of Artificial Sequence: Synthetic oligonucleotide
uuugguaaacaagacaggu

SEQ ID NO: 2247405 - RNA, 19 nt, Artificial Sequence
  Description of Artificial Sequence: Synthetic oligonucleotide
agaccuagggaccugaaca

SEQ ID NO: 2247406 - RNA, 19 nt, Artificial Sequence
  Description of Artificial Sequence: Synthetic oligonucleotide
agagcucagaucucuaguc

SEQ ID NO: 2247407 - RNA, 19 nt, Artificial Sequence
  Description of Artificial Sequence: Synthetic oligonucleotide
acagguuuguauuuuccag

SEQ ID NO: 2247408 - RNA, 19 nt, Artificial Sequence
  Description of Artificial Sequence: Synthetic oligonucleotide
aagaccuagggaccugaac

SEQ ID NO: 2247409 - RNA, 19 nt, Artificial Sequence
  Description of Artificial Sequence: Synthetic oligonucleotide
accugaacaauguuuaaga

SEQ ID NO: 2247410 - RNA, 19 nt, Artificial Sequence
  Description of Artificial Sequence: Synthetic oligonucleotide
uucucaagacauuugucug

SEQ ID NO: 2247411 - RNA, 19 nt, Artificial Sequence
  Description of Artificial Sequence: Synthetic oligonucleotide
guguuuuggacauaaauaa

SEQ ID NO: 2247412 - RNA, 19 nt, Artificial Sequence
  Description of Artificial Sequence: Synthetic oligonucleotide
uaguguucgaaguugugca

SEQ ID NO: 2247413 - RNA, 19 nt, Artificial Sequence
  Description of Artificial Sequence: Synthetic oligonucleotide
agaugguggauguaugcuc

SEQ ID NO: 2247414 - RNA, 19 nt, Artificial Sequence
  Description of Artificial Sequence: Synthetic oligonucleotide
uucuuuacuugauccaagc

SEQ ID NO: 2247415 - RNA, 19 nt, Artificial Sequence
  Description of Artificial Sequence: Synthetic oligonucleotide
ucacgaguggucuaaaauc

SEQ ID NO: 2247416 - RNA, 19 nt, Artificial Sequence
  Description of Artificial Sequence: Synthetic oligonucleotide
ugauucuuacagcaguaac

SEQ ID NO: 2247417 - RNA, 19 nt, Artificial Sequence
  Description of Artificial Sequence: Synthetic oligonucleotide
cuuacaccgcagaugagcc

SEQ ID NO: 2247418 - RNA, 19 nt, Artificial Sequence
  Description of Artificial Sequence: Synthetic oligonucleotide
gauuaauuucaaaugaugu

SEQ ID NO: 2247419 - RNA, 19 nt, Artificial Sequence
  Description of Artificial Sequence: Synthetic oligonucleotide
uuauauggauucuuagaaa

SEQ ID NO: 2247420 - RNA, 19 nt, Artificial Sequence
  Description of Artificial Sequence: Synthetic oligonucleotide
gauucuuacagcaguaaca

SEQ ID NO: 2247421 - RNA, 19 nt, Artificial Sequence
  Description of Artificial Sequence: Synthetic oligonucleotide
uggcaaucaaaggugaaag

SEQ ID NO: 2247422 - RNA, 19 nt, Artificial Sequence
  Description of Artificial Sequence: Synthetic oligonucleotide
ucuuuacuugauccaagca

SEQ ID NO: 2247423 - RNA, 19 nt, Artificial Sequence
  Description of Artificial Sequence: Synthetic oligonucleotide
ucaucagcaggacaccagc

SEQ ID NO: 2247424 - RNA, 19 nt, Artificial Sequence
  Description of Artificial Sequence: Synthetic oligonucleotide
uggcuauugcccuuuauac

SEQ ID NO: 2247425 - RNA, 19 nt, Artificial Sequence
  Description of Artificial Sequence: Synthetic oligonucleotide
gaauuuucaguguuuugga

SEQ ID NO: 2247426 - RNA, 19 nt, Artificial Sequence
  Description of Artificial Sequence: Synthetic oligonucleotide
cuuucaacacacucgagca

SEQ ID NO: 2247427 - RNA, 19 nt, Artificial Sequence
  Description of Artificial Sequence: Synthetic oligonucleotide
uugucuguggaugaguucu

SEQ ID NO: 2247428 - RNA, 19 nt, Artificial Sequence
  Description of Artificial Sequence: Synthetic oligonucleotide
gaaguaguguucgaaguug

SEQ ID NO: 2247429 - RNA, 19 nt, Artificial Sequence
  Description of Artificial Sequence: Synthetic oligonucleotide
ucugcggugacugaugaca

SEQ ID NO: 2247430 - RNA, 19 nt, Artificial Sequence
  Description of Artificial Sequence: Synthetic oligonucleotide
gagugugauucuuacagca

SEQ ID NO: 2247431 - RNA, 19 nt, Artificial Sequence
  Description of Artificial Sequence: Synthetic oligonucleotide
aucuggccggcuuacaccg

SEQ ID NO: 2247432 - RNA, 19 nt, Artificial Sequence
  Description of Artificial Sequence: Synthetic oligonucleotide
ugacugaugacagcaagug

SEQ ID NO: 2247433 - RNA, 19 nt, Artificial Sequence
  Description of Artificial Sequence: Synthetic oligonucleotide
uucacgaguggucuaaaau

SEQ ID NO: 2247434 - RNA, 19 nt, Artificial Sequence
  Description of Artificial Sequence: Synthetic oligonucleotide
uuucagugccucccggacg

SEQ ID NO: 2247435 - RNA, 19 nt, Artificial Sequence
  Description of Artificial Sequence: Synthetic oligonucleotide
aagacauuugucuguggau

SEQ ID NO: 2247436 - RNA, 19 nt, Artificial Sequence
  Description of Artificial Sequence: Synthetic oligonucleotide
uaaugucucuucaggauuc

SEQ ID NO: 2247437 - RNA, 19 nt, Artificial Sequence
  Description of Artificial Sequence: Synthetic oligonucleotide
guggauguaugcucgagug

SEQ ID NO: 2247438 - RNA, 19 nt, Artificial Sequence
  Description of Artificial Sequence: Synthetic oligonucleotide
uguucgaaguugugcauca

SEQ ID NO: 2247439 - RNA, 19 nt, Artificial Sequence
  Description of Artificial Sequence: Synthetic oligonucleotide
cugaacaauguuuaagaga

SEQ ID NO: 2247440 - RNA, 19 nt, Artificial Sequence
  Description of Artificial Sequence: Synthetic oligonucleotide
uuggcuauugcccuuuaua

SEQ ID NO: 2247441 - RNA, 19 nt, Artificial Sequence
  Description of Artificial Sequence: Synthetic oligonucleotide
acucgagcacuucaucugg

SEQ ID NO: 2247442 - RNA, 19 nt, Artificial Sequence
  Description of Artificial Sequence: Synthetic oligonucleotide
caaucaaaggugaaagaca

SEQ ID NO: 2247443 - RNA, 19 nt, Artificial Sequence
  Description of Artificial Sequence: Synthetic oligonucleotide
guuuguauuuuccaguucu

SEQ ID NO: 2247444 - RNA, 19 nt, Artificial Sequence
  Description of Artificial Sequence: Synthetic oligonucleotide
augccaaaucaaccaaaac

SEQ ID NO: 2247445 - RNA, 19 nt, Artificial Sequence
  Description of Artificial Sequence: Synthetic oligonucleotide
agcgugucacuuuucagug

SEQ ID NO: 2247446 - RNA, 19 nt, Artificial Sequence
  Description of Artificial Sequence: Synthetic oligonucleotide
aguguuuuggacauaaaua

SEQ ID NO: 2247447 - RNA, 19 nt, Artificial Sequence
  Description of Artificial Sequence: Synthetic oligonucleotide
aaggacaaccagccucagg

SEQ ID NO: 2247448 - RNA, 19 nt, Artificial Sequence
  Description of Artificial Sequence: Synthetic oligonucleotide
guaugcucgagugugauuc

SEQ ID NO: 2247449 - RNA, 19 nt, Artificial Sequence
  Description of Artificial Sequence: Synthetic oligonucleotide
uccucuggcagcucugcgg

SEQ ID NO: 2247450 - RNA, 19 nt, Artificial Sequence
  Description of Artificial Sequence: Synthetic oligonucleotide
ucauuggucacgagcagau

SEQ ID NO: 2247451 - RNA, 19 nt, Artificial Sequence
  Description of Artificial Sequence: Synthetic oligonucleotide
agaaucacagagaacccag

SEQ ID NO: 2247452 - RNA, 19 nt, Artificial Sequence
  Description of Artificial Sequence: Synthetic oligonucleotide
gaccugaacaauguuuaag

SEQ ID NO: 2247453 - RNA, 19 nt, Artificial Sequence
  Description of Artificial Sequence: Synthetic oligonucleotide
acuaguccacuccucuuuc

SEQ ID NO: 2247454 - RNA, 19 nt, Artificial Sequence
  Description of Artificial Sequence: Synthetic oligonucleotide
gucauuucuugguugcacc

SEQ ID NO: 2247455 - RNA, 19 nt, Artificial Sequence
  Description of Artificial Sequence: Synthetic oligonucleotide
aacuaguccacuccucuuu

SEQ ID NO: 2247456 - RNA, 19 nt, Artificial Sequence
  Description of Artificial Sequence: Synthetic oligonucleotide
guaguguucgaaguugugc

SEQ ID NO: 2247457 - RNA, 19 nt, Artificial Sequence
  Description of Artificial Sequence: Synthetic oligonucleotide
aucucuagucuuuaaccgu

SEQ ID NO: 2247458 - RNA, 19 nt, Artificial Sequence
  Description of Artificial Sequence: Synthetic oligonucleotide
uuuguauuuuccaguucuc

SEQ ID NO: 2247459 - RNA, 19 nt, Artificial Sequence
  Description of Artificial Sequence: Synthetic oligonucleotide
acagaaucacagagaaccc

SEQ ID NO: 2247460 - RNA, 19 nt, Artificial Sequence
  Description of Artificial Sequence: Synthetic oligonucleotide
ugugauucuuacagcagua

SEQ ID NO: 2247461 - RNA, 19 nt, Artificial Sequence
  Description of Artificial Sequence: Synthetic oligonucleotide
aguccacuccucuuucaac

SEQ ID NO: 2247462 - RNA, 19 nt, Artificial Sequence
  Description of Artificial Sequence: Synthetic oligonucleotide
guucuuucagcugugccag

SEQ ID NO: 2247463 - RNA, 19 nt, Artificial Sequence
  Description of Artificial Sequence: Synthetic oligonucleotide
agacagguuuguauuuucc

SEQ ID NO: 2247464 - RNA, 19 nt, Artificial Sequence
  Description of Artificial Sequence: Synthetic oligonucleotide
uucaggauucagcuggcaa

SEQ ID NO: 2247465 - RNA, 19 nt, Artificial Sequence
  Description of Artificial Sequence: Synthetic oligonucleotide
guucucaagacauuugucu

SEQ ID NO: 2247466 - RNA, 19 nt, Artificial Sequence
  Description of Artificial Sequence: Synthetic oligonucleotide
uucgaaguugugcaucauc

SEQ ID NO: 2247467 - RNA, 19 nt, Artificial Sequence
  Description of Artificial Sequence: Synthetic oligonucleotide
acacucgagcacuucaucu

SEQ ID NO: 2247468 - RNA, 19 nt, Artificial Sequence
  Description of Artificial Sequence: Synthetic oligonucleotide
gacugaugacagcaagugc

SEQ ID NO: 2247469 - RNA, 19 nt, Artificial Sequence
  Description of Artificial Sequence: Synthetic oligonucleotide
ucucuagucuuuaaccguu

SEQ ID NO: 2247470 - RNA, 19 nt, Artificial Sequence
  Description of Artificial Sequence: Synthetic oligonucleotide
gaguggucuaaaaucuucc

SEQ ID NO: 2247471 - RNA, 19 nt, Artificial Sequence
  Description of Artificial Sequence: Synthetic oligonucleotide
uugguaaacaagacagguu

SEQ ID NO: 2247472 - RNA, 19 nt, Artificial Sequence
  Description of Artificial Sequence: Synthetic oligonucleotide
gacauuugucuguggauga

SEQ ID NO: 2247473 - RNA, 19 nt, Artificial Sequence
  Description of Artificial Sequence: Synthetic oligonucleotide
  modified_base (14)..(14): a, c, u, g, unknown or other
ucccggacggagcngaaaa

SEQ ID NO: 2247474 - RNA, 19 nt, Artificial Sequence
  Description of Artificial Sequence: Synthetic oligonucleotide
uccgucacuugauauggga

SEQ ID NO: 2247475 - RNA, 19 nt, Artificial Sequence
  Description of Artificial Sequence: Synthetic oligonucleotide
agcugugccagcgugucac

SEQ ID NO: 2247476 - RNA, 19 nt, Artificial Sequence
  Description of Artificial Sequence: Synthetic oligonucleotide
cacuccucuuucaacacac

SEQ ID NO: 2247477 - RNA, 19 nt, Artificial Sequence
  Description of Artificial Sequence: Synthetic oligonucleotide
uucuuggauuccauuuugu

SEQ ID NO: 2247478 - RNA, 19 nt, Artificial Sequence
  Description of Artificial Sequence: Synthetic oligonucleotide
cagaucucuagucuuuaac

SEQ ID NO: 2247479 - RNA, 19 nt, Artificial Sequence
  Description of Artificial Sequence: Synthetic oligonucleotide
aaaagaccuagggaccuga

SEQ ID NO: 2247480 - RNA, 19 nt, Artificial Sequence
  Description of Artificial Sequence: Synthetic oligonucleotide
aaaaucuuccugauacuuu

SEQ ID NO: 2247481 - RNA, 19 nt, Artificial Sequence
  Description of Artificial Sequence: Synthetic oligonucleotide
ucaaacuaguccacuccuc

SEQ ID NO: 2247482 - RNA, 19 nt, Artificial Sequence
  Description of Artificial Sequence: Synthetic oligonucleotide
acucauaaauuuauaugga

SEQ ID NO: 2247483 - RNA, 19 nt, Artificial Sequence
  Description of Artificial Sequence: Synthetic oligonucleotide
ugguuuguccucuggcagc

SEQ ID NO: 2247484 - RNA, 19 nt, Artificial Sequence
  Description of Artificial Sequence: Synthetic oligonucleotide
gcaaucaaaggugaaagac

SEQ ID NO: 2247485 - RNA, 19 nt, Artificial Sequence
  Description of Artificial Sequence: Synthetic oligonucleotide
cuugguugcacccaguugu

SEQ ID NO: 2247486 - RNA, 19 nt, Artificial Sequence
  Description of Artificial Sequence: Synthetic oligonucleotide
uuggucacgagcagauggu

SEQ ID NO: 2247487 - RNA, 19 nt, Artificial Sequence
  Description of Artificial Sequence: Synthetic oligonucleotide
ccuuuauacacauuuaaaa

SEQ ID NO: 2247488 - RNA, 19 nt, Artificial Sequence
  Description of Artificial Sequence: Synthetic oligonucleotide
cagcuggcaaucaaaggug

SEQ ID NO: 2247489 - RNA, 19 nt, Artificial Sequence
  Description of Artificial Sequence: Synthetic oligonucleotide
uggauguaugcucgagugu

SEQ ID NO: 2247490 - RNA, 19 nt, Artificial Sequence
  Description of Artificial Sequence: Synthetic oligonucleotide
cuugguuuguccucuggca

SEQ ID NO: 2247491 - RNA, 19 nt, Artificial Sequence
  Description of Artificial Sequence: Synthetic oligonucleotide
uauugcccuuuauacacau

SEQ ID NO: 2247492 - RNA, 19 nt, Artificial Sequence
  Description of Artificial Sequence: Synthetic oligonucleotide
agguuuguauuuuccaguu

SEQ ID NO: 2247493 - RNA, 19 nt, Artificial Sequence
  Description of Artificial Sequence: Synthetic oligonucleotide
ucgagcacuucaucuggcc

SEQ ID NO: 2247494 - RNA, 19 nt, Artificial Sequence
  Description of Artificial Sequence: Synthetic oligonucleotide
uuacuugauccaagcauuu

SEQ ID NO: 2247495 - RNA, 19 nt, Artificial Sequence
  Description of Artificial Sequence: Synthetic oligonucleotide
cuuuacuugauccaagcau

SEQ ID NO: 2247496 - RNA, 19 nt, Artificial Sequence
  Description of Artificial Sequence: Synthetic oligonucleotide
aaacuaguccacuccucuu

SEQ ID NO: 2247497 - RNA, 19 nt, Artificial Sequence
  Description of Artificial Sequence: Synthetic oligonucleotide
cacucgagcacuucaucug

SEQ ID NO: 2247498 - RNA, 19 nt, Artificial Sequence
  Description of Artificial Sequence: Synthetic oligonucleotide
uucagugacugugggauuc

SEQ ID NO: 2247499 - RNA, 19 nt, Artificial Sequence
  Description of Artificial Sequence: Synthetic oligonucleotide
guuuauuggcuauugcccu

SEQ ID NO: 2247500 - RNA, 19 nt, Artificial Sequence
  Description of Artificial Sequence: Synthetic oligonucleotide
agugugauucuuacagcag

SEQ ID NO: 2247501 - RNA, 19 nt, Artificial Sequence
  Description of Artificial Sequence: Synthetic oligonucleotide
caucagcaggacaccagcc

SEQ ID NO: 2247502 - RNA, 19 nt, Artificial Sequence
  Description of Artificial Sequence: Synthetic oligonucleotide
agcacuucaucuggccggc

SEQ ID NO: 2247503 - RNA, 19 nt, Artificial Sequence
  Description of Artificial Sequence: Synthetic oligonucleotide
uuuauuggcuauugcccuu

SEQ ID NO: 2247504 - RNA, 19 nt, Artificial Sequence
  Description of Artificial Sequence: Synthetic oligonucleotide
uaacaggagcacccauuca

SEQ ID NO: 2247505 - RNA, 19 nt, Artificial Sequence
  Description of Artificial Sequence: Synthetic oligonucleotide
caaaucaaccaaaacacuu

SEQ ID NO: 2247506 - RNA, 19 nt, Artificial Sequence
  Description of Artificial Sequence: Synthetic oligonucleotide
ucuagucuuuaaccguuuu

SEQ ID NO: 2247507 - RNA, 19 nt, Artificial Sequence
  Description of Artificial Sequence: Synthetic oligonucleotide
ccugaacaauguuuaagag

SEQ ID NO: 2247508 - RNA, 19 nt, Artificial Sequence
  Description of Artificial Sequence: Synthetic oligonucleotide
auacagaaucacagagaac

SEQ ID NO: 2247509 - RNA, 19 nt, Artificial Sequence
  Description of Artificial Sequence: Synthetic oligonucleotide
acaauguuuaagagaauuu

SEQ ID NO: 2247510 - RNA, 19 nt, Artificial Sequence
  Description of Artificial Sequence: Synthetic oligonucleotide
gucacgagcagauggugga

SEQ ID NO: 2247511 - RNA, 19 nt, Artificial Sequence
  Description of Artificial Sequence: Synthetic oligonucleotide
uaaacaagacagguuugua

SEQ ID NO: 2247512 - RNA, 19 nt, Artificial Sequence
  Description of Artificial Sequence: Synthetic oligonucleotide
acgagcagaugguggaugu

SEQ ID NO: 2247513 - RNA, 19 nt, Artificial Sequence
  Description of Artificial Sequence: Synthetic oligonucleotide
gaaagacagggcacagccc

SEQ ID NO: 2247514 - RNA, 19 nt, Artificial Sequence
  Description of Artificial Sequence: Synthetic oligonucleotide
acccaggaaggacaaccag

SEQ ID NO: 2247515 - RNA, 19 nt, Artificial Sequence
  Description of Artificial Sequence: Synthetic oligonucleotide
cucaggaccugcagaugcc

SEQ ID NO: 2247516 - RNA, 19 nt, Artificial Sequence
  Description of Artificial Sequence: Synthetic oligonucleotide
ucuggcagcucugcgguga

SEQ ID NO: 2247517 - RNA, 19 nt, Artificial Sequence
  Description of Artificial Sequence: Synthetic oligonucleotide
aguguucgaaguugugcau

SEQ ID NO: 2247518 - RNA, 19 nt, Artificial Sequence
  Description of Artificial Sequence: Synthetic oligonucleotide
gcuccgucacuugauaugg

SEQ ID NO: 2247519 - RNA, 19 nt, Artificial Sequence
  Description of Artificial Sequence: Synthetic oligonucleotide
aucaaaggugaaagacagg

SEQ ID NO: 2247520 - RNA, 19 nt, Artificial Sequence
  Description of Artificial Sequence: Synthetic oligonucleotide
ugucacuuuucagugccuc

SEQ ID NO: 2247521 - RNA, 19 nt, Artificial Sequence
  Description of Artificial Sequence: Synthetic oligonucleotide
uggauuccauuuuguugca

SEQ ID NO: 2247522 - RNA, 19 nt, Artificial Sequence
  Description of Artificial Sequence: Synthetic oligonucleotide
agcucagaucucuagucuu

SEQ ID NO: 2247523 - RNA, 19 nt, Artificial Sequence
  Description of Artificial Sequence: Synthetic oligonucleotide
guugcacccaguuguuuca

SEQ ID NO: 2247524 - RNA, 19 nt, Artificial Sequence
  Description of Artificial Sequence: Synthetic oligonucleotide
ugaugacagcaagugcagc

SEQ ID NO: 2247525 - RNA, 19 nt, Artificial Sequence
  Description of Artificial Sequence: Synthetic oligonucleotide
uaugcucgagugugauucu

SEQ ID NO: 2247526 - RNA, 19 nt, Artificial Sequence
  Description of Artificial Sequence: Synthetic oligonucleotide
cacgaguggucuaaaaucu

SEQ ID NO: 2247527 - RNA, 19 nt, Artificial Sequence
  Description of Artificial Sequence: Synthetic oligonucleotide
aagugcagccugguuucag

SEQ ID NO: 2247528 - RNA, 19 nt, Artificial Sequence
  Description of Artificial Sequence: Synthetic oligonucleotide
ccaagcauuuuauuucuuc

SEQ ID NO: 2247529 - RNA, 19 nt, Artificial Sequence
  Description of Artificial Sequence: Synthetic oligonucleotide
cucgagcacuucaucuggc

SEQ ID NO: 2247530 - RNA, 19 nt, Artificial Sequence
  Description of Artificial Sequence: Synthetic oligonucleotide
uacaccgcagaugagccuu

SEQ ID NO: 2247531 - RNA, 19 nt, Artificial Sequence
  Description of Artificial Sequence: Synthetic oligonucleotide
acccaguuguuucaauuuu

SEQ ID NO: 2247532 - RNA, 19 nt, Artificial Sequence
  Description of Artificial Sequence: Synthetic oligonucleotide
auucacgaguggucuaaaa

SEQ ID NO: 2247533 - RNA, 19 nt, Artificial Sequence
  Description of Artificial Sequence: Synthetic oligonucleotide
ugcucgagugugauucuua

SEQ ID NO: 2247534 - RNA, 19 nt, Artificial Sequence
  Description of Artificial Sequence: Synthetic oligonucleotide
ugguggauguaugcucgag

SEQ ID NO: 2247535 - RNA, 19 nt, Artificial Sequence
  Description of Artificial Sequence: Synthetic oligonucleotide
aucugaaguaguguucgaa

SEQ ID NO: 2247536 - RNA, 19 nt, Artificial Sequence
  Description of Artificial Sequence: Synthetic oligonucleotide
cacccauucacgagugguc

SEQ ID NO: 2247537 - RNA, 19 nt, Artificial Sequence
  Description of Artificial Sequence: Synthetic oligonucleotide
ccucaggaccugcagaugc

SEQ ID NO: 2247538 - RNA, 19 nt, Artificial Sequence
  Description of Artificial Sequence: Synthetic oligonucleotide
agccugguuucagugacug

SEQ ID NO: 2247539 - RNA, 19 nt, Artificial Sequence
  Description of Artificial Sequence: Synthetic oligonucleotide
caggauucagcuggcaauc

SEQ ID NO: 2247540 - RNA, 19 nt, Artificial Sequence
  Description of Artificial Sequence: Synthetic oligonucleotide
cucuuucaacacacucgag

SEQ ID NO: 2247541 - RNA, 19 nt, Artificial Sequence
  Description of Artificial Sequence: Synthetic oligonucleotide
uuacaccgcagaugagccu

SEQ ID NO: 2247542 - RNA, 19 nt, Artificial Sequence
  Description of Artificial Sequence: Synthetic oligonucleotide
guaaacaagacagguuugu

SEQ ID NO: 2247543 - RNA, 19 nt, Artificial Sequence
  Description of Artificial Sequence: Synthetic oligonucleotide
cagauuaauuucaaaugau

SEQ ID NO: 2247544 - RNA, 19 nt, Artificial Sequence
  Description of Artificial Sequence: Synthetic oligonucleotide
ccuagggaccugaacaaug

SEQ ID NO: 2247545 - RNA, 19 nt, Artificial Sequence
  Description of Artificial Sequence: Synthetic oligonucleotide
aaaagagcucagaucucua

SEQ ID NO: 2247546 - RNA, 19 nt, Artificial Sequence
  Description of Artificial Sequence: Synthetic oligonucleotide
aguaacaggagcacccauu

SEQ ID NO: 2247547 - RNA, 19 nt, Artificial Sequence
  Description of Artificial Sequence: Synthetic oligonucleotide
ggucacgagcagauggugg

SEQ ID NO: 2247548 - RNA, 19 nt, Artificial Sequence
  Description of Artificial Sequence: Synthetic oligonucleotide
gauguaugcucgaguguga

SEQ ID NO: 2247549 - RNA, 19 nt, Artificial Sequence
  Description of Artificial Sequence: Synthetic oligonucleotide
aguaguguucgaaguugug

SEQ ID NO: 2247550 - RNA, 19 nt, Artificial Sequence
  Description of Artificial Sequence: Synthetic oligonucleotide
caaacuaguccacuccucu

SEQ ID NO: 2247551 - RNA, 19 nt, Artificial Sequence
  Description of Artificial Sequence: Synthetic oligonucleotide
ugugccagcgugucacuuu

SEQ ID NO: 2247552 - RNA, 19 nt, Artificial Sequence
  Description of Artificial Sequence: Synthetic oligonucleotide
gugaaagacagggcacagc

SEQ ID NO: 2247553 - RNA, 19 nt, Artificial Sequence
  Description of Artificial Sequence: Synthetic oligonucleotide
uggucacgagcagauggug

SEQ ID NO: 2247554 - RNA, 19 nt, Artificial Sequence
  Description of Artificial Sequence: Synthetic oligonucleotide
auuggcuauugcccuuuau

SEQ ID NO: 2247555 - RNA, 19 nt, Artificial Sequence
  Description of Artificial Sequence: Synthetic oligonucleotide
cuccgucacuugauauggg

SEQ ID NO: 2247556 - RNA, 19 nt, Artificial Sequence
  Description of Artificial Sequence: Synthetic oligonucleotide
cuauugcccuuuauacaca

SEQ ID NO: 2247557 - RNA, 19 nt, Artificial Sequence
  Description of Artificial Sequence: Synthetic oligonucleotide
uguaugcucgagugugauu

SEQ ID NO: 2247558 - RNA, 19 nt, Artificial Sequence
  Description of Artificial Sequence: Synthetic oligonucleotide
cagaaucacagagaaccca

SEQ ID NO: 2247559 - RNA, 19 nt, Artificial Sequence
  Description of Artificial Sequence: Synthetic oligonucleotide
cacacucgagcacuucauc

SEQ ID NO: 2247560 - RNA, 19 nt, Artificial Sequence
  Description of Artificial Sequence: Synthetic oligonucleotide
gucacuugauaugggaaaa

SEQ ID NO: 2247561 - RNA, 19 nt, Artificial Sequence
  Description of Artificial Sequence: Synthetic oligonucleotide
uccaagcauuuuauuucuu

SEQ ID NO: 2247562 - RNA, 19 nt, Artificial Sequence
  Description of Artificial Sequence: Synthetic oligonucleotide
gagcucagaucucuagucu

SEQ ID NO: 2247563 - RNA, 19 nt, Artificial Sequence
  Description of Artificial Sequence: Synthetic oligonucleotide
caauguuuaagagaauuuu

SEQ ID NO: 2247564 - RNA, 19 nt, Artificial Sequence
  Description of Artificial Sequence: Synthetic oligonucleotide
agcagaugguggauguaug

SEQ ID NO: 2247565 - RNA, 19 nt, Artificial Sequence
  Description of Artificial Sequence: Synthetic oligonucleotide
accccugucauaccaccaa

SEQ ID NO: 2247566 - RNA, 19 nt, Artificial Sequence
  Description of Artificial Sequence: Synthetic oligonucleotide
agggaccugaacaauguuu

SEQ ID NO: 2247567 - RNA, 19 nt, Artificial Sequence
  Description of Artificial Sequence: Synthetic oligonucleotide
agaacccaggaaggacaac

SEQ ID NO: 2247568 - RNA, 19 nt, Artificial Sequence
  Description of Artificial Sequence: Synthetic oligonucleotide
cuagggaccugaacaaugu

SEQ ID NO: 2247569 - RNA, 19 nt, Artificial Sequence
  Description of Artificial Sequence: Synthetic oligonucleotide
uuucagugacugugggauu

SEQ ID NO: 2247570 - RNA, 19 nt, Artificial Sequence
  Description of Artificial Sequence: Synthetic oligonucleotide
cucaaacuaguccacuccu

SEQ ID NO: 2247571 - RNA, 19 nt, Artificial Sequence
  Description of Artificial Sequence: Synthetic oligonucleotide
cagcgugucacuuuucagu

SEQ ID NO: 2247572 - RNA, 19 nt, Artificial Sequence
  Description of Artificial Sequence: Synthetic oligonucleotide
agcaggacaccagccagga

SEQ ID NO: 2247573 - RNA, 19 nt, Artificial Sequence
  Description of Artificial Sequence: Synthetic oligonucleotide
ccucuuucaacacacucga

SEQ ID NO: 2247574 - RNA, 19 nt, Artificial Sequence
  Description of Artificial Sequence: Synthetic oligonucleotide
caggagcucauuggucacg

SEQ ID NO: 2247575 - RNA, 19 nt, Artificial Sequence
  Description of Artificial Sequence: Synthetic oligonucleotide
gucuaaaaucuuccugaua

SEQ ID NO: 2247576 - RNA, 19 nt, Artificial Sequence
  Description of Artificial Sequence: Synthetic oligonucleotide
aggagcucauuggucacga

SEQ ID NO: 2247577 - RNA, 19 nt, Artificial Sequence
  Description of Artificial Sequence: Synthetic oligonucleotide
aaccccugucauaccacca

SEQ ID NO: 2247578 - RNA, 19 nt, Artificial Sequence
  Description of Artificial Sequence: Synthetic oligonucleotide
ggugaaagacagggcacag

SEQ ID NO: 2247579 - RNA, 19 nt, Artificial Sequence
  Description of Artificial Sequence: Synthetic oligonucleotide
gcccuuuauacacauuuaa

SEQ ID NO: 2247580 - RNA, 19 nt, Artificial Sequence
  Description of Artificial Sequence: Synthetic oligonucleotide
gcucgagugugauucuuac

SEQ ID NO: 2247581 - RNA, 19 nt, Artificial Sequence
  Description of Artificial Sequence: Synthetic oligonucleotide
ugucuguggaugaguucuu

SEQ ID NO: 2247582 - RNA, 19 nt, Artificial Sequence
  Description of Artificial Sequence: Synthetic oligonucleotide
agcuggcaaucaaagguga

SEQ ID NO: 2247583 - RNA, 19 nt, Artificial Sequence
  Description of Artificial Sequence: Synthetic oligonucleotide
cauuucuugguugcaccca

SEQ ID NO: 2247584 - RNA, 19 nt, Artificial Sequence
  Description of Artificial Sequence: Synthetic oligonucleotide
gagcacccauucacgagug

SEQ ID NO: 2247585 - RNA, 19 nt, Artificial Sequence
  Description of Artificial Sequence: Synthetic oligonucleotide
cucauuggucacgagcaga

SEQ ID NO: 2247586 - RNA, 19 nt, Artificial Sequence
  Description of Artificial Sequence: Synthetic oligonucleotide
cucgagugugauucuuaca

SEQ ID NO: 2247587 - RNA, 19 nt, Artificial Sequence
  Description of Artificial Sequence: Synthetic oligonucleotide
gguuucagugacuguggga

SEQ ID NO: 2247588 - RNA, 19 nt, Artificial Sequence
  Description of Artificial Sequence: Synthetic oligonucleotide
gaccugcagaugccaaauc

SEQ ID NO: 2247589 - RNA, 19 nt, Artificial Sequence
  Description of Artificial Sequence: Synthetic oligonucleotide
cacgagcagaugguggaug

SEQ ID NO: 2247590 - RNA, 19 nt, Artificial Sequence
  Description of Artificial Sequence: Synthetic oligonucleotide
auguaugcucgagugugau

SEQ ID NO: 2247591 - RNA, 19 nt, Artificial Sequence
  Description of Artificial Sequence: Synthetic oligonucleotide
cuucaucuggccggcuuac

SEQ ID NO: 2247592 - RNA, 19 nt, Artificial Sequence
  Description of Artificial Sequence: Synthetic oligonucleotide
acagcaagugcagccuggu

SEQ ID NO: 2247593 - RNA, 19 nt, Artificial Sequence
  Description of Artificial Sequence: Synthetic oligonucleotide
aaagaccuagggaccugaa

SEQ ID NO: 2247594 - RNA, 19 nt, Artificial Sequence
  Description of Artificial Sequence: Synthetic oligonucleotide
gugauucuuacagcaguaa

SEQ ID NO: 2247595 - RNA, 19 nt, Artificial Sequence
  Description of Artificial Sequence: Synthetic oligonucleotide
gaaggacaaccagccucag

SEQ ID NO: 2247596 - RNA, 19 nt, Artificial Sequence
  Description of Artificial Sequence: Synthetic oligonucleotide
ucuggccggcuuacaccgc

SEQ ID NO: 2247597 - RNA, 19 nt, Artificial Sequence
  Description of Artificial Sequence: Synthetic oligonucleotide
aucaaccaaaacacuucaa

SEQ ID NO: 2247598 - RNA, 19 nt, Artificial Sequence
  Description of Artificial Sequence: Synthetic oligonucleotide
uggccggcuuacaccgcag

SEQ ID NO: 2247599 - RNA, 19 nt, Artificial Sequence
  Description of Artificial Sequence: Synthetic oligonucleotide
aggauucagcuggcaauca

SEQ ID NO: 2247600 - RNA, 19 nt, Artificial Sequence
  Description of Artificial Sequence: Synthetic oligonucleotide
gggaccugaacaauguuua

SEQ ID NO: 2247601 - RNA, 19 nt, Artificial Sequence
  Description of Artificial Sequence: Synthetic oligonucleotide
cgaguggucuaaaaucuuc

SEQ ID NO: 2247602 - RNA, 19 nt, Artificial Sequence
  Description of Artificial Sequence: Synthetic oligonucleotide
cgagugugauucuuacagc

SEQ ID NO: 2247603 - RNA, 19 nt, Artificial Sequence
  Description of Artificial Sequence: Synthetic oligonucleotide
agggcacagccccgcuccg

SEQ ID NO: 2247604 - RNA, 19 nt, Artificial Sequence
  Description of Artificial Sequence: Synthetic oligonucleotide
cauuggucacgagcagaug

SEQ ID NO: 2247605 - RNA, 19 nt, Artificial Sequence
  Description of Artificial Sequence: Synthetic oligonucleotide
cucugcggugacugaugac

SEQ ID NO: 2247606 - RNA, 19 nt, Artificial Sequence
  Description of Artificial Sequence: Synthetic oligonucleotide
accgcagaugagccuuggu

SEQ ID NO: 2247607 - RNA, 19 nt, Artificial Sequence
  Description of Artificial Sequence: Synthetic oligonucleotide
agcucugcggugacugaug

SEQ ID NO: 2247608 - RNA, 19 nt, Artificial Sequence
  Description of Artificial Sequence: Synthetic oligonucleotide
gugacugaugacagcaagu

SEQ ID NO: 2247609 - RNA, 19 nt, Artificial Sequence
  Description of Artificial Sequence: Synthetic oligonucleotide
gccuugguuuguccucugg

SEQ ID NO: 2247610 - RNA, 19 nt, Artificial Sequence
  Description of Artificial Sequence: Synthetic oligonucleotide
ggacaaccagccucaggac

SEQ ID NO: 2247611 - RNA, 19 nt, Artificial Sequence
  Description of Artificial Sequence: Synthetic oligonucleotide
ccagcgugucacuuuucag

SEQ ID NO: 2247612 - RNA, 19 nt, Artificial Sequence
  Description of Artificial Sequence: Synthetic oligonucleotide
ucacgagcagaugguggau

SEQ ID NO: 2247613 - RNA, 19 nt, Artificial Sequence
  Description of Artificial Sequence: Synthetic oligonucleotide
cagugacugugggauuccc

SEQ ID NO: 2247614 - RNA, 19 nt, Artificial Sequence
  Description of Artificial Sequence: Synthetic oligonucleotide
  modified_base (19)..(19): a, c, u, g, unknown or other
gugccucccggacggagcn

SEQ ID NO: 2247615 - RNA, 19 nt, Artificial Sequence
  Description of Artificial Sequence: Synthetic oligonucleotide
ggauucagcuggcaaucaa

SEQ ID NO: 2247616 - RNA, 19 nt, Artificial Sequence
  Description of Artificial Sequence: Synthetic oligonucleotide
ggacauaaauaaaacucau

SEQ ID NO: 2247617 - RNA, 19 nt, Artificial Sequence
  Description of Artificial Sequence: Synthetic oligonucleotide
gguggauguaugcucgagu

SEQ ID NO: 2247618 - RNA, 19 nt, Artificial Sequence
  Description of Artificial Sequence: Synthetic oligonucleotide
accuagggaccugaacaau

SEQ ID NO: 2247619 - RNA, 19 nt, Artificial Sequence
  Description of Artificial Sequence: Synthetic oligonucleotide
gcgugucacuuuucagugc

SEQ ID NO: 2247620 - RNA, 19 nt, Artificial Sequence
  Description of Artificial Sequence: Synthetic oligonucleotide
cuggccggcuuacaccgca

SEQ ID NO: 2247621 - RNA, 19 nt, Artificial Sequence
  Description of Artificial Sequence: Synthetic oligonucleotide
ggucuaaaaucuuccugau

SEQ ID NO: 2247622 - RNA, 19 nt, Artificial Sequence
  Description of Artificial Sequence: Synthetic oligonucleotide
cauuugucuguggaugagu

SEQ ID NO: 2247623 - RNA, 19 nt, Artificial Sequence
  Description of Artificial Sequence: Synthetic oligonucleotide
cacccaguuguuucaauuu

SEQ ID NO: 2247624 - RNA, 19 nt, Artificial Sequence
  Description of Artificial Sequence: Synthetic oligonucleotide
cggcuuacaccgcagauga

SEQ ID NO: 2247625 - RNA, 19 nt, Artificial Sequence
  Description of Artificial Sequence: Synthetic oligonucleotide
gcucugcggugacugauga

SEQ ID NO: 2247626 - RNA, 19 nt, Artificial Sequence
  Description of Artificial Sequence: Synthetic oligonucleotide
ugguugcacccaguuguuu

SEQ ID NO: 2247627 - RNA, 19 nt, Artificial Sequence
  Description of Artificial Sequence: Synthetic oligonucleotide
cgcuccgucacuugauaug

SEQ ID NO: 2247628 - RNA, 19 nt, Artificial Sequence
  Description of Artificial Sequence: Synthetic oligonucleotide
cgucacuugauaugggaaa

SEQ ID NO: 2247629 - RNA, 19 nt, Artificial Sequence
  Description of Artificial Sequence: Synthetic oligonucleotide
ccggcuuacaccgcagaug

SEQ ID NO: 2247630 - RNA, 19 nt, Artificial Sequence
  Description of Artificial Sequence: Synthetic oligonucleotide
cccugucauaccaccaaca

SEQ ID NO: 2247631 - RNA, 19 nt, Artificial Sequence
  Description of Artificial Sequence: Synthetic oligonucleotide
agccccgcuccgucacuug

SEQ ID NO: 2247632 - RNA, 19 nt, Artificial Sequence
  Description of Artificial Sequence: Synthetic oligonucleotide
ggcacagccccgcuccguc

SEQ ID NO: 2247633 - RNA, 19 nt, Artificial Sequence
  Description of Artificial Sequence: Synthetic oligonucleotide
augcucgagugugauucuu

SEQ ID NO: 2247634 - RNA, 19 nt, Artificial Sequence
  Description of Artificial Sequence: Synthetic oligonucleotide
auugcccuuuauacacauu

SEQ ID NO: 2247635 - RNA, 19 nt, Artificial Sequence
  Description of Artificial Sequence: Synthetic oligonucleotide
ccgucacuugauaugggaa

SEQ ID NO: 2247636 - RNA, 19 nt, Artificial Sequence
  Description of Artificial Sequence: Synthetic oligonucleotide
acaccgcagaugagccuug

SEQ ID NO: 2247637 - RNA, 19 nt, Artificial Sequence
  Description of Artificial Sequence: Synthetic oligonucleotide
ccccugucauaccaccaac

SEQ ID NO: 2247638 - RNA, 19 nt, Artificial Sequence
  Description of Artificial Sequence: Synthetic oligonucleotide
gguuuguccucuggcagcu

SEQ ID NO: 2247639 - RNA, 19 nt, Artificial Sequence
  Description of Artificial Sequence: Synthetic oligonucleotide
cauucacgaguggucuaaa

SEQ ID NO: 2247640 - RNA, 19 nt, Artificial Sequence
  Description of Artificial Sequence: Synthetic oligonucleotide
gcaggacaccagccaggag

SEQ ID NO: 2247641 - RNA, 19 nt, Artificial Sequence
  Description of Artificial Sequence: Synthetic oligonucleotide
cucuagucuuuaaccguuu

SEQ ID NO: 2247642 - RNA, 19 nt, Artificial Sequence
  Description of Artificial Sequence: Synthetic oligonucleotide
gugccagcgugucacuuuu

SEQ ID NO: 2247643 - RNA, 19 nt, Artificial Sequence
  Description of Artificial Sequence: Synthetic oligonucleotide
gcacccauucacgaguggu

SEQ ID NO: 2247644 - RNA, 19 nt, Artificial Sequence
  Description of Artificial Sequence: Synthetic oligonucleotide
caagugcagccugguuuca

SEQ ID NO: 2247645 - RNA, 19 nt, Artificial Sequence
  Description of Artificial Sequence: Synthetic oligonucleotide
ccauucacgaguggucuaa

SEQ ID NO: 2247646 - RNA, 19 nt, Artificial Sequence
  Description of Artificial Sequence: Synthetic oligonucleotide
ggccggcuuacaccgcaga

SEQ ID NO: 2247647 - RNA, 19 nt, Artificial Sequence
  Description of Artificial Sequence: Synthetic oligonucleotide
cgcagaugagccuugguuu

SEQ ID NO: 2247648 - RNA, 19 nt, Artificial Sequence
  Description of Artificial Sequence: Synthetic oligonucleotide
ccucuggcagcucugcggu

SEQ ID NO: 2247649 - RNA, 19 nt, Artificial Sequence
  Description of Artificial Sequence: Synthetic oligonucleotide
gucuguggaugaguucuuu

SEQ ID NO: 2247650 - RNA, 19 nt, Artificial Sequence
  Description of Artificial Sequence: Synthetic oligonucleotide
gccccgcuccgucacuuga

SEQ ID NO: 2247651 - RNA, 19 nt, Artificial Sequence
  Description of Artificial Sequence: Synthetic oligonucleotide
cagccugguuucagugacu

SEQ ID NO: 2247652 - RNA, 19 nt, Artificial Sequence
  Description of Artificial Sequence: Synthetic oligonucleotide
  modified_base (15)..(15): a, c, u, g, unknown or other
cucccggacggagcngaaa

SEQ ID NO: 2247653 - RNA, 19 nt, Artificial Sequence
  Description of Artificial Sequence: Synthetic oligonucleotide
ccgcagaugagccuugguu

SEQ ID NO: 2247654 - RNA, 19 nt, Artificial Sequence
  Description of Artificial Sequence: Synthetic oligonucleotide
gccggcuuacaccgcagau

SEQ ID NO: 2247655 - RNA, 19 nt, Artificial Sequence
  Description of Artificial Sequence: Synthetic oligonucleotide
cccgcuccgucacuugaua

SEQ ID NO: 2247656 - RNA, 19 nt, Artificial Sequence
  Description of Artificial Sequence: Synthetic oligonucleotide
ggacaccagccaggagcuc

SEQ ID NO: 2247657 - RNA, 19 nt, Artificial Sequence
  Description of Artificial Sequence: Synthetic oligonucleotide
cugugccagcgugucacuu

SEQ ID NO: 2247658 - RNA, 19 nt, Artificial Sequence
  Description of Artificial Sequence: Synthetic oligonucleotide
  modified_base (16)..(16): a, c, u, g, unknown or other
ccucccggacggagcngaa

SEQ ID NO: 2247659 - RNA, 19 nt, Artificial Sequence
  Description of Artificial Sequence: Synthetic oligonucleotide
ccgcuccgucacuugauau

SEQ ID NO: 2247660 - RNA, 19 nt, Artificial Sequence
  Description of Artificial Sequence: Synthetic oligonucleotide
gggcacagccccgcuccgu

SEQ ID NO: 2247661 - RNA, 19 nt, Artificial Sequence
  Description of Artificial Sequence: Synthetic oligonucleotide
cagccccgcuccgucacuu

SEQ ID NO: 2247662 - RNA, 19 nt, Artificial Sequence
  Description of Artificial Sequence: Synthetic oligonucleotide
ccccgcuccgucacuugau

SEQ ID NO: 2247663 - RNA, 19 nt, Artificial Sequence
  Description of Artificial Sequence: Synthetic oligonucleotide
gcacuucaucuggccggcu

SEQ ID NO: 2247664 - RNA, 19 nt, Artificial Sequence
  Description of Artificial Sequence: Synthetic oligonucleotide
uuuguuaugauacucaagu

SEQ ID NO: 2247665 - RNA, 19 nt, Artificial Sequence
  Description of Artificial Sequence: Synthetic oligonucleotide
uacacgaugauauauaaaa

SEQ ID NO: 2247666 - RNA, 19 nt, Artificial Sequence
  Description of Artificial Sequence: Synthetic oligonucleotide
aaccccagagauuauguac

SEQ ID NO: 2247667 - RNA, 19 nt, Artificial Sequence
  Description of Artificial Sequence: Synthetic oligonucleotide
ucuuuugugaguccgaccu

SEQ ID NO: 2247668 - RNA, 19 nt, Artificial Sequence
  Description of Artificial Sequence: Synthetic oligonucleotide
cucauguuuguuaugauac

SEQ ID NO: 2247669 - RNA, 19 nt, Artificial Sequence
  Description of Artificial Sequence: Synthetic oligonucleotide
acugccacgucuuugcgcc

SEQ ID NO: 2247670 - RNA, 19 nt, Artificial Sequence
  Description of Artificial Sequence: Synthetic oligonucleotide
acuacugccacgucuuugc

SEQ ID NO: 2247671 - RNA, 19 nt, Artificial Sequence
  Description of Artificial Sequence: Synthetic oligonucleotide
uuagugacacugcucauag

SEQ ID NO: 2247672 - RNA, 19 nt, Artificial Sequence
  Description of Artificial Sequence: Synthetic oligonucleotide
agcauuuuggccguguugc

SEQ ID NO: 2247673 - RNA, 19 nt, Artificial Sequence
  Description of Artificial Sequence: Synthetic oligonucleotide
aagagaauggaggugacug

SEQ ID NO: 2247674 - RNA, 19 nt, Artificial Sequence
  Description of Artificial Sequence: Synthetic oligonucleotide
acgaaugugcuuuuggcuc

SEQ ID NO: 2247675 - RNA, 19 nt, Artificial Sequence
  Description of Artificial Sequence: Synthetic oligonucleotide
uucaccaaaccacauggcc

SEQ ID NO: 2247676 - RNA, 19 nt, Artificial Sequence
  Description of Artificial Sequence: Synthetic oligonucleotide
uguggcuuggggaagcccg

SEQ ID NO: 2247677 - RNA, 19 nt, Artificial Sequence
  Description of Artificial Sequence: Synthetic oligonucleotide
aucuuagugacacugcuca

SEQ ID NO: 2247678 - RNA, 19 nt, Artificial Sequence
  Description of Artificial Sequence: Synthetic oligonucleotide
gaugcuucgacuccugggc

SEQ ID NO: 2247679 - RNA, 19 nt, Artificial Sequence
  Description of Artificial Sequence: Synthetic oligonucleotide
ugaucagccuugaugagca

SEQ ID NO: 2247680 - RNA, 19 nt, Artificial Sequence
  Description of Artificial Sequence: Synthetic oligonucleotide
uggguguguguuaaugugg

SEQ ID NO: 2247681 - RNA, 19 nt, Artificial Sequence
  Description of Artificial Sequence: Synthetic oligonucleotide
uguuaauguggggacaggg

SEQ ID NO: 2247682 - RNA, 19 nt, Artificial Sequence
  Description of Artificial Sequence: Synthetic oligonucleotide
uggguguccccaaagaggc

SEQ ID NO: 2247683 - RNA, 19 nt, Artificial Sequence
  Description of Artificial Sequence: Synthetic oligonucleotide
uaggugaugcugaucagcc

SEQ ID NO: 2247684 - RNA, 19 nt, Artificial Sequence
  Description of Artificial Sequence: Synthetic oligonucleotide
auuuuggccguguugcuag

SEQ ID NO: 2247685 - RNA, 19 nt, Artificial Sequence
  Description of Artificial Sequence: Synthetic oligonucleotide
agagauuauguacaggcau

SEQ ID NO: 2247686 - RNA, 19 nt, Artificial Sequence
  Description of Artificial Sequence: Synthetic oligonucleotide
ugugaguccgaccugcugu

SEQ ID NO: 2247687 - RNA, 19 nt, Artificial Sequence
  Description of Artificial Sequence: Synthetic oligonucleotide
ugaggauggccucaggucu

SEQ ID NO: 2247688 - RNA, 19 nt, Artificial Sequence
  Description of Artificial Sequence: Synthetic oligonucleotide
uuaauguggggacagggua

SEQ ID NO: 2247689 - RNA, 19 nt, Artificial Sequence
  Description of Artificial Sequence: Synthetic oligonucleotide
uauguacaggcaucauugg

SEQ ID NO: 2247690 - RNA, 19 nt, Artificial Sequence
  Description of Artificial Sequence: Synthetic oligonucleotide
guccgugggaaucacaggg

SEQ ID NO: 2247691 - RNA, 19 nt, Artificial Sequence
  Description of Artificial Sequence: Synthetic oligonucleotide
ugaucuuagugacacugcu

SEQ ID NO: 2247692 - RNA, 19 nt, Artificial Sequence
  Description of Artificial Sequence: Synthetic oligonucleotide
acuguugcuaaaccuucac

SEQ ID NO: 2247693 - RNA, 19 nt, Artificial Sequence
  Description of Artificial Sequence: Synthetic oligonucleotide
ugaugcuucgacuccuggg

SEQ ID NO: 2247694 - RNA, 19 nt, Artificial Sequence
  Description of Artificial Sequence: Synthetic oligonucleotide
ccagagauuauguacaggc

SEQ ID NO: 2247695 - RNA, 19 nt, Artificial Sequence
  Description of Artificial Sequence: Synthetic oligonucleotide
cauggccugauuuucagug

SEQ ID NO: 2247696 - RNA, 19 nt, Artificial Sequence
  Description of Artificial Sequence: Synthetic oligonucleotide
auguacaggcaucauuggg

SEQ ID NO: 2247697 - RNA, 19 nt, Artificial Sequence
  Description of Artificial Sequence: Synthetic oligonucleotide
uugccguugugcaugagug

SEQ ID NO: 2247698 - RNA, 19 nt, Artificial Sequence
  Description of Artificial Sequence: Synthetic oligonucleotide
uguguguuaauguggggac

SEQ ID NO: 2247699 - RNA, 19 nt, Artificial Sequence
  Description of Artificial Sequence: Synthetic oligonucleotide
uguguuaauguggggacag

SEQ ID NO: 2247700 - RNA, 19 nt, Artificial Sequence
  Description of Artificial Sequence: Synthetic oligonucleotide
acugaucuuagugacacug

SEQ ID NO: 2247701 - RNA, 19 nt, Artificial Sequence
  Description of Artificial Sequence: Synthetic oligonucleotide
aauguggggacaggguacg

SEQ ID NO: 2247702 - RNA, 19 nt, Artificial Sequence
  Description of Artificial Sequence: Synthetic oligonucleotide
ucggguggauccuugaggc

SEQ ID NO: 2247703 - RNA, 19 nt, Artificial Sequence
  Description of Artificial Sequence: Synthetic oligonucleotide
ugcgugaugggcaggacca

SEQ ID NO: 2247704 - RNA, 19 nt, Artificial Sequence
  Description of Artificial Sequence: Synthetic oligonucleotide
ugaucgcacacacaauaca

SEQ ID NO: 2247705 - RNA, 19 nt, Artificial Sequence
  Description of Artificial Sequence: Synthetic oligonucleotide
uguggugugguauggugug

SEQ ID NO: 2247706 - RNA, 19 nt, Artificial Sequence
  Description of Artificial Sequence: Synthetic oligonucleotide
ucggaguggauucuggggu

SEQ ID NO: 2247707 - RNA, 19 nt, Artificial Sequence
  Description of Artificial Sequence: Synthetic oligonucleotide
uuuugugaguccgaccugc

SEQ ID NO: 2247708 - RNA, 19 nt, Artificial Sequence
  Description of Artificial Sequence: Synthetic oligonucleotide
aggugacuguugcuaaacc

SEQ ID NO: 2247709 - RNA, 19 nt, Artificial Sequence
  Description of Artificial Sequence: Synthetic oligonucleotide
aaagaggccacugaucuua

SEQ ID NO: 2247710 - RNA, 19 nt, Artificial Sequence
  Description of Artificial Sequence: Synthetic oligonucleotide
guacgaaugugcuuuuggc

SEQ ID NO: 2247711 - RNA, 19 nt, Artificial Sequence
  Description of Artificial Sequence: Synthetic oligonucleotide
acugcucauagacuccccg

SEQ ID NO: 2247712 - RNA, 19 nt, Artificial Sequence
  Description of Artificial Sequence: Synthetic oligonucleotide
acgaugauauauaaaauaa

SEQ ID NO: 2247713 - RNA, 19 nt, Artificial Sequence
  Description of Artificial Sequence: Synthetic oligonucleotide
ugagcguuaggugugggug

SEQ ID NO: 2247714 - RNA, 19 nt, Artificial Sequence
  Description of Artificial Sequence: Synthetic oligonucleotide
uauggugugugugugugug

SEQ ID NO: 2247715 - RNA, 19 nt, Artificial Sequence
  Description of Artificial Sequence: Synthetic oligonucleotide
uaugguguggugugguaug

SEQ ID NO: 2247716 - RNA, 19 nt, Artificial Sequence
  Description of Artificial Sequence: Synthetic oligonucleotide
cugauuuucagugucccug

SEQ ID NO: 2247717 - RNA, 19 nt, Artificial Sequence
  Description of Artificial Sequence: Synthetic oligonucleotide
uguggguguguguuaaugu

SEQ ID NO: 2247718 - RNA, 19 nt, Artificial Sequence
  Description of Artificial Sequence: Synthetic oligonucleotide
gaucgcacacacaauacac

SEQ ID NO: 2247719 - RNA, 19 nt, Artificial Sequence
  Description of Artificial Sequence: Synthetic oligonucleotide
ugucggaguggauucuggg

SEQ ID NO: 2247720 - RNA, 19 nt, Artificial Sequence
  Description of Artificial Sequence: Synthetic oligonucleotide
gguacgaaugugcuuuugg

SEQ ID NO: 2247721 - RNA, 19 nt, Artificial Sequence
  Description of Artificial Sequence: Synthetic oligonucleotide
uuggccguguugcuaggcg

SEQ ID NO: 2247722 - RNA, 19 nt, Artificial Sequence
  Description of Artificial Sequence: Synthetic oligonucleotide
agugaggauggccucaggu

SEQ ID NO: 2247723 - RNA, 19 nt, Artificial Sequence
  Description of Artificial Sequence: Synthetic oligonucleotide
guacaggcaucauugggcc

SEQ ID NO: 2247724 - RNA, 19 nt, Artificial Sequence
  Description of Artificial Sequence: Synthetic oligonucleotide
aaaccuucaccaaaccaca

SEQ ID NO: 2247725 - RNA, 19 nt, Artificial Sequence
  Description of Artificial Sequence: Synthetic oligonucleotide
cacgaugauauauaaaaua

SEQ ID NO: 2247726 - RNA, 19 nt, Artificial Sequence
  Description of Artificial Sequence: Synthetic oligonucleotide
ugacuguugcuaaaccuuc

SEQ ID NO: 2247727 - RNA, 19 nt, Artificial Sequence
  Description of Artificial Sequence: Synthetic oligonucleotide
uugcuaaaccuucaccaaa

SEQ ID NO: 2247728 - RNA, 19 nt, Artificial Sequence
  Description of Artificial Sequence: Synthetic oligonucleotide
acaauacacgaugauauau

SEQ ID NO: 2247729 - RNA, 19 nt, Artificial Sequence
  Description of Artificial Sequence: Synthetic oligonucleotide
ugugguguggugugguaug

SEQ ID NO: 2247730 - RNA, 19 nt, Artificial Sequence
  Description of Artificial Sequence: Synthetic oligonucleotide
ugguguguggugugugugg

SEQ ID NO: 2247731 - RNA, 19 nt, Artificial Sequence
  Description of Artificial Sequence: Synthetic oligonucleotide
aacuggaugggugccucac

SEQ ID NO: 2247732 - RNA, 19 nt, Artificial Sequence
  Description of Artificial Sequence: Synthetic oligonucleotide
ugcucauagacuccccgac

SEQ ID NO: 2247733 - RNA, 19 nt, Artificial Sequence
  Description of Artificial Sequence: Synthetic oligonucleotide
uuguuaugauacucaaguc

SEQ ID NO: 2247734 - RNA, 19 nt, Artificial Sequence
  Description of Artificial Sequence: Synthetic oligonucleotide
aauggaggugacuguugcu

SEQ ID NO: 2247735 - RNA, 19 nt, Artificial Sequence
  Description of Artificial Sequence: Synthetic oligonucleotide
ucgucugaugcuucgacuc

SEQ ID NO: 2247736 - RNA, 19 nt, Artificial Sequence
  Description of Artificial Sequence: Synthetic oligonucleotide
ugugugugugugugugugg

SEQ ID NO: 2247737 - RNA, 19 nt, Artificial Sequence
  Description of Artificial Sequence: Synthetic oligonucleotide
gucggaguggauucugggg

SEQ ID NO: 2247738 - RNA, 19 nt, Artificial Sequence
  Description of Artificial Sequence: Synthetic oligonucleotide
uugcugaacuggaugggug

SEQ ID NO: 2247739 - RNA, 19 nt, Artificial Sequence
  Description of Artificial Sequence: Synthetic oligonucleotide
acacugcucauagacuccc

SEQ ID NO: 2247740 - RNA, 19 nt, Artificial Sequence
  Description of Artificial Sequence: Synthetic oligonucleotide
gucggguggauccuugagg

SEQ ID NO: 2247741 - RNA, 19 nt, Artificial Sequence
  Description of Artificial Sequence: Synthetic oligonucleotide
cugaucuuagugacacugc

SEQ ID NO: 2247742 - RNA, 19 nt, Artificial Sequence
  Description of Artificial Sequence: Synthetic oligonucleotide
cauguuuguuaugauacuc

SEQ ID NO: 2247743 - RNA, 19 nt, Artificial Sequence
  Description of Artificial Sequence: Synthetic oligonucleotide
augcuucgacuccugggcc

SEQ ID NO: 2247744 - RNA, 19 nt, Artificial Sequence
  Description of Artificial Sequence: Synthetic oligonucleotide
ggugcacgcauugugagcg

SEQ ID NO: 2247745 - RNA, 19 nt, Artificial Sequence
  Description of Artificial Sequence: Synthetic oligonucleotide
agagugugugagcucuuuc

SEQ ID NO: 2247746 - RNA, 19 nt, Artificial Sequence
  Description of Artificial Sequence: Synthetic oligonucleotide
ugugguguguguggugugg

SEQ ID NO: 2247747 - RNA, 19 nt, Artificial Sequence
  Description of Artificial Sequence: Synthetic oligonucleotide
uguguguguguggugcacg

SEQ ID NO: 2247748 - RNA, 19 nt, Artificial Sequence
  Description of Artificial Sequence: Synthetic oligonucleotide
agauuauguacaggcauca

SEQ ID NO: 2247749 - RNA, 19 nt, Artificial Sequence
  Description of Artificial Sequence: Synthetic oligonucleotide
ugugugguguguguggugu

SEQ ID NO: 2247750 - RNA, 19 nt, Artificial Sequence
  Description of Artificial Sequence: Synthetic oligonucleotide
gagauuauguacaggcauc

SEQ ID NO: 2247751 - RNA, 19 nt, Artificial Sequence
  Description of Artificial Sequence: Synthetic oligonucleotide
aaccacauggccugauuuu

SEQ ID NO: 2247752 - RNA, 19 nt, Artificial Sequence
  Description of Artificial Sequence: Synthetic oligonucleotide
aucgcacacacaauacacg

SEQ ID NO: 2247753 - RNA, 19 nt, Artificial Sequence
  Description of Artificial Sequence: Synthetic oligonucleotide
gagcucuuucucuuugcgc

SEQ ID NO: 2247754 - RNA, 19 nt, Artificial Sequence
  Description of Artificial Sequence: Synthetic oligonucleotide
accuucaccaaaccacaug

SEQ ID NO: 2247755 - RNA, 19 nt, Artificial Sequence
  Description of Artificial Sequence: Synthetic oligonucleotide
auguuuguuaugauacuca

SEQ ID NO: 2247756 - RNA, 19 nt, Artificial Sequence
  Description of Artificial Sequence: Synthetic oligonucleotide
ggaugggugccucaccucg

SEQ ID NO: 2247757 - RNA, 19 nt, Artificial Sequence
  Description of Artificial Sequence: Synthetic oligonucleotide
uaugauacucaagucuuuu

SEQ ID NO: 2247758 - RNA, 19 nt, Artificial Sequence
  Description of Artificial Sequence: Synthetic oligonucleotide
cugaucagccuugaugagc

SEQ ID NO: 2247759 - RNA, 19 nt, Artificial Sequence
  Description of Artificial Sequence: Synthetic oligonucleotide
uggggacaggguacgaaug

SEQ ID NO: 2247760 - RNA, 19 nt, Artificial Sequence
  Description of Artificial Sequence: Synthetic oligonucleotide
gagcauuuuggccguguug

SEQ ID NO: 2247761 - RNA, 19 nt, Artificial Sequence
  Description of Artificial Sequence: Synthetic oligonucleotide
uugugcaugaguggaguga

SEQ ID NO: 2247762 - RNA, 19 nt, Artificial Sequence
  Description of Artificial Sequence: Synthetic oligonucleotide
aggaggacccagcauccuc

SEQ ID NO: 2247763 - RNA, 19 nt, Artificial Sequence
  Description of Artificial Sequence: Synthetic oligonucleotide
aggccacugaucuuaguga

SEQ ID NO: 2247764 - RNA, 19 nt, Artificial Sequence
  Description of Artificial Sequence: Synthetic oligonucleotide
gugggaaucacaggggagc

SEQ ID NO: 2247765 - RNA, 19 nt, Artificial Sequence
  Description of Artificial Sequence: Synthetic oligonucleotide
uucucuuugcgcugcacua

SEQ ID NO: 2247766 - RNA, 19 nt, Artificial Sequence
  Description of Artificial Sequence: Synthetic oligonucleotide
uuaugauacucaagucuuu

SEQ ID NO: 2247767 - RNA, 19 nt, Artificial Sequence
  Description of Artificial Sequence: Synthetic oligonucleotide
ugccguugugcaugagugg

SEQ ID NO: 2247768 - RNA, 19 nt, Artificial Sequence
  Description of Artificial Sequence: Synthetic oligonucleotide
ugaugagcauuuuggccgu

SEQ ID NO: 2247769 - RNA, 19 nt, Artificial Sequence
  Description of Artificial Sequence: Synthetic oligonucleotide
cuaggcguggccagcuugc

SEQ ID NO: 2247770 - RNA, 19 nt, Artificial Sequence
  Description of Artificial Sequence: Synthetic oligonucleotide
uggccugauuuucaguguc

SEQ ID NO: 2247771 - RNA, 19 nt, Artificial Sequence
  Description of Artificial Sequence: Synthetic oligonucleotide
gcaucauugggccugcgug

SEQ ID NO: 2247772 - RNA, 19 nt, Artificial Sequence
  Description of Artificial Sequence: Synthetic oligonucleotide
agccuugaugagcauuuug

SEQ ID NO: 2247773 - RNA, 19 nt, Artificial Sequence
  Description of Artificial Sequence: Synthetic oligonucleotide
auugugagcguuaggugug

SEQ ID NO: 2247774 - RNA, 19 nt, Artificial Sequence
  Description of Artificial Sequence: Synthetic oligonucleotide
guguguguguguguggugc

SEQ ID NO: 2247775 - RNA, 19 nt, Artificial Sequence
  Description of Artificial Sequence: Synthetic oligonucleotide
uacugccacgucuuugcgc

SEQ ID NO: 2247776 - RNA, 19 nt, Artificial Sequence
  Description of Artificial Sequence: Synthetic oligonucleotide
uggugugugugugugugug

SEQ ID NO: 2247777 - RNA, 19 nt, Artificial Sequence
  Description of Artificial Sequence: Synthetic oligonucleotide
caauacacgaugauauaua

SEQ ID NO: 2247778 - RNA, 19 nt, Artificial Sequence
  Description of Artificial Sequence: Synthetic oligonucleotide
cauugugagcguuaggugu

SEQ ID NO: 2247779 - RNA, 19 nt, Artificial Sequence
  Description of Artificial Sequence: Synthetic oligonucleotide
ggugaggucuaggugaugc

SEQ ID NO: 2247780 - RNA, 19 nt, Artificial Sequence
  Description of Artificial Sequence: Synthetic oligonucleotide
cuuugcgccgugaucgcac

SEQ ID NO: 2247781 - RNA, 19 nt, Artificial Sequence
  Description of Artificial Sequence: Synthetic oligonucleotide
acgucuuugcgccgugauc

SEQ ID NO: 2247782 - RNA, 19 nt, Artificial Sequence
  Description of Artificial Sequence: Synthetic oligonucleotide
uugugaguccgaccugcug

SEQ ID NO: 2247783 - RNA, 19 nt, Artificial Sequence
  Description of Artificial Sequence: Synthetic oligonucleotide
ugugucccagggaggagga

SEQ ID NO: 2247784 - RNA, 19 nt, Artificial Sequence
  Description of Artificial Sequence: Synthetic oligonucleotide
acgagagugugugagcucu

SEQ ID NO: 2247785 - RNA, 19 nt, Artificial Sequence
  Description of Artificial Sequence: Synthetic oligonucleotide
aguccgaccugcuguacga

SEQ ID NO: 2247786 - RNA, 19 nt, Artificial Sequence
  Description of Artificial Sequence: Synthetic oligonucleotide
ugugugugguguggugugg

SEQ ID NO: 2247787 - RNA, 19 nt, Artificial Sequence
  Description of Artificial Sequence: Synthetic oligonucleotide
uuugugaguccgaccugcu

SEQ ID NO: 2247788 - RNA, 19 nt, Artificial Sequence
  Description of Artificial Sequence: Synthetic oligonucleotide
uguguguguguguggugca

SEQ ID NO: 2247789 - RNA, 19 nt, Artificial Sequence
  Description of Artificial Sequence: Synthetic oligonucleotide
uuuuggccguguugcuagg

SEQ ID NO: 2247790 - RNA, 19 nt, Artificial Sequence
  Description of Artificial Sequence: Synthetic oligonucleotide
agggcggugaggucuaggu

SEQ ID NO: 2247791 - RNA, 19 nt, Artificial Sequence
  Description of Artificial Sequence: Synthetic oligonucleotide
uccccgacgagagugugug

SEQ ID NO: 2247792 - RNA, 19 nt, Artificial Sequence
  Description of Artificial Sequence: Synthetic oligonucleotide
guugugcaugaguggagug

SEQ ID NO: 2247793 - RNA, 19 nt, Artificial Sequence
  Description of Artificial Sequence: Synthetic oligonucleotide
gucuuuugugaguccgacc

SEQ ID NO: 2247794 - RNA, 19 nt, Artificial Sequence
  Description of Artificial Sequence: Synthetic oligonucleotide
gaucuuagugacacugcuc

SEQ ID NO: 2247795 - RNA, 19 nt, Artificial Sequence
  Description of Artificial Sequence: Synthetic oligonucleotide
ugcagugucggaguggauu

SEQ ID NO: 2247796 - RNA, 19 nt, Artificial Sequence
  Description of Artificial Sequence: Synthetic oligonucleotide
uguguguguguguguggug

SEQ ID NO: 2247797 - RNA, 19 nt, Artificial Sequence
  Description of Artificial Sequence: Synthetic oligonucleotide
gaggugacuguugcuaaac

SEQ ID NO: 2247798 - RNA, 19 nt, Artificial Sequence
  Description of Artificial Sequence: Synthetic oligonucleotide
cugcgugaugggcaggacc

SEQ ID NO: 2247799 - RNA, 19 nt, Artificial Sequence
  Description of Artificial Sequence: Synthetic oligonucleotide
agacuccccgacgagagug

SEQ ID NO: 2247800 - RNA, 19 nt, Artificial Sequence
  Description of Artificial Sequence: Synthetic oligonucleotide
uggugcacgcauugugagc

SEQ ID NO: 2247801 - RNA, 19 nt, Artificial Sequence
  Description of Artificial Sequence: Synthetic oligonucleotide
cuuuggacugggugucccc

SEQ ID NO: 2247802 - RNA, 19 nt, Artificial Sequence
  Description of Artificial Sequence: Synthetic oligonucleotide
ggcggugaggucuagguga

SEQ ID NO: 2247803 - RNA, 19 nt, Artificial Sequence
  Description of Artificial Sequence: Synthetic oligonucleotide
accugcuguacgauguggg

SEQ ID NO: 2247804 - RNA, 19 nt, Artificial Sequence
  Description of Artificial Sequence: Synthetic oligonucleotide
accccagagauuauguaca

SEQ ID NO: 2247805 - RNA, 19 nt, Artificial Sequence
  Description of Artificial Sequence: Synthetic oligonucleotide
uggaggugacuguugcuaa

SEQ ID NO: 2247806 - RNA, 19 nt, Artificial Sequence
  Description of Artificial Sequence: Synthetic oligonucleotide
cagagauuauguacaggca

SEQ ID NO: 2247807 - RNA, 19 nt, Artificial Sequence
  Description of Artificial Sequence: Synthetic oligonucleotide
ugugugugugugugugugu

SEQ ID NO: 2247808 - RNA, 19 nt, Artificial Sequence
  Description of Artificial Sequence: Synthetic oligonucleotide
uggugugguauggugugug

SEQ ID NO: 2247809 - RNA, 19 nt, Artificial Sequence
  Description of Artificial Sequence: Synthetic oligonucleotide
cugaugcuucgacuccugg

SEQ ID NO: 2247810 - RNA, 19 nt, Artificial Sequence
  Description of Artificial Sequence: Synthetic oligonucleotide
uccgaccugcuguacgaug

SEQ ID NO: 2247811 - RNA, 19 nt, Artificial Sequence
  Description of Artificial Sequence: Synthetic oligonucleotide
uugugagcguuaggugugg

SEQ ID NO: 2247812 - RNA, 19 nt, Artificial Sequence
  Description of Artificial Sequence: Synthetic oligonucleotide
accacgcuggggauguggc

SEQ ID NO: 2247813 - RNA, 19 nt, Artificial Sequence
  Description of Artificial Sequence: Synthetic oligonucleotide
gugugugugguguggugug

SEQ ID NO: 2247814 - RNA, 19 nt, Artificial Sequence
  Description of Artificial Sequence: Synthetic oligonucleotide
augggugccucaccucguc

SEQ ID NO: 2247815 - RNA, 19 nt, Artificial Sequence
  Description of Artificial Sequence: Synthetic oligonucleotide
gacccagcauccucaacuc

SEQ ID NO: 2247816 - RNA, 19 nt, Artificial Sequence
  Description of Artificial Sequence: Synthetic oligonucleotide
auggccugauuuucagugu

SEQ ID NO: 2247817 - RNA, 19 nt, Artificial Sequence
  Description of Artificial Sequence: Synthetic oligonucleotide
gaggucuaggugaugcuga

SEQ ID NO: 2247818 - RNA, 19 nt, Artificial Sequence
  Description of Artificial Sequence: Synthetic oligonucleotide
gugugugugugugugugug

SEQ ID NO: 2247819 - RNA, 19 nt, Artificial Sequence
  Description of Artificial Sequence: Synthetic oligonucleotide
caucauugggccugcguga

SEQ ID NO: 2247820 - RNA, 19 nt, Artificial Sequence
  Description of Artificial Sequence: Synthetic oligonucleotide
cuuuugugaguccgaccug

SEQ ID NO: 2247821 - RNA, 19 nt, Artificial Sequence
  Description of Artificial Sequence: Synthetic oligonucleotide
gguauggugugugugugug

SEQ ID NO: 2247822 - RNA, 19 nt, Artificial Sequence
  Description of Artificial Sequence: Synthetic oligonucleotide
cgucuuugcgccgugaucg

SEQ ID NO: 2247823 - RNA, 19 nt, Artificial Sequence
  Description of Artificial Sequence: Synthetic oligonucleotide
ggagugugaaggaagagaa

SEQ ID NO: 2247824 - RNA, 19 nt, Artificial Sequence
  Description of Artificial Sequence: Synthetic oligonucleotide
gcucauagacuccccgacg

SEQ ID NO: 2247825 - RNA, 19 nt, Artificial Sequence
  Description of Artificial Sequence: Synthetic oligonucleotide
ugagcauuuuggccguguu

SEQ ID NO: 2247826 - RNA, 19 nt, Artificial Sequence
  Description of Artificial Sequence: Synthetic oligonucleotide
agaauggaggugacuguug

SEQ ID NO: 2247827 - RNA, 19 nt, Artificial Sequence
  Description of Artificial Sequence: Synthetic oligonucleotide
uuggucggguggauccuug

SEQ ID NO: 2247828 - RNA, 19 nt, Artificial Sequence
  Description of Artificial Sequence: Synthetic oligonucleotide
aagucuuuugugaguccga

SEQ ID NO: 2247829 - RNA, 19 nt, Artificial Sequence
  Description of Artificial Sequence: Synthetic oligonucleotide
uuugcgccgugaucgcaca

SEQ ID NO: 2247830 - RNA, 19 nt, Artificial Sequence
  Description of Artificial Sequence: Synthetic oligonucleotide
acacgaugauauauaaaau

SEQ ID NO: 2247831 - RNA, 19 nt, Artificial Sequence
  Description of Artificial Sequence: Synthetic oligonucleotide
cuacugccacgucuuugcg

SEQ ID NO: 2247832 - RNA, 19 nt, Artificial Sequence
  Description of Artificial Sequence: Synthetic oligonucleotide
ugguauggugugugugugu

SEQ ID NO: 2247833 - RNA, 19 nt, Artificial Sequence
  Description of Artificial Sequence: Synthetic oligonucleotide
gcuaaaccuucaccaaacc

SEQ ID NO: 2247834 - RNA, 19 nt, Artificial Sequence
  Description of Artificial Sequence: Synthetic oligonucleotide
gugaucgcacacacaauac

SEQ ID NO: 2247835 - RNA, 19 nt, Artificial Sequence
  Description of Artificial Sequence: Synthetic oligonucleotide
ugugagcguuagguguggg

SEQ ID NO: 2247836 - RNA, 19 nt, Artificial Sequence
  Description of Artificial Sequence: Synthetic oligonucleotide
ucuuagugacacugcucau

SEQ ID NO: 2247837 - RNA, 19 nt, Artificial Sequence
  Description of Artificial Sequence: Synthetic oligonucleotide
gguguguguuaaugugggg

SEQ ID NO: 2247838 - RNA, 19 nt, Artificial Sequence
  Description of Artificial Sequence: Synthetic oligonucleotide
cacgcauugugagcguuag

SEQ ID NO: 2247839 - RNA, 19 nt, Artificial Sequence
  Description of Artificial Sequence: Synthetic oligonucleotide
uggugugugugguguggug

SEQ ID NO: 2247840 - RNA, 19 nt, Artificial Sequence
  Description of Artificial Sequence: Synthetic oligonucleotide
gcauugugagcguuaggug

SEQ ID NO: 2247841 - RNA, 19 nt, Artificial Sequence
  Description of Artificial Sequence: Synthetic oligonucleotide
gccgugaucgcacacacaa

SEQ ID NO: 2247842 - RNA, 19 nt, Artificial Sequence
  Description of Artificial Sequence: Synthetic oligonucleotide
uggccguguugcuaggcgu

SEQ ID NO: 2247843 - RNA, 19 nt, Artificial Sequence
  Description of Artificial Sequence: Synthetic oligonucleotide
uggugugguaugguguggu

SEQ ID NO: 2247844 - RNA, 19 nt, Artificial Sequence
  Description of Artificial Sequence: Synthetic oligonucleotide
aagaggccacugaucuuag

SEQ ID NO: 2247845 - RNA, 19 nt, Artificial Sequence
  Description of Artificial Sequence: Synthetic oligonucleotide
uguguguggugcacgcauu

SEQ ID NO: 2247846 - RNA, 19 nt, Artificial Sequence
  Description of Artificial Sequence: Synthetic oligonucleotide
uuuggccguguugcuaggc

SEQ ID NO: 2247847 - RNA, 19 nt, Artificial Sequence
  Description of Artificial Sequence: Synthetic oligonucleotide
ucagugucccuguguccca

SEQ ID NO: 2247848 - RNA, 19 nt, Artificial Sequence
  Description of Artificial Sequence: Synthetic oligonucleotide
agugucggaguggauucug

SEQ ID NO: 2247849 - RNA, 19 nt, Artificial Sequence
  Description of Artificial Sequence: Synthetic oligonucleotide
guguuaauguggggacagg

SEQ ID NO: 2247850 - RNA, 19 nt, Artificial Sequence
  Description of Artificial Sequence: Synthetic oligonucleotide
acgcauugugagcguuagg

SEQ ID NO: 2247851 - RNA, 19 nt, Artificial Sequence
  Description of Artificial Sequence: Synthetic oligonucleotide
ucccacucgcggcugccgc

SEQ ID NO: 2247852 - RNA, 19 nt, Artificial Sequence
  Description of Artificial Sequence: Synthetic oligonucleotide
aggcguggccagcuugccg

SEQ ID NO: 2247853 - RNA, 19 nt, Artificial Sequence
  Description of Artificial Sequence: Synthetic oligonucleotide
auacacgaugauauauaaa

SEQ ID NO: 2247854 - RNA, 19 nt, Artificial Sequence
  Description of Artificial Sequence: Synthetic oligonucleotide
gugugguauggugugugug

SEQ ID NO: 2247855 - RNA, 19 nt, Artificial Sequence
  Description of Artificial Sequence: Synthetic oligonucleotide
cagcuugccguugugcaug

SEQ ID NO: 2247856 - RNA, 19 nt, Artificial Sequence
  Description of Artificial Sequence: Synthetic oligonucleotide
gauguggcuuggggaagcc

SEQ ID NO: 2247857 - RNA, 19 nt, Artificial Sequence
  Description of Artificial Sequence: Synthetic oligonucleotide
cuuagugacacugcucaua

SEQ ID NO: 2247858 - RNA, 19 nt, Artificial Sequence
  Description of Artificial Sequence: Synthetic oligonucleotide
gacgagagugugugagcuc

SEQ ID NO: 2247859 - RNA, 19 nt, Artificial Sequence
  Description of Artificial Sequence: Synthetic oligonucleotide
gugucggaguggauucugg

SEQ ID NO: 2247860 - RNA, 19 nt, Artificial Sequence
  Description of Artificial Sequence: Synthetic oligonucleotide
ggaaucacaggggagccca

SEQ ID NO: 2247861 - RNA, 19 nt, Artificial Sequence
  Description of Artificial Sequence: Synthetic oligonucleotide
acaggguacgaaugugcuu

SEQ ID NO: 2247862 - RNA, 19 nt, Artificial Sequence
  Description of Artificial Sequence: Synthetic oligonucleotide
ggacccagcauccucaacu

SEQ ID NO: 2247863 - RNA, 19 nt, Artificial Sequence
  Description of Artificial Sequence: Synthetic oligonucleotide
gacuguugcuaaaccuuca

SEQ ID NO: 2247864 - RNA, 19 nt, Artificial Sequence
  Description of Artificial Sequence: Synthetic oligonucleotide
gguccgugggaaucacagg

SEQ ID NO: 2247865 - RNA, 19 nt, Artificial Sequence
  Description of Artificial Sequence: Synthetic oligonucleotide
ugaugcugaucagccuuga

SEQ ID NO: 2247866 - RNA, 19 nt, Artificial Sequence
  Description of Artificial Sequence: Synthetic oligonucleotide
gggagugugaaggaagaga

SEQ ID NO: 2247867 - RNA, 19 nt, Artificial Sequence
  Description of Artificial Sequence: Synthetic oligonucleotide
guuaauguggggacagggu

SEQ ID NO: 2247868 - RNA, 19 nt, Artificial Sequence
  Description of Artificial Sequence: Synthetic oligonucleotide
uagacuccccgacgagagu

SEQ ID NO: 2247869 - RNA, 19 nt, Artificial Sequence
  Description of Artificial Sequence: Synthetic oligonucleotide
auggugugugugugugugu

SEQ ID NO: 2247870 - RNA, 19 nt, Artificial Sequence
  Description of Artificial Sequence: Synthetic oligonucleotide
uguguggugugguguggua

SEQ ID NO: 2247871 - RNA, 19 nt, Artificial Sequence
  Description of Artificial Sequence: Synthetic oligonucleotide
cacaauacacgaugauaua

SEQ ID NO: 2247872 - RNA, 19 nt, Artificial Sequence
  Description of Artificial Sequence: Synthetic oligonucleotide
agcguuaggugugggugug

SEQ ID NO: 2247873 - RNA, 19 nt, Artificial Sequence
  Description of Artificial Sequence: Synthetic oligonucleotide
cugcucauagacuccccga

SEQ ID NO: 2247874 - RNA, 19 nt, Artificial Sequence
  Description of Artificial Sequence: Synthetic oligonucleotide
ucuuugcgccgugaucgca

SEQ ID NO: 2247875 - RNA, 19 nt, Artificial Sequence
  Description of Artificial Sequence: Synthetic oligonucleotide
gucuuugcgccgugaucgc

SEQ ID NO: 2247876 - RNA, 19 nt, Artificial Sequence
  Description of Artificial Sequence: Synthetic oligonucleotide
gugguguguggugugugug

SEQ ID NO: 2247877 - RNA, 19 nt, Artificial Sequence
  Description of Artificial Sequence: Synthetic oligonucleotide
aggucuaggugaugcugau

SEQ ID NO: 2247878 - RNA, 19 nt, Artificial Sequence
  Description of Artificial Sequence: Synthetic oligonucleotide
guugcuaggcguggccagc

SEQ ID NO: 2247879 - RNA, 19 nt, Artificial Sequence
  Description of Artificial Sequence: Synthetic oligonucleotide
gacaggguacgaaugugcu

SEQ ID NO: 2247880 - RNA, 19 nt, Artificial Sequence
  Description of Artificial Sequence: Synthetic oligonucleotide
gcucauguuuguuaugaua

SEQ ID NO: 2247881 - RNA, 19 nt, Artificial Sequence
  Description of Artificial Sequence: Synthetic oligonucleotide
cacuacugccacgucuuug

SEQ ID NO: 2247882 - RNA, 19 nt, Artificial Sequence
  Description of Artificial Sequence: Synthetic oligonucleotide
uggaugggugccucaccuc

SEQ ID NO: 2247883 - RNA, 19 nt, Artificial Sequence
  Description of Artificial Sequence: Synthetic oligonucleotide
uuggacuggguguccccaa

SEQ ID NO: 2247884 - RNA, 19 nt, Artificial Sequence
  Description of Artificial Sequence: Synthetic oligonucleotide
uggucggguggauccuuga

SEQ ID NO: 2247885 - RNA, 19 nt, Artificial Sequence
  Description of Artificial Sequence: Synthetic oligonucleotide
ucuuggucggguggauccu

SEQ ID NO: 2247886 - RNA, 19 nt, Artificial Sequence
  Description of Artificial Sequence: Synthetic oligonucleotide
aaccuucaccaaaccacau

SEQ ID NO: 2247887 - RNA, 19 nt, Artificial Sequence
  Description of Artificial Sequence: Synthetic oligonucleotide
ugaguggagugaggauggc

SEQ ID NO: 2247888 - RNA, 19 nt, Artificial Sequence
  Description of Artificial Sequence: Synthetic oligonucleotide
augagcauuuuggccgugu

SEQ ID NO: 2247889 - RNA, 19 nt, Artificial Sequence
  Description of Artificial Sequence: Synthetic oligonucleotide
gcugaucagccuugaugag

SEQ ID NO: 2247890 - RNA, 19 nt, Artificial Sequence
  Description of Artificial Sequence: Synthetic oligonucleotide
caccacgcuggggaugugg

SEQ ID NO: 2247891 - RNA, 19 nt, Artificial Sequence
  Description of Artificial Sequence: Synthetic oligonucleotide
ggucggguggauccuugag

SEQ ID NO: 2247892 - RNA, 19 nt, Artificial Sequence
  Description of Artificial Sequence: Synthetic oligonucleotide
uagguguggguguguguua

SEQ ID NO: 2247893 - RNA, 19 nt, Artificial Sequence
  Description of Artificial Sequence: Synthetic oligonucleotide
gguguccccaaagaggcca

SEQ ID NO: 2247894 - RNA, 19 nt, Artificial Sequence
  Description of Artificial Sequence: Synthetic oligonucleotide
agggccaucuuggucgggu

SEQ ID NO: 2247895 - RNA, 19 nt, Artificial Sequence
  Description of Artificial Sequence: Synthetic oligonucleotide
aucauugggccugcgugau

SEQ ID NO: 2247896 - RNA, 19 nt, Artificial Sequence
  Description of Artificial Sequence: Synthetic oligonucleotide
ggacuggguguccccaaag

SEQ ID NO: 2247897 - RNA, 19 nt, Artificial Sequence
  Description of Artificial Sequence: Synthetic oligonucleotide
cuugccguugugcaugagu

SEQ ID NO: 2247898 - RNA, 19 nt, Artificial Sequence
  Description of Artificial Sequence: Synthetic oligonucleotide
ggaggaggacccagcaucc

SEQ ID NO: 2247899 - RNA, 19 nt, Artificial Sequence
  Description of Artificial Sequence: Synthetic oligonucleotide
gugugugguguguguggug

SEQ ID NO: 2247900 - RNA, 19 nt, Artificial Sequence
  Description of Artificial Sequence: Synthetic oligonucleotide
gagcguuaggugugggugu

SEQ ID NO: 2247901 - RNA, 19 nt, Artificial Sequence
  Description of Artificial Sequence: Synthetic oligonucleotide
ggugugguaugguguggug

SEQ ID NO: 2247902 - RNA, 19 nt, Artificial Sequence
  Description of Artificial Sequence: Synthetic oligonucleotide
gccugauuuucaguguccc

SEQ ID NO: 2247903 - RNA, 19 nt, Artificial Sequence
  Description of Artificial Sequence: Synthetic oligonucleotide
gaagagaauggaggugacu

SEQ ID NO: 2247904 - RNA, 19 nt, Artificial Sequence
  Description of Artificial Sequence: Synthetic oligonucleotide
gcuaggcguggccagcuug

SEQ ID NO: 2247905 - RNA, 19 nt, Artificial Sequence
  Description of Artificial Sequence: Synthetic oligonucleotide
guguguuaauguggggaca

SEQ ID NO: 2247906 - RNA, 19 nt, Artificial Sequence
  Description of Artificial Sequence: Synthetic oligonucleotide
uugcuaggcguggccagcu

SEQ ID NO: 2247907 - RNA, 19 nt, Artificial Sequence
  Description of Artificial Sequence: Synthetic oligonucleotide
gggugccucaccucgucug

SEQ ID NO: 2247908 - RNA, 19 nt, Artificial Sequence
  Description of Artificial Sequence: Synthetic oligonucleotide
gugugguguguguggugug

SEQ ID NO: 2247909 - RNA, 19 nt, Artificial Sequence
  Description of Artificial Sequence: Synthetic oligonucleotide
agguguggguguguguuaa

SEQ ID NO: 2247910 - RNA, 19 nt, Artificial Sequence
  Description of Artificial Sequence: Synthetic oligonucleotide
cgaugauauauaaaauaaa

SEQ ID NO: 2247911 - RNA, 19 nt, Artificial Sequence
  Description of Artificial Sequence: Synthetic oligonucleotide
gagaauggaggugacuguu

SEQ ID NO: 2247912 - RNA, 19 nt, Artificial Sequence
  Description of Artificial Sequence: Synthetic oligonucleotide
gaugagcauuuuggccgug

SEQ ID NO: 2247913 - RNA, 19 nt, Artificial Sequence
  Description of Artificial Sequence: Synthetic oligonucleotide
guguugcuaggcguggcca

SEQ ID NO: 2247914 - RNA, 19 nt, Artificial Sequence
  Description of Artificial Sequence: Synthetic oligonucleotide
ugccacgucuuugcgccgu

SEQ ID NO: 2247915 - RNA, 19 nt, Artificial Sequence
  Description of Artificial Sequence: Synthetic oligonucleotide
cccgacgagagugugugag

SEQ ID NO: 2247916 - RNA, 19 nt, Artificial Sequence
  Description of Artificial Sequence: Synthetic oligonucleotide
gcugaacuggaugggugcc

SEQ ID NO: 2247917 - RNA, 19 nt, Artificial Sequence
  Description of Artificial Sequence: Synthetic oligonucleotide
caggguacgaaugugcuuu

SEQ ID NO: 2247918 - RNA, 19 nt, Artificial Sequence
  Description of Artificial Sequence: Synthetic oligonucleotide
ucgcggcugccgcgguugg

SEQ ID NO: 2247919 - RNA, 19 nt, Artificial Sequence
  Description of Artificial Sequence: Synthetic oligonucleotide
ggauguggcuuggggaagc

SEQ ID NO: 2247920 - RNA, 19 nt, Artificial Sequence
  Description of Artificial Sequence: Synthetic oligonucleotide
ucgacuccugggccccaac

SEQ ID NO: 2247921 - RNA, 19 nt, Artificial Sequence
  Description of Artificial Sequence: Synthetic oligonucleotide
uaggcguggccagcuugcc

SEQ ID NO: 2247922 - RNA, 19 nt, Artificial Sequence
  Description of Artificial Sequence: Synthetic oligonucleotide
gggacaggguacgaaugug

SEQ ID NO: 2247923 - RNA, 19 nt, Artificial Sequence
  Description of Artificial Sequence: Synthetic oligonucleotide
ugaguccgaccugcuguac

SEQ ID NO: 2247924 - RNA, 19 nt, Artificial Sequence
  Description of Artificial Sequence: Synthetic oligonucleotide
caaccccagagauuaugua

SEQ ID NO: 2247925 - RNA, 19 nt, Artificial Sequence
  Description of Artificial Sequence: Synthetic oligonucleotide
gccguugugcaugagugga

SEQ ID NO: 2247926 - RNA, 19 nt, Artificial Sequence
  Description of Artificial Sequence: Synthetic oligonucleotide
uugcgccgugaucgcacac

SEQ ID NO: 2247927 - RNA, 19 nt, Artificial Sequence
  Description of Artificial Sequence: Synthetic oligonucleotide
guuaggugugggugugugu

SEQ ID NO: 2247928 - RNA, 19 nt, Artificial Sequence
  Description of Artificial Sequence: Synthetic oligonucleotide
cucgucugaugcuucgacu

SEQ ID NO: 2247929 - RNA, 19 nt, Artificial Sequence
  Description of Artificial Sequence: Synthetic oligonucleotide
gauuauguacaggcaucau

SEQ ID NO: 2247930 - RNA, 19 nt, Artificial Sequence
  Description of Artificial Sequence: Synthetic oligonucleotide
ggccugauuuucagugucc

SEQ ID NO: 2247931 - RNA, 19 nt, Artificial Sequence
  Description of Artificial Sequence: Synthetic oligonucleotide
gaggacccagcauccucaa

SEQ ID NO: 2247932 - RNA, 19 nt, Artificial Sequence
  Description of Artificial Sequence: Synthetic oligonucleotide
cugcacuacugccacgucu

SEQ ID NO: 2247933 - RNA, 19 nt, Artificial Sequence
  Description of Artificial Sequence: Synthetic oligonucleotide
ugcacgcauugugagcguu

SEQ ID NO: 2247934 - RNA, 19 nt, Artificial Sequence
  Description of Artificial Sequence: Synthetic oligonucleotide
guguguguguguggugcac

SEQ ID NO: 2247935 - RNA, 19 nt, Artificial Sequence
  Description of Artificial Sequence: Synthetic oligonucleotide
cugccacgucuuugcgccg

SEQ ID NO: 2247936 - RNA, 19 nt, Artificial Sequence
  Description of Artificial Sequence: Synthetic oligonucleotide
guguguguguguguguggu

SEQ ID NO: 2247937 - RNA, 19 nt, Artificial Sequence
  Description of Artificial Sequence: Synthetic oligonucleotide
aggguacgaaugugcuuuu

SEQ ID NO: 2247938 - RNA, 19 nt, Artificial Sequence
  Description of Artificial Sequence: Synthetic oligonucleotide
guaugguguggugugguau

SEQ ID NO: 2247939 - RNA, 19 nt, Artificial Sequence
  Description of Artificial Sequence: Synthetic oligonucleotide
agaccuugcugaacuggau

SEQ ID NO: 2247940 - RNA, 19 nt, Artificial Sequence
  Description of Artificial Sequence: Synthetic oligonucleotide
ccgacgagagugugugagc

SEQ ID NO: 2247941 - RNA, 19 nt, Artificial Sequence
  Description of Artificial Sequence: Synthetic oligonucleotide
cgugggaaucacaggggag

SEQ ID NO: 2247942 - RNA, 19 nt, Artificial Sequence
  Description of Artificial Sequence: Synthetic oligonucleotide
gaugcugaucagccuugau

SEQ ID NO: 2247943 - RNA, 19 nt, Artificial Sequence
  Description of Artificial Sequence: Synthetic oligonucleotide
gugagcguuaggugugggu

SEQ ID NO: 2247944 - RNA, 19 nt, Artificial Sequence
  Description of Artificial Sequence: Synthetic oligonucleotide
ggggagugugaaggaagag

SEQ ID NO: 2247945 - RNA, 19 nt, Artificial Sequence
  Description of Artificial Sequence: Synthetic oligonucleotide
ggugccucaccucgucuga

SEQ ID NO: 2247946 - RNA, 19 nt, Artificial Sequence
  Description of Artificial Sequence: Synthetic oligonucleotide
acuccccgacgagagugug

SEQ ID NO: 2247947 - RNA, 19 nt, Artificial Sequence
  Description of Artificial Sequence: Synthetic oligonucleotide
ggaagcccgaaggggcagg

SEQ ID NO: 2247948 - RNA, 19 nt, Artificial Sequence
  Description of Artificial Sequence: Synthetic oligonucleotide
gggcggugaggucuaggug

SEQ ID NO: 2247949 - RNA, 19 nt, Artificial Sequence
  Description of Artificial Sequence: Synthetic oligonucleotide
guauggugugugugugugu

SEQ ID NO: 2247950 - RNA, 19 nt, Artificial Sequence
  Description of Artificial Sequence: Synthetic oligonucleotide
ccguugugcaugaguggag

SEQ ID NO: 2247951 - RNA, 19 nt, Artificial Sequence
  Description of Artificial Sequence: Synthetic oligonucleotide
cgugaucgcacacacaaua

SEQ ID NO: 2247952 - RNA, 19 nt, Artificial Sequence
  Description of Artificial Sequence: Synthetic oligonucleotide
accucgucugaugcuucga

SEQ ID NO: 2247953 - RNA, 19 nt, Artificial Sequence
  Description of Artificial Sequence: Synthetic oligonucleotide
accaaaccacauggccuga

SEQ ID NO: 2247954 - RNA, 19 nt, Artificial Sequence
  Description of Artificial Sequence: Synthetic oligonucleotide
ggaggugacuguugcuaaa

SEQ ID NO: 2247955 - RNA, 19 nt, Artificial Sequence
  Description of Artificial Sequence: Synthetic oligonucleotide
cagggcggugaggucuagg

SEQ ID NO: 2247956 - RNA, 19 nt, Artificial Sequence
  Description of Artificial Sequence: Synthetic oligonucleotide
gugcaggcauugaugaggu

SEQ ID NO: 2247957 - RNA, 19 nt, Artificial Sequence
  Description of Artificial Sequence: Synthetic oligonucleotide
ugcuaggcguggccagcuu

SEQ ID NO: 2247958 - RNA, 19 nt, Artificial Sequence
  Description of Artificial Sequence: Synthetic oligonucleotide
gggaaucacaggggagccc

SEQ ID NO: 2247959 - RNA, 19 nt, Artificial Sequence
  Description of Artificial Sequence: Synthetic oligonucleotide
ggggacaggguacgaaugu

SEQ ID NO: 2247960 - RNA, 19 nt, Artificial Sequence
  Description of Artificial Sequence: Synthetic oligonucleotide
ggggcauguccuuggugca

SEQ ID NO: 2247961 - RNA, 19 nt, Artificial Sequence
  Description of Artificial Sequence: Synthetic oligonucleotide
gcuucgacuccugggcccc

SEQ ID NO: 2247962 - RNA, 19 nt, Artificial Sequence
  Description of Artificial Sequence: Synthetic oligonucleotide
ggugugugugguguggugu

SEQ ID NO: 2247963 - RNA, 19 nt, Artificial Sequence
  Description of Artificial Sequence: Synthetic oligonucleotide
gguauggugugguguggua

SEQ ID NO: 2247964 - RNA, 19 nt, Artificial Sequence
  Description of Artificial Sequence: Synthetic oligonucleotide
ggccguguugcuaggcgug

SEQ ID NO: 2247965 - RNA, 19 nt, Artificial Sequence
  Description of Artificial Sequence: Synthetic oligonucleotide
caguggagaccuugcugaa

SEQ ID NO: 2247966 - RNA, 19 nt, Artificial Sequence
  Description of Artificial Sequence: Synthetic oligonucleotide
gccguguugcuaggcgugg

SEQ ID NO: 2247967 - RNA, 19 nt, Artificial Sequence
  Description of Artificial Sequence: Synthetic oligonucleotide
gggccaucuuggucgggug

SEQ ID NO: 2247968 - RNA, 19 nt, Artificial Sequence
  Description of Artificial Sequence: Synthetic oligonucleotide
gcuuuuggcucauguuugu

SEQ ID NO: 2247969 - RNA, 19 nt, Artificial Sequence
  Description of Artificial Sequence: Synthetic oligonucleotide
ccacauggccugauuuuca

SEQ ID NO: 2247970 - RNA, 19 nt, Artificial Sequence
  Description of Artificial Sequence: Synthetic oligonucleotide
ggguacgaaugugcuuuug

SEQ ID NO: 2247971 - RNA, 19 nt, Artificial Sequence
  Description of Artificial Sequence: Synthetic oligonucleotide
ggugguguguggugugugu

SEQ ID NO: 2247972 - RNA, 19 nt, Artificial Sequence
  Description of Artificial Sequence: Synthetic oligonucleotide
cagguccgugggaaucaca

SEQ ID NO: 2247973 - RNA, 19 nt, Artificial Sequence
  Description of Artificial Sequence: Synthetic oligonucleotide
gccaucuuggucgggugga

SEQ ID NO: 2247974 - RNA, 19 nt, Artificial Sequence
  Description of Artificial Sequence: Synthetic oligonucleotide
ggugugguauggugugugu

SEQ ID NO: 2247975 - RNA, 19 nt, Artificial Sequence
  Description of Artificial Sequence: Synthetic oligonucleotide
gccgcgguugggcuuccgc

SEQ ID NO: 2247976 - RNA, 19 nt, Artificial Sequence
  Description of Artificial Sequence: Synthetic oligonucleotide
cgcauugugagcguuaggu

SEQ ID NO: 2247977 - RNA, 19 nt, Artificial Sequence
  Description of Artificial Sequence: Synthetic oligonucleotide
cccacucgcggcugccgcg

SEQ ID NO: 2247978 - RNA, 19 nt, Artificial Sequence
  Description of Artificial Sequence: Synthetic oligonucleotide
aggcaucauugggccugcg

SEQ ID NO: 2247979 - RNA, 19 nt, Artificial Sequence
  Description of Artificial Sequence: Synthetic oligonucleotide
gcgguugggcuuccgcuuc

SEQ ID NO: 2247980 - RNA, 19 nt, Artificial Sequence
  Description of Artificial Sequence: Synthetic oligonucleotide
gcggcugccgcgguugggc

SEQ ID NO: 2247981 - RNA, 19 nt, Artificial Sequence
  Description of Artificial Sequence: Synthetic oligonucleotide
gagagugugugagcucuuu

SEQ ID NO: 2247982 - RNA, 19 nt, Artificial Sequence
  Description of Artificial Sequence: Synthetic oligonucleotide
ggcaucauugggccugcgu

SEQ ID NO: 2247983 - RNA, 19 nt, Artificial Sequence
  Description of Artificial Sequence: Synthetic oligonucleotide
gggugguguguggugugug

SEQ ID NO: 2247984 - RNA, 19 nt, Artificial Sequence
  Description of Artificial Sequence: Synthetic oligonucleotide
gugugguguggugugguau

SEQ ID NO: 2247985 - RNA, 19 nt, Artificial Sequence
  Description of Artificial Sequence: Synthetic oligonucleotide
uugaggcaguggagaccuu

SEQ ID NO: 2247986 - RNA, 19 nt, Artificial Sequence
  Description of Artificial Sequence: Synthetic oligonucleotide
gaaugugcuuuuggcucau

SEQ ID NO: 2247987 - RNA, 19 nt, Artificial Sequence
  Description of Artificial Sequence: Synthetic oligonucleotide
ggugugugugugugugugu

SEQ ID NO: 2247988 - RNA, 19 nt, Artificial Sequence
  Description of Artificial Sequence: Synthetic oligonucleotide
aggauggccucaggucuuu

SEQ ID NO: 2247989 - RNA, 19 nt, Artificial Sequence
  Description of Artificial Sequence: Synthetic oligonucleotide
gaagcccgaaggggcaggu

SEQ ID NO: 2247990 - RNA, 19 nt, Artificial Sequence
  Description of Artificial Sequence: Synthetic oligonucleotide
ggugugugguguguguggu

SEQ ID NO: 2247991 - RNA, 19 nt, Artificial Sequence
  Description of Artificial Sequence: Synthetic oligonucleotide
caaagaggccacugaucuu

SEQ ID NO: 2247992 - RNA, 19 nt, Artificial Sequence
  Description of Artificial Sequence: Synthetic oligonucleotide
cgacuccugggccccaacc

SEQ ID NO: 2247993 - RNA, 19 nt, Artificial Sequence
  Description of Artificial Sequence: Synthetic oligonucleotide
guguguggugugguguggu

SEQ ID NO: 2247994 - RNA, 19 nt, Artificial Sequence
  Description of Artificial Sequence: Synthetic oligonucleotide
gacuccccgacgagagugu

SEQ ID NO: 2247995 - RNA, 19 nt, Artificial Sequence
  Description of Artificial Sequence: Synthetic oligonucleotide
cacgucuuugcgccgugau

SEQ ID NO: 2247996 - RNA, 19 nt, Artificial Sequence
  Description of Artificial Sequence: Synthetic oligonucleotide
guggugugugugguguggu

SEQ ID NO: 2247997 - RNA, 19 nt, Artificial Sequence
  Description of Artificial Sequence: Synthetic oligonucleotide
cacugaucuuagugacacu

SEQ ID NO: 2247998 - RNA, 19 nt, Artificial Sequence
  Description of Artificial Sequence: Synthetic oligonucleotide
gcauuuuggccguguugcu

SEQ ID NO: 2247999 - RNA, 19 nt, Artificial Sequence
  Description of Artificial Sequence: Synthetic oligonucleotide
gaggaggacccagcauccu

SEQ ID NO: 2248000 - RNA, 19 nt, Artificial Sequence
  Description of Artificial Sequence: Synthetic oligonucleotide
gcugccgcgguugggcuuc

SEQ ID NO: 2248001 - RNA, 19 nt, Artificial Sequence
  Description of Artificial Sequence: Synthetic oligonucleotide
ugccgcgguugggcuuccg

SEQ ID NO: 2248002 - RNA, 19 nt, Artificial Sequence
  Description of Artificial Sequence: Synthetic oligonucleotide
gcugcacuacugccacguc

SEQ ID NO: 2248003 - RNA, 19 nt, Artificial Sequence
  Description of Artificial Sequence: Synthetic oligonucleotide
ccgcuucugcugcaguguc

SEQ ID NO: 2248004 - RNA, 19 nt, Artificial Sequence
  Description of Artificial Sequence: Synthetic oligonucleotide
gcgcugcacuacugccacg

SEQ ID NO: 2248005 - RNA, 19 nt, Artificial Sequence
  Description of Artificial Sequence: Synthetic oligonucleotide
ccacucgcggcugccgcgg

SEQ ID NO: 2248006 - RNA, 19 nt, Artificial Sequence
  Description of Artificial Sequence: Synthetic oligonucleotide
ggguguccccaaagaggcc

SEQ ID NO: 2248007 - RNA, 19 nt, Artificial Sequence
  Description of Artificial Sequence: Synthetic oligonucleotide
gccacgucuuugcgccgug

SEQ ID NO: 2248008 - RNA, 19 nt, Artificial Sequence
  Description of Artificial Sequence: Synthetic oligonucleotide
cuccccgacgagagugugu

SEQ ID NO: 2248009 - RNA, 19 nt, Artificial Sequence
  Description of Artificial Sequence: Synthetic oligonucleotide
ggauggccucaggucuuug

SEQ ID NO: 2248010 - RNA, 19 nt, Artificial Sequence
  Description of Artificial Sequence: Synthetic oligonucleotide
ccugugucccagggaggag

SEQ ID NO: 2248011 - RNA, 19 nt, Artificial Sequence
  Description of Artificial Sequence: Synthetic oligonucleotide
gcagguccgugggaaucac

SEQ ID NO: 2248012 - RNA, 19 nt, Artificial Sequence
  Description of Artificial Sequence: Synthetic oligonucleotide
ccguguugcuaggcguggc

SEQ ID NO: 2248013 - RNA, 19 nt, Artificial Sequence
  Description of Artificial Sequence: Synthetic oligonucleotide
gugcacgcauugugagcgu

SEQ ID NO: 2248014 - RNA, 19 nt, Artificial Sequence
  Description of Artificial Sequence: Synthetic oligonucleotide
gcacgcauugugagcguua

SEQ ID NO: 2248015 - RNA, 19 nt, Artificial Sequence
  Description of Artificial Sequence: Synthetic oligonucleotide
gcgugaugggcaggaccac

SEQ ID NO: 2248016 - RNA, 19 nt, Artificial Sequence
  Description of Artificial Sequence: Synthetic oligonucleotide
cagugucggaguggauucu

SEQ ID NO: 2248017 - RNA, 19 nt, Artificial Sequence
  Description of Artificial Sequence: Synthetic oligonucleotide
cuucgacuccugggcccca

SEQ ID NO: 2248018 - RNA, 19 nt, Artificial Sequence
  Description of Artificial Sequence: Synthetic oligonucleotide
ccugcgugaugggcaggac

SEQ ID NO: 2248019 - RNA, 19 nt, Artificial Sequence
  Description of Artificial Sequence: Synthetic oligonucleotide
gguguggguguguguuaau

SEQ ID NO: 2248020 - RNA, 19 nt, Artificial Sequence
  Description of Artificial Sequence: Synthetic oligonucleotide
cuuggucggguggauccuu

SEQ ID NO: 2248021 - RNA, 19 nt, Artificial Sequence
  Description of Artificial Sequence: Synthetic oligonucleotide
cgacgagagugugugagcu

SEQ ID NO: 2248022 - RNA, 19 nt, Artificial Sequence
  Description of Artificial Sequence: Synthetic oligonucleotide
cguugugcaugaguggagu

SEQ ID NO: 2248023 - RNA, 19 nt, Artificial Sequence
  Description of Artificial Sequence: Synthetic oligonucleotide
cugccgcgguugggcuucc

SEQ ID NO: 2248024 - RNA, 19 nt, Artificial Sequence
  Description of Artificial Sequence: Synthetic oligonucleotide
guccgaccugcuguacgau

SEQ ID NO: 2248025 - RNA, 19 nt, Artificial Sequence
  Description of Artificial Sequence: Synthetic oligonucleotide
ccgcgguugggcuuccgcu

SEQ ID NO: 2248026 - RNA, 19 nt, Artificial Sequence
  Description of Artificial Sequence: Synthetic oligonucleotide
ccucaccucgucugaugcu

SEQ ID NO: 2248027 - RNA, 19 nt, Artificial Sequence
  Description of Artificial Sequence: Synthetic oligonucleotide
ccucucccacucgcggcug

SEQ ID NO: 2248028 - RNA, 19 nt, Artificial Sequence
  Description of Artificial Sequence: Synthetic oligonucleotide
gcagggcggugaggucuag

SEQ ID NO: 2248029 - RNA, 19 nt, Artificial Sequence
  Description of Artificial Sequence: Synthetic oligonucleotide
cggguggauccuugaggca

SEQ ID NO: 2248030 - RNA, 19 nt, Artificial Sequence
  Description of Artificial Sequence: Synthetic oligonucleotide
cugcagugucggaguggau

SEQ ID NO: 2248031 - RNA, 19 nt, Artificial Sequence
  Description of Artificial Sequence: Synthetic oligonucleotide
ccacgcuggggauguggcu

SEQ ID NO: 2248032 - RNA, 19 nt, Artificial Sequence
  Description of Artificial Sequence: Synthetic oligonucleotide
ccacgucuuugcgccguga

SEQ ID NO: 2248033 - RNA, 19 nt, Artificial Sequence
  Description of Artificial Sequence: Synthetic oligonucleotide
ccgugaucgcacacacaau

SEQ ID NO: 2248034 - RNA, 19 nt, Artificial Sequence
  Description of Artificial Sequence: Synthetic oligonucleotide
ccccgacgagaguguguga

SEQ ID NO: 2248035 - RNA, 19 nt, Artificial Sequence
  Description of Artificial Sequence: Synthetic oligonucleotide
cgccgugaucgcacacaca

SEQ ID NO: 2248036 - RNA, 19 nt, Artificial Sequence
  Description of Artificial Sequence: Synthetic oligonucleotide
ggccccaaccccagagauu

SEQ ID NO: 2248037 - RNA, 19 nt, Artificial Sequence
  Description of Artificial Sequence: Synthetic oligonucleotide
gcguuaggugugggugugu

SEQ ID NO: 2248038 - RNA, 19 nt, Artificial Sequence
  Description of Artificial Sequence: Synthetic oligonucleotide
cacucgcggcugccgcggu

SEQ ID NO: 2248039 - RNA, 19 nt, Artificial Sequence
  Description of Artificial Sequence: Synthetic oligonucleotide
cggugaggucuaggugaug

SEQ ID NO: 2248040 - RNA, 19 nt, Artificial Sequence
  Description of Artificial Sequence: Synthetic oligonucleotide
cgcgguugggcuuccgcuu

SEQ ID NO: 2248041 - RNA, 19 nt, Artificial Sequence
  Description of Artificial Sequence: Synthetic oligonucleotide
ccaucuuggucggguggau

SEQ ID NO: 2248042 - RNA, 19 nt, Artificial Sequence
  Description of Artificial Sequence: Synthetic oligonucleotide
cggcugccgcgguugggcu

SEQ ID NO: 2248043 - RNA, 19 nt, Artificial Sequence
  Description of Artificial Sequence: Synthetic oligonucleotide
aaaagauaucaguauaugc

SEQ ID NO: 2248044 - RNA, 19 nt, Artificial Sequence
  Description of Artificial Sequence: Synthetic oligonucleotide
aaaacaaugcagcacagcg

SEQ ID NO: 2248045 - RNA, 19 nt, Artificial Sequence
  Description of Artificial Sequence: Synthetic oligonucleotide
uaugaaaugacacaugacc

SEQ ID NO: 2248046 - RNA, 19 nt, Artificial Sequence
  Description of Artificial Sequence: Synthetic oligonucleotide
uuauauaaacuucauaagc

SEQ ID NO: 2248047 - RNA, 19 nt, Artificial Sequence
  Description of Artificial Sequence: Synthetic oligonucleotide
aauccuuccuuucacauac

SEQ ID NO: 2248048 - RNA, 19 nt, Artificial Sequence
  Description of Artificial Sequence: Synthetic oligonucleotide
auauuagaaacacauagag

SEQ ID NO: 2248049 - RNA, 19 nt, Artificial Sequence
  Description of Artificial Sequence: Synthetic oligonucleotide
uguggguaaagacagauag

SEQ ID NO: 2248050 - RNA, 19 nt, Artificial Sequence
  Description of Artificial Sequence: Synthetic oligonucleotide
caauauuagaaacacauag

SEQ ID NO: 2248051 - RNA, 19 nt, Artificial Sequence
  Description of Artificial Sequence: Synthetic oligonucleotide
aguacuguggcauauguuc

SEQ ID NO: 2248052 - RNA, 19 nt, Artificial Sequence
  Description of Artificial Sequence: Synthetic oligonucleotide
uguaagauauuuuauuuca

SEQ ID NO: 2248053 - RNA, 19 nt, Artificial Sequence
  Description of Artificial Sequence: Synthetic oligonucleotide
agucacuaaauauagauca

SEQ ID NO: 2248054 - RNA, 19 nt, Artificial Sequence
  Description of Artificial Sequence: Synthetic oligonucleotide
aaauauagaucaucaucac

SEQ ID NO: 2248055 - RNA, 19 nt, Artificial Sequence
  Description of Artificial Sequence: Synthetic oligonucleotide
aaaucucuuggguuggggc

SEQ ID NO: 2248056 - RNA, 19 nt, Artificial Sequence
  Description of Artificial Sequence: Synthetic oligonucleotide
acauacacuaaauaaagug

SEQ ID NO: 2248057 - RNA, 19 nt, Artificial Sequence
  Description of Artificial Sequence: Synthetic oligonucleotide
auaaacauguugcagucac

SEQ ID NO: 2248058 - RNA, 19 nt, Artificial Sequence
  Description of Artificial Sequence: Synthetic oligonucleotide
gauaauaucacuagaaauc

SEQ ID NO: 2248059 - RNA, 19 nt, Artificial Sequence
  Description of Artificial Sequence: Synthetic oligonucleotide
aagcacaagaacauuauac

SEQ ID NO: 2248060 - RNA, 19 nt, Artificial Sequence
  Description of Artificial Sequence: Synthetic oligonucleotide
aacaaagccgccugugugc

SEQ ID NO: 2248061 - RNA, 19 nt, Artificial Sequence
  Description of Artificial Sequence: Synthetic oligonucleotide
aaaacgucgaguaaggcag

SEQ ID NO: 2248062 - RNA, 19 nt, Artificial Sequence
  Description of Artificial Sequence: Synthetic oligonucleotide
aucacagugaaccaaaaug

SEQ ID NO: 2248063 - RNA, 19 nt, Artificial Sequence
  Description of Artificial Sequence: Synthetic oligonucleotide
ucacagugaaccaaaaugc

SEQ ID NO: 2248064 - RNA, 19 nt, Artificial Sequence
  Description of Artificial Sequence: Synthetic oligonucleotide
agcaugaauaaauuugugg

SEQ ID NO: 2248065 - RNA, 19 nt, Artificial Sequence
  Description of Artificial Sequence: Synthetic oligonucleotide
auaaauuaauuauacagau

SEQ ID NO: 2248066 - RNA, 19 nt, Artificial Sequence
  Description of Artificial Sequence: Synthetic oligonucleotide
uuguauaacuucaucauga

SEQ ID NO: 2248067 - RNA, 19 nt, Artificial Sequence
  Description of Artificial Sequence: Synthetic oligonucleotide
uaugguaucccaauauucc

SEQ ID NO: 2248068 - RNA, 19 nt, Artificial Sequence
  Description of Artificial Sequence: Synthetic oligonucleotide
cauauguucacuuccauug

SEQ ID NO: 2248069 - RNA, 19 nt, Artificial Sequence
  Description of Artificial Sequence: Synthetic oligonucleotide
auauagaucaucaucacag

SEQ ID NO: 2248070 - RNA, 19 nt, Artificial Sequence
  Description of Artificial Sequence: Synthetic oligonucleotide
acuaaauaaagugacuugg

SEQ ID NO: 2248071 - RNA, 19 nt, Artificial Sequence
  Description of Artificial Sequence: Synthetic oligonucleotide
acuaaaagugaacucacag

SEQ ID NO: 2248072 - RNA, 19 nt, Artificial Sequence
  Description of Artificial Sequence: Synthetic oligonucleotide
cacaugaccacuaaaagug

SEQ ID NO: 2248073 - RNA, 19 nt, Artificial Sequence
  Description of Artificial Sequence: Synthetic oligonucleotide
aaccaaaaugcauaguugu

SEQ ID NO: 2248074 - RNA, 19 nt, Artificial Sequence
  Description of Artificial Sequence: Synthetic oligonucleotide
ucauuugucaugauaauau

SEQ ID NO: 2248075 - RNA, 19 nt, Artificial Sequence
  Description of Artificial Sequence: Synthetic oligonucleotide
gaugaacugggcuauuugg

SEQ ID NO: 2248076 - RNA, 19 nt, Artificial Sequence
  Description of Artificial Sequence: Synthetic oligonucleotide
aaaugcauaguuguuauga

SEQ ID NO: 2248077 - RNA, 19 nt, Artificial Sequence
  Description of Artificial Sequence: Synthetic oligonucleotide
uuggcaaacaguucugugg

SEQ ID NO: 2248078 - RNA, 19 nt, Artificial Sequence
  Description of Artificial Sequence: Synthetic oligonucleotide
gcaugaauaaauuuguggg

SEQ ID NO: 2248079 - RNA, 19 nt, Artificial Sequence
  Description of Artificial Sequence: Synthetic oligonucleotide
aacuucacucucaacaagc

SEQ ID NO: 2248080 - RNA, 19 nt, Artificial Sequence
  Description of Artificial Sequence: Synthetic oligonucleotide
auaaacuucauaagcagac

SEQ ID NO: 2248081 - RNA, 19 nt, Artificial Sequence
  Description of Artificial Sequence: Synthetic oligonucleotide
ugaaucagugguauaaaca

SEQ ID NO: 2248082 - RNA, 19 nt, Artificial Sequence
  Description of Artificial Sequence: Synthetic oligonucleotide
aaagugaacucacagccca

SEQ ID NO: 2248083 - RNA, 19 nt, Artificial Sequence
  Description of Artificial Sequence: Synthetic oligonucleotide
ugcaucauuaaaauccuug

SEQ ID NO: 2248084 - RNA, 19 nt, Artificial Sequence
  Description of Artificial Sequence: Synthetic oligonucleotide
agcucgaucaaacuguuuc

SEQ ID NO: 2248085 - RNA, 19 nt, Artificial Sequence
  Description of Artificial Sequence: Synthetic oligonucleotide
aauauagaucaucaucaca

SEQ ID NO: 2248086 - RNA, 19 nt, Artificial Sequence
  Description of Artificial Sequence: Synthetic oligonucleotide
acaagaacauuauacaagu

SEQ ID NO: 2248087 - RNA, 19 nt, Artificial Sequence
  Description of Artificial Sequence: Synthetic oligonucleotide
uucauaagcagacuuaaau

SEQ ID NO: 2248088 - RNA, 19 nt, Artificial Sequence
  Description of Artificial Sequence: Synthetic oligonucleotide
auguaagauauuuuauuuc

SEQ ID NO: 2248089 - RNA, 19 nt, Artificial Sequence
  Description of Artificial Sequence: Synthetic oligonucleotide
cuugguuacuuauauaaac

SEQ ID NO: 2248090 - RNA, 19 nt, Artificial Sequence
  Description of Artificial Sequence: Synthetic oligonucleotide
uucaaaacgucgaguaagg

SEQ ID NO: 2248091 - RNA, 19 nt, Artificial Sequence
  Description of Artificial Sequence: Synthetic oligonucleotide
ugauaauaucacuagaaau

SEQ ID NO: 2248092 - RNA, 19 nt, Artificial Sequence
  Description of Artificial Sequence: Synthetic oligonucleotide
uuuguauaacuucaucaug

SEQ ID NO: 2248093 - RNA, 19 nt, Artificial Sequence
  Description of Artificial Sequence: Synthetic oligonucleotide
aguuguuaugaaaugacac

SEQ ID NO: 2248094 - RNA, 19 nt, Artificial Sequence
  Description of Artificial Sequence: Synthetic oligonucleotide
cuaaaagugaacucacagc

SEQ ID NO: 2248095 - RNA, 19 nt, Artificial Sequence
  Description of Artificial Sequence: Synthetic oligonucleotide
acuuaaaucauuugucaug

SEQ ID NO: 2248096 - RNA, 19 nt, Artificial Sequence
  Description of Artificial Sequence: Synthetic oligonucleotide
aaaauccuugccaaacccc

SEQ ID NO: 2248097 - RNA, 19 nt, Artificial Sequence
  Description of Artificial Sequence: Synthetic oligonucleotide
uuugguuuagaagacagcu

SEQ ID NO: 2248098 - RNA, 19 nt, Artificial Sequence
  Description of Artificial Sequence: Synthetic oligonucleotide
uaaaauccuugccaaaccc

SEQ ID NO: 2248099 - RNA, 19 nt, Artificial Sequence
  Description of Artificial Sequence: Synthetic oligonucleotide
gacagauagcuacagagug

SEQ ID NO: 2248100 - RNA, 19 nt, Artificial Sequence
  Description of Artificial Sequence: Synthetic oligonucleotide
aagacagcuguagucaucg

SEQ ID NO: 2248101 - RNA, 19 nt, Artificial Sequence
  Description of Artificial Sequence: Synthetic oligonucleotide
cacaagaacauuauacaag

SEQ ID NO: 2248102 - RNA, 19 nt, Artificial Sequence
  Description of Artificial Sequence: Synthetic oligonucleotide
aaauuuguggguaaagaca

SEQ ID NO: 2248103 - RNA, 19 nt, Artificial Sequence
  Description of Artificial Sequence: Synthetic oligonucleotide
ugugcugugaacuuccgca

SEQ ID NO: 2248104 - RNA, 19 nt, Artificial Sequence
  Description of Artificial Sequence: Synthetic oligonucleotide
aauauuagaaacacauaga

SEQ ID NO: 2248105 - RNA, 19 nt, Artificial Sequence
  Description of Artificial Sequence: Synthetic oligonucleotide
uauuagaaacacauagagu

SEQ ID NO: 2248106 - RNA, 19 nt, Artificial Sequence
  Description of Artificial Sequence: Synthetic oligonucleotide
cauaagcagacuuaaauca

SEQ ID NO: 2248107 - RNA, 19 nt, Artificial Sequence
  Description of Artificial Sequence: Synthetic oligonucleotide
auuuguauaacuucaucau

SEQ ID NO: 2248108 - RNA, 19 nt, Artificial Sequence
  Description of Artificial Sequence: Synthetic oligonucleotide
ucauaagcagacuuaaauc

SEQ ID NO: 2248109 - RNA, 19 nt, Artificial Sequence
  Description of Artificial Sequence: Synthetic oligonucleotide
uuagaaacacauagaguug

SEQ ID NO: 2248110 - RNA, 19 nt, Artificial Sequence
  Description of Artificial Sequence: Synthetic oligonucleotide
ugcagcacagcgaagauaa

SEQ ID NO: 2248111 - RNA, 19 nt, Artificial Sequence
  Description of Artificial Sequence: Synthetic oligonucleotide
gguaaagacagauagcuac

SEQ ID NO: 2248112 - RNA, 19 nt, Artificial Sequence
  Description of Artificial Sequence: Synthetic oligonucleotide
gacuugguuacuuauauaa

SEQ ID NO: 2248113 - RNA, 19 nt, Artificial Sequence
  Description of Artificial Sequence: Synthetic oligonucleotide
guuaugaaaugacacauga

SEQ ID NO: 2248114 - RNA, 19 nt, Artificial Sequence
  Description of Artificial Sequence: Synthetic oligonucleotide
auauguucacuuccauugc

SEQ ID NO: 2248115 - RNA, 19 nt, Artificial Sequence
  Description of Artificial Sequence: Synthetic oligonucleotide
auaguuguuaugaaaugac

SEQ ID NO: 2248116 - RNA, 19 nt, Artificial Sequence
  Description of Artificial Sequence: Synthetic oligonucleotide
ugucaugauaauaucacua

SEQ ID NO: 2248117 - RNA, 19 nt, Artificial Sequence
  Description of Artificial Sequence: Synthetic oligonucleotide
gucaugauaauaucacuag

SEQ ID NO: 2248118 - RNA, 19 nt, Artificial Sequence
  Description of Artificial Sequence: Synthetic oligonucleotide
ugacacaugaccacuaaaa

SEQ ID NO: 2248119 - RNA, 19 nt, Artificial Sequence
  Description of Artificial Sequence: Synthetic oligonucleotide
uuuucuaggguaccugacc

SEQ ID NO: 2248120 - RNA, 19 nt, Artificial Sequence
  Description of Artificial Sequence: Synthetic oligonucleotide
acucucaacaagcaaaacu

SEQ ID NO: 2248121 - RNA, 19 nt, Artificial Sequence
  Description of Artificial Sequence: Synthetic oligonucleotide
aaccaauccuuccuuucac

SEQ ID NO: 2248122 - RNA, 19 nt, Artificial Sequence
  Description of Artificial Sequence: Synthetic oligonucleotide
uggguaaagacagauagcu

SEQ ID NO: 2248123 - RNA, 19 nt, Artificial Sequence
  Description of Artificial Sequence: Synthetic oligonucleotide
auggaauuugaaucagugg

SEQ ID NO: 2248124 - RNA, 19 nt, Artificial Sequence
  Description of Artificial Sequence: Synthetic oligonucleotide
auaauaucacuagaaaucu

SEQ ID NO: 2248125 - RNA, 19 nt, Artificial Sequence
  Description of Artificial Sequence: Synthetic oligonucleotide
cauacacuaaauaaaguga

SEQ ID NO: 2248126 - RNA, 19 nt, Artificial Sequence
  Description of Artificial Sequence: Synthetic oligonucleotide
agcacaagaacauuauaca

SEQ ID NO: 2248127 - RNA, 19 nt, Artificial Sequence
  Description of Artificial Sequence: Synthetic oligonucleotide
guagucaucgggaagcucg

SEQ ID NO: 2248128 - RNA, 19 nt, Artificial Sequence
  Description of Artificial Sequence: Synthetic oligonucleotide
agacuuaaaucauuuguca

SEQ ID NO: 2248129 - RNA, 19 nt, Artificial Sequence
  Description of Artificial Sequence: Synthetic oligonucleotide
uuagaagacagcuguaguc

SEQ ID NO: 2248130 - RNA, 19 nt, Artificial Sequence
  Description of Artificial Sequence: Synthetic oligonucleotide
uuucuaggguaccugacca

SEQ ID NO: 2248131 - RNA, 19 nt, Artificial Sequence
  Description of Artificial Sequence: Synthetic oligonucleotide
acagguaccagccaggaau

SEQ ID NO: 2248132 - RNA, 19 nt, Artificial Sequence
  Description of Artificial Sequence: Synthetic oligonucleotide
uuuagaagacagcuguagu

SEQ ID NO: 2248133 - RNA, 19 nt, Artificial Sequence
  Description of Artificial Sequence: Synthetic oligonucleotide
ucaugauaauaucacuaga

SEQ ID NO: 2248134 - RNA, 19 nt, Artificial Sequence
  Description of Artificial Sequence: Synthetic oligonucleotide
uguuaugaaaugacacaug

SEQ ID NO: 2248135 - RNA, 19 nt, Artificial Sequence
  Description of Artificial Sequence: Synthetic oligonucleotide
ucaucgggaagcucgauca

SEQ ID NO: 2248136 - RNA, 19 nt, Artificial Sequence
  Description of Artificial Sequence: Synthetic oligonucleotide
ggcuauuugguuuagaaga

SEQ ID NO: 2248137 - RNA, 19 nt, Artificial Sequence
  Description of Artificial Sequence: Synthetic oligonucleotide
caacaagcaaaacucagug

SEQ ID NO: 2248138 - RNA, 19 nt, Artificial Sequence
  Description of Artificial Sequence: Synthetic oligonucleotide
acacaugaccacuaaaagu

SEQ ID NO: 2248139 - RNA, 19 nt, Artificial Sequence
  Description of Artificial Sequence: Synthetic oligonucleotide
cuucaaaacgucgaguaag

SEQ ID NO: 2248140 - RNA, 19 nt, Artificial Sequence
  Description of Artificial Sequence: Synthetic oligonucleotide
uaucacuagaaaucucuug

SEQ ID NO: 2248141 - RNA, 19 nt, Artificial Sequence
  Description of Artificial Sequence: Synthetic oligonucleotide
guuguuaugaaaugacaca

SEQ ID NO: 2248142 - RNA, 19 nt, Artificial Sequence
  Description of Artificial Sequence: Synthetic oligonucleotide
ucaccaauauuagaaacac

SEQ ID NO: 2248143 - RNA, 19 nt, Artificial Sequence
  Description of Artificial Sequence: Synthetic oligonucleotide
aaugcauaguuguuaugaa

SEQ ID NO: 2248144 - RNA, 19 nt, Artificial Sequence
  Description of Artificial Sequence: Synthetic oligonucleotide
acauguaagauauuuuauu

SEQ ID NO: 2248145 - RNA, 19 nt, Artificial Sequence
  Description of Artificial Sequence: Synthetic oligonucleotide
cauccuacugaaccaaucc

SEQ ID NO: 2248146 - RNA, 19 nt, Artificial Sequence
  Description of Artificial Sequence: Synthetic oligonucleotide
accacuaaaagugaacuca

SEQ ID NO: 2248147 - RNA, 19 nt, Artificial Sequence
  Description of Artificial Sequence: Synthetic oligonucleotide
uguugcagucacuaaauau

SEQ ID NO: 2248148 - RNA, 19 nt, Artificial Sequence
  Description of Artificial Sequence: Synthetic oligonucleotide
uacacuaaauaaagugacu

SEQ ID NO: 2248149 - RNA, 19 nt, Artificial Sequence
  Description of Artificial Sequence: Synthetic oligonucleotide
cacuaaauauagaucauca

SEQ ID NO: 2248150 - RNA, 19 nt, Artificial Sequence
  Description of Artificial Sequence: Synthetic oligonucleotide
agcacagcgaagauaaggg

SEQ ID NO: 2248151 - RNA, 19 nt, Artificial Sequence
  Description of Artificial Sequence: Synthetic oligonucleotide
uggggugaccccaaguaag

SEQ ID NO: 2248152 - RNA, 19 nt, Artificial Sequence
  Description of Artificial Sequence: Synthetic oligonucleotide
acuguacucuccuucagca

SEQ ID NO: 2248153 - RNA, 19 nt, Artificial Sequence
  Description of Artificial Sequence: Synthetic oligonucleotide
aaucauuugucaugauaau

SEQ ID NO: 2248154 - RNA, 19 nt, Artificial Sequence
  Description of Artificial Sequence: Synthetic oligonucleotide
auuauacacauguaagaua

SEQ ID NO: 2248155 - RNA, 19 nt, Artificial Sequence
  Description of Artificial Sequence: Synthetic oligonucleotide
ugcaucauuuguauaacuu

SEQ ID NO: 2248156 - RNA, 19 nt, Artificial Sequence
  Description of Artificial Sequence: Synthetic oligonucleotide
acauuauacaaguuuuaau

SEQ ID NO: 2248157 - RNA, 19 nt, Artificial Sequence
  Description of Artificial Sequence: Synthetic oligonucleotide
caucauuuguauaacuuca

SEQ ID NO: 2248158 - RNA, 19 nt, Artificial Sequence
  Description of Artificial Sequence: Synthetic oligonucleotide
cacuaaauaaagugacuug

SEQ ID NO: 2248159 - RNA, 19 nt, Artificial Sequence
  Description of Artificial Sequence: Synthetic oligonucleotide
ugguauaaacauguugcag

SEQ ID NO: 2248160 - RNA, 19 nt, Artificial Sequence
  Description of Artificial Sequence: Synthetic oligonucleotide
gaaucagugguauaaacau

SEQ ID NO: 2248161 - RNA, 19 nt, Artificial Sequence
  Description of Artificial Sequence: Synthetic oligonucleotide
ucaucaugaauggaauuug

SEQ ID NO: 2248162 - RNA, 19 nt, Artificial Sequence
  Description of Artificial Sequence: Synthetic oligonucleotide
gaaacuucacucucaacaa

SEQ ID NO: 2248163 - RNA, 19 nt, Artificial Sequence
  Description of Artificial Sequence: Synthetic oligonucleotide
ugguaucccaauauuccug

SEQ ID NO: 2248164 - RNA, 19 nt, Artificial Sequence
  Description of Artificial Sequence: Synthetic oligonucleotide
ugaccacuaaaagugaacu

SEQ ID NO: 2248165 - RNA, 19 nt, Artificial Sequence
  Description of Artificial Sequence: Synthetic oligonucleotide
uacugaaccaauccuuccu

SEQ ID NO: 2248166 - RNA, 19 nt, Artificial Sequence
  Description of Artificial Sequence: Synthetic oligonucleotide
cuuaaaucauuugucauga

SEQ ID NO: 2248167 - RNA, 19 nt, Artificial Sequence
  Description of Artificial Sequence: Synthetic oligonucleotide
aucagugguauaaacaugu

SEQ ID NO: 2248168 - RNA, 19 nt, Artificial Sequence
  Description of Artificial Sequence: Synthetic oligonucleotide
caccucugcaguaagggcc

SEQ ID NO: 2248169 - RNA, 19 nt, Artificial Sequence
  Description of Artificial Sequence: Synthetic oligonucleotide
aguuuuaauuuacaucuuu

SEQ ID NO: 2248170 - RNA, 19 nt, Artificial Sequence
  Description of Artificial Sequence: Synthetic oligonucleotide
ugcuucaaaacgucgagua

SEQ ID NO: 2248171 - RNA, 19 nt, Artificial Sequence
  Description of Artificial Sequence: Synthetic oligonucleotide
acuaaauauagaucaucau

SEQ ID NO: 2248172 - RNA, 19 nt, Artificial Sequence
  Description of Artificial Sequence: Synthetic oligonucleotide
gcuacagccaacaaagccg

SEQ ID NO: 2248173 - RNA, 19 nt, Artificial Sequence
  Description of Artificial Sequence: Synthetic oligonucleotide
auuugucaugauaauauca

SEQ ID NO: 2248174 - RNA, 19 nt, Artificial Sequence
  Description of Artificial Sequence: Synthetic oligonucleotide
agaucaucaucacagugaa

SEQ ID NO: 2248175 - RNA, 19 nt, Artificial Sequence
  Description of Artificial Sequence: Synthetic oligonucleotide
uauagaucaucaucacagu

SEQ ID NO: 2248176 - RNA, 19 nt, Artificial Sequence
  Description of Artificial Sequence: Synthetic oligonucleotide
uguauaacuucaucaugaa

SEQ ID NO: 2248177 - RNA, 19 nt, Artificial Sequence
  Description of Artificial Sequence: Synthetic oligonucleotide
gaaacacauagaguuggag

SEQ ID NO: 2248178 - RNA, 19 nt, Artificial Sequence
  Description of Artificial Sequence: Synthetic oligonucleotide
augaaaugacacaugacca

SEQ ID NO: 2248179 - RNA, 19 nt, Artificial Sequence
  Description of Artificial Sequence: Synthetic oligonucleotide
gguaucccaauauuccugg

SEQ ID NO: 2248180 - RNA, 19 nt, Artificial Sequence
  Description of Artificial Sequence: Synthetic oligonucleotide
auuugguuuagaagacagc

SEQ ID NO: 2248181 - RNA, 19 nt, Artificial Sequence
  Description of Artificial Sequence: Synthetic oligonucleotide
ugguuacuuauauaaacuu

SEQ ID NO: 2248182 - RNA, 19 nt, Artificial Sequence
  Description of Artificial Sequence: Synthetic oligonucleotide
aaugacacaugaccacuaa

SEQ ID NO: 2248183 - RNA, 19 nt, Artificial Sequence
  Description of Artificial Sequence: Synthetic oligonucleotide
caaaacgucgaguaaggca

SEQ ID NO: 2248184 - RNA, 19 nt, Artificial Sequence
  Description of Artificial Sequence: Synthetic oligonucleotide
uugucaugauaauaucacu

SEQ ID NO: 2248185 - RNA, 19 nt, Artificial Sequence
  Description of Artificial Sequence: Synthetic oligonucleotide
agaacauuauacaaguuuu

SEQ ID NO: 2248186 - RNA, 19 nt, Artificial Sequence
  Description of Artificial Sequence: Synthetic oligonucleotide
aaaccccucaccaauauua

SEQ ID NO: 2248187 - RNA, 19 nt, Artificial Sequence
  Description of Artificial Sequence: Synthetic oligonucleotide
ccauucuucagugagaccc

SEQ ID NO: 2248188 - RNA, 19 nt, Artificial Sequence
  Description of Artificial Sequence: Synthetic oligonucleotide
guggcauauguucacuucc

SEQ ID NO: 2248189 - RNA, 19 nt, Artificial Sequence
  Description of Artificial Sequence: Synthetic oligonucleotide
uaucccaauauuccuggaa

SEQ ID NO: 2248190 - RNA, 19 nt, Artificial Sequence
  Description of Artificial Sequence: Synthetic oligonucleotide
cucaccaauauuagaaaca

SEQ ID NO: 2248191 - RNA, 19 nt, Artificial Sequence
  Description of Artificial Sequence: Synthetic oligonucleotide
uuuguggguaaagacagau

SEQ ID NO: 2248192 - RNA, 19 nt, Artificial Sequence
  Description of Artificial Sequence: Synthetic oligonucleotide
uguucacuuccauugcaga

SEQ ID NO: 2248193 - RNA, 19 nt, Artificial Sequence
  Description of Artificial Sequence: Synthetic oligonucleotide
aaucagugguauaaacaug

SEQ ID NO: 2248194 - RNA, 19 nt, Artificial Sequence
  Description of Artificial Sequence: Synthetic oligonucleotide
aagugacuugguuacuuau

SEQ ID NO: 2248195 - RNA, 19 nt, Artificial Sequence
  Description of Artificial Sequence: Synthetic oligonucleotide
gaaugcuacagccaacaaa

SEQ ID NO: 2248196 - RNA, 19 nt, Artificial Sequence
  Description of Artificial Sequence: Synthetic oligonucleotide
cauagaguuggagccaucc

SEQ ID NO: 2248197 - RNA, 19 nt, Artificial Sequence
  Description of Artificial Sequence: Synthetic oligonucleotide
ucacuaaauauagaucauc

SEQ ID NO: 2248198 - RNA, 19 nt, Artificial Sequence
  Description of Artificial Sequence: Synthetic oligonucleotide
agugagacccacagguacc

SEQ ID NO: 2248199 - RNA, 19 nt, Artificial Sequence
  Description of Artificial Sequence: Synthetic oligonucleotide
augguaucccaauauuccu

SEQ ID NO: 2248200 - RNA, 19 nt, Artificial Sequence
  Description of Artificial Sequence: Synthetic oligonucleotide
uaauaucacuagaaaucuc

SEQ ID NO: 2248201 - RNA, 19 nt, Artificial Sequence
  Description of Artificial Sequence: Synthetic oligonucleotide
uaagcagacuuaaaucauu

SEQ ID NO: 2248202 - RNA, 19 nt, Artificial Sequence
  Description of Artificial Sequence: Synthetic oligonucleotide
cauuugucaugauaauauc

SEQ ID NO: 2248203 - RNA, 19 nt, Artificial Sequence
  Description of Artificial Sequence: Synthetic oligonucleotide
cagugguauaaacauguug

SEQ ID NO: 2248204 - RNA, 19 nt, Artificial Sequence
  Description of Artificial Sequence: Synthetic oligonucleotide
gugaacuuccgcaaagaag

SEQ ID NO: 2248205 - RNA, 19 nt, Artificial Sequence
  Description of Artificial Sequence: Synthetic oligonucleotide
aaagugacuugguuacuua

SEQ ID NO: 2248206 - RNA, 19 nt, Artificial Sequence
  Description of Artificial Sequence: Synthetic oligonucleotide
agauaucaguauaugcauc

SEQ ID NO: 2248207 - RNA, 19 nt, Artificial Sequence
  Description of Artificial Sequence: Synthetic oligonucleotide
cagucacuaaauauagauc

SEQ ID NO: 2248208 - RNA, 19 nt, Artificial Sequence
  Description of Artificial Sequence: Synthetic oligonucleotide
augaccacuaaaagugaac

SEQ ID NO: 2248209 - RNA, 19 nt, Artificial Sequence
  Description of Artificial Sequence: Synthetic oligonucleotide
auacacauguaagauauuu

SEQ ID NO: 2248210 - RNA, 19 nt, Artificial Sequence
  Description of Artificial Sequence: Synthetic oligonucleotide
ucgggaagcucgaucaaac

SEQ ID NO: 2248211 - RNA, 19 nt, Artificial Sequence
  Description of Artificial Sequence: Synthetic oligonucleotide
uaugcaucauuuguauaac

SEQ ID NO: 2248212 - RNA, 19 nt, Artificial Sequence
  Description of Artificial Sequence: Synthetic oligonucleotide
uaaggggugaugccauucu

SEQ ID NO: 2248213 - RNA, 19 nt, Artificial Sequence
  Description of Artificial Sequence: Synthetic oligonucleotide
gaaaucucuuggguugggg

SEQ ID NO: 2248214 - RNA, 19 nt, Artificial Sequence
  Description of Artificial Sequence: Synthetic oligonucleotide
ugaaccaauccuuccuuuc

SEQ ID NO: 2248215 - RNA, 19 nt, Artificial Sequence
  Description of Artificial Sequence: Synthetic oligonucleotide
uccuacugaaccaauccuu

SEQ ID NO: 2248216 - RNA, 19 nt, Artificial Sequence
  Description of Artificial Sequence: Synthetic oligonucleotide
gguauaaacauguugcagu

SEQ ID NO: 2248217 - RNA, 19 nt, Artificial Sequence
  Description of Artificial Sequence: Synthetic oligonucleotide
cuacugaaccaauccuucc

SEQ ID NO: 2248218 - RNA, 19 nt, Artificial Sequence
  Description of Artificial Sequence: Synthetic oligonucleotide
gaaccaauccuuccuuuca

SEQ ID NO: 2248219 - RNA, 19 nt, Artificial Sequence
  Description of Artificial Sequence: Synthetic oligonucleotide
uccauugcagaaacuucac

SEQ ID NO: 2248220 - RNA, 19 nt, Artificial Sequence
  Description of Artificial Sequence: Synthetic oligonucleotide
uggcauauguucacuucca

SEQ ID NO: 2248221 - RNA, 19 nt, Artificial Sequence
  Description of Artificial Sequence: Synthetic oligonucleotide
accccaaguaaguagugga

SEQ ID NO: 2248222 - RNA, 19 nt, Artificial Sequence
  Description of Artificial Sequence: Synthetic oligonucleotide
aaacaaugcagcacagcga

SEQ ID NO: 2248223 - RNA, 19 nt, Artificial Sequence
  Description of Artificial Sequence: Synthetic oligonucleotide
uguggcauauguucacuuc

SEQ ID NO: 2248224 - RNA, 19 nt, Artificial Sequence
  Description of Artificial Sequence: Synthetic oligonucleotide
uucacuuccauugcagaaa

SEQ ID NO: 2248225 - RNA, 19 nt, Artificial Sequence
  Description of Artificial Sequence: Synthetic oligonucleotide
aaugcagcacagcgaagau

SEQ ID NO: 2248226 - RNA, 19 nt, Artificial Sequence
  Description of Artificial Sequence: Synthetic oligonucleotide
caagcaaaacucagugaug

SEQ ID NO: 2248227 - RNA, 19 nt, Artificial Sequence
  Description of Artificial Sequence: Synthetic oligonucleotide
aauuugaaucagugguaua

SEQ ID NO: 2248228 - RNA, 19 nt, Artificial Sequence
  Description of Artificial Sequence: Synthetic oligonucleotide
ucuaggguaccugaccaca

SEQ ID NO: 2248229 - RNA, 19 nt, Artificial Sequence
  Description of Artificial Sequence: Synthetic oligonucleotide
guuggggcaguacuguggc

SEQ ID NO: 2248230 - RNA, 19 nt, Artificial Sequence
  Description of Artificial Sequence: Synthetic oligonucleotide
guugcagucacuaaauaua

SEQ ID NO: 2248231 - RNA, 19 nt, Artificial Sequence
  Description of Artificial Sequence: Synthetic oligonucleotide
aguauaugcaucauuugua

SEQ ID NO: 2248232 - RNA, 19 nt, Artificial Sequence
  Description of Artificial Sequence: Synthetic oligonucleotide
uuugaaucagugguauaaa

SEQ ID NO: 2248233 - RNA, 19 nt, Artificial Sequence
  Description of Artificial Sequence: Synthetic oligonucleotide
gagacccacagguaccagc

SEQ ID NO: 2248234 - RNA, 19 nt, Artificial Sequence
  Description of Artificial Sequence: Synthetic oligonucleotide
aaggcaggaucugcacacc

SEQ ID NO: 2248235 - RNA, 19 nt, Artificial Sequence
  Description of Artificial Sequence: Synthetic oligonucleotide
auaaggggugaugccauuc

SEQ ID NO: 2248236 - RNA, 19 nt, Artificial Sequence
  Description of Artificial Sequence: Synthetic oligonucleotide
ggugaccccaaguaaguag

SEQ ID NO: 2248237 - RNA, 19 nt, Artificial Sequence
  Description of Artificial Sequence: Synthetic oligonucleotide
ugaacugggcuauuugguu

SEQ ID NO: 2248238 - RNA, 19 nt, Artificial Sequence
  Description of Artificial Sequence: Synthetic oligonucleotide
gaacucacagcccauacau

SEQ ID NO: 2248239 - RNA, 19 nt, Artificial Sequence
  Description of Artificial Sequence: Synthetic oligonucleotide
ugccauucuucagugagac

SEQ ID NO: 2248240 - RNA, 19 nt, Artificial Sequence
  Description of Artificial Sequence: Synthetic oligonucleotide
augcauaguuguuaugaaa

SEQ ID NO: 2248241 - RNA, 19 nt, Artificial Sequence
  Description of Artificial Sequence: Synthetic oligonucleotide
cagugagacccacagguac

SEQ ID NO: 2248242 - RNA, 19 nt, Artificial Sequence
  Description of Artificial Sequence: Synthetic oligonucleotide
ugcagucacuaaauauaga

SEQ ID NO: 2248243 - RNA, 19 nt, Artificial Sequence
  Description of Artificial Sequence: Synthetic oligonucleotide
gaccccaaguaaguagugg

SEQ ID NO: 2248244 - RNA, 19 nt, Artificial Sequence
  Description of Artificial Sequence: Synthetic oligonucleotide
aaagccgccugugugcugu

SEQ ID NO: 2248245 - RNA, 19 nt, Artificial Sequence
  Description of Artificial Sequence: Synthetic oligonucleotide
acuucauaagcagacuuaa

SEQ ID NO: 2248246 - RNA, 19 nt, Artificial Sequence
  Description of Artificial Sequence: Synthetic oligonucleotide
acagagugcacuguacucu

SEQ ID NO: 2248247 - RNA, 19 nt, Artificial Sequence
  Description of Artificial Sequence: Synthetic oligonucleotide
gaccacuaaaagugaacuc

SEQ ID NO: 2248248 - RNA, 19 nt, Artificial Sequence
  Description of Artificial Sequence: Synthetic oligonucleotide
acccacagguaccagccag

SEQ ID NO: 2248249 - RNA, 19 nt, Artificial Sequence
  Description of Artificial Sequence: Synthetic oligonucleotide
aacuucauaagcagacuua

SEQ ID NO: 2248250 - RNA, 19 nt, Artificial Sequence
  Description of Artificial Sequence: Synthetic oligonucleotide
gggaagcucgaucaaacug

SEQ ID NO: 2248251 - RNA, 19 nt, Artificial Sequence
  Description of Artificial Sequence: Synthetic oligonucleotide
uaggguaccugaccacagc

SEQ ID NO: 2248252 - RNA, 19 nt, Artificial Sequence
  Description of Artificial Sequence: Synthetic oligonucleotide
ucugcacaccaccucugca

SEQ ID NO: 2248253 - RNA, 19 nt, Artificial Sequence
  Description of Artificial Sequence: Synthetic oligonucleotide
gauagcuacagagugcacu

SEQ ID NO: 2248254 - RNA, 19 nt, Artificial Sequence
  Description of Artificial Sequence: Synthetic oligonucleotide
caugaauaaauuugugggu

SEQ ID NO: 2248255 - RNA, 19 nt, Artificial Sequence
  Description of Artificial Sequence: Synthetic oligonucleotide
uacuguggcauauguucac

SEQ ID NO: 2248256 - RNA, 19 nt, Artificial Sequence
  Description of Artificial Sequence: Synthetic oligonucleotide
aggguaccugaccacagca

SEQ ID NO: 2248257 - RNA, 19 nt, Artificial Sequence
  Description of Artificial Sequence: Synthetic oligonucleotide
ccaauauuccuggaaaagc

SEQ ID NO: 2248258 - RNA, 19 nt, Artificial Sequence
  Description of Artificial Sequence: Synthetic oligonucleotide
cuaggguaccugaccacag

SEQ ID NO: 2248259 - RNA, 19 nt, Artificial Sequence
  Description of Artificial Sequence: Synthetic oligonucleotide
cacagugaaccaaaaugca

SEQ ID NO: 2248260 - RNA, 19 nt, Artificial Sequence
  Description of Artificial Sequence: Synthetic oligonucleotide
gcaauaaaagauaucagua

SEQ ID NO: 2248261 - RNA, 19 nt, Artificial Sequence
  Description of Artificial Sequence: Synthetic oligonucleotide
aucauuugucaugauaaua

SEQ ID NO: 2248262 - RNA, 19 nt, Artificial Sequence
  Description of Artificial Sequence: Synthetic oligonucleotide
gacuuaaaucauuugucau

SEQ ID NO: 2248263 - RNA, 19 nt, Artificial Sequence
  Description of Artificial Sequence: Synthetic oligonucleotide
gguuacuuauauaaacuuc

SEQ ID NO: 2248264 - RNA, 19 nt, Artificial Sequence
  Description of Artificial Sequence: Synthetic oligonucleotide
aagcagacuuaaaucauuu

SEQ ID NO: 2248265 - RNA, 19 nt, Artificial Sequence
  Description of Artificial Sequence: Synthetic oligonucleotide
aguaagggccuuaugguau

SEQ ID NO: 2248266 - RNA, 19 nt, Artificial Sequence
  Description of Artificial Sequence: Synthetic oligonucleotide
auguucacuuccauugcag

SEQ ID NO: 2248267 - RNA, 19 nt, Artificial Sequence
  Description of Artificial Sequence: Synthetic oligonucleotide
guaaagacagauagcuaca

SEQ ID NO: 2248268 - RNA, 19 nt, Artificial Sequence
  Description of Artificial Sequence: Synthetic oligonucleotide
cuaaauaaagugacuuggu

SEQ ID NO: 2248269 - RNA, 19 nt, Artificial Sequence
  Description of Artificial Sequence: Synthetic oligonucleotide
ucgaucaaacuguuucuuu

SEQ ID NO: 2248270 - RNA, 19 nt, Artificial Sequence
  Description of Artificial Sequence: Synthetic oligonucleotide
gcauaguuguuaugaaaug

SEQ ID NO: 2248271 - RNA, 19 nt, Artificial Sequence
  Description of Artificial Sequence: Synthetic oligonucleotide
cagauagcuacagagugca

SEQ ID NO: 2248272 - RNA, 19 nt, Artificial Sequence
  Description of Artificial Sequence: Synthetic oligonucleotide
agacagauagcuacagagu

SEQ ID NO: 2248273 - RNA, 19 nt, Artificial Sequence
  Description of Artificial Sequence: Synthetic oligonucleotide
aaacgucgaguaaggcagg

SEQ ID NO: 2248274 - RNA, 19 nt, Artificial Sequence
  Description of Artificial Sequence: Synthetic oligonucleotide
accaauccuuccuuucaca

SEQ ID NO: 2248275 - RNA, 19 nt, Artificial Sequence
  Description of Artificial Sequence: Synthetic oligonucleotide
caguauaugcaucauuugu

SEQ ID NO: 2248276 - RNA, 19 nt, Artificial Sequence
  Description of Artificial Sequence: Synthetic oligonucleotide
guucacuuccauugcagaa

SEQ ID NO: 2248277 - RNA, 19 nt, Artificial Sequence
  Description of Artificial Sequence: Synthetic oligonucleotide
uagucaucgggaagcucga

SEQ ID NO: 2248278 - RNA, 19 nt, Artificial Sequence
  Description of Artificial Sequence: Synthetic oligonucleotide
uuguggguaaagacagaua

SEQ ID NO: 2248279 - RNA, 19 nt, Artificial Sequence
  Description of Artificial Sequence: Synthetic oligonucleotide
cagguaccagccaggaaug

SEQ ID NO: 2248280 - RNA, 19 nt, Artificial Sequence
  Description of Artificial Sequence: Synthetic oligonucleotide
uuaaaucauuugucaugau

SEQ ID NO: 2248281 - RNA, 19 nt, Artificial Sequence
  Description of Artificial Sequence: Synthetic oligonucleotide
aggggugaugccauucuuc

SEQ ID NO: 2248282 - RNA, 19 nt, Artificial Sequence
  Description of Artificial Sequence: Synthetic oligonucleotide
cuguacucuccuucagcag

SEQ ID NO: 2248283 - RNA, 19 nt, Artificial Sequence
  Description of Artificial Sequence: Synthetic oligonucleotide
uucuaggguaccugaccac

SEQ ID NO: 2248284 - RNA, 19 nt, Artificial Sequence
  Description of Artificial Sequence: Synthetic oligonucleotide
gaauuugaaucagugguau

SEQ ID NO: 2248285 - RNA, 19 nt, Artificial Sequence
  Description of Artificial Sequence: Synthetic oligonucleotide
ucgaguaaggcaggaucug

SEQ ID NO: 2248286 - RNA, 19 nt, Artificial Sequence
  Description of Artificial Sequence: Synthetic oligonucleotide
aaaugacacaugaccacua

SEQ ID NO: 2248287 - RNA, 19 nt, Artificial Sequence
  Description of Artificial Sequence: Synthetic oligonucleotide
acagugaaccaaaaugcau

SEQ ID NO: 2248288 - RNA, 19 nt, Artificial Sequence
  Description of Artificial Sequence: Synthetic oligonucleotide
gcugugaacuuccgcaaag

SEQ ID NO: 2248289 - RNA, 19 nt, Artificial Sequence
  Description of Artificial Sequence: Synthetic oligonucleotide
ugcugugaacuuccgcaaa

SEQ ID NO: 2248290 - RNA, 19 nt, Artificial Sequence
  Description of Artificial Sequence: Synthetic oligonucleotide
gcagucacuaaauauagau

SEQ ID NO: 2248291 - RNA, 19 nt, Artificial Sequence
  Description of Artificial Sequence: Synthetic oligonucleotide
agaaaucucuuggguuggg

SEQ ID NO: 2248292 - RNA, 19 nt, Artificial Sequence
  Description of Artificial Sequence: Synthetic oligonucleotide
ugacuugguuacuuauaua

SEQ ID NO: 2248293 - RNA, 19 nt, Artificial Sequence
  Description of Artificial Sequence: Synthetic oligonucleotide
cagcagaguuggcaaacag

SEQ ID NO: 2248294 - RNA, 19 nt, Artificial Sequence
  Description of Artificial Sequence: Synthetic oligonucleotide
ucagugguauaaacauguu

SEQ ID NO: 2248295 - RNA, 19 nt, Artificial Sequence
  Description of Artificial Sequence: Synthetic oligonucleotide
ucagcagaguuggcaaaca

SEQ ID NO: 2248296 - RNA, 19 nt, Artificial Sequence
  Description of Artificial Sequence: Synthetic oligonucleotide
guggguaaagacagauagc

SEQ ID NO: 2248297 - RNA, 19 nt, Artificial Sequence
  Description of Artificial Sequence: Synthetic oligonucleotide
cagagugcacuguacucuc

SEQ ID NO: 2248298 - RNA, 19 nt, Artificial Sequence
  Description of Artificial Sequence: Synthetic oligonucleotide
aucaugaauggaauuugaa

SEQ ID NO: 2248299 - RNA, 19 nt, Artificial Sequence
  Description of Artificial Sequence: Synthetic oligonucleotide
guacucuccuucagcagag

SEQ ID NO: 2248300 - RNA, 19 nt, Artificial Sequence
  Description of Artificial Sequence: Synthetic oligonucleotide
cagaguuggcaaacaguuc

SEQ ID NO: 2248301 - RNA, 19 nt, Artificial Sequence
  Description of Artificial Sequence: Synthetic oligonucleotide
acuucacucucaacaagca

SEQ ID NO: 2248302 - RNA, 19 nt, Artificial Sequence
  Description of Artificial Sequence: Synthetic oligonucleotide
uggggcaguacuguggcau

SEQ ID NO: 2248303 - RNA, 19 nt, Artificial Sequence
  Description of Artificial Sequence: Synthetic oligonucleotide
agagugcacuguacucucc

SEQ ID NO: 2248304 - RNA, 19 nt, Artificial Sequence
  Description of Artificial Sequence: Synthetic oligonucleotide
gugacuugguuacuuauau

SEQ ID NO: 2248305 - RNA, 19 nt, Artificial Sequence
  Description of Artificial Sequence: Synthetic oligonucleotide
aguuggcaaacaguucugu

SEQ ID NO: 2248306 - RNA, 19 nt, Artificial Sequence
  Description of Artificial Sequence: Synthetic oligonucleotide
gucaucgggaagcucgauc

SEQ ID NO: 2248307 - RNA, 19 nt, Artificial Sequence
  Description of Artificial Sequence: Synthetic oligonucleotide
caugaccacuaaaagugaa

SEQ ID NO: 2248308 - RNA, 19 nt, Artificial Sequence
  Description of Artificial Sequence: Synthetic oligonucleotide
ucugcaguaagggccuuau

SEQ ID NO: 2248309 - RNA, 19 nt, Artificial Sequence
  Description of Artificial Sequence: Synthetic oligonucleotide
cacagcgaagauaaggggu

SEQ ID NO: 2248310 - RNA, 19 nt, Artificial Sequence
  Description of Artificial Sequence: Synthetic oligonucleotide
ccuacugaaccaauccuuc

SEQ ID NO: 2248311 - RNA, 19 nt, Artificial Sequence
  Description of Artificial Sequence: Synthetic oligonucleotide
cgaagauaaggggugaugc

SEQ ID NO: 2248312 - RNA, 19 nt, Artificial Sequence
  Description of Artificial Sequence: Synthetic oligonucleotide
cacuaaaagugaacucaca

SEQ ID NO: 2248313 - RNA, 19 nt, Artificial Sequence
  Description of Artificial Sequence: Synthetic oligonucleotide
guaagggccuuaugguauc

SEQ ID NO: 2248314 - RNA, 19 nt, Artificial Sequence
  Description of Artificial Sequence: Synthetic oligonucleotide
aucauuuguauaacuucau

SEQ ID NO: 2248315 - RNA, 19 nt, Artificial Sequence
  Description of Artificial Sequence: Synthetic oligonucleotide
acuugguuacuuauauaaa

SEQ ID NO: 2248316 - RNA, 19 nt, Artificial Sequence
  Description of Artificial Sequence: Synthetic oligonucleotide
gcuauuugguuuagaagac

SEQ ID NO: 2248317 - RNA, 19 nt, Artificial Sequence
  Description of Artificial Sequence: Synthetic oligonucleotide
cauucuucagugagaccca

SEQ ID NO: 2248318 - RNA, 19 nt, Artificial Sequence
  Description of Artificial Sequence: Synthetic oligonucleotide
guacuguggcauauguuca

SEQ ID NO: 2248319 - RNA, 19 nt, Artificial Sequence
  Description of Artificial Sequence: Synthetic oligonucleotide
cauguugcagucacuaaau

SEQ ID NO: 2248320 - RNA, 19 nt, Artificial Sequence
  Description of Artificial Sequence: Synthetic oligonucleotide
uaagggccuuaugguaucc

SEQ ID NO: 2248321 - RNA, 19 nt, Artificial Sequence
  Description of Artificial Sequence: Synthetic oligonucleotide
acaugaccacuaaaaguga

SEQ ID NO: 2248322 - RNA, 19 nt, Artificial Sequence
  Description of Artificial Sequence: Synthetic oligonucleotide
cucagugaugaacugggcu

SEQ ID NO: 2248323 - RNA, 19 nt, Artificial Sequence
  Description of Artificial Sequence: Synthetic oligonucleotide
agauaaggggugaugccau

SEQ ID NO: 2248324 - RNA, 19 nt, Artificial Sequence
  Description of Artificial Sequence: Synthetic oligonucleotide
cccaauauuccuggaaaag

SEQ ID NO: 2248325 - RNA, 19 nt, Artificial Sequence
  Description of Artificial Sequence: Synthetic oligonucleotide
cugaccacagcacuuuucu

SEQ ID NO: 2248326 - RNA, 19 nt, Artificial Sequence
  Description of Artificial Sequence: Synthetic oligonucleotide
acaaagccgccugugugcu

SEQ ID NO: 2248327 - RNA, 19 nt, Artificial Sequence
  Description of Artificial Sequence: Synthetic oligonucleotide
cacauacacuaaauaaagu

SEQ ID NO: 2248328 - RNA, 19 nt, Artificial Sequence
  Description of Artificial Sequence: Synthetic oligonucleotide
auaucacuagaaaucucuu

SEQ ID NO: 2248329 - RNA, 19 nt, Artificial Sequence
  Description of Artificial Sequence: Synthetic oligonucleotide
caccaauauuagaaacaca

SEQ ID NO: 2248330 - RNA, 19 nt, Artificial Sequence
  Description of Artificial Sequence: Synthetic oligonucleotide
accccucaccaauauuaga

SEQ ID NO: 2248331 - RNA, 19 nt, Artificial Sequence
  Description of Artificial Sequence: Synthetic oligonucleotide
agugacuugguuacuuaua

SEQ ID NO: 2248332 - RNA, 19 nt, Artificial Sequence
  Description of Artificial Sequence: Synthetic oligonucleotide
caggaaugcuacagccaac

SEQ ID NO: 2248333 - RNA, 19 nt, Artificial Sequence
  Description of Artificial Sequence: Synthetic oligonucleotide
cuuggguuggggcaguacu

SEQ ID NO: 2248334 - RNA, 19 nt, Artificial Sequence
  Description of Artificial Sequence: Synthetic oligonucleotide
cuuaugguaucccaauauu

SEQ ID NO: 2248335 - RNA, 19 nt, Artificial Sequence
  Description of Artificial Sequence: Synthetic oligonucleotide
gaauggaauuugaaucagu

SEQ ID NO: 2248336 - RNA, 19 nt, Artificial Sequence
  Description of Artificial Sequence: Synthetic oligonucleotide
accaaaaugcauaguuguu

SEQ ID NO: 2248337 - RNA, 19 nt, Artificial Sequence
  Description of Artificial Sequence: Synthetic oligonucleotide
agauagcuacagagugcac

SEQ ID NO: 2248338 - RNA, 19 nt, Artificial Sequence
  Description of Artificial Sequence: Synthetic oligonucleotide
ggaagcucgaucaaacugu

SEQ ID NO: 2248339 - RNA, 19 nt, Artificial Sequence
  Description of Artificial Sequence: Synthetic oligonucleotide
cuacagagugcacuguacu

SEQ ID NO: 2248340 - RNA, 19 nt, Artificial Sequence
  Description of Artificial Sequence: Synthetic oligonucleotide
ccagccaggaaugcuacag

SEQ ID NO: 2248341 - RNA, 19 nt, Artificial Sequence
  Description of Artificial Sequence: Synthetic oligonucleotide
ccaaguaaguaguggaaaa

SEQ ID NO: 2248342 - RNA, 19 nt, Artificial Sequence
  Description of Artificial Sequence: Synthetic oligonucleotide
gucgaguaaggcaggaucu

SEQ ID NO: 2248343 - RNA, 19 nt, Artificial Sequence
  Description of Artificial Sequence: Synthetic oligonucleotide
ggaauuugaaucaguggua

SEQ ID NO: 2248344 - RNA, 19 nt, Artificial Sequence
  Description of Artificial Sequence: Synthetic oligonucleotide
ucuuggguuggggcaguac

SEQ ID NO: 2248345 - RNA, 19 nt, Artificial Sequence
  Description of Artificial Sequence: Synthetic oligonucleotide
agugaacucacagcccaua

SEQ ID NO: 2248346 - RNA, 19 nt, Artificial Sequence
  Description of Artificial Sequence: Synthetic oligonucleotide
uaccugaccacagcacuuu

SEQ ID NO: 2248347 - RNA, 19 nt, Artificial Sequence
  Description of Artificial Sequence: Synthetic oligonucleotide
ccccucaccaauauuagaa

SEQ ID NO: 2248348 - RNA, 19 nt, Artificial Sequence
  Description of Artificial Sequence: Synthetic oligonucleotide
guaucccaauauuccugga

SEQ ID NO: 2248349 - RNA, 19 nt, Artificial Sequence
  Description of Artificial Sequence: Synthetic oligonucleotide
aucgggaagcucgaucaaa

SEQ ID NO: 2248350 - RNA, 19 nt, Artificial Sequence
  Description of Artificial Sequence: Synthetic oligonucleotide
guaccagccaggaaugcua

SEQ ID NO: 2248351 - RNA, 19 nt, Artificial Sequence
  Description of Artificial Sequence: Synthetic oligonucleotide
gcaguaagggccuuauggu

SEQ ID NO: 2248352 - RNA, 19 nt, Artificial Sequence
  Description of Artificial Sequence: Synthetic oligonucleotide
guggggugaccccaaguaa

SEQ ID NO: 2248353 - RNA, 19 nt, Artificial Sequence
  Description of Artificial Sequence: Synthetic oligonucleotide
aagugaacucacagcccau

SEQ ID NO: 2248354 - RNA, 19 nt, Artificial Sequence
  Description of Artificial Sequence: Synthetic oligonucleotide
aacucacagcccauacaua

SEQ ID NO: 2248355 - RNA, 19 nt, Artificial Sequence
  Description of Artificial Sequence: Synthetic oligonucleotide
cacucucaacaagcaaaac

SEQ ID NO: 2248356 - RNA, 19 nt, Artificial Sequence
  Description of Artificial Sequence: Synthetic oligonucleotide
acauagaguuggagccauc

SEQ ID NO: 2248357 - RNA, 19 nt, Artificial Sequence
  Description of Artificial Sequence: Synthetic oligonucleotide
cugugaacuuccgcaaaga

SEQ ID NO: 2248358 - RNA, 19 nt, Artificial Sequence
  Description of Artificial Sequence: Synthetic oligonucleotide
cccacagguaccagccagg

SEQ ID NO: 2248359 - RNA, 19 nt, Artificial Sequence
  Description of Artificial Sequence: Synthetic oligonucleotide
ccauccuacugaaccaauc

SEQ ID NO: 2248360 - RNA, 19 nt, Artificial Sequence
  Description of Artificial Sequence: Synthetic oligonucleotide
cgucgaguaaggcaggauc

SEQ ID NO: 2248361 - RNA, 19 nt, Artificial Sequence
  Description of Artificial Sequence: Synthetic oligonucleotide
agccauccuacugaaccaa

SEQ ID NO: 2248362 - RNA, 19 nt, Artificial Sequence
  Description of Artificial Sequence: Synthetic oligonucleotide
gcuacagagugcacuguac

SEQ ID NO: 2248363 - RNA, 19 nt, Artificial Sequence
  Description of Artificial Sequence: Synthetic oligonucleotide
gcgaagauaaggggugaug

SEQ ID NO: 2248364 - RNA, 19 nt, Artificial Sequence
  Description of Artificial Sequence: Synthetic oligonucleotide
agcgaagauaaggggugau

SEQ ID NO: 2248365 - RNA, 19 nt, Artificial Sequence
  Description of Artificial Sequence: Synthetic oligonucleotide
ggaaaagcaugaauaaauu

SEQ ID NO: 2248366 - RNA, 19 nt, Artificial Sequence
  Description of Artificial Sequence: Synthetic oligonucleotide
cagcccauacauacacuaa

SEQ ID NO: 2248367 - RNA, 19 nt, Artificial Sequence
  Description of Artificial Sequence: Synthetic oligonucleotide
gucacuaaauauagaucau

SEQ ID NO: 2248368 - RNA, 19 nt, Artificial Sequence
  Description of Artificial Sequence: Synthetic oligonucleotide
aagccgccugugugcugug

SEQ ID NO: 2248369 - RNA, 19 nt, Artificial Sequence
  Description of Artificial Sequence: Synthetic oligonucleotide
ccugaccacagcacuuuuc

SEQ ID NO: 2248370 - RNA, 19 nt, Artificial Sequence
  Description of Artificial Sequence: Synthetic oligonucleotide
gcucgaucaaacuguuucu

SEQ ID NO: 2248371 - RNA, 19 nt, Artificial Sequence
  Description of Artificial Sequence: Synthetic oligonucleotide
cacaccaccucugcaguaa

SEQ ID NO: 2248372 - RNA, 19 nt, Artificial Sequence
  Description of Artificial Sequence: Synthetic oligonucleotide
caaagccgccugugugcug

SEQ ID NO: 2248373 - RNA, 19 nt, Artificial Sequence
  Description of Artificial Sequence: Synthetic oligonucleotide
gauaaggggugaugccauu

SEQ ID NO: 2248374 - RNA, 19 nt, Artificial Sequence
  Description of Artificial Sequence: Synthetic oligonucleotide
aagcucgaucaaacuguuu

SEQ ID NO: 2248375 - RNA, 19 nt, Artificial Sequence
  Description of Artificial Sequence: Synthetic oligonucleotide
ggaaugcuacagccaacaa

SEQ ID NO: 2248376 - RNA, 19 nt, Artificial Sequence
  Description of Artificial Sequence: Synthetic oligonucleotide
gaagcucgaucaaacuguu

SEQ ID NO: 2248377 - RNA, 19 nt, Artificial Sequence
  Description of Artificial Sequence: Synthetic oligonucleotide
cgaguaaggcaggaucugc

SEQ ID NO: 2248378 - RNA, 19 nt, Artificial Sequence
  Description of Artificial Sequence: Synthetic oligonucleotide
ggguaccugaccacagcac

SEQ ID NO: 2248379 - RNA, 19 nt, Artificial Sequence
  Description of Artificial Sequence: Synthetic oligonucleotide
ccuuaugguaucccaauau

SEQ ID NO: 2248380 - RNA, 19 nt, Artificial Sequence
  Description of Artificial Sequence: Synthetic oligonucleotide
cccucaccaauauuagaaa

SEQ ID NO: 2248381 - RNA, 19 nt, Artificial Sequence
  Description of Artificial Sequence: Synthetic oligonucleotide
cugaaccaauccuuccuuu

SEQ ID NO: 2248382 - RNA, 19 nt, Artificial Sequence
  Description of Artificial Sequence: Synthetic oligonucleotide
cccaaguaaguaguggaaa

SEQ ID NO: 2248383 - RNA, 19 nt, Artificial Sequence
  Description of Artificial Sequence: Synthetic oligonucleotide
caucgggaagcucgaucaa

SEQ ID NO: 2248384 - RNA, 19 nt, Artificial Sequence
  Description of Artificial Sequence: Synthetic oligonucleotide
gugaaccaaaaugcauagu

SEQ ID NO: 2248385 - RNA, 19 nt, Artificial Sequence
  Description of Artificial Sequence: Synthetic oligonucleotide
gccuuaugguaucccaaua

SEQ ID NO: 2248386 - RNA, 19 nt, Artificial Sequence
  Description of Artificial Sequence: Synthetic oligonucleotide
cagcgaagauaagggguga

SEQ ID NO: 2248387 - RNA, 19 nt, Artificial Sequence
  Description of Artificial Sequence: Synthetic oligonucleotide
ccuuucacauacacuaaau

SEQ ID NO: 2248388 - RNA, 19 nt, Artificial Sequence
  Description of Artificial Sequence: Synthetic oligonucleotide
ggccuuaugguaucccaau

SEQ ID NO: 2248389 - RNA, 19 nt, Artificial Sequence
  Description of Artificial Sequence: Synthetic oligonucleotide
agucaucgggaagcucgau

SEQ ID NO: 2248390 - RNA, 19 nt, Artificial Sequence
  Description of Artificial Sequence: Synthetic oligonucleotide
gguaccagccaggaaugcu

SEQ ID NO: 2248391 - RNA, 19 nt, Artificial Sequence
  Description of Artificial Sequence: Synthetic oligonucleotide
cugcuucaaaacgucgagu

SEQ ID NO: 2248392 - RNA, 19 nt, Artificial Sequence
  Description of Artificial Sequence: Synthetic oligonucleotide
ggguaaagacagauagcua

SEQ ID NO: 2248393 - RNA, 19 nt, Artificial Sequence
  Description of Artificial Sequence: Synthetic oligonucleotide
cacauagaguuggagccau

SEQ ID NO: 2248394 - RNA, 19 nt, Artificial Sequence
  Description of Artificial Sequence: Synthetic oligonucleotide
ccccaaguaaguaguggaa

SEQ ID NO: 2248395 - RNA, 19 nt, Artificial Sequence
  Description of Artificial Sequence: Synthetic oligonucleotide
cuguggcauauguucacuu

SEQ ID NO: 2248396 - RNA, 19 nt, Artificial Sequence
  Description of Artificial Sequence: Synthetic oligonucleotide
ccuuccuuucacauacacu

SEQ ID NO: 2248397 - RNA, 19 nt, Artificial Sequence
  Description of Artificial Sequence: Synthetic oligonucleotide
ggcauauguucacuuccau

SEQ ID NO: 2248398 - RNA, 19 nt, Artificial Sequence
  Description of Artificial Sequence: Synthetic oligonucleotide
cagugaugaacugggcuau

SEQ ID NO: 2248399 - RNA, 19 nt, Artificial Sequence
  Description of Artificial Sequence: Synthetic oligonucleotide
ccaauccuuccuuucacau

SEQ ID NO: 2248400 - RNA, 19 nt, Artificial Sequence
  Description of Artificial Sequence: Synthetic oligonucleotide
guaccugaccacagcacuu

SEQ ID NO: 2248401 - RNA, 19 nt, Artificial Sequence
  Description of Artificial Sequence: Synthetic oligonucleotide
gggccuuaugguaucccaa

SEQ ID NO: 2248402 - RNA, 19 nt, Artificial Sequence
  Description of Artificial Sequence: Synthetic oligonucleotide
ccgccugugugcugugaac

SEQ ID NO: 2248403 - RNA, 19 nt, Artificial Sequence
  Description of Artificial Sequence: Synthetic oligonucleotide
cacuuccauugcagaaacu

SEQ ID NO: 2248404 - RNA, 19 nt, Artificial Sequence
  Description of Artificial Sequence: Synthetic oligonucleotide
cuguggggugaccccaagu

SEQ ID NO: 2248405 - RNA, 19 nt, Artificial Sequence
  Description of Artificial Sequence: Synthetic oligonucleotide
caaaccccucaccaauauu

SEQ ID NO: 2248406 - RNA, 19 nt, Artificial Sequence
  Description of Artificial Sequence: Synthetic oligonucleotide
ggggcaguacuguggcaua

SEQ ID NO: 2248407 - RNA, 19 nt, Artificial Sequence
  Description of Artificial Sequence: Synthetic oligonucleotide
ggggugaccccaaguaagu

SEQ ID NO: 2248408 - RNA, 19 nt, Artificial Sequence
  Description of Artificial Sequence: Synthetic oligonucleotide
gccgccugugugcugugaa

SEQ ID NO: 2248409 - RNA, 19 nt, Artificial Sequence
  Description of Artificial Sequence: Synthetic oligonucleotide
agccgccugugugcuguga

SEQ ID NO: 2248410 - RNA, 19 nt, Artificial Sequence
  Description of Artificial Sequence: Synthetic oligonucleotide
gccaaaccccucaccaaua

SEQ ID NO: 2248411 - RNA, 19 nt, Artificial Sequence
  Description of Artificial Sequence: Synthetic oligonucleotide
gcacaccaccucugcagua

SEQ ID NO: 2248412 - RNA, 19 nt, Artificial Sequence
  Description of Artificial Sequence: Synthetic oligonucleotide
gggugaccccaaguaagua

SEQ ID NO: 2248413 - RNA, 19 nt, Artificial Sequence
  Description of Artificial Sequence: Synthetic oligonucleotide
ccaaaccccucaccaauau

SEQ ID NO: 2248414 - RNA, 19 nt, Artificial Sequence
  Description of Artificial Sequence: Synthetic oligonucleotide
cgggaagcucgaucaaacu

SEQ ID NO: 2248415 - RNA, 19 nt, Artificial Sequence
  Description of Artificial Sequence: Synthetic oligonucleotide
cgccugugugcugugaacu

SEQ ID NO: 2248416 - RNA, 19 nt, Artificial Sequence
  Description of Artificial Sequence: Synthetic oligonucleotide
aauuuugcuaaguagaugg

SEQ ID NO: 2248417 - RNA, 19 nt, Artificial Sequence
  Description of Artificial Sequence: Synthetic oligonucleotide
aauuauaugaguuauccca

SEQ ID NO: 2248418 - RNA, 19 nt, Artificial Sequence
  Description of Artificial Sequence: Synthetic oligonucleotide
aaacucuuuagucauaggg

SEQ ID NO: 2248419 - RNA, 19 nt, Artificial Sequence
  Description of Artificial Sequence: Synthetic oligonucleotide
aaaacuaaguaucuaaaca

SEQ ID NO: 2248420 - RNA, 19 nt, Artificial Sequence
  Description of Artificial Sequence: Synthetic oligonucleotide
caaauagaaauucauaucc

SEQ ID NO: 2248421 - RNA, 19 nt, Artificial Sequence
  Description of Artificial Sequence: Synthetic oligonucleotide
guuucuguaauauagguag

SEQ ID NO: 2248422 - RNA, 19 nt, Artificial Sequence
  Description of Artificial Sequence: Synthetic oligonucleotide
uggauuaucugcaauaucc

SEQ ID NO: 2248423 - RNA, 19 nt, Artificial Sequence
  Description of Artificial Sequence: Synthetic oligonucleotide
aaauuauaugaguuauccc

SEQ ID NO: 2248424 - RNA, 19 nt, Artificial Sequence
  Description of Artificial Sequence: Synthetic oligonucleotide
ugugguaccagaaugaaca

SEQ ID NO: 2248425 - RNA, 19 nt, Artificial Sequence
  Description of Artificial Sequence: Synthetic oligonucleotide
uaagcuuccaucaauaaac

SEQ ID NO: 2248426 - RNA, 19 nt, Artificial Sequence
  Description of Artificial Sequence: Synthetic oligonucleotide
aucaauaaacucuuuaguc

SEQ ID NO: 2248427 - RNA, 19 nt, Artificial Sequence
  Description of Artificial Sequence: Synthetic oligonucleotide
uuaggauuaauacaaaauc

SEQ ID NO: 2248428 - RNA, 19 nt, Artificial Sequence
  Description of Artificial Sequence: Synthetic oligonucleotide
aaaaucuccuuucuuggac

SEQ ID NO: 2248429 - RNA, 19 nt, Artificial Sequence
  Description of Artificial Sequence: Synthetic oligonucleotide
aaacuaaguaucuaaacaa

SEQ ID NO: 2248430 - RNA, 19 nt, Artificial Sequence
  Description of Artificial Sequence: Synthetic oligonucleotide
uuuuccuccauuuuguaag

SEQ ID NO: 2248431 - RNA, 19 nt, Artificial Sequence
  Description of Artificial Sequence: Synthetic oligonucleotide
aaauucauauccauguaac

SEQ ID NO: 2248432 - RNA, 19 nt, Artificial Sequence
  Description of Artificial Sequence: Synthetic oligonucleotide
uacauuauuacuacgauuu

SEQ ID NO: 2248433 - RNA, 19 nt, Artificial Sequence
  Description of Artificial Sequence: Synthetic oligonucleotide
uuugcuucaauauuuugcc

SEQ ID NO: 2248434 - RNA, 19 nt, Artificial Sequence
  Description of Artificial Sequence: Synthetic oligonucleotide
ugaaaguuugguuuaauga

SEQ ID NO: 2248435 - RNA, 19 nt, Artificial Sequence
  Description of Artificial Sequence: Synthetic oligonucleotide
uaaguaucuaaacaauugc

SEQ ID NO: 2248436 - RNA, 19 nt, Artificial Sequence
  Description of Artificial Sequence: Synthetic oligonucleotide
ucaauaaacucuuuaguca

SEQ ID NO: 2248437 - RNA, 19 nt, Artificial Sequence
  Description of Artificial Sequence: Synthetic oligonucleotide
uugaaaagaaacuauuugu

SEQ ID NO: 2248438 - RNA, 19 nt, Artificial Sequence
  Description of Artificial Sequence: Synthetic oligonucleotide
ugcaauauccaaaacuaag

SEQ ID NO: 2248439 - RNA, 19 nt, Artificial Sequence
  Description of Artificial Sequence: Synthetic oligonucleotide
aauauuuugccguaugcaa

SEQ ID NO: 2248440 - RNA, 19 nt, Artificial Sequence
  Description of Artificial Sequence: Synthetic oligonucleotide
aguagauggcuucauauuc

SEQ ID NO: 2248441 - RNA, 19 nt, Artificial Sequence
  Description of Artificial Sequence: Synthetic oligonucleotide
auagcagaagaguaugggc

SEQ ID NO: 2248442 - RNA, 19 nt, Artificial Sequence
  Description of Artificial Sequence: Synthetic oligonucleotide
uaggauuaauacaaaaucu

SEQ ID NO: 2248443 - RNA, 19 nt, Artificial Sequence
  Description of Artificial Sequence: Synthetic oligonucleotide
caaauuauaugaguuaucc

SEQ ID NO: 2248444 - RNA, 19 nt, Artificial Sequence
  Description of Artificial Sequence: Synthetic oligonucleotide
aagaguaugggccuaagaa

SEQ ID NO: 2248445 - RNA, 19 nt, Artificial Sequence
  Description of Artificial Sequence: Synthetic oligonucleotide
auauccaaaacuaaguauc

SEQ ID NO: 2248446 - RNA, 19 nt, Artificial Sequence
  Description of Artificial Sequence: Synthetic oligonucleotide
uuugguuuaaugaaguuuu

SEQ ID NO: 2248447 - RNA, 19 nt, Artificial Sequence
  Description of Artificial Sequence: Synthetic oligonucleotide
cuaaguaucuaaacaauug

SEQ ID NO: 2248448 - RNA, 19 nt, Artificial Sequence
  Description of Artificial Sequence: Synthetic oligonucleotide
aauagaaauucauauccau

SEQ ID NO: 2248449 - RNA, 19 nt, Artificial Sequence
  Description of Artificial Sequence: Synthetic oligonucleotide
ucugcaauauccaaaacua

SEQ ID NO: 2248450 - RNA, 19 nt, Artificial Sequence
  Description of Artificial Sequence: Synthetic oligonucleotide
uuggacauaagcaaacgca

SEQ ID NO: 2248451 - RNA, 19 nt, Artificial Sequence
  Description of Artificial Sequence: Synthetic oligonucleotide
gauguaugcaauaacgaag

SEQ ID NO: 2248452 - RNA, 19 nt, Artificial Sequence
  Description of Artificial Sequence: Synthetic oligonucleotide
acaaaaucuccuuucuugg

SEQ ID NO: 2248453 - RNA, 19 nt, Artificial Sequence
  Description of Artificial Sequence: Synthetic oligonucleotide
uauaauugaaaagaaacua

SEQ ID NO: 2248454 - RNA, 19 nt, Artificial Sequence
  Description of Artificial Sequence: Synthetic oligonucleotide
ucuaaacaauugcugaaag

SEQ ID NO: 2248455 - RNA, 19 nt, Artificial Sequence
  Description of Artificial Sequence: Synthetic oligonucleotide
ucuguauuguuaauuuugc

SEQ ID NO: 2248456 - RNA, 19 nt, Artificial Sequence
  Description of Artificial Sequence: Synthetic oligonucleotide
uguauuguuaauuuugcua

SEQ ID NO: 2248457 - RNA, 19 nt, Artificial Sequence
  Description of Artificial Sequence: Synthetic oligonucleotide
gaucuuucuaucuggagug

SEQ ID NO: 2248458 - RNA, 19 nt, Artificial Sequence
  Description of Artificial Sequence: Synthetic oligonucleotide
aauguuuccaugauguaug

SEQ ID NO: 2248459 - RNA, 19 nt, Artificial Sequence
  Description of Artificial Sequence: Synthetic oligonucleotide
uauuauguuuucaacugga

SEQ ID NO: 2248460 - RNA, 19 nt, Artificial Sequence
  Description of Artificial Sequence: Synthetic oligonucleotide
ucaaauagaaauucauauc

SEQ ID NO: 2248461 - RNA, 19 nt, Artificial Sequence
  Description of Artificial Sequence: Synthetic oligonucleotide
uuuucauagcagaagagua

SEQ ID NO: 2248462 - RNA, 19 nt, Artificial Sequence
  Description of Artificial Sequence: Synthetic oligonucleotide
uaaacaauugcugaaaguu

SEQ ID NO: 2248463 - RNA, 19 nt, Artificial Sequence
  Description of Artificial Sequence: Synthetic oligonucleotide
auugcugaaaguuugguuu

SEQ ID NO: 2248464 - RNA, 19 nt, Artificial Sequence
  Description of Artificial Sequence: Synthetic oligonucleotide
uucacguccuccauggucc

SEQ ID NO: 2248465 - RNA, 19 nt, Artificial Sequence
  Description of Artificial Sequence: Synthetic oligonucleotide
uucauauccauguaacagu

SEQ ID NO: 2248466 - RNA, 19 nt, Artificial Sequence
  Description of Artificial Sequence: Synthetic oligonucleotide
cauguuucuguaauauagg

SEQ ID NO: 2248467 - RNA, 19 nt, Artificial Sequence
  Description of Artificial Sequence: Synthetic oligonucleotide
gauaaguccacuccucggc

SEQ ID NO: 2248468 - RNA, 19 nt, Artificial Sequence
  Description of Artificial Sequence: Synthetic oligonucleotide
cauaggauaaguccacucc

SEQ ID NO: 2248469 - RNA, 19 nt, Artificial Sequence
  Description of Artificial Sequence: Synthetic oligonucleotide
gaagcugguggacaaaacc

SEQ ID NO: 2248470 - RNA, 19 nt, Artificial Sequence
  Description of Artificial Sequence: Synthetic oligonucleotide
aggauuaauacaaaaucuc

SEQ ID NO: 2248471 - RNA, 19 nt, Artificial Sequence
  Description of Artificial Sequence: Synthetic oligonucleotide
uccaaaacuaaguaucuaa

SEQ ID NO: 2248472 - RNA, 19 nt, Artificial Sequence
  Description of Artificial Sequence: Synthetic oligonucleotide
auuaauacaaaaucuccuu

SEQ ID NO: 2248473 - RNA, 19 nt, Artificial Sequence
  Description of Artificial Sequence: Synthetic oligonucleotide
caaaacuaaguaucuaaac

SEQ ID NO: 2248474 - RNA, 19 nt, Artificial Sequence
  Description of Artificial Sequence: Synthetic oligonucleotide
auguaugcaauaacgaagg

SEQ ID NO: 2248475 - RNA, 19 nt, Artificial Sequence
  Description of Artificial Sequence: Synthetic oligonucleotide
cuuuacauuauuacuacga

SEQ ID NO: 2248476 - RNA, 19 nt, Artificial Sequence
  Description of Artificial Sequence: Synthetic oligonucleotide
guauuguuaauuuugcuaa

SEQ ID NO: 2248477 - RNA, 19 nt, Artificial Sequence
  Description of Artificial Sequence: Synthetic oligonucleotide
agcguauuauguuuucaac

SEQ ID NO: 2248478 - RNA, 19 nt, Artificial Sequence
  Description of Artificial Sequence: Synthetic oligonucleotide
uauaugaguuaucccaugu

SEQ ID NO: 2248479 - RNA, 19 nt, Artificial Sequence
  Description of Artificial Sequence: Synthetic oligonucleotide
guauuauguuuucaacugg

SEQ ID NO: 2248480 - RNA, 19 nt, Artificial Sequence
  Description of Artificial Sequence: Synthetic oligonucleotide
auuauuacuacgauuuucu

SEQ ID NO: 2248481 - RNA, 19 nt, Artificial Sequence
  Description of Artificial Sequence: Synthetic oligonucleotide
aguuaaggaucuuucuauc

SEQ ID NO: 2248482 - RNA, 19 nt, Artificial Sequence
  Description of Artificial Sequence: Synthetic oligonucleotide
gaaggcagcacuucuggag

SEQ ID NO: 2248483 - RNA, 19 nt, Artificial Sequence
  Description of Artificial Sequence: Synthetic oligonucleotide
auucccauggacaagaacu

SEQ ID NO: 2248484 - RNA, 19 nt, Artificial Sequence
  Description of Artificial Sequence: Synthetic oligonucleotide
aaaucuccuuucuuggaca

SEQ ID NO: 2248485 - RNA, 19 nt, Artificial Sequence
  Description of Artificial Sequence: Synthetic oligonucleotide
cuaagaacaauccaggcaa

SEQ ID NO: 2248486 - RNA, 19 nt, Artificial Sequence
  Description of Artificial Sequence: Synthetic oligonucleotide
cuguaauauagguagcuug

SEQ ID NO: 2248487 - RNA, 19 nt, Artificial Sequence
  Description of Artificial Sequence: Synthetic oligonucleotide
uaaguagauggcuucauau

SEQ ID NO: 2248488 - RNA, 19 nt, Artificial Sequence
  Description of Artificial Sequence: Synthetic oligonucleotide
uaugaguuaucccauguuu

SEQ ID NO: 2248489 - RNA, 19 nt, Artificial Sequence
  Description of Artificial Sequence: Synthetic oligonucleotide
ugcuucaauauuuugccgu

SEQ ID NO: 2248490 - RNA, 19 nt, Artificial Sequence
  Description of Artificial Sequence: Synthetic oligonucleotide
ucauguguucucuucaaac

SEQ ID NO: 2248491 - RNA, 19 nt, Artificial Sequence
  Description of Artificial Sequence: Synthetic oligonucleotide
uauccaaaacuaaguaucu

SEQ ID NO: 2248492 - RNA, 19 nt, Artificial Sequence
  Description of Artificial Sequence: Synthetic oligonucleotide
guaucuaaacaauugcuga

SEQ ID NO: 2248493 - RNA, 19 nt, Artificial Sequence
  Description of Artificial Sequence: Synthetic oligonucleotide
ucuggaagcaacauauaau

SEQ ID NO: 2248494 - RNA, 19 nt, Artificial Sequence
  Description of Artificial Sequence: Synthetic oligonucleotide
uacgauuuucuccuuuuca

SEQ ID NO: 2248495 - RNA, 19 nt, Artificial Sequence
  Description of Artificial Sequence: Synthetic oligonucleotide
acuuuacauuauuacuacg

SEQ ID NO: 2248496 - RNA, 19 nt, Artificial Sequence
  Description of Artificial Sequence: Synthetic oligonucleotide
gaaauucauauccauguaa

SEQ ID NO: 2248497 - RNA, 19 nt, Artificial Sequence
  Description of Artificial Sequence: Synthetic oligonucleotide
auggacaagaacuuuuccu

SEQ ID NO: 2248498 - RNA, 19 nt, Artificial Sequence
  Description of Artificial Sequence: Synthetic oligonucleotide
agcauuaggauuaauacaa

SEQ ID NO: 2248499 - RNA, 19 nt, Artificial Sequence
  Description of Artificial Sequence: Synthetic oligonucleotide
auaaacucuuuagucauag

SEQ ID NO: 2248500 - RNA, 19 nt, Artificial Sequence
  Description of Artificial Sequence: Synthetic oligonucleotide
caaaacuuccugcaucucc

SEQ ID NO: 2248501 - RNA, 19 nt, Artificial Sequence
  Description of Artificial Sequence: Synthetic oligonucleotide
aguaucuaaacaauugcug

SEQ ID NO: 2248502 - RNA, 19 nt, Artificial Sequence
  Description of Artificial Sequence: Synthetic oligonucleotide
uauuguuaauuuugcuaag

SEQ ID NO: 2248503 - RNA, 19 nt, Artificial Sequence
  Description of Artificial Sequence: Synthetic oligonucleotide
uguguucucuucaaacuac

SEQ ID NO: 2248504 - RNA, 19 nt, Artificial Sequence
  Description of Artificial Sequence: Synthetic oligonucleotide
aacucuuuagucauaggga

SEQ ID NO: 2248505 - RNA, 19 nt, Artificial Sequence
  Description of Artificial Sequence: Synthetic oligonucleotide
agaacaauccaggcaaaac

SEQ ID NO: 2248506 - RNA, 19 nt, Artificial Sequence
  Description of Artificial Sequence: Synthetic oligonucleotide
aacauauaauugaaaagaa

SEQ ID NO: 2248507 - RNA, 19 nt, Artificial Sequence
  Description of Artificial Sequence: Synthetic oligonucleotide
uuucauagcagaagaguau

SEQ ID NO: 2248508 - RNA, 19 nt, Artificial Sequence
  Description of Artificial Sequence: Synthetic oligonucleotide
aauugcugaaaguuugguu

SEQ ID NO: 2248509 - RNA, 19 nt, Artificial Sequence
  Description of Artificial Sequence: Synthetic oligonucleotide
ugcacugugggagcgaagg

SEQ ID NO: 2248510 - RNA, 19 nt, Artificial Sequence
  Description of Artificial Sequence: Synthetic oligonucleotide
uaucuaaacaauugcugaa

SEQ ID NO: 2248511 - RNA, 19 nt, Artificial Sequence
  Description of Artificial Sequence: Synthetic oligonucleotide
auaggauaaguccacuccu

SEQ ID NO: 2248512 - RNA, 19 nt, Artificial Sequence
  Description of Artificial Sequence: Synthetic oligonucleotide
agucuuugcacugugggag

SEQ ID NO: 2248513 - RNA, 19 nt, Artificial Sequence
  Description of Artificial Sequence: Synthetic oligonucleotide
uggaguggugacaucaucu

SEQ ID NO: 2248514 - RNA, 19 nt, Artificial Sequence
  Description of Artificial Sequence: Synthetic oligonucleotide
uuuucccuacuuuacauua

SEQ ID NO: 2248515 - RNA, 19 nt, Artificial Sequence
  Description of Artificial Sequence: Synthetic oligonucleotide
aggauaaguccacuccucg

SEQ ID NO: 2248516 - RNA, 19 nt, Artificial Sequence
  Description of Artificial Sequence: Synthetic oligonucleotide
auguuucuguaauauaggu

SEQ ID NO: 2248517 - RNA, 19 nt, Artificial Sequence
  Description of Artificial Sequence: Synthetic oligonucleotide
agcaaacgcaucucuguac

SEQ ID NO: 2248518 - RNA, 19 nt, Artificial Sequence
  Description of Artificial Sequence: Synthetic oligonucleotide
ucuuuagucauagggaaaa

SEQ ID NO: 2248519 - RNA, 19 nt, Artificial Sequence
  Description of Artificial Sequence: Synthetic oligonucleotide
uggacauaagcaaacgcau

SEQ ID NO: 2248520 - RNA, 19 nt, Artificial Sequence
  Description of Artificial Sequence: Synthetic oligonucleotide
uuucuuggacauaagcaaa

SEQ ID NO: 2248521 - RNA, 19 nt, Artificial Sequence
  Description of Artificial Sequence: Synthetic oligonucleotide
ccauguuucuguaauauag

SEQ ID NO: 2248522 - RNA, 19 nt, Artificial Sequence
  Description of Artificial Sequence: Synthetic oligonucleotide
cuuggacauaagcaaacgc

SEQ ID NO: 2248523 - RNA, 19 nt, Artificial Sequence
  Description of Artificial Sequence: Synthetic oligonucleotide
uguuucuguaauauaggua

SEQ ID NO: 2248524 - RNA, 19 nt, Artificial Sequence
  Description of Artificial Sequence: Synthetic oligonucleotide
uuguuaauuuugcuaagua

SEQ ID NO: 2248525 - RNA, 19 nt, Artificial Sequence
  Description of Artificial Sequence: Synthetic oligonucleotide
acucuuuagucauagggaa

SEQ ID NO: 2248526 - RNA, 19 nt, Artificial Sequence
  Description of Artificial Sequence: Synthetic oligonucleotide
ugccguaugcaaauuauau

SEQ ID NO: 2248527 - RNA, 19 nt, Artificial Sequence
  Description of Artificial Sequence: Synthetic oligonucleotide
cuacuuuacauuauuacua

SEQ ID NO: 2248528 - RNA, 19 nt, Artificial Sequence
  Description of Artificial Sequence: Synthetic oligonucleotide
uuugccguaugcaaauuau

SEQ ID NO: 2248529 - RNA, 19 nt, Artificial Sequence
  Description of Artificial Sequence: Synthetic oligonucleotide
uaucccauguuucuguaau

SEQ ID NO: 2248530 - RNA, 19 nt, Artificial Sequence
  Description of Artificial Sequence: Synthetic oligonucleotide
ucuuggacauaagcaaacg

SEQ ID NO: 2248531 - RNA, 19 nt, Artificial Sequence
  Description of Artificial Sequence: Synthetic oligonucleotide
uuauaugaguuaucccaug

SEQ ID NO: 2248532 - RNA, 19 nt, Artificial Sequence
  Description of Artificial Sequence: Synthetic oligonucleotide
cugaaaguuugguuuaaug

SEQ ID NO: 2248533 - RNA, 19 nt, Artificial Sequence
  Description of Artificial Sequence: Synthetic oligonucleotide
uaccagaaugaacaguuaa

SEQ ID NO: 2248534 - RNA, 19 nt, Artificial Sequence
  Description of Artificial Sequence: Synthetic oligonucleotide
cauagcagaagaguauggg

SEQ ID NO: 2248535 - RNA, 19 nt, Artificial Sequence
  Description of Artificial Sequence: Synthetic oligonucleotide
aggcaaaacuuccugcauc

SEQ ID NO: 2248536 - RNA, 19 nt, Artificial Sequence
  Description of Artificial Sequence: Synthetic oligonucleotide
guucucuucaaacuaccug

SEQ ID NO: 2248537 - RNA, 19 nt, Artificial Sequence
  Description of Artificial Sequence: Synthetic oligonucleotide
uuucuguaauauagguagc

SEQ ID NO: 2248538 - RNA, 19 nt, Artificial Sequence
  Description of Artificial Sequence: Synthetic oligonucleotide
uugcuucaauauuuugccg

SEQ ID NO: 2248539 - RNA, 19 nt, Artificial Sequence
  Description of Artificial Sequence: Synthetic oligonucleotide
acgaaggcagcacuucugg

SEQ ID NO: 2248540 - RNA, 19 nt, Artificial Sequence
  Description of Artificial Sequence: Synthetic oligonucleotide
auagaaauucauauccaug

SEQ ID NO: 2248541 - RNA, 19 nt, Artificial Sequence
  Description of Artificial Sequence: Synthetic oligonucleotide
ucucauaggauaaguccac

SEQ ID NO: 2248542 - RNA, 19 nt, Artificial Sequence
  Description of Artificial Sequence: Synthetic oligonucleotide
uaaacucuuuagucauagg

SEQ ID NO: 2248543 - RNA, 19 nt, Artificial Sequence
  Description of Artificial Sequence: Synthetic oligonucleotide
ucauauccauguaacaguu

SEQ ID NO: 2248544 - RNA, 19 nt, Artificial Sequence
  Description of Artificial Sequence: Synthetic oligonucleotide
gaacaauccaggcaaaacu

SEQ ID NO: 2248545 - RNA, 19 nt, Artificial Sequence
  Description of Artificial Sequence: Synthetic oligonucleotide
uuacauuauuacuacgauu

SEQ ID NO: 2248546 - RNA, 19 nt, Artificial Sequence
  Description of Artificial Sequence: Synthetic oligonucleotide
cuugcauguuuccaaaauc

SEQ ID NO: 2248547 - RNA, 19 nt, Artificial Sequence
  Description of Artificial Sequence: Synthetic oligonucleotide
uuuugcuaaguagauggcu

SEQ ID NO: 2248548 - RNA, 19 nt, Artificial Sequence
  Description of Artificial Sequence: Synthetic oligonucleotide
uaauuuugcuaaguagaug

SEQ ID NO: 2248549 - RNA, 19 nt, Artificial Sequence
  Description of Artificial Sequence: Synthetic oligonucleotide
gaguaugggccuaagaaca

SEQ ID NO: 2248550 - RNA, 19 nt, Artificial Sequence
  Description of Artificial Sequence: Synthetic oligonucleotide
ugguuuaaugaaguuuugc

SEQ ID NO: 2248551 - RNA, 19 nt, Artificial Sequence
  Description of Artificial Sequence: Synthetic oligonucleotide
aggucagccauucugugca

SEQ ID NO: 2248552 - RNA, 19 nt, Artificial Sequence
  Description of Artificial Sequence: Synthetic oligonucleotide
agcgaaggaaacuccagcu

SEQ ID NO: 2248553 - RNA, 19 nt, Artificial Sequence
  Description of Artificial Sequence: Synthetic oligonucleotide
aacuaaguaucuaaacaau

SEQ ID NO: 2248554 - RNA, 19 nt, Artificial Sequence
  Description of Artificial Sequence: Synthetic oligonucleotide
gauuaauacaaaaucuccu

SEQ ID NO: 2248555 - RNA, 19 nt, Artificial Sequence
  Description of Artificial Sequence: Synthetic oligonucleotide
uguaugcaauaacgaaggc

SEQ ID NO: 2248556 - RNA, 19 nt, Artificial Sequence
  Description of Artificial Sequence: Synthetic oligonucleotide
uaauauagguagcuugcuu

SEQ ID NO: 2248557 - RNA, 19 nt, Artificial Sequence
  Description of Artificial Sequence: Synthetic oligonucleotide
agaaacaugucuggaagca

SEQ ID NO: 2248558 - RNA, 19 nt, Artificial Sequence
  Description of Artificial Sequence: Synthetic oligonucleotide
acgauuuucuccuuuucaa

SEQ ID NO: 2248559 - RNA, 19 nt, Artificial Sequence
  Description of Artificial Sequence: Synthetic oligonucleotide
cuucaucccaaauguuucc

SEQ ID NO: 2248560 - RNA, 19 nt, Artificial Sequence
  Description of Artificial Sequence: Synthetic oligonucleotide
uuuccaugauguaugcaau

SEQ ID NO: 2248561 - RNA, 19 nt, Artificial Sequence
  Description of Artificial Sequence: Synthetic oligonucleotide
auaacgaaggcagcacuuc

SEQ ID NO: 2248562 - RNA, 19 nt, Artificial Sequence
  Description of Artificial Sequence: Synthetic oligonucleotide
uugguuuaaugaaguuuug

SEQ ID NO: 2248563 - RNA, 19 nt, Artificial Sequence
  Description of Artificial Sequence: Synthetic oligonucleotide
uguucucuucaaacuaccu

SEQ ID NO: 2248564 - RNA, 19 nt, Artificial Sequence
  Description of Artificial Sequence: Synthetic oligonucleotide
ugggccuaagaacaaucca

SEQ ID NO: 2248565 - RNA, 19 nt, Artificial Sequence
  Description of Artificial Sequence: Synthetic oligonucleotide
gauuaucugcaauauccaa

SEQ ID NO: 2248566 - RNA, 19 nt, Artificial Sequence
  Description of Artificial Sequence: Synthetic oligonucleotide
uuuccuccauuuuguaagc

SEQ ID NO: 2248567 - RNA, 19 nt, Artificial Sequence
  Description of Artificial Sequence: Synthetic oligonucleotide
uccauguaacaguucucag

SEQ ID NO: 2248568 - RNA, 19 nt, Artificial Sequence
  Description of Artificial Sequence: Synthetic oligonucleotide
uguaagcuuccaucaauaa

SEQ ID NO: 2248569 - RNA, 19 nt, Artificial Sequence
  Description of Artificial Sequence: Synthetic oligonucleotide
gagcgaaggaaacuccagc

SEQ ID NO: 2248570 - RNA, 19 nt, Artificial Sequence
  Description of Artificial Sequence: Synthetic oligonucleotide
agcuuccaucaauaaacuc

SEQ ID NO: 2248571 - RNA, 19 nt, Artificial Sequence
  Description of Artificial Sequence: Synthetic oligonucleotide
uuuugccguaugcaaauua

SEQ ID NO: 2248572 - RNA, 19 nt, Artificial Sequence
  Description of Artificial Sequence: Synthetic oligonucleotide
augggccuaagaacaaucc

SEQ ID NO: 2248573 - RNA, 19 nt, Artificial Sequence
  Description of Artificial Sequence: Synthetic oligonucleotide
ugcauguuuccaaaaucau

SEQ ID NO: 2248574 - RNA, 19 nt, Artificial Sequence
  Description of Artificial Sequence: Synthetic oligonucleotide
acuugcauguuuccaaaau

SEQ ID NO: 2248575 - RNA, 19 nt, Artificial Sequence
  Description of Artificial Sequence: Synthetic oligonucleotide
cauggacaagaacuuuucc

SEQ ID NO: 2248576 - RNA, 19 nt, Artificial Sequence
  Description of Artificial Sequence: Synthetic oligonucleotide
aaggaaacuccagcuucac

SEQ ID NO: 2248577 - RNA, 19 nt, Artificial Sequence
  Description of Artificial Sequence: Synthetic oligonucleotide
uaacgaaggcagcacuucu

SEQ ID NO: 2248578 - RNA, 19 nt, Artificial Sequence
  Description of Artificial Sequence: Synthetic oligonucleotide
auuaucugcaauauccaaa

SEQ ID NO: 2248579 - RNA, 19 nt, Artificial Sequence
  Description of Artificial Sequence: Synthetic oligonucleotide
ugaacaguuaaggaucuuu

SEQ ID NO: 2248580 - RNA, 19 nt, Artificial Sequence
  Description of Artificial Sequence: Synthetic oligonucleotide
uuauuacuacgauuuucuc

SEQ ID NO: 2248581 - RNA, 19 nt, Artificial Sequence
  Description of Artificial Sequence: Synthetic oligonucleotide
ucucccgucucauaggaua

SEQ ID NO: 2248582 - RNA, 19 nt, Artificial Sequence
  Description of Artificial Sequence: Synthetic oligonucleotide
gaacaguuaaggaucuuuc

SEQ ID NO: 2248583 - RNA, 19 nt, Artificial Sequence
  Description of Artificial Sequence: Synthetic oligonucleotide
gacaagaacuuuuccucca

SEQ ID NO: 2248584 - RNA, 19 nt, Artificial Sequence
  Description of Artificial Sequence: Synthetic oligonucleotide
uagauggcuucauauuccu

SEQ ID NO: 2248585 - RNA, 19 nt, Artificial Sequence
  Description of Artificial Sequence: Synthetic oligonucleotide
guaugcaauaacgaaggca

SEQ ID NO: 2248586 - RNA, 19 nt, Artificial Sequence
  Description of Artificial Sequence: Synthetic oligonucleotide
ucauauuccugaagcuggu

SEQ ID NO: 2248587 - RNA, 19 nt, Artificial Sequence
  Description of Artificial Sequence: Synthetic oligonucleotide
aggaucuuucuaucuggag

SEQ ID NO: 2248588 - RNA, 19 nt, Artificial Sequence
  Description of Artificial Sequence: Synthetic oligonucleotide
acaauugcugaaaguuugg

SEQ ID NO: 2248589 - RNA, 19 nt, Artificial Sequence
  Description of Artificial Sequence: Synthetic oligonucleotide
guagcuugcuuuucauagc

SEQ ID NO: 2248590 - RNA, 19 nt, Artificial Sequence
  Description of Artificial Sequence: Synthetic oligonucleotide
augauguaugcaauaacga

SEQ ID NO: 2248591 - RNA, 19 nt, Artificial Sequence
  Description of Artificial Sequence: Synthetic oligonucleotide
auuauaugaguuaucccau

SEQ ID NO: 2248592 - RNA, 19 nt, Artificial Sequence
  Description of Artificial Sequence: Synthetic oligonucleotide
uaggauaaguccacuccuc

SEQ ID NO: 2248593 - RNA, 19 nt, Artificial Sequence
  Description of Artificial Sequence: Synthetic oligonucleotide
aagaaacuauuuguguuuu

SEQ ID NO: 2248594 - RNA, 19 nt, Artificial Sequence
  Description of Artificial Sequence: Synthetic oligonucleotide
aauaacgaaggcagcacuu

SEQ ID NO: 2248595 - RNA, 19 nt, Artificial Sequence
  Description of Artificial Sequence: Synthetic oligonucleotide
acgggguccuggcagcugc

SEQ ID NO: 2248596 - RNA, 19 nt, Artificial Sequence
  Description of Artificial Sequence: Synthetic oligonucleotide
acauauaauugaaaagaaa

SEQ ID NO: 2248597 - RNA, 19 nt, Artificial Sequence
  Description of Artificial Sequence: Synthetic oligonucleotide
aagcaaacgcaucucugua

SEQ ID NO: 2248598 - RNA, 19 nt, Artificial Sequence
  Description of Artificial Sequence: Synthetic oligonucleotide
ccguaugcaaauuauauga

SEQ ID NO: 2248599 - RNA, 19 nt, Artificial Sequence
  Description of Artificial Sequence: Synthetic oligonucleotide
uggacaaaaccagcauuag

SEQ ID NO: 2248600 - RNA, 19 nt, Artificial Sequence
  Description of Artificial Sequence: Synthetic oligonucleotide
guaagcuuccaucaauaaa

SEQ ID NO: 2248601 - RNA, 19 nt, Artificial Sequence
  Description of Artificial Sequence: Synthetic oligonucleotide
ucggcguagucuuugcacu

SEQ ID NO: 2248602 - RNA, 19 nt, Artificial Sequence
  Description of Artificial Sequence: Synthetic oligonucleotide
auguguucucuucaaacua

SEQ ID NO: 2248603 - RNA, 19 nt, Artificial Sequence
  Description of Artificial Sequence: Synthetic oligonucleotide
cagcauuaggauuaauaca

SEQ ID NO: 2248604 - RNA, 19 nt, Artificial Sequence
  Description of Artificial Sequence: Synthetic oligonucleotide
gucucauaggauaagucca

SEQ ID NO: 2248605 - RNA, 19 nt, Artificial Sequence
  Description of Artificial Sequence: Synthetic oligonucleotide
gguuuaaugaaguuuugcu

SEQ ID NO: 2248606 - RNA, 19 nt, Artificial Sequence
  Description of Artificial Sequence: Synthetic oligonucleotide
auaagcaaacgcaucucug

SEQ ID NO: 2248607 - RNA, 19 nt, Artificial Sequence
  Description of Artificial Sequence: Synthetic oligonucleotide
auccaggcaaaacuuccug

SEQ ID NO: 2248608 - RNA, 19 nt, Artificial Sequence
  Description of Artificial Sequence: Synthetic oligonucleotide
ucuaucuggaguggugaca

SEQ ID NO: 2248609 - RNA, 19 nt, Artificial Sequence
  Description of Artificial Sequence: Synthetic oligonucleotide
aacuaccugugguaccaga

SEQ ID NO: 2248610 - RNA, 19 nt, Artificial Sequence
  Description of Artificial Sequence: Synthetic oligonucleotide
uauccauguaacaguucuc

SEQ ID NO: 2248611 - RNA, 19 nt, Artificial Sequence
  Description of Artificial Sequence: Synthetic oligonucleotide
ggauaaguccacuccucgg

SEQ ID NO: 2248612 - RNA, 19 nt, Artificial Sequence
  Description of Artificial Sequence: Synthetic oligonucleotide
cucggcguagucuuugcac

SEQ ID NO: 2248613 - RNA, 19 nt, Artificial Sequence
  Description of Artificial Sequence: Synthetic oligonucleotide
gacaucaucuguauuguua

SEQ ID NO: 2248614 - RNA, 19 nt, Artificial Sequence
  Description of Artificial Sequence: Synthetic oligonucleotide
ggaaacuccagcuucacgu

SEQ ID NO: 2248615 - RNA, 19 nt, Artificial Sequence
  Description of Artificial Sequence: Synthetic oligonucleotide
ugggagcgaaggaaacucc

SEQ ID NO: 2248616 - RNA, 19 nt, Artificial Sequence
  Description of Artificial Sequence: Synthetic oligonucleotide
gaagaguaugggccuaaga

SEQ ID NO: 2248617 - RNA, 19 nt, Artificial Sequence
  Description of Artificial Sequence: Synthetic oligonucleotide
ggacaagaacuuuuccucc

SEQ ID NO: 2248618 - RNA, 19 nt, Artificial Sequence
  Description of Artificial Sequence: Synthetic oligonucleotide
uaagaacaauccaggcaaa

SEQ ID NO: 2248619 - RNA, 19 nt, Artificial Sequence
  Description of Artificial Sequence: Synthetic oligonucleotide
gaaguuuugcuucaauauu

SEQ ID NO: 2248620 - RNA, 19 nt, Artificial Sequence
  Description of Artificial Sequence: Synthetic oligonucleotide
gaccacgggguccuggcag

SEQ ID NO: 2248621 - RNA, 19 nt, Artificial Sequence
  Description of Artificial Sequence: Synthetic oligonucleotide
uuucccuacuuuacauuau

SEQ ID NO: 2248622 - RNA, 19 nt, Artificial Sequence
  Description of Artificial Sequence: Synthetic oligonucleotide
ucuguaauauagguagcuu

SEQ ID NO: 2248623 - RNA, 19 nt, Artificial Sequence
  Description of Artificial Sequence: Synthetic oligonucleotide
aagcuuccaucaauaaacu

SEQ ID NO: 2248624 - RNA, 19 nt, Artificial Sequence
  Description of Artificial Sequence: Synthetic oligonucleotide
uucuaucuggaguggugac

SEQ ID NO: 2248625 - RNA, 19 nt, Artificial Sequence
  Description of Artificial Sequence: Synthetic oligonucleotide
aagaacaauccaggcaaaa

SEQ ID NO: 2248626 - RNA, 19 nt, Artificial Sequence
  Description of Artificial Sequence: Synthetic oligonucleotide
caucaauaaacucuuuagu

SEQ ID NO: 2248627 - RNA, 19 nt, Artificial Sequence
  Description of Artificial Sequence: Synthetic oligonucleotide
aguuugguuuaaugaaguu

SEQ ID NO: 2248628 - RNA, 19 nt, Artificial Sequence
  Description of Artificial Sequence: Synthetic oligonucleotide
gggccuaagaacaauccag

SEQ ID NO: 2248629 - RNA, 19 nt, Artificial Sequence
  Description of Artificial Sequence: Synthetic oligonucleotide
gaguuaucccauguuucug

SEQ ID NO: 2248630 - RNA, 19 nt, Artificial Sequence
  Description of Artificial Sequence: Synthetic oligonucleotide
ugcuaaguagauggcuuca

SEQ ID NO: 2248631 - RNA, 19 nt, Artificial Sequence
  Description of Artificial Sequence: Synthetic oligonucleotide
caugcugcggccgucuccc

SEQ ID NO: 2248632 - RNA, 19 nt, Artificial Sequence
  Description of Artificial Sequence: Synthetic oligonucleotide
uuaucccauguuucuguaa

SEQ ID NO: 2248633 - RNA, 19 nt, Artificial Sequence
  Description of Artificial Sequence: Synthetic oligonucleotide
ggccuaagaacaauccagg

SEQ ID NO: 2248634 - RNA, 19 nt, Artificial Sequence
  Description of Artificial Sequence: Synthetic oligonucleotide
caguucucagaggucagcc

SEQ ID NO: 2248635 - RNA, 19 nt, Artificial Sequence
  Description of Artificial Sequence: Synthetic oligonucleotide
aucuuucuaucuggagugg

SEQ ID NO: 2248636 - RNA, 19 nt, Artificial Sequence
  Description of Artificial Sequence: Synthetic oligonucleotide
caaaaucuccuuucuugga

SEQ ID NO: 2248637 - RNA, 19 nt, Artificial Sequence
  Description of Artificial Sequence: Synthetic oligonucleotide
uugccguaugcaaauuaua

SEQ ID NO: 2248638 - RNA, 19 nt, Artificial Sequence
  Description of Artificial Sequence: Synthetic oligonucleotide
gccguaugcaaauuauaug

SEQ ID NO: 2248639 - RNA, 19 nt, Artificial Sequence
  Description of Artificial Sequence: Synthetic oligonucleotide
guugccacuugcauguuuc

SEQ ID NO: 2248640 - RNA, 19 nt, Artificial Sequence
  Description of Artificial Sequence: Synthetic oligonucleotide
ugugggagcgaaggaaacu

SEQ ID NO: 2248641 - RNA, 19 nt, Artificial Sequence
  Description of Artificial Sequence: Synthetic oligonucleotide
cauguguucucuucaaacu

SEQ ID NO: 2248642 - RNA, 19 nt, Artificial Sequence
  Description of Artificial Sequence: Synthetic oligonucleotide
aauaaacucuuuagucaua

SEQ ID NO: 2248643 - RNA, 19 nt, Artificial Sequence
  Description of Artificial Sequence: Synthetic oligonucleotide
guuuucaacuggauuaucu

SEQ ID NO: 2248644 - RNA, 19 nt, Artificial Sequence
  Description of Artificial Sequence: Synthetic oligonucleotide
acauuauuacuacgauuuu

SEQ ID NO: 2248645 - RNA, 19 nt, Artificial Sequence
  Description of Artificial Sequence: Synthetic oligonucleotide
caaacuaccugugguacca

SEQ ID NO: 2248646 - RNA, 19 nt, Artificial Sequence
  Description of Artificial Sequence: Synthetic oligonucleotide
cuuuucauagcagaagagu

SEQ ID NO: 2248647 - RNA, 19 nt, Artificial Sequence
  Description of Artificial Sequence: Synthetic oligonucleotide
cuuuuccuccauuuuguaa

SEQ ID NO: 2248648 - RNA, 19 nt, Artificial Sequence
  Description of Artificial Sequence: Synthetic oligonucleotide
cuaaacaauugcugaaagu

SEQ ID NO: 2248649 - RNA, 19 nt, Artificial Sequence
  Description of Artificial Sequence: Synthetic oligonucleotide
acucggagaccacgggguc

SEQ ID NO: 2248650 - RNA, 19 nt, Artificial Sequence
  Description of Artificial Sequence: Synthetic oligonucleotide
cauucccauggacaagaac

SEQ ID NO: 2248651 - RNA, 19 nt, Artificial Sequence
  Description of Artificial Sequence: Synthetic oligonucleotide
uacuacgauuuucuccuuu

SEQ ID NO: 2248652 - RNA, 19 nt, Artificial Sequence
  Description of Artificial Sequence: Synthetic oligonucleotide
cuggauuaucugcaauauc

SEQ ID NO: 2248653 - RNA, 19 nt, Artificial Sequence
  Description of Artificial Sequence: Synthetic oligonucleotide
auuauguuuucaacuggau

SEQ ID NO: 2248654 - RNA, 19 nt, Artificial Sequence
  Description of Artificial Sequence: Synthetic oligonucleotide
gucuuugcacugugggagc

SEQ ID NO: 2248655 - RNA, 19 nt, Artificial Sequence
  Description of Artificial Sequence: Synthetic oligonucleotide
uauagguagcuugcuuuuc

SEQ ID NO: 2248656 - RNA, 19 nt, Artificial Sequence
  Description of Artificial Sequence: Synthetic oligonucleotide
guguucucuucaaacuacc

SEQ ID NO: 2248657 - RNA, 19 nt, Artificial Sequence
  Description of Artificial Sequence: Synthetic oligonucleotide
ugguaccagaaugaacagu

SEQ ID NO: 2248658 - RNA, 19 nt, Artificial Sequence
  Description of Artificial Sequence: Synthetic oligonucleotide
gcuuccaucaauaaacucu

SEQ ID NO: 2248659 - RNA, 19 nt, Artificial Sequence
  Description of Artificial Sequence: Synthetic oligonucleotide
uugccacuugcauguuucc

SEQ ID NO: 2248660 - RNA, 19 nt, Artificial Sequence
  Description of Artificial Sequence: Synthetic oligonucleotide
aaacuaccugugguaccag

SEQ ID NO: 2248661 - RNA, 19 nt, Artificial Sequence
  Description of Artificial Sequence: Synthetic oligonucleotide
ccuaagaacaauccaggca

SEQ ID NO: 2248662 - RNA, 19 nt, Artificial Sequence
  Description of Artificial Sequence: Synthetic oligonucleotide
uuugcacugugggagcgaa

SEQ ID NO: 2248663 - RNA, 19 nt, Artificial Sequence
  Description of Artificial Sequence: Synthetic oligonucleotide
ucucagaggucagccauuc

SEQ ID NO: 2248664 - RNA, 19 nt, Artificial Sequence
  Description of Artificial Sequence: Synthetic oligonucleotide
cguaugcaaauuauaugag

SEQ ID NO: 2248665 - RNA, 19 nt, Artificial Sequence
  Description of Artificial Sequence: Synthetic oligonucleotide
caguuaaggaucuuucuau

SEQ ID NO: 2248666 - RNA, 19 nt, Artificial Sequence
  Description of Artificial Sequence: Synthetic oligonucleotide
cauaagcaaacgcaucucu

SEQ ID NO: 2248667 - RNA, 19 nt, Artificial Sequence
  Description of Artificial Sequence: Synthetic oligonucleotide
gccuaagaacaauccaggc

SEQ ID NO: 2248668 - RNA, 19 nt, Artificial Sequence
  Description of Artificial Sequence: Synthetic oligonucleotide
uguuuucaacuggauuauc

SEQ ID NO: 2248669 - RNA, 19 nt, Artificial Sequence
  Description of Artificial Sequence: Synthetic oligonucleotide
agaagaguaugggccuaag

SEQ ID NO: 2248670 - RNA, 19 nt, Artificial Sequence
  Description of Artificial Sequence: Synthetic oligonucleotide
gcguauuauguuuucaacu

SEQ ID NO: 2248671 - RNA, 19 nt, Artificial Sequence
  Description of Artificial Sequence: Synthetic oligonucleotide
accugugguaccagaauga

SEQ ID NO: 2248672 - RNA, 19 nt, Artificial Sequence
  Description of Artificial Sequence: Synthetic oligonucleotide
cugcaauauccaaaacuaa

SEQ ID NO: 2248673 - RNA, 19 nt, Artificial Sequence
  Description of Artificial Sequence: Synthetic oligonucleotide
cuccauggucccagggccc

SEQ ID NO: 2248674 - RNA, 19 nt, Artificial Sequence
  Description of Artificial Sequence: Synthetic oligonucleotide
gcacucggagaccacgggg

SEQ ID NO: 2248675 - RNA, 19 nt, Artificial Sequence
  Description of Artificial Sequence: Synthetic oligonucleotide
agaugccugcauucccaug

SEQ ID NO: 2248676 - RNA, 19 nt, Artificial Sequence
  Description of Artificial Sequence: Synthetic oligonucleotide
cucuuuagucauagggaaa

SEQ ID NO: 2248677 - RNA, 19 nt, Artificial Sequence
  Description of Artificial Sequence: Synthetic oligonucleotide
acuaccugugguaccagaa

SEQ ID NO: 2248678 - RNA, 19 nt, Artificial Sequence
  Description of Artificial Sequence: Synthetic oligonucleotide
cauauuccugaagcuggug

SEQ ID NO: 2248679 - RNA, 19 nt, Artificial Sequence
  Description of Artificial Sequence: Synthetic oligonucleotide
caucucccgucucauagga

SEQ ID NO: 2248680 - RNA, 19 nt, Artificial Sequence
  Description of Artificial Sequence: Synthetic oligonucleotide
gacggggcaccgccggccg

SEQ ID NO: 2248681 - RNA, 19 nt, Artificial Sequence
  Description of Artificial Sequence: Synthetic oligonucleotide
caugucuggaagcaacaua

SEQ ID NO: 2248682 - RNA, 19 nt, Artificial Sequence
  Description of Artificial Sequence: Synthetic oligonucleotide
cuaaguagauggcuucaua

SEQ ID NO: 2248683 - RNA, 19 nt, Artificial Sequence
  Description of Artificial Sequence: Synthetic oligonucleotide
ccaaaacuaaguaucuaaa

SEQ ID NO: 2248684 - RNA, 19 nt, Artificial Sequence
  Description of Artificial Sequence: Synthetic oligonucleotide
uccucggcguagucuuugc

SEQ ID NO: 2248685 - RNA, 19 nt, Artificial Sequence
  Description of Artificial Sequence: Synthetic oligonucleotide
aaaccagcauuaggauuaa

SEQ ID NO: 2248686 - RNA, 19 nt, Artificial Sequence
  Description of Artificial Sequence: Synthetic oligonucleotide
gcaauaacgaaggcagcac

SEQ ID NO: 2248687 - RNA, 19 nt, Artificial Sequence
  Description of Artificial Sequence: Synthetic oligonucleotide
cgaaggaaacuccagcuuc

SEQ ID NO: 2248688 - RNA, 19 nt, Artificial Sequence
  Description of Artificial Sequence: Synthetic oligonucleotide
ggagcgaaggaaacuccag

SEQ ID NO: 2248689 - RNA, 19 nt, Artificial Sequence
  Description of Artificial Sequence: Synthetic oligonucleotide
cuguauuguuaauuuugcu

SEQ ID NO: 2248690 - RNA, 19 nt, Artificial Sequence
  Description of Artificial Sequence: Synthetic oligonucleotide
caauaacgaaggcagcacu

SEQ ID NO: 2248691 - RNA, 19 nt, Artificial Sequence
  Description of Artificial Sequence: Synthetic oligonucleotide
guaauauagguagcuugcu

SEQ ID NO: 2248692 - RNA, 19 nt, Artificial Sequence
  Description of Artificial Sequence: Synthetic oligonucleotide
cucggagaccacggggucc

SEQ ID NO: 2248693 - RNA, 19 nt, Artificial Sequence
  Description of Artificial Sequence: Synthetic oligonucleotide
ucccgucucauaggauaag

SEQ ID NO: 2248694 - RNA, 19 nt, Artificial Sequence
  Description of Artificial Sequence: Synthetic oligonucleotide
cagcacuucuggagaugcc

SEQ ID NO: 2248695 - RNA, 19 nt, Artificial Sequence
  Description of Artificial Sequence: Synthetic oligonucleotide
gcaaauuauaugaguuauc

SEQ ID NO: 2248696 - RNA, 19 nt, Artificial Sequence
  Description of Artificial Sequence: Synthetic oligonucleotide
aguaugggccuaagaacaa

SEQ ID NO: 2248697 - RNA, 19 nt, Artificial Sequence
  Description of Artificial Sequence: Synthetic oligonucleotide
ccaggcaaaacuuccugca

SEQ ID NO: 2248698 - RNA, 19 nt, Artificial Sequence
  Description of Artificial Sequence: Synthetic oligonucleotide
gccacuugcauguuuccaa

SEQ ID NO: 2248699 - RNA, 19 nt, Artificial Sequence
  Description of Artificial Sequence: Synthetic oligonucleotide
ggacauaagcaaacgcauc

SEQ ID NO: 2248700 - RNA, 19 nt, Artificial Sequence
  Description of Artificial Sequence: Synthetic oligonucleotide
gcaaacgcaucucuguacu

SEQ ID NO: 2248701 - RNA, 19 nt, Artificial Sequence
  Description of Artificial Sequence: Synthetic oligonucleotide
gcuucaauauuuugccgua

SEQ ID NO: 2248702 - RNA, 19 nt, Artificial Sequence
  Description of Artificial Sequence: Synthetic oligonucleotide
cucccgucucauaggauaa

SEQ ID NO: 2248703 - RNA, 19 nt, Artificial Sequence
  Description of Artificial Sequence: Synthetic oligonucleotide
ggagaugccugcauuccca

SEQ ID NO: 2248704 - RNA, 19 nt, Artificial Sequence
  Description of Artificial Sequence: Synthetic oligonucleotide
uccacuccucggcguaguc

SEQ ID NO: 2248705 - RNA, 19 nt, Artificial Sequence
  Description of Artificial Sequence: Synthetic oligonucleotide
cacucggagaccacggggu

SEQ ID NO: 2248706 - RNA, 19 nt, Artificial Sequence
  Description of Artificial Sequence: Synthetic oligonucleotide
ugcugcggccgucucccuc

SEQ ID NO: 2248707 - RNA, 19 nt, Artificial Sequence
  Description of Artificial Sequence: Synthetic oligonucleotide
ggggcugacgcgcggcggg

SEQ ID NO: 2248708 - RNA, 19 nt, Artificial Sequence
  Description of Artificial Sequence: Synthetic oligonucleotide
auuuugccguaugcaaauu

SEQ ID NO: 2248709 - RNA, 19 nt, Artificial Sequence
  Description of Artificial Sequence: Synthetic oligonucleotide
cuccucggcguagucuuug

SEQ ID NO: 2248710 - RNA, 19 nt, Artificial Sequence
  Description of Artificial Sequence: Synthetic oligonucleotide
acggggcaccgccggccgc

SEQ ID NO: 2248711 - RNA, 19 nt, Artificial Sequence
  Description of Artificial Sequence: Synthetic oligonucleotide
gcugcaacaggaaggcgga

SEQ ID NO: 2248712 - RNA, 19 nt, Artificial Sequence
  Description of Artificial Sequence: Synthetic oligonucleotide
caauugcugaaaguuuggu

SEQ ID NO: 2248713 - RNA, 19 nt, Artificial Sequence
  Description of Artificial Sequence: Synthetic oligonucleotide
gcggcgggcucacagcgag

SEQ ID NO: 2248714 - RNA, 19 nt, Artificial Sequence
  Description of Artificial Sequence: Synthetic oligonucleotide
gcguagucuuugcacugug

SEQ ID NO: 2248715 - RNA, 19 nt, Artificial Sequence
  Description of Artificial Sequence: Synthetic oligonucleotide
gggagcgaaggaaacucca

SEQ ID NO: 2248716 - RNA, 19 nt, Artificial Sequence
  Description of Artificial Sequence: Synthetic oligonucleotide
guaccagaaugaacaguua

SEQ ID NO: 2248717 - RNA, 19 nt, Artificial Sequence
  Description of Artificial Sequence: Synthetic oligonucleotide
augaacaguuaaggaucuu

SEQ ID NO: 2248718 - RNA, 19 nt, Artificial Sequence
  Description of Artificial Sequence: Synthetic oligonucleotide
cuuugcacugugggagcga

SEQ ID NO: 2248719 - RNA, 19 nt, Artificial Sequence
  Description of Artificial Sequence: Synthetic oligonucleotide
cugcaacaggaaggcggag

SEQ ID NO: 2248720 - RNA, 19 nt, Artificial Sequence
  Description of Artificial Sequence: Synthetic oligonucleotide
cgagcacucggagaccacg

SEQ ID NO: 2248721 - RNA, 19 nt, Artificial Sequence
  Description of Artificial Sequence: Synthetic oligonucleotide
gcauuaggauuaauacaaa

SEQ ID NO: 2248722 - RNA, 19 nt, Artificial Sequence
  Description of Artificial Sequence: Synthetic oligonucleotide
ggcgggcucacagcgagca

SEQ ID NO: 2248723 - RNA, 19 nt, Artificial Sequence
  Description of Artificial Sequence: Synthetic oligonucleotide
cagaagaguaugggccuaa

SEQ ID NO: 2248724 - RNA, 19 nt, Artificial Sequence
  Description of Artificial Sequence: Synthetic oligonucleotide
caggcaaaacuuccugcau

SEQ ID NO: 2248725 - RNA, 19 nt, Artificial Sequence
  Description of Artificial Sequence: Synthetic oligonucleotide
ggcgggugggcgcggcgcg

SEQ ID NO: 2248726 - RNA, 19 nt, Artificial Sequence
  Description of Artificial Sequence: Synthetic oligonucleotide
aucuccuuucuuggacaua

SEQ ID NO: 2248727 - RNA, 19 nt, Artificial Sequence
  Description of Artificial Sequence: Synthetic oligonucleotide
guaugggccuaagaacaau

SEQ ID NO: 2248728 - RNA, 19 nt, Artificial Sequence
  Description of Artificial Sequence: Synthetic oligonucleotide
caagaacuuuuccuccauu

SEQ ID NO: 2248729 - RNA, 19 nt, Artificial Sequence
  Description of Artificial Sequence: Synthetic oligonucleotide
cuucuggagaugccugcau

SEQ ID NO: 2248730 - RNA, 19 nt, Artificial Sequence
  Description of Artificial Sequence: Synthetic oligonucleotide
aucucccgucucauaggau

SEQ ID NO: 2248731 - RNA, 19 nt, Artificial Sequence
  Description of Artificial Sequence: Synthetic oligonucleotide
ggcucacagcgagcacucg

SEQ ID NO: 2248732 - RNA, 19 nt, Artificial Sequence
  Description of Artificial Sequence: Synthetic oligonucleotide
caaacgcaucucuguacuu

SEQ ID NO: 2248733 - RNA, 19 nt, Artificial Sequence
  Description of Artificial Sequence: Synthetic oligonucleotide
acgcaucucuguacuucau

SEQ ID NO: 2248734 - RNA, 19 nt, Artificial Sequence
  Description of Artificial Sequence: Synthetic oligonucleotide
cacgggguccuggcagcug

SEQ ID NO: 2248735 - RNA, 19 nt, Artificial Sequence
  Description of Artificial Sequence: Synthetic oligonucleotide
cggcguagucuuugcacug

SEQ ID NO: 2248736 - RNA, 19 nt, Artificial Sequence
  Description of Artificial Sequence: Synthetic oligonucleotide
cugcaucucccgucucaua

SEQ ID NO: 2248737 - RNA, 19 nt, Artificial Sequence
  Description of Artificial Sequence: Synthetic oligonucleotide
gcuaaguagauggcuucau

SEQ ID NO: 2248738 - RNA, 19 nt, Artificial Sequence
  Description of Artificial Sequence: Synthetic oligonucleotide
augcugcggccgucucccu

SEQ ID NO: 2248739 - RNA, 19 nt, Artificial Sequence
  Description of Artificial Sequence: Synthetic oligonucleotide
cucagaggucagccauucu

SEQ ID NO: 2248740 - RNA, 19 nt, Artificial Sequence
  Description of Artificial Sequence: Synthetic oligonucleotide
ggcguagucuuugcacugu

SEQ ID NO: 2248741 - RNA, 19 nt, Artificial Sequence
  Description of Artificial Sequence: Synthetic oligonucleotide
ggccccggcgggugggcgc

SEQ ID NO: 2248742 - RNA, 19 nt, Artificial Sequence
  Description of Artificial Sequence: Synthetic oligonucleotide
gcugaaaguuugguuuaau

SEQ ID NO: 2248743 - RNA, 19 nt, Artificial Sequence
  Description of Artificial Sequence: Synthetic oligonucleotide
cugacgcgcggcgggcuca

SEQ ID NO: 2248744 - RNA, 19 nt, Artificial Sequence
  Description of Artificial Sequence: Synthetic oligonucleotide
cgaaggcagcacuucugga

SEQ ID NO: 2248745 - RNA, 19 nt, Artificial Sequence
  Description of Artificial Sequence: Synthetic oligonucleotide
gugggcgcggcgcggggcu

SEQ ID NO: 2248746 - RNA, 19 nt, Artificial Sequence
  Description of Artificial Sequence: Synthetic oligonucleotide
acuccucggcguagucuuu

SEQ ID NO: 2248747 - RNA, 19 nt, Artificial Sequence
  Description of Artificial Sequence: Synthetic oligonucleotide
ccucggcguagucuuugca

SEQ ID NO: 2248748 - RNA, 19 nt, Artificial Sequence
  Description of Artificial Sequence: Synthetic oligonucleotide
cgcgcggcgggcucacagc

SEQ ID NO: 2248749 - RNA, 19 nt, Artificial Sequence
  Description of Artificial Sequence: Synthetic oligonucleotide
gccccggcgggugggcgcg

SEQ ID NO: 2248750 - RNA, 19 nt, Artificial Sequence
  Description of Artificial Sequence: Synthetic oligonucleotide
guccacuccucggcguagu

SEQ ID NO: 2248751 - RNA, 19 nt, Artificial Sequence
  Description of Artificial Sequence: Synthetic oligonucleotide
gcgggcucacagcgagcac

SEQ ID NO: 2248752 - RNA, 19 nt, Artificial Sequence
  Description of Artificial Sequence: Synthetic oligonucleotide
gggcugacgcgcggcgggc

SEQ ID NO: 2248753 - RNA, 19 nt, Artificial Sequence
  Description of Artificial Sequence: Synthetic oligonucleotide
cccgucucauaggauaagu

SEQ ID NO: 2248754 - RNA, 19 nt, Artificial Sequence
  Description of Artificial Sequence: Synthetic oligonucleotide
ccggcgggugggcgcggcg

SEQ ID NO: 2248755 - RNA, 19 nt, Artificial Sequence
  Description of Artificial Sequence: Synthetic oligonucleotide
gacgcgcggcgggcucaca

SEQ ID NO: 2248756 - RNA, 19 nt, Artificial Sequence
  Description of Artificial Sequence: Synthetic oligonucleotide
cggggcaccgccggccgcc

SEQ ID NO: 2248757 - RNA, 19 nt, Artificial Sequence
  Description of Artificial Sequence: Synthetic oligonucleotide
cgggcucacagcgagcacu

SEQ ID NO: 2248758 - RNA, 19 nt, Artificial Sequence
  Description of Artificial Sequence: Synthetic oligonucleotide
cggcgggcucacagcgagc

SEQ ID NO: 2248759 - RNA, 19 nt, Artificial Sequence
  Description of Artificial Sequence: Synthetic oligonucleotide
ggcugacgcgcggcgggcu

SEQ ID NO: 2248760 - RNA, 19 nt, Artificial Sequence
  Description of Artificial Sequence: Synthetic oligonucleotide
gggcgcggcgcggggcuga

SEQ ID NO: 2248761 - RNA, 19 nt, Artificial Sequence
  Description of Artificial Sequence: Synthetic oligonucleotide
ggcgcggcgcggggcugac

SEQ ID NO: 2248762 - RNA, 19 nt, Artificial Sequence
  Description of Artificial Sequence: Synthetic oligonucleotide
gcgcggcgcggggcugacg

SEQ ID NO: 2248763 - RNA, 19 nt, Artificial Sequence
  Description of Artificial Sequence: Synthetic oligonucleotide
ggggcaccgccggccgcca

SEQ ID NO: 2248764 - RNA, 19 nt, Artificial Sequence
  Description of Artificial Sequence: Synthetic oligonucleotide
ccacgggguccuggcagcu

SEQ ID NO: 2248765 - RNA, 19 nt, Artificial Sequence
  Description of Artificial Sequence: Synthetic oligonucleotide
aaaguaaaugauuuaaugg

SEQ ID NO: 2248766 - RNA, 19 nt, Artificial Sequence
  Description of Artificial Sequence: Synthetic oligonucleotide
aauaauuguagauaaaaug

SEQ ID NO: 2248767 - RNA, 19 nt, Artificial Sequence
  Description of Artificial Sequence: Synthetic oligonucleotide
uuugaaauuauuauuacgc

SEQ ID NO: 2248768 - RNA, 19 nt, Artificial Sequence
  Description of Artificial Sequence: Synthetic oligonucleotide
uauacuaaaauaauuguag

SEQ ID NO: 2248769 - RNA, 19 nt, Artificial Sequence
  Description of Artificial Sequence: Synthetic oligonucleotide
auuauuacgccacauauac

SEQ ID NO: 2248770 - RNA, 19 nt, Artificial Sequence
  Description of Artificial Sequence: Synthetic oligonucleotide
uguacaacaagcauaaugc

SEQ ID NO: 2248771 - RNA, 19 nt, Artificial Sequence
  Description of Artificial Sequence: Synthetic oligonucleotide
auaauuguagauaaaaugc

SEQ ID NO: 2248772 - RNA, 19 nt, Artificial Sequence
  Description of Artificial Sequence: Synthetic oligonucleotide
uugucauauaccaauaugg

SEQ ID NO: 2248773 - RNA, 19 nt, Artificial Sequence
  Description of Artificial Sequence: Synthetic oligonucleotide
ucauauagaguaaacaucc

SEQ ID NO: 2248774 - RNA, 19 nt, Artificial Sequence
  Description of Artificial Sequence: Synthetic oligonucleotide
aauuugaaauuauuauuac

SEQ ID NO: 2248775 - RNA, 19 nt, Artificial Sequence
  Description of Artificial Sequence: Synthetic oligonucleotide
uauauguaaaaguaaauga

SEQ ID NO: 2248776 - RNA, 19 nt, Artificial Sequence
  Description of Artificial Sequence: Synthetic oligonucleotide
caugacaucaaucugaaag

SEQ ID NO: 2248777 - RNA, 19 nt, Artificial Sequence
  Description of Artificial Sequence: Synthetic oligonucleotide
aaacaaugaaacaauauuc

SEQ ID NO: 2248778 - RNA, 19 nt, Artificial Sequence
  Description of Artificial Sequence: Synthetic oligonucleotide
aaagucaacauguuugcuc

SEQ ID NO: 2248779 - RNA, 19 nt, Artificial Sequence
  Description of Artificial Sequence: Synthetic oligonucleotide
aaugccaucugauucuuac

SEQ ID NO: 2248780 - RNA, 19 nt, Artificial Sequence
  Description of Artificial Sequence: Synthetic oligonucleotide
acaauauucauauagagua

SEQ ID NO: 2248781 - RNA, 19 nt, Artificial Sequence
  Description of Artificial Sequence: Synthetic oligonucleotide
ugauuuaauggcuauaagc

SEQ ID NO: 2248782 - RNA, 19 nt, Artificial Sequence
  Description of Artificial Sequence: Synthetic oligonucleotide
uuuaauggcuauaagcaag

SEQ ID NO: 2248783 - RNA, 19 nt, Artificial Sequence
  Description of Artificial Sequence: Synthetic oligonucleotide
uucuuuuacaaguuggccg

SEQ ID NO: 2248784 - RNA, 19 nt, Artificial Sequence
  Description of Artificial Sequence: Synthetic oligonucleotide
uauagaguaaacauccuca

SEQ ID NO: 2248785 - RNA, 19 nt, Artificial Sequence
  Description of Artificial Sequence: Synthetic oligonucleotide
auaguaauccuuuaaaggu

SEQ ID NO: 2248786 - RNA, 19 nt, Artificial Sequence
  Description of Artificial Sequence: Synthetic oligonucleotide
uuacaaaaguuauugauga

SEQ ID NO: 2248787 - RNA, 19 nt, Artificial Sequence
  Description of Artificial Sequence: Synthetic oligonucleotide
acuaaguucgaccagagca

SEQ ID NO: 2248788 - RNA, 19 nt, Artificial Sequence
  Description of Artificial Sequence: Synthetic oligonucleotide
uguauuucaaaggaagugg

SEQ ID NO: 2248789 - RNA, 19 nt, Artificial Sequence
  Description of Artificial Sequence: Synthetic oligonucleotide
auuugaaauuauuauuacg

SEQ ID NO: 2248790 - RNA, 19 nt, Artificial Sequence
  Description of Artificial Sequence: Synthetic oligonucleotide
agaaauagaauugugcuuc

SEQ ID NO: 2248791 - RNA, 19 nt, Artificial Sequence
  Description of Artificial Sequence: Synthetic oligonucleotide
ucauacaugacaucaaucu

SEQ ID NO: 2248792 - RNA, 19 nt, Artificial Sequence
  Description of Artificial Sequence: Synthetic oligonucleotide
ucuucauucuuuuacaagu

SEQ ID NO: 2248793 - RNA, 19 nt, Artificial Sequence
  Description of Artificial Sequence: Synthetic oligonucleotide
ucaaucugaaaguauuagg

SEQ ID NO: 2248794 - RNA, 19 nt, Artificial Sequence
  Description of Artificial Sequence: Synthetic oligonucleotide
ucauauuugaaagucaaca

SEQ ID NO: 2248795 - RNA, 19 nt, Artificial Sequence
  Description of Artificial Sequence: Synthetic oligonucleotide
aauauggcauuguacaaca

SEQ ID NO: 2248796 - RNA, 19 nt, Artificial Sequence
  Description of Artificial Sequence: Synthetic oligonucleotide
auuuucgaggucuacuggc

SEQ ID NO: 2248797 - RNA, 19 nt, Artificial Sequence
  Description of Artificial Sequence: Synthetic oligonucleotide
auaaauugcuucuguuucc

SEQ ID NO: 2248798 - RNA, 19 nt, Artificial Sequence
  Description of Artificial Sequence: Synthetic oligonucleotide
aacgauagaugaugaacac

SEQ ID NO: 2248799 - RNA, 19 nt, Artificial Sequence
  Description of Artificial Sequence: Synthetic oligonucleotide
gauuuaauggcuauaagca

SEQ ID NO: 2248800 - RNA, 19 nt, Artificial Sequence
  Description of Artificial Sequence: Synthetic oligonucleotide
ugaaauuauuauuacgcca

SEQ ID NO: 2248801 - RNA, 19 nt, Artificial Sequence
  Description of Artificial Sequence: Synthetic oligonucleotide
aaggcagauaccuuuaacu

SEQ ID NO: 2248802 - RNA, 19 nt, Artificial Sequence
  Description of Artificial Sequence: Synthetic oligonucleotide
ugacauuacagaaaaggca

SEQ ID NO: 2248803 - RNA, 19 nt, Artificial Sequence
  Description of Artificial Sequence: Synthetic oligonucleotide
uuauuauuacgccacauau

SEQ ID NO: 2248804 - RNA, 19 nt, Artificial Sequence
  Description of Artificial Sequence: Synthetic oligonucleotide
uuugucauauaccaauaug

SEQ ID NO: 2248805 - RNA, 19 nt, Artificial Sequence
  Description of Artificial Sequence: Synthetic oligonucleotide
auagaauugugcuucuuuc

SEQ ID NO: 2248806 - RNA, 19 nt, Artificial Sequence
  Description of Artificial Sequence: Synthetic oligonucleotide
uaauuguagauaaaaugcu

SEQ ID NO: 2248807 - RNA, 19 nt, Artificial Sequence
  Description of Artificial Sequence: Synthetic oligonucleotide
uaucuuuuaucauucaccu

SEQ ID NO: 2248808 - RNA, 19 nt, Artificial Sequence
  Description of Artificial Sequence: Synthetic oligonucleotide
auauuugaaagucaacaug

SEQ ID NO: 2248809 - RNA, 19 nt, Artificial Sequence
  Description of Artificial Sequence: Synthetic oligonucleotide
auauagaguaaacauccuc

SEQ ID NO: 2248810 - RNA, 19 nt, Artificial Sequence
  Description of Artificial Sequence: Synthetic oligonucleotide
accaauauggcauuguaca

SEQ ID NO: 2248811 - RNA, 19 nt, Artificial Sequence
  Description of Artificial Sequence: Synthetic oligonucleotide
uuagguauguccauuuuac

SEQ ID NO: 2248812 - RNA, 19 nt, Artificial Sequence
  Description of Artificial Sequence: Synthetic oligonucleotide
augaugaacacacacuaag

SEQ ID NO: 2248813 - RNA, 19 nt, Artificial Sequence
  Description of Artificial Sequence: Synthetic oligonucleotide
uaaagguuccucuucauac

SEQ ID NO: 2248814 - RNA, 19 nt, Artificial Sequence
  Description of Artificial Sequence: Synthetic oligonucleotide
gaaauuauuauuacgccac

SEQ ID NO: 2248815 - RNA, 19 nt, Artificial Sequence
  Description of Artificial Sequence: Synthetic oligonucleotide
uugaaauuauuauuacgcc

SEQ ID NO: 2248816 - RNA, 19 nt, Artificial Sequence
  Description of Artificial Sequence: Synthetic oligonucleotide
uauuacgccacauauacua

SEQ ID NO: 2248817 - RNA, 19 nt, Artificial Sequence
  Description of Artificial Sequence: Synthetic oligonucleotide
ucuuacaaaaguuauugau

SEQ ID NO: 2248818 - RNA, 19 nt, Artificial Sequence
  Description of Artificial Sequence: Synthetic oligonucleotide
uucauauagaguaaacauc

SEQ ID NO: 2248819 - RNA, 19 nt, Artificial Sequence
  Description of Artificial Sequence: Synthetic oligonucleotide
guauaguaauccuuuaaag

SEQ ID NO: 2248820 - RNA, 19 nt, Artificial Sequence
  Description of Artificial Sequence: Synthetic oligonucleotide
ucguaaguaucuuuuauca

SEQ ID NO: 2248821 - RNA, 19 nt, Artificial Sequence
  Description of Artificial Sequence: Synthetic oligonucleotide
agguauguccauuuuacuc

SEQ ID NO: 2248822 - RNA, 19 nt, Artificial Sequence
  Description of Artificial Sequence: Synthetic oligonucleotide
agaguaaacauccucacaa

SEQ ID NO: 2248823 - RNA, 19 nt, Artificial Sequence
  Description of Artificial Sequence: Synthetic oligonucleotide
gauaccuuuaacuaugaaa

SEQ ID NO: 2248824 - RNA, 19 nt, Artificial Sequence
  Description of Artificial Sequence: Synthetic oligonucleotide
auagaguaaacauccucac

SEQ ID NO: 2248825 - RNA, 19 nt, Artificial Sequence
  Description of Artificial Sequence: Synthetic oligonucleotide
acacacacuaaguucgacc

SEQ ID NO: 2248826 - RNA, 19 nt, Artificial Sequence
  Description of Artificial Sequence: Synthetic oligonucleotide
auuuuacuccuugagaaac

SEQ ID NO: 2248827 - RNA, 19 nt, Artificial Sequence
  Description of Artificial Sequence: Synthetic oligonucleotide
aauugugcuucuuucccag

SEQ ID NO: 2248828 - RNA, 19 nt, Artificial Sequence
  Description of Artificial Sequence: Synthetic oligonucleotide
aaaguauuagguaugucca

SEQ ID NO: 2248829 - RNA, 19 nt, Artificial Sequence
  Description of Artificial Sequence: Synthetic oligonucleotide
uacaacaagcauaaugcca

SEQ ID NO: 2248830 - RNA, 19 nt, Artificial Sequence
  Description of Artificial Sequence: Synthetic oligonucleotide
ucuuuuacaaguuggccga

SEQ ID NO: 2248831 - RNA, 19 nt, Artificial Sequence
  Description of Artificial Sequence: Synthetic oligonucleotide
cugacauuacagaaaaggc

SEQ ID NO: 2248832 - RNA, 19 nt, Artificial Sequence
  Description of Artificial Sequence: Synthetic oligonucleotide
aauggcuauaagcaagaca

SEQ ID NO: 2248833 - RNA, 19 nt, Artificial Sequence
  Description of Artificial Sequence: Synthetic oligonucleotide
ucugaaaguauuagguaug

SEQ ID NO: 2248834 - RNA, 19 nt, Artificial Sequence
  Description of Artificial Sequence: Synthetic oligonucleotide
uaacuaugaaaacaacucu

SEQ ID NO: 2248835 - RNA, 19 nt, Artificial Sequence
  Description of Artificial Sequence: Synthetic oligonucleotide
uaaguaucuuuuaucauuc

SEQ ID NO: 2248836 - RNA, 19 nt, Artificial Sequence
  Description of Artificial Sequence: Synthetic oligonucleotide
aucguaaguaucuuuuauc

SEQ ID NO: 2248837 - RNA, 19 nt, Artificial Sequence
  Description of Artificial Sequence: Synthetic oligonucleotide
ucuccagguauaaauguag

SEQ ID NO: 2248838 - RNA, 19 nt, Artificial Sequence
  Description of Artificial Sequence: Synthetic oligonucleotide
guaaacauccucacaaacg

SEQ ID NO: 2248839 - RNA, 19 nt, Artificial Sequence
  Description of Artificial Sequence: Synthetic oligonucleotide
aaacgauagaugaugaaca

SEQ ID NO: 2248840 - RNA, 19 nt, Artificial Sequence
  Description of Artificial Sequence: Synthetic oligonucleotide
uguagaaacucauaauaaa

SEQ ID NO: 2248841 - RNA, 19 nt, Artificial Sequence
  Description of Artificial Sequence: Synthetic oligonucleotide
aauagaauugugcuucuuu

SEQ ID NO: 2248842 - RNA, 19 nt, Artificial Sequence
  Description of Artificial Sequence: Synthetic oligonucleotide
ugggcagacaagaagaggu

SEQ ID NO: 2248843 - RNA, 19 nt, Artificial Sequence
  Description of Artificial Sequence: Synthetic oligonucleotide
aaggaagugggccauuucu

SEQ ID NO: 2248844 - RNA, 19 nt, Artificial Sequence
  Description of Artificial Sequence: Synthetic oligonucleotide
auucuuuuacaaguuggcc

SEQ ID NO: 2248845 - RNA, 19 nt, Artificial Sequence
  Description of Artificial Sequence: Synthetic oligonucleotide
ucccauacaaacaaugaaa

SEQ ID NO: 2248846 - RNA, 19 nt, Artificial Sequence
  Description of Artificial Sequence: Synthetic oligonucleotide
ugauuuucgaggucuacug

SEQ ID NO: 2248847 - RNA, 19 nt, Artificial Sequence
  Description of Artificial Sequence: Synthetic oligonucleotide
auggcuauaagcaagacaa

SEQ ID NO: 2248848 - RNA, 19 nt, Artificial Sequence
  Description of Artificial Sequence: Synthetic oligonucleotide
uuucccauacaaacaauga

SEQ ID NO: 2248849 - RNA, 19 nt, Artificial Sequence
  Description of Artificial Sequence: Synthetic oligonucleotide
aacauguuugcucuguuua

SEQ ID NO: 2248850 - RNA, 19 nt, Artificial Sequence
  Description of Artificial Sequence: Synthetic oligonucleotide
ugauucuuacaaaaguuau

SEQ ID NO: 2248851 - RNA, 19 nt, Artificial Sequence
  Description of Artificial Sequence: Synthetic oligonucleotide
uagaaacucauaauaaauu

SEQ ID NO: 2248852 - RNA, 19 nt, Artificial Sequence
  Description of Artificial Sequence: Synthetic oligonucleotide
aguucgaccagagcaaagc

SEQ ID NO: 2248853 - RNA, 19 nt, Artificial Sequence
  Description of Artificial Sequence: Synthetic oligonucleotide
auuaguguauaguaauccu

SEQ ID NO: 2248854 - RNA, 19 nt, Artificial Sequence
  Description of Artificial Sequence: Synthetic oligonucleotide
aagauuggugguuaccacu

SEQ ID NO: 2248855 - RNA, 19 nt, Artificial Sequence
  Description of Artificial Sequence: Synthetic oligonucleotide
uccauuuuacuccuugaga

SEQ ID NO: 2248856 - RNA, 19 nt, Artificial Sequence
  Description of Artificial Sequence: Synthetic oligonucleotide
ggcaaaggaagauuggugg

SEQ ID NO: 2248857 - RNA, 19 nt, Artificial Sequence
  Description of Artificial Sequence: Synthetic oligonucleotide
ugucaguccaucucucugg

SEQ ID NO: 2248858 - RNA, 19 nt, Artificial Sequence
  Description of Artificial Sequence: Synthetic oligonucleotide
gguauguccauuuuacucc

SEQ ID NO: 2248859 - RNA, 19 nt, Artificial Sequence
  Description of Artificial Sequence: Synthetic oligonucleotide
cauuaguguauaguaaucc

SEQ ID NO: 2248860 - RNA, 19 nt, Artificial Sequence
  Description of Artificial Sequence: Synthetic oligonucleotide
aaucugaaaguauuaggua

SEQ ID NO: 2248861 - RNA, 19 nt, Artificial Sequence
  Description of Artificial Sequence: Synthetic oligonucleotide
ucacaaacgauagaugaug

SEQ ID NO: 2248862 - RNA, 19 nt, Artificial Sequence
  Description of Artificial Sequence: Synthetic oligonucleotide
uuuacaaguuggccgaacu

SEQ ID NO: 2248863 - RNA, 19 nt, Artificial Sequence
  Description of Artificial Sequence: Synthetic oligonucleotide
acuaaaauaauuguagaua

SEQ ID NO: 2248864 - RNA, 19 nt, Artificial Sequence
  Description of Artificial Sequence: Synthetic oligonucleotide
augacaucaaucugaaagu

SEQ ID NO: 2248865 - RNA, 19 nt, Artificial Sequence
  Description of Artificial Sequence: Synthetic oligonucleotide
ucauucauauuugaaaguc

SEQ ID NO: 2248866 - RNA, 19 nt, Artificial Sequence
  Description of Artificial Sequence: Synthetic oligonucleotide
gauuuucgaggucuacugg

SEQ ID NO: 2248867 - RNA, 19 nt, Artificial Sequence
  Description of Artificial Sequence: Synthetic oligonucleotide
aaauuauuauuacgccaca

SEQ ID NO: 2248868 - RNA, 19 nt, Artificial Sequence
  Description of Artificial Sequence: Synthetic oligonucleotide
guuccauucauaguacugg

SEQ ID NO: 2248869 - RNA, 19 nt, Artificial Sequence
  Description of Artificial Sequence: Synthetic oligonucleotide
uguccauuaguguauagua

SEQ ID NO: 2248870 - RNA, 19 nt, Artificial Sequence
  Description of Artificial Sequence: Synthetic oligonucleotide
uuggugguuaccacugggg

SEQ ID NO: 2248871 - RNA, 19 nt, Artificial Sequence
  Description of Artificial Sequence: Synthetic oligonucleotide
uagaauugugcuucuuucc

SEQ ID NO: 2248872 - RNA, 19 nt, Artificial Sequence
  Description of Artificial Sequence: Synthetic oligonucleotide
uccauuaguguauaguaau

SEQ ID NO: 2248873 - RNA, 19 nt, Artificial Sequence
  Description of Artificial Sequence: Synthetic oligonucleotide
ugcuuagcuacaauuuccc

SEQ ID NO: 2248874 - RNA, 19 nt, Artificial Sequence
  Description of Artificial Sequence: Synthetic oligonucleotide
ucgaccagagcaaagcaga

SEQ ID NO: 2248875 - RNA, 19 nt, Artificial Sequence
  Description of Artificial Sequence: Synthetic oligonucleotide
uccuugagaaacuuccuca

SEQ ID NO: 2248876 - RNA, 19 nt, Artificial Sequence
  Description of Artificial Sequence: Synthetic oligonucleotide
caaacgauagaugaugaac

SEQ ID NO: 2248877 - RNA, 19 nt, Artificial Sequence
  Description of Artificial Sequence: Synthetic oligonucleotide
uuagcuacaauuucccaua

SEQ ID NO: 2248878 - RNA, 19 nt, Artificial Sequence
  Description of Artificial Sequence: Synthetic oligonucleotide
uaccuguagaaacucauaa

SEQ ID NO: 2248879 - RNA, 19 nt, Artificial Sequence
  Description of Artificial Sequence: Synthetic oligonucleotide
uugaugauuuucgaggucu

SEQ ID NO: 2248880 - RNA, 19 nt, Artificial Sequence
  Description of Artificial Sequence: Synthetic oligonucleotide
guauuucaaaggaaguggg

SEQ ID NO: 2248881 - RNA, 19 nt, Artificial Sequence
  Description of Artificial Sequence: Synthetic oligonucleotide
aucuucauucuuuuacaag

SEQ ID NO: 2248882 - RNA, 19 nt, Artificial Sequence
  Description of Artificial Sequence: Synthetic oligonucleotide
aguaauccuuuaaagguuc

SEQ ID NO: 2248883 - RNA, 19 nt, Artificial Sequence
  Description of Artificial Sequence: Synthetic oligonucleotide
uucgaccagagcaaagcag

SEQ ID NO: 2248884 - RNA, 19 nt, Artificial Sequence
  Description of Artificial Sequence: Synthetic oligonucleotide
uuaguguauaguaauccuu

SEQ ID NO: 2248885 - RNA, 19 nt, Artificial Sequence
  Description of Artificial Sequence: Synthetic oligonucleotide
aaaggaagugggccauuuc

SEQ ID NO: 2248886 - RNA, 19 nt, Artificial Sequence
  Description of Artificial Sequence: Synthetic oligonucleotide
aaggaagauuggugguuac

SEQ ID NO: 2248887 - RNA, 19 nt, Artificial Sequence
  Description of Artificial Sequence: Synthetic oligonucleotide
augcuuagcuacaauuucc

SEQ ID NO: 2248888 - RNA, 19 nt, Artificial Sequence
  Description of Artificial Sequence: Synthetic oligonucleotide
auuggugguuaccacuggg

SEQ ID NO: 2248889 - RNA, 19 nt, Artificial Sequence
  Description of Artificial Sequence: Synthetic oligonucleotide
uauuauuacgccacauaua

SEQ ID NO: 2248890 - RNA, 19 nt, Artificial Sequence
  Description of Artificial Sequence: Synthetic oligonucleotide
uucccauacaaacaaugaa

SEQ ID NO: 2248891 - RNA, 19 nt, Artificial Sequence
  Description of Artificial Sequence: Synthetic oligonucleotide
acaacucuuaaauuugaaa

SEQ ID NO: 2248892 - RNA, 19 nt, Artificial Sequence
  Description of Artificial Sequence: Synthetic oligonucleotide
agcaauauauguaaaagua

SEQ ID NO: 2248893 - RNA, 19 nt, Artificial Sequence
  Description of Artificial Sequence: Synthetic oligonucleotide
auuuaauggcuauaagcaa

SEQ ID NO: 2248894 - RNA, 19 nt, Artificial Sequence
  Description of Artificial Sequence: Synthetic oligonucleotide
aguaaaugauuuaauggcu

SEQ ID NO: 2248895 - RNA, 19 nt, Artificial Sequence
  Description of Artificial Sequence: Synthetic oligonucleotide
cauuguacaacaagcauaa

SEQ ID NO: 2248896 - RNA, 19 nt, Artificial Sequence
  Description of Artificial Sequence: Synthetic oligonucleotide
ucauaauaaauugcuucug

SEQ ID NO: 2248897 - RNA, 19 nt, Artificial Sequence
  Description of Artificial Sequence: Synthetic oligonucleotide
auugaugauuuucgagguc

SEQ ID NO: 2248898 - RNA, 19 nt, Artificial Sequence
  Description of Artificial Sequence: Synthetic oligonucleotide
uggugacugaucuucauuc

SEQ ID NO: 2248899 - RNA, 19 nt, Artificial Sequence
  Description of Artificial Sequence: Synthetic oligonucleotide
aaugaaaugcuuagcuaca

SEQ ID NO: 2248900 - RNA, 19 nt, Artificial Sequence
  Description of Artificial Sequence: Synthetic oligonucleotide
ugccaucugauucuuacaa

SEQ ID NO: 2248901 - RNA, 19 nt, Artificial Sequence
  Description of Artificial Sequence: Synthetic oligonucleotide
caucugauucuuacaaaag

SEQ ID NO: 2248902 - RNA, 19 nt, Artificial Sequence
  Description of Artificial Sequence: Synthetic oligonucleotide
aguuauugaugauuuucga

SEQ ID NO: 2248903 - RNA, 19 nt, Artificial Sequence
  Description of Artificial Sequence: Synthetic oligonucleotide
aauguccauuaguguauag

SEQ ID NO: 2248904 - RNA, 19 nt, Artificial Sequence
  Description of Artificial Sequence: Synthetic oligonucleotide
auaauaaauugcuucuguu

SEQ ID NO: 2248905 - RNA, 19 nt, Artificial Sequence
  Description of Artificial Sequence: Synthetic oligonucleotide
auacaugacaucaaucuga

SEQ ID NO: 2248906 - RNA, 19 nt, Artificial Sequence
  Description of Artificial Sequence: Synthetic oligonucleotide
agaaacuuccucaagugca

SEQ ID NO: 2248907 - RNA, 19 nt, Artificial Sequence
  Description of Artificial Sequence: Synthetic oligonucleotide
uuuucgaggucuacuggca

SEQ ID NO: 2248908 - RNA, 19 nt, Artificial Sequence
  Description of Artificial Sequence: Synthetic oligonucleotide
uccauucauaguacuggag

SEQ ID NO: 2248909 - RNA, 19 nt, Artificial Sequence
  Description of Artificial Sequence: Synthetic oligonucleotide
cauacaugacaucaaucug

SEQ ID NO: 2248910 - RNA, 19 nt, Artificial Sequence
  Description of Artificial Sequence: Synthetic oligonucleotide
uuuuacuccuugagaaacu

SEQ ID NO: 2248911 - RNA, 19 nt, Artificial Sequence
  Description of Artificial Sequence: Synthetic oligonucleotide
uucauaguacuggaggaug

SEQ ID NO: 2248912 - RNA, 19 nt, Artificial Sequence
  Description of Artificial Sequence: Synthetic oligonucleotide
acaagcauaaugccaucug

SEQ ID NO: 2248913 - RNA, 19 nt, Artificial Sequence
  Description of Artificial Sequence: Synthetic oligonucleotide
uagaguaaacauccucaca

SEQ ID NO: 2248914 - RNA, 19 nt, Artificial Sequence
  Description of Artificial Sequence: Synthetic oligonucleotide
uacaugacaucaaucugaa

SEQ ID NO: 2248915 - RNA, 19 nt, Artificial Sequence
  Description of Artificial Sequence: Synthetic oligonucleotide
aauuguagauaaaaugcuu

SEQ ID NO: 2248916 - RNA, 19 nt, Artificial Sequence
  Description of Artificial Sequence: Synthetic oligonucleotide
guacuggaggaugugaggg

SEQ ID NO: 2248917 - RNA, 19 nt, Artificial Sequence
  Description of Artificial Sequence: Synthetic oligonucleotide
gucauauaccaauauggca

SEQ ID NO: 2248918 - RNA, 19 nt, Artificial Sequence
  Description of Artificial Sequence: Synthetic oligonucleotide
aaaugcuuagcuacaauuu

SEQ ID NO: 2248919 - RNA, 19 nt, Artificial Sequence
  Description of Artificial Sequence: Synthetic oligonucleotide
aauaccuguagaaacucau

SEQ ID NO: 2248920 - RNA, 19 nt, Artificial Sequence
  Description of Artificial Sequence: Synthetic oligonucleotide
aauuauuauuacgccacau

SEQ ID NO: 2248921 - RNA, 19 nt, Artificial Sequence
  Description of Artificial Sequence: Synthetic oligonucleotide
uuaaagguuccucuucaua

SEQ ID NO: 2248922 - RNA, 19 nt, Artificial Sequence
  Description of Artificial Sequence: Synthetic oligonucleotide
uggugguuaccacuggggc

SEQ ID NO: 2248923 - RNA, 19 nt, Artificial Sequence
  Description of Artificial Sequence: Synthetic oligonucleotide
guacaacaagcauaaugcc

SEQ ID NO: 2248924 - RNA, 19 nt, Artificial Sequence
  Description of Artificial Sequence: Synthetic oligonucleotide
auuucccauacaaacaaug

SEQ ID NO: 2248925 - RNA, 19 nt, Artificial Sequence
  Description of Artificial Sequence: Synthetic oligonucleotide
cuguauuucaaaggaagug

SEQ ID NO: 2248926 - RNA, 19 nt, Artificial Sequence
  Description of Artificial Sequence: Synthetic oligonucleotide
ccauucauaguacuggagg

SEQ ID NO: 2248927 - RNA, 19 nt, Artificial Sequence
  Description of Artificial Sequence: Synthetic oligonucleotide
agucacuuuccaguucucc

SEQ ID NO: 2248928 - RNA, 19 nt, Artificial Sequence
  Description of Artificial Sequence: Synthetic oligonucleotide
acaacaagcauaaugccau

SEQ ID NO: 2248929 - RNA, 19 nt, Artificial Sequence
  Description of Artificial Sequence: Synthetic oligonucleotide
aaguauuagguauguccau

SEQ ID NO: 2248930 - RNA, 19 nt, Artificial Sequence
  Description of Artificial Sequence: Synthetic oligonucleotide
aucuuuuaucauucaccuc

SEQ ID NO: 2248931 - RNA, 19 nt, Artificial Sequence
  Description of Artificial Sequence: Synthetic oligonucleotide
aacacacacuaaguucgac

SEQ ID NO: 2248932 - RNA, 19 nt, Artificial Sequence
  Description of Artificial Sequence: Synthetic oligonucleotide
aacaagcauaaugccaucu

SEQ ID NO: 2248933 - RNA, 19 nt, Artificial Sequence
  Description of Artificial Sequence: Synthetic oligonucleotide
acucuuaaauuugaaauua

SEQ ID NO: 2248934 - RNA, 19 nt, Artificial Sequence
  Description of Artificial Sequence: Synthetic oligonucleotide
uccucacaaacgauagaug

SEQ ID NO: 2248935 - RNA, 19 nt, Artificial Sequence
  Description of Artificial Sequence: Synthetic oligonucleotide
aaguaucuuuuaucauuca

SEQ ID NO: 2248936 - RNA, 19 nt, Artificial Sequence
  Description of Artificial Sequence: Synthetic oligonucleotide
cauucauaguacuggagga

SEQ ID NO: 2248937 - RNA, 19 nt, Artificial Sequence
  Description of Artificial Sequence: Synthetic oligonucleotide
aaaaggcagauaccuuuaa

SEQ ID NO: 2248938 - RNA, 19 nt, Artificial Sequence
  Description of Artificial Sequence: Synthetic oligonucleotide
uacgccacauauacuaaaa

SEQ ID NO: 2248939 - RNA, 19 nt, Artificial Sequence
  Description of Artificial Sequence: Synthetic oligonucleotide
uaaauugcuucuguuuccu

SEQ ID NO: 2248940 - RNA, 19 nt, Artificial Sequence
  Description of Artificial Sequence: Synthetic oligonucleotide
cacacacuaaguucgacca

SEQ ID NO: 2248941 - RNA, 19 nt, Artificial Sequence
  Description of Artificial Sequence: Synthetic oligonucleotide
uuacaaguuggccgaacuc

SEQ ID NO: 2248942 - RNA, 19 nt, Artificial Sequence
  Description of Artificial Sequence: Synthetic oligonucleotide
aaauugcuucuguuuccug

SEQ ID NO: 2248943 - RNA, 19 nt, Artificial Sequence
  Description of Artificial Sequence: Synthetic oligonucleotide
gaagauuggugguuaccac

SEQ ID NO: 2248944 - RNA, 19 nt, Artificial Sequence
  Description of Artificial Sequence: Synthetic oligonucleotide
caauauggcauuguacaac

SEQ ID NO: 2248945 - RNA, 19 nt, Artificial Sequence
  Description of Artificial Sequence: Synthetic oligonucleotide
cuugagaaacuuccucaag

SEQ ID NO: 2248946 - RNA, 19 nt, Artificial Sequence
  Description of Artificial Sequence: Synthetic oligonucleotide
cuuuaaagguuccucuuca

SEQ ID NO: 2248947 - RNA, 19 nt, Artificial Sequence
  Description of Artificial Sequence: Synthetic oligonucleotide
aggaagauuggugguuacc

SEQ ID NO: 2248948 - RNA, 19 nt, Artificial Sequence
  Description of Artificial Sequence: Synthetic oligonucleotide
uauaccaauauggcauugu

SEQ ID NO: 2248949 - RNA, 19 nt, Artificial Sequence
  Description of Artificial Sequence: Synthetic oligonucleotide
agcaagacaaagaaauaga

SEQ ID NO: 2248950 - RNA, 19 nt, Artificial Sequence
  Description of Artificial Sequence: Synthetic oligonucleotide
uuauuacgccacauauacu

SEQ ID NO: 2248951 - RNA, 19 nt, Artificial Sequence
  Description of Artificial Sequence: Synthetic oligonucleotide
cagguauaaauguaggcaa

SEQ ID NO: 2248952 - RNA, 19 nt, Artificial Sequence
  Description of Artificial Sequence: Synthetic oligonucleotide
cucuucauacaugacauca

SEQ ID NO: 2248953 - RNA, 19 nt, Artificial Sequence
  Description of Artificial Sequence: Synthetic oligonucleotide
guaaguaucuuuuaucauu

SEQ ID NO: 2248954 - RNA, 19 nt, Artificial Sequence
  Description of Artificial Sequence: Synthetic oligonucleotide
ggcuauaagcaagacaaag

SEQ ID NO: 2248955 - RNA, 19 nt, Artificial Sequence
  Description of Artificial Sequence: Synthetic oligonucleotide
aacauccucacaaacgaua

SEQ ID NO: 2248956 - RNA, 19 nt, Artificial Sequence
  Description of Artificial Sequence: Synthetic oligonucleotide
gcauaaugccaucugauuc

SEQ ID NO: 2248957 - RNA, 19 nt, Artificial Sequence
  Description of Artificial Sequence: Synthetic oligonucleotide
uuuaaagguuccucuucau

SEQ ID NO: 2248958 - RNA, 19 nt, Artificial Sequence
  Description of Artificial Sequence: Synthetic oligonucleotide
agcauuugucaguccaucu

SEQ ID NO: 2248959 - RNA, 19 nt, Artificial Sequence
  Description of Artificial Sequence: Synthetic oligonucleotide
aaaugauuuaauggcuaua

SEQ ID NO: 2248960 - RNA, 19 nt, Artificial Sequence
  Description of Artificial Sequence: Synthetic oligonucleotide
aacugguggggucauucau

SEQ ID NO: 2248961 - RNA, 19 nt, Artificial Sequence
  Description of Artificial Sequence: Synthetic oligonucleotide
aagcauaaugccaucugau

SEQ ID NO: 2248962 - RNA, 19 nt, Artificial Sequence
  Description of Artificial Sequence: Synthetic oligonucleotide
ucgaggucuacuggcaaag

SEQ ID NO: 2248963 - RNA, 19 nt, Artificial Sequence
  Description of Artificial Sequence: Synthetic oligonucleotide
uuacgccacauauacuaaa

SEQ ID NO: 2248964 - RNA, 19 nt, Artificial Sequence
  Description of Artificial Sequence: Synthetic oligonucleotide
augauuuucgaggucuacu

SEQ ID NO: 2248965 - RNA, 19 nt, Artificial Sequence
  Description of Artificial Sequence: Synthetic oligonucleotide
uauuagguauguccauuuu

SEQ ID NO: 2248966 - RNA, 19 nt, Artificial Sequence
  Description of Artificial Sequence: Synthetic oligonucleotide
uagguauguccauuuuacu

SEQ ID NO: 2248967 - RNA, 19 nt, Artificial Sequence
  Description of Artificial Sequence: Synthetic oligonucleotide
agcauaaugccaucugauu

SEQ ID NO: 2248968 - RNA, 19 nt, Artificial Sequence
  Description of Artificial Sequence: Synthetic oligonucleotide
cuaaguucgaccagagcaa

SEQ ID NO: 2248969 - RNA, 19 nt, Artificial Sequence
  Description of Artificial Sequence: Synthetic oligonucleotide
agauuggugguuaccacug

SEQ ID NO: 2248970 - RNA, 19 nt, Artificial Sequence
  Description of Artificial Sequence: Synthetic oligonucleotide
auaccaauauggcauugua

SEQ ID NO: 2248971 - RNA, 19 nt, Artificial Sequence
  Description of Artificial Sequence: Synthetic oligonucleotide
uacaaaaguuauugaugau

SEQ ID NO: 2248972 - RNA, 19 nt, Artificial Sequence
  Description of Artificial Sequence: Synthetic oligonucleotide
caguccaucucucugguga

SEQ ID NO: 2248973 - RNA, 19 nt, Artificial Sequence
  Description of Artificial Sequence: Synthetic oligonucleotide
gcugguuccauucauagua

SEQ ID NO: 2248974 - RNA, 19 nt, Artificial Sequence
  Description of Artificial Sequence: Synthetic oligonucleotide
gaggucuacuggcaaagga

SEQ ID NO: 2248975 - RNA, 19 nt, Artificial Sequence
  Description of Artificial Sequence: Synthetic oligonucleotide
auguccauuaguguauagu

SEQ ID NO: 2248976 - RNA, 19 nt, Artificial Sequence
  Description of Artificial Sequence: Synthetic oligonucleotide
gugguuaccacuggggcug

SEQ ID NO: 2248977 - RNA, 19 nt, Artificial Sequence
  Description of Artificial Sequence: Synthetic oligonucleotide
acuaugaaaacaacucuua

SEQ ID NO: 2248978 - RNA, 19 nt, Artificial Sequence
  Description of Artificial Sequence: Synthetic oligonucleotide
acaaacgauagaugaugaa

SEQ ID NO: 2248979 - RNA, 19 nt, Artificial Sequence
  Description of Artificial Sequence: Synthetic oligonucleotide
cauaauaaauugcuucugu

SEQ ID NO: 2248980 - RNA, 19 nt, Artificial Sequence
  Description of Artificial Sequence: Synthetic oligonucleotide
gguauaaauguaggcaaug

SEQ ID NO: 2248981 - RNA, 19 nt, Artificial Sequence
  Description of Artificial Sequence: Synthetic oligonucleotide
uuucgaggucuacuggcaa

SEQ ID NO: 2248982 - RNA, 19 nt, Artificial Sequence
  Description of Artificial Sequence: Synthetic oligonucleotide
acauguuugcucuguuuaa

SEQ ID NO: 2248983 - RNA, 19 nt, Artificial Sequence
  Description of Artificial Sequence: Synthetic oligonucleotide
gcagauaccuuuaacuaug

SEQ ID NO: 2248984 - RNA, 19 nt, Artificial Sequence
  Description of Artificial Sequence: Synthetic oligonucleotide
gcaaagcagaacugguggg

SEQ ID NO: 2248985 - RNA, 19 nt, Artificial Sequence
  Description of Artificial Sequence: Synthetic oligonucleotide
cacaaacgauagaugauga

SEQ ID NO: 2248986 - RNA, 19 nt, Artificial Sequence
  Description of Artificial Sequence: Synthetic oligonucleotide
cauauuugaaagucaacau

SEQ ID NO: 2248987 - RNA, 19 nt, Artificial Sequence
  Description of Artificial Sequence: Synthetic oligonucleotide
acacacuaaguucgaccag

SEQ ID NO: 2248988 - RNA, 19 nt, Artificial Sequence
  Description of Artificial Sequence: Synthetic oligonucleotide
aguguauaguaauccuuua

SEQ ID NO: 2248989 - RNA, 19 nt, Artificial Sequence
  Description of Artificial Sequence: Synthetic oligonucleotide
aaguuggccgaacucugua

SEQ ID NO: 2248990 - RNA, 19 nt, Artificial Sequence
  Description of Artificial Sequence: Synthetic oligonucleotide
guagaaacucauaauaaau

SEQ ID NO: 2248991 - RNA, 19 nt, Artificial Sequence
  Description of Artificial Sequence: Synthetic oligonucleotide
ccuuuaacuaugaaaacaa

SEQ ID NO: 2248992 - RNA, 19 nt, Artificial Sequence
  Description of Artificial Sequence: Synthetic oligonucleotide
uggggucauucauauuuga

SEQ ID NO: 2248993 - RNA, 19 nt, Artificial Sequence
  Description of Artificial Sequence: Synthetic oligonucleotide
gggucauucauauuugaaa

SEQ ID NO: 2248994 - RNA, 19 nt, Artificial Sequence
  Description of Artificial Sequence: Synthetic oligonucleotide
uacuggaggaugugaggga

SEQ ID NO: 2248995 - RNA, 19 nt, Artificial Sequence
  Description of Artificial Sequence: Synthetic oligonucleotide
uggaggaugugagggaacu

SEQ ID NO: 2248996 - RNA, 19 nt, Artificial Sequence
  Description of Artificial Sequence: Synthetic oligonucleotide
uagcuacaauuucccauac

SEQ ID NO: 2248997 - RNA, 19 nt, Artificial Sequence
  Description of Artificial Sequence: Synthetic oligonucleotide
cuuagcuacaauuucccau

SEQ ID NO: 2248998 - RNA, 19 nt, Artificial Sequence
  Description of Artificial Sequence: Synthetic oligonucleotide
aguauuagguauguccauu

SEQ ID NO: 2248999 - RNA, 19 nt, Artificial Sequence
  Description of Artificial Sequence: Synthetic oligonucleotide
ugguuccauucauaguacu

SEQ ID NO: 2249000 - RNA, 19 nt, Artificial Sequence
  Description of Artificial Sequence: Synthetic oligonucleotide
ccauuuuacuccuugagaa

SEQ ID NO: 2249001 - RNA, 19 nt, Artificial Sequence
  Description of Artificial Sequence: Synthetic oligonucleotide
uuuuacaaguuggccgaac

SEQ ID NO: 2249002 - RNA, 19 nt, Artificial Sequence
  Description of Artificial Sequence: Synthetic oligonucleotide
ccucacaaacgauagauga

SEQ ID NO: 2249003 - RNA, 19 nt, Artificial Sequence
  Description of Artificial Sequence: Synthetic oligonucleotide
acgauagaugaugaacaca

SEQ ID NO: 2249004 - RNA, 19 nt, Artificial Sequence
  Description of Artificial Sequence: Synthetic oligonucleotide
agagcaaagcagaacuggu

SEQ ID NO: 2249005 - RNA, 19 nt, Artificial Sequence
  Description of Artificial Sequence: Synthetic oligonucleotide
uucgaggucuacuggcaaa

SEQ ID NO: 2249006 - RNA, 19 nt, Artificial Sequence
  Description of Artificial Sequence: Synthetic oligonucleotide
cagccuguuuuccuguuug

SEQ ID NO: 2249007 - RNA, 19 nt, Artificial Sequence
  Description of Artificial Sequence: Synthetic oligonucleotide
auucauaguacuggaggau

SEQ ID NO: 2249008 - RNA, 19 nt, Artificial Sequence
  Description of Artificial Sequence: Synthetic oligonucleotide
ggcagacaagaagaggugg

SEQ ID NO: 2249009 - RNA, 19 nt, Artificial Sequence
  Description of Artificial Sequence: Synthetic oligonucleotide
gaggagacugcacuggagu

SEQ ID NO: 2249010 - RNA, 19 nt, Artificial Sequence
  Description of Artificial Sequence: Synthetic oligonucleotide
aaguucgaccagagcaaag

SEQ ID NO: 2249011 - RNA, 19 nt, Artificial Sequence
  Description of Artificial Sequence: Synthetic oligonucleotide
ugaaaguauuagguauguc

SEQ ID NO: 2249012 - RNA, 19 nt, Artificial Sequence
  Description of Artificial Sequence: Synthetic oligonucleotide
ggaagauuggugguuacca

SEQ ID NO: 2249013 - RNA, 19 nt, Artificial Sequence
  Description of Artificial Sequence: Synthetic oligonucleotide
uggggcugggcagacaaga

SEQ ID NO: 2249014 - RNA, 19 nt, Artificial Sequence
  Description of Artificial Sequence: Synthetic oligonucleotide
guaauccuuuaaagguucc

SEQ ID NO: 2249015 - RNA, 19 nt, Artificial Sequence
  Description of Artificial Sequence: Synthetic oligonucleotide
uaaguucgaccagagcaaa

SEQ ID NO: 2249016 - RNA, 19 nt, Artificial Sequence
  Description of Artificial Sequence: Synthetic oligonucleotide
auugcugcugggcaucgua

SEQ ID NO: 2249017 - RNA, 19 nt, Artificial Sequence
  Description of Artificial Sequence: Synthetic oligonucleotide
guucgaccagagcaaagca

SEQ ID NO: 2249018 - RNA, 19 nt, Artificial Sequence
  Description of Artificial Sequence: Synthetic oligonucleotide
ggugaggagacugcacugg

SEQ ID NO: 2249019 - RNA, 19 nt, Artificial Sequence
  Description of Artificial Sequence: Synthetic oligonucleotide
cacuaaguucgaccagagc

SEQ ID NO: 2249020 - RNA, 19 nt, Artificial Sequence
  Description of Artificial Sequence: Synthetic oligonucleotide
ccuguagaaacucauaaua

SEQ ID NO: 2249021 - RNA, 19 nt, Artificial Sequence
  Description of Artificial Sequence: Synthetic oligonucleotide
cauaguacuggaggaugug

SEQ ID NO: 2249022 - RNA, 19 nt, Artificial Sequence
  Description of Artificial Sequence: Synthetic oligonucleotide
augccaucugauucuuaca

SEQ ID NO: 2249023 - RNA, 19 nt, Artificial Sequence
  Description of Artificial Sequence: Synthetic oligonucleotide
ucuggugacugaucuucau

SEQ ID NO: 2249024 - RNA, 19 nt, Artificial Sequence
  Description of Artificial Sequence: Synthetic oligonucleotide
aguuggccgaacucuguau

SEQ ID NO: 2249025 - RNA, 19 nt, Artificial Sequence
  Description of Artificial Sequence: Synthetic oligonucleotide
agagguggugggaacaccu

SEQ ID NO: 2249026 - RNA, 19 nt, Artificial Sequence
  Description of Artificial Sequence: Synthetic oligonucleotide
cauuugucaguccaucucu

SEQ ID NO: 2249027 - RNA, 19 nt, Artificial Sequence
  Description of Artificial Sequence: Synthetic oligonucleotide
cagacaagaagagguggug

SEQ ID NO: 2249028 - RNA, 19 nt, Artificial Sequence
  Description of Artificial Sequence: Synthetic oligonucleotide
gaagugggccauuucuucu

SEQ ID NO: 2249029 - RNA, 19 nt, Artificial Sequence
  Description of Artificial Sequence: Synthetic oligonucleotide
cugugggugaggagacugc

SEQ ID NO: 2249030 - RNA, 19 nt, Artificial Sequence
  Description of Artificial Sequence: Synthetic oligonucleotide
guauaaauguaggcaaugu

SEQ ID NO: 2249031 - RNA, 19 nt, Artificial Sequence
  Description of Artificial Sequence: Synthetic oligonucleotide
gguuccauucauaguacug

SEQ ID NO: 2249032 - RNA, 19 nt, Artificial Sequence
  Description of Artificial Sequence: Synthetic oligonucleotide
uaauggcuauaagcaagac

SEQ ID NO: 2249033 - RNA, 19 nt, Artificial Sequence
  Description of Artificial Sequence: Synthetic oligonucleotide
ucccagacuggagacaaau

SEQ ID NO: 2249034 - RNA, 19 nt, Artificial Sequence
  Description of Artificial Sequence: Synthetic oligonucleotide
agcagaacuggugggguca

SEQ ID NO: 2249035 - RNA, 19 nt, Artificial Sequence
  Description of Artificial Sequence: Synthetic oligonucleotide
gguggggucauucauauuu

SEQ ID NO: 2249036 - RNA, 19 nt, Artificial Sequence
  Description of Artificial Sequence: Synthetic oligonucleotide
acgccacauauacuaaaau

SEQ ID NO: 2249037 - RNA, 19 nt, Artificial Sequence
  Description of Artificial Sequence: Synthetic oligonucleotide
aaacauccucacaaacgau

SEQ ID NO: 2249038 - RNA, 19 nt, Artificial Sequence
  Description of Artificial Sequence: Synthetic oligonucleotide
cacacuaaguucgaccaga

SEQ ID NO: 2249039 - RNA, 19 nt, Artificial Sequence
  Description of Artificial Sequence: Synthetic oligonucleotide
uggcuauaagcaagacaaa

SEQ ID NO: 2249040 - RNA, 19 nt, Artificial Sequence
  Description of Artificial Sequence: Synthetic oligonucleotide
agucaacauguuugcucug

SEQ ID NO: 2249041 - RNA, 19 nt, Artificial Sequence
  Description of Artificial Sequence: Synthetic oligonucleotide
acacuaaguucgaccagag

SEQ ID NO: 2249042 - RNA, 19 nt, Artificial Sequence
  Description of Artificial Sequence: Synthetic oligonucleotide
ggaagugggccauuucuuc

SEQ ID NO: 2249043 - RNA, 19 nt, Artificial Sequence
  Description of Artificial Sequence: Synthetic oligonucleotide
uuggccgaacucuguauuu

SEQ ID NO: 2249044 - RNA, 19 nt, Artificial Sequence
  Description of Artificial Sequence: Synthetic oligonucleotide
ccauuaguguauaguaauc

SEQ ID NO: 2249045 - RNA, 19 nt, Artificial Sequence
  Description of Artificial Sequence: Synthetic oligonucleotide
uguuuuccuguuugucaua

SEQ ID NO: 2249046 - RNA, 19 nt, Artificial Sequence
  Description of Artificial Sequence: Synthetic oligonucleotide
acauuacagaaaaggcaga

SEQ ID NO: 2249047 - RNA, 19 nt, Artificial Sequence
  Description of Artificial Sequence: Synthetic oligonucleotide
ucaguccaucucucuggug

SEQ ID NO: 2249048 - RNA, 19 nt, Artificial Sequence
  Description of Artificial Sequence: Synthetic oligonucleotide
ccuguuuuccuguuuguca

SEQ ID NO: 2249049 - RNA, 19 nt, Artificial Sequence
  Description of Artificial Sequence: Synthetic oligonucleotide
ccaucugauucuuacaaaa

SEQ ID NO: 2249050 - RNA, 19 nt, Artificial Sequence
  Description of Artificial Sequence: Synthetic oligonucleotide
caacaagcauaaugccauc

SEQ ID NO: 2249051 - RNA, 19 nt, Artificial Sequence
  Description of Artificial Sequence: Synthetic oligonucleotide
cugggcaucguaaguaucu

SEQ ID NO: 2249052 - RNA, 19 nt, Artificial Sequence
  Description of Artificial Sequence: Synthetic oligonucleotide
ugucacucccagagucacu

SEQ ID NO: 2249053 - RNA, 19 nt, Artificial Sequence
  Description of Artificial Sequence: Synthetic oligonucleotide
cagauaccuuuaacuauga

SEQ ID NO: 2249054 - RNA, 19 nt, Artificial Sequence
  Description of Artificial Sequence: Synthetic oligonucleotide
guccauuaguguauaguaa

SEQ ID NO: 2249055 - RNA, 19 nt, Artificial Sequence
  Description of Artificial Sequence: Synthetic oligonucleotide
guauuagguauguccauuu

SEQ ID NO: 2249056 - RNA, 19 nt, Artificial Sequence
  Description of Artificial Sequence: Synthetic oligonucleotide
auuacgccacauauacuaa

SEQ ID NO: 2249057 - RNA, 19 nt, Artificial Sequence
  Description of Artificial Sequence: Synthetic oligonucleotide
uuuuccuguuugucauaua

SEQ ID NO: 2249058 - RNA, 19 nt, Artificial Sequence
  Description of Artificial Sequence: Synthetic oligonucleotide
acucuguauuucaaaggaa

SEQ ID NO: 2249059 - RNA, 19 nt, Artificial Sequence
  Description of Artificial Sequence: Synthetic oligonucleotide
agccuguuuuccuguuugu

SEQ ID NO: 2249060 - RNA, 19 nt, Artificial Sequence
  Description of Artificial Sequence: Synthetic oligonucleotide
guuaccacuggggcugcug

SEQ ID NO: 2249061 - RNA, 19 nt, Artificial Sequence
  Description of Artificial Sequence: Synthetic oligonucleotide
uggccgaacucuguauuuc

SEQ ID NO: 2249062 - RNA, 19 nt, Artificial Sequence
  Description of Artificial Sequence: Synthetic oligonucleotide
gacaucaaucugaaaguau

SEQ ID NO: 2249063 - RNA, 19 nt, Artificial Sequence
  Description of Artificial Sequence: Synthetic oligonucleotide
ccauacaaacaaugaaaca

SEQ ID NO: 2249064 - RNA, 19 nt, Artificial Sequence
  Description of Artificial Sequence: Synthetic oligonucleotide
cucuuaaauuugaaauuau

SEQ ID NO: 2249065 - RNA, 19 nt, Artificial Sequence
  Description of Artificial Sequence: Synthetic oligonucleotide
gaacacacacuaaguucga

SEQ ID NO: 2249066 - RNA, 19 nt, Artificial Sequence
  Description of Artificial Sequence: Synthetic oligonucleotide
gaaagucaacauguuugcu

SEQ ID NO: 2249067 - RNA, 19 nt, Artificial Sequence
  Description of Artificial Sequence: Synthetic oligonucleotide
cacuggaguacuggggcug

SEQ ID NO: 2249068 - RNA, 19 nt, Artificial Sequence
  Description of Artificial Sequence: Synthetic oligonucleotide
gaaacuuccucaagugcau

SEQ ID NO: 2249069 - RNA, 19 nt, Artificial Sequence
  Description of Artificial Sequence: Synthetic oligonucleotide
caucguaaguaucuuuuau

SEQ ID NO: 2249070 - RNA, 19 nt, Artificial Sequence
  Description of Artificial Sequence: Synthetic oligonucleotide
cucacaaacgauagaugau

SEQ ID NO: 2249071 - RNA, 19 nt, Artificial Sequence
  Description of Artificial Sequence: Synthetic oligonucleotide
gggugaggagacugcacug

SEQ ID NO: 2249072 - RNA, 19 nt, Artificial Sequence
  Description of Artificial Sequence: Synthetic oligonucleotide
acaugacaucaaucugaaa

SEQ ID NO: 2249073 - RNA, 19 nt, Artificial Sequence
  Description of Artificial Sequence: Synthetic oligonucleotide
ccagagcaaagcagaacug

SEQ ID NO: 2249074 - RNA, 19 nt, Artificial Sequence
  Description of Artificial Sequence: Synthetic oligonucleotide
uucagccuguuuuccuguu

SEQ ID NO: 2249075 - RNA, 19 nt, Artificial Sequence
  Description of Artificial Sequence: Synthetic oligonucleotide
cauauaccaauauggcauu

SEQ ID NO: 2249076 - RNA, 19 nt, Artificial Sequence
  Description of Artificial Sequence: Synthetic oligonucleotide
cugaaaguauuagguaugu

SEQ ID NO: 2249077 - RNA, 19 nt, Artificial Sequence
  Description of Artificial Sequence: Synthetic oligonucleotide
aggaagugggccauuucuu

SEQ ID NO: 2249078 - RNA, 19 nt, Artificial Sequence
  Description of Artificial Sequence: Synthetic oligonucleotide
acugguggggucauucaua

SEQ ID NO: 2249079 - RNA, 19 nt, Artificial Sequence
  Description of Artificial Sequence: Synthetic oligonucleotide
gcuuagcuacaauuuccca

SEQ ID NO: 2249080 - RNA, 19 nt, Artificial Sequence
  Description of Artificial Sequence: Synthetic oligonucleotide
agguuccucuucauacaug

SEQ ID NO: 2249081 - RNA, 19 nt, Artificial Sequence
  Description of Artificial Sequence: Synthetic oligonucleotide
guuuuccuguuugucauau

SEQ ID NO: 2249082 - RNA, 19 nt, Artificial Sequence
  Description of Artificial Sequence: Synthetic oligonucleotide
gucaacauguuugcucugu

SEQ ID NO: 2249083 - RNA, 19 nt, Artificial Sequence
  Description of Artificial Sequence: Synthetic oligonucleotide
ggugguuaccacuggggcu

SEQ ID NO: 2249084 - RNA, 19 nt, Artificial Sequence
  Description of Artificial Sequence: Synthetic oligonucleotide
ggccgaacucuguauuuca

SEQ ID NO: 2249085 - RNA, 19 nt, Artificial Sequence
  Description of Artificial Sequence: Synthetic oligonucleotide
uucccagacuggagacaaa

SEQ ID NO: 2249086 - RNA, 19 nt, Artificial Sequence
  Description of Artificial Sequence: Synthetic oligonucleotide
ccaauauggcauuguacaa

SEQ ID NO: 2249087 - RNA, 19 nt, Artificial Sequence
  Description of Artificial Sequence: Synthetic oligonucleotide
cuuucccagacuggagaca

SEQ ID NO: 2249088 - RNA, 19 nt, Artificial Sequence
  Description of Artificial Sequence: Synthetic oligonucleotide
ucaaaggaagugggccauu

SEQ ID NO: 2249089 - RNA, 19 nt, Artificial Sequence
  Description of Artificial Sequence: Synthetic oligonucleotide
cugguggggucauucauau

SEQ ID NO: 2249090 - RNA, 19 nt, Artificial Sequence
  Description of Artificial Sequence: Synthetic oligonucleotide
guuggccgaacucuguauu

SEQ ID NO: 2249091 - RNA, 19 nt, Artificial Sequence
  Description of Artificial Sequence: Synthetic oligonucleotide
gugggugaggagacugcac

SEQ ID NO: 2249092 - RNA, 19 nt, Artificial Sequence
  Description of Artificial Sequence: Synthetic oligonucleotide
auauggcauuguacaacaa

SEQ ID NO: 2249093 - RNA, 19 nt, Artificial Sequence
  Description of Artificial Sequence: Synthetic oligonucleotide
gcaucguaaguaucuuuua

SEQ ID NO: 2249094 - RNA, 19 nt, Artificial Sequence
  Description of Artificial Sequence: Synthetic oligonucleotide
gccaucugauucuuacaaa

SEQ ID NO: 2249095 - RNA, 19 nt, Artificial Sequence
  Description of Artificial Sequence: Synthetic oligonucleotide
cuggaguacuggggcuggg

SEQ ID NO: 2249096 - RNA, 19 nt, Artificial Sequence
  Description of Artificial Sequence: Synthetic oligonucleotide
gucacucccagagucacuu

SEQ ID NO: 2249097 - RNA, 19 nt, Artificial Sequence
  Description of Artificial Sequence: Synthetic oligonucleotide
gagucacuuuccaguucuc

SEQ ID NO: 2249098 - RNA, 19 nt, Artificial Sequence
  Description of Artificial Sequence: Synthetic oligonucleotide
ggggucauucauauuugaa

SEQ ID NO: 2249099 - RNA, 19 nt, Artificial Sequence
  Description of Artificial Sequence: Synthetic oligonucleotide
gugggccauuucuucucca

SEQ ID NO: 2249100 - RNA, 19 nt, Artificial Sequence
  Description of Artificial Sequence: Synthetic oligonucleotide
ggcaucguaaguaucuuuu

SEQ ID NO: 2249101 - RNA, 19 nt, Artificial Sequence
  Description of Artificial Sequence: Synthetic oligonucleotide
gcaauguccauuaguguau

SEQ ID NO: 2249102 - RNA, 19 nt, Artificial Sequence
  Description of Artificial Sequence: Synthetic oligonucleotide
cuuuuacaaguuggccgaa

SEQ ID NO: 2249103 - RNA, 19 nt, Artificial Sequence
  Description of Artificial Sequence: Synthetic oligonucleotide
ccgaacucuguauuucaaa

SEQ ID NO: 2249104 - RNA, 19 nt, Artificial Sequence
  Description of Artificial Sequence: Synthetic oligonucleotide
ugguggggucauucauauu

SEQ ID NO: 2249105 - RNA, 19 nt, Artificial Sequence
  Description of Artificial Sequence: Synthetic oligonucleotide
gcagacaagaagagguggu

SEQ ID NO: 2249106 - RNA, 19 nt, Artificial Sequence
  Description of Artificial Sequence: Synthetic oligonucleotide
cuacuggcaaaggaagauu

SEQ ID NO: 2249107 - RNA, 19 nt, Artificial Sequence
  Description of Artificial Sequence: Synthetic oligonucleotide
gcugggcaucguaaguauc

SEQ ID NO: 2249108 - RNA, 19 nt, Artificial Sequence
  Description of Artificial Sequence: Synthetic oligonucleotide
caucucucuggugacugau

SEQ ID NO: 2249109 - RNA, 19 nt, Artificial Sequence
  Description of Artificial Sequence: Synthetic oligonucleotide
ugcuuuccuucagccuguu

SEQ ID NO: 2249110 - RNA, 19 nt, Artificial Sequence
  Description of Artificial Sequence: Synthetic oligonucleotide
cgaggucuacuggcaaagg

SEQ ID NO: 2249111 - RNA, 19 nt, Artificial Sequence
  Description of Artificial Sequence: Synthetic oligonucleotide
cguaaguaucuuuuaucau

SEQ ID NO: 2249112 - RNA, 19 nt, Artificial Sequence
  Description of Artificial Sequence: Synthetic oligonucleotide
gccgaacucuguauuucaa

SEQ ID NO: 2249113 - RNA, 19 nt, Artificial Sequence
  Description of Artificial Sequence: Synthetic oligonucleotide
gcacuggaguacuggggcu

SEQ ID NO: 2249114 - RNA, 19 nt, Artificial Sequence
  Description of Artificial Sequence: Synthetic oligonucleotide
gccuugucacucccagagu

SEQ ID NO: 2249115 - RNA, 19 nt, Artificial Sequence
  Description of Artificial Sequence: Synthetic oligonucleotide
gcuuuccuucagccuguuu

SEQ ID NO: 2249116 - RNA, 19 nt, Artificial Sequence
  Description of Artificial Sequence: Synthetic oligonucleotide
gcagaacugguggggucau

SEQ ID NO: 2249117 - RNA, 19 nt, Artificial Sequence
  Description of Artificial Sequence: Synthetic oligonucleotide
gguuaccacuggggcugcu

SEQ ID NO: 2249118 - RNA, 19 nt, Artificial Sequence
  Description of Artificial Sequence: Synthetic oligonucleotide
caccuccugcugggcuguu

SEQ ID NO: 2249119 - RNA, 19 nt, Artificial Sequence
  Description of Artificial Sequence: Synthetic oligonucleotide
aaaguuacagaggaagugc

SEQ ID NO: 2249120 - RNA, 19 nt, Artificial Sequence
  Description of Artificial Sequence: Synthetic oligonucleotide
gauguuauaaacauguggc

SEQ ID NO: 2249121 - RNA, 19 nt, Artificial Sequence
  Description of Artificial Sequence: Synthetic oligonucleotide
aauuaaucucuuuggcagc

SEQ ID NO: 2249122 - RNA, 19 nt, Artificial Sequence
  Description of Artificial Sequence: Synthetic oligonucleotide
uuuucuccgaucaaauacg

SEQ ID NO: 2249123 - RNA, 19 nt, Artificial Sequence
  Description of Artificial Sequence: Synthetic oligonucleotide
aagguuaugucgaugagcg

SEQ ID NO: 2249124 - RNA, 19 nt, Artificial Sequence
  Description of Artificial Sequence: Synthetic oligonucleotide
agagcaauuguucagggag

SEQ ID NO: 2249125 - RNA, 19 nt, Artificial Sequence
  Description of Artificial Sequence: Synthetic oligonucleotide
aacuuguagaaacaagcag

SEQ ID NO: 2249126 - RNA, 19 nt, Artificial Sequence
  Description of Artificial Sequence: Synthetic oligonucleotide
auaggagaagguuaugucg

SEQ ID NO: 2249127 - RNA, 19 nt, Artificial Sequence
  Description of Artificial Sequence: Synthetic oligonucleotide
aagagaacaccacuagagg

SEQ ID NO: 2249128 - RNA, 19 nt, Artificial Sequence
  Description of Artificial Sequence: Synthetic oligonucleotide
aauacgaaagccgacgaag

SEQ ID NO: 2249129 - RNA, 19 nt, Artificial Sequence
  Description of Artificial Sequence: Synthetic oligonucleotide
uaaauugcugguuuccggg

SEQ ID NO: 2249130 - RNA, 19 nt, Artificial Sequence
  Description of Artificial Sequence: Synthetic oligonucleotide
aagaaaguggcaucucggg

SEQ ID NO: 2249131 - RNA, 19 nt, Artificial Sequence
  Description of Artificial Sequence: Synthetic oligonucleotide
uaagcuucggagaugcgcg

SEQ ID NO: 2249132 - RNA, 19 nt, Artificial Sequence
  Description of Artificial Sequence: Synthetic oligonucleotide
aaaaccagagcaauuguuc

SEQ ID NO: 2249133 - RNA, 19 nt, Artificial Sequence
  Description of Artificial Sequence: Synthetic oligonucleotide
ucaaauacgaaagccgacg

SEQ ID NO: 2249134 - RNA, 19 nt, Artificial Sequence
  Description of Artificial Sequence: Synthetic oligonucleotide
accaauaguucaaaggucc

SEQ ID NO: 2249135 - RNA, 19 nt, Artificial Sequence
  Description of Artificial Sequence: Synthetic oligonucleotide
aagucgaacauagugcgac

SEQ ID NO: 2249136 - RNA, 19 nt, Artificial Sequence
  Description of Artificial Sequence: Synthetic oligonucleotide
cuuuucuccgaucaaauac

SEQ ID NO: 2249137 - RNA, 19 nt, Artificial Sequence
  Description of Artificial Sequence: Synthetic oligonucleotide
gaaggcaacuuguagaaac

SEQ ID NO: 2249138 - RNA, 19 nt, Artificial Sequence
  Description of Artificial Sequence: Synthetic oligonucleotide
aacauagugcgacggucgc

SEQ ID NO: 2249139 - RNA, 19 nt, Artificial Sequence
  Description of Artificial Sequence: Synthetic oligonucleotide
acgaccaauaguucaaagg

SEQ ID NO: 2249140 - RNA, 19 nt, Artificial Sequence
  Description of Artificial Sequence: Synthetic oligonucleotide
gaccagauaagcuucggag

SEQ ID NO: 2249141 - RNA, 19 nt, Artificial Sequence
  Description of Artificial Sequence: Synthetic oligonucleotide
auaaacauguggcagggga

SEQ ID NO: 2249142 - RNA, 19 nt, Artificial Sequence
  Description of Artificial Sequence: Synthetic oligonucleotide
aauggcaaguuucuuggcu

SEQ ID NO: 2249143 - RNA, 19 nt, Artificial Sequence
  Description of Artificial Sequence: Synthetic oligonucleotide
uaguacgccgcuuugaucu

SEQ ID NO: 2249144 - RNA, 19 nt, Artificial Sequence
  Description of Artificial Sequence: Synthetic oligonucleotide
auaagcuucggagaugcgc

SEQ ID NO: 2249145 - RNA, 19 nt, Artificial Sequence
  Description of Artificial Sequence: Synthetic oligonucleotide
gaaaguggcaucucgggug

SEQ ID NO: 2249146 - RNA, 19 nt, Artificial Sequence
  Description of Artificial Sequence: Synthetic oligonucleotide
ucuccgaucaaauacgaaa

SEQ ID NO: 2249147 - RNA, 19 nt, Artificial Sequence
  Description of Artificial Sequence: Synthetic oligonucleotide
aaaccagagcaauuguuca

SEQ ID NO: 2249148 - RNA, 19 nt, Artificial Sequence
  Description of Artificial Sequence: Synthetic oligonucleotide
agccuagagggccugaccc

SEQ ID NO: 2249149 - RNA, 19 nt, Artificial Sequence
  Description of Artificial Sequence: Synthetic oligonucleotide
aaggcgucaaagucgaaca

SEQ ID NO: 2249150 - RNA, 19 nt, Artificial Sequence
  Description of Artificial Sequence: Synthetic oligonucleotide
uucuggauaaaaccagagc

SEQ ID NO: 2249151 - RNA, 19 nt, Artificial Sequence
  Description of Artificial Sequence: Synthetic oligonucleotide
gacaagacaaaacuugcuc

SEQ ID NO: 2249152 - RNA, 19 nt, Artificial Sequence
  Description of Artificial Sequence: Synthetic oligonucleotide
gguaucuuuacccuggggc

SEQ ID NO: 2249153 - RNA, 19 nt, Artificial Sequence
  Description of Artificial Sequence: Synthetic oligonucleotide
aacaagcaggcacccaggg

SEQ ID NO: 2249154 - RNA, 19 nt, Artificial Sequence
  Description of Artificial Sequence: Synthetic oligonucleotide
gaggguucaaaaguuacag

SEQ ID NO: 2249155 - RNA, 19 nt, Artificial Sequence
  Description of Artificial Sequence: Synthetic oligonucleotide
aacaccacuagagguaguc

SEQ ID NO: 2249156 - RNA, 19 nt, Artificial Sequence
  Description of Artificial Sequence: Synthetic oligonucleotide
auacuugcgacggaggacg

SEQ ID NO: 2249157 - RNA, 19 nt, Artificial Sequence
  Description of Artificial Sequence: Synthetic oligonucleotide
gagaagguuaugucgauga

SEQ ID NO: 2249158 - RNA, 19 nt, Artificial Sequence
  Description of Artificial Sequence: Synthetic oligonucleotide
aaccagagcaauuguucag

SEQ ID NO: 2249159 - RNA, 19 nt, Artificial Sequence
  Description of Artificial Sequence: Synthetic oligonucleotide
guaucuuuacccuggggcc

SEQ ID NO: 2249160 - RNA, 19 nt, Artificial Sequence
  Description of Artificial Sequence: Synthetic oligonucleotide
gucaauccaacccacgacc

SEQ ID NO: 2249161 - RNA, 19 nt, Artificial Sequence
  Description of Artificial Sequence: Synthetic oligonucleotide
ucgaugagcggccaggcug

SEQ ID NO: 2249162 - RNA, 19 nt, Artificial Sequence
  Description of Artificial Sequence: Synthetic oligonucleotide
ucaagagaacaccacuaga

SEQ ID NO: 2249163 - RNA, 19 nt, Artificial Sequence
  Description of Artificial Sequence: Synthetic oligonucleotide
uccguagugcgccugguag

SEQ ID NO: 2249164 - RNA, 19 nt, Artificial Sequence
  Description of Artificial Sequence: Synthetic oligonucleotide
uugaggguucaaaaguuac

SEQ ID NO: 2249165 - RNA, 19 nt, Artificial Sequence
  Description of Artificial Sequence: Synthetic oligonucleotide
gaacauagugcgacggucg

SEQ ID NO: 2249166 - RNA, 19 nt, Artificial Sequence
  Description of Artificial Sequence: Synthetic oligonucleotide
acacuugaggguucaaaag

SEQ ID NO: 2249167 - RNA, 19 nt, Artificial Sequence
  Description of Artificial Sequence: Synthetic oligonucleotide
gaagguuaugucgaugagc

SEQ ID NO: 2249168 - RNA, 19 nt, Artificial Sequence
  Description of Artificial Sequence: Synthetic oligonucleotide
guagcggaagcucugccgg

SEQ ID NO: 2249169 - RNA, 19 nt, Artificial Sequence
  Description of Artificial Sequence: Synthetic oligonucleotide
guugcgaucgggaugguag

SEQ ID NO: 2249170 - RNA, 19 nt, Artificial Sequence
  Description of Artificial Sequence: Synthetic oligonucleotide
gacaaaacuugcucagggc

SEQ ID NO: 2249171 - RNA, 19 nt, Artificial Sequence
  Description of Artificial Sequence: Synthetic oligonucleotide
aagcucugccgguaguacg

SEQ ID NO: 2249172 - RNA, 19 nt, Artificial Sequence
  Description of Artificial Sequence: Synthetic oligonucleotide
ugaggguucaaaaguuaca

SEQ ID NO: 2249173 - RNA, 19 nt, Artificial Sequence
  Description of Artificial Sequence: Synthetic oligonucleotide
uccgaucaaauacgaaagc

SEQ ID NO: 2249174 - RNA, 19 nt, Artificial Sequence
  Description of Artificial Sequence: Synthetic oligonucleotide
uaaacauguggcaggggac

SEQ ID NO: 2249175 - RNA, 19 nt, Artificial Sequence
  Description of Artificial Sequence: Synthetic oligonucleotide
uggaaaccagcacauaaau

SEQ ID NO: 2249176 - RNA, 19 nt, Artificial Sequence
  Description of Artificial Sequence: Synthetic oligonucleotide
aaaguggcaucucgggugu

SEQ ID NO: 2249177 - RNA, 19 nt, Artificial Sequence
  Description of Artificial Sequence: Synthetic oligonucleotide
cuucuggauaaaaccagag

SEQ ID NO: 2249178 - RNA, 19 nt, Artificial Sequence
  Description of Artificial Sequence: Synthetic oligonucleotide
gucaagagaacaccacuag

SEQ ID NO: 2249179 - RNA, 19 nt, Artificial Sequence
  Description of Artificial Sequence: Synthetic oligonucleotide
agaccucggucauacuugc

SEQ ID NO: 2249180 - RNA, 19 nt, Artificial Sequence
  Description of Artificial Sequence: Synthetic oligonucleotide
ucggucauacuugcgacgg

SEQ ID NO: 2249181 - RNA, 19 nt, Artificial Sequence
  Description of Artificial Sequence: Synthetic oligonucleotide
aaauugcugguuuccgggu

SEQ ID NO: 2249182 - RNA, 19 nt, Artificial Sequence
  Description of Artificial Sequence: Synthetic oligonucleotide
aauuguucagggaguugac

SEQ ID NO: 2249183 - RNA, 19 nt, Artificial Sequence
  Description of Artificial Sequence: Synthetic oligonucleotide
ucaauccaacccacgacca

SEQ ID NO: 2249184 - RNA, 19 nt, Artificial Sequence
  Description of Artificial Sequence: Synthetic oligonucleotide
acgaaagccgacgaagacg

SEQ ID NO: 2249185 - RNA, 19 nt, Artificial Sequence
  Description of Artificial Sequence: Synthetic oligonucleotide
uuugcgaagggccucucuc

SEQ ID NO: 2249186 - RNA, 19 nt, Artificial Sequence
  Description of Artificial Sequence: Synthetic oligonucleotide
aaauacgaaagccgacgaa

SEQ ID NO: 2249187 - RNA, 19 nt, Artificial Sequence
  Description of Artificial Sequence: Synthetic oligonucleotide
aagacgaagaugaggaaaa

SEQ ID NO: 2249188 - RNA, 19 nt, Artificial Sequence
  Description of Artificial Sequence: Synthetic oligonucleotide
agguagucaauccaaccca

SEQ ID NO: 2249189 - RNA, 19 nt, Artificial Sequence
  Description of Artificial Sequence: Synthetic oligonucleotide
cauagugcgacggucgccg

SEQ ID NO: 2249190 - RNA, 19 nt, Artificial Sequence
  Description of Artificial Sequence: Synthetic oligonucleotide
aaagccuagagggccugac

SEQ ID NO: 2249191 - RNA, 19 nt, Artificial Sequence
  Description of Artificial Sequence: Synthetic oligonucleotide
gguuaugucgaugagcggc

SEQ ID NO: 2249192 - RNA, 19 nt, Artificial Sequence
  Description of Artificial Sequence: Synthetic oligonucleotide
ugcgaagggccucucuccg

SEQ ID NO: 2249193 - RNA, 19 nt, Artificial Sequence
  Description of Artificial Sequence: Synthetic oligonucleotide
accagagcaauuguucagg

SEQ ID NO: 2249194 - RNA, 19 nt, Artificial Sequence
  Description of Artificial Sequence: Synthetic oligonucleotide
aggagagucaagagaacac

SEQ ID NO: 2249195 - RNA, 19 nt, Artificial Sequence
  Description of Artificial Sequence: Synthetic oligonucleotide
aucaaauacgaaagccgac

SEQ ID NO: 2249196 - RNA, 19 nt, Artificial Sequence
  Description of Artificial Sequence: Synthetic oligonucleotide
cacuagagguagucaaucc

SEQ ID NO: 2249197 - RNA, 19 nt, Artificial Sequence
  Description of Artificial Sequence: Synthetic oligonucleotide
gaaggcgucaaagucgaac

SEQ ID NO: 2249198 - RNA, 19 nt, Artificial Sequence
  Description of Artificial Sequence: Synthetic oligonucleotide
cgaucaaauacgaaagccg

SEQ ID NO: 2249199 - RNA, 19 nt, Artificial Sequence
  Description of Artificial Sequence: Synthetic oligonucleotide
ucgggugucgucccaucgg

SEQ ID NO: 2249200 - RNA, 19 nt, Artificial Sequence
  Description of Artificial Sequence: Synthetic oligonucleotide
caacuuguagaaacaagca

SEQ ID NO: 2249201 - RNA, 19 nt, Artificial Sequence
  Description of Artificial Sequence: Synthetic oligonucleotide
auaguucaaagguccaaaa

SEQ ID NO: 2249202 - RNA, 19 nt, Artificial Sequence
  Description of Artificial Sequence: Synthetic oligonucleotide
agucgaacauagugcgacg

SEQ ID NO: 2249203 - RNA, 19 nt, Artificial Sequence
  Description of Artificial Sequence: Synthetic oligonucleotide
aggcccgaaagccuagagg

SEQ ID NO: 2249204 - RNA, 19 nt, Artificial Sequence
  Description of Artificial Sequence: Synthetic oligonucleotide
aucggagccccuuguuggc

SEQ ID NO: 2249205 - RNA, 19 nt, Artificial Sequence
  Description of Artificial Sequence: Synthetic oligonucleotide
cagaccucggucauacuug

SEQ ID NO: 2249206 - RNA, 19 nt, Artificial Sequence
  Description of Artificial Sequence: Synthetic oligonucleotide
aauccaacccacgaccaau

SEQ ID NO: 2249207 - RNA, 19 nt, Artificial Sequence
  Description of Artificial Sequence: Synthetic oligonucleotide
gcagcagacaaccagugac

SEQ ID NO: 2249208 - RNA, 19 nt, Artificial Sequence
  Description of Artificial Sequence: Synthetic oligonucleotide
aagccgacgaagacgaaga

SEQ ID NO: 2249209 - RNA, 19 nt, Artificial Sequence
  Description of Artificial Sequence: Synthetic oligonucleotide
aauugcugguuuccgggua

SEQ ID NO: 2249210 - RNA, 19 nt, Artificial Sequence
  Description of Artificial Sequence: Synthetic oligonucleotide
uccaacccacgaccaauag

SEQ ID NO: 2249211 - RNA, 19 nt, Artificial Sequence
  Description of Artificial Sequence: Synthetic oligonucleotide
aaggcaacuuguagaaaca

SEQ ID NO: 2249212 - RNA, 19 nt, Artificial Sequence
  Description of Artificial Sequence: Synthetic oligonucleotide
cuagagguagucaauccaa

SEQ ID NO: 2249213 - RNA, 19 nt, Artificial Sequence
  Description of Artificial Sequence: Synthetic oligonucleotide
gucgaacauagugcgacgg

SEQ ID NO: 2249214 - RNA, 19 nt, Artificial Sequence
  Description of Artificial Sequence: Synthetic oligonucleotide
cucggucauacuugcgacg

SEQ ID NO: 2249215 - RNA, 19 nt, Artificial Sequence
  Description of Artificial Sequence: Synthetic oligonucleotide
aguaaggccuccccggcga

SEQ ID NO: 2249216 - RNA, 19 nt, Artificial Sequence
  Description of Artificial Sequence: Synthetic oligonucleotide
guuuccggguaucuuuacc

SEQ ID NO: 2249217 - RNA, 19 nt, Artificial Sequence
  Description of Artificial Sequence: Synthetic oligonucleotide
guuaugucgaugagcggcc

SEQ ID NO: 2249218 - RNA, 19 nt, Artificial Sequence
  Description of Artificial Sequence: Synthetic oligonucleotide
ucgaacauagugcgacggu

SEQ ID NO: 2249219 - RNA, 19 nt, Artificial Sequence
  Description of Artificial Sequence: Synthetic oligonucleotide
agcucguagagggcggugc

SEQ ID NO: 2249220 - RNA, 19 nt, Artificial Sequence
  Description of Artificial Sequence: Synthetic oligonucleotide
gguagcggaagcucugccg

SEQ ID NO: 2249221 - RNA, 19 nt, Artificial Sequence
  Description of Artificial Sequence: Synthetic oligonucleotide
gaguaaggccuccccggcg

SEQ ID NO: 2249222 - RNA, 19 nt, Artificial Sequence
  Description of Artificial Sequence: Synthetic oligonucleotide
ggggacaagacaaaacuug

SEQ ID NO: 2249223 - RNA, 19 nt, Artificial Sequence
  Description of Artificial Sequence: Synthetic oligonucleotide
uccccggcgagcacaagcc

SEQ ID NO: 2249224 - RNA, 19 nt, Artificial Sequence
  Description of Artificial Sequence: Synthetic oligonucleotide
uccuucuguuugcgaaggg

SEQ ID NO: 2249225 - RNA, 19 nt, Artificial Sequence
  Description of Artificial Sequence: Synthetic oligonucleotide
aggguucaaaaguuacaga

SEQ ID NO: 2249226 - RNA, 19 nt, Artificial Sequence
  Description of Artificial Sequence: Synthetic oligonucleotide
gaccaauaguucaaagguc

SEQ ID NO: 2249227 - RNA, 19 nt, Artificial Sequence
  Description of Artificial Sequence: Synthetic oligonucleotide
gggaguaaggccuccccgg

SEQ ID NO: 2249228 - RNA, 19 nt, Artificial Sequence
  Description of Artificial Sequence: Synthetic oligonucleotide
uccggguaucuuuacccug

SEQ ID NO: 2249229 - RNA, 19 nt, Artificial Sequence
  Description of Artificial Sequence: Synthetic oligonucleotide
guagucaauccaacccacg

SEQ ID NO: 2249230 - RNA, 19 nt, Artificial Sequence
  Description of Artificial Sequence: Synthetic oligonucleotide
uaucuuuacccuggggccu

SEQ ID NO: 2249231 - RNA, 19 nt, Artificial Sequence
  Description of Artificial Sequence: Synthetic oligonucleotide
uggaccauaggagaagguu

SEQ ID NO: 2249232 - RNA, 19 nt, Artificial Sequence
  Description of Artificial Sequence: Synthetic oligonucleotide
acauagugcgacggucgcc

SEQ ID NO: 2249233 - RNA, 19 nt, Artificial Sequence
  Description of Artificial Sequence: Synthetic oligonucleotide
cacgaccaauaguucaaag

SEQ ID NO: 2249234 - RNA, 19 nt, Artificial Sequence
  Description of Artificial Sequence: Synthetic oligonucleotide
augucgaugagcggccagg

SEQ ID NO: 2249235 - RNA, 19 nt, Artificial Sequence
  Description of Artificial Sequence: Synthetic oligonucleotide
caaauacgaaagccgacga

SEQ ID NO: 2249236 - RNA, 19 nt, Artificial Sequence
  Description of Artificial Sequence: Synthetic oligonucleotide
gugucgucccaucggagcc

SEQ ID NO: 2249237 - RNA, 19 nt, Artificial Sequence
  Description of Artificial Sequence: Synthetic oligonucleotide
uuccggguaucuuuacccu

SEQ ID NO: 2249238 - RNA, 19 nt, Artificial Sequence
  Description of Artificial Sequence: Synthetic oligonucleotide
aucgggaugguagcggaag

SEQ ID NO: 2249239 - RNA, 19 nt, Artificial Sequence
  Description of Artificial Sequence: Synthetic oligonucleotide
ugcgccugguagaaggcgu

SEQ ID NO: 2249240 - RNA, 19 nt, Artificial Sequence
  Description of Artificial Sequence: Synthetic oligonucleotide
gggguugcgaucgggaugg

SEQ ID NO: 2249241 - RNA, 19 nt, Artificial Sequence
  Description of Artificial Sequence: Synthetic oligonucleotide
gcgucaaagucgaacauag

SEQ ID NO: 2249242 - RNA, 19 nt, Artificial Sequence
  Description of Artificial Sequence: Synthetic oligonucleotide
cuugcgacggaggacggug

SEQ ID NO: 2249243 - RNA, 19 nt, Artificial Sequence
  Description of Artificial Sequence: Synthetic oligonucleotide
agguuaugucgaugagcgg

SEQ ID NO: 2249244 - RNA, 19 nt, Artificial Sequence
  Description of Artificial Sequence: Synthetic oligonucleotide
aaagucgaacauagugcga

SEQ ID NO: 2249245 - RNA, 19 nt, Artificial Sequence
  Description of Artificial Sequence: Synthetic oligonucleotide
uagugcgacggucgccggg

SEQ ID NO: 2249246 - RNA, 19 nt, Artificial Sequence
  Description of Artificial Sequence: Synthetic oligonucleotide
auacgaaagccgacgaaga

SEQ ID NO: 2249247 - RNA, 19 nt, Artificial Sequence
  Description of Artificial Sequence: Synthetic oligonucleotide
uagagggccugaccccggg

SEQ ID NO: 2249248 - RNA, 19 nt, Artificial Sequence
  Description of Artificial Sequence: Synthetic oligonucleotide
cauacuugcgacggaggac

SEQ ID NO: 2249249 - RNA, 19 nt, Artificial Sequence
  Description of Artificial Sequence: Synthetic oligonucleotide
uacuugcgacggaggacgg

SEQ ID NO: 2249250 - RNA, 19 nt, Artificial Sequence
  Description of Artificial Sequence: Synthetic oligonucleotide
ccgaucaaauacgaaagcc

SEQ ID NO: 2249251 - RNA, 19 nt, Artificial Sequence
  Description of Artificial Sequence: Synthetic oligonucleotide
gggacaagacaaaacuugc

SEQ ID NO: 2249252 - RNA, 19 nt, Artificial Sequence
  Description of Artificial Sequence: Synthetic oligonucleotide
aacccacgaccaauaguuc

SEQ ID NO: 2249253 - RNA, 19 nt, Artificial Sequence
  Description of Artificial Sequence: Synthetic oligonucleotide
gacaaccagugacacuuga

SEQ ID NO: 2249254 - RNA, 19 nt, Artificial Sequence
  Description of Artificial Sequence: Synthetic oligonucleotide
ggugucgucccaucggagc

SEQ ID NO: 2249255 - RNA, 19 nt, Artificial Sequence
  Description of Artificial Sequence: Synthetic oligonucleotide
gagcagaccucggucauac

SEQ ID NO: 2249256 - RNA, 19 nt, Artificial Sequence
  Description of Artificial Sequence: Synthetic oligonucleotide
ugguuuccggguaucuuua

SEQ ID NO: 2249257 - RNA, 19 nt, Artificial Sequence
  Description of Artificial Sequence: Synthetic oligonucleotide
agugcgccugguagaaggc

SEQ ID NO: 2249258 - RNA, 19 nt, Artificial Sequence
  Description of Artificial Sequence: Synthetic oligonucleotide
ugugccugcguggccgugg

SEQ ID NO: 2249259 - RNA, 19 nt, Artificial Sequence
  Description of Artificial Sequence: Synthetic oligonucleotide
aagcuucggagaugcgcgu

SEQ ID NO: 2249260 - RNA, 19 nt, Artificial Sequence
  Description of Artificial Sequence: Synthetic oligonucleotide
cuugcucagggcuucugga

SEQ ID NO: 2249261 - RNA, 19 nt, Artificial Sequence
  Description of Artificial Sequence: Synthetic oligonucleotide
cucgggugucgucccaucg

SEQ ID NO: 2249262 - RNA, 19 nt, Artificial Sequence
  Description of Artificial Sequence: Synthetic oligonucleotide
ggcaacuuguagaaacaag

SEQ ID NO: 2249263 - RNA, 19 nt, Artificial Sequence
  Description of Artificial Sequence: Synthetic oligonucleotide
uacccuggggccucuuucu

SEQ ID NO: 2249264 - RNA, 19 nt, Artificial Sequence
  Description of Artificial Sequence: Synthetic oligonucleotide
gaagcucugccgguaguac

SEQ ID NO: 2249265 - RNA, 19 nt, Artificial Sequence
  Description of Artificial Sequence: Synthetic oligonucleotide
uacgccgcuuugaucugug

SEQ ID NO: 2249266 - RNA, 19 nt, Artificial Sequence
  Description of Artificial Sequence: Synthetic oligonucleotide
cacuugaggguucaaaagu

SEQ ID NO: 2249267 - RNA, 19 nt, Artificial Sequence
  Description of Artificial Sequence: Synthetic oligonucleotide
agcacauaaauugcugguu

SEQ ID NO: 2249268 - RNA, 19 nt, Artificial Sequence
  Description of Artificial Sequence: Synthetic oligonucleotide
aucuuuacccuggggccuc

SEQ ID NO: 2249269 - RNA, 19 nt, Artificial Sequence
  Description of Artificial Sequence: Synthetic oligonucleotide
uugcgacggaggacggugc

SEQ ID NO: 2249270 - RNA, 19 nt, Artificial Sequence
  Description of Artificial Sequence: Synthetic oligonucleotide
caccacuagagguagucaa

SEQ ID NO: 2249271 - RNA, 19 nt, Artificial Sequence
  Description of Artificial Sequence: Synthetic oligonucleotide
uggucggugagcagaccuc

SEQ ID NO: 2249272 - RNA, 19 nt, Artificial Sequence
  Description of Artificial Sequence: Synthetic oligonucleotide
acggaggacggugcugccc

SEQ ID NO: 2249273 - RNA, 19 nt, Artificial Sequence
  Description of Artificial Sequence: Synthetic oligonucleotide
aaggccuccccggcgagca

SEQ ID NO: 2249274 - RNA, 19 nt, Artificial Sequence
  Description of Artificial Sequence: Synthetic oligonucleotide
gaugcgcgugaagcgcucg

SEQ ID NO: 2249275 - RNA, 19 nt, Artificial Sequence
  Description of Artificial Sequence: Synthetic oligonucleotide
ccggguaucuuuacccugg

SEQ ID NO: 2249276 - RNA, 19 nt, Artificial Sequence
  Description of Artificial Sequence: Synthetic oligonucleotide
cccgcguagguccuggucg

SEQ ID NO: 2249277 - RNA, 19 nt, Artificial Sequence
  Description of Artificial Sequence: Synthetic oligonucleotide
cccgauguuauaaacaugu

SEQ ID NO: 2249278 - RNA, 19 nt, Artificial Sequence
  Description of Artificial Sequence: Synthetic oligonucleotide
cugcucuccguagugcgcc

SEQ ID NO: 2249279 - RNA, 19 nt, Artificial Sequence
  Description of Artificial Sequence: Synthetic oligonucleotide
augcgcgugaagcgcucgg

SEQ ID NO: 2249280 - RNA, 19 nt, Artificial Sequence
  Description of Artificial Sequence: Synthetic oligonucleotide
guagagggcggugcgggag

SEQ ID NO: 2249281 - RNA, 19 nt, Artificial Sequence
  Description of Artificial Sequence: Synthetic oligonucleotide
auagugcgacggucgccgg

SEQ ID NO: 2249282 - RNA, 19 nt, Artificial Sequence
  Description of Artificial Sequence: Synthetic oligonucleotide
guaguacgccgcuuugauc

SEQ ID NO: 2249283 - RNA, 19 nt, Artificial Sequence
  Description of Artificial Sequence: Synthetic oligonucleotide
aguacgccgcuuugaucug

SEQ ID NO: 2249284 - RNA, 19 nt, Artificial Sequence
  Description of Artificial Sequence: Synthetic oligonucleotide
uuuacccuggggccucuuu

SEQ ID NO: 2249285 - RNA, 19 nt, Artificial Sequence
  Description of Artificial Sequence: Synthetic oligonucleotide
acgccgcuuugaucugugc

SEQ ID NO: 2249286 - RNA, 19 nt, Artificial Sequence
  Description of Artificial Sequence: Synthetic oligonucleotide
cuagagggccugaccccgg

SEQ ID NO: 2249287 - RNA, 19 nt, Artificial Sequence
  Description of Artificial Sequence: Synthetic oligonucleotide
aggagaagguuaugucgau

SEQ ID NO: 2249288 - RNA, 19 nt, Artificial Sequence
  Description of Artificial Sequence: Synthetic oligonucleotide
cucugccgguaguacgccg

SEQ ID NO: 2249289 - RNA, 19 nt, Artificial Sequence
  Description of Artificial Sequence: Synthetic oligonucleotide
uuaugucgaugagcggcca

SEQ ID NO: 2249290 - RNA, 19 nt, Artificial Sequence
  Description of Artificial Sequence: Synthetic oligonucleotide
gacggucgccgggagaggc

SEQ ID NO: 2249291 - RNA, 19 nt, Artificial Sequence
  Description of Artificial Sequence: Synthetic oligonucleotide
ggaguaaggccuccccggc

SEQ ID NO: 2249292 - RNA, 19 nt, Artificial Sequence
  Description of Artificial Sequence: Synthetic oligonucleotide
ugcugcccgauguuauaaa

SEQ ID NO: 2249293 - RNA, 19 nt, Artificial Sequence
  Description of Artificial Sequence: Synthetic oligonucleotide
gcugcccgauguuauaaac

SEQ ID NO: 2249294 - RNA, 19 nt, Artificial Sequence
  Description of Artificial Sequence: Synthetic oligonucleotide
cagagcaauuguucaggga

SEQ ID NO: 2249295 - RNA, 19 nt, Artificial Sequence
  Description of Artificial Sequence: Synthetic oligonucleotide
ggguaucuuuacccugggg

SEQ ID NO: 2249296 - RNA, 19 nt, Artificial Sequence
  Description of Artificial Sequence: Synthetic oligonucleotide
ucccaucggagccccuugu

SEQ ID NO: 2249297 - RNA, 19 nt, Artificial Sequence
  Description of Artificial Sequence: Synthetic oligonucleotide
ccuucuguuugcgaagggc

SEQ ID NO: 2249298 - RNA, 19 nt, Artificial Sequence
  Description of Artificial Sequence: Synthetic oligonucleotide
cuuguuggcccggcucucc

SEQ ID NO: 2249299 - RNA, 19 nt, Artificial Sequence
  Description of Artificial Sequence: Synthetic oligonucleotide
acaccacuagagguaguca

SEQ ID NO: 2249300 - RNA, 19 nt, Artificial Sequence
  Description of Artificial Sequence: Synthetic oligonucleotide
agugcgacggucgccggga

SEQ ID NO: 2249301 - RNA, 19 nt, Artificial Sequence
  Description of Artificial Sequence: Synthetic oligonucleotide
guuggcccggcucuccuuc

SEQ ID NO: 2249302 - RNA, 19 nt, Artificial Sequence
  Description of Artificial Sequence: Synthetic oligonucleotide
cucguagagggcggugcgg

SEQ ID NO: 2249303 - RNA, 19 nt, Artificial Sequence
  Description of Artificial Sequence: Synthetic oligonucleotide
aggcgucaaagucgaacau

SEQ ID NO: 2249304 - RNA, 19 nt, Artificial Sequence
  Description of Artificial Sequence: Synthetic oligonucleotide
caauaguucaaagguccaa

SEQ ID NO: 2249305 - RNA, 19 nt, Artificial Sequence
  Description of Artificial Sequence: Synthetic oligonucleotide
cgaaagccgacgaagacga

SEQ ID NO: 2249306 - RNA, 19 nt, Artificial Sequence
  Description of Artificial Sequence: Synthetic oligonucleotide
uggcaggggacaagacaaa

SEQ ID NO: 2249307 - RNA, 19 nt, Artificial Sequence
  Description of Artificial Sequence: Synthetic oligonucleotide
gcucguagagggcggugcg

SEQ ID NO: 2249308 - RNA, 19 nt, Artificial Sequence
  Description of Artificial Sequence: Synthetic oligonucleotide
gugcgccugguagaaggcg

SEQ ID NO: 2249309 - RNA, 19 nt, Artificial Sequence
  Description of Artificial Sequence: Synthetic oligonucleotide
agggcggugcgggaguaag

SEQ ID NO: 2249310 - RNA, 19 nt, Artificial Sequence
  Description of Artificial Sequence: Synthetic oligonucleotide
ggagaagguuaugucgaug

SEQ ID NO: 2249311 - RNA, 19 nt, Artificial Sequence
  Description of Artificial Sequence: Synthetic oligonucleotide
gaccauaggagaagguuau

SEQ ID NO: 2249312 - RNA, 19 nt, Artificial Sequence
  Description of Artificial Sequence: Synthetic oligonucleotide
gcucccgggguugcgaucg

SEQ ID NO: 2249313 - RNA, 19 nt, Artificial Sequence
  Description of Artificial Sequence: Synthetic oligonucleotide
gaccucggucauacuugcg

SEQ ID NO: 2249314 - RNA, 19 nt, Artificial Sequence
  Description of Artificial Sequence: Synthetic oligonucleotide
accacuagagguagucaau

SEQ ID NO: 2249315 - RNA, 19 nt, Artificial Sequence
  Description of Artificial Sequence: Synthetic oligonucleotide
guaaggccuccccggcgag

SEQ ID NO: 2249316 - RNA, 19 nt, Artificial Sequence
  Description of Artificial Sequence: Synthetic oligonucleotide
ggaccagauaagcuucgga

SEQ ID NO: 2249317 - RNA, 19 nt, Artificial Sequence
  Description of Artificial Sequence: Synthetic oligonucleotide
ggcggugcgggaguaaggc

SEQ ID NO: 2249318 - RNA, 19 nt, Artificial Sequence
  Description of Artificial Sequence: Synthetic oligonucleotide
ugcgacggucgccgggaga

SEQ ID NO: 2249319 - RNA, 19 nt, Artificial Sequence
  Description of Artificial Sequence: Synthetic oligonucleotide
ccucggucauacuugcgac

SEQ ID NO: 2249320 - RNA, 19 nt, Artificial Sequence
  Description of Artificial Sequence: Synthetic oligonucleotide
ggaccauaggagaagguua

SEQ ID NO: 2249321 - RNA, 19 nt, Artificial Sequence
  Description of Artificial Sequence: Synthetic oligonucleotide
ugcgggaguaaggccuccc

SEQ ID NO: 2249322 - RNA, 19 nt, Artificial Sequence
  Description of Artificial Sequence: Synthetic oligonucleotide
ccuagagggccugaccccg

SEQ ID NO: 2249323 - RNA, 19 nt, Artificial Sequence
  Description of Artificial Sequence: Synthetic oligonucleotide
gucccaucggagccccuug

SEQ ID NO: 2249324 - RNA, 19 nt, Artificial Sequence
  Description of Artificial Sequence: Synthetic oligonucleotide
agcuucggagaugcgcgug

SEQ ID NO: 2249325 - RNA, 19 nt, Artificial Sequence
  Description of Artificial Sequence: Synthetic oligonucleotide
cgaugagcggccaggcugg

SEQ ID NO: 2249326 - RNA, 19 nt, Artificial Sequence
  Description of Artificial Sequence: Synthetic oligonucleotide
gagcaauuguucagggagu

SEQ ID NO: 2249327 - RNA, 19 nt, Artificial Sequence
  Description of Artificial Sequence: Synthetic oligonucleotide
gcgcgugaagcgcucggcg

SEQ ID NO: 2249328 - RNA, 19 nt, Artificial Sequence
  Description of Artificial Sequence: Synthetic oligonucleotide
ucucgggugucgucccauc

SEQ ID NO: 2249329 - RNA, 19 nt, Artificial Sequence
  Description of Artificial Sequence: Synthetic oligonucleotide
gaugagcggccaggcuggg

SEQ ID NO: 2249330 - RNA, 19 nt, Artificial Sequence
  Description of Artificial Sequence: Synthetic oligonucleotide
cgaccaauaguucaaaggu

SEQ ID NO: 2249331 - RNA, 19 nt, Artificial Sequence
  Description of Artificial Sequence: Synthetic oligonucleotide
acggucgccgggagaggcc

SEQ ID NO: 2249332 - RNA, 19 nt, Artificial Sequence
  Description of Artificial Sequence: Synthetic oligonucleotide
gcaggggacaagacaaaac

SEQ ID NO: 2249333 - RNA, 19 nt, Artificial Sequence
  Description of Artificial Sequence: Synthetic oligonucleotide
gcgaucgggaugguagcgg

SEQ ID NO: 2249334 - RNA, 19 nt, Artificial Sequence
  Description of Artificial Sequence: Synthetic oligonucleotide
ccaucggagccccuuguug

SEQ ID NO: 2249335 - RNA, 19 nt, Artificial Sequence
  Description of Artificial Sequence: Synthetic oligonucleotide
ccaauaguucaaaggucca

SEQ ID NO: 2249336 - RNA, 19 nt, Artificial Sequence
  Description of Artificial Sequence: Synthetic oligonucleotide
gccgacgaagacgaagaug

SEQ ID NO: 2249337 - RNA, 19 nt, Artificial Sequence
  Description of Artificial Sequence: Synthetic oligonucleotide
agccgacgaagacgaagau

SEQ ID NO: 2249338 - RNA, 19 nt, Artificial Sequence
  Description of Artificial Sequence: Synthetic oligonucleotide
gguuuccggguaucuuuac

SEQ ID NO: 2249339 - RNA, 19 nt, Artificial Sequence
  Description of Artificial Sequence: Synthetic oligonucleotide
cuggucggugagcagaccu

SEQ ID NO: 2249340 - RNA, 19 nt, Artificial Sequence
  Description of Artificial Sequence: Synthetic oligonucleotide
caauccaacccacgaccaa

SEQ ID NO: 2249341 - RNA, 19 nt, Artificial Sequence
  Description of Artificial Sequence: Synthetic oligonucleotide
ugcucuccguagugcgccu

SEQ ID NO: 2249342 - RNA, 19 nt, Artificial Sequence
  Description of Artificial Sequence: Synthetic oligonucleotide
gaaagccuagagggccuga

SEQ ID NO: 2249343 - RNA, 19 nt, Artificial Sequence
  Description of Artificial Sequence: Synthetic oligonucleotide
gguaguacgccgcuuugau

SEQ ID NO: 2249344 - RNA, 19 nt, Artificial Sequence
  Description of Artificial Sequence: Synthetic oligonucleotide
gcaauuguucagggaguug

SEQ ID NO: 2249345 - RNA, 19 nt, Artificial Sequence
  Description of Artificial Sequence: Synthetic oligonucleotide
gggaugguagcggaagcuc

SEQ ID NO: 2249346 - RNA, 19 nt, Artificial Sequence
  Description of Artificial Sequence: Synthetic oligonucleotide
cucggugcucccgggguug

SEQ ID NO: 2249347 - RNA, 19 nt, Artificial Sequence
  Description of Artificial Sequence: Synthetic oligonucleotide
gucgucccaucggagcccc

SEQ ID NO: 2249348 - RNA, 19 nt, Artificial Sequence
  Description of Artificial Sequence: Synthetic oligonucleotide
uguuggcccggcucuccuu

SEQ ID NO: 2249349 - RNA, 19 nt, Artificial Sequence
  Description of Artificial Sequence: Synthetic oligonucleotide
gaccccgggcccgcguagg

SEQ ID NO: 2249350 - RNA, 19 nt, Artificial Sequence
  Description of Artificial Sequence: Synthetic oligonucleotide
gacaucuggaaggcaacuu

SEQ ID NO: 2249351 - RNA, 19 nt, Artificial Sequence
  Description of Artificial Sequence: Synthetic oligonucleotide
auccaacccacgaccaaua

SEQ ID NO: 2249352 - RNA, 19 nt, Artificial Sequence
  Description of Artificial Sequence: Synthetic oligonucleotide
gcuucggagaugcgcguga

SEQ ID NO: 2249353 - RNA, 19 nt, Artificial Sequence
  Description of Artificial Sequence: Synthetic oligonucleotide
acggugcugcccaggacca

SEQ ID NO: 2249354 - RNA, 19 nt, Artificial Sequence
  Description of Artificial Sequence: Synthetic oligonucleotide
agaggcccgaaagccuaga

SEQ ID NO: 2249355 - RNA, 19 nt, Artificial Sequence
  Description of Artificial Sequence: Synthetic oligonucleotide
acuugcgacggaggacggu

SEQ ID NO: 2249356 - RNA, 19 nt, Artificial Sequence
  Description of Artificial Sequence: Synthetic oligonucleotide
cgaacauagugcgacgguc

SEQ ID NO: 2249357 - RNA, 19 nt, Artificial Sequence
  Description of Artificial Sequence: Synthetic oligonucleotide
ccgcguagguccuggucgg

SEQ ID NO: 2249358 - RNA, 19 nt, Artificial Sequence
  Description of Artificial Sequence: Synthetic oligonucleotide
ugccugcguggccguggag

SEQ ID NO: 2249359 - RNA, 19 nt, Artificial Sequence
  Description of Artificial Sequence: Synthetic oligonucleotide
guuugcgaagggccucucu

SEQ ID NO: 2249360 - RNA, 19 nt, Artificial Sequence
  Description of Artificial Sequence: Synthetic oligonucleotide
ggacaagacaaaacuugcu

SEQ ID NO: 2249361 - RNA, 19 nt, Artificial Sequence
  Description of Artificial Sequence: Synthetic oligonucleotide
uguuugcgaagggccucuc

SEQ ID NO: 2249362 - RNA, 19 nt, Artificial Sequence
  Description of Artificial Sequence: Synthetic oligonucleotide
gaucgggaugguagcggaa

SEQ ID NO: 2249363 - RNA, 19 nt, Artificial Sequence
  Description of Artificial Sequence: Synthetic oligonucleotide
gaggggacgcccagcagcu

SEQ ID NO: 2249364 - RNA, 19 nt, Artificial Sequence
  Description of Artificial Sequence: Synthetic oligonucleotide
ggcgucaaagucgaacaua

SEQ ID NO: 2249365 - RNA, 19 nt, Artificial Sequence
  Description of Artificial Sequence: Synthetic oligonucleotide
cccacgaccaauaguucaa

SEQ ID NO: 2249366 - RNA, 19 nt, Artificial Sequence
  Description of Artificial Sequence: Synthetic oligonucleotide
aucucgggugucgucccau

SEQ ID NO: 2249367 - RNA, 19 nt, Artificial Sequence
  Description of Artificial Sequence: Synthetic oligonucleotide
cccaggggucucuggaaac

SEQ ID NO: 2249368 - RNA, 19 nt, Artificial Sequence
  Description of Artificial Sequence: Synthetic oligonucleotide
gcggugcgggaguaaggcc

SEQ ID NO: 2249369 - RNA, 19 nt, Artificial Sequence
  Description of Artificial Sequence: Synthetic oligonucleotide
agcggaagcucugccggua

SEQ ID NO: 2249370 - RNA, 19 nt, Artificial Sequence
  Description of Artificial Sequence: Synthetic oligonucleotide
cuccgggcgcgcagacgcc

SEQ ID NO: 2249371 - RNA, 19 nt, Artificial Sequence
  Description of Artificial Sequence: Synthetic oligonucleotide
gcccgauguuauaaacaug

SEQ ID NO: 2249372 - RNA, 19 nt, Artificial Sequence
  Description of Artificial Sequence: Synthetic oligonucleotide
gcugcucuccguagugcgc

SEQ ID NO: 2249373 - RNA, 19 nt, Artificial Sequence
  Description of Artificial Sequence: Synthetic oligonucleotide
cugcguggccguggagggg

SEQ ID NO: 2249374 - RNA, 19 nt, Artificial Sequence
  Description of Artificial Sequence: Synthetic oligonucleotide
ggcaggggacaagacaaaa

SEQ ID NO: 2249375 - RNA, 19 nt, Artificial Sequence
  Description of Artificial Sequence: Synthetic oligonucleotide
gugcgacggucgccgggag

SEQ ID NO: 2249376 - RNA, 19 nt, Artificial Sequence
  Description of Artificial Sequence: Synthetic oligonucleotide
gggugucgucccaucggag

SEQ ID NO: 2249377 - RNA, 19 nt, Artificial Sequence
  Description of Artificial Sequence: Synthetic oligonucleotide
cucccgggguugcgaucgg

SEQ ID NO: 2249378 - RNA, 19 nt, Artificial Sequence
  Description of Artificial Sequence: Synthetic oligonucleotide
gcccgaaagccuagagggc

SEQ ID NO: 2249379 - RNA, 19 nt, Artificial Sequence
  Description of Artificial Sequence: Synthetic oligonucleotide
ggugcgggaguaaggccuc

SEQ ID NO: 2249380 - RNA, 19 nt, Artificial Sequence
  Description of Artificial Sequence: Synthetic oligonucleotide
ggaaggcaacuuguagaaa

SEQ ID NO: 2249381 - RNA, 19 nt, Artificial Sequence
  Description of Artificial Sequence: Synthetic oligonucleotide
aggggacgcccagcagcuc

SEQ ID NO: 2249382 - RNA, 19 nt, Artificial Sequence
  Description of Artificial Sequence: Synthetic oligonucleotide
caucucgggugucguccca

SEQ ID NO: 2249383 - RNA, 19 nt, Artificial Sequence
  Description of Artificial Sequence: Synthetic oligonucleotide
gggcggugcgggaguaagg

SEQ ID NO: 2249384 - RNA, 19 nt, Artificial Sequence
  Description of Artificial Sequence: Synthetic oligonucleotide
gcguagguccuggucggug

SEQ ID NO: 2249385 - RNA, 19 nt, Artificial Sequence
  Description of Artificial Sequence: Synthetic oligonucleotide
augagcggccaggcuggga

SEQ ID NO: 2249386 - RNA, 19 nt, Artificial Sequence
  Description of Artificial Sequence: Synthetic oligonucleotide
ccgguaguacgccgcuuug

SEQ ID NO: 2249387 - RNA, 19 nt, Artificial Sequence
  Description of Artificial Sequence: Synthetic oligonucleotide
cguagguccuggucgguga

SEQ ID NO: 2249388 - RNA, 19 nt, Artificial Sequence
  Description of Artificial Sequence: Synthetic oligonucleotide
cuccguagugcgccuggua

SEQ ID NO: 2249389 - RNA, 19 nt, Artificial Sequence
  Description of Artificial Sequence: Synthetic oligonucleotide
ccguagugcgccugguaga

SEQ ID NO: 2249390 - RNA, 19 nt, Artificial Sequence
  Description of Artificial Sequence: Synthetic oligonucleotide
cgggguugcgaucgggaug

SEQ ID NO: 2249391 - RNA, 19 nt, Artificial Sequence
  Description of Artificial Sequence: Synthetic oligonucleotide
gcucugccgguaguacgcc

SEQ ID NO: 2249392 - RNA, 19 nt, Artificial Sequence
  Description of Artificial Sequence: Synthetic oligonucleotide
gugcgggaguaaggccucc

SEQ ID NO: 2249393 - RNA, 19 nt, Artificial Sequence
  Description of Artificial Sequence: Synthetic oligonucleotide
cucucuccgggcgcgcaga

SEQ ID NO: 2249394 - RNA, 19 nt, Artificial Sequence
  Description of Artificial Sequence: Synthetic oligonucleotide
agagggcggugcgggagua

SEQ ID NO: 2249395 - RNA, 19 nt, Artificial Sequence
  Description of Artificial Sequence: Synthetic oligonucleotide
cgaucgggaugguagcgga

SEQ ID NO: 2249396 - RNA, 19 nt, Artificial Sequence
  Description of Artificial Sequence: Synthetic oligonucleotide
gggcccgcguagguccugg

SEQ ID NO: 2249397 - RNA, 19 nt, Artificial Sequence
  Description of Artificial Sequence: Synthetic oligonucleotide
ugccgguaguacgccgcuu

SEQ ID NO: 2249398 - RNA, 19 nt, Artificial Sequence
  Description of Artificial Sequence: Synthetic oligonucleotide
ccucucuccgggcgcgcag

SEQ ID NO: 2249399 - RNA, 19 nt, Artificial Sequence
  Description of Artificial Sequence: Synthetic oligonucleotide
ccaacccacgaccaauagu

SEQ ID NO: 2249400 - RNA, 19 nt, Artificial Sequence
  Description of Artificial Sequence: Synthetic oligonucleotide
gugacacuugaggguucaa

SEQ ID NO: 2249401 - RNA, 19 nt, Artificial Sequence
  Description of Artificial Sequence: Synthetic oligonucleotide
ccccggcgagcacaagccc

SEQ ID NO: 2249402 - RNA, 19 nt, Artificial Sequence
  Description of Artificial Sequence: Synthetic oligonucleotide
cccgggguugcgaucggga

SEQ ID NO: 2249403 - RNA, 19 nt, Artificial Sequence
  Description of Artificial Sequence: Synthetic oligonucleotide
gcccgcguagguccugguc

SEQ ID NO: 2249404 - RNA, 19 nt, Artificial Sequence
  Description of Artificial Sequence: Synthetic oligonucleotide
gucgccgggagaggcccga

SEQ ID NO: 2249405 - RNA, 19 nt, Artificial Sequence
  Description of Artificial Sequence: Synthetic oligonucleotide
cugaccccgggcccgcgua

SEQ ID NO: 2249406 - RNA, 19 nt, Artificial Sequence
  Description of Artificial Sequence: Synthetic oligonucleotide
gccgguaguacgccgcuuu

SEQ ID NO: 2249407 - RNA, 19 nt, Artificial Sequence
  Description of Artificial Sequence: Synthetic oligonucleotide
gguugcgaucgggauggua

SEQ ID NO: 2249408 - RNA, 19 nt, Artificial Sequence
  Description of Artificial Sequence: Synthetic oligonucleotide
cugccgguaguacgccgcu

SEQ ID NO: 2249409 - RNA, 19 nt, Artificial Sequence
  Description of Artificial Sequence: Synthetic oligonucleotide
gagggcggugcgggaguaa

SEQ ID NO: 2249410 - RNA, 19 nt, Artificial Sequence
  Description of Artificial Sequence: Synthetic oligonucleotide
cggugcgggaguaaggccu

SEQ ID NO: 2249411 - RNA, 19 nt, Artificial Sequence
  Description of Artificial Sequence: Synthetic oligonucleotide
cgaaagccuagagggccug

SEQ ID NO: 2249412 - RNA, 19 nt, Artificial Sequence
  Description of Artificial Sequence: Synthetic oligonucleotide
gugcucccgggguugcgau

SEQ ID NO: 2249413 - RNA, 19 nt, Artificial Sequence
  Description of Artificial Sequence: Synthetic oligonucleotide
cgggugucgucccaucgga

SEQ ID NO: 2249414 - RNA, 19 nt, Artificial Sequence
  Description of Artificial Sequence: Synthetic oligonucleotide
ccgaaagccuagagggccu

SEQ ID NO: 2249415 - RNA, 19 nt, Artificial Sequence
  Description of Artificial Sequence: Synthetic oligonucleotide
gccucggugcucccggggu

SEQ ID NO: 2249416 - RNA, 19 nt, Artificial Sequence
  Description of Artificial Sequence: Synthetic oligonucleotide
ggcgcgcagacgccgcucu

SEQ ID NO: 2249417 - RNA, 19 nt, Artificial Sequence
  Description of Artificial Sequence: Synthetic oligonucleotide
cggucgccgggagaggccc

SEQ ID NO: 2249418 - RNA, 19 nt, Artificial Sequence
  Description of Artificial Sequence: Synthetic oligonucleotide
ccacgaccaauaguucaaa

SEQ ID NO: 2249419 - RNA, 19 nt, Artificial Sequence
  Description of Artificial Sequence: Synthetic oligonucleotide
cgguaguacgccgcuuuga

SEQ ID NO: 2249420 - RNA, 19 nt, Artificial Sequence
  Description of Artificial Sequence: Synthetic oligonucleotide
ggccugaccccgggcccgc

SEQ ID NO: 2249421 - RNA, 19 nt, Artificial Sequence
  Description of Artificial Sequence: Synthetic oligonucleotide
ggccucucuccgggcgcgc

SEQ ID NO: 2249422 - RNA, 19 nt, Artificial Sequence
  Description of Artificial Sequence: Synthetic oligonucleotide
gccucucuccgggcgcgca

SEQ ID NO: 2249423 - RNA, 19 nt, Artificial Sequence
  Description of Artificial Sequence: Synthetic oligonucleotide
cggucauacuugcgacgga

SEQ ID NO: 2249424 - RNA, 19 nt, Artificial Sequence
  Description of Artificial Sequence: Synthetic oligonucleotide
ccgggguugcgaucgggau

SEQ ID NO: 2249425 - RNA, 19 nt, Artificial Sequence
  Description of Artificial Sequence: Synthetic oligonucleotide
cgacggucgccgggagagg

SEQ ID NO: 2249426 - RNA, 19 nt, Artificial Sequence
  Description of Artificial Sequence: Synthetic oligonucleotide
gccuccccggcgagcacaa

SEQ ID NO: 2249427 - RNA, 19 nt, Artificial Sequence
  Description of Artificial Sequence: Synthetic oligonucleotide
gccccuuguuggcccggcu

SEQ ID NO: 2249428 - RNA, 19 nt, Artificial Sequence
  Description of Artificial Sequence: Synthetic oligonucleotide
cuuuacccuggggccucuu

SEQ ID NO: 2249429 - RNA, 19 nt, Artificial Sequence
  Description of Artificial Sequence: Synthetic oligonucleotide
cggugcucccgggguugcg

SEQ ID NO: 2249430 - RNA, 19 nt, Artificial Sequence
  Description of Artificial Sequence: Synthetic oligonucleotide
cccaucggagccccuuguu

SEQ ID NO: 2249431 - RNA, 19 nt, Artificial Sequence
  Description of Artificial Sequence: Synthetic oligonucleotide
ccuccccggcgagcacaag

SEQ ID NO: 2249432 - RNA, 19 nt, Artificial Sequence
  Description of Artificial Sequence: Synthetic oligonucleotide
ggcccgcguagguccuggu

SEQ ID NO: 2249433 - RNA, 19 nt, Artificial Sequence
  Description of Artificial Sequence: Synthetic oligonucleotide
ccucggugcucccgggguu

SEQ ID NO: 2249434 - RNA, 19 nt, Artificial Sequence
  Description of Artificial Sequence: Synthetic oligonucleotide
ccugaccccgggcccgcgu

SEQ ID NO: 2249435 - RNA, 19 nt, Artificial Sequence
  Description of Artificial Sequence: Synthetic oligonucleotide
cgccgggagaggcccgaaa

SEQ ID NO: 2249436 - RNA, 19 nt, Artificial Sequence
  Description of Artificial Sequence: Synthetic oligonucleotide
ggguugcgaucgggauggu

SEQ ID NO: 2249437 - RNA, 19 nt, Artificial Sequence
  Description of Artificial Sequence: Synthetic oligonucleotide
cgucccaucggagccccuu

SEQ ID NO: 2249438 - RNA, 19 nt, Artificial Sequence
  Description of Artificial Sequence: Synthetic oligonucleotide
cgggcccgcguagguccug

SEQ ID NO: 2249439 - RNA, 19 nt, Artificial Sequence
  Description of Artificial Sequence: Synthetic oligonucleotide
cgcguagguccuggucggu

SEQ ID NO: 2249440 - RNA, 19 nt, Artificial Sequence
  Description of Artificial Sequence: Synthetic oligonucleotide
  modified_base (4)..(4): a, c, u, g, unknown or other
uuunuuuucucuauagacc

SEQ ID NO: 2249441 - RNA, 19 nt, Artificial Sequence
  Description of Artificial Sequence: Synthetic oligonucleotide
ucaaacuauaauuaaacug

SEQ ID NO: 2249442 - RNA, 19 nt, Artificial Sequence
  Description of Artificial Sequence: Synthetic oligonucleotide
aacaacaaucaacacauag

SEQ ID NO: 2249443 - RNA, 19 nt, Artificial Sequence
  Description of Artificial Sequence: Synthetic oligonucleotide
  modified_base (5)..(5): a, c, u, g, unknown or other
uuuunuuuucucuauagac

SEQ ID NO: 2249444 - RNA, 19 nt, Artificial Sequence
  Description of Artificial Sequence: Synthetic oligonucleotide
acaaucaacacauagccag

SEQ ID NO: 2249445 - RNA, 19 nt, Artificial Sequence
  Description of Artificial Sequence: Synthetic oligonucleotide
ugcaugaacacucaaagca

SEQ ID NO: 2249446 - RNA, 19 nt, Artificial Sequence
  Description of Artificial Sequence: Synthetic oligonucleotide
caacuugugaguuaaaagg

SEQ ID NO: 2249447 - RNA, 19 nt, Artificial Sequence
  Description of Artificial Sequence: Synthetic oligonucleotide
aauuaaacuggcuuaagaa

SEQ ID NO: 2249448 - RNA, 19 nt, Artificial Sequence
  Description of Artificial Sequence: Synthetic oligonucleotide
aaaacaacaaucaacacau

SEQ ID NO: 2249449 - RNA, 19 nt, Artificial Sequence
  Description of Artificial Sequence: Synthetic oligonucleotide
  modified_base (3)..(3): a, c, u, g, unknown or other
uunuuuucucuauagacca

SEQ ID NO: 2249450 - RNA, 19 nt, Artificial Sequence
  Description of Artificial Sequence: Synthetic oligonucleotide
uacagaaccacguaucugg

SEQ ID NO: 2249451 - RNA, 19 nt, Artificial Sequence
  Description of Artificial Sequence: Synthetic oligonucleotide
  modified_base (7)..(7): a, c, u, g, unknown or other
ucuuuunuuuucucuauag

SEQ ID NO: 2249452 - RNA, 19 nt, Artificial Sequence
  Description of Artificial Sequence: Synthetic oligonucleotide
ugugcaugaacacucaaag

SEQ ID NO: 2249453 - RNA, 19 nt, Artificial Sequence
  Description of Artificial Sequence: Synthetic oligonucleotide
cuuuugucagauuucaugg

SEQ ID NO: 2249454 - RNA, 19 nt, Artificial Sequence
  Description of Artificial Sequence: Synthetic oligonucleotide
ugaguuaaaaggaauaaaa

SEQ ID NO: 2249455 - RNA, 19 nt, Artificial Sequence
  Description of Artificial Sequence: Synthetic oligonucleotide
uccauugcuaucaaaaggc

SEQ ID NO: 2249456 - RNA, 19 nt, Artificial Sequence
  Description of Artificial Sequence: Synthetic oligonucleotide
cucugcaucauacagaacc

SEQ ID NO: 2249457 - RNA, 19 nt, Artificial Sequence
  Description of Artificial Sequence: Synthetic oligonucleotide
aaucaaaagcuucaugcug

SEQ ID NO: 2249458 - RNA, 19 nt, Artificial Sequence
  Description of Artificial Sequence: Synthetic oligonucleotide
caacaaucaacacauagcc

SEQ ID NO: 2249459 - RNA, 19 nt, Artificial Sequence
  Description of Artificial Sequence: Synthetic oligonucleotide
auucaaacuauaauuaaac

SEQ ID NO: 2249460 - RNA, 19 nt, Artificial Sequence
  Description of Artificial Sequence: Synthetic oligonucleotide
uuccauugcuaucaaaagg

SEQ ID NO: 2249461 - RNA, 19 nt, Artificial Sequence
  Description of Artificial Sequence: Synthetic oligonucleotide
aaggcaauuugccuuuuac

SEQ ID NO: 2249462 - RNA, 19 nt, Artificial Sequence
  Description of Artificial Sequence: Synthetic oligonucleotide
aaucauacauuccauugcu

SEQ ID NO: 2249463 - RNA, 19 nt, Artificial Sequence
  Description of Artificial Sequence: Synthetic oligonucleotide
uuaaacuggcuuaagaaau

SEQ ID NO: 2249464 - RNA, 19 nt, Artificial Sequence
  Description of Artificial Sequence: Synthetic oligonucleotide
ucagaugacaaauuuaaau

SEQ ID NO: 2249465 - RNA, 19 nt, Artificial Sequence
  Description of Artificial Sequence: Synthetic oligonucleotide
aaacuauaauuaaacuggc

SEQ ID NO: 2249466 - RNA, 19 nt, Artificial Sequence
  Description of Artificial Sequence: Synthetic oligonucleotide
aauugguauuuccaaagga

SEQ ID NO: 2249467 - RNA, 19 nt, Artificial Sequence
  Description of Artificial Sequence: Synthetic oligonucleotide
acuauaauuaaacuggcuu

SEQ ID NO: 2249468 - RNA, 19 nt, Artificial Sequence
  Description of Artificial Sequence: Synthetic oligonucleotide
uaauuaaacuggcuuaaga

SEQ ID NO: 2249469 - RNA, 19 nt, Artificial Sequence
  Description of Artificial Sequence: Synthetic oligonucleotide
aacaaauugguauuuccaa

SEQ ID NO: 2249470 - RNA, 19 nt, Artificial Sequence
  Description of Artificial Sequence: Synthetic oligonucleotide
uugguauuuccaaaggaca

SEQ ID NO: 2249471 - RNA, 19 nt, Artificial Sequence
  Description of Artificial Sequence: Synthetic oligonucleotide
aaauacaggagaugacucu

SEQ ID NO: 2249472 - RNA, 19 nt, Artificial Sequence
  Description of Artificial Sequence: Synthetic oligonucleotide
uuauucugaggguaaaaca

SEQ ID NO: 2249473 - RNA, 19 nt, Artificial Sequence
  Description of Artificial Sequence: Synthetic oligonucleotide
auuaaacuggcuuaagaaa

SEQ ID NO: 2249474 - RNA, 19 nt, Artificial Sequence
  Description of Artificial Sequence: Synthetic oligonucleotide
aacacauagccagucuccc

SEQ ID NO: 2249475 - RNA, 19 nt, Artificial Sequence
  Description of Artificial Sequence: Synthetic oligonucleotide
caaaggacaaagcuuuucc

SEQ ID NO: 2249476 - RNA, 19 nt, Artificial Sequence
  Description of Artificial Sequence: Synthetic oligonucleotide
aaaggacaaagcuuuuccu

SEQ ID NO: 2249477 - RNA, 19 nt, Artificial Sequence
  Description of Artificial Sequence: Synthetic oligonucleotide
acuacugguggcuugucuc

SEQ ID NO: 2249478 - RNA, 19 nt, Artificial Sequence
  Description of Artificial Sequence: Synthetic oligonucleotide
gguaaaacaacaaucaaca

SEQ ID NO: 2249479 - RNA, 19 nt, Artificial Sequence
  Description of Artificial Sequence: Synthetic oligonucleotide
aauucaaacuauaauuaaa

SEQ ID NO: 2249480 - RNA, 19 nt, Artificial Sequence
  Description of Artificial Sequence: Synthetic oligonucleotide
auuccauugcuaucaaaag

SEQ ID NO: 2249481 - RNA, 19 nt, Artificial Sequence
  Description of Artificial Sequence: Synthetic oligonucleotide
ucaaagguuuuccuguaga

SEQ ID NO: 2249482 - RNA, 19 nt, Artificial Sequence
  Description of Artificial Sequence: Synthetic oligonucleotide
aaauuuaaaucaaaagcuu

SEQ ID NO: 2249483 - RNA, 19 nt, Artificial Sequence
  Description of Artificial Sequence: Synthetic oligonucleotide
uuugguagaggcacgcucu

SEQ ID NO: 2249484 - RNA, 19 nt, Artificial Sequence
  Description of Artificial Sequence: Synthetic oligonucleotide
agaaccacguaucugggcu

SEQ ID NO: 2249485 - RNA, 19 nt, Artificial Sequence
  Description of Artificial Sequence: Synthetic oligonucleotide
ucauacauuccauugcuau

SEQ ID NO: 2249486 - RNA, 19 nt, Artificial Sequence
  Description of Artificial Sequence: Synthetic oligonucleotide
uauaauuaaacuggcuuaa

SEQ ID NO: 2249487 - RNA, 19 nt, Artificial Sequence
  Description of Artificial Sequence: Synthetic oligonucleotide
cuuucaggaugccauaggc

SEQ ID NO: 2249488 - RNA, 19 nt, Artificial Sequence
  Description of Artificial Sequence: Synthetic oligonucleotide
aaucaacacauagccaguc

SEQ ID NO: 2249489 - RNA, 19 nt, Artificial Sequence
  Description of Artificial Sequence: Synthetic oligonucleotide
uggugauccaauucaaacu

SEQ ID NO: 2249490 - RNA, 19 nt, Artificial Sequence
  Description of Artificial Sequence: Synthetic oligonucleotide
ugcaguacccgcgucaagg

SEQ ID NO: 2249491 - RNA, 19 nt, Artificial Sequence
  Description of Artificial Sequence: Synthetic oligonucleotide
aagauucacccacacuucu

SEQ ID NO: 2249492 - RNA, 19 nt, Artificial Sequence
  Description of Artificial Sequence: Synthetic oligonucleotide
aaggacaaagcuuuuccuu

SEQ ID NO: 2249493 - RNA, 19 nt, Artificial Sequence
  Description of Artificial Sequence: Synthetic oligonucleotide
aagcggauggaugaugguc

SEQ ID NO: 2249494 - RNA, 19 nt, Artificial Sequence
  Description of Artificial Sequence: Synthetic oligonucleotide
auacauuccauugcuauca

SEQ ID NO: 2249495 - RNA, 19 nt, Artificial Sequence
  Description of Artificial Sequence: Synthetic oligonucleotide
agacacacacauuuguugu

SEQ ID NO: 2249496 - RNA, 19 nt, Artificial Sequence
  Description of Artificial Sequence: Synthetic oligonucleotide
ugaacacucaaagcagagg

SEQ ID NO: 2249497 - RNA, 19 nt, Artificial Sequence
  Description of Artificial Sequence: Synthetic oligonucleotide
  modified_base (2)..(2): a, c, u, g, unknown or other
unuuuucucuauagaccag

SEQ ID NO: 2249498 - RNA, 19 nt, Artificial Sequence
  Description of Artificial Sequence: Synthetic oligonucleotide
uuuugguagaggcacgcuc

SEQ ID NO: 2249499 - RNA, 19 nt, Artificial Sequence
  Description of Artificial Sequence: Synthetic oligonucleotide
caaagguuuuccuguagag

SEQ ID NO: 2249500 - RNA, 19 nt, Artificial Sequence
  Description of Artificial Sequence: Synthetic oligonucleotide
ugugaguuaaaaggaauaa

SEQ ID NO: 2249501 - RNA, 19 nt, Artificial Sequence
  Description of Artificial Sequence: Synthetic oligonucleotide
uugugaguuaaaaggaaua

SEQ ID NO: 2249502 - RNA, 19 nt, Artificial Sequence
  Description of Artificial Sequence: Synthetic oligonucleotide
cauuccauugcuaucaaaa

SEQ ID NO: 2249503 - RNA, 19 nt, Artificial Sequence
  Description of Artificial Sequence: Synthetic oligonucleotide
gagaugacucuuuguuugg

SEQ ID NO: 2249504 - RNA, 19 nt, Artificial Sequence
  Description of Artificial Sequence: Synthetic oligonucleotide
ucuaagauucacccacacu

SEQ ID NO: 2249505 - RNA, 19 nt, Artificial Sequence
  Description of Artificial Sequence: Synthetic oligonucleotide
gccuuuuacaacuugugag

SEQ ID NO: 2249506 - RNA, 19 nt, Artificial Sequence
  Description of Artificial Sequence: Synthetic oligonucleotide
ugccuuuuacaacuuguga

SEQ ID NO: 2249507 - RNA, 19 nt, Artificial Sequence
  Description of Artificial Sequence: Synthetic oligonucleotide
guggugauccaauucaaac

SEQ ID NO: 2249508 - RNA, 19 nt, Artificial Sequence
  Description of Artificial Sequence: Synthetic oligonucleotide
  modified_base (9)..(9): a, c, u, g, unknown or other
uuucuuuunuuuucucuau

SEQ ID NO: 2249509 - RNA, 19 nt, Artificial Sequence
  Description of Artificial Sequence: Synthetic oligonucleotide
uagagccgcagcaggaagg

SEQ ID NO: 2249510 - RNA, 19 nt, Artificial Sequence
  Description of Artificial Sequence: Synthetic oligonucleotide
cagacacacacauuuguug

SEQ ID NO: 2249511 - RNA, 19 nt, Artificial Sequence
  Description of Artificial Sequence: Synthetic oligonucleotide
ucagaguuagcucucgcuu

SEQ ID NO: 2249512 - RNA, 19 nt, Artificial Sequence
  Description of Artificial Sequence: Synthetic oligonucleotide
cuauaauuaaacuggcuua

SEQ ID NO: 2249513 - RNA, 19 nt, Artificial Sequence
  Description of Artificial Sequence: Synthetic oligonucleotide
uggcuuaagaaaucauaca

SEQ ID NO: 2249514 - RNA, 19 nt, Artificial Sequence
  Description of Artificial Sequence: Synthetic oligonucleotide
uugucagauuucaugguuc

SEQ ID NO: 2249515 - RNA, 19 nt, Artificial Sequence
  Description of Artificial Sequence: Synthetic oligonucleotide
uuuucucuauagaccaggu

SEQ ID NO: 2249516 - RNA, 19 nt, Artificial Sequence
  Description of Artificial Sequence: Synthetic oligonucleotide
auucugaggguaaaacaac

SEQ ID NO: 2249517 - RNA, 19 nt, Artificial Sequence
  Description of Artificial Sequence: Synthetic oligonucleotide
auccaauucaaacuauaau

SEQ ID NO: 2249518 - RNA, 19 nt, Artificial Sequence
  Description of Artificial Sequence: Synthetic oligonucleotide
agucagaugacaaauuuaa

SEQ ID NO: 2249519 - RNA, 19 nt, Artificial Sequence
  Description of Artificial Sequence: Synthetic oligonucleotide
cauaggccgagucagauga

SEQ ID NO: 2249520 - RNA, 19 nt, Artificial Sequence
  Description of Artificial Sequence: Synthetic oligonucleotide
uugcgucagaguuagcucu

SEQ ID NO: 2249521 - RNA, 19 nt, Artificial Sequence
  Description of Artificial Sequence: Synthetic oligonucleotide
ucacuugcgucagaguuag

SEQ ID NO: 2249522 - RNA, 19 nt, Artificial Sequence
  Description of Artificial Sequence: Synthetic oligonucleotide
gauucacccacacuucuuc

SEQ ID NO: 2249523 - RNA, 19 nt, Artificial Sequence
  Description of Artificial Sequence: Synthetic oligonucleotide
auugcuaucaaaaggcaau

SEQ ID NO: 2249524 - RNA, 19 nt, Artificial Sequence
  Description of Artificial Sequence: Synthetic oligonucleotide
acacucaaagcagaggcag

SEQ ID NO: 2249525 - RNA, 19 nt, Artificial Sequence
  Description of Artificial Sequence: Synthetic oligonucleotide
ugccguacaaaggugagcu

SEQ ID NO: 2249526 - RNA, 19 nt, Artificial Sequence
  Description of Artificial Sequence: Synthetic oligonucleotide
ugauccaauucaaacuaua

SEQ ID NO: 2249527 - RNA, 19 nt, Artificial Sequence
  Description of Artificial Sequence: Synthetic oligonucleotide
gguggcuugucucugcugg

SEQ ID NO: 2249528 - RNA, 19 nt, Artificial Sequence
  Description of Artificial Sequence: Synthetic oligonucleotide
auucacccacacuucuucg

SEQ ID NO: 2249529 - RNA, 19 nt, Artificial Sequence
  Description of Artificial Sequence: Synthetic oligonucleotide
aucaaaagcuucaugcuga

SEQ ID NO: 2249530 - RNA, 19 nt, Artificial Sequence
  Description of Artificial Sequence: Synthetic oligonucleotide
aacuauaauuaaacuggcu

SEQ ID NO: 2249531 - RNA, 19 nt, Artificial Sequence
  Description of Artificial Sequence: Synthetic oligonucleotide
acacacauuuguuguuuuc

SEQ ID NO: 2249532 - RNA, 19 nt, Artificial Sequence
  Description of Artificial Sequence: Synthetic oligonucleotide
uucuaagauucacccacac

SEQ ID NO: 2249533 - RNA, 19 nt, Artificial Sequence
  Description of Artificial Sequence: Synthetic oligonucleotide
acaaaggugagcucugcau

SEQ ID NO: 2249534 - RNA, 19 nt, Artificial Sequence
  Description of Artificial Sequence: Synthetic oligonucleotide
gucgcugcaccccacaagc

SEQ ID NO: 2249535 - RNA, 19 nt, Artificial Sequence
  Description of Artificial Sequence: Synthetic oligonucleotide
acuugcgucagaguuagcu

SEQ ID NO: 2249536 - RNA, 19 nt, Artificial Sequence
  Description of Artificial Sequence: Synthetic oligonucleotide
  modified_base (6)..(6): a, c, u, g, unknown or other
cuuuunuuuucucuauaga

SEQ ID NO: 2249537 - RNA, 19 nt, Artificial Sequence
  Description of Artificial Sequence: Synthetic oligonucleotide
gaugccauaggccgaguca

SEQ ID NO: 2249538 - RNA, 19 nt, Artificial Sequence
  Description of Artificial Sequence: Synthetic oligonucleotide
cucuuuguuuggaugcccc

SEQ ID NO: 2249539 - RNA, 19 nt, Artificial Sequence
  Description of Artificial Sequence: Synthetic oligonucleotide
  modified_base (8)..(8): a, c, u, g, unknown or other
uucuuuunuuuucucuaua

SEQ ID NO: 2249540 - RNA, 19 nt, Artificial Sequence
  Description of Artificial Sequence: Synthetic oligonucleotide
acuagaaaaggcugugcau

SEQ ID NO: 2249541 - RNA, 19 nt, Artificial Sequence
  Description of Artificial Sequence: Synthetic oligonucleotide
cacuucuucggcuuugcug

SEQ ID NO: 2249542 - RNA, 19 nt, Artificial Sequence
  Description of Artificial Sequence: Synthetic oligonucleotide
aggcaauuugccuuuuaca

SEQ ID NO: 2249543 - RNA, 19 nt, Artificial Sequence
  Description of Artificial Sequence: Synthetic oligonucleotide
uacaaaggugagcucugca

SEQ ID NO: 2249544 - RNA, 19 nt, Artificial Sequence
  Description of Artificial Sequence: Synthetic oligonucleotide
auaauuaaacuggcuuaag

SEQ ID NO: 2249545 - RNA, 19 nt, Artificial Sequence
  Description of Artificial Sequence: Synthetic oligonucleotide
aguuagcucucgcuucuuc

SEQ ID NO: 2249546 - RNA, 19 nt, Artificial Sequence
  Description of Artificial Sequence: Synthetic oligonucleotide
aacaaucaacacauagcca

SEQ ID NO: 2249547 - RNA, 19 nt, Artificial Sequence
  Description of Artificial Sequence: Synthetic oligonucleotide
caauuugccuuuuacaacu

SEQ ID NO: 2249548 - RNA, 19 nt, Artificial Sequence
  Description of Artificial Sequence: Synthetic oligonucleotide
aaggcugugcaugaacacu

SEQ ID NO: 2249549 - RNA, 19 nt, Artificial Sequence
  Description of Artificial Sequence: Synthetic oligonucleotide
ggcaauuugccuuuuacaa

SEQ ID NO: 2249550 - RNA, 19 nt, Artificial Sequence
  Description of Artificial Sequence: Synthetic oligonucleotide
cacauuuguuguuuucaac

SEQ ID NO: 2249551 - RNA, 19 nt, Artificial Sequence
  Description of Artificial Sequence: Synthetic oligonucleotide
uguagaucuccagcugccg

SEQ ID NO: 2249552 - RNA, 19 nt, Artificial Sequence
  Description of Artificial Sequence: Synthetic oligonucleotide
caaaggugagcucugcauc

SEQ ID NO: 2249553 - RNA, 19 nt, Artificial Sequence
  Description of Artificial Sequence: Synthetic oligonucleotide
caauucaaacuauaauuaa

SEQ ID NO: 2249554 - RNA, 19 nt, Artificial Sequence
  Description of Artificial Sequence: Synthetic oligonucleotide
uuggaugccccagacacac

SEQ ID NO: 2249555 - RNA, 19 nt, Artificial Sequence
  Description of Artificial Sequence: Synthetic oligonucleotide
cuggucuuccucugcagcc

SEQ ID NO: 2249556 - RNA, 19 nt, Artificial Sequence
  Description of Artificial Sequence: Synthetic oligonucleotide
uuuuggugucuuugggucu

SEQ ID NO: 2249557 - RNA, 19 nt, Artificial Sequence
  Description of Artificial Sequence: Synthetic oligonucleotide
acucuuuguuuggaugccc

SEQ ID NO: 2249558 - RNA, 19 nt, Artificial Sequence
  Description of Artificial Sequence: Synthetic oligonucleotide
agaguuagcucucgcuucu

SEQ ID NO: 2249559 - RNA, 19 nt, Artificial Sequence
  Description of Artificial Sequence: Synthetic oligonucleotide
ucgugccuccccaaaguag

SEQ ID NO: 2249560 - RNA, 19 nt, Artificial Sequence
  Description of Artificial Sequence: Synthetic oligonucleotide
uguggugauccaauucaaa

SEQ ID NO: 2249561 - RNA, 19 nt, Artificial Sequence
  Description of Artificial Sequence: Synthetic oligonucleotide
aggacaaagcuuuuccuuu

SEQ ID NO: 2249562 - RNA, 19 nt, Artificial Sequence
  Description of Artificial Sequence: Synthetic oligonucleotide
ggguaaaacaacaaucaac

SEQ ID NO: 2249563 - RNA, 19 nt, Artificial Sequence
  Description of Artificial Sequence: Synthetic oligonucleotide
gucaggggcgucuuucagg

SEQ ID NO: 2249564 - RNA, 19 nt, Artificial Sequence
  Description of Artificial Sequence: Synthetic oligonucleotide
ucuuuguuuggaugcccca

SEQ ID NO: 2249565 - RNA, 19 nt, Artificial Sequence
  Description of Artificial Sequence: Synthetic oligonucleotide
cuugcgucagaguuagcuc

SEQ ID NO: 2249566 - RNA, 19 nt, Artificial Sequence
  Description of Artificial Sequence: Synthetic oligonucleotide
uccacuagaaaaggcugug

SEQ ID NO: 2249567 - RNA, 19 nt, Artificial Sequence
  Description of Artificial Sequence: Synthetic oligonucleotide
agagccgcagcaggaaggc

SEQ ID NO: 2249568 - RNA, 19 nt, Artificial Sequence
  Description of Artificial Sequence: Synthetic oligonucleotide
aggguaaaacaacaaucaa

SEQ ID NO: 2249569 - RNA, 19 nt, Artificial Sequence
  Description of Artificial Sequence: Synthetic oligonucleotide
cccuuucuaagauucaccc

SEQ ID NO: 2249570 - RNA, 19 nt, Artificial Sequence
  Description of Artificial Sequence: Synthetic oligonucleotide
auaggggucgcugcacccc

SEQ ID NO: 2249571 - RNA, 19 nt, Artificial Sequence
  Description of Artificial Sequence: Synthetic oligonucleotide
agccccuuccucugguggc

SEQ ID NO: 2249572 - RNA, 19 nt, Artificial Sequence
  Description of Artificial Sequence: Synthetic oligonucleotide
gauccaauucaaacuauaa

SEQ ID NO: 2249573 - RNA, 19 nt, Artificial Sequence
  Description of Artificial Sequence: Synthetic oligonucleotide
cuuuguuuggaugccccag

SEQ ID NO: 2249574 - RNA, 19 nt, Artificial Sequence
  Description of Artificial Sequence: Synthetic oligonucleotide
caugaacacucaaagcaga

SEQ ID NO: 2249575 - RNA, 19 nt, Artificial Sequence
  Description of Artificial Sequence: Synthetic oligonucleotide
cacuagaaaaggcugugca

SEQ ID NO: 2249576 - RNA, 19 nt, Artificial Sequence
  Description of Artificial Sequence: Synthetic oligonucleotide
aacacucaaagcagaggca

SEQ ID NO: 2249577 - RNA, 19 nt, Artificial Sequence
  Description of Artificial Sequence: Synthetic oligonucleotide
ucaggaugccauaggccga

SEQ ID NO: 2249578 - RNA, 19 nt, Artificial Sequence
  Description of Artificial Sequence: Synthetic oligonucleotide
gguagaggcacgcucuuug

SEQ ID NO: 2249579 - RNA, 19 nt, Artificial Sequence
  Description of Artificial Sequence: Synthetic oligonucleotide
aggcugugcaugaacacuc

SEQ ID NO: 2249580 - RNA, 19 nt, Artificial Sequence
  Description of Artificial Sequence: Synthetic oligonucleotide
cagaguuagcucucgcuuc

SEQ ID NO: 2249581 - RNA, 19 nt, Artificial Sequence
  Description of Artificial Sequence: Synthetic oligonucleotide
uuucucuauagaccagguu

SEQ ID NO: 2249582 - RNA, 19 nt, Artificial Sequence
  Description of Artificial Sequence: Synthetic oligonucleotide
agaggcacgcucuuuguuu

SEQ ID NO: 2249583 - RNA, 19 nt, Artificial Sequence
  Description of Artificial Sequence: Synthetic oligonucleotide
aaguagccugggauuaaag

SEQ ID NO: 2249584 - RNA, 19 nt, Artificial Sequence
  Description of Artificial Sequence: Synthetic oligonucleotide
acguaucugggcuccaccu

SEQ ID NO: 2249585 - RNA, 19 nt, Artificial Sequence
  Description of Artificial Sequence: Synthetic oligonucleotide
gcaauuugccuuuuacaac

SEQ ID NO: 2249586 - RNA, 19 nt, Artificial Sequence
  Description of Artificial Sequence: Synthetic oligonucleotide
aaaguagccugggauuaaa

SEQ ID NO: 2249587 - RNA, 19 nt, Artificial Sequence
  Description of Artificial Sequence: Synthetic oligonucleotide
gacucuuuguuuggaugcc

SEQ ID NO: 2249588 - RNA, 19 nt, Artificial Sequence
  Description of Artificial Sequence: Synthetic oligonucleotide
aggagaugacucuuuguuu

SEQ ID NO: 2249589 - RNA, 19 nt, Artificial Sequence
  Description of Artificial Sequence: Synthetic oligonucleotide
guagagccgcagcaggaag

SEQ ID NO: 2249590 - RNA, 19 nt, Artificial Sequence
  Description of Artificial Sequence: Synthetic oligonucleotide
auacagaaccacguaucug

SEQ ID NO: 2249591 - RNA, 19 nt, Artificial Sequence
  Description of Artificial Sequence: Synthetic oligonucleotide
aguccccaucacuugcguc

SEQ ID NO: 2249592 - RNA, 19 nt, Artificial Sequence
  Description of Artificial Sequence: Synthetic oligonucleotide
agucuuuauucugagggua

SEQ ID NO: 2249593 - RNA, 19 nt, Artificial Sequence
  Description of Artificial Sequence: Synthetic oligonucleotide
acuggcuuaagaaaucaua

SEQ ID NO: 2249594 - RNA, 19 nt, Artificial Sequence
  Description of Artificial Sequence: Synthetic oligonucleotide
agcggauggaugaugguca

SEQ ID NO: 2249595 - RNA, 19 nt, Artificial Sequence
  Description of Artificial Sequence: Synthetic oligonucleotide
cauaggggucgcugcaccc

SEQ ID NO: 2249596 - RNA, 19 nt, Artificial Sequence
  Description of Artificial Sequence: Synthetic oligonucleotide
ggcuuaagaaaucauacau

SEQ ID NO: 2249597 - RNA, 19 nt, Artificial Sequence
  Description of Artificial Sequence: Synthetic oligonucleotide
uagaucuccagcugccgua

SEQ ID NO: 2249598 - RNA, 19 nt, Artificial Sequence
  Description of Artificial Sequence: Synthetic oligonucleotide
uacauuccauugcuaucaa

SEQ ID NO: 2249599 - RNA, 19 nt, Artificial Sequence
  Description of Artificial Sequence: Synthetic oligonucleotide
ucgcugcaccccacaagcg

SEQ ID NO: 2249600 - RNA, 19 nt, Artificial Sequence
  Description of Artificial Sequence: Synthetic oligonucleotide
agguuuuccuguagagccg

SEQ ID NO: 2249601 - RNA, 19 nt, Artificial Sequence
  Description of Artificial Sequence: Synthetic oligonucleotide
gugaguuaaaaggaauaaa

SEQ ID NO: 2249602 - RNA, 19 nt, Artificial Sequence
  Description of Artificial Sequence: Synthetic oligonucleotide
gugucuuugggucuuuugu

SEQ ID NO: 2249603 - RNA, 19 nt, Artificial Sequence
  Description of Artificial Sequence: Synthetic oligonucleotide
uguagagccgcagcaggaa

SEQ ID NO: 2249604 - RNA, 19 nt, Artificial Sequence
  Description of Artificial Sequence: Synthetic oligonucleotide
cccgcgucaaggcauaggg

SEQ ID NO: 2249605 - RNA, 19 nt, Artificial Sequence
  Description of Artificial Sequence: Synthetic oligonucleotide
acacauagccagucuccca

SEQ ID NO: 2249606 - RNA, 19 nt, Artificial Sequence
  Description of Artificial Sequence: Synthetic oligonucleotide
ggaugccccagacacacac

SEQ ID NO: 2249607 - RNA, 19 nt, Artificial Sequence
  Description of Artificial Sequence: Synthetic oligonucleotide
ugcgucagaguuagcucuc

SEQ ID NO: 2249608 - RNA, 19 nt, Artificial Sequence
  Description of Artificial Sequence: Synthetic oligonucleotide
gaaccacguaucugggcuc

SEQ ID NO: 2249609 - RNA, 19 nt, Artificial Sequence
  Description of Artificial Sequence: Synthetic oligonucleotide
uggacuacugguggcuugu

SEQ ID NO: 2249610 - RNA, 19 nt, Artificial Sequence
  Description of Artificial Sequence: Synthetic oligonucleotide
uugcuaucaaaaggcaauu

SEQ ID NO: 2249611 - RNA, 19 nt, Artificial Sequence
  Description of Artificial Sequence: Synthetic oligonucleotide
uuuggugucuuugggucuu

SEQ ID NO: 2249612 - RNA, 19 nt, Artificial Sequence
  Description of Artificial Sequence: Synthetic oligonucleotide
ggucuuuugucagauuuca

SEQ ID NO: 2249613 - RNA, 19 nt, Artificial Sequence
  Description of Artificial Sequence: Synthetic oligonucleotide
accugucccucgugccucc

SEQ ID NO: 2249614 - RNA, 19 nt, Artificial Sequence
  Description of Artificial Sequence: Synthetic oligonucleotide
uuacaacuugugaguuaaa

SEQ ID NO: 2249615 - RNA, 19 nt, Artificial Sequence
  Description of Artificial Sequence: Synthetic oligonucleotide
uagaggcacgcucuuuguu

SEQ ID NO: 2249616 - RNA, 19 nt, Artificial Sequence
  Description of Artificial Sequence: Synthetic oligonucleotide
ggcccuguagaucuccagc

SEQ ID NO: 2249617 - RNA, 19 nt, Artificial Sequence
  Description of Artificial Sequence: Synthetic oligonucleotide
gagcucugcaucauacaga

SEQ ID NO: 2249618 - RNA, 19 nt, Artificial Sequence
  Description of Artificial Sequence: Synthetic oligonucleotide
cuggacuacugguggcuug

SEQ ID NO: 2249619 - RNA, 19 nt, Artificial Sequence
  Description of Artificial Sequence: Synthetic oligonucleotide
aguacccgcgucaaggcau

SEQ ID NO: 2249620 - RNA, 19 nt, Artificial Sequence
  Description of Artificial Sequence: Synthetic oligonucleotide
guacaaaggugagcucugc

SEQ ID NO: 2249621 - RNA, 19 nt, Artificial Sequence
  Description of Artificial Sequence: Synthetic oligonucleotide
cugcaucauacagaaccac

SEQ ID NO: 2249622 - RNA, 19 nt, Artificial Sequence
  Description of Artificial Sequence: Synthetic oligonucleotide
gguuuuccuguagagccgc

SEQ ID NO: 2249623 - RNA, 19 nt, Artificial Sequence
  Description of Artificial Sequence: Synthetic oligonucleotide
gucagaguuagcucucgcu

SEQ ID NO: 2249624 - RNA, 19 nt, Artificial Sequence
  Description of Artificial Sequence: Synthetic oligonucleotide
agcugccguacaaagguga

SEQ ID NO: 2249625 - RNA, 19 nt, Artificial Sequence
  Description of Artificial Sequence: Synthetic oligonucleotide
uacugguggcuugucucug

SEQ ID NO: 2249626 - RNA, 19 nt, Artificial Sequence
  Description of Artificial Sequence: Synthetic oligonucleotide
cugaggguaaaacaacaau

SEQ ID NO: 2249627 - RNA, 19 nt, Artificial Sequence
  Description of Artificial Sequence: Synthetic oligonucleotide
accacuguggugauccaau

SEQ ID NO: 2249628 - RNA, 19 nt, Artificial Sequence
  Description of Artificial Sequence: Synthetic oligonucleotide
acacuucuucggcuuugcu

SEQ ID NO: 2249629 - RNA, 19 nt, Artificial Sequence
  Description of Artificial Sequence: Synthetic oligonucleotide
cccacaagcggauggauga

SEQ ID NO: 2249630 - RNA, 19 nt, Artificial Sequence
  Description of Artificial Sequence: Synthetic oligonucleotide
aaggugagcucugcaucau

SEQ ID NO: 2249631 - RNA, 19 nt, Artificial Sequence
  Description of Artificial Sequence: Synthetic oligonucleotide
aucacuugcgucagaguua

SEQ ID NO: 2249632 - RNA, 19 nt, Artificial Sequence
  Description of Artificial Sequence: Synthetic oligonucleotide
cugccguacaaaggugagc

SEQ ID NO: 2249633 - RNA, 19 nt, Artificial Sequence
  Description of Artificial Sequence: Synthetic oligonucleotide
gcaguacccgcgucaaggc

SEQ ID NO: 2249634 - RNA, 19 nt, Artificial Sequence
  Description of Artificial Sequence: Synthetic oligonucleotide
ggucgcugcaccccacaag

SEQ ID NO: 2249635 - RNA, 19 nt, Artificial Sequence
  Description of Artificial Sequence: Synthetic oligonucleotide
aguggccaggacaccacug

SEQ ID NO: 2249636 - RNA, 19 nt, Artificial Sequence
  Description of Artificial Sequence: Synthetic oligonucleotide
guagaucuccagcugccgu

SEQ ID NO: 2249637 - RNA, 19 nt, Artificial Sequence
  Description of Artificial Sequence: Synthetic oligonucleotide
accacggccugcuggcccu

SEQ ID NO: 2249638 - RNA, 19 nt, Artificial Sequence
  Description of Artificial Sequence: Synthetic oligonucleotide
cuguggugauccaauucaa

SEQ ID NO: 2249639 - RNA, 19 nt, Artificial Sequence
  Description of Artificial Sequence: Synthetic oligonucleotide
augcaguacccgcgucaag

SEQ ID NO: 2249640 - RNA, 19 nt, Artificial Sequence
  Description of Artificial Sequence: Synthetic oligonucleotide
gacuacugguggcuugucu

SEQ ID NO: 2249641 - RNA, 19 nt, Artificial Sequence
  Description of Artificial Sequence: Synthetic oligonucleotide
auaggccgagucagaugac

SEQ ID NO: 2249642 - RNA, 19 nt, Artificial Sequence
  Description of Artificial Sequence: Synthetic oligonucleotide
aaacaacaaucaacacaua

SEQ ID NO: 2249643 - RNA, 19 nt, Artificial Sequence
  Description of Artificial Sequence: Synthetic oligonucleotide
gcauaggggucgcugcacc

SEQ ID NO: 2249644 - RNA, 19 nt, Artificial Sequence
  Description of Artificial Sequence: Synthetic oligonucleotide
agcucucgcuucuuccuuu

SEQ ID NO: 2249645 - RNA, 19 nt, Artificial Sequence
  Description of Artificial Sequence: Synthetic oligonucleotide
ucuggacuacugguggcuu

SEQ ID NO: 2249646 - RNA, 19 nt, Artificial Sequence
  Description of Artificial Sequence: Synthetic oligonucleotide
uggcuugucucugcugguc

SEQ ID NO: 2249647 - RNA, 19 nt, Artificial Sequence
  Description of Artificial Sequence: Synthetic oligonucleotide
cacauagccagucucccau

SEQ ID NO: 2249648 - RNA, 19 nt, Artificial Sequence
  Description of Artificial Sequence: Synthetic oligonucleotide
uucuuccuuuuaggagccc

SEQ ID NO: 2249649 - RNA, 19 nt, Artificial Sequence
  Description of Artificial Sequence: Synthetic oligonucleotide
aucauacauuccauugcua

SEQ ID NO: 2249650 - RNA, 19 nt, Artificial Sequence
  Description of Artificial Sequence: Synthetic oligonucleotide
uggaugccccagacacaca

SEQ ID NO: 2249651 - RNA, 19 nt, Artificial Sequence
  Description of Artificial Sequence: Synthetic oligonucleotide
acccgcgucaaggcauagg

SEQ ID NO: 2249652 - RNA, 19 nt, Artificial Sequence
  Description of Artificial Sequence: Synthetic oligonucleotide
cuucuucggcuuugcuguc

SEQ ID NO: 2249653 - RNA, 19 nt, Artificial Sequence
  Description of Artificial Sequence: Synthetic oligonucleotide
ucccucgugccuccccaaa

SEQ ID NO: 2249654 - RNA, 19 nt, Artificial Sequence
  Description of Artificial Sequence: Synthetic oligonucleotide
ugcaccccacaagcggaug

SEQ ID NO: 2249655 - RNA, 19 nt, Artificial Sequence
  Description of Artificial Sequence: Synthetic oligonucleotide
ggggcgucuuucaggaugc

SEQ ID NO: 2249656 - RNA, 19 nt, Artificial Sequence
  Description of Artificial Sequence: Synthetic oligonucleotide
ccuuucuaagauucaccca

SEQ ID NO: 2249657 - RNA, 19 nt, Artificial Sequence
  Description of Artificial Sequence: Synthetic oligonucleotide
cguacaaaggugagcucug

SEQ ID NO: 2249658 - RNA, 19 nt, Artificial Sequence
  Description of Artificial Sequence: Synthetic oligonucleotide
ccaaaggacaaagcuuuuc

SEQ ID NO: 2249659 - RNA, 19 nt, Artificial Sequence
  Description of Artificial Sequence: Synthetic oligonucleotide
gcggauggaugauggucag

SEQ ID NO: 2249660 - RNA, 19 nt, Artificial Sequence
  Description of Artificial Sequence: Synthetic oligonucleotide
gcugccguacaaaggugag

SEQ ID NO: 2249661 - RNA, 19 nt, Artificial Sequence
  Description of Artificial Sequence: Synthetic oligonucleotide
guagaggcacgcucuuugu

SEQ ID NO: 2249662 - RNA, 19 nt, Artificial Sequence
  Description of Artificial Sequence: Synthetic oligonucleotide
gucaaggcauaggggucgc

SEQ ID NO: 2249663 - RNA, 19 nt, Artificial Sequence
  Description of Artificial Sequence: Synthetic oligonucleotide
ggaugccauaggccgaguc

SEQ ID NO: 2249664 - RNA, 19 nt, Artificial Sequence
  Description of Artificial Sequence: Synthetic oligonucleotide
caugcaguacccgcgucaa

SEQ ID NO: 2249665 - RNA, 19 nt, Artificial Sequence
  Description of Artificial Sequence: Synthetic oligonucleotide
gaggcacgcucuuuguuuu

SEQ ID NO: 2249666 - RNA, 19 nt, Artificial Sequence
  Description of Artificial Sequence: Synthetic oligonucleotide
cgucaaggcauaggggucg

SEQ ID NO: 2249667 - RNA, 19 nt, Artificial Sequence
  Description of Artificial Sequence: Synthetic oligonucleotide
cugucccucgugccucccc

SEQ ID NO: 2249668 - RNA, 19 nt, Artificial Sequence
  Description of Artificial Sequence: Synthetic oligonucleotide
cugcagccccuuccucugg

SEQ ID NO: 2249669 - RNA, 19 nt, Artificial Sequence
  Description of Artificial Sequence: Synthetic oligonucleotide
ccacuagaaaaggcugugc

SEQ ID NO: 2249670 - RNA, 19 nt, Artificial Sequence
  Description of Artificial Sequence: Synthetic oligonucleotide
gggucuuuugucagauuuc

SEQ ID NO: 2249671 - RNA, 19 nt, Artificial Sequence
  Description of Artificial Sequence: Synthetic oligonucleotide
ccagcugccguacaaaggu

SEQ ID NO: 2249672 - RNA, 19 nt, Artificial Sequence
  Description of Artificial Sequence: Synthetic oligonucleotide
acaccacuguggugaucca

SEQ ID NO: 2249673 - RNA, 19 nt, Artificial Sequence
  Description of Artificial Sequence: Synthetic oligonucleotide
gggauccaccugucccucg

SEQ ID NO: 2249674 - RNA, 19 nt, Artificial Sequence
  Description of Artificial Sequence: Synthetic oligonucleotide
caguacccgcgucaaggca

SEQ ID NO: 2249675 - RNA, 19 nt, Artificial Sequence
  Description of Artificial Sequence: Synthetic oligonucleotide
gugccuccccaaaguagcc

SEQ ID NO: 2249676 - RNA, 19 nt, Artificial Sequence
  Description of Artificial Sequence: Synthetic oligonucleotide
ucaaggcauaggggucgcu

SEQ ID NO: 2249677 - RNA, 19 nt, Artificial Sequence
  Description of Artificial Sequence: Synthetic oligonucleotide
agccagucucccauccacu

SEQ ID NO: 2249678 - RNA, 19 nt, Artificial Sequence
  Description of Artificial Sequence: Synthetic oligonucleotide
ccccacaagcggauggaug

SEQ ID NO: 2249679 - RNA, 19 nt, Artificial Sequence
  Description of Artificial Sequence: Synthetic oligonucleotide
ccgcgucaaggcauagggg

SEQ ID NO: 2249680 - RNA, 19 nt, Artificial Sequence
  Description of Artificial Sequence: Synthetic oligonucleotide
agucucccauccacuagaa

SEQ ID NO: 2249681 - RNA, 19 nt, Artificial Sequence
  Description of Artificial Sequence: Synthetic oligonucleotide
caaaguagccugggauuaa

SEQ ID NO: 2249682 - RNA, 19 nt, Artificial Sequence
  Description of Artificial Sequence: Synthetic oligonucleotide
ggcaguggccaggacacca

SEQ ID NO: 2249683 - RNA, 19 nt, Artificial Sequence
  Description of Artificial Sequence: Synthetic oligonucleotide
ugguagaggcacgcucuuu

SEQ ID NO: 2249684 - RNA, 19 nt, Artificial Sequence
  Description of Artificial Sequence: Synthetic oligonucleotide
caccugucccucgugccuc

SEQ ID NO: 2249685 - RNA, 19 nt, Artificial Sequence
  Description of Artificial Sequence: Synthetic oligonucleotide
cucgugccuccccaaagua

SEQ ID NO: 2249686 - RNA, 19 nt, Artificial Sequence
  Description of Artificial Sequence: Synthetic oligonucleotide
cacucaaagcagaggcagu

SEQ ID NO: 2249687 - RNA, 19 nt, Artificial Sequence
  Description of Artificial Sequence: Synthetic oligonucleotide
gcgucagaguuagcucucg

SEQ ID NO: 2249688 - RNA, 19 nt, Artificial Sequence
  Description of Artificial Sequence: Synthetic oligonucleotide
gucucccauccacuagaaa

SEQ ID NO: 2249689 - RNA, 19 nt, Artificial Sequence
  Description of Artificial Sequence: Synthetic oligonucleotide
uacccgcgucaaggcauag

SEQ ID NO: 2249690 - RNA, 19 nt, Artificial Sequence
  Description of Artificial Sequence: Synthetic oligonucleotide
gcugcaccccacaagcgga

SEQ ID NO: 2249691 - RNA, 19 nt, Artificial Sequence
  Description of Artificial Sequence: Synthetic oligonucleotide
gccaggacaccacuguggu

SEQ ID NO: 2249692 - RNA, 19 nt, Artificial Sequence
  Description of Artificial Sequence: Synthetic oligonucleotide
gugauccaauucaaacuau

SEQ ID NO: 2249693 - RNA, 19 nt, Artificial Sequence
  Description of Artificial Sequence: Synthetic oligonucleotide
ggccgagucagaugacaaa

SEQ ID NO: 2249694 - RNA, 19 nt, Artificial Sequence
  Description of Artificial Sequence: Synthetic oligonucleotide
ccaaaguagccugggauua

SEQ ID NO: 2249695 - RNA, 19 nt, Artificial Sequence
  Description of Artificial Sequence: Synthetic oligonucleotide
cccucgugccuccccaaag

SEQ ID NO: 2249696 - RNA, 19 nt, Artificial Sequence
  Description of Artificial Sequence: Synthetic oligonucleotide
cacuugcgucagaguuagc

SEQ ID NO: 2249697 - RNA, 19 nt, Artificial Sequence
  Description of Artificial Sequence: Synthetic oligonucleotide
accccacaagcggauggau

SEQ ID NO: 2249698 - RNA, 19 nt, Artificial Sequence
  Description of Artificial Sequence: Synthetic oligonucleotide
ggcgucuuucaggaugcca

SEQ ID NO: 2249699 - RNA, 19 nt, Artificial Sequence
  Description of Artificial Sequence: Synthetic oligonucleotide
caagcggauggaugauggu

SEQ ID NO: 2249700 - RNA, 19 nt, Artificial Sequence
  Description of Artificial Sequence: Synthetic oligonucleotide
aggggucgcugcaccccac

SEQ ID NO: 2249701 - RNA, 19 nt, Artificial Sequence
  Description of Artificial Sequence: Synthetic oligonucleotide
gcgucuuucaggaugccau

SEQ ID NO: 2249702 - RNA, 19 nt, Artificial Sequence
  Description of Artificial Sequence: Synthetic oligonucleotide
cgcgucaaggcauaggggu

SEQ ID NO: 2249703 - RNA, 19 nt, Artificial Sequence
  Description of Artificial Sequence: Synthetic oligonucleotide
gccgagucagaugacaaau

SEQ ID NO: 2249704 - RNA, 19 nt, Artificial Sequence
  Description of Artificial Sequence: Synthetic oligonucleotide
caccccacaagcggaugga

SEQ ID NO: 2249705 - RNA, 19 nt, Artificial Sequence
  Description of Artificial Sequence: Synthetic oligonucleotide
gcgucaaggcauagggguc

SEQ ID NO: 2249706 - RNA, 19 nt, Artificial Sequence
  Description of Artificial Sequence: Synthetic oligonucleotide
cgucagaguuagcucucgc

SEQ ID NO: 2249707 - RNA, 19 nt, Artificial Sequence
  Description of Artificial Sequence: Synthetic oligonucleotide
cccagacacacacauuugu

SEQ ID NO: 2249708 - RNA, 19 nt, Artificial Sequence
  Description of Artificial Sequence: Synthetic oligonucleotide
ccaggacaccacuguggug

SEQ ID NO: 2249709 - RNA, 19 nt, Artificial Sequence
  Description of Artificial Sequence: Synthetic oligonucleotide
ccguacaaaggugagcucu

SEQ ID NO: 2249710 - RNA, 19 nt, Artificial Sequence
  Description of Artificial Sequence: Synthetic oligonucleotide
ggcugugcaugaacacuca

SEQ ID NO: 2249711 - RNA, 19 nt, Artificial Sequence
  Description of Artificial Sequence: Synthetic oligonucleotide
gccguacaaaggugagcuc

SEQ ID NO: 2249712 - RNA, 19 nt, Artificial Sequence
  Description of Artificial Sequence: Synthetic oligonucleotide
caccacuguggugauccaa

SEQ ID NO: 2249713 - RNA, 19 nt, Artificial Sequence
  Description of Artificial Sequence: Synthetic oligonucleotide
uuggugucuuugggucuuu

SEQ ID NO: 2249714 - RNA, 19 nt, Artificial Sequence
  Description of Artificial Sequence: Synthetic oligonucleotide
accacguaucugggcucca

SEQ ID NO: 2249715 - RNA, 19 nt, Artificial Sequence
  Description of Artificial Sequence: Synthetic oligonucleotide
gucuuuugucagauuucau

SEQ ID NO: 2249716 - RNA, 19 nt, Artificial Sequence
  Description of Artificial Sequence: Synthetic oligonucleotide
guacccgcgucaaggcaua

SEQ ID NO: 2249717 - RNA, 19 nt, Artificial Sequence
  Description of Artificial Sequence: Synthetic oligonucleotide
ccccaaaguagccugggau

SEQ ID NO: 2249718 - RNA, 19 nt, Artificial Sequence
  Description of Artificial Sequence: Synthetic oligonucleotide
ccacguaucugggcuccac

SEQ ID NO: 2249719 - RNA, 19 nt, Artificial Sequence
  Description of Artificial Sequence: Synthetic oligonucleotide
cccgcagccuucuggacua

SEQ ID NO: 2249720 - RNA, 19 nt, Artificial Sequence
  Description of Artificial Sequence: Synthetic oligonucleotide
caguccccaucacuugcgu

SEQ ID NO: 2249721 - RNA, 19 nt, Artificial Sequence
  Description of Artificial Sequence: Synthetic oligonucleotide
gggucgcugcaccccacaa

SEQ ID NO: 2249722 - RNA, 19 nt, Artificial Sequence
  Description of Artificial Sequence: Synthetic oligonucleotide
ggacuacugguggcuuguc

SEQ ID NO: 2249723 - RNA, 19 nt, Artificial Sequence
  Description of Artificial Sequence: Synthetic oligonucleotide
cugcaccccacaagcggau

SEQ ID NO: 2249724 - RNA, 19 nt, Artificial Sequence
  Description of Artificial Sequence: Synthetic oligonucleotide
gaguuagcucucgcuucuu

SEQ ID NO: 2249725 - RNA, 19 nt, Artificial Sequence
  Description of Artificial Sequence: Synthetic oligonucleotide
ccucaugcaguacccgcgu

SEQ ID NO: 2249726 - RNA, 19 nt, Artificial Sequence
  Description of Artificial Sequence: Synthetic oligonucleotide
gggcgucuuucaggaugcc

SEQ ID NO: 2249727 - RNA, 19 nt, Artificial Sequence
  Description of Artificial Sequence: Synthetic oligonucleotide
ccgagucagaugacaaauu

SEQ ID NO: 2249728 - RNA, 19 nt, Artificial Sequence
  Description of Artificial Sequence: Synthetic oligonucleotide
ccaccugucccucgugccu

SEQ ID NO: 2249729 - RNA, 19 nt, Artificial Sequence
  Description of Artificial Sequence: Synthetic oligonucleotide
ccccgcagccuucuggacu

SEQ ID NO: 2249730 - RNA, 19 nt, Artificial Sequence
  Description of Artificial Sequence: Synthetic oligonucleotide
gccccuuccucugguggcu

SEQ ID NO: 2249731 - RNA, 19 nt, Artificial Sequence
  Description of Artificial Sequence: Synthetic oligonucleotide
ccgcagccuucuggacuac

SEQ ID NO: 2249732 - RNA, 19 nt, Artificial Sequence
  Description of Artificial Sequence: Synthetic oligonucleotide
cgcagccuucuggacuacu

SEQ ID NO: 2249733 - RNA, 19 nt, Artificial Sequence
  Description of Artificial Sequence: Synthetic oligonucleotide
  modified_base (1)..(1): a, c, u, g, unknown or other
nuuuucucuauagaccagg

SEQ ID NO: 2249734 - RNA, 19 nt, Artificial Sequence
  Description of Artificial Sequence: Synthetic oligonucleotide
aacuuguucgcuuuggcgc

SEQ ID NO: 2249735 - RNA, 19 nt, Artificial Sequence
  Description of Artificial Sequence: Synthetic oligonucleotide
uuuguggccauucuuaggg

SEQ ID NO: 2249736 - RNA, 19 nt, Artificial Sequence
  Description of Artificial Sequence: Synthetic oligonucleotide
guuaacacacccuuuaagc

SEQ ID NO: 2249737 - RNA, 19 nt, Artificial Sequence
  Description of Artificial Sequence: Synthetic oligonucleotide
aauugaguggacugagagg

SEQ ID NO: 2249738 - RNA, 19 nt, Artificial Sequence
  Description of Artificial Sequence: Synthetic oligonucleotide
aacacaucuccguugacug

SEQ ID NO: 2249739 - RNA, 19 nt, Artificial Sequence
  Description of Artificial Sequence: Synthetic oligonucleotide
aggauaauaauaaauaagu

SEQ ID NO: 2249740 - RNA, 19 nt, Artificial Sequence
  Description of Artificial Sequence: Synthetic oligonucleotide
gaggauaauaauaaauaag

SEQ ID NO: 2249741 - RNA, 19 nt, Artificial Sequence
  Description of Artificial Sequence: Synthetic oligonucleotide
uuaacacacccuuuaagcc

SEQ ID NO: 2249742 - RNA, 19 nt, Artificial Sequence
  Description of Artificial Sequence: Synthetic oligonucleotide
aaagaguuaacacacccuu

SEQ ID NO: 2249743 - RNA, 19 nt, Artificial Sequence
  Description of Artificial Sequence: Synthetic oligonucleotide
aauacaucaggagggacag

SEQ ID NO: 2249744 - RNA, 19 nt, Artificial Sequence
  Description of Artificial Sequence: Synthetic oligonucleotide
ugaggauaauaauaaauaa

SEQ ID NO: 2249745 - RNA, 19 nt, Artificial Sequence
  Description of Artificial Sequence: Synthetic oligonucleotide
aaugaggauaauaauaaau

SEQ ID NO: 2249746 - RNA, 19 nt, Artificial Sequence
  Description of Artificial Sequence: Synthetic oligonucleotide
guucagucaccuuagaggc

SEQ ID NO: 2249747 - RNA, 19 nt, Artificial Sequence
  Description of Artificial Sequence: Synthetic oligonucleotide
guugaaagggguuaggguc

SEQ ID NO: 2249748 - RNA, 19 nt, Artificial Sequence
  Description of Artificial Sequence: Synthetic oligonucleotide
uccugagucagccugucag

SEQ ID NO: 2249749 - RNA, 19 nt, Artificial Sequence
  Description of Artificial Sequence: Synthetic oligonucleotide
aaucucgcucuccugcugg

SEQ ID NO: 2249750 - RNA, 19 nt, Artificial Sequence
  Description of Artificial Sequence: Synthetic oligonucleotide
agugacaugagcaccgagc

SEQ ID NO: 2249751 - RNA, 19 nt, Artificial Sequence
  Description of Artificial Sequence: Synthetic oligonucleotide
gaagccgaaguccucagcc

SEQ ID NO: 2249752 - RNA, 19 nt, Artificial Sequence
  Description of Artificial Sequence: Synthetic oligonucleotide
aguuaacacacccuuuaag

SEQ ID NO: 2249753 - RNA, 19 nt, Artificial Sequence
  Description of Artificial Sequence: Synthetic oligonucleotide
aaaauacaucaggagggac

SEQ ID NO: 2249754 - RNA, 19 nt, Artificial Sequence
  Description of Artificial Sequence: Synthetic oligonucleotide
agggcaggcaccuagcggg

SEQ ID NO: 2249755 - RNA, 19 nt, Artificial Sequence
  Description of Artificial Sequence: Synthetic oligonucleotide
ucagaugcccuauuguuga

SEQ ID NO: 2249756 - RNA, 19 nt, Artificial Sequence
  Description of Artificial Sequence: Synthetic oligonucleotide
cuuagaggcagcauccagc

SEQ ID NO: 2249757 - RNA, 19 nt, Artificial Sequence
  Description of Artificial Sequence: Synthetic oligonucleotide
gugacaugagcaccgagcg

SEQ ID NO: 2249758 - RNA, 19 nt, Artificial Sequence
  Description of Artificial Sequence: Synthetic oligonucleotide
uaacacacccuuuaagcca

SEQ ID NO: 2249759 - RNA, 19 nt, Artificial Sequence
  Description of Artificial Sequence: Synthetic oligonucleotide
aaauacaucaggagggaca

SEQ ID NO: 2249760 - RNA, 19 nt, Artificial Sequence
  Description of Artificial Sequence: Synthetic oligonucleotide
caaaagccucuucagaugc

SEQ ID NO: 2249761 - RNA, 19 nt, Artificial Sequence
  Description of Artificial Sequence: Synthetic oligonucleotide
ucuuagggcaggcaccuag

SEQ ID NO: 2249762 - RNA, 19 nt, Artificial Sequence
  Description of Artificial Sequence: Synthetic oligonucleotide
acgagaagaagccgaaguc

SEQ ID NO: 2249763 - RNA, 19 nt, Artificial Sequence
  Description of Artificial Sequence: Synthetic oligonucleotide
aaaugaggauaauaauaaa

SEQ ID NO: 2249764 - RNA, 19 nt, Artificial Sequence
  Description of Artificial Sequence: Synthetic oligonucleotide
uucgcuuuggcgcugguuc

SEQ ID NO: 2249765 - RNA, 19 nt, Artificial Sequence
  Description of Artificial Sequence: Synthetic oligonucleotide
ucuccguugacuguagucc

SEQ ID NO: 2249766 - RNA, 19 nt, Artificial Sequence
  Description of Artificial Sequence: Synthetic oligonucleotide
agacccaugcuuuguggcc

SEQ ID NO: 2249767 - RNA, 19 nt, Artificial Sequence
  Description of Artificial Sequence: Synthetic oligonucleotide
acugagaggagucgugagg

SEQ ID NO: 2249768 - RNA, 19 nt, Artificial Sequence
  Description of Artificial Sequence: Synthetic oligonucleotide
ggaaguuccacccuggcug

SEQ ID NO: 2249769 - RNA, 19 nt, Artificial Sequence
  Description of Artificial Sequence: Synthetic oligonucleotide
gacuguaguccccaugucc

SEQ ID NO: 2249770 - RNA, 19 nt, Artificial Sequence
  Description of Artificial Sequence: Synthetic oligonucleotide
aauugcugcauagccauca

SEQ ID NO: 2249771 - RNA, 19 nt, Artificial Sequence
  Description of Artificial Sequence: Synthetic oligonucleotide
aaaagaguuaacacacccu

SEQ ID NO: 2249772 - RNA, 19 nt, Artificial Sequence
  Description of Artificial Sequence: Synthetic oligonucleotide
augagcaccgagcgcaggc

SEQ ID NO: 2249773 - RNA, 19 nt, Artificial Sequence
  Description of Artificial Sequence: Synthetic oligonucleotide
caacuuguucgcuuuggcg

SEQ ID NO: 2249774 - RNA, 19 nt, Artificial Sequence
  Description of Artificial Sequence: Synthetic oligonucleotide
ucaccuuagaggcagcauc

SEQ ID NO: 2249775 - RNA, 19 nt, Artificial Sequence
  Description of Artificial Sequence: Synthetic oligonucleotide
acagucacaauugagugga

SEQ ID NO: 2249776 - RNA, 19 nt, Artificial Sequence
  Description of Artificial Sequence: Synthetic oligonucleotide
acgucuuugcacugcuugc

SEQ ID NO: 2249777 - RNA, 19 nt, Artificial Sequence
  Description of Artificial Sequence: Synthetic oligonucleotide
cauucuuagggcaggcacc

SEQ ID NO: 2249778 - RNA, 19 nt, Artificial Sequence
  Description of Artificial Sequence: Synthetic oligonucleotide
cuauuguugaucuuguucu

SEQ ID NO: 2249779 - RNA, 19 nt, Artificial Sequence
  Description of Artificial Sequence: Synthetic oligonucleotide
agcggugucugcuucagug

SEQ ID NO: 2249780 - RNA, 19 nt, Artificial Sequence
  Description of Artificial Sequence: Synthetic oligonucleotide
agaguuaacacacccuuua

SEQ ID NO: 2249781 - RNA, 19 nt, Artificial Sequence
  Description of Artificial Sequence: Synthetic oligonucleotide
aucuccguugacuguaguc

SEQ ID NO: 2249782 - RNA, 19 nt, Artificial Sequence
  Description of Artificial Sequence: Synthetic oligonucleotide
uuccuguucagucaccuua

SEQ ID NO: 2249783 - RNA, 19 nt, Artificial Sequence
  Description of Artificial Sequence: Synthetic oligonucleotide
cugagaggagucgugaggg

SEQ ID NO: 2249784 - RNA, 19 nt, Artificial Sequence
  Description of Artificial Sequence: Synthetic oligonucleotide
augaggauaauaauaaaua

SEQ ID NO: 2249785 - RNA, 19 nt, Artificial Sequence
  Description of Artificial Sequence: Synthetic oligonucleotide
ugcuuuguggccauucuua

SEQ ID NO: 2249786 - RNA, 19 nt, Artificial Sequence
  Description of Artificial Sequence: Synthetic oligonucleotide
uucuguuccucucuccacu

SEQ ID NO: 2249787 - RNA, 19 nt, Artificial Sequence
  Description of Artificial Sequence: Synthetic oligonucleotide
cuuggauuccuucacaaaa

SEQ ID NO: 2249788 - RNA, 19 nt, Artificial Sequence
  Description of Artificial Sequence: Synthetic oligonucleotide
cuuccggaugcucucaggc

SEQ ID NO: 2249789 - RNA, 19 nt, Artificial Sequence
  Description of Artificial Sequence: Synthetic oligonucleotide
ugcccuauuguugaucuug

SEQ ID NO: 2249790 - RNA, 19 nt, Artificial Sequence
  Description of Artificial Sequence: Synthetic oligonucleotide
caccuuagaggcagcaucc

SEQ ID NO: 2249791 - RNA, 19 nt, Artificial Sequence
  Description of Artificial Sequence: Synthetic oligonucleotide
cugaaacacaucuccguug

SEQ ID NO: 2249792 - RNA, 19 nt, Artificial Sequence
  Description of Artificial Sequence: Synthetic oligonucleotide
cuuuguggccauucuuagg

SEQ ID NO: 2249793 - RNA, 19 nt, Artificial Sequence
  Description of Artificial Sequence: Synthetic oligonucleotide
aagaagccgaaguccucag

SEQ ID NO: 2249794 - RNA, 19 nt, Artificial Sequence
  Description of Artificial Sequence: Synthetic oligonucleotide
agaagccgaaguccucagc

SEQ ID NO: 2249795 - RNA, 19 nt, Artificial Sequence
  Description of Artificial Sequence: Synthetic oligonucleotide
caagacccaugcuuugugg

SEQ ID NO: 2249796 - RNA, 19 nt, Artificial Sequence
  Description of Artificial Sequence: Synthetic oligonucleotide
cuccugaaacacaucuccg

SEQ ID NO: 2249797 - RNA, 19 nt, Artificial Sequence
  Description of Artificial Sequence: Synthetic oligonucleotide
gagucagccugucagccug

SEQ ID NO: 2249798 - RNA, 19 nt, Artificial Sequence
  Description of Artificial Sequence: Synthetic oligonucleotide
ucuccgacgacgagaagaa

SEQ ID NO: 2249799 - RNA, 19 nt, Artificial Sequence
  Description of Artificial Sequence: Synthetic oligonucleotide
cuguucagucaccuuagag

SEQ ID NO: 2249800 - RNA, 19 nt, Artificial Sequence
  Description of Artificial Sequence: Synthetic oligonucleotide
uuccagagaaaugaggaua

SEQ ID NO: 2249801 - RNA, 19 nt, Artificial Sequence
  Description of Artificial Sequence: Synthetic oligonucleotide
gaugcucucaggcuccuga

SEQ ID NO: 2249802 - RNA, 19 nt, Artificial Sequence
  Description of Artificial Sequence: Synthetic oligonucleotide
cacgucuuugcacugcuug

SEQ ID NO: 2249803 - RNA, 19 nt, Artificial Sequence
  Description of Artificial Sequence: Synthetic oligonucleotide
acccuuuaagccaagaaaa

SEQ ID NO: 2249804 - RNA, 19 nt, Artificial Sequence
  Description of Artificial Sequence: Synthetic oligonucleotide
uccggaugcucucaggcuc

SEQ ID NO: 2249805 - RNA, 19 nt, Artificial Sequence
  Description of Artificial Sequence: Synthetic oligonucleotide
ucacaauugaguggacuga

SEQ ID NO: 2249806 - RNA, 19 nt, Artificial Sequence
  Description of Artificial Sequence: Synthetic oligonucleotide
ucagcaggcccauuagccu

SEQ ID NO: 2249807 - RNA, 19 nt, Artificial Sequence
  Description of Artificial Sequence: Synthetic oligonucleotide
cuuucucccgccauuccug

SEQ ID NO: 2249808 - RNA, 19 nt, Artificial Sequence
  Description of Artificial Sequence: Synthetic oligonucleotide
gaugcccuauuguugaucu

SEQ ID NO: 2249809 - RNA, 19 nt, Artificial Sequence
  Description of Artificial Sequence: Synthetic oligonucleotide
acuuguucgcuuuggcgcu

SEQ ID NO: 2249810 - RNA, 19 nt, Artificial Sequence
  Description of Artificial Sequence: Synthetic oligonucleotide
uggacugagaggagucgug

SEQ ID NO: 2249811 - RNA, 19 nt, Artificial Sequence
  Description of Artificial Sequence: Synthetic oligonucleotide
ucaggcuccugagucagcc

SEQ ID NO: 2249812 - RNA, 19 nt, Artificial Sequence
  Description of Artificial Sequence: Synthetic oligonucleotide
gacgagaagaagccgaagu

SEQ ID NO: 2249813 - RNA, 19 nt, Artificial Sequence
  Description of Artificial Sequence: Synthetic oligonucleotide
cuuagggcaggcaccuagc

SEQ ID NO: 2249814 - RNA, 19 nt, Artificial Sequence
  Description of Artificial Sequence: Synthetic oligonucleotide
aagccgaaguccucagcca

SEQ ID NO: 2249815 - RNA, 19 nt, Artificial Sequence
  Description of Artificial Sequence: Synthetic oligonucleotide
cacaauugaguggacugag

SEQ ID NO: 2249816 - RNA, 19 nt, Artificial Sequence
  Description of Artificial Sequence: Synthetic oligonucleotide
cuccguugacuguaguccc

SEQ ID NO: 2249817 - RNA, 19 nt, Artificial Sequence
  Description of Artificial Sequence: Synthetic oligonucleotide
ccuauuguugaucuuguuc

SEQ ID NO: 2249818 - RNA, 19 nt, Artificial Sequence
  Description of Artificial Sequence: Synthetic oligonucleotide
ucgaugccagcaaucucgc

SEQ ID NO: 2249819 - RNA, 19 nt, Artificial Sequence
  Description of Artificial Sequence: Synthetic oligonucleotide
ugacaugagcaccgagcgc

SEQ ID NO: 2249820 - RNA, 19 nt, Artificial Sequence
  Description of Artificial Sequence: Synthetic oligonucleotide
uuuggcgcugguuccacuc

SEQ ID NO: 2249821 - RNA, 19 nt, Artificial Sequence
  Description of Artificial Sequence: Synthetic oligonucleotide
aggcgggacacgucuuugc

SEQ ID NO: 2249822 - RNA, 19 nt, Artificial Sequence
  Description of Artificial Sequence: Synthetic oligonucleotide
gaagcccgggucauucucg

SEQ ID NO: 2249823 - RNA, 19 nt, Artificial Sequence
  Description of Artificial Sequence: Synthetic oligonucleotide
ucucccgccauuccuguuc

SEQ ID NO: 2249824 - RNA, 19 nt, Artificial Sequence
  Description of Artificial Sequence: Synthetic oligonucleotide
ugaguggacugagaggagu

SEQ ID NO: 2249825 - RNA, 19 nt, Artificial Sequence
  Description of Artificial Sequence: Synthetic oligonucleotide
cugggcaauugcugcauag

SEQ ID NO: 2249826 - RNA, 19 nt, Artificial Sequence
  Description of Artificial Sequence: Synthetic oligonucleotide
gagaaaugaggauaauaau

SEQ ID NO: 2249827 - RNA, 19 nt, Artificial Sequence
  Description of Artificial Sequence: Synthetic oligonucleotide
guugacuguaguccccaug

SEQ ID NO: 2249828 - RNA, 19 nt, Artificial Sequence
  Description of Artificial Sequence: Synthetic oligonucleotide
aguggacugagaggagucg

SEQ ID NO: 2249829 - RNA, 19 nt, Artificial Sequence
  Description of Artificial Sequence: Synthetic oligonucleotide
aacacacccuuuaagccaa

SEQ ID NO: 2249830 - RNA, 19 nt, Artificial Sequence
  Description of Artificial Sequence: Synthetic oligonucleotide
uugaguggacugagaggag

SEQ ID NO: 2249831 - RNA, 19 nt, Artificial Sequence
  Description of Artificial Sequence: Synthetic oligonucleotide
gacgacgagaagaagccga

SEQ ID NO: 2249832 - RNA, 19 nt, Artificial Sequence
  Description of Artificial Sequence: Synthetic oligonucleotide
aagggguuagggucccacu

SEQ ID NO: 2249833 - RNA, 19 nt, Artificial Sequence
  Description of Artificial Sequence: Synthetic oligonucleotide
ugggcaauugcugcauagc

SEQ ID NO: 2249834 - RNA, 19 nt, Artificial Sequence
  Description of Artificial Sequence: Synthetic oligonucleotide
uccguugacuguagucccc

SEQ ID NO: 2249835 - RNA, 19 nt, Artificial Sequence
  Description of Artificial Sequence: Synthetic oligonucleotide
cauagccaucagcaggccc

SEQ ID NO: 2249836 - RNA, 19 nt, Artificial Sequence
  Description of Artificial Sequence: Synthetic oligonucleotide
cacccuuuaagccaagaaa

SEQ ID NO: 2249837 - RNA, 19 nt, Artificial Sequence
  Description of Artificial Sequence: Synthetic oligonucleotide
agucgugagggcugggaca

SEQ ID NO: 2249838 - RNA, 19 nt, Artificial Sequence
  Description of Artificial Sequence: Synthetic oligonucleotide
gggcaauugcugcauagcc

SEQ ID NO: 2249839 - RNA, 19 nt, Artificial Sequence
  Description of Artificial Sequence: Synthetic oligonucleotide
acacccuuuaagccaagaa

SEQ ID NO: 2249840 - RNA, 19 nt, Artificial Sequence
  Description of Artificial Sequence: Synthetic oligonucleotide
uguaguccccauguccuca

SEQ ID NO: 2249841 - RNA, 19 nt, Artificial Sequence
  Description of Artificial Sequence: Synthetic oligonucleotide
ugggcuaccuucucccacu

SEQ ID NO: 2249842 - RNA, 19 nt, Artificial Sequence
  Description of Artificial Sequence: Synthetic oligonucleotide
cugagucagccugucagcc

SEQ ID NO: 2249843 - RNA, 19 nt, Artificial Sequence
  Description of Artificial Sequence: Synthetic oligonucleotide
uguugaucuuguucuucuc

SEQ ID NO: 2249844 - RNA, 19 nt, Artificial Sequence
  Description of Artificial Sequence: Synthetic oligonucleotide
agaugcccuauuguugauc

SEQ ID NO: 2249845 - RNA, 19 nt, Artificial Sequence
  Description of Artificial Sequence: Synthetic oligonucleotide
uugcacugcuugcugcucu

SEQ ID NO: 2249846 - RNA, 19 nt, Artificial Sequence
  Description of Artificial Sequence: Synthetic oligonucleotide
agucacaauugaguggacu

SEQ ID NO: 2249847 - RNA, 19 nt, Artificial Sequence
  Description of Artificial Sequence: Synthetic oligonucleotide
ugagaggagucgugagggc

SEQ ID NO: 2249848 - RNA, 19 nt, Artificial Sequence
  Description of Artificial Sequence: Synthetic oligonucleotide
cugcgcagaggccaccugg

SEQ ID NO: 2249849 - RNA, 19 nt, Artificial Sequence
  Description of Artificial Sequence: Synthetic oligonucleotide
gaaggcggcggccgggucc

SEQ ID NO: 2249850 - RNA, 19 nt, Artificial Sequence
  Description of Artificial Sequence: Synthetic oligonucleotide
cagccugucagccugggca

SEQ ID NO: 2249851 - RNA, 19 nt, Artificial Sequence
  Description of Artificial Sequence: Synthetic oligonucleotide
gaaguuccacccuggcuga

SEQ ID NO: 2249852 - RNA, 19 nt, Artificial Sequence
  Description of Artificial Sequence: Synthetic oligonucleotide
uuggcgcugguuccacucc

SEQ ID NO: 2249853 - RNA, 19 nt, Artificial Sequence
  Description of Artificial Sequence: Synthetic oligonucleotide
uuccggaugcucucaggcu

SEQ ID NO: 2249854 - RNA, 19 nt, Artificial Sequence
  Description of Artificial Sequence: Synthetic oligonucleotide
cacaaaagccucuucagau

SEQ ID NO: 2249855 - RNA, 19 nt, Artificial Sequence
  Description of Artificial Sequence: Synthetic oligonucleotide
gaguuaacacacccuuuaa

SEQ ID NO: 2249856 - RNA, 19 nt, Artificial Sequence
  Description of Artificial Sequence: Synthetic oligonucleotide
gucuuugcacugcuugcug

SEQ ID NO: 2249857 - RNA, 19 nt, Artificial Sequence
  Description of Artificial Sequence: Synthetic oligonucleotide
ggguugaaagggguuaggg

SEQ ID NO: 2249858 - RNA, 19 nt, Artificial Sequence
  Description of Artificial Sequence: Synthetic oligonucleotide
ugagucagccugucagccu

SEQ ID NO: 2249859 - RNA, 19 nt, Artificial Sequence
  Description of Artificial Sequence: Synthetic oligonucleotide
gcuuuguggccauucuuag

SEQ ID NO: 2249860 - RNA, 19 nt, Artificial Sequence
  Description of Artificial Sequence: Synthetic oligonucleotide
ucuucucaacuuguucgcu

SEQ ID NO: 2249861 - RNA, 19 nt, Artificial Sequence
  Description of Artificial Sequence: Synthetic oligonucleotide
ggauuccuucacaaaagcc

SEQ ID NO: 2249862 - RNA, 19 nt, Artificial Sequence
  Description of Artificial Sequence: Synthetic oligonucleotide
ccgacgacgagaagaagcc

SEQ ID NO: 2249863 - RNA, 19 nt, Artificial Sequence
  Description of Artificial Sequence: Synthetic oligonucleotide
cucuccgacgacgagaaga

SEQ ID NO: 2249864 - RNA, 19 nt, Artificial Sequence
  Description of Artificial Sequence: Synthetic oligonucleotide
ucgcuuuggcgcugguucc

SEQ ID NO: 2249865 - RNA, 19 nt, Artificial Sequence
  Description of Artificial Sequence: Synthetic oligonucleotide
uggccauucuuagggcagg

SEQ ID NO: 2249866 - RNA, 19 nt, Artificial Sequence
  Description of Artificial Sequence: Synthetic oligonucleotide
aggaacagaacaggcugug

SEQ ID NO: 2249867 - RNA, 19 nt, Artificial Sequence
  Description of Artificial Sequence: Synthetic oligonucleotide
aagcccgggucauucucga

SEQ ID NO: 2249868 - RNA, 19 nt, Artificial Sequence
  Description of Artificial Sequence: Synthetic oligonucleotide
agggacagucacaauugag

SEQ ID NO: 2249869 - RNA, 19 nt, Artificial Sequence
  Description of Artificial Sequence: Synthetic oligonucleotide
ccauucuuagggcaggcac

SEQ ID NO: 2249870 - RNA, 19 nt, Artificial Sequence
  Description of Artificial Sequence: Synthetic oligonucleotide
guaguccccauguccucag

SEQ ID NO: 2249871 - RNA, 19 nt, Artificial Sequence
  Description of Artificial Sequence: Synthetic oligonucleotide
gccucagcaagacccaugc

SEQ ID NO: 2249872 - RNA, 19 nt, Artificial Sequence
  Description of Artificial Sequence: Synthetic oligonucleotide
gucauucucgaugccagca

SEQ ID NO: 2249873 - RNA, 19 nt, Artificial Sequence
  Description of Artificial Sequence: Synthetic oligonucleotide
ggcuguguguggcagcugc

SEQ ID NO: 2249874 - RNA, 19 nt, Artificial Sequence
  Description of Artificial Sequence: Synthetic oligonucleotide
guggccauucuuagggcag

SEQ ID NO: 2249875 - RNA, 19 nt, Artificial Sequence
  Description of Artificial Sequence: Synthetic oligonucleotide
ugacuguaguccccauguc

SEQ ID NO: 2249876 - RNA, 19 nt, Artificial Sequence
  Description of Artificial Sequence: Synthetic oligonucleotide
agggguuagggucccacuu

SEQ ID NO: 2249877 - RNA, 19 nt, Artificial Sequence
  Description of Artificial Sequence: Synthetic oligonucleotide
agccgaaguccucagccau

SEQ ID NO: 2249878 - RNA, 19 nt, Artificial Sequence
  Description of Artificial Sequence: Synthetic oligonucleotide
acacaucuccguugacugu

SEQ ID NO: 2249879 - RNA, 19 nt, Artificial Sequence
  Description of Artificial Sequence: Synthetic oligonucleotide
ucagccugucagccugggc

SEQ ID NO: 2249880 - RNA, 19 nt, Artificial Sequence
  Description of Artificial Sequence: Synthetic oligonucleotide
gaguggacugagaggaguc

SEQ ID NO: 2249881 - RNA, 19 nt, Artificial Sequence
  Description of Artificial Sequence: Synthetic oligonucleotide
ggcaccuagcgggacagcg

SEQ ID NO: 2249882 - RNA, 19 nt, Artificial Sequence
  Description of Artificial Sequence: Synthetic oligonucleotide
uuguucgcuuuggcgcugg

SEQ ID NO: 2249883 - RNA, 19 nt, Artificial Sequence
  Description of Artificial Sequence: Synthetic oligonucleotide
gccggaggaaguuccaccc

SEQ ID NO: 2249884 - RNA, 19 nt, Artificial Sequence
  Description of Artificial Sequence: Synthetic oligonucleotide
uucucccacucugugccug

SEQ ID NO: 2249885 - RNA, 19 nt, Artificial Sequence
  Description of Artificial Sequence: Synthetic oligonucleotide
ucagugacaugagcaccga

SEQ ID NO: 2249886 - RNA, 19 nt, Artificial Sequence
  Description of Artificial Sequence: Synthetic oligonucleotide
aguuccacccuggcugaag

SEQ ID NO: 2249887 - RNA, 19 nt, Artificial Sequence
  Description of Artificial Sequence: Synthetic oligonucleotide
cugggcuaccuucucccac

SEQ ID NO: 2249888 - RNA, 19 nt, Artificial Sequence
  Description of Artificial Sequence: Synthetic oligonucleotide
acaauugaguggacugaga

SEQ ID NO: 2249889 - RNA, 19 nt, Artificial Sequence
  Description of Artificial Sequence: Synthetic oligonucleotide
gcaagacccaugcuuugug

SEQ ID NO: 2249890 - RNA, 19 nt, Artificial Sequence
  Description of Artificial Sequence: Synthetic oligonucleotide
gccauuccuguucagucac

SEQ ID NO: 2249891 - RNA, 19 nt, Artificial Sequence
  Description of Artificial Sequence: Synthetic oligonucleotide
cugcucuugggguugaagu

SEQ ID NO: 2249892 - RNA, 19 nt, Artificial Sequence
  Description of Artificial Sequence: Synthetic oligonucleotide
cuggcugaagcagccacuc

SEQ ID NO: 2249893 - RNA, 19 nt, Artificial Sequence
  Description of Artificial Sequence: Synthetic oligonucleotide
gaggccaccuggccgccgc

SEQ ID NO: 2249894 - RNA, 19 nt, Artificial Sequence
  Description of Artificial Sequence: Synthetic oligonucleotide
gacagcggugucugcuuca

SEQ ID NO: 2249895 - RNA, 19 nt, Artificial Sequence
  Description of Artificial Sequence: Synthetic oligonucleotide
uggcgcugguuccacuccu

SEQ ID NO: 2249896 - RNA, 19 nt, Artificial Sequence
  Description of Artificial Sequence: Synthetic oligonucleotide
cccgggucauucucgaugc

SEQ ID NO: 2249897 - RNA, 19 nt, Artificial Sequence
  Description of Artificial Sequence: Synthetic oligonucleotide
ggguugaagucacacagcu

SEQ ID NO: 2249898 - RNA, 19 nt, Artificial Sequence
  Description of Artificial Sequence: Synthetic oligonucleotide
gguugaaagggguuagggu

SEQ ID NO: 2249899 - RNA, 19 nt, Artificial Sequence
  Description of Artificial Sequence: Synthetic oligonucleotide
uuugcacugcuugcugcuc

SEQ ID NO: 2249900 - RNA, 19 nt, Artificial Sequence
  Description of Artificial Sequence: Synthetic oligonucleotide
agucaccuuagaggcagca

SEQ ID NO: 2249901 - RNA, 19 nt, Artificial Sequence
  Description of Artificial Sequence: Synthetic oligonucleotide
cagugacaugagcaccgag

SEQ ID NO: 2249902 - RNA, 19 nt, Artificial Sequence
  Description of Artificial Sequence: Synthetic oligonucleotide
agccugucagccugggcaa

SEQ ID NO: 2249903 - RNA, 19 nt, Artificial Sequence
  Description of Artificial Sequence: Synthetic oligonucleotide
aagccucuucagaugcccu

SEQ ID NO: 2249904 - RNA, 19 nt, Artificial Sequence
  Description of Artificial Sequence: Synthetic oligonucleotide
cacuuccggaugcucucag

SEQ ID NO: 2249905 - RNA, 19 nt, Artificial Sequence
  Description of Artificial Sequence: Synthetic oligonucleotide
gacacgucuuugcacugcu

SEQ ID NO: 2249906 - RNA, 19 nt, Artificial Sequence
  Description of Artificial Sequence: Synthetic oligonucleotide
gggacagucacaauugagu

SEQ ID NO: 2249907 - RNA, 19 nt, Artificial Sequence
  Description of Artificial Sequence: Synthetic oligonucleotide
cuguaguccccauguccuc

SEQ ID NO: 2249908 - RNA, 19 nt, Artificial Sequence
  Description of Artificial Sequence: Synthetic oligonucleotide
ccuuagaggcagcauccag

SEQ ID NO: 2249909 - RNA, 19 nt, Artificial Sequence
  Description of Artificial Sequence: Synthetic oligonucleotide
guccucagagccagccccg

SEQ ID NO: 2249910 - RNA, 19 nt, Artificial Sequence
  Description of Artificial Sequence: Synthetic oligonucleotide
caggcaccuagcgggacag

SEQ ID NO: 2249911 - RNA, 19 nt, Artificial Sequence
  Description of Artificial Sequence: Synthetic oligonucleotide
acaucuccguugacuguag

SEQ ID NO: 2249912 - RNA, 19 nt, Artificial Sequence
  Description of Artificial Sequence: Synthetic oligonucleotide
cuuugcacugcuugcugcu

SEQ ID NO: 2249913 - RNA, 19 nt, Artificial Sequence
  Description of Artificial Sequence: Synthetic oligonucleotide
agggucccacuucccagcu

SEQ ID NO: 2249914 - RNA, 19 nt, Artificial Sequence
  Description of Artificial Sequence: Synthetic oligonucleotide
cagcaaucucgcucuccug

SEQ ID NO: 2249915 - RNA, 19 nt, Artificial Sequence
  Description of Artificial Sequence: Synthetic oligonucleotide
accuuagaggcagcaucca

SEQ ID NO: 2249916 - RNA, 19 nt, Artificial Sequence
  Description of Artificial Sequence: Synthetic oligonucleotide
cuguuccucucuccacuuc

SEQ ID NO: 2249917 - RNA, 19 nt, Artificial Sequence
  Description of Artificial Sequence: Synthetic oligonucleotide
cacaucuccguugacugua

SEQ ID NO: 2249918 - RNA, 19 nt, Artificial Sequence
  Description of Artificial Sequence: Synthetic oligonucleotide
gccggguccuccucggcgg

SEQ ID NO: 2249919 - RNA, 19 nt, Artificial Sequence
  Description of Artificial Sequence: Synthetic oligonucleotide
cucaggcuccugagucagc

SEQ ID NO: 2249920 - RNA, 19 nt, Artificial Sequence
  Description of Artificial Sequence: Synthetic oligonucleotide
uagcgggacagcggugucu

SEQ ID NO: 2249921 - RNA, 19 nt, Artificial Sequence
  Description of Artificial Sequence: Synthetic oligonucleotide
gggguugaaagggguuagg

SEQ ID NO: 2249922 - RNA, 19 nt, Artificial Sequence
  Description of Artificial Sequence: Synthetic oligonucleotide
cagucacaauugaguggac

SEQ ID NO: 2249923 - RNA, 19 nt, Artificial Sequence
  Description of Artificial Sequence: Synthetic oligonucleotide
gggucuccuccuuggauuc

SEQ ID NO: 2249924 - RNA, 19 nt, Artificial Sequence
  Description of Artificial Sequence: Synthetic oligonucleotide
acgacgagaagaagccgaa

SEQ ID NO: 2249925 - RNA, 19 nt, Artificial Sequence
  Description of Artificial Sequence: Synthetic oligonucleotide
cuuguucgcuuuggcgcug

SEQ ID NO: 2249926 - RNA, 19 nt, Artificial Sequence
  Description of Artificial Sequence: Synthetic oligonucleotide
gcaccuagcgggacagcgg

SEQ ID NO: 2249927 - RNA, 19 nt, Artificial Sequence
  Description of Artificial Sequence: Synthetic oligonucleotide
cacuccucugccucagcaa

SEQ ID NO: 2249928 - RNA, 19 nt, Artificial Sequence
  Description of Artificial Sequence: Synthetic oligonucleotide
cauuccuguucagucaccu

SEQ ID NO: 2249929 - RNA, 19 nt, Artificial Sequence
  Description of Artificial Sequence: Synthetic oligonucleotide
cccacuucccagcucccag

SEQ ID NO: 2249930 - RNA, 19 nt, Artificial Sequence
  Description of Artificial Sequence: Synthetic oligonucleotide
ccggcaggugccccgaagc

SEQ ID NO: 2249931 - RNA, 19 nt, Artificial Sequence
  Description of Artificial Sequence: Synthetic oligonucleotide
gggacacgucuuugcacug

SEQ ID NO: 2249932 - RNA, 19 nt, Artificial Sequence
  Description of Artificial Sequence: Synthetic oligonucleotide
ggcgggacacgucuuugca

SEQ ID NO: 2249933 - RNA, 19 nt, Artificial Sequence
  Description of Artificial Sequence: Synthetic oligonucleotide
cuagcgggacagcgguguc

SEQ ID NO: 2249934 - RNA, 19 nt, Artificial Sequence
  Description of Artificial Sequence: Synthetic oligonucleotide
cucgcgagucccggcugcg

SEQ ID NO: 2249935 - RNA, 19 nt, Artificial Sequence
  Description of Artificial Sequence: Synthetic oligonucleotide
acccaugcuuuguggccau

SEQ ID NO: 2249936 - RNA, 19 nt, Artificial Sequence
  Description of Artificial Sequence: Synthetic oligonucleotide
cauucucgaugccagcaau

SEQ ID NO: 2249937 - RNA, 19 nt, Artificial Sequence
  Description of Artificial Sequence: Synthetic oligonucleotide
gcgggacacgucuuugcac

SEQ ID NO: 2249938 - RNA, 19 nt, Artificial Sequence
  Description of Artificial Sequence: Synthetic oligonucleotide
ggcccauuagccuccugaa

SEQ ID NO: 2249939 - RNA, 19 nt, Artificial Sequence
  Description of Artificial Sequence: Synthetic oligonucleotide
caggcgggacacgucuuug

SEQ ID NO: 2249940 - RNA, 19 nt, Artificial Sequence
  Description of Artificial Sequence: Synthetic oligonucleotide
agcgcaggcgggacacguc

SEQ ID NO: 2249941 - RNA, 19 nt, Artificial Sequence
  Description of Artificial Sequence: Synthetic oligonucleotide
ccauuccuguucagucacc

SEQ ID NO: 2249942 - RNA, 19 nt, Artificial Sequence
  Description of Artificial Sequence: Synthetic oligonucleotide
cucccgccauuccuguuca

SEQ ID NO: 2249943 - RNA, 19 nt, Artificial Sequence
  Description of Artificial Sequence: Synthetic oligonucleotide
gcggugucugcuucaguga

SEQ ID NO: 2249944 - RNA, 19 nt, Artificial Sequence
  Description of Artificial Sequence: Synthetic oligonucleotide
ucccgccauuccuguucag

SEQ ID NO: 2249945 - RNA, 19 nt, Artificial Sequence
  Description of Artificial Sequence: Synthetic oligonucleotide
gguuagggucccacuuccc

SEQ ID NO: 2249946 - RNA, 19 nt, Artificial Sequence
  Description of Artificial Sequence: Synthetic oligonucleotide
caccuagcgggacagcggu

SEQ ID NO: 2249947 - RNA, 19 nt, Artificial Sequence
  Description of Artificial Sequence: Synthetic oligonucleotide
cuccgacgacgagaagaag

SEQ ID NO: 2249948 - RNA, 19 nt, Artificial Sequence
  Description of Artificial Sequence: Synthetic oligonucleotide
augcccuauuguugaucuu

SEQ ID NO: 2249949 - RNA, 19 nt, Artificial Sequence
  Description of Artificial Sequence: Synthetic oligonucleotide
aggaaggcggcggccgggu

SEQ ID NO: 2249950 - RNA, 19 nt, Artificial Sequence
  Description of Artificial Sequence: Synthetic oligonucleotide
ucgcgagucccggcugcgc

SEQ ID NO: 2249951 - RNA, 19 nt, Artificial Sequence
  Description of Artificial Sequence: Synthetic oligonucleotide
caggugccccgaagcccgg

SEQ ID NO: 2249952 - RNA, 19 nt, Artificial Sequence
  Description of Artificial Sequence: Synthetic oligonucleotide
uucucccgccauuccuguu

SEQ ID NO: 2249953 - RNA, 19 nt, Artificial Sequence
  Description of Artificial Sequence: Synthetic oligonucleotide
uugcugcucuugggguuga

SEQ ID NO: 2249954 - RNA, 19 nt, Artificial Sequence
  Description of Artificial Sequence: Synthetic oligonucleotide
cacacccuuuaagccaaga

SEQ ID NO: 2249955 - RNA, 19 nt, Artificial Sequence
  Description of Artificial Sequence: Synthetic oligonucleotide
ggagucgugagggcuggga

SEQ ID NO: 2249956 - RNA, 19 nt, Artificial Sequence
  Description of Artificial Sequence: Synthetic oligonucleotide
ccaugcuuuguggccauuc

SEQ ID NO: 2249957 - RNA, 19 nt, Artificial Sequence
  Description of Artificial Sequence: Synthetic oligonucleotide
gccagcaaucucgcucucc

SEQ ID NO: 2249958 - RNA, 19 nt, Artificial Sequence
  Description of Artificial Sequence: Synthetic oligonucleotide
aggugccccgaagcccggg

SEQ ID NO: 2249959 - RNA, 19 nt, Artificial Sequence
  Description of Artificial Sequence: Synthetic oligonucleotide
gugccccgaagcccggguc

SEQ ID NO: 2249960 - RNA, 19 nt, Artificial Sequence
  Description of Artificial Sequence: Synthetic oligonucleotide
ggggccccgcucuccgacg

SEQ ID NO: 2249961 - RNA, 19 nt, Artificial Sequence
  Description of Artificial Sequence: Synthetic oligonucleotide
acacacccuuuaagccaag

SEQ ID NO: 2249962 - RNA, 19 nt, Artificial Sequence
  Description of Artificial Sequence: Synthetic oligonucleotide
agcccgggucauucucgau

SEQ ID NO: 2249963 - RNA, 19 nt, Artificial Sequence
  Description of Artificial Sequence: Synthetic oligonucleotide
ccagcaaucucgcucuccu

SEQ ID NO: 2249964 - RNA, 19 nt, Artificial Sequence
  Description of Artificial Sequence: Synthetic oligonucleotide
gcccauuagccuccugaaa

SEQ ID NO: 2249965 - RNA, 19 nt, Artificial Sequence
  Description of Artificial Sequence: Synthetic oligonucleotide
accuagcgggacagcggug

SEQ ID NO: 2249966 - RNA, 19 nt, Artificial Sequence
  Description of Artificial Sequence: Synthetic oligonucleotide
gcauagccaucagcaggcc

SEQ ID NO: 2249967 - RNA, 19 nt, Artificial Sequence
  Description of Artificial Sequence: Synthetic oligonucleotide
ccacuccucugccucagca

SEQ ID NO: 2249968 - RNA, 19 nt, Artificial Sequence
  Description of Artificial Sequence: Synthetic oligonucleotide
gcugcgcagaggccaccug

SEQ ID NO: 2249969 - RNA, 19 nt, Artificial Sequence
  Description of Artificial Sequence: Synthetic oligonucleotide
gagcgcaggcgggacacgu

SEQ ID NO: 2249970 - RNA, 19 nt, Artificial Sequence
  Description of Artificial Sequence: Synthetic oligonucleotide
gucaccuuagaggcagcau

SEQ ID NO: 2249971 - RNA, 19 nt, Artificial Sequence
  Description of Artificial Sequence: Synthetic oligonucleotide
cgacgacgagaagaagccg

SEQ ID NO: 2249972 - RNA, 19 nt, Artificial Sequence
  Description of Artificial Sequence: Synthetic oligonucleotide
cgaagcccgggucauucuc

SEQ ID NO: 2249973 - RNA, 19 nt, Artificial Sequence
  Description of Artificial Sequence: Synthetic oligonucleotide
gccauucuuagggcaggca

SEQ ID NO: 2249974 - RNA, 19 nt, Artificial Sequence
  Description of Artificial Sequence: Synthetic oligonucleotide
ggaacagaacaggcugugu

SEQ ID NO: 2249975 - RNA, 19 nt, Artificial Sequence
  Description of Artificial Sequence: Synthetic oligonucleotide
gcuuuggcgcugguuccac

SEQ ID NO: 2249976 - RNA, 19 nt, Artificial Sequence
  Description of Artificial Sequence: Synthetic oligonucleotide
cuuuggcgcugguuccacu

SEQ ID NO: 2249977 - RNA, 19 nt, Artificial Sequence
  Description of Artificial Sequence: Synthetic oligonucleotide
gggcuaccuucucccacuc

SEQ ID NO: 2249978 - RNA, 19 nt, Artificial Sequence
  Description of Artificial Sequence: Synthetic oligonucleotide
ggccaccuggccgccgccg

SEQ ID NO: 2249979 - RNA, 19 nt, Artificial Sequence
  Description of Artificial Sequence: Synthetic oligonucleotide
acacgucuuugcacugcuu

SEQ ID NO: 2249980 - RNA, 19 nt, Artificial Sequence
  Description of Artificial Sequence: Synthetic oligonucleotide
ccgagcgcaggcgggacac

SEQ ID NO: 2249981 - RNA, 19 nt, Artificial Sequence
  Description of Artificial Sequence: Synthetic oligonucleotide
ccucucuccacuuccggau

SEQ ID NO: 2249982 - RNA, 19 nt, Artificial Sequence
  Description of Artificial Sequence: Synthetic oligonucleotide
gccgaaguccucagccauc

SEQ ID NO: 2249983 - RNA, 19 nt, Artificial Sequence
  Description of Artificial Sequence: Synthetic oligonucleotide
caucuccguugacuguagu

SEQ ID NO: 2249984 - RNA, 19 nt, Artificial Sequence
  Description of Artificial Sequence: Synthetic oligonucleotide
cgggacacgucuuugcacu

SEQ ID NO: 2249985 - RNA, 19 nt, Artificial Sequence
  Description of Artificial Sequence: Synthetic oligonucleotide
gccacuccucugccucagc

SEQ ID NO: 2249986 - RNA, 19 nt, Artificial Sequence
  Description of Artificial Sequence: Synthetic oligonucleotide
cgcucuccgacgacgagaa

SEQ ID NO: 2249987 - RNA, 19 nt, Artificial Sequence
  Description of Artificial Sequence: Synthetic oligonucleotide
cgacgagaagaagccgaag

SEQ ID NO: 2249988 - RNA, 19 nt, Artificial Sequence
  Description of Artificial Sequence: Synthetic oligonucleotide
gcucuccgacgacgagaag

SEQ ID NO: 2249989 - RNA, 19 nt, Artificial Sequence
  Description of Artificial Sequence: Synthetic oligonucleotide
gcgcaggcgggacacgucu

SEQ ID NO: 2249990 - RNA, 19 nt, Artificial Sequence
  Description of Artificial Sequence: Synthetic oligonucleotide
gcccuauuguugaucuugu

SEQ ID NO: 2249991 - RNA, 19 nt, Artificial Sequence
  Description of Artificial Sequence: Synthetic oligonucleotide
cccacucugugccuggggu

SEQ ID NO: 2249992 - RNA, 19 nt, Artificial Sequence
  Description of Artificial Sequence: Synthetic oligonucleotide
cagaugcccuauuguugau

SEQ ID NO: 2249993 - RNA, 19 nt, Artificial Sequence
  Description of Artificial Sequence: Synthetic oligonucleotide
ccguugacuguagucccca

SEQ ID NO: 2249994 - RNA, 19 nt, Artificial Sequence
  Description of Artificial Sequence: Synthetic oligonucleotide
caccuggccgccgccggca

SEQ ID NO: 2249995 - RNA, 19 nt, Artificial Sequence
  Description of Artificial Sequence: Synthetic oligonucleotide
ggcaggcaccuagcgggac

SEQ ID NO: 2249996 - RNA, 19 nt, Artificial Sequence
  Description of Artificial Sequence: Synthetic oligonucleotide
guucgcuuuggcgcugguu

SEQ ID NO: 2249997 - RNA, 19 nt, Artificial Sequence
  Description of Artificial Sequence: Synthetic oligonucleotide
cccgcucuccgacgacgag

SEQ ID NO: 2249998 - RNA, 19 nt, Artificial Sequence
  Description of Artificial Sequence: Synthetic oligonucleotide
ccuagcgggacagcggugu

SEQ ID NO: 2249999 - RNA, 19 nt, Artificial Sequence
  Description of Artificial Sequence: Synthetic oligonucleotide
ggugccccgaagcccgggu

SEQ ID NO: 2250000 - RNA, 19 nt, Artificial Sequence
  Description of Artificial Sequence: Synthetic oligonucleotide
ccgcucuccgacgacgaga

SEQ ID NO: 2250001 - RNA, 19 nt, Artificial Sequence
  Description of Artificial Sequence: Synthetic oligonucleotide
ccuggccgccgccggcagg

SEQ ID NO: 2250002 - RNA, 19 nt, Artificial Sequence
  Description of Artificial Sequence: Synthetic oligonucleotide
ccgaaguccucagccaucu

SEQ ID NO: 2250003 - RNA, 19 nt, Artificial Sequence
  Description of Artificial Sequence: Synthetic oligonucleotide
caggagggacagucacaau

SEQ ID NO: 2250004 - RNA, 19 nt, Artificial Sequence
  Description of Artificial Sequence: Synthetic oligonucleotide
ccccgcucuccgacgacga

SEQ ID NO: 2250005 - RNA, 19 nt, Artificial Sequence
  Description of Artificial Sequence: Synthetic oligonucleotide
gcaggcgggacacgucuuu

SEQ ID NO: 2250006 - RNA, 19 nt, Artificial Sequence
  Description of Artificial Sequence: Synthetic oligonucleotide
gccccgcucgcgagucccg

SEQ ID NO: 2250007 - RNA, 19 nt, Artificial Sequence
  Description of Artificial Sequence: Synthetic oligonucleotide
ggccccgcucuccgacgac

SEQ ID NO: 2250008 - RNA, 19 nt, Artificial Sequence
  Description of Artificial Sequence: Synthetic oligonucleotide
cgcgagucccggcugcgca

SEQ ID NO: 2250009 - RNA, 19 nt, Artificial Sequence
  Description of Artificial Sequence: Synthetic oligonucleotide
cagcggugucugcuucagu

SEQ ID NO: 2250010 - RNA, 19 nt, Artificial Sequence
  Description of Artificial Sequence: Synthetic oligonucleotide
ggcugcgcagaggccaccu

SEQ ID NO: 2250011 - RNA, 19 nt, Artificial Sequence
  Description of Artificial Sequence: Synthetic oligonucleotide
cccgccauuccuguucagu

SEQ ID NO: 2250012 - RNA, 19 nt, Artificial Sequence
  Description of Artificial Sequence: Synthetic oligonucleotide
ccggaggaaguuccacccu

SEQ ID NO: 2250013 - RNA, 19 nt, Artificial Sequence
  Description of Artificial Sequence: Synthetic oligonucleotide
cccuauuguugaucuuguu

SEQ ID NO: 2250014 - RNA, 19 nt, Artificial Sequence
  Description of Artificial Sequence: Synthetic oligonucleotide
cgagcgcaggcgggacacg

SEQ ID NO: 2250015 - RNA, 19 nt, Artificial Sequence
  Description of Artificial Sequence: Synthetic oligonucleotide
cgcuuuggcgcugguucca

SEQ ID NO: 2250016 - RNA, 19 nt, Artificial Sequence
  Description of Artificial Sequence: Synthetic oligonucleotide
ccgaagcccgggucauucu

SEQ ID NO: 2250017 - RNA, 19 nt, Artificial Sequence
  Description of Artificial Sequence: Synthetic oligonucleotide
ccucagagccagccccgcu

SEQ ID NO: 2250018 - RNA, 19 nt, Artificial Sequence
  Description of Artificial Sequence: Synthetic oligonucleotide
cgaugccagcaaucucgcu

SEQ ID NO: 2250019 - RNA, 19 nt, Artificial Sequence
  Description of Artificial Sequence: Synthetic oligonucleotide
cguugacuguaguccccau

SEQ ID NO: 2250020 - RNA, 19 nt, Artificial Sequence
  Description of Artificial Sequence: Synthetic oligonucleotide
ccgccggcaggugccccga

SEQ ID NO: 2250021 - RNA, 19 nt, Artificial Sequence
  Description of Artificial Sequence: Synthetic oligonucleotide
cccaugcuuuguggccauu

SEQ ID NO: 2250022 - RNA, 19 nt, Artificial Sequence
  Description of Artificial Sequence: Synthetic oligonucleotide
ccccgaagcccgggucauu

SEQ ID NO: 2250023 - RNA, 19 nt, Artificial Sequence
  Description of Artificial Sequence: Synthetic oligonucleotide
aauguaaaguguuagguac

SEQ ID NO: 2250024 - RNA, 19 nt, Artificial Sequence
  Description of Artificial Sequence: Synthetic oligonucleotide
aauguauagcaccaaauac

SEQ ID NO: 2250025 - RNA, 19 nt, Artificial Sequence
  Description of Artificial Sequence: Synthetic oligonucleotide
ugaaguagcaucuuuaggg

SEQ ID NO: 2250026 - RNA, 19 nt, Artificial Sequence
  Description of Artificial Sequence: Synthetic oligonucleotide
aauaagacaaggcugagaa

SEQ ID NO: 2250027 - RNA, 19 nt, Artificial Sequence
  Description of Artificial Sequence: Synthetic oligonucleotide
uugucuauaaucuagggcu

SEQ ID NO: 2250028 - RNA, 19 nt, Artificial Sequence
  Description of Artificial Sequence: Synthetic oligonucleotide
auuaccaaggcauuucagc

SEQ ID NO: 2250029 - RNA, 19 nt, Artificial Sequence
  Description of Artificial Sequence: Synthetic oligonucleotide
ugaaaguauuucaaggccg

SEQ ID NO: 2250030 - RNA, 19 nt, Artificial Sequence
  Description of Artificial Sequence: Synthetic oligonucleotide
aucaaugaaauguaaagug

SEQ ID NO: 2250031 - RNA, 19 nt, Artificial Sequence
  Description of Artificial Sequence: Synthetic oligonucleotide
acuaaugcagauugcauac

SEQ ID NO: 2250032 - RNA, 19 nt, Artificial Sequence
  Description of Artificial Sequence: Synthetic oligonucleotide
uguguuuccuauuaccucg

SEQ ID NO: 2250033 - RNA, 19 nt, Artificial Sequence
  Description of Artificial Sequence: Synthetic oligonucleotide
ucugucacaaaccuguaag

SEQ ID NO: 2250034 - RNA, 19 nt, Artificial Sequence
  Description of Artificial Sequence: Synthetic oligonucleotide
uugcauaccacuuaugagc

SEQ ID NO: 2250035 - RNA, 19 nt, Artificial Sequence
  Description of Artificial Sequence: Synthetic oligonucleotide
ucaaaacucaaauaagaca

SEQ ID NO: 2250036 - RNA, 19 nt, Artificial Sequence
  Description of Artificial Sequence: Synthetic oligonucleotide
uuuccuauuaccucggagc

SEQ ID NO: 2250037 - RNA, 19 nt, Artificial Sequence
  Description of Artificial Sequence: Synthetic oligonucleotide
uauuguaugagcaacugau

SEQ ID NO: 2250038 - RNA, 19 nt, Artificial Sequence
  Description of Artificial Sequence: Synthetic oligonucleotide
gcaaucuuaaccuugaugc

SEQ ID NO: 2250039 - RNA, 19 nt, Artificial Sequence
  Description of Artificial Sequence: Synthetic oligonucleotide
aaccuugaugccuucauag

SEQ ID NO: 2250040 - RNA, 19 nt, Artificial Sequence
  Description of Artificial Sequence: Synthetic oligonucleotide
auguauagcaccaaauacc

SEQ ID NO: 2250041 - RNA, 19 nt, Artificial Sequence
  Description of Artificial Sequence: Synthetic oligonucleotide
ucagcaaauguauagcacc

SEQ ID NO: 2250042 - RNA, 19 nt, Artificial Sequence
  Description of Artificial Sequence: Synthetic oligonucleotide
aaacucaaauaagacaagg

SEQ ID NO: 2250043 - RNA, 19 nt, Artificial Sequence
  Description of Artificial Sequence: Synthetic oligonucleotide
aaguauuucaaggccgucc

SEQ ID NO: 2250044 - RNA, 19 nt, Artificial Sequence
  Description of Artificial Sequence: Synthetic oligonucleotide
uucuauacuaccuaaacuu

SEQ ID NO: 2250045 - RNA, 19 nt, Artificial Sequence
  Description of Artificial Sequence: Synthetic oligonucleotide
acuaggaggauuugcaaac

SEQ ID NO: 2250046 - RNA, 19 nt, Artificial Sequence
  Description of Artificial Sequence: Synthetic oligonucleotide
gcuuuuaccagccagaaag

SEQ ID NO: 2250047 - RNA, 19 nt, Artificial Sequence
  Description of Artificial Sequence: Synthetic oligonucleotide
uguggcaugaaccacggca

SEQ ID NO: 2250048 - RNA, 19 nt, Artificial Sequence
  Description of Artificial Sequence: Synthetic oligonucleotide
ucaaugaaauguaaagugu

SEQ ID NO: 2250049 - RNA, 19 nt, Artificial Sequence
  Description of Artificial Sequence: Synthetic oligonucleotide
acuugauagguuucaaaac

SEQ ID NO: 2250050 - RNA, 19 nt, Artificial Sequence
  Description of Artificial Sequence: Synthetic oligonucleotide
ucuccaaacaucacuaaug

SEQ ID NO: 2250051 - RNA, 19 nt, Artificial Sequence
  Description of Artificial Sequence: Synthetic oligonucleotide
acucaaauaagacaaggcu

SEQ ID NO: 2250052 - RNA, 19 nt, Artificial Sequence
  Description of Artificial Sequence: Synthetic oligonucleotide
uaaucuagggcuucuauac

SEQ ID NO: 2250053 - RNA, 19 nt, Artificial Sequence
  Description of Artificial Sequence: Synthetic oligonucleotide
aacugauaaagcuucucug

SEQ ID NO: 2250054 - RNA, 19 nt, Artificial Sequence
  Description of Artificial Sequence: Synthetic oligonucleotide
uuucauauagguagucugc

SEQ ID NO: 2250055 - RNA, 19 nt, Artificial Sequence
  Description of Artificial Sequence: Synthetic oligonucleotide
aaaaggccucucuugaaag

SEQ ID NO: 2250056 - RNA, 19 nt, Artificial Sequence
  Description of Artificial Sequence: Synthetic oligonucleotide
cugugaaaguauuucaagg

SEQ ID NO: 2250057 - RNA, 19 nt, Artificial Sequence
  Description of Artificial Sequence: Synthetic oligonucleotide
ucugcuaucuuucacuuuc

SEQ ID NO: 2250058 - RNA, 19 nt, Artificial Sequence
  Description of Artificial Sequence: Synthetic oligonucleotide
uuaccagccagaaagcagc

SEQ ID NO: 2250059 - RNA, 19 nt, Artificial Sequence
  Description of Artificial Sequence: Synthetic oligonucleotide
uuaugagcagcaaaacuug

SEQ ID NO: 2250060 - RNA, 19 nt, Artificial Sequence
  Description of Artificial Sequence: Synthetic oligonucleotide
aaaccuguaagcaacugag

SEQ ID NO: 2250061 - RNA, 19 nt, Artificial Sequence
  Description of Artificial Sequence: Synthetic oligonucleotide
auauagguagucugcuugc

SEQ ID NO: 2250062 - RNA, 19 nt, Artificial Sequence
  Description of Artificial Sequence: Synthetic oligonucleotide
cauuucagcaaauguauag

SEQ ID NO: 2250063 - RNA, 19 nt, Artificial Sequence
  Description of Artificial Sequence: Synthetic oligonucleotide
ucaaguaugucuuuccuaa

SEQ ID NO: 2250064 - RNA, 19 nt, Artificial Sequence
  Description of Artificial Sequence: Synthetic oligonucleotide
ugaaguccuacuaagcugu

SEQ ID NO: 2250065 - RNA, 19 nt, Artificial Sequence
  Description of Artificial Sequence: Synthetic oligonucleotide
auugaaguagcaucuuuag

SEQ ID NO: 2250066 - RNA, 19 nt, Artificial Sequence
  Description of Artificial Sequence: Synthetic oligonucleotide
uugaaguagcaucuuuagg

SEQ ID NO: 2250067 - RNA, 19 nt, Artificial Sequence
  Description of Artificial Sequence: Synthetic oligonucleotide
aaguaugucuuuccuaaca

SEQ ID NO: 2250068 - RNA, 19 nt, Artificial Sequence
  Description of Artificial Sequence: Synthetic oligonucleotide
aucuuuaggguucaguuca

SEQ ID NO: 2250069 - RNA, 19 nt, Artificial Sequence
  Description of Artificial Sequence: Synthetic oligonucleotide
ucauagguggaacuaggag

SEQ ID NO: 2250070 - RNA, 19 nt, Artificial Sequence
  Description of Artificial Sequence: Synthetic oligonucleotide
gauugcauaccacuuauga

SEQ ID NO: 2250071 - RNA, 19 nt, Artificial Sequence
  Description of Artificial Sequence: Synthetic oligonucleotide
cuuucauauagguagucug

SEQ ID NO: 2250072 - RNA, 19 nt, Artificial Sequence
  Description of Artificial Sequence: Synthetic oligonucleotide
ucuuguguuuccuauuacc

SEQ ID NO: 2250073 - RNA, 19 nt, Artificial Sequence
  Description of Artificial Sequence: Synthetic oligonucleotide
ccaaacaucacuaaugcag

SEQ ID NO: 2250074 - RNA, 19 nt, Artificial Sequence
  Description of Artificial Sequence: Synthetic oligonucleotide
guaugagcaacugauaaag

SEQ ID NO: 2250075 - RNA, 19 nt, Artificial Sequence
  Description of Artificial Sequence: Synthetic oligonucleotide
uuguaugagcaacugauaa

SEQ ID NO: 2250076 - RNA, 19 nt, Artificial Sequence
  Description of Artificial Sequence: Synthetic oligonucleotide
aacucugcuaucuuucacu

SEQ ID NO: 2250077 - RNA, 19 nt, Artificial Sequence
  Description of Artificial Sequence: Synthetic oligonucleotide
ugcuggauaacccuuuggc

SEQ ID NO: 2250078 - RNA, 19 nt, Artificial Sequence
  Description of Artificial Sequence: Synthetic oligonucleotide
uaaggugaauugaaguagc

SEQ ID NO: 2250079 - RNA, 19 nt, Artificial Sequence
  Description of Artificial Sequence: Synthetic oligonucleotide
aggauuugcaaacagcacu

SEQ ID NO: 2250080 - RNA, 19 nt, Artificial Sequence
  Description of Artificial Sequence: Synthetic oligonucleotide
uaggguucaguucaauugc

SEQ ID NO: 2250081 - RNA, 19 nt, Artificial Sequence
  Description of Artificial Sequence: Synthetic oligonucleotide
auugcauaccacuuaugag

SEQ ID NO: 2250082 - RNA, 19 nt, Artificial Sequence
  Description of Artificial Sequence: Synthetic oligonucleotide
ucacaaaccuguaagcaac

SEQ ID NO: 2250083 - RNA, 19 nt, Artificial Sequence
  Description of Artificial Sequence: Synthetic oligonucleotide
auaaggugaauugaaguag

SEQ ID NO: 2250084 - RNA, 19 nt, Artificial Sequence
  Description of Artificial Sequence: Synthetic oligonucleotide
  modified_base (6)..(6): a, c, u, g, unknown or other
agcagnuucugucuguauc

SEQ ID NO: 2250085 - RNA, 19 nt, Artificial Sequence
  Description of Artificial Sequence: Synthetic oligonucleotide
gcaccaaauacccauaagg

SEQ ID NO: 2250086 - RNA, 19 nt, Artificial Sequence
  Description of Artificial Sequence: Synthetic oligonucleotide
gugaaaguauuucaaggcc

SEQ ID NO: 2250087 - RNA, 19 nt, Artificial Sequence
  Description of Artificial Sequence: Synthetic oligonucleotide
ugauagguuucaaaacuca

SEQ ID NO: 2250088 - RNA, 19 nt, Artificial Sequence
  Description of Artificial Sequence: Synthetic oligonucleotide
ucaguucugucacaaaccu

SEQ ID NO: 2250089 - RNA, 19 nt, Artificial Sequence
  Description of Artificial Sequence: Synthetic oligonucleotide
aaucuuaaccuugaugccu

SEQ ID NO: 2250090 - RNA, 19 nt, Artificial Sequence
  Description of Artificial Sequence: Synthetic oligonucleotide
uacauuguugccuucucca

SEQ ID NO: 2250091 - RNA, 19 nt, Artificial Sequence
  Description of Artificial Sequence: Synthetic oligonucleotide
ggcauuugcaaucuuaacc

SEQ ID NO: 2250092 - RNA, 19 nt, Artificial Sequence
  Description of Artificial Sequence: Synthetic oligonucleotide
caaggcugagaacaaaagg

SEQ ID NO: 2250093 - RNA, 19 nt, Artificial Sequence
  Description of Artificial Sequence: Synthetic oligonucleotide
accaaauacccauaaggug

SEQ ID NO: 2250094 - RNA, 19 nt, Artificial Sequence
  Description of Artificial Sequence: Synthetic oligonucleotide
auacccauaaggugaauug

SEQ ID NO: 2250095 - RNA, 19 nt, Artificial Sequence
  Description of Artificial Sequence: Synthetic oligonucleotide
ucuguaucuguuuaucuuc

SEQ ID NO: 2250096 - RNA, 19 nt, Artificial Sequence
  Description of Artificial Sequence: Synthetic oligonucleotide
uuugcucguaggaaguuug

SEQ ID NO: 2250097 - RNA, 19 nt, Artificial Sequence
  Description of Artificial Sequence: Synthetic oligonucleotide
uuccuauuaccucggagcc

SEQ ID NO: 2250098 - RNA, 19 nt, Artificial Sequence
  Description of Artificial Sequence: Synthetic oligonucleotide
gauaauguaggcauuugca

SEQ ID NO: 2250099 - RNA, 19 nt, Artificial Sequence
  Description of Artificial Sequence: Synthetic oligonucleotide
ugcauaccacuuaugagca

SEQ ID NO: 2250100 - RNA, 19 nt, Artificial Sequence
  Description of Artificial Sequence: Synthetic oligonucleotide
aaauguuccuugauaaugu

SEQ ID NO: 2250101 - RNA, 19 nt, Artificial Sequence
  Description of Artificial Sequence: Synthetic oligonucleotide
uccuuguauuguaugagca

SEQ ID NO: 2250102 - RNA, 19 nt, Artificial Sequence
  Description of Artificial Sequence: Synthetic oligonucleotide
uugcaaacagcacuuuagc

SEQ ID NO: 2250103 - RNA, 19 nt, Artificial Sequence
  Description of Artificial Sequence: Synthetic oligonucleotide
ugucacgugaugcucgugc

SEQ ID NO: 2250104 - RNA, 19 nt, Artificial Sequence
  Description of Artificial Sequence: Synthetic oligonucleotide
augaaauguaaaguguuag

SEQ ID NO: 2250105 - RNA, 19 nt, Artificial Sequence
  Description of Artificial Sequence: Synthetic oligonucleotide
ucguaggaaguuuggaucc

SEQ ID NO: 2250106 - RNA, 19 nt, Artificial Sequence
  Description of Artificial Sequence: Synthetic oligonucleotide
acuuaugagcagcaaaacu

SEQ ID NO: 2250107 - RNA, 19 nt, Artificial Sequence
  Description of Artificial Sequence: Synthetic oligonucleotide
ugugcuaugucacgugaug

SEQ ID NO: 2250108 - RNA, 19 nt, Artificial Sequence
  Description of Artificial Sequence: Synthetic oligonucleotide
aacuaggaggauuugcaaa

SEQ ID NO: 2250109 - RNA, 19 nt, Artificial Sequence
  Description of Artificial Sequence: Synthetic oligonucleotide
aauucuucuuugauuacca

SEQ ID NO: 2250110 - RNA, 19 nt, Artificial Sequence
  Description of Artificial Sequence: Synthetic oligonucleotide
ucuguuuaucuucuucugu

SEQ ID NO: 2250111 - RNA, 19 nt, Artificial Sequence
  Description of Artificial Sequence: Synthetic oligonucleotide
auaauguaggcauuugcaa

SEQ ID NO: 2250112 - RNA, 19 nt, Artificial Sequence
  Description of Artificial Sequence: Synthetic oligonucleotide
accuguaagcaacugagca

SEQ ID NO: 2250113 - RNA, 19 nt, Artificial Sequence
  Description of Artificial Sequence: Synthetic oligonucleotide
ucaacuuuuggcuguggca

SEQ ID NO: 2250114 - RNA, 19 nt, Artificial Sequence
  Description of Artificial Sequence: Synthetic oligonucleotide
uguugccuucuccauaaag

SEQ ID NO: 2250115 - RNA, 19 nt, Artificial Sequence
  Description of Artificial Sequence: Synthetic oligonucleotide
uuguuuuagcuucaaguau

SEQ ID NO: 2250116 - RNA, 19 nt, Artificial Sequence
  Description of Artificial Sequence: Synthetic oligonucleotide
uugauagguuucaaaacuc

SEQ ID NO: 2250117 - RNA, 19 nt, Artificial Sequence
  Description of Artificial Sequence: Synthetic oligonucleotide
uaauguaggcauuugcaau

SEQ ID NO: 2250118 - RNA, 19 nt, Artificial Sequence
  Description of Artificial Sequence: Synthetic oligonucleotide
guguuagguacauuguugc

SEQ ID NO: 2250119 - RNA, 19 nt, Artificial Sequence
  Description of Artificial Sequence: Synthetic oligonucleotide
ugagcaacugauaaagcuu

SEQ ID NO: 2250120 - RNA, 19 nt, Artificial Sequence
  Description of Artificial Sequence: Synthetic oligonucleotide
aaugcagauugcauaccac

SEQ ID NO: 2250121 - RNA, 19 nt, Artificial Sequence
  Description of Artificial Sequence: Synthetic oligonucleotide
ugauuaccaaggcauuuca

SEQ ID NO: 2250122 - RNA, 19 nt, Artificial Sequence
  Description of Artificial Sequence: Synthetic oligonucleotide
cuaugucacgugaugcucg

SEQ ID NO: 2250123 - RNA, 19 nt, Artificial Sequence
  Description of Artificial Sequence: Synthetic oligonucleotide
uuuccuuguauuguaugag

SEQ ID NO: 2250124 - RNA, 19 nt, Artificial Sequence
  Description of Artificial Sequence: Synthetic oligonucleotide
ggugaauugaaguagcauc

SEQ ID NO: 2250125 - RNA, 19 nt, Artificial Sequence
  Description of Artificial Sequence: Synthetic oligonucleotide
aguccuacuaagcugugcu

SEQ ID NO: 2250126 - RNA, 19 nt, Artificial Sequence
  Description of Artificial Sequence: Synthetic oligonucleotide
aaaacucaaauaagacaag

SEQ ID NO: 2250127 - RNA, 19 nt, Artificial Sequence
  Description of Artificial Sequence: Synthetic oligonucleotide
cuuguauuguaugagcaac

SEQ ID NO: 2250128 - RNA, 19 nt, Artificial Sequence
  Description of Artificial Sequence: Synthetic oligonucleotide
uaugagcaacugauaaagc

SEQ ID NO: 2250129 - RNA, 19 nt, Artificial Sequence
  Description of Artificial Sequence: Synthetic oligonucleotide
uguauuguaugagcaacug

SEQ ID NO: 2250130 - RNA, 19 nt, Artificial Sequence
  Description of Artificial Sequence: Synthetic oligonucleotide
aaccacggcagccugagaa

SEQ ID NO: 2250131 - RNA, 19 nt, Artificial Sequence
  Description of Artificial Sequence: Synthetic oligonucleotide
uuccuuguauuguaugagc

SEQ ID NO: 2250132 - RNA, 19 nt, Artificial Sequence
  Description of Artificial Sequence: Synthetic oligonucleotide
uauaaucuagggcuucuau

SEQ ID NO: 2250133 - RNA, 19 nt, Artificial Sequence
  Description of Artificial Sequence: Synthetic oligonucleotide
uuguauuguaugagcaacu

SEQ ID NO: 2250134 - RNA, 19 nt, Artificial Sequence
  Description of Artificial Sequence: Synthetic oligonucleotide
ucuauacuaccuaaacuuu

SEQ ID NO: 2250135 - RNA, 19 nt, Artificial Sequence
  Description of Artificial Sequence: Synthetic oligonucleotide
uguaugagcaacugauaaa

SEQ ID NO: 2250136 - RNA, 19 nt, Artificial Sequence
  Description of Artificial Sequence: Synthetic oligonucleotide
aguuuggauccacuuguuc

SEQ ID NO: 2250137 - RNA, 19 nt, Artificial Sequence
  Description of Artificial Sequence: Synthetic oligonucleotide
acuaagcugugcuauguca

SEQ ID NO: 2250138 - RNA, 19 nt, Artificial Sequence
  Description of Artificial Sequence: Synthetic oligonucleotide
auaagacaaggcugagaac

SEQ ID NO: 2250139 - RNA, 19 nt, Artificial Sequence
  Description of Artificial Sequence: Synthetic oligonucleotide
cuaagcugugcuaugucac

SEQ ID NO: 2250140 - RNA, 19 nt, Artificial Sequence
  Description of Artificial Sequence: Synthetic oligonucleotide
  modified_base (10)..(10): a, c, u, g, unknown or other
acugagcagnuucugucug

SEQ ID NO: 2250141 - RNA, 19 nt, Artificial Sequence
  Description of Artificial Sequence: Synthetic oligonucleotide
cauaccacuuaugagcagc

SEQ ID NO: 2250142 - RNA, 19 nt, Artificial Sequence
  Description of Artificial Sequence: Synthetic oligonucleotide
uguuuaucuucuucugugu

SEQ ID NO: 2250143 - RNA, 19 nt, Artificial Sequence
  Description of Artificial Sequence: Synthetic oligonucleotide
aggccguccucauaggugg

SEQ ID NO: 2250144 - RNA, 19 nt, Artificial Sequence
  Description of Artificial Sequence: Synthetic oligonucleotide
gaaguuuggauccacuugu

SEQ ID NO: 2250145 - RNA, 19 nt, Artificial Sequence
  Description of Artificial Sequence: Synthetic oligonucleotide
caaucuuaaccuugaugcc

SEQ ID NO: 2250146 - RNA, 19 nt, Artificial Sequence
  Description of Artificial Sequence: Synthetic oligonucleotide
aaucuagggcuucuauacu

SEQ ID NO: 2250147 - RNA, 19 nt, Artificial Sequence
  Description of Artificial Sequence: Synthetic oligonucleotide
aaggucuuguguuuccuau

SEQ ID NO: 2250148 - RNA, 19 nt, Artificial Sequence
  Description of Artificial Sequence: Synthetic oligonucleotide
ugagcagcaaaacuugauu

SEQ ID NO: 2250149 - RNA, 19 nt, Artificial Sequence
  Description of Artificial Sequence: Synthetic oligonucleotide
cauaggucuccaaacauca

SEQ ID NO: 2250150 - RNA, 19 nt, Artificial Sequence
  Description of Artificial Sequence: Synthetic oligonucleotide
aauugaaguagcaucuuua

SEQ ID NO: 2250151 - RNA, 19 nt, Artificial Sequence
  Description of Artificial Sequence: Synthetic oligonucleotide
aaguccuacuaagcugugc

SEQ ID NO: 2250152 - RNA, 19 nt, Artificial Sequence
  Description of Artificial Sequence: Synthetic oligonucleotide
ucuccacuuucauauaggu

SEQ ID NO: 2250153 - RNA, 19 nt, Artificial Sequence
  Description of Artificial Sequence: Synthetic oligonucleotide
aaauaagacaaggcugaga

SEQ ID NO: 2250154 - RNA, 19 nt, Artificial Sequence
  Description of Artificial Sequence: Synthetic oligonucleotide
auagguagucugcuugcuc

SEQ ID NO: 2250155 - RNA, 19 nt, Artificial Sequence
  Description of Artificial Sequence: Synthetic oligonucleotide
uuaaccuugaugccuucau

SEQ ID NO: 2250156 - RNA, 19 nt, Artificial Sequence
  Description of Artificial Sequence: Synthetic oligonucleotide
aaccuguaagcaacugagc

SEQ ID NO: 2250157 - RNA, 19 nt, Artificial Sequence
  Description of Artificial Sequence: Synthetic oligonucleotide
uucugugugugcuggauaa

SEQ ID NO: 2250158 - RNA, 19 nt, Artificial Sequence
  Description of Artificial Sequence: Synthetic oligonucleotide
ucuagggcuucuauacuac

SEQ ID NO: 2250159 - RNA, 19 nt, Artificial Sequence
  Description of Artificial Sequence: Synthetic oligonucleotide
aguguuagguacauuguug

SEQ ID NO: 2250160 - RNA, 19 nt, Artificial Sequence
  Description of Artificial Sequence: Synthetic oligonucleotide
augcagauugcauaccacu

SEQ ID NO: 2250161 - RNA, 19 nt, Artificial Sequence
  Description of Artificial Sequence: Synthetic oligonucleotide
agaacaaaaggccucucuu

SEQ ID NO: 2250162 - RNA, 19 nt, Artificial Sequence
  Description of Artificial Sequence: Synthetic oligonucleotide
aucacuaaugcagauugca

SEQ ID NO: 2250163 - RNA, 19 nt, Artificial Sequence
  Description of Artificial Sequence: Synthetic oligonucleotide
auaaaguucucaguucugu

SEQ ID NO: 2250164 - RNA, 19 nt, Artificial Sequence
  Description of Artificial Sequence: Synthetic oligonucleotide
cugucacaaaccuguaagc

SEQ ID NO: 2250165 - RNA, 19 nt, Artificial Sequence
  Description of Artificial Sequence: Synthetic oligonucleotide
uuagguacauuguugccuu

SEQ ID NO: 2250166 - RNA, 19 nt, Artificial Sequence
  Description of Artificial Sequence: Synthetic oligonucleotide
cuugauagguuucaaaacu

SEQ ID NO: 2250167 - RNA, 19 nt, Artificial Sequence
  Description of Artificial Sequence: Synthetic oligonucleotide
guuuccuauuaccucggag

SEQ ID NO: 2250168 - RNA, 19 nt, Artificial Sequence
  Description of Artificial Sequence: Synthetic oligonucleotide
aauacccauaaggugaauu

SEQ ID NO: 2250169 - RNA, 19 nt, Artificial Sequence
  Description of Artificial Sequence: Synthetic oligonucleotide
cucgccaguugacagacgc

SEQ ID NO: 2250170 - RNA, 19 nt, Artificial Sequence
  Description of Artificial Sequence: Synthetic oligonucleotide
uuuuaccagccagaaagca

SEQ ID NO: 2250171 - RNA, 19 nt, Artificial Sequence
  Description of Artificial Sequence: Synthetic oligonucleotide
gaugccuucauaggucucc

SEQ ID NO: 2250172 - RNA, 19 nt, Artificial Sequence
  Description of Artificial Sequence: Synthetic oligonucleotide
auaaucuagggcuucuaua

SEQ ID NO: 2250173 - RNA, 19 nt, Artificial Sequence
  Description of Artificial Sequence: Synthetic oligonucleotide
auagguggaacuaggagga

SEQ ID NO: 2250174 - RNA, 19 nt, Artificial Sequence
  Description of Artificial Sequence: Synthetic oligonucleotide
caaacaucacuaaugcaga

SEQ ID NO: 2250175 - RNA, 19 nt, Artificial Sequence
  Description of Artificial Sequence: Synthetic oligonucleotide
uagggcuucuauacuaccu

SEQ ID NO: 2250176 - RNA, 19 nt, Artificial Sequence
  Description of Artificial Sequence: Synthetic oligonucleotide
uuuaggguucaguucaauu

SEQ ID NO: 2250177 - RNA, 19 nt, Artificial Sequence
  Description of Artificial Sequence: Synthetic oligonucleotide
ccaaauacccauaagguga

SEQ ID NO: 2250178 - RNA, 19 nt, Artificial Sequence
  Description of Artificial Sequence: Synthetic oligonucleotide
uucauauagguagucugcu

SEQ ID NO: 2250179 - RNA, 19 nt, Artificial Sequence
  Description of Artificial Sequence: Synthetic oligonucleotide
aaacaucacuaaugcagau

SEQ ID NO: 2250180 - RNA, 19 nt, Artificial Sequence
  Description of Artificial Sequence: Synthetic oligonucleotide
ugaugcucgugccaaccgc

SEQ ID NO: 2250181 - RNA, 19 nt, Artificial Sequence
  Description of Artificial Sequence: Synthetic oligonucleotide
auuaccucggagcccagga

SEQ ID NO: 2250182 - RNA, 19 nt, Artificial Sequence
  Description of Artificial Sequence: Synthetic oligonucleotide
ugcuaugucacgugaugcu

SEQ ID NO: 2250183 - RNA, 19 nt, Artificial Sequence
  Description of Artificial Sequence: Synthetic oligonucleotide
cuuaugagcagcaaaacuu

SEQ ID NO: 2250184 - RNA, 19 nt, Artificial Sequence
  Description of Artificial Sequence: Synthetic oligonucleotide
guaucuguuuaucuucuuc

SEQ ID NO: 2250185 - RNA, 19 nt, Artificial Sequence
  Description of Artificial Sequence: Synthetic oligonucleotide
caucuuuaggguucaguuc

SEQ ID NO: 2250186 - RNA, 19 nt, Artificial Sequence
  Description of Artificial Sequence: Synthetic oligonucleotide
uugcucguaggaaguuugg

SEQ ID NO: 2250187 - RNA, 19 nt, Artificial Sequence
  Description of Artificial Sequence: Synthetic oligonucleotide
uggaacuaggaggauuugc

SEQ ID NO: 2250188 - RNA, 19 nt, Artificial Sequence
  Description of Artificial Sequence: Synthetic oligonucleotide
ugugcuggauaacccuuug

SEQ ID NO: 2250189 - RNA, 19 nt, Artificial Sequence
  Description of Artificial Sequence: Synthetic oligonucleotide
ugcagauugcauaccacuu

SEQ ID NO: 2250190 - RNA, 19 nt, Artificial Sequence
  Description of Artificial Sequence: Synthetic oligonucleotide
gauuaccaaggcauuucag

SEQ ID NO: 2250191 - RNA, 19 nt, Artificial Sequence
  Description of Artificial Sequence: Synthetic oligonucleotide
ggaaguuuggauccacuug

SEQ ID NO: 2250192 - RNA, 19 nt, Artificial Sequence
  Description of Artificial Sequence: Synthetic oligonucleotide
ugacuugauagguuucaaa

SEQ ID NO: 2250193 - RNA, 19 nt, Artificial Sequence
  Description of Artificial Sequence: Synthetic oligonucleotide
uugauuaccaaggcauuuc

SEQ ID NO: 2250194 - RNA, 19 nt, Artificial Sequence
  Description of Artificial Sequence: Synthetic oligonucleotide
ucuauaaucuagggcuucu

SEQ ID NO: 2250195 - RNA, 19 nt, Artificial Sequence
  Description of Artificial Sequence: Synthetic oligonucleotide
agcaccaaauacccauaag

SEQ ID NO: 2250196 - RNA, 19 nt, Artificial Sequence
  Description of Artificial Sequence: Synthetic oligonucleotide
uccucauagguggaacuag

SEQ ID NO: 2250197 - RNA, 19 nt, Artificial Sequence
  Description of Artificial Sequence: Synthetic oligonucleotide
uugauaauguaggcauuug

SEQ ID NO: 2250198 - RNA, 19 nt, Artificial Sequence
  Description of Artificial Sequence: Synthetic oligonucleotide
guacauuguugccuucucc

SEQ ID NO: 2250199 - RNA, 19 nt, Artificial Sequence
  Description of Artificial Sequence: Synthetic oligonucleotide
uaacucugcuaucuuucac

SEQ ID NO: 2250200 - RNA, 19 nt, Artificial Sequence
  Description of Artificial Sequence: Synthetic oligonucleotide
uguaaaguguuagguacau

SEQ ID NO: 2250201 - RNA, 19 nt, Artificial Sequence
  Description of Artificial Sequence: Synthetic oligonucleotide
gagcaacugauaaagcuuc

SEQ ID NO: 2250202 - RNA, 19 nt, Artificial Sequence
  Description of Artificial Sequence: Synthetic oligonucleotide
gaaguagcaucuuuagggu

SEQ ID NO: 2250203 - RNA, 19 nt, Artificial Sequence
  Description of Artificial Sequence: Synthetic oligonucleotide
acuuucauauagguagucu

SEQ ID NO: 2250204 - RNA, 19 nt, Artificial Sequence
  Description of Artificial Sequence: Synthetic oligonucleotide
uagcaauucuucuuugauu

SEQ ID NO: 2250205 - RNA, 19 nt, Artificial Sequence
  Description of Artificial Sequence: Synthetic oligonucleotide
agcuucaaguaugucuuuc

SEQ ID NO: 2250206 - RNA, 19 nt, Artificial Sequence
  Description of Artificial Sequence: Synthetic oligonucleotide
ugaaccacggcagccugag

SEQ ID NO: 2250207 - RNA, 19 nt, Artificial Sequence
  Description of Artificial Sequence: Synthetic oligonucleotide
cugugugugcuggauaacc

SEQ ID NO: 2250208 - RNA, 19 nt, Artificial Sequence
  Description of Artificial Sequence: Synthetic oligonucleotide
gcaaacagcacuuuagcaa

SEQ ID NO: 2250209 - RNA, 19 nt, Artificial Sequence
  Description of Artificial Sequence: Synthetic oligonucleotide
  modified_base (3)..(3): a, c, u, g, unknown or other
agnuucugucuguaucugu

SEQ ID NO: 2250210 - RNA, 19 nt, Artificial Sequence
  Description of Artificial Sequence: Synthetic oligonucleotide
ugucuauaaucuagggcuu

SEQ ID NO: 2250211 - RNA, 19 nt, Artificial Sequence
  Description of Artificial Sequence: Synthetic oligonucleotide
  modified_base (19)..(19): a, c, u, g, unknown or other
cuguaagcaacugagcagn

SEQ ID NO: 2250212 - RNA, 19 nt, Artificial Sequence
  Description of Artificial Sequence: Synthetic oligonucleotide
cuagggcuucuauacuacc

SEQ ID NO: 2250213 - RNA, 19 nt, Artificial Sequence
  Description of Artificial Sequence: Synthetic oligonucleotide
gucacaaaccuguaagcaa

SEQ ID NO: 2250214 - RNA, 19 nt, Artificial Sequence
  Description of Artificial Sequence: Synthetic oligonucleotide
auagguuucaaaacucaaa

SEQ ID NO: 2250215 - RNA, 19 nt, Artificial Sequence
  Description of Artificial Sequence: Synthetic oligonucleotide
caaaccuguaagcaacuga

SEQ ID NO: 2250216 - RNA, 19 nt, Artificial Sequence
  Description of Artificial Sequence: Synthetic oligonucleotide
gaugcucgugccaaccgcc

SEQ ID NO: 2250217 - RNA, 19 nt, Artificial Sequence
  Description of Artificial Sequence: Synthetic oligonucleotide
uccuacuaagcugugcuau

SEQ ID NO: 2250218 - RNA, 19 nt, Artificial Sequence
  Description of Artificial Sequence: Synthetic oligonucleotide
ugugugcuggauaacccuu

SEQ ID NO: 2250219 - RNA, 19 nt, Artificial Sequence
  Description of Artificial Sequence: Synthetic oligonucleotide
guggcaugaaccacggcag

SEQ ID NO: 2250220 - RNA, 19 nt, Artificial Sequence
  Description of Artificial Sequence: Synthetic oligonucleotide
caucacuaaugcagauugc

SEQ ID NO: 2250221 - RNA, 19 nt, Artificial Sequence
  Description of Artificial Sequence: Synthetic oligonucleotide
gauagguuucaaaacucaa

SEQ ID NO: 2250222 - RNA, 19 nt, Artificial Sequence
  Description of Artificial Sequence: Synthetic oligonucleotide
gugaugcucgugccaaccg

SEQ ID NO: 2250223 - RNA, 19 nt, Artificial Sequence
  Description of Artificial Sequence: Synthetic oligonucleotide
uaugucacgugaugcucgu

SEQ ID NO: 2250224 - RNA, 19 nt, Artificial Sequence
  Description of Artificial Sequence: Synthetic oligonucleotide
ucaaggccguccucauagg

SEQ ID NO: 2250225 - RNA, 19 nt, Artificial Sequence
  Description of Artificial Sequence: Synthetic oligonucleotide
uacuaagcugugcuauguc

SEQ ID NO: 2250226 - RNA, 19 nt, Artificial Sequence
  Description of Artificial Sequence: Synthetic oligonucleotide
aaggccguccucauaggug

SEQ ID NO: 2250227 - RNA, 19 nt, Artificial Sequence
  Description of Artificial Sequence: Synthetic oligonucleotide
aggaaguuuggauccacuu

SEQ ID NO: 2250228 - RNA, 19 nt, Artificial Sequence
  Description of Artificial Sequence: Synthetic oligonucleotide
gaacuaggaggauuugcaa

SEQ ID NO: 2250229 - RNA, 19 nt, Artificial Sequence
  Description of Artificial Sequence: Synthetic oligonucleotide
uagcaccaaauacccauaa

SEQ ID NO: 2250230 - RNA, 19 nt, Artificial Sequence
  Description of Artificial Sequence: Synthetic oligonucleotide
accgccacaguaacucugc

SEQ ID NO: 2250231 - RNA, 19 nt, Artificial Sequence
  Description of Artificial Sequence: Synthetic oligonucleotide
uaccucggagcccaggaau

SEQ ID NO: 2250232 - RNA, 19 nt, Artificial Sequence
  Description of Artificial Sequence: Synthetic oligonucleotide
uauuaccucggagcccagg

SEQ ID NO: 2250233 - RNA, 19 nt, Artificial Sequence
  Description of Artificial Sequence: Synthetic oligonucleotide
gaggauuugcaaacagcac

SEQ ID NO: 2250234 - RNA, 19 nt, Artificial Sequence
  Description of Artificial Sequence: Synthetic oligonucleotide
ucauauagguagucugcuu

SEQ ID NO: 2250235 - RNA, 19 nt, Artificial Sequence
  Description of Artificial Sequence: Synthetic oligonucleotide
ucggagcccaggaaucccc

SEQ ID NO: 2250236 - RNA, 19 nt, Artificial Sequence
  Description of Artificial Sequence: Synthetic oligonucleotide
ugcccugugaaaguauuuc

SEQ ID NO: 2250237 - RNA, 19 nt, Artificial Sequence
  Description of Artificial Sequence: Synthetic oligonucleotide
ccuguaagcaacugagcag

SEQ ID NO: 2250238 - RNA, 19 nt, Artificial Sequence
  Description of Artificial Sequence: Synthetic oligonucleotide
ucacgugaugcucgugcca

SEQ ID NO: 2250239 - RNA, 19 nt, Artificial Sequence
  Description of Artificial Sequence: Synthetic oligonucleotide
cagcaaauguauagcacca

SEQ ID NO: 2250240 - RNA, 19 nt, Artificial Sequence
  Description of Artificial Sequence: Synthetic oligonucleotide
aagcugugcuaugucacgu

SEQ ID NO: 2250241 - RNA, 19 nt, Artificial Sequence
  Description of Artificial Sequence: Synthetic oligonucleotide
uguuuccuauuaccucgga

SEQ ID NO: 2250242 - RNA, 19 nt, Artificial Sequence
  Description of Artificial Sequence: Synthetic oligonucleotide
agccugagaaaugacuuga

SEQ ID NO: 2250243 - RNA, 19 nt, Artificial Sequence
  Description of Artificial Sequence: Synthetic oligonucleotide
ucuucaacuuuuggcugug

SEQ ID NO: 2250244 - RNA, 19 nt, Artificial Sequence
  Description of Artificial Sequence: Synthetic oligonucleotide
gugaauugaaguagcaucu

SEQ ID NO: 2250245 - RNA, 19 nt, Artificial Sequence
  Description of Artificial Sequence: Synthetic oligonucleotide
gugcuggauaacccuuugg

SEQ ID NO: 2250246 - RNA, 19 nt, Artificial Sequence
  Description of Artificial Sequence: Synthetic oligonucleotide
cuucuauacuaccuaaacu

SEQ ID NO: 2250247 - RNA, 19 nt, Artificial Sequence
  Description of Artificial Sequence: Synthetic oligonucleotide
  modified_base (18)..(18): a, c, u, g, unknown or other
uguaagcaacugagcagnu

SEQ ID NO: 2250248 - RNA, 19 nt, Artificial Sequence
  Description of Artificial Sequence: Synthetic oligonucleotide
caaauaagacaaggcugag

SEQ ID NO: 2250249 - RNA, 19 nt, Artificial Sequence
  Description of Artificial Sequence: Synthetic oligonucleotide
gucacgugaugcucgugcc

SEQ ID NO: 2250250 - RNA, 19 nt, Artificial Sequence
  Description of Artificial Sequence: Synthetic oligonucleotide
acaaaaggccucucuugaa

SEQ ID NO: 2250251 - RNA, 19 nt, Artificial Sequence
  Description of Artificial Sequence: Synthetic oligonucleotide
gugcuaugucacgugaugc

SEQ ID NO: 2250252 - RNA, 19 nt, Artificial Sequence
  Description of Artificial Sequence: Synthetic oligonucleotide
acauuguugccuucuccau

SEQ ID NO: 2250253 - RNA, 19 nt, Artificial Sequence
  Description of Artificial Sequence: Synthetic oligonucleotide
acucugcuaucuuucacuu

SEQ ID NO: 2250254 - RNA, 19 nt, Artificial Sequence
  Description of Artificial Sequence: Synthetic oligonucleotide
agggcuucuauacuaccua

SEQ ID NO: 2250255 - RNA, 19 nt, Artificial Sequence
  Description of Artificial Sequence: Synthetic oligonucleotide
guuagguacauuguugccu

SEQ ID NO: 2250256 - RNA, 19 nt, Artificial Sequence
  Description of Artificial Sequence: Synthetic oligonucleotide
aggcauuucagcaaaugua

SEQ ID NO: 2250257 - RNA, 19 nt, Artificial Sequence
  Description of Artificial Sequence: Synthetic oligonucleotide
guugccuucuccauaaagu

SEQ ID NO: 2250258 - RNA, 19 nt, Artificial Sequence
  Description of Artificial Sequence: Synthetic oligonucleotide
ggcaccacagugcccacgg

SEQ ID NO: 2250259 - RNA, 19 nt, Artificial Sequence
  Description of Artificial Sequence: Synthetic oligonucleotide
ggaacuaggaggauuugca

SEQ ID NO: 2250260 - RNA, 19 nt, Artificial Sequence
  Description of Artificial Sequence: Synthetic oligonucleotide
ucuuuaggguucaguucaa

SEQ ID NO: 2250261 - RNA, 19 nt, Artificial Sequence
  Description of Artificial Sequence: Synthetic oligonucleotide
uuuguuguuuuagcuucaa

SEQ ID NO: 2250262 - RNA, 19 nt, Artificial Sequence
  Description of Artificial Sequence: Synthetic oligonucleotide
agcugugcuaugucacgug

SEQ ID NO: 2250263 - RNA, 19 nt, Artificial Sequence
  Description of Artificial Sequence: Synthetic oligonucleotide
uagucugcuugcucaagua

SEQ ID NO: 2250264 - RNA, 19 nt, Artificial Sequence
  Description of Artificial Sequence: Synthetic oligonucleotide
auccccgggcaccacagug

SEQ ID NO: 2250265 - RNA, 19 nt, Artificial Sequence
  Description of Artificial Sequence: Synthetic oligonucleotide
caaacagcacuuuagcaau

SEQ ID NO: 2250266 - RNA, 19 nt, Artificial Sequence
  Description of Artificial Sequence: Synthetic oligonucleotide
cacuuaugagcagcaaaac

SEQ ID NO: 2250267 - RNA, 19 nt, Artificial Sequence
  Description of Artificial Sequence: Synthetic oligonucleotide
caaauacccauaaggugaa

SEQ ID NO: 2250268 - RNA, 19 nt, Artificial Sequence
  Description of Artificial Sequence: Synthetic oligonucleotide
auaggucuccaaacaucac

SEQ ID NO: 2250269 - RNA, 19 nt, Artificial Sequence
  Description of Artificial Sequence: Synthetic oligonucleotide
ugccaaccgccacaguaac

SEQ ID NO: 2250270 - RNA, 19 nt, Artificial Sequence
  Description of Artificial Sequence: Synthetic oligonucleotide
auguaaaguguuagguaca

SEQ ID NO: 2250271 - RNA, 19 nt, Artificial Sequence
  Description of Artificial Sequence: Synthetic oligonucleotide
agaaaugacuugauagguu

SEQ ID NO: 2250272 - RNA, 19 nt, Artificial Sequence
  Description of Artificial Sequence: Synthetic oligonucleotide
cucauagguggaacuagga

SEQ ID NO: 2250273 - RNA, 19 nt, Artificial Sequence
  Description of Artificial Sequence: Synthetic oligonucleotide
caguucaauugcuuucuca

SEQ ID NO: 2250274 - RNA, 19 nt, Artificial Sequence
  Description of Artificial Sequence: Synthetic oligonucleotide
aagacaaggcugagaacaa

SEQ ID NO: 2250275 - RNA, 19 nt, Artificial Sequence
  Description of Artificial Sequence: Synthetic oligonucleotide
uccuauuaccucggagccc

SEQ ID NO: 2250276 - RNA, 19 nt, Artificial Sequence
  Description of Artificial Sequence: Synthetic oligonucleotide
acaaaccuguaagcaacug

SEQ ID NO: 2250277 - RNA, 19 nt, Artificial Sequence
  Description of Artificial Sequence: Synthetic oligonucleotide
aaccgccacaguaacucug

SEQ ID NO: 2250278 - RNA, 19 nt, Artificial Sequence
  Description of Artificial Sequence: Synthetic oligonucleotide
ucgccaguugacagacgcc

SEQ ID NO: 2250279 - RNA, 19 nt, Artificial Sequence
  Description of Artificial Sequence: Synthetic oligonucleotide
ugcucguaggaaguuugga

SEQ ID NO: 2250280 - RNA, 19 nt, Artificial Sequence
  Description of Artificial Sequence: Synthetic oligonucleotide
gaauccccgggcaccacag

SEQ ID NO: 2250281 - RNA, 19 nt, Artificial Sequence
  Description of Artificial Sequence: Synthetic oligonucleotide
ccucauagguggaacuagg

SEQ ID NO: 2250282 - RNA, 19 nt, Artificial Sequence
  Description of Artificial Sequence: Synthetic oligonucleotide
ugaauugaaguagcaucuu

SEQ ID NO: 2250283 - RNA, 19 nt, Artificial Sequence
  Description of Artificial Sequence: Synthetic oligonucleotide
uuaccucggagcccaggaa

SEQ ID NO: 2250284 - RNA, 19 nt, Artificial Sequence
  Description of Artificial Sequence: Synthetic oligonucleotide
cugucuguaucuguuuauc

SEQ ID NO: 2250285 - RNA, 19 nt, Artificial Sequence
  Description of Artificial Sequence: Synthetic oligonucleotide
uuuugcucguaggaaguuu

SEQ ID NO: 2250286 - RNA, 19 nt, Artificial Sequence
  Description of Artificial Sequence: Synthetic oligonucleotide
acggcagccugagaaauga

SEQ ID NO: 2250287 - RNA, 19 nt, Artificial Sequence
  Description of Artificial Sequence: Synthetic oligonucleotide
acuuuuggcuguggcauga

SEQ ID NO: 2250288 - RNA, 19 nt, Artificial Sequence
  Description of Artificial Sequence: Synthetic oligonucleotide
aggugaauugaaguagcau

SEQ ID NO: 2250289 - RNA, 19 nt, Artificial Sequence
  Description of Artificial Sequence: Synthetic oligonucleotide
acaguaacucugcuaucuu

SEQ ID NO: 2250290 - RNA, 19 nt, Artificial Sequence
  Description of Artificial Sequence: Synthetic oligonucleotide
ggcuguggcaugaaccacg

SEQ ID NO: 2250291 - RNA, 19 nt, Artificial Sequence
  Description of Artificial Sequence: Synthetic oligonucleotide
  modified_base (4)..(4): a, c, u, g, unknown or other
cagnuucugucuguaucug

SEQ ID NO: 2250292 - RNA, 19 nt, Artificial Sequence
  Description of Artificial Sequence: Synthetic oligonucleotide
agguacauuguugccuucu

SEQ ID NO: 2250293 - RNA, 19 nt, Artificial Sequence
  Description of Artificial Sequence: Synthetic oligonucleotide
uuuuagcuucaaguauguc

SEQ ID NO: 2250294 - RNA, 19 nt, Artificial Sequence
  Description of Artificial Sequence: Synthetic oligonucleotide
cuggauaacccuuuggcuu

SEQ ID NO: 2250295 - RNA, 19 nt, Artificial Sequence
  Description of Artificial Sequence: Synthetic oligonucleotide
  modified_base (8)..(8): a, c, u, g, unknown or other
ugagcagnuucugucugua

SEQ ID NO: 2250296 - RNA, 19 nt, Artificial Sequence
  Description of Artificial Sequence: Synthetic oligonucleotide
acgugaugcucgugccaac

SEQ ID NO: 2250297 - RNA, 19 nt, Artificial Sequence
  Description of Artificial Sequence: Synthetic oligonucleotide
cuccauaaaguucucaguu

SEQ ID NO: 2250298 - RNA, 19 nt, Artificial Sequence
  Description of Artificial Sequence: Synthetic oligonucleotide
auuguaugagcaacugaua

SEQ ID NO: 2250299 - RNA, 19 nt, Artificial Sequence
  Description of Artificial Sequence: Synthetic oligonucleotide
gcucaaguacuucuucaac

SEQ ID NO: 2250300 - RNA, 19 nt, Artificial Sequence
  Description of Artificial Sequence: Synthetic oligonucleotide
uuucaaggccguccucaua

SEQ ID NO: 2250301 - RNA, 19 nt, Artificial Sequence
  Description of Artificial Sequence: Synthetic oligonucleotide
  modified_base (2)..(2): a, c, u, g, unknown or other
gnuucugucuguaucuguu

SEQ ID NO: 2250302 - RNA, 19 nt, Artificial Sequence
  Description of Artificial Sequence: Synthetic oligonucleotide
accucggagcccaggaauc

SEQ ID NO: 2250303 - RNA, 19 nt, Artificial Sequence
  Description of Artificial Sequence: Synthetic oligonucleotide
aucuuaaccuugaugccuu

SEQ ID NO: 2250304 - RNA, 19 nt, Artificial Sequence
  Description of Artificial Sequence: Synthetic oligonucleotide
guaggaaguuuggauccac

SEQ ID NO: 2250305 - RNA, 19 nt, Artificial Sequence
  Description of Artificial Sequence: Synthetic oligonucleotide
  modified_base (5)..(5): a, c, u, g, unknown or other
gcagnuucugucuguaucu

SEQ ID NO: 2250306 - RNA, 19 nt, Artificial Sequence
  Description of Artificial Sequence: Synthetic oligonucleotide
agauugcauaccacuuaug

SEQ ID NO: 2250307 - RNA, 19 nt, Artificial Sequence
  Description of Artificial Sequence: Synthetic oligonucleotide
gucuauaaucuagggcuuc

SEQ ID NO: 2250308 - RNA, 19 nt, Artificial Sequence
  Description of Artificial Sequence: Synthetic oligonucleotide
gucuguaucuguuuaucuu

SEQ ID NO: 2250309 - RNA, 19 nt, Artificial Sequence
  Description of Artificial Sequence: Synthetic oligonucleotide
aauccccgggcaccacagu

SEQ ID NO: 2250310 - RNA, 19 nt, Artificial Sequence
  Description of Artificial Sequence: Synthetic oligonucleotide
uguaggcauuugcaaucuu

SEQ ID NO: 2250311 - RNA, 19 nt, Artificial Sequence
  Description of Artificial Sequence: Synthetic oligonucleotide
ugcucgugccaaccgccac

SEQ ID NO: 2250312 - RNA, 19 nt, Artificial Sequence
  Description of Artificial Sequence: Synthetic oligonucleotide
guagucugcuugcucaagu

SEQ ID NO: 2250313 - RNA, 19 nt, Artificial Sequence
  Description of Artificial Sequence: Synthetic oligonucleotide
ccaaccgccacaguaacuc

SEQ ID NO: 2250314 - RNA, 19 nt, Artificial Sequence
  Description of Artificial Sequence: Synthetic oligonucleotide
cacaguaacucugcuaucu

SEQ ID NO: 2250315 - RNA, 19 nt, Artificial Sequence
  Description of Artificial Sequence: Synthetic oligonucleotide
agcaaauguauagcaccaa

SEQ ID NO: 2250316 - RNA, 19 nt, Artificial Sequence
  Description of Artificial Sequence: Synthetic oligonucleotide
gcugagaacaaaaggccuc

SEQ ID NO: 2250317 - RNA, 19 nt, Artificial Sequence
  Description of Artificial Sequence: Synthetic oligonucleotide
ucugugugugcuggauaac

SEQ ID NO: 2250318 - RNA, 19 nt, Artificial Sequence
  Description of Artificial Sequence: Synthetic oligonucleotide
gguacauuguugccuucuc

SEQ ID NO: 2250319 - RNA, 19 nt, Artificial Sequence
  Description of Artificial Sequence: Synthetic oligonucleotide
gaaguccuacuaagcugug

SEQ ID NO: 2250320 - RNA, 19 nt, Artificial Sequence
  Description of Artificial Sequence: Synthetic oligonucleotide
cucgugccaaccgccacag

SEQ ID NO: 2250321 - RNA, 19 nt, Artificial Sequence
  Description of Artificial Sequence: Synthetic oligonucleotide
cacggcagccugagaaaug

SEQ ID NO: 2250322 - RNA, 19 nt, Artificial Sequence
  Description of Artificial Sequence: Synthetic oligonucleotide
aggccucucuugaaagguc

SEQ ID NO: 2250323 - RNA, 19 nt, Artificial Sequence
  Description of Artificial Sequence: Synthetic oligonucleotide
guuuuagcuucaaguaugu

SEQ ID NO: 2250324 - RNA, 19 nt, Artificial Sequence
  Description of Artificial Sequence: Synthetic oligonucleotide
ccuacuaagcugugcuaug

SEQ ID NO: 2250325 - RNA, 19 nt, Artificial Sequence
  Description of Artificial Sequence: Synthetic oligonucleotide
aaguuuggauccacuuguu

SEQ ID NO: 2250326 - RNA, 19 nt, Artificial Sequence
  Description of Artificial Sequence: Synthetic oligonucleotide
aaauacccauaaggugaau

SEQ ID NO: 2250327 - RNA, 19 nt, Artificial Sequence
  Description of Artificial Sequence: Synthetic oligonucleotide
cuugaaaggucuuguguuu

SEQ ID NO: 2250328 - RNA, 19 nt, Artificial Sequence
  Description of Artificial Sequence: Synthetic oligonucleotide
aaacagcacuuuagcaauu

SEQ ID NO: 2250329 - RNA, 19 nt, Artificial Sequence
  Description of Artificial Sequence: Synthetic oligonucleotide
cuaggaggauuugcaaaca

SEQ ID NO: 2250330 - RNA, 19 nt, Artificial Sequence
  Description of Artificial Sequence: Synthetic oligonucleotide
ggcaugaaccacggcagcc

SEQ ID NO: 2250331 - RNA, 19 nt, Artificial Sequence
  Description of Artificial Sequence: Synthetic oligonucleotide
cacuuguucugcccuguga

SEQ ID NO: 2250332 - RNA, 19 nt, Artificial Sequence
  Description of Artificial Sequence: Synthetic oligonucleotide
gucuccaaacaucacuaau

SEQ ID NO: 2250333 - RNA, 19 nt, Artificial Sequence
  Description of Artificial Sequence: Synthetic oligonucleotide
ccaguugacagacgccgag

SEQ ID NO: 2250334 - RNA, 19 nt, Artificial Sequence
  Description of Artificial Sequence: Synthetic oligonucleotide
gugugugcuggauaacccu

SEQ ID NO: 2250335 - RNA, 19 nt, Artificial Sequence
  Description of Artificial Sequence: Synthetic oligonucleotide
agcaacugauaaagcuucu

SEQ ID NO: 2250336 - RNA, 19 nt, Artificial Sequence
  Description of Artificial Sequence: Synthetic oligonucleotide
cacuuuagcaauucuucuu

SEQ ID NO: 2250337 - RNA, 19 nt, Artificial Sequence
  Description of Artificial Sequence: Synthetic oligonucleotide
gaaaggucuuguguuuccu

SEQ ID NO: 2250338 - RNA, 19 nt, Artificial Sequence
  Description of Artificial Sequence: Synthetic oligonucleotide
cagauugcauaccacuuau

SEQ ID NO: 2250339 - RNA, 19 nt, Artificial Sequence
  Description of Artificial Sequence: Synthetic oligonucleotide
ccuauuaccucggagccca

SEQ ID NO: 2250340 - RNA, 19 nt, Artificial Sequence
  Description of Artificial Sequence: Synthetic oligonucleotide
ccagaaagcagcaagcuuu

SEQ ID NO: 2250341 - RNA, 19 nt, Artificial Sequence
  Description of Artificial Sequence: Synthetic oligonucleotide
agguggaacuaggaggauu

SEQ ID NO: 2250342 - RNA, 19 nt, Artificial Sequence
  Description of Artificial Sequence: Synthetic oligonucleotide
auagcaccaaauacccaua

SEQ ID NO: 2250343 - RNA, 19 nt, Artificial Sequence
  Description of Artificial Sequence: Synthetic oligonucleotide
agacaaggcugagaacaaa

SEQ ID NO: 2250344 - RNA, 19 nt, Artificial Sequence
  Description of Artificial Sequence: Synthetic oligonucleotide
gcagauugcauaccacuua

SEQ ID NO: 2250345 - RNA, 19 nt, Artificial Sequence
  Description of Artificial Sequence: Synthetic oligonucleotide
gcccugugaaaguauuuca

SEQ ID NO: 2250346 - RNA, 19 nt, Artificial Sequence
  Description of Artificial Sequence: Synthetic oligonucleotide
gcuggauaacccuuuggcu

SEQ ID NO: 2250347 - RNA, 19 nt, Artificial Sequence
  Description of Artificial Sequence: Synthetic oligonucleotide
gcuaugucacgugaugcuc

SEQ ID NO: 2250348 - RNA, 19 nt, Artificial Sequence
  Description of Artificial Sequence: Synthetic oligonucleotide
uaccacuuaugagcagcaa

SEQ ID NO: 2250349 - RNA, 19 nt, Artificial Sequence
  Description of Artificial Sequence: Synthetic oligonucleotide
gccuucauaggucuccaaa

SEQ ID NO: 2250350 - RNA, 19 nt, Artificial Sequence
  Description of Artificial Sequence: Synthetic oligonucleotide
uuguugccuucuccauaaa

SEQ ID NO: 2250351 - RNA, 19 nt, Artificial Sequence
  Description of Artificial Sequence: Synthetic oligonucleotide
cuauuaccucggagcccag

SEQ ID NO: 2250352 - RNA, 19 nt, Artificial Sequence
  Description of Artificial Sequence: Synthetic oligonucleotide
gguagucugcuugcucaag

SEQ ID NO: 2250353 - RNA, 19 nt, Artificial Sequence
  Description of Artificial Sequence: Synthetic oligonucleotide
cgccaguugacagacgccg

SEQ ID NO: 2250354 - RNA, 19 nt, Artificial Sequence
  Description of Artificial Sequence: Synthetic oligonucleotide
gcacuuuagcaauucuucu

SEQ ID NO: 2250355 - RNA, 19 nt, Artificial Sequence
  Description of Artificial Sequence: Synthetic oligonucleotide
guggaacuaggaggauuug

SEQ ID NO: 2250356 - RNA, 19 nt, Artificial Sequence
  Description of Artificial Sequence: Synthetic oligonucleotide
ugccuucauaggucuccaa

SEQ ID NO: 2250357 - RNA, 19 nt, Artificial Sequence
  Description of Artificial Sequence: Synthetic oligonucleotide
gcauaccacuuaugagcag

SEQ ID NO: 2250358 - RNA, 19 nt, Artificial Sequence
  Description of Artificial Sequence: Synthetic oligonucleotide
cacgugaugcucgugccaa

SEQ ID NO: 2250359 - RNA, 19 nt, Artificial Sequence
  Description of Artificial Sequence: Synthetic oligonucleotide
gugccaaccgccacaguaa

SEQ ID NO: 2250360 - RNA, 19 nt, Artificial Sequence
  Description of Artificial Sequence: Synthetic oligonucleotide
cuacuaagcugugcuaugu

SEQ ID NO: 2250361 - RNA, 19 nt, Artificial Sequence
  Description of Artificial Sequence: Synthetic oligonucleotide
cacaaaccuguaagcaacu

SEQ ID NO: 2250362 - RNA, 19 nt, Artificial Sequence
  Description of Artificial Sequence: Synthetic oligonucleotide
cagcacuuuagcaauucuu

SEQ ID NO: 2250363 - RNA, 19 nt, Artificial Sequence
  Description of Artificial Sequence: Synthetic oligonucleotide
  modified_base (7)..(7): a, c, u, g, unknown or other
gagcagnuucugucuguau

SEQ ID NO: 2250364 - RNA, 19 nt, Artificial Sequence
  Description of Artificial Sequence: Synthetic oligonucleotide
guccuacuaagcugugcua

SEQ ID NO: 2250365 - RNA, 19 nt, Artificial Sequence
  Description of Artificial Sequence: Synthetic oligonucleotide
cuauaaucuagggcuucua

SEQ ID NO: 2250366 - RNA, 19 nt, Artificial Sequence
  Description of Artificial Sequence: Synthetic oligonucleotide
ggaauccccgggcaccaca

SEQ ID NO: 2250367 - RNA, 19 nt, Artificial Sequence
  Description of Artificial Sequence: Synthetic oligonucleotide
ggucuccaaacaucacuaa

SEQ ID NO: 2250368 - RNA, 19 nt, Artificial Sequence
  Description of Artificial Sequence: Synthetic oligonucleotide
  modified_base (9)..(9): a, c, u, g, unknown or other
cugagcagnuucugucugu

SEQ ID NO: 2250369 - RNA, 19 nt, Artificial Sequence
  Description of Artificial Sequence: Synthetic oligonucleotide
augaaccacggcagccuga

SEQ ID NO: 2250370 - RNA, 19 nt, Artificial Sequence
  Description of Artificial Sequence: Synthetic oligonucleotide
ggauuugcaaacagcacuu

SEQ ID NO: 2250371 - RNA, 19 nt, Artificial Sequence
  Description of Artificial Sequence: Synthetic oligonucleotide
ccucucuugaaaggucuug

SEQ ID NO: 2250372 - RNA, 19 nt, Artificial Sequence
  Description of Artificial Sequence: Synthetic oligonucleotide
uagguggaacuaggaggau

SEQ ID NO: 2250373 - RNA, 19 nt, Artificial Sequence
  Description of Artificial Sequence: Synthetic oligonucleotide
ggcugagaacaaaaggccu

SEQ ID NO: 2250374 - RNA, 19 nt, Artificial Sequence
  Description of Artificial Sequence: Synthetic oligonucleotide
augucacgugaugcucgug

SEQ ID NO: 2250375 - RNA, 19 nt, Artificial Sequence
  Description of Artificial Sequence: Synthetic oligonucleotide
gcucgugccaaccgccaca

SEQ ID NO: 2250376 - RNA, 19 nt, Artificial Sequence
  Description of Artificial Sequence: Synthetic oligonucleotide
caaggccguccucauaggu

SEQ ID NO: 2250377 - RNA, 19 nt, Artificial Sequence
  Description of Artificial Sequence: Synthetic oligonucleotide
ggcuucuauacuaccuaaa

SEQ ID NO: 2250378 - RNA, 19 nt, Artificial Sequence
  Description of Artificial Sequence: Synthetic oligonucleotide
cgugaugcucgugccaacc

SEQ ID NO: 2250379 - RNA, 19 nt, Artificial Sequence
  Description of Artificial Sequence: Synthetic oligonucleotide
gccucgccaguugacagac

SEQ ID NO: 2250380 - RNA, 19 nt, Artificial Sequence
  Description of Artificial Sequence: Synthetic oligonucleotide
ggcuuuuaccagccagaaa

SEQ ID NO: 2250381 - RNA, 19 nt, Artificial Sequence
  Description of Artificial Sequence: Synthetic oligonucleotide
cagcaaaacuugauucauu

SEQ ID NO: 2250382 - RNA, 19 nt, Artificial Sequence
  Description of Artificial Sequence: Synthetic oligonucleotide
ucgugccaaccgccacagu

SEQ ID NO: 2250383 - RNA, 19 nt, Artificial Sequence
  Description of Artificial Sequence: Synthetic oligonucleotide
  modified_base (17)..(17): a, c, u, g, unknown or other
guaagcaacugagcagnuu

SEQ ID NO: 2250384 - RNA, 19 nt, Artificial Sequence
  Description of Artificial Sequence: Synthetic oligonucleotide
gauaacccuuuggcuuuua

SEQ ID NO: 2250385 - RNA, 19 nt, Artificial Sequence
  Description of Artificial Sequence: Synthetic oligonucleotide
ccccgggcaccacagugcc

SEQ ID NO: 2250386 - RNA, 19 nt, Artificial Sequence
  Description of Artificial Sequence: Synthetic oligonucleotide
ccacaguaacucugcuauc

SEQ ID NO: 2250387 - RNA, 19 nt, Artificial Sequence
  Description of Artificial Sequence: Synthetic oligonucleotide
ggccucgccaguugacaga

SEQ ID NO: 2250388 - RNA, 19 nt, Artificial Sequence
  Description of Artificial Sequence: Synthetic oligonucleotide
cgugccaaccgccacagua

SEQ ID NO: 2250389 - RNA, 19 nt, Artificial Sequence
  Description of Artificial Sequence: Synthetic oligonucleotide
caaccgccacaguaacucu

SEQ ID NO: 2250390 - RNA, 19 nt, Artificial Sequence
  Description of Artificial Sequence: Synthetic oligonucleotide
cuuuuggcuguggcaugaa

SEQ ID NO: 2250391 - RNA, 19 nt, Artificial Sequence
  Description of Artificial Sequence: Synthetic oligonucleotide
guaaaguguuagguacauu

SEQ ID NO: 2250392 - RNA, 19 nt, Artificial Sequence
  Description of Artificial Sequence: Synthetic oligonucleotide
ccgggcaccacagugccca

SEQ ID NO: 2250393 - RNA, 19 nt, Artificial Sequence
  Description of Artificial Sequence: Synthetic oligonucleotide
ggccucucuugaaaggucu

SEQ ID NO: 2250394 - RNA, 19 nt, Artificial Sequence
  Description of Artificial Sequence: Synthetic oligonucleotide
ccguccucauagguggaac

SEQ ID NO: 2250395 - RNA, 19 nt, Artificial Sequence
  Description of Artificial Sequence: Synthetic oligonucleotide
cuuuaggguucaguucaau

SEQ ID NO: 2250396 - RNA, 19 nt, Artificial Sequence
  Description of Artificial Sequence: Synthetic oligonucleotide
ccucgccaguugacagacg

SEQ ID NO: 2250397 - RNA, 19 nt, Artificial Sequence
  Description of Artificial Sequence: Synthetic oligonucleotide
cugcccugugaaaguauuu

SEQ ID NO: 2250398 - RNA, 19 nt, Artificial Sequence
  Description of Artificial Sequence: Synthetic oligonucleotide
gccaguugacagacgccga

SEQ ID NO: 2250399 - RNA, 19 nt, Artificial Sequence
  Description of Artificial Sequence: Synthetic oligonucleotide
gugugcuggauaacccuuu

SEQ ID NO: 2250400 - RNA, 19 nt, Artificial Sequence
  Description of Artificial Sequence: Synthetic oligonucleotide
cguaggaaguuuggaucca

SEQ ID NO: 2250401 - RNA, 19 nt, Artificial Sequence
  Description of Artificial Sequence: Synthetic oligonucleotide
cccgggcaccacagugccc

SEQ ID NO: 2250402 - RNA, 19 nt, Artificial Sequence
  Description of Artificial Sequence: Synthetic oligonucleotide
cguccucauagguggaacu

SEQ ID NO: 2250403 - RNA, 19 nt, Artificial Sequence
  Description of Artificial Sequence: Synthetic oligonucleotide
gccguccucauagguggaa

SEQ ID NO: 2250404 - RNA, 19 nt, Artificial Sequence
  Description of Artificial Sequence: Synthetic oligonucleotide
cccggggccucgccaguug

SEQ ID NO: 2250405 - RNA, 19 nt, Artificial Sequence
  Description of Artificial Sequence: Synthetic oligonucleotide
gccugagaaaugacuugau

SEQ ID NO: 2250406 - RNA, 19 nt, Artificial Sequence
  Description of Artificial Sequence: Synthetic oligonucleotide
cggggccucgccaguugac

SEQ ID NO: 2250407 - RNA, 19 nt, Artificial Sequence
  Description of Artificial Sequence: Synthetic oligonucleotide
ccaaggcauuucagcaaau

SEQ ID NO: 2250408 - RNA, 19 nt, Artificial Sequence
  Description of Artificial Sequence: Synthetic oligonucleotide
ccggggccucgccaguuga

SEQ ID NO: 2250409 - RNA, 19 nt, Artificial Sequence
  Description of Artificial Sequence: Synthetic oligonucleotide
ggauaacccuuuggcuuuu

SEQ ID NO: 2250410 - RNA, 19 nt, Artificial Sequence
  Description of Artificial Sequence: Synthetic oligonucleotide
ccacggcagccugagaaau

SEQ ID NO: 2250411 - RNA, 19 nt, Artificial Sequence
  Description of Artificial Sequence: Synthetic oligonucleotide
ccgccacaguaacucugcu

SEQ ID NO: 2250412 - RNA, 19 nt, Artificial Sequence
  Description of Artificial Sequence: Synthetic oligonucleotide
ccccggggccucgccaguu

SEQ ID NO: 2250413 - RNA, 19 nt, Artificial Sequence
  Description of Artificial Sequence: Synthetic oligonucleotide
aaacaaucaucacugcgcc

SEQ ID NO: 2250414 - RNA, 19 nt, Artificial Sequence
  Description of Artificial Sequence: Synthetic oligonucleotide
uguuucuuagacacuaucg

SEQ ID NO: 2250415 - RNA, 19 nt, Artificial Sequence
  Description of Artificial Sequence: Synthetic oligonucleotide
ugaaaaugucuuuucaacg

SEQ ID NO: 2250416 - RNA, 19 nt, Artificial Sequence
  Description of Artificial Sequence: Synthetic oligonucleotide
augaaaaugucuuuucaac

SEQ ID NO: 2250417 - RNA, 19 nt, Artificial Sequence
  Description of Artificial Sequence: Synthetic oligonucleotide
agaucuuccaucucugugc

SEQ ID NO: 2250418 - RNA, 19 nt, Artificial Sequence
  Description of Artificial Sequence: Synthetic oligonucleotide
uccaugguaacaaagacuc

SEQ ID NO: 2250419 - RNA, 19 nt, Artificial Sequence
  Description of Artificial Sequence: Synthetic oligonucleotide
ugguagaacagcaugagcu

SEQ ID NO: 2250420 - RNA, 19 nt, Artificial Sequence
  Description of Artificial Sequence: Synthetic oligonucleotide
aacgcaguguuaucggccc

SEQ ID NO: 2250421 - RNA, 19 nt, Artificial Sequence
  Description of Artificial Sequence: Synthetic oligonucleotide
ugcauuuucucauuuggag

SEQ ID NO: 2250422 - RNA, 19 nt, Artificial Sequence
  Description of Artificial Sequence: Synthetic oligonucleotide
uauuuucaaauuccaugcg

SEQ ID NO: 2250423 - RNA, 19 nt, Artificial Sequence
  Description of Artificial Sequence: Synthetic oligonucleotide
guaaacaaucaucacugcg

SEQ ID NO: 2250424 - RNA, 19 nt, Artificial Sequence
  Description of Artificial Sequence: Synthetic oligonucleotide
uuuuaccccaugaaaaugu

SEQ ID NO: 2250425 - RNA, 19 nt, Artificial Sequence
  Description of Artificial Sequence: Synthetic oligonucleotide
gaugauuuugguuuucuca

SEQ ID NO: 2250426 - RNA, 19 nt, Artificial Sequence
  Description of Artificial Sequence: Synthetic oligonucleotide
uggaucuugacgaugauuu

SEQ ID NO: 2250427 - RNA, 19 nt, Artificial Sequence
  Description of Artificial Sequence: Synthetic oligonucleotide
guuucuuagacacuaucgc

SEQ ID NO: 2250428 - RNA, 19 nt, Artificial Sequence
  Description of Artificial Sequence: Synthetic oligonucleotide
uccaaugucguccuucuug

SEQ ID NO: 2250429 - RNA, 19 nt, Artificial Sequence
  Description of Artificial Sequence: Synthetic oligonucleotide
uuucaacgcaguguuaucg

SEQ ID NO: 2250430 - RNA, 19 nt, Artificial Sequence
  Description of Artificial Sequence: Synthetic oligonucleotide
uuaagcaggagucaucguc

SEQ ID NO: 2250431 - RNA, 19 nt, Artificial Sequence
  Description of Artificial Sequence: Synthetic oligonucleotide
uagucggaaagcuucuucg

SEQ ID NO: 2250432 - RNA, 19 nt, Artificial Sequence
  Description of Artificial Sequence: Synthetic oligonucleotide
ugcggauggggucauacgg

SEQ ID NO: 2250433 - RNA, 19 nt, Artificial Sequence
  Description of Artificial Sequence: Synthetic oligonucleotide
uuucuuagacacuaucgcu

SEQ ID NO: 2250434 - RNA, 19 nt, Artificial Sequence
  Description of Artificial Sequence: Synthetic oligonucleotide
ucguccuucuugaagacug

SEQ ID NO: 2250435 - RNA, 19 nt, Artificial Sequence
  Description of Artificial Sequence: Synthetic oligonucleotide
aacaaagacuccagcuucc

SEQ ID NO: 2250436 - RNA, 19 nt, Artificial Sequence
  Description of Artificial Sequence: Synthetic oligonucleotide
acaaucaucacugcgccuc

SEQ ID NO: 2250437 - RNA, 19 nt, Artificial Sequence
  Description of Artificial Sequence: Synthetic oligonucleotide
uuagacacuaucgcuuugg

SEQ ID NO: 2250438 - RNA, 19 nt, Artificial Sequence
  Description of Artificial Sequence: Synthetic oligonucleotide
ucaguuucagcucuugaau

SEQ ID NO: 2250439 - RNA, 19 nt, Artificial Sequence
  Description of Artificial Sequence: Synthetic oligonucleotide
uucaacgcaguguuaucgg

SEQ ID NO: 2250440 - RNA, 19 nt, Artificial Sequence
  Description of Artificial Sequence: Synthetic oligonucleotide
cuucguucuucucagcucc

SEQ ID NO: 2250441 - RNA, 19 nt, Artificial Sequence
  Description of Artificial Sequence: Synthetic oligonucleotide
uucacgugcagcaccacca

SEQ ID NO: 2250442 - RNA, 19 nt, Artificial Sequence
  Description of Artificial Sequence: Synthetic oligonucleotide
uaugguagaacagcaugag

SEQ ID NO: 2250443 - RNA, 19 nt, Artificial Sequence
  Description of Artificial Sequence: Synthetic oligonucleotide
ucuuuuaccccaugaaaau

SEQ ID NO: 2250444 - RNA, 19 nt, Artificial Sequence
  Description of Artificial Sequence: Synthetic oligonucleotide
ugcgccucgaagcuggucc

SEQ ID NO: 2250445 - RNA, 19 nt, Artificial Sequence
  Description of Artificial Sequence: Synthetic oligonucleotide
uucuuagacacuaucgcuu

SEQ ID NO: 2250446 - RNA, 19 nt, Artificial Sequence
  Description of Artificial Sequence: Synthetic oligonucleotide
acagauccucuuuauuuuc

SEQ ID NO: 2250447 - RNA, 19 nt, Artificial Sequence
  Description of Artificial Sequence: Synthetic oligonucleotide
ucagcccuugcauauucgg

SEQ ID NO: 2250448 - RNA, 19 nt, Artificial Sequence
  Description of Artificial Sequence: Synthetic oligonucleotide
uucuucguucuucucagcu

SEQ ID NO: 2250449 - RNA, 19 nt, Artificial Sequence
  Description of Artificial Sequence: Synthetic oligonucleotide
augucguccuucuugaaga

SEQ ID NO: 2250450 - RNA, 19 nt, Artificial Sequence
  Description of Artificial Sequence: Synthetic oligonucleotide
ugugcagagccgaugcacc

SEQ ID NO: 2250451 - RNA, 19 nt, Artificial Sequence
  Description of Artificial Sequence: Synthetic oligonucleotide
uugcauauucggagggagg

SEQ ID NO: 2250452 - RNA, 19 nt, Artificial Sequence
  Description of Artificial Sequence: Synthetic oligonucleotide
agcccuugcauauucggag

SEQ ID NO: 2250453 - RNA, 19 nt, Artificial Sequence
  Description of Artificial Sequence: Synthetic oligonucleotide
gauggggucauacgguggc

SEQ ID NO: 2250454 - RNA, 19 nt, Artificial Sequence
  Description of Artificial Sequence: Synthetic oligonucleotide
auuuggagcuugcccauuc

SEQ ID NO: 2250455 - RNA, 19 nt, Artificial Sequence
  Description of Artificial Sequence: Synthetic oligonucleotide
uguuaucggcccaugggga

SEQ ID NO: 2250456 - RNA, 19 nt, Artificial Sequence
  Description of Artificial Sequence: Synthetic oligonucleotide
uaccgucuucuucaaaacc

SEQ ID NO: 2250457 - RNA, 19 nt, Artificial Sequence
  Description of Artificial Sequence: Synthetic oligonucleotide
ugucuccuaugguagaaca

SEQ ID NO: 2250458 - RNA, 19 nt, Artificial Sequence
  Description of Artificial Sequence: Synthetic oligonucleotide
uccacuuguuucuuagaca

SEQ ID NO: 2250459 - RNA, 19 nt, Artificial Sequence
  Description of Artificial Sequence: Synthetic oligonucleotide
cacguagucggaaagcuuc

SEQ ID NO: 2250460 - RNA, 19 nt, Artificial Sequence
  Description of Artificial Sequence: Synthetic oligonucleotide
uaccccaugaaaaugucuu

SEQ ID NO: 2250461 - RNA, 19 nt, Artificial Sequence
  Description of Artificial Sequence: Synthetic oligonucleotide
gaugucuuuuaccccauga

SEQ ID NO: 2250462 - RNA, 19 nt, Artificial Sequence
  Description of Artificial Sequence: Synthetic oligonucleotide
auuccaugcggaugggguc

SEQ ID NO: 2250463 - RNA, 19 nt, Artificial Sequence
  Description of Artificial Sequence: Synthetic oligonucleotide
uuguuucuuagacacuauc

SEQ ID NO: 2250464 - RNA, 19 nt, Artificial Sequence
  Description of Artificial Sequence: Synthetic oligonucleotide
ugcauauucggagggagga

SEQ ID NO: 2250465 - RNA, 19 nt, Artificial Sequence
  Description of Artificial Sequence: Synthetic oligonucleotide
aucugcucgucagucagcc

SEQ ID NO: 2250466 - RNA, 19 nt, Artificial Sequence
  Description of Artificial Sequence: Synthetic oligonucleotide
aaauuccaugcggaugggg

SEQ ID NO: 2250467 - RNA, 19 nt, Artificial Sequence
  Description of Artificial Sequence: Synthetic oligonucleotide
uaucgcuuuggcuucuucu

SEQ ID NO: 2250468 - RNA, 19 nt, Artificial Sequence
  Description of Artificial Sequence: Synthetic oligonucleotide
augggguaaacaaucauca

SEQ ID NO: 2250469 - RNA, 19 nt, Artificial Sequence
  Description of Artificial Sequence: Synthetic oligonucleotide
gaacacgcgggcccgagag

SEQ ID NO: 2250470 - RNA, 19 nt, Artificial Sequence
  Description of Artificial Sequence: Synthetic oligonucleotide
ucaucacugcgccucgaag

SEQ ID NO: 2250471 - RNA, 19 nt, Artificial Sequence
  Description of Artificial Sequence: Synthetic oligonucleotide
ucaacgcaguguuaucggc

SEQ ID NO: 2250472 - RNA, 19 nt, Artificial Sequence
  Description of Artificial Sequence: Synthetic oligonucleotide
gagggaggaacacaccgug

SEQ ID NO: 2250473 - RNA, 19 nt, Artificial Sequence
  Description of Artificial Sequence: Synthetic oligonucleotide
acacuaucgcuuuggcuuc

SEQ ID NO: 2250474 - RNA, 19 nt, Artificial Sequence
  Description of Artificial Sequence: Synthetic oligonucleotide
cuaugguagaacagcauga

SEQ ID NO: 2250475 - RNA, 19 nt, Artificial Sequence
  Description of Artificial Sequence: Synthetic oligonucleotide
aagacuccagcuuccacuu

SEQ ID NO: 2250476 - RNA, 19 nt, Artificial Sequence
  Description of Artificial Sequence: Synthetic oligonucleotide
ucugggucgccacuugaug

SEQ ID NO: 2250477 - RNA, 19 nt, Artificial Sequence
  Description of Artificial Sequence: Synthetic oligonucleotide
aucgucauuuucuuccagu

SEQ ID NO: 2250478 - RNA, 19 nt, Artificial Sequence
  Description of Artificial Sequence: Synthetic oligonucleotide
uuaccccaugaaaaugucu

SEQ ID NO: 2250479 - RNA, 19 nt, Artificial Sequence
  Description of Artificial Sequence: Synthetic oligonucleotide
uggguacacacuucucucc

SEQ ID NO: 2250480 - RNA, 19 nt, Artificial Sequence
  Description of Artificial Sequence: Synthetic oligonucleotide
uagaacagcaugagcugcu

SEQ ID NO: 2250481 - RNA, 19 nt, Artificial Sequence
  Description of Artificial Sequence: Synthetic oligonucleotide
cuugcauauucggagggag

SEQ ID NO: 2250482 - RNA, 19 nt, Artificial Sequence
  Description of Artificial Sequence: Synthetic oligonucleotide
uuuaccccaugaaaauguc

SEQ ID NO: 2250483 - RNA, 19 nt, Artificial Sequence
  Description of Artificial Sequence: Synthetic oligonucleotide
accgugugccgccagaucu

SEQ ID NO: 2250484 - RNA, 19 nt, Artificial Sequence
  Description of Artificial Sequence: Synthetic oligonucleotide
ucgucagucagcccuugca

SEQ ID NO: 2250485 - RNA, 19 nt, Artificial Sequence
  Description of Artificial Sequence: Synthetic oligonucleotide
uagacacuaucgcuuuggc

SEQ ID NO: 2250486 - RNA, 19 nt, Artificial Sequence
  Description of Artificial Sequence: Synthetic oligonucleotide
uuuggagcuugcccauucc

SEQ ID NO: 2250487 - RNA, 19 nt, Artificial Sequence
  Description of Artificial Sequence: Synthetic oligonucleotide
auuccuccguccaaugucg

SEQ ID NO: 2250488 - RNA, 19 nt, Artificial Sequence
  Description of Artificial Sequence: Synthetic oligonucleotide
ucuuagacacuaucgcuuu

SEQ ID NO: 2250489 - RNA, 19 nt, Artificial Sequence
  Description of Artificial Sequence: Synthetic oligonucleotide
caguuucagcucuugaauc

SEQ ID NO: 2250490 - RNA, 19 nt, Artificial Sequence
  Description of Artificial Sequence: Synthetic oligonucleotide
guuaucggcccauggggag

SEQ ID NO: 2250491 - RNA, 19 nt, Artificial Sequence
  Description of Artificial Sequence: Synthetic oligonucleotide
cuuuuaccccaugaaaaug

SEQ ID NO: 2250492 - RNA, 19 nt, Artificial Sequence
  Description of Artificial Sequence: Synthetic oligonucleotide
acuuguuucuuagacacua

SEQ ID NO: 2250493 - RNA, 19 nt, Artificial Sequence
  Description of Artificial Sequence: Synthetic oligonucleotide
cauuccuccguccaauguc

SEQ ID NO: 2250494 - RNA, 19 nt, Artificial Sequence
  Description of Artificial Sequence: Synthetic oligonucleotide
aacaaucaucacugcgccu

SEQ ID NO: 2250495 - RNA, 19 nt, Artificial Sequence
  Description of Artificial Sequence: Synthetic oligonucleotide
uuuucucauuuggagcuug

SEQ ID NO: 2250496 - RNA, 19 nt, Artificial Sequence
  Description of Artificial Sequence: Synthetic oligonucleotide
aucacugcgccucgaagcu

SEQ ID NO: 2250497 - RNA, 19 nt, Artificial Sequence
  Description of Artificial Sequence: Synthetic oligonucleotide
gguagaacagcaugagcug

SEQ ID NO: 2250498 - RNA, 19 nt, Artificial Sequence
  Description of Artificial Sequence: Synthetic oligonucleotide
cauauucggagggaggaac

SEQ ID NO: 2250499 - RNA, 19 nt, Artificial Sequence
  Description of Artificial Sequence: Synthetic oligonucleotide
ugugccgccagaucuucca

SEQ ID NO: 2250500 - RNA, 19 nt, Artificial Sequence
  Description of Artificial Sequence: Synthetic oligonucleotide
ugcugcauuuucucauuug

SEQ ID NO: 2250501 - RNA, 19 nt, Artificial Sequence
  Description of Artificial Sequence: Synthetic oligonucleotide
ucuucguucuucucagcuc

SEQ ID NO: 2250502 - RNA, 19 nt, Artificial Sequence
  Description of Artificial Sequence: Synthetic oligonucleotide
aguuuaagcaggagucauc

SEQ ID NO: 2250503 - RNA, 19 nt, Artificial Sequence
  Description of Artificial Sequence: Synthetic oligonucleotide
agccgcccguuguagacgc

SEQ ID NO: 2250504 - RNA, 19 nt, Artificial Sequence
  Description of Artificial Sequence: Synthetic oligonucleotide
acacgcgggcccgagaggc

SEQ ID NO: 2250505 - RNA, 19 nt, Artificial Sequence
  Description of Artificial Sequence: Synthetic oligonucleotide
guagaacagcaugagcugc

SEQ ID NO: 2250506 - RNA, 19 nt, Artificial Sequence
  Description of Artificial Sequence: Synthetic oligonucleotide
accgucuucuucaaaaccu

SEQ ID NO: 2250507 - RNA, 19 nt, Artificial Sequence
  Description of Artificial Sequence: Synthetic oligonucleotide
uuggagcuugcccauuccu

SEQ ID NO: 2250508 - RNA, 19 nt, Artificial Sequence
  Description of Artificial Sequence: Synthetic oligonucleotide
uuuucaacgcaguguuauc

SEQ ID NO: 2250509 - RNA, 19 nt, Artificial Sequence
  Description of Artificial Sequence: Synthetic oligonucleotide
cuaccgucuucuucaaaac

SEQ ID NO: 2250510 - RNA, 19 nt, Artificial Sequence
  Description of Artificial Sequence: Synthetic oligonucleotide
agccgugagcuccuccagc

SEQ ID NO: 2250511 - RNA, 19 nt, Artificial Sequence
  Description of Artificial Sequence: Synthetic oligonucleotide
gagcuugcccauuccuccg

SEQ ID NO: 2250512 - RNA, 19 nt, Artificial Sequence
  Description of Artificial Sequence: Synthetic oligonucleotide
agacacuaucgcuuuggcu

SEQ ID NO: 2250513 - RNA, 19 nt, Artificial Sequence
  Description of Artificial Sequence: Synthetic oligonucleotide
ucgucauuuucuuccaguu

SEQ ID NO: 2250514 - RNA, 19 nt, Artificial Sequence
  Description of Artificial Sequence: Synthetic oligonucleotide
gaacacaccgugugccgcc

SEQ ID NO: 2250515 - RNA, 19 nt, Artificial Sequence
  Description of Artificial Sequence: Synthetic oligonucleotide
augaugggcucccgggccg

SEQ ID NO: 2250516 - RNA, 19 nt, Artificial Sequence
  Description of Artificial Sequence: Synthetic oligonucleotide
ugcuugugcuccucgcugc

SEQ ID NO: 2250517 - RNA, 19 nt, Artificial Sequence
  Description of Artificial Sequence: Synthetic oligonucleotide
aacacgcgggcccgagagg

SEQ ID NO: 2250518 - RNA, 19 nt, Artificial Sequence
  Description of Artificial Sequence: Synthetic oligonucleotide
ccuaugguagaacagcaug

SEQ ID NO: 2250519 - RNA, 19 nt, Artificial Sequence
  Description of Artificial Sequence: Synthetic oligonucleotide
agucggaaagcuucuucgu

SEQ ID NO: 2250520 - RNA, 19 nt, Artificial Sequence
  Description of Artificial Sequence: Synthetic oligonucleotide
cuucacgugcagcaccacc

SEQ ID NO: 2250521 - RNA, 19 nt, Artificial Sequence
  Description of Artificial Sequence: Synthetic oligonucleotide
gguaacaaagacuccagcu

SEQ ID NO: 2250522 - RNA, 19 nt, Artificial Sequence
  Description of Artificial Sequence: Synthetic oligonucleotide
ugggguaaacaaucaucac

SEQ ID NO: 2250523 - RNA, 19 nt, Artificial Sequence
  Description of Artificial Sequence: Synthetic oligonucleotide
cucgucgccucucuucacg

SEQ ID NO: 2250524 - RNA, 19 nt, Artificial Sequence
  Description of Artificial Sequence: Synthetic oligonucleotide
agcuccgugcucccgggcg

SEQ ID NO: 2250525 - RNA, 19 nt, Artificial Sequence
  Description of Artificial Sequence: Synthetic oligonucleotide
uuuaagcaggagucaucgu

SEQ ID NO: 2250526 - RNA, 19 nt, Artificial Sequence
  Description of Artificial Sequence: Synthetic oligonucleotide
uccccacguagucggaaag

SEQ ID NO: 2250527 - RNA, 19 nt, Artificial Sequence
  Description of Artificial Sequence: Synthetic oligonucleotide
ucgcuuuggcuucuucuac

SEQ ID NO: 2250528 - RNA, 19 nt, Artificial Sequence
  Description of Artificial Sequence: Synthetic oligonucleotide
uguagacgcgggucacccg

SEQ ID NO: 2250529 - RNA, 19 nt, Artificial Sequence
  Description of Artificial Sequence: Synthetic oligonucleotide
augcggauggggucauacg

SEQ ID NO: 2250530 - RNA, 19 nt, Artificial Sequence
  Description of Artificial Sequence: Synthetic oligonucleotide
uucucauuuggagcuugcc

SEQ ID NO: 2250531 - RNA, 19 nt, Artificial Sequence
  Description of Artificial Sequence: Synthetic oligonucleotide
caaucaucacugcgccucg

SEQ ID NO: 2250532 - RNA, 19 nt, Artificial Sequence
  Description of Artificial Sequence: Synthetic oligonucleotide
uccuaugguagaacagcau

SEQ ID NO: 2250533 - RNA, 19 nt, Artificial Sequence
  Description of Artificial Sequence: Synthetic oligonucleotide
guagucggaaagcuucuuc

SEQ ID NO: 2250534 - RNA, 19 nt, Artificial Sequence
  Description of Artificial Sequence: Synthetic oligonucleotide
gggaguuuaagcaggaguc

SEQ ID NO: 2250535 - RNA, 19 nt, Artificial Sequence
  Description of Artificial Sequence: Synthetic oligonucleotide
guaacaaagacuccagcuu

SEQ ID NO: 2250536 - RNA, 19 nt, Artificial Sequence
  Description of Artificial Sequence: Synthetic oligonucleotide
ucauuuggagcuugcccau

SEQ ID NO: 2250537 - RNA, 19 nt, Artificial Sequence
  Description of Artificial Sequence: Synthetic oligonucleotide
gguaaacaaucaucacugc

SEQ ID NO: 2250538 - RNA, 19 nt, Artificial Sequence
  Description of Artificial Sequence: Synthetic oligonucleotide
ucaucugggucgccacuug
